United States Patent Application Publication US 2023/0272435 A1 - sequence listing, part 3

SEQ ID NO: 9079 - protein, 531 aa, synthetic construct
MAKDKKPLDQEIGVIYARYSSSGQREESIEGQLRDCHAYAEKFGIRIVEEYCDRALTGTSDKRPKFQKMIRDSAKGQFSVVITWKNDRFARSRYDSAIYKAKLKQNGVRVLYAKEYIPDGPEGIILESVMEGFAEYYSANLSQNVKRGNYDSALKRQTLGQQVFGLRRGPDKRFEHDPETAPIVKRIFEEYAAGKSAKEIYTELNNEGFHTSRGNRFNKSSIRRILQNEKYIGVYEYCEIRDENGIPPIVDRALFEKVQKMVEKNHESPAAKKADGGFLLTSKLFCGECGKPMTGDSGTSKTGKVYSYYTCVGRRAKLCTKERAQKDWIEDVVVTKLAEIVNSDEMVNEIADRFMDWQARQNTDDVASGLEQQLREVNDAIKNNMDLIDSGFITDSVKSHLVELEGKRAALEVGIAKEKLAGSAPALERESVVWFLKRFRNEDPSDIRTRIWLVDTFLKAAYLYDDGRLLLHLNFAGDKSKISVKLAEKTVAEGEALSSCFAPSAVPNGANTNTAKYFLNEVFVASVFAQK

SEQ ID NO: 9080 - protein, 694 aa, synthetic construct
MAKKQRAALICRVSTPRQIKLGLESQVAVLKRRAIQDGYEVPDSLIFQEQISGLDAKKPIRKSLKDLMDAVEEHKVDVCYTYELTRISRDPYNLVERVKWFTDRLIPMYIYDADMWTLDRVTKEELEETTSYVFGAATYGKVEAKKMKLRTMRARNEVAKEGLYVGHLSDGYCVVQTERGKEIKIDDDRKEVVQRIFDLYSQGYTIDRIAEYLNTNNIPTANSYRLNSPKFKGYQETYRKKGSDVPINRGATKWQGATVSNYLRNKWYIGERSYNKHTYSIEPIIKAEQWSIVASMLEQNAISFRSKKESKTHIYLLGGLIFCGKCGRRMYGHYTGLNNHYYCSSVEEGVKCGLRGVSKENIEAAVLVMVKQKAGVALVDGKDNFVTNFFKISPQEEKRLKDEIKTNNILIAEYDKKTDELDKNYAEAVKQTIIHANDKNRVAVYESLITEIEDEKARYNNKKVQLTHKNIINTKKLNTDANVTKILFSIMDERNLYTIRELFIAVLDKVVVFNLTPSIDVIKVMYIDGSSEYFLYSYRLMKQNIKAMPRMLIYYDEHENVLRLTESNEIVSPKEYIKSPFSTWSFERLEEPTDEARKQDAKYKEWRKKYNTGLPTSIPYVVKDESYEEISLRKKHLYNRKYKIKKHKKLTDAERKHQLDEIDKELALLTAKVRYLNREEAIKEYKKKMKEKNT

SEQ ID NO: 9081 - protein, 402 aa, synthetic construct
MKQIKTIQAQKVTTIKRLKVAAYTRVSHTSLLQSLSNQVSHYSQMIQANPEWDYVGVYSDSAISGRSQAHRRDFQQLLEDCRKGKIDIILTKSISRFGRNTVELLETVRELKRLGISVRFEKEKIDTLTAEGELLLTLLASMAQEESQSISQNIRWRVKKRFEEGKPYIPQDIFGYRWNGDEYVIEPHEASIVRQVFEWYMEGLSAPKIAKKLDDRGERTRLGNRFTKRIIYNMFDQEAYCGRLILQKTFRDHFGSRSIPNDGQMAKYIVENAHEAIVTPEYFQLVNQEKKRRARRRVSKHDALARLQGKVYCEHCGLDMILTLETKSNQEKRVRYYCRTRDGKGVEACLGRTVTEEQLFQAFGESINIEDIHHISFNSVTNEAKVTYRNGEEKHVIIQKGR

SEQ ID NO: 9082 - protein, 518 aa, synthetic construct
MEIKKVTMIPAKKSVETKSLSSIVKKRKVCGYARVSTDKEEQQSSYTAQVDYYTNLIKSNPSWEYVDLYSDEGISGTSMKHRDGFNKMIDDALAGKIDLIITKSVSRFARNTVDTLQTIRKLKEHNVEVFFEKEHIYSLDGKGEVLLSILSSLAQEESRSISLNTTWGHRKRFSDGRHSVAYNSFLGYDKGEEGKLVVNKKQAETIKMIYKLYLLGKSLYGIKQELERLNLETPMHKKVWHISTIKSILTNEKYKGDALLQKQYTVDFLTKKRKTNEGEIPQYYVTDDHEPIIDKKTFDLVQIEREKRNGVSYSGTDVFANKIVCGECGSQFGKKVWHSNDKYRCVIYRCNKKYSGKKCSTGHVTEDEIKAKFVEAYNSLDRAGVIRNVESIKQVLMSSDKEKAEQKKLQDEYDKCEKKLYKLIEENSTHAQNQDEYNKKYRDLADKSTKIQEKLDKITATIKDKGDRAKVLETYINDLKASKNKLTDFDEGLLYALVDRVKVNKDSIKIIWKDGTES

SEQ ID NO: 9083 - protein, 402 aa, synthetic construct
MITQVKHKKLILPARKKVAAYARVSVDTDKLRNSLSAQISYYNSLIQTNKEWEFVGVFADLGISGTDTKKRDKFNELIDLCKAHKVDIILTKSISRFARNTVDLLKTVRMLKELNVEVRFEKENINSLSADGELMLSILAGFAQSESEAISSNCKWGIRKRMERGLIRHIDLFGYDYDYEKKEYKINKAEAKAIKEVFSRFLNGETYTEIAEAMSGRNIKSRNGLDFNYLMVKDFLRQEKYAGYTIAQKKYVCDSLTHKAKRNKGELAQYKVEGTHPPIISVEDFEKAQERMKFITNNQTKLHKQSKWFTGLVKCPVCGRSMIVCNKKFLKCIGACKYRTCDNKQTLKISELEEFLKGKDIEKVDKVIFNKIRLEKFSRKGYKPAVVVPRDVGKEDFEIIWK

SEQ ID NO: 9084 - protein, 527 aa, synthetic construct
MPKAIGYIRFSSPKQVSSNSKQRQGEMIARWLEAHPDYSLSDLTFEDLGRSGFHGQHAAEGGGWAKLLAAVEAGAIKPGDAVLVEALDRTGRLETVDALHFLNPILRADVSVITLDDGNVYSRESLNGPQIYLLVAKIQAAHGYSKLLSERTKLSYQARKQKARLGEGVKRLGPVWLTTDGKLREDIAPYIVQAFELYVSGVGKISIANRLRASGVEAFKTCSGPTVEGWLRNKTAIGFWDEIPNVYPPVVSRELFLQAQKRQREATTGPRTKTTKHLLVGLVKCGVCGGNYIMQSKGGEPHSMRCLTRQRLKDNGCTNTKTIPRNVLEYVRLQTSHIALAEAMQRQQLTVADKRRLELEAEIDSISLRVQKIVALLDDLDDMAELSDKLKNLKAQRKALQDELLLLERTDEQTMPGWESAYTETEIAEDDPVRLNAMLKSVGYTITVYQDGLIKASNDVFPFFYLGPKRKQNEVLGYRVTWSGEERLVIPQVLSEIYDLIPKIKLHPKSELERLLYLTKRADGDVR

SEQ ID NO: 9085 - protein, 520 aa, synthetic construct
MKKITKIEGNLANSFIKPKTRVVAYCRVSTDSNEQLVSLQAQKAHYETYIKANPEWEYAGLYYDEGISGTKKENRSDLLRMLSDCETGRIDLIITKSISRFARNTTDCLEMVRKLIGLGVHIYFEKENINTGTMESELMLSILSGLAESESISISENTKWAIQRRFQNGTFKISYPPYGYQNMDGQMIVIPKQAEIVKYIFAEVLSGKGTQKVANDLNQKGIPSKRGGRWTATTIRGILTNEKYTGDVLLQKTYTDSHFNRHTNYGEKNMYLVENHHEAIISHEDFEAVDVVLNQRAKEKGIEKRNSKYQNRYSFSGKIICSECGSTFKRRIHSSGRKYVAWCCSKHIGNITECSMQFIRDEDIKTAFVTMMNKLIYGQKFILRPLLNGLRNQNNVASFRRIEELETKIENNMEQSQMLTGLMAKGYLEPALFNKEKNSLEAERESLFAEKEQLTHSVNGNFTKVEEVDRLLKFTTKSKMLTAYEDELFENYVEKIIVFSREVVGFVLKCGITLKERLVN

SEQ ID NO: 9086 - protein, 545 aa, synthetic construct
MKERKKDMSVKQEKVKKIIKINPVKSQVMMQLQPKKRVCSYSRVSTDSREQHNSFIAQKAYYEEMIGQRDDWQYVGMYADEARSGTKIQKRDDFLRMMRDCEAGKIDMIITKSVTRFARNTVDSIEAIRKLKLLGIAVFFEQENINTLSENSEVLLTILSSLAQGEAESTSTNNKWAAIKRFKDGTFKISTPALGYTKDIDGELIIDEQEVEIVRYIFKQYLNGKGTYVIAKELNDMEIPTIRGAERWVDRAIKDILLNPVYAGNLILQKTYRTEVIPFKQKRNKGELPQYFIYENHEPIISMEEAEAVKEIFEYRRKQMSVDVIKVQNRYAFTSKIICGECGRVFRRQKIYIGKSYEKVQWCCIQHIQDKDKCKMTSIREDVIQQTFTLMWNKLSSNYKEILYPLLESLKNLRADEQQEREIRECNEKLIELSKQSHILSGVVAKGYIDSAIFIEKQTALQVETDAMRKRRKALLDESGFEAEIFNTEHLIGLFERYPEIQDNYSEELFLQSVDQIIIGGMTVTFRLINKLEFSECFSKEEIQQ

SEQ ID NO: 9087 - protein, 547 aa, synthetic construct
MQALRKKNISIIPSNPAYDKTIKVQFKALRVAAYCRVSTLLEQQEGSYEAQVSYYTEKIQQNPNWKLAGIYADDGKSATNTKKRDDFNALVDDCMAGKIDLVLTKSVSRFARNTVDSLQTIRKLKEKNIGIIFEKEGINTLEGSGELLITILSSQAQEESRNLSENTRWGFERKFEKGVVMVNHKKFLGYTKDEYGELVIVPEQAQLVRRIYRLYLEGLSTQQIADTFMAEGIKTVTGNDKWHDTVIAKILQNEKYMGDVLQQKTYTIDFLTKKRVKNDGIVPQYYIEDNHEAIIPKEIFFQVQEERARRASLHKPAVTRRANKEKSKYSSKYVLSDILVCGECKHPYRRQTWSRNGVITPVWRCESRLASGTKNCKHSPTLKEKPLHEAIMTAVNNVVENHREVVGAFRQNMIRIIGSYSTKNLESEFDEQINMLQNQLLVLIEENAKQGAVDEDFDEKYKRIADEMQELKMKKLKQARERKLAGEYGQRLDGMDSCIGGANYDIRMFDEDLIRRLVLRIRVISELKIEIHFKAGFVMLQDVTLYE

SEQ ID NO: 9088 - protein, 562 aa, synthetic construct
MSAMMMQQQLNQQTFSNTTTVIKRVAIYARVSTTEQAEEGYSIDEQERVLREWCDKQGYEVHEVYADRGISGKSIRNRPALKQLIEDANKRLFDIVLVWKTNRLARNVLDVLKIHEIFDRNYIAFRSFTENHETETPNGKLQFQMLAVIAEFERNAISENVKMGMLARARQGKWNGGRVLGYDLEDISNPGDRRKHTRLVINEQEAKTVKRIFELYIAGNGYKAIANRVNKEGHVGKRGKPFSISTIKTILENPIYVGMIRYDVRRNWTDKRRGDINPNPVLQKGEHEPIISQLDWGKAQQILKERSNKPNRVHGGTFPFTGVMKCPQCGAGMVVMRTVNKLKDGTRKTLEYYACGAWKNQGTSVCRSNTLRADKAESYIFGRLQALATNKKLIKEVADRVNGKRSNQEVPLQQKHQALLKELEQAKRKKDRAMELYEDDIIKRVDLQERLIKVNELIEQLELRLQPIKLQLQSLKVHTIDEETIQEVMGNFQKAFKKAITQEQQKHLITLIIKDITLNDKREVDSIQIQFNNTVLDYLTEHGADRSLADDLSAPFYVLVAI

SEQ ID NO: 9089 - protein, 596 aa, synthetic construct
MKTQLYSYVRWSSDKQTGNSSLERQTRKSKEYAARNGLEWAELRDEAVSAYRGANWDEKKSALGGFIGAVKKGLVPSDSWLYVESLDRLSRQNVLDATEWFISVLKLGITIVTGMDEHVYNKESIAANATGLMMSIMLFARANEESETKSKRVVSHAKQLIERHKEGKPATIKSAGSHVWWIDSTGDEREGVKPHPEMWEPAKLIVEMFKEGESIFRIVAALRERYPYGFKGRDWSGSTIKNMRVNPALYGCRTLKFGLEENKLENYYPALCTEAEFYRIQEVKSNNKFRANKSSSISLLAGMRLIRCGQCGGTMNTLTTTDGKLRYVCSSGLATKGGGCTRSWSLSGILIEHCLMIVLSHAYFDASIRNQNSATDLDTQIEKFEIRIAELNIEIKNIASGIAKHYSEALVELLAAAEKERKKLVQELDRTNQKKLLLTANTVFEKDMLNFFELIQWGIISDPTHETRVKLREIVRRLMQSVVIHKRDGIVSLHYSYKEGEYFVFEGAGKRHEWTYYIKGDKQADNTVSPEIIEQVKNHRLIKDIETSLYNLETDHEGMFNLVLDMLAIVNYPKLKGSQFWPKKSSTERTVFKKPA

SEQ ID NO: 9090 - protein, 533 aa, synthetic construct
MTVKRVYCLYRVSTLGQVEKDDIPMQKTSCHEFTAAKSGWQIIKEFSEKGVSGFKVSAKDRDAIQEIQKDAVEGKFDILLVFMFDRIGRREDETPFVVEWFVNNGIEVWSVNEGQQRFDTHVDKLTNYIRYWQASGESIKTSVRTSTRMGQIVIEGKFKGGVAAYGYKLEKLGRLNKKNQEVNDIVINAEEAAVVKMIFDLYVNSGLGTHNIATHLTKQDIFTRKGNNFTSPSIRNILKNPMYLGILRSGESWSKPFEHLRIIDDYTFQRAQELAKQRSNEYEDKRTFPRTTRSKNCLLSGNIFCGHCGARLTATPVGADYSKKDGTVVKHRYWRYVCYNRTRHKHLCNGQTGYKSSKIDSVIEELLMDFFSDFKEVSMSDFMDAQYSDKKKECQAKLNLAQRSLKKHTSDLNSLKDEIVKSIRGKSKFTPELLNDAIEKVTQEQKQAELDVAKFAEEYSDSEKIVTELKAQHNRLLNWANIFEDSEIEVKKMIIAHLIERITVSTGYVIDVDFNISVEQFINYRNTIKKVHN

SEQ ID NO: 9091 - protein, 428 aa, synthetic construct
MSTDQDEQLSSYENQVSYYRDYILKHEDYELVDIYADEGISATNTKKREAFNRLIQDCRAGKVDRILVKSISRFARNTLDCIKYVRELKELGIGVTFEKENIDSLDSKGEVLLTILSSLAQDESRSISENATWGIRKKFERGEVRVNTTKFMGYDKDENGKLVINPEQAEVVKHIYQQFLKGYSPESIAKELNTNGIKGWSGKANWYPSSILKMLQNEKYKGDALLQKTYTVDFLTKKRTENDGQVNQYYVTNNHEAIIDTEMWDTVQEELARRKDFREKHKLKTYIMQSDDNPFTTKVFCAECGSAFGRKNWTTSRDKRKVWQCNNRYKVKGQIGCQNNHIDEEMLEKAFMKAVELLQEHRADVVVKWQKLEKGTNLLHKHYAKQMYQLLDLEKFDGTIMNKVLDHISISEVGQIIVIFLEGTEVEL

SEQ ID NO: 9092 - protein, 542 aa, synthetic construct
MTRVALYARYSSDRQNERSISDQLNLLIQHAAAKGWAVVATYTDAAISGSAMANRPGLLSALAAAERGEFDLLLAEDEDRLARNLEHLAHVANRLADVGAGIATLSTDRVQDMHVAFKGLIAQDFIRNLSLKTKRGMASNAEKGLATGSRLYGYRSQPGGLVEIVPEQAEVIRRIFAMYVHDRMSSREIAERLNQDRIPSPAGREWNASSIQGSRQRANGILHSEIYAGVKVYNRVEMRKDRQTGRKITICKPPSEHKRIDVPHLAIIDRDLWNAARHRLDSRQTADPSQRASLRRRPGLLSGLTKCGCCGASYTSLSQGRLVCAAYRERGASVCDNNRHVSRAEIEQRVLDGLRTRLLAPEAVAAYVRAYHAAWAEQAAQVEDRRRPLTRRLAEVERAIERGAEALLSGATAAAVIGKKLETLEIEQAELKAALQQLDADGAPPVQLHPRAAENYARKVEQLQSRLAQAADSTEVADRELIDSVRDLIQRIDIEPVDKSRGAPVRVTLHGDLARFIRPQQPPIGGCALVVGGGIEPPTCGL

SEQ ID NO: 9093 - protein, 475 aa, synthetic construct
METGIYIRVSTEEQVQEGFSIRGQEEKLRDYVRIKDWSLFNLYIDEGISGKNIKDRPAVNRLIEDVRAGRVKNVLVYKIDRLTRSTADLVFLVELFNKYNCAFNSLMESIDTQTPSGRMFIKIIGIFAEFERENIIERVTMGRDRKVKEGYSLCSSHASYGYDREPGKKIQTINEEEAKIVREIFDKFVNQNMSLNSIVRLLNLRKIPSKEGNLWDRKNLKNVLTNASYVGKVRHFIDDEERYVELEGLHEPIISEELFEQAARLAEKNKATSSTKKPVEHNYYLGFLYCTKCGGKLSTHNRKTKLKDGSFKYHCSYRCQNNVLNGGCGMCGDINHKKVETAFLAYIDRIADLSVTNEVELESPDTVHQKSDELIQRYTHKLQNLEKRHREIMDSYCDGGIDFESYRHMKNKLDSDKELIHAELAKLENENNSEETINHTDIITNIHENWELLTNREKRQFLLRFVKRVRGENVN

SEQ ID NO: 9094 - protein, 541 aa, synthetic construct
MRAAIYARYSSDRQHERSIDDQVALCEKHLASLGGGSAEVYADYAISGAHLASRPSASRMLEDAAEGKFDIVIAEALDRLSRDQEHIAAIYKQLTFAGVKLITVSEGTVDELHIGLKGTMNAVFLRDLAAKIRRGQTGRVKAGKVPGGKAFGYDVVRQLDARGEPLRGERAINDEQAEIVRRIFKEYAAGMTAREIAKGLNNDGIPSPFGGDWNASSINGNRARRSGILYNEGYLGFIIYNRVRMVKDPATGKRISRPNPPEEWLVEEAPHLRIIENDVWEAVQARKATANAKPFRQRRKPPHIFSGLIKCGKCGGGYTAKGGGYLGCTRHRESGVCNNGQTIKLETVEQRVLGGIQQRLLAPELVEEALKAYEEERARLRKEALGNKKKLVRRRGAVQREIDACVRAVLDGLLSDAIKQRLPELEQELAQLDRDLAALEDDNPLVEFHPQAAAAWKKRMEDLSGALKGIGPDKSQAREIIRDMVDRIELHPRLARGQFDIQLFGSLPGILNIMGGENKLGPKSAVQLVAEEGLEPPTRGL

SEQ ID NO: 9095 - protein, 413 aa, synthetic construct
MAVRLIKAKQDHKKQRICAYVRVSTTNSSQLDSLENQKTYFETLYANREDVDFLGVYYDKGISGAKEKRPNFQAMLEVCRQGQIDLIHTKSISRFARNTMTVLEVSRELKVLGVGIYFEEQNINTLSNEGEVMLSVLASLAEEELESMSTNQRWAFQKKFQRGEVVINTKRFMGYDVDVDGELVINEAEAQIVRRIFHLYLDGMGLHRIAKLLNEEGVTTVSNAKWHDTTVRHMLRNEKYKGAALLQKTYLDGVNGKRRLNQGEVAQYLIEDNHEPIVSKEVWQAVQHKLDSNTWKQGPNKHYLFTSMLRCQYCGSTLKRQVSYKKQIVWCCSKYIKEGKASCQGMRVPEKAIEEWKLKTPVTVIERTEYGQKHYSYSSQENAADGHPSASHQNQSGRLLSGVHRPRRTAIKL

SEQ ID NO: 9096 - protein, 486 aa, synthetic construct
MIIMRTAVYVRVSTEEQAKEGYSIRAQTERLKAYCLSQGWEIVDFYIDDGQSAKDMERTNLKRMIQHIEQGLIECVLVYKLDRLTRSVLDLYKLLEIFDAHGCKFKSATEVYDTTTAMGRMFITIVAALAQWERENLSERVRMGMEQKAREGQWVINMAPFGYELDKKNKSLIINDKEAAIVTRIFNMYLSGKGMKKIATELNAVNIPTKTGKTWSDNKIGYILKNPTYVGTIRYNYRVHNDQYFEVENAVPAIIDRVTFEKVQSVATARKKVHPKAATSEFIFSGTIKCAKCGAPFSGKYGYSKRGEKIHRPRSYYCSKQILGLCTQRNISERFIEHHFLKYLQDIEIDQDQIKNVEPTNEQKDIQQQIMLLEKDLRAIEQRRKKWQYAWVNNMIDDDDFAARMEEENQTEVKIQEELNNIQPVANSMDPVEFKTILKDIRTNWNSLTAIEKKMMLQMLVKKMVVDKISPKPKVDSVEIVEIEFN

SEQ ID NO: 9097 - protein, 473 aa, synthetic construct
MRIATYIRVSTQEQAVEGYSIEAQKERLSNYCKAKGWQLVTEYVDGGFSGSNLDRPQIQKLINDVKSDIFDGILVYKLDRLSRSQKDTLFLIEDVFLKNEISFISLNENFDTSTAFGRAMIGILSVFAQLEREQIKERTRMGLEERVKQGKHHSFAPFGYRYVDKKLVIEPTEAEVVKLIFERVSENYTFAQIKRDLIKDYPEFPAFGTSFANKVADIAHNITYGGYVKFGDVICKGDHPAIIEDELYRNAHAVMDHRRKEWETTRTRKTGTKSSYLLSGFLFCGQCGARYRVMPRPKKTVYICYSRAEKSAYMAKQEGCKAPTYLMNDLDEIILNEIRNLGNEDYFNNIAKQPKDDNASILIEKNKKEIDKISKQIGKMLDLYGLDGMDITVLSQKIKSLTDKKAALEKTVIELQGKVKHTKLKYEQVSSMLSCVDELIENGATNELRQLLQMLIDKIIITNDEIKIKWTFA

SEQ ID NO: 9098 - protein, 487 aa, synthetic construct
MIIASAYIRVSTEDQTDYSPSAQLEDIISFAEKNGYYIPKEFIFEDEGISGRSADKRPGFQEMIRQARKKQNKIEYIIVHKYDRFARNKEDAVLYKALLKKDGVKVLSVKEPIPQDDKFAVIYESMLEAMAEYYSLNLAEEVKKTMVKKAMMGEYQSTPPFGYCMKNKQLTPIPEEASMVRFIYEAYASGKESMFSLSRQMNQMGFHTHRGGVFENRTIQYILNNPVYKGYSRWTPTGRTRRNFNNPDSVVAKGNWEPIVSEQLWESVAIRIAREKRTHYSHKRPETDGKHWISSMIKCSACERSLVISAKHKTGDAFYLQCGGYNHGQCHVSHSLSTNRLFPALFDTLRNIALGKESTSKYHIRRLSLETDETESIELMINKTKQRIAKAKEAYLAGIDTLDEYRQTKLAIDTELKALNEKLNNSKQKQFKPFDHNLFSSKVLNVLNVLQDETASMEIKRASFKSIVEKVIYDKPNGSLELFLIGD

SEQ ID NO: 9099 - protein, 520 aa, synthetic construct
MKKVTKIAPTTKSTAEQPQLRVAAYARVSTDSDEQLVSLETQKNHYESYIKANPEWEFAGLYYDEGITGTKKEKRPELLRMIADCEQRKIDLIVTKSISRLARNTMDCLSLVRKLTKLGISVYFESENINTGSMESELMLSILSGLAEGESASIAENNKWSIQRRFQNGTYKIGCSPYGYDAVNGKLVVNEQQAEIVRFVFSEILSGKSLHKIADALNQRNILSKKGGRWKANTLRNMVVNEKYIGDALFQKTYSDSQFNRHKNDGEKEQYLIRDHHEPIISREDFEAVQKVIEQHGKEKGVEKYSEKYQKRYPFSGKIICGQCGGTFKRRTHSSGRKYIAWCCSTHIESIEKCSMKYIPDSDFEYAFITMMNKLIFSHQFVLKPLLIGLRGVNTDESFISIQDIDKKLEENAEQQNVLVNLMAKGYLDRPVFKKSSNNLLQEADRLQRQKESINRLIQDGNQHLGEVSALLQYATKATMLKRFDEDVFKNFVNRIIVYSRTEIGFELKCGITLKERLVI

SEQ ID NO: 9100 - protein, 524 aa, synthetic construct
MTEAKMSVTVLPARKQARGKNDDEEKAKLRVAAYCRVSTDSDEQATSYEAQIEHYTAYINGQPDWSLAGIYADDGISGTNTKKREEFNRMIDECMAGNVDMVITKSISRFARNTLDCLKYIRQLKEKCIPVYFEKENINSMDSKGEVMLTIMASLAQQESQSLSQNVKLGLQYRYQQGEIQVNCNRFLGFAKDENKRLIVVPEEATIIKRIYREYLEGASMLKIARGLEADGILNGAGNEKWHTSNINQILRNEKYIGDALLQKTYTTDFLTKTRVKNHGIVPQYYVENSHEAIIPREIFMQVQEELIRRRIVHTSPNGKNRTFSSIHCFSNMIICGGCGEFYRRIHWNNRGKKSVVWRCISRLENTGLYCDARTVLESTIEQVLVTAINQTLCGKDDFLITLQNNIETVLCHESDQTLACIDARLQELQAELLKLASSKADYESVGNEIHRLHEDKQKVQLESAGRDELKKRIDEMSTFLQKQPIDLTEYDEPLVRRLIEKVTIYEDKFTVDFKSGLTVDVDE

SEQ ID NO: 9101 - protein, 550 aa, synthetic construct
MKIAIYARKSKYSPTGESVENQVQLCKEYLQSKYKSETLEIDEYKDEGYSGGNTNRPDFKKLIAQIEDYDMLICYRLDRISRNVADFSSTLTLLQNNKCDFVSIKEQFDTTSPMGRAMIYISSVFAQLERETIAERIRDNMMELAKMGRWLGGTIPMGFDSEPITFIDENMKERSMTKLIPNVEELKVIELIYEKYLQLGSMGKVVTYLLQNNIKTKKGKDFTLGSIKLILTNPIYVKANKEVVNHLKTQGITVCGDVDGKKALLTYNKTTGISNDVGTKTIVKDKSEWIAAVANHKGIIPADKWLQAQNIKDKNKDSFPALGRSNTTIASRVLRCDKCESTMGVSHGHVNPSTGNKHYYYNCTLKKRSKGVRCDNKPAKAAEVDEAILITLENMFKTKSSIIDNLKAKNKARRIEMLSSNRVDTINKIIEDKTKQIDNLVNKLSLDEDLTDILFKKIKGLKAEIKELEDELLTLTSENIKLNEDEVVLDFTEKLLEKCSIIRTLDILEQQQIVDALIPLVTWNGDTEVLNIYPLGSPELELKEAESKKK

SEQ ID NO: 9102 - protein, 518 aa, synthetic construct
MPKAISYIRFSTKIQSVGDSTKRQSKYINDWLKRNPDYYLDESLRFQDLGISGFSGANAKSGAFGEFLAAVESGYIESGSVLLVESLDRVSRQDIDTAGEQLRKILRSGVEVVTLVDNEWYTRDSLKDSLSMIKAMLVMERAHEESAMKSTRLRSVWAAKRERAAKGEIMSKRCAAWLKVSEDRSHFEFIPENVKAVQRVFQLRLEGLSHVKIAKQMNDEGFSTLNQFKSVTGGWSQSSVTELLSNRSVIGFKVPSKSMAVKGVSEIPNYYPSIITDEQFYAVQQLKQGSGRKPSSDLPLLTNLFKGVLRCSECGFIVVVAGVSAKRSGIYKCSMKSEGRCNSVGFSRLQTDRALVQGLLYNTNRLALNRDNGSAIGSLQSELEQLQKQRERLIKLAMLADDTESMAKDLKALNSQIKDAEKAVSEVHQREQSSQLETISHLDLTVKKDRIEAQIIIKRIVKEIRLNTAGKKCDVFLHNGLKLLNFPLDRVVDGEIFLEVLPVLEADEFDFDTYRMIE

SEQ ID NO: 9103 - protein, 545 aa, synthetic construct
MKEKKDMSIKQEKVKRIIKINPVKSQVMMRLQPRMRVCAYCRISTDSREQHNSFIAQKTYYEEMIGQREDWQYVGMYADEARSATKIQSRDDFLRMMKDCEAGKIDMIITKSVTRFARNTVDSIEAIRKLKLLGIAVFFEQENINTLSENSEVLLTILSSLAQGEAESTSTNNKWAAIKRFKDGTFKISTPALGYTKDIDGELIIDEQEVEIIKYIFKQYLNGKGTYVIAKELNDMEIPTIRGAEKWVDRAIKDILLNPVYTGNLILQKTYRTEVIPFKQKRNKGELPQYFIYENHESIIRMEEAEAVKEIFEYRRKQMSVDVIKVQNRYAFTSKIICGECGKVFRRQKIYIGKPYEKVQWCCIQHIQDKEKCKMTSIREDIIQQAFTLMWNKLSSNYKEILYPLLESLKNLRADEQQEREIRECNEKIIELSKQSHILSGVVAKGYIDSAIFIEKQTALQVETDAIRKRRKVLLDESGFEAEIFNTEHLIGLFERYPELQDNYSEELFLQSVDQIIIIEGMTITFRLINKLEFSECFSKEEIQQ

SEQ ID NO: 9104 - protein, 547 aa, synthetic construct
MQALRKKNISIIPSNPAYDKTIKVQFKALRVAAYCRVSTLLEQQEGSYEAQVSYYTEKIQQNPNWKLAGIYADDGKSATNTKKRDDFNALIEDCMAGKIDLVLTKSVSRFARNTVDSLQAIRKLREKNIGIIFEKEGINTLEGSGELLITILSSQAQEESRNLSENTRWGFERKFEKGVVMVNHKKFLGYTKDEYGELVIVPEQAQLVRRIYRLYLEGLSTQQIADTFMAEGIKTVTGNDKWHDTVIAKILQNEKYMGDVLQQKTYTIDFLTKKRVKNDGIVPQYYIEDNHEAIVPKEIFFQVQEERARRASLHKPAVTRRANKEKSKYSSKYVLSDILVCGECKHPYRRQTWSRNGVITPVWRCESRLASGTKNCKHSPTLKEKPLHEAIMTAVNNVVENHREVVGAFRQNIIRIVGSYSTKNMESEFDEQIDMLQGQLLELIEENAKQGAVDEDFDERYKKIADEMQELKMKKLKQARERKLAGEYGQRMDGMDSCLGVANYDIRMFDEDLIRRLVLRIRVISEEKIEIHFKAGFVMLQDVPLYE

SEQ ID NO: 9105 - protein, 585 aa, synthetic construct
MEETDIRPTAYSYVRMSTQQQLKGDSLRRQLERSREYAAENNLRLDDSLHDIGVSAYTGANVRSGALGQFLQLVQNGQIKRGSYLLVESLDRLSRLQVRNALGPFIELINAGITIVTLADKQVYSDATVDENWTQLMMSLAIMSRAHEESQTKSDRLQRAAEGRRKRALAGETRFSHHMFRWYDQIEIAPDKYEYRLNKHADTVRQIYEWADAGIGQIVITRRLNEAKTPTLTGKGVWQQPTVGLILRNEAVIGTYQPVHRVNGKSQPYGEALRGYLPAVISEELFWRVQKNKRVRNSAGRKGERLTNLIGPLATCAHCQGRMLIKTGGAANNPQKYIRCDNNYRGGTCTGPTGQFRYDKVENAILDHVKEFHSFSAFARENSSAGKQQLQEKIASHETTLAGLEKQRKNLMAIAAMADDDATRADVMREISERRTREDSTKAELEILRADLITLDSAERNANSLAERIASERKAWEIGTDAEVYESRSKIAQALTQIIDLISFDMDTRRFRVIIGAGIVAYEFDKQGRLTNKFDLAVSPMRTGPSPLTVDHFVGTYKGEVESNQLDAKRETLIKIMEENRTKDA

SEQ ID NO: 9106 - protein, 522 aa, synthetic construct
MSNKIACYIRVSTEKSDQQKSLEQQRVLLEEQYKDREILIYSDTGTGTSFKRAGFQQLMYDAGLNSRQLKDSRMVFEVDSEREPLFNEIVVINTSRFARNIAIIDVLRVLWNHKKVNVKFLDVQKNSSDVNDMILLQMFFAMAENEVKETSVRTKRGNKTTILQNRIRNNSIFGWDFDRKTNSLLRNENEAKVVEFIFKASLNNGLKMTAKLANQMGYRTKKGNLWTDSTIKTMIVNPKYKGHNVRNKFNNVNLFTESKTKYVKKENWIVQQNDRIEPLVTAELWEDVQKALSNRCIAGNKGQNARIYDTRGKLKCAKCGASYVRCVETKVSDKANQLHYLICSHKKKYTKTYCSAENINIEVLDNYIEKQRKVYYKNIQLQIQLKIISLQDELSNLNDDNNSNIVFKIQEEEMELERLKSKLESLIENFISTSKTMQSVIEKKIKELEVRIQSKDEEIERLKLINTDKEKHIRDINHKISKLKGELLMAHDKELTRTEWLDKVEKILIGGKKDIKAVYNLD

SEQ ID NO: 9107 - protein, 554 aa, synthetic construct
MKAAIYARKSVATEKGESIDNQIQLCKEYGSRLGVKEFIIYKDEGFSGGNINRPSFKNMIKDAKNKKFNVLICYRLDRISRSVADFSSTLDELQSKNIDFISIKEHFDTSTPIGRAMVYISSVFAQLERETIAERIRDNMMELAKTGRWLGGTTPLGYKSEAVEYVDENGKNKKMYKLIEVPEEIEIVKLIYDLYIKKKGFPSVATYLCKNNYKGKTGGEFSRTSVEQIIKNPVYAIADERIEKFFQSHGAITYGDFNGINGIMPYNKRENGKKDKPISEWIVAIGNHKGIIPSKLWIKCQAINNENMEKSSPRSGTGNKFLLSGMMVCGICGSGMSSWSKKIKKTGEISRYYRCNLKARASSRCDSKMLNAEVAEDLVLSNITAIDINQLIAKIEKDNSEVAAHSEIDENILKLNKNIEDNKKSIQGLIRKLALLEDLSIINLIKDEINKLNEENKKLEEELLGIKSQKEPMETLNEYIKYINESLKSFKAFINLIKETSKKREVLKAIVESIVWDSKNEELIVNIIGSSPKLPNGVVRRRNGSKLCFGDGSR

SEQ ID NO: 9108 - protein, 520 aa, synthetic construct
MKKITKIDELPQGQLPTTKLRVAAYARVSTDSDEQLESLKAQREHYERYIKSNPEWVFAGLYYDEGISGTKMEKRTELLRMIRDCKQGRIDFIITKSISRFARNTVDCLELVRKLIDIGVYIYFEKENLNTGDMESELMLSILSGFAAEESASISQNSTWSIQKRFQNGSYVGTPPYGYSKINGEMVIVPEEAEIIKRIFAECLSGKGGGTIARGLNKDKIPARRGNHWSAGTVIDMLRNEKYMGDVLLQKTYTDSNYNRHPNTGEKDQYYYEDNHEPIISREDFAKAQDLIDERAKMKCKGVKKNVYLNRYALSGKIVCGECGRNFRRKTNYSAGRSYIAWSCIGHIEDKESCSMLFLRDGEIKAIFTTLMNKLAFSNKLILEPLYKSISQIDEDRDRERMAAIDKRMEQLMEERNTLITLMAKGFLEPVLFNQERNVLDSEMKNLSTEKTNLVSNSTSGVLRANEIKDLIDYVSADNFIGDYTEELFEEFVENIIVNSREELTFNLKCGLSLKEKVVR

SEQ ID NO: 9109 - protein, 451 aa, synthetic construct
MQRVAIYMRVSTDQQAKHGDSLREQQETLDEYIKRNKNLKVVDKYIDGGISGQKLNRDEFQRLLDDVKNDQIDLILFTKLDRWFRNLRHYLNTQEILEKHNVSWNAVSQQYYDTTTAYGRTFIAQVMSFAELEAQMTSERIKSVFSNKIQQGEVVSGKVPLGYKIENKRLVPTPDKDIVIDLFDYYVRVGSLRKTTTYLEEKHGIVRDYQSVRKLLTNEKYIGKLRNNTNYCEPIIDKDVFETVQLRLSQNVKTSGSHDYIFRGLVRCADCNGSMSCSTLKSKYIKKTDGEVSYYIRSCYRCTRRRNNPTRCKNKKTYYERALERYLLDNIQTNIAMHVRTLKKEVTKKDSVKRKKDALFVKIERLKKAYLNEIIELDEYKRDREMLENEIASLKEPKINKNIAPLKKVLSDDFFEKYEKASINQKNELWRSIIESIEVSVDGNITVNFLP

SEQ ID NO: 9110 - protein, 547 aa, synthetic construct
MKVAIYIRVSTHHQIDKDSLPLQRQDLINYCEYVLNTKEHEVFEDAGYSAKNTDRPRYQDMMNRIRKGEFSHMLVWKIDRISRNLIDFCDMYEEIKKYNCTFISKNEQFDTSSAMGEAMLKIILVFAELERKLTAERVTAIMLDRASKGLWNGAPVPLGYKWDNKIKFPVIDEEESKVVKLIFDKYQELQSTSAVRNILNSLRVKTKRDGSWTTKTLSDVIRNPFYKGTYRYNYRNSIDQKKKKENEWIMVEDNHPAIISKELWQKCNCIMDENALRNNARFRSNVKTHLFSGLLECGECHNSLYAKQDKPHLDGYIPSLYCCSGRYNHLDCEQRTTSEKLIGEFVFNYIATLLKIEKKRSKVEFEVFNDILLNTRQLKGVVAIDGVENLYNLTNSNKNIFTKVSKNENNDLEIERFKKEKSKYERALDRLEDLYLFDDEGISEKDYIIKKNKIVEKLNEVNNELKKHVSSDSNNDNFILVASNFILGKALVLSEEDINIKTLINKVGRDLLKEFLNAIIDKIIVKDKKVMCIRFKNGIENRFIYTS

SEQ ID NO: 9111 - protein, 521 aa, synthetic construct
MNVTVIKPKVVQKERLRVAAYCRVSTDHADQETSIENQIDYYQNLIQENPDYDFAGIYYDHGVSGYKKKRPGFEKMMEAAREGKMDLIMTKSITRFARNTETVLKATRELKELGIGVFFELQNMNTLSQEGELLMTIYAAFAQGESESNAELAKMTWKRYFSEGNPPTCLERVYGFRAGKKKRTVEIVPKEAKIVRQIFEWLRDDYDTNTILRMCQKAGYKKRGGKDFAYQDIARMLHNVSYKGDYIMQKTFINEDGLSRVNTGQLPKYYVENHHPAIVSRELWEEANDVYKKRMEEKNMKYPRYPITEENYPYKNKLHCGYCGEKMHYTYRWPNEGPLGFFCPRKIKADQGRCPGLYIPQRVVESWPEITENIYIKKDPDKPVHEQFTYCTEKEWLKENKKSGYLERVPYTQENFWFYKRIFCASCGWPLYRRKTYVGRDIFVCGGNAKHKKAFCKGVTIPLKVMQRLPKKDGYFLLMEEKIDGKKNYRYSCQKEVPERKKFVRSEETESSGVLPGVVGS

SEQ ID NO: 9112 - protein, 447 aa, synthetic construct
MSDQRKLRVAAYCRVSSDHEDQLSSFENQVDYYTKYIQKNQNYEMVDIYTDEGITGTNTRKREGFNRMIADCEAGKIDLVITKSISRFARNTQDCLQYSRKLKSLGIGIIFEKENISTLDANGELLFTILSSLAQEESRNISENCKFGIRHNYRNGIIKQSTRYFLGYDTDENGKWVINPEQAKTVKRLYREFLEGWTVNEIAKHLNEDKVVGPKGNIAWEGTPILYMLQNEKYIGDTRLQKTYISDYLTKKAVKNRGEVEQYYVENSHEAIVSKEEWNAAQLEVERRERYCKEVGIRYFGNSSAGTPFISKVICGSCGTLYYRIKNNQRLVITWICRNRYRRGQPVTCHNDRVKEEVINQAFIIAWNSVVKDRDELLATWEAMKKEGNPLEKLRAKQMIELTNEGPLRKPLPELTRMVLERVIVHDKRVFTVRFLDGTERRVCVSH

SEQ ID NO: 9113 - protein, 543 aa, synthetic construct
MLPKQTEYKVGMYLRLSRDDERVGESLSIENQRTILTKYIEEQHGWTLYDEYVDDGISGTTFDRPGVQRMLEDAKAGKINLIICKDLSRFGRNYIQVGQYTDYIFPMYNIRFIALNDNIDTAKSDSASMDMMPIMNVFNEWHAANTSKKLRAVFEANAKSGKYKTNYPPYGYMKGTDKNCTPIVDPYSSEIVRRIFEMRAAGYNVKRIVDVLNRKHILVPSDYYYHTIGKPNPYRTSHLWGVSAVKRILRNPIYLGHLIQLRTTTVSYKNHKTVRRDENDWAVTENNHEAIISQELWDRVREVDDSVSNGKSSKNGITMPLSGLCYCSDCGSKMKQNSNIHCKSKPCYTCGRYSRFGKEYCSSHTIRLELIESLVLQDIQHQIDFVMNEPDVRAKLLAYKQGENAVQNSSDRKRQHDIVKRIDELDGLIQSVYEDKVAGKVPEKVCIGLLEKYQAEKDKLTAEQDELRKRSEATRQDERNVDEYIRRMKSYAGAKKLTREMALELIEYIKVDAHPGHRNLPRTIHVFYKLIDKPLTNKRNALE

SEQ ID NO: 9114 - protein, 525 aa, synthetic construct
MFTVPDLKPEEVLIYLRKSRTDDPALSVSETLAKHEQMLNEWCVQNLSELVPECNRFREVVSGETIEARPEVQKVLHLIERPQYKAVLIVEPQRLSRGDLEDIGRLTKLFRYTGTLIITLQGIFDLNDARDRDFFNRELMRGNDFLEYQKRIMGNGRVLSVENGNYIGSRAPYGYERTRIREGKRWAHTLEINQAEAENVRLIFRMYADGSGATAICTRLNSIGSKTKNGARWTPPTIYSMLDNPIYIGMVKWQARKTIKMIENGVVVRRNPHQKNYATYSGKHEAIIEDTLWEAVRARREARTIPRTNITCTLKNPLSGLIQCECGYYLIRRPYNGRCADRMQCPNMTYCKNASSTMDETIEEVKHILSGCITDFRVKIGLGAVADLAAHDVYCQQLRERLAALEEKEKSLWEKYVEDEMPKHIFNDLLEKNNADKSRTEEQLRDAETNAPRRIDYEERCRTFQAAIDALNDENMSAEQQNAILKRCFIRLRYHRPQGKRGRNSGPDRRGWETEPMQLRAELNL

SEQ ID NO: 9115 - protein, 503 aa, synthetic construct
MIAALYARYSSDSQRAESIVAQIRAGREYCRRKGYHIIKEYADEAYTGTNDNRPAYREMLRDAAAGLFEVVIFHKVDRNGRNEFDYYKNKQELARHNVRVEYSGQAFDSTSPEGALMENQLVGLAAYYSRNLSREVKKGLKENVLAGKITGGRPLFGYSVDKNKKYVINEEEAVAVRYIFERYAAGASYIDILREVNARGYRTRRGAEFGKATLHDMLNNRRYIGTCILGKNQPYLDGRRNSHRPDHDGMIIVPNGCPAIISPELFQAVHERMQENRRRGGRRTAKYPYLLSGLVYCGECGASMSGTRTRTRKKEIREYYRCCQKSNHGDAKCPNRYIYAPALENFIIERLAAVIDNENLLFRLAQKVQEKYDALVGNARVQIAALQEQEAKASKSLERLYEVIADGDTFDDFDRAQMKHLKQKILDIRAQREKLEQQPGKTISSAEIVHYIRDRFLPAIRQRTASGLTELLQYFVHTVTVFRDKIRVEYWFAACRYSSERTT

SEQ ID NO: 9116 - protein, 569 aa, synthetic construct
MPRAQKKKAAIYCRVSTLHQVDKDSLPMQRQDMINYAKYVLSIKDYEVFENAGYSGKNTDRPAFQEMMERIERGEFSHVLVWKIDRISRNLLDFATMYARCKKLGVTFVSKNEQFDTSTAMGEAMLKIILVFAELERNMTSERVASTMNARAAEGKWNGGRVPFAYAYDRETDSFSIRDDEAKVALELKDTYLRTHSLTYTARLLNGTGKRTRRGYAWTPATVAIILRSPFYRGTYRYNYRDESDVTFSFKAQNEWILCAKHHPPLFSEADCRQVDYWLDKNRRHHGKATHVQRKHVHIFAGLIQCGVCGSNYAVSVDRARASGYQPSMYNCGGRRQKGTCKNRYVNDITIGGFVFNYISNVIRLRTAFRPQWSLARIQRFLLQDENFREVASLSADTLRRVQSILLGYTVGTAEYQAGQDMRGHGNATAQAREANLRAELERKKRALSRLTHLFLYAEDEMHEADFLREKHSLQDDIASLQDDLAKAEQASVFASSMTDEEFLQKAARLLFQDAMGHGSIDFPGLALHVGKLELKNFINAVIEQIIVLDGRITQLTFRNGEVHTFLYA

SEQ ID NO: 9117 - protein, 526 aa, synthetic construct
MAYCLYLRKSRADLEAEARGEGETLARHEHILLELAGKMKLNVTKSYKEIVSGETISARPVMQQLLTDVEQGIWEGVLVVEVERLARGDTIDQGIVAQTFKYSDTKIITPMKIYDPNNEYDEEYFEFGLFMSRREYKTINRRLQSGRVQSAKEGKYVGNKPPYGYTRKKIEHDKGYTLKPNPEQADVVRMIFELYTRGELQPDGSYRRLGVSLIVRRLNDLHIPPMKGDVWVPATIQTILRNPVYIGKIRWNFRPTVKTIIDGKVQLKRPRANPEDWILSDGLHEPLIDMETWNMAQDYLATNPPHPANKKIKNPLSGLIVCGMCGRKMVRRPYTGRDYPDTLMCPNAACPNVSSQLCIVEDHLLDALGKWLKEYKLTWDISNNDITDNIQIDVKKKAVTKLNDELKTLEKQMENIHNLLEQGVYSTDTFFERSKAITERIEEAKRNKETLDKELKIEETREESKKTIIPKVEKVLELYKLTDDPELKNNLLKEVLEKVIYTKTVNGRWHDKPDDFELVLYPKLPK

SEQ ID NO: 9118 - protein, 519 aa, synthetic construct
MIGAGYGRYSTPKQCSIEVQFAYIRKYCREHGIELSESQLYDDEAMTGTRVKKRKGFHELLNAAKKHEFDCVVLYDLTRGSRDVVDWFTFRKYMKALGIEVYSVMDRLGDLDNPTDFLTELVTVGMGQTHVLTSRLKSMDKIDFLAKQGKFLGGYAPMGYDIKDGRYIINPIEAEYVRTIFTMYAAGRSYSEILKALPPGLHGKRGRPIGKNSLHEILRNERYIGKYTWCKRKVKYMSEWAGGGPSDRAVTIDNIIPQIIDWDTWERVRKRMEANKHNKLNNNHSNREYLLTGLLRCGYCGGAYIGITTTNKKGYEYKFYACGNKYRRHTCKAKNIAANDIEPLVVSLLRRSMRDGSMIEATADAILSAGSGENSRSEISALKKERSDLDGKINNLVDALSNGLNSPAVQARLTEFEGKRQILSQKIKELRPKPTLSRDYLIKELSKDAEKLEKDPACVKELLHKYIVKIDIFDDAIEIYSTADFSSVLPAGGEKIPMNAKSTEKILGTLSGIGCGGWI

SEQ ID NO: 9119 - protein, 521 aa, synthetic construct
MAKVKKIPATISRVTAEPLGSVKKRRVAGYARVSTDNEEQQTSYEAQMDYYSKYIASRDDWEFVKMYSDEGISATSTKHRAGFNAMIDDALAGKIDLIITKSISRFARNTVDSLTAIRKLKENGTEVFFEKENIWTFDARGELLITIMSSLAQEESRSISENTTWGRRKAFADGNYSLPWKSFYGYDKGEDGKPVINPEQAEVIRLIYKLFLEGYSAQAIANTLYDKGVKSPMGKDMWNTYNIMYILQNEKMCGNALLQKKYTESFLTKKQIKNNGEIPQYLVEDDHDGIIDKRTWELVQAEVQRRKGKHYSGVSIFSSKIICGECGGYYGSKVWHSTDKYRRVIWRCNHKYKGKKCETPHLTEDEIKELFVKALGELLSDKDEVIENLTILREAVSDTSELETQLTEAETEMALLAEMVQEAVSENAHKAQDQNAYAEKYNGLVSRYDEQKKLHDELSDRIAAVKANDKQMEEFIQELQNLDGVVSEFDENLWSSLVDHVTVMKDKKVIFTFKGGTEITV

SEQ ID NO: 9120 - protein, 406 aa, synthetic construct
MPKIKKIEASEQAVRPRKKVAAYARVSKATDQLMHSLSAQISYYSNLIQSNPEWEYAGVYADAGITGTSVDARKEFQRMVADCDAGKIDIVLTKSISRFARNTVDLLDTVRHLKEIGVEVRFERENINTMSGDGELMLTILASFAEAESSSLSRNIKWVIKKKYENGIVHTHQNMLGYRWRGDDLIIKEDEAEVVRRIYSDYIDGKTVGCIQRELAAEGFIGLRGKPVSTPGIIRVLTNEEYTGSMLFHKQYTYAPKKEKYNHGEKAMYRIENHHEPIISSETFELVQKLRAERKKKNTQRSEECACFLGKVVCGECGYRMAPHTAYNRGNRRKRYTFVCNNRHANGKDACDNPWYAKSKLDAACAEVLGQENYEDKFTAEIKELRIYKDHLEFEFKDGRKIKWQK

SEQ ID NO: 9121 - protein, 513 aa, synthetic construct
MLAIAYARYSSSHQREESITAQLRAIHDYARRNDITIIREYTDEAESATTDDRPGFLRMINDVKTGKIKANLLLVHKLDRFARNRYDSAIYRKALSKAGIRLVAVDQPLDDRPESILLESLLEGLAEFYSRNLAREVMKGMKENAYQARFNGGTPPLGFDVIDGHYAINKEEARIVRLIYSTFRQCRNYRIIQDRLNKQGYRTKAGRPFGKNSIYEILRNPRYAGYYVFNRAPTRVDGKRNWHARKREEEIIMIPDAIPAIIPKEEWEEVQKILDGRKMETAPRQRSEVIYILTGKAVCGECGAAMVGDSSRSKSGQVKRYYNCNRKLRTKECDNRQISKRILEEYVLGELEKHFFAPGNKEELAKELVRLAQERDGREAEEEKGLKKELAEVDSKIRSIVTAVENGADWKPFAERMRELSTRKEDIEVRLGSLSRPLKTVTEEKVLKYLSSLKLSSLSVLDDIRKQKLVEEYVHEVKVYRDKIKVILKITLPPGTDKSGAGGLTILYPLPPR

SEQ ID NO: 9122 - protein, 509 aa, synthetic construct
MKKAIAYMRFSSAVQQKGDSLRRQRKLIDDWLVQNPEFTLDTTTYEDLGLSAYKGKHAQSGAFGEFIEAIENGLILPGTVLLVESLDRLSREKIGEATERLKYILKSGVDVITLSDRTHYSEASLDDPYALIKAILISQRANEESELKSSRVKLSWQKKREDAELTGKIMTKACPRWLKVTSDYTQFEVIEAKVRIIQKIFALRKANKSLTAIAKYLNDKSIENLSGKCGEWCPSVIEKLLGNKALIGICRPTYTGRAKGVKEIPEYYPKVLSEEEFYSVQEVRLSPFGFTSHSGNPYLINLLRTVMKCKYCGNTMIITSVSDTIKGYYVCPMRRLHRCSSPAVRREIVDSILIDEILCNLDRLQIETNHQSLQVTLEKKCIELQFQINQFVQALAIAPDVKSLADKIRELDSSLRKNETAIKVLKNKAVFDRDCDVNNLDLSLREDREVCRRLAFKAYKEIKIDTVSLRCDIYFSNGLVFKNFPLSKRCNAKYIISTLKYLDEKTVYF

SEQ ID NO: 9123 - protein, 630 aa, synthetic construct
MRKCFIYHRVSSDQQVEGSGLRRQADLIESYLERTNLCAEMDDPTPVIIAESGGTSAFKGHNMLLSSCLGSWMQEVRLGMWDGSHLVYENGDRFSRQNPFTVVGYINDLVKHKISIHDVTMNIVINHKNSAMLPMVLMNAQRAYDESKFKSDRIRKGWAKKRENAFNNGTIVTNKRPKWIDIIDNKYVLNDKSRIVEEIFRLYQTGIGCPTIAKVLQAKGEEWQFDRPWRGESVHKILRNRRVTGVIFISEIIRDYDSTDNPVDQKRYEMEVYPPVINKEQFELVQKLLKERRPGSGRTNGGIITKRVKDEDGNFLTNENKKQIYINVDSGKDLIKSNIFSGLCRCALCGEPMYHNVIVSTRTPKKSTSSIKDEYRYIRCLGERDNLCTNKALRYETVEQYVIEHVKRLDFAKIVEPNIDNPEAELTRIKIEEEKNHIIEYQLGIERLRNAGKKIPFDALVELEESQTRLSDLEQLQLTYENTHVDTDELKNLDTAILYDIKNIELRSRIERELSKIVDSIILLRNERNYTITFKYRNTDLIKHVLMVEAKKEPVLLAGISIEKVGDMMVYSTPSFMIGHEEGTMPRFQVVKEQPLSQADYLILMNYVESIEDNNIVANWMRDNHNFLFS

SEQ ID NO: 9124 - protein, 581 aa, synthetic construct
MSNNVSDKLSTMKAALYIRVSTHWQIDKDSLPVQREELINYAKYALNINKYEVFEDAGYSAKNTDRPAFQQMMARLRTGEFSHLCVWKIDRISRNLLDFSEMYAELKKLGITFVSKNEQFDTSNAMGEAMLKIILVFAELERNMTSERVSAVMLSRATNGQWNGGKVPYGYDYNKETREFTVNEKEASVIRMIFDIYESQNSLLYTARTLNEKGIFPRSGCAWNPTTISTMLKNPFYTGAYRYNYHDESKGNSNRALLKAPDEWVIIENHHPAIIDKGRQNKVTEILQRNQRSNNRSSKTYIRKNTHIFAGILYCGYCEKQMQSTIDRERNDGYRPSIYACSRKRRFGDCPNKYISDIVVAPFVLNYIANILKAQNNFGKSTAIEVFERKLLRGKTFEEVEHIEPEGLTDMYEMLKRGNLSEAVYTSNRTSSEEDKATADERDILATERRKRERALARLKSLYLYNDDAISEREYLIEKKSLDDGITAINNRLEEIERNSSSHFTLTDDEFMSKASIFIMTHNLQDKRYIEFEKLIRKIDPQIIKEFINTVIQKIVIKNGRVMSIRFKNGLEHKFLYKTEE

SEQ ID NO: 9125 - protein, 554 aa, synthetic construct
MPKKAPKHPAKPKRGKKLEIEEPGVLYGRYSSHNQKDISVEQQFEKGYELAAEYGIRIVDTYADRAVSGRTDKRKDFQRMMSDAAKGKFRYVIAWKSNRMGRNMLEALINETKLQDLGVRVLYVEEDFDDTAAGRFAARSMMNVNQFYSENMAEDIKRGLYDNAANCMVANGHLPYGYKADETLHYALDEPKAAVIREIFARVATGEALVDIMSSLNARGITTSYGRPWGRSSFQKILSNERYRGIYIYGDVRKEGGIPRIVSDELYFKVQEVLTTKKNPQGRHRVNGDYLLTGKLFCGHCKSPMVGVSGTSRTGNLHHYYVCQRRRTEKDCDKKNVRRDDIELQIAEAIKNNALKDEIIKWIADSTMAYNERKEAESKVGILEDQLAGTERSIKNVMAAIEQGIITATTKDRLVELESERAAIQAKIAAARADIVTISRDDLISGLEMFREGDVHDKKYQARLFDTFLVAVYLYDDDMKIVFSFSGDKNTIWIPLNQSIDNIENCAESSYKLCLGPPKQYNPNLLPIGHGFGFIVSITDTKIFPLKNGSNYVF

SEQ ID NO: 9126 - protein, 463 aa, synthetic construct
MARSVTVIPARNRQASGHRTAPQKKIRVAAYCRVSTDQEDQLHSFEAQVDYYTKYINDHENYEMAGIYADEGISGTNTKKREQFKRMIADCEKGKIDLVITKSISRFARNTQDCLMYSRKLKNLGIGIIFEKENINTLDSTGELLFTILSSLAQDESRNISENCKWGIRTKFKNGEMHLNTFKFLGYDKDENGKLIINREQAKTVRRIYRDFLWGLNPAQIAKELEEEQVPGCLGQTKWYASTVVGILKQEKHMGDALLQKTYTADFLTKRQVKNNGEVAQVYVKDSHKGIIDKETWNAVQEEFDRREKFMQRHGTDRYSYGSECYPFCEKIFCGECGSLFTRHSWKSRGIVQWQCKNHRKDGKVACTNAYVDNADLEKGFVKAFNRLVSEREKHMERWNAMKAEGTPLEKIRAVQMMEATENGQLQKYVPEAAQLVLEEITIFGAKKYEFAFLEGSRVKVSV

SEQ ID NO: 9127 - protein, 501 aa, synthetic construct
MEIQIREGSREQKRKLKVCAYCRVSTDADEQENSLENQVRHYETVIKANPDYEYAGVYSDFAISGFKEKRPGLQKMLADAEKGKIDLILTKSVSRFARNTSIVLEATRKLKELNVGVFFELQNINTLSGEGELMLTILAAFAQAESESGSVGAKMVYQRKYEAGIPVQYLERSFGFTKDERGIFVADEAEAVWVRKIYEMAADGYTPAAIKRYLNENGVKTVGGAEWIDSTVFRLIENEIYKGDYIMHKHFVNEERKLVRNRGEVDAWYIEDDHEAIVSPELWQRAQDALEAKRDYLAEGSVIEEFTEENYPYMNKIYCAKCGHPLYKRIYSKGNRLNWGCSGTKRYGKSFCDGINIPDGVLRSAWHFEENTYIDEKASDKGVKEFSYLKERSWKRRHKKKQPPTIPENTEAEYPYREKIYCALCGSRLVRHVDTKSHKVTWVCNGRKRKGKDFCDGTRVPDTILKGWGEIKKDIYIQRKEDRNGKKRYSYTSKKPSGIGA

SEQ ID NO: 9128 - protein, 509 aa, synthetic construct
MKIAIYSRKSKETDTGESIKNQINMCKDYFTRQFDDCIFETFEDEGFSGGNINRPSFQRMMQLAKHKQFDVVTCYKIDRISRNTLDFLTVFEELKSYGVKLVSVTEGFDPSTPAGKMMMSMISSMAEMERMNIAQRVKDNMLELGKMGRWSGGTPPTGYRSVSVVNESGKKETYLELIPEYIDKLNLIFNMIAEGYTPGQVSKKIGLPNRTISNILTNPVHLAATEESKSYLESIGYKVYGELNGKGFMPYNRRPRVNGKALWNSKDMFVSTSKHEVAVEPTIWIKANQVFKSRGAEARPRISPNSFLSHMVKCKCGSGMFVFPGNPNKYGEVKYYFRCSDKKYKKTNCDIKWLPVELVEEYFLKTLQGISLDKSILYSYLTSNEDINYDNLIKDVKKDINKRNKDIESLTEKLIFIEGPAIEIVTNKINNISNEISVLNEELLALERKKIFQDQDKINIDTLYELIVITISEFDTLSVEKQQVKIKSFLKEIIYHGGDDIEIVFLGGV

SEQ ID NO: 9129 - protein, 504 aa, synthetic construct
MKRAVIYARYSSDAQKETSIDDQIRDCKKYAADNDYHIIHIYRDDCVSGKTDNRAQFQKMLTDSSSELFETVIVWKLDRFARNRNESAINKVKLKKNGVKVVSAMEHIPDGPEGIILESVLEGMAEYYIYDLMEKTTRGRIGVALQCKHTGGRPLLGYRVNPDKTYSIDEYNAETIRQIFHMYANGSSFSEIIDEMNRQGRKTAAGNSFGKNSIHELLRNERFIGIFTYNKIPSENGKRNSHASKPQDKVIRIPNGIPAIVSKDEWNAVQERMQKNKHAQARHKAKIEYLLSGKIFCGECGGAMVGQSSGNHEKYSYYECSTKKRLRTCSKSNVKKETIENAVINCTIEYILSKKFREALVDLILQQDDERQKNVQLITGLKEKIKQNQNEKGNIIKAIEAGIFTRTTKDELEKLEKESDLLDSQLLEAETMHSPTYTKEAVSAWLDKIATKSKKSESGNKYLLYSFVHAVYVYEDNTVKVIYNLGDKEQRVTLSDLNGAGDRT

SEQ ID NO: 9130 - protein, 521 aa, synthetic construct
MNESLEENNATYVAAYVRVSTDEQAEKGTGIVTQKKTIEGFCERAKLRIYDFYEDERSGASLERPGLRRLLEDAEKGKFKVVLVYKTDRLSRSIKDIVRLVLDDFERLGLTFKSATEPYDTSTAAGRMFFVQLGGFADFERELIRERTRSGKLNTALKGKWVGSILPFGYKKDSEGYLVPDHEEVEIYKKIVSWCLEGNSTLKIARKLNELGIPTERSKHSSRAKNFKWKPGTVYRILTNPLYKGCFKYRGHEIKVPALISEQDFELVKKQLDSNYNNAGRNNKVHFYLLRGLLYCKKCERKLFGYIKPSRGMRVYCCLSKRADPDPRFCGLKNVNIDKLNNAVWENVKEMLKNSQKLREAIKRHRNSAIVDRAILEAKLKKINRDIEANKQETDATLDLYIKAKKLTVEQLDERIGKIKEERDELLKRRESILERIAKAKEAKTTLEKVERFASEISKNLDSYTEQEKYDLLHTIVSKIIVDYDADTDMHSIEIEGMIPVFEEKAQKEESPIASMQRILP

SEQ ID NO: 9131 - protein, 552 aa, synthetic construct
MPSILTTSSKLHSPATRAVIYARVSSTKQTKAGDGLNSQVTRCEEFARHKGYSIVRVFQDDISGSLIDRPGMADMLRFLSDHRDDPHVVLIDDLSRLARGLDAHIALRRAISEAGGLLESPSIEFGEDSDSQLVENLLAVVSQHQRQKNGEQTKNRMRARVMNGYWPFRVPMGYRHERVSGQGKMMIRHEPLASIIQTCLEGYAVGRFETQAEVHRYLESLPHFPRDSRGIIRYQRVKEMLTNPLYAGMVEAPNWDVSLREGKHEGLVSFTTFKKIQDRLAAKPVAPVRDTVYKDFALRGFVECGDCGQPLTACWAKGRSKKYPYYHCYNPKCTSYGKSIKRDMLEGEVEEVIQSLQPSPALVKCGFAMFKDLWDQRRSQAKTLIAEGKTEIKRIEKDIDDLVARIVESSSKHVIKAYEKRIAALEAEKLLLQEKAHRAAKPSKPFEECFRTALDFLLNPVKPWDSGDPALRHIVLKLAFAGPIIYDRGKGVRTATPSLPFQVIKSLKGDSEGLHDPENNMAHPRGFEPLTSAFGAGLRAYPNCTIGHARAR

SEQ ID NO: 9132 - protein, 544 aa, synthetic construct
MSKKKPSRPKPRTAKKLAAIYCRVSTFDQNRGDYSSLEDQEQRLRRAAKEDGYEVFQVFKEVASSANLDREELGKMLGKLDKIDAVYVTKLDRLSRSMSDWCRINELLEENDCALVSVTQKIDTTTTMGRFFRDLLMLFAQFEREMIAERTYEKMAEQAKKGRWSGGHPILGYDAVEKKLIVNKEQAKLVQTLFDKYLEVASIARTARWANDNGHRTKAVRYSNGREVKPRKFTRADIQRMLSNITYIGKVRFDEMEFDGEHEGIIDEKKFIEVQKLMDARKEKPRRGDQSQQDTLLLGLLRCGYCGCAYTTSFVNKKKKDGSTQRYYYYKCTTKSKKDAAACCGADLKAETIDDAIVEYIQDLAKKPKHLAAVIASATEANRAGVKSLESERTKLSKELSKLEKNSVALVDRLADPALQAITAIADRLAALEKDQQSLKSRITELTLQIRDRRDGDISTEEVQAAYEDFAGLWKELDFDERQYALRLLIKQIQLKFKKKEPSGEIEIEAWGQRPVPLGVSIARSRNGKLRNRDGRLPRQDSNL

SEQ ID NO: 9133 - protein, 500 aa, synthetic construct
MNVVVWARVSSREQREGYSIDAQLRATREKAEREGWHVAREFDVAESARRGAERLAFNEMLKWVRAHARREKITAILSHKLDRVCRNMRDAVRLQELEDSCGVHLAFVENQFGPGAAGALSFNVMAAVAQYYSDNLRSEVLKGMDEKVRQGWPTGLAPYGYINVQDDDEEPVQPHPEKSKTVIRIFELYACGDLTFQSLADALQREGHIYRPSQPRFTRTALSYVLNNRFYIGELLRNGQTFTGSYQRLITRDLFEACQDVLHGRNRRTGKPQIPLAGGLMRCAHCGFAVTGERIRRKLKDGSINEHLYYRCGNNHPETGHPRVRWRAEDIEIAIADELATLRIEPAEVRDLFRKTLAAAFDDISSQQRRQTTALTKRHSELTGMQDRLLNAYLAGTVAEGQYRDKAQDLRSELAGVTEARERVGRIDAGDKEMAFAVFDWCQSADEHWRRSNSAVRRRILDSVSLNRTLSDTNLCITKRKPFDLLIEGLDSERSRGDRI

SEQ ID NO: 9134 - protein, 520 aa, synthetic construct
MKKVTKIMPNATASSEKPKLRVAAYCRVSTDTDGQLESLETQIKHYETSIRANPEWEYAGIYYDEGISGTKTEKRRELLRMIADCENGNIDFIVTKSISRFARNTADCLELVRKLQNLGIFIFFEKENINTGEMENELMLSILSGLAENESVSIAENNKWSVRRRFQNGTYKISCPPYGYDSLDGKLVINEAEADIVRFIFAEILSGKGCGKVAKELNLRGLKGKLGGQWKSSTIRGMAYNEKYIGDALFQKTYTDEHFNHRRNNGEKEQYLIQNHHEPIVSREDFEAAQAVIAQRAREKGIEKRDGKSQNRYPFSGKIICGNCGGTFKHRIHASGKHRIAWCCTTHLADIAECPVKYIPDSALEVAFVTMMNKLIFGHQTVLRPLLVSLRGINSDSSLKSIGELDKKLEDNTEQRKVLVGLLTKGYLEPAVYNKGNNELLQEAELIQRQKESLLRFMNSDSRSLSEVSAILQYATKATLLKGFDGELFTRFVERIHVYSRTEIGFELKCGITLKERLVI

SEQ ID NO: 9135 - protein, 574 aa, synthetic construct
MQNKTVRIIQPKVHVNLDDLSRPILKKRVCAYVRVSTDNLEQKTSYEAQREEYTKRISENPDWEFCGIYADEGISGTSTKNRKQFNLMIARAKKGELDIILTKSISRFARNTVDALNFIRELRKVKVEIFFEKENLSSIDPKVEFFFTMMASMAQEEARNVSENVKWNVQRRFREGVPIINHARFLGYTKEKRGGNLVIEPKEAEIVKLIFNLYIGGLGPSAIAERMMELKYKTGAGKSLWRVSTVASVLKNEKYMGNMLQQKTVSTDYLNHTRVKNKNHAPTYYTENSHDAIINKETFDLAQHIRKERAQVRVGENKNLSKYTNKYPFSAMIICSECGRTLKRRYWNYGSKSQRVMQQCGNYIDGKAHCNAKASYQEVLEGTTIQMLNEVFLKDLNIMDTIKNVIKSTLVMDDLQNEIDGMNLELQETENMLSNLIDTRVKTPGFSESIFTNKYNEYTSKMNYLSKEISKLELELEHVKTFDTKQRLDTINTLLKNRDLVIDTLDSDILGSFIYKMISVNPGEVVFCVAGTKNYSDTEFSDNRKKFLKLKPIYTGAYYNKKYDKSMDYRVVII

SEQ ID NO: 9136 - protein, 572 aa, synthetic construct
MQNKQVRVIQPKPVFDLSGTLPKNLKKRVCAYVRVSTDNEEQKTSYIAQTDEYTERIQNNPEWTFCGIYADEGISGTSTKHRKQFNNMMDAAKRGEIDLIMTKSISRFARNTVDCLNYIREMRAINVEIFFEKENIYSSDPKVDFLLTIMSSIAQEEARNVSENVKWNVQKRFNNSVPIVNHNRFLGYTKDKRGGNLIVVPEEAKIVREIFQMYVSGIGPMKIAKHMESLGATTGAGATKWSMSTVAVILKNEKYIGDLVQQKTLTVDYLSHKKVKNKELAPMYHTENAHEAIIDRETFLLAQRIREDRSKVKVGKDKNLAKYNVTYPFSAFIVCSECGRTLKRRYWNYGTPAQRVMQQCGGYIDGKAHCKAKATYQEMIEGATVKMLNEVFLQERDIIPNIQKIIKSTIRISDVEIKIQKLQTQGDELERMISNLIDVQVKNPNLSQEDFNSKYQSLTLQLHNNKTEIRKLEGEYLTNYDTRSRLAKIETTLNNLLEPIQEVDSDTLRSFIYKIISVTPENIVFCVAGTKNYTDKEFSENRHTFEALKPLATGTYHNEKYDKIMNYKVVII

SEQ ID NO: 9137 - protein, 565 aa, synthetic construct
MHAYVEIIEPKPKFKNSETDQIVRKKRVAAYARVSTDETDQLHSYQNQIEEFTTRIQKNDEWDFAGMFCDEGITGTDMKKRPGFLQMIEAAKNGHIDLILTKSISRFSRNTIDILTVIKELRTLGVEIYFEKESISSSDPKIDFILTIMSSMAQEESRSISENTKWGIQKRFQNGKLLMTTKWFLGFDKDDKGNLVINEEQAKTVRYIFDCYLRGMNTNALANHLIENKIVNGRGNVTWYADTVKEILKNEKYVGDLMLQKTVTLDYLSHKTIDNDGHATKYYIKDAHEPIIDRETFDIVQTMLHAREIVLLENNMERFKHLAQKPIKGLVYCSRCKRMYRSKMHNSGTTFKKSMLKCHTEINNPHNCDNPSIHEPLIERGTLHVIEALTKTDRMQEDIMSYMTQILEKTNSHEPLKALRQESRMIANALKALPKQRLHSTMTDSEYNIEYKRLNTLYEEIKVKIEDLKQKITKEHLMRRRYYALNAFIDTNYQDVSIIKSFFGLILMMGKNHVRYVIDDTFSIIDDLHQDIDKIIKLPTILKGTYFDSQTKENLYYEVIIYERN

SEQ ID NO: 9138 - protein, 484 aa, synthetic construct
MQAPKQQIKSACAYIRVSTEQQEELSPDSQRRLLKEYAEKNNMIVTKFYEDLGISGRKADKRPEFQNMISDCKSKDHPYDVVLVWKFSRFARNQEESILYKSLLNKAKIEVVSVSESVPDGMVGGLVERIFEWMDEYYSINLSGEAKRGWEEKRLKGGYPASCPYGYDYVKGGIPKINEEEIKIVRKIFDMYLYDDRSASYITKWLNQNGHRTKFGRTWDNRYLIDLLVNPFFAGKIRWKAFDENKHLKPISEWIIMDGVHDAIITMEEFEEAYKKRIACGALKRRGANGCKNWLSGMVKCSHCGATLIYCKESKHNYSYFRCKGYINGLCSHANYVTENKLTEDIVAGLKNISGLNNEICFKTKSEYHNNDIDSISKQIGEIDKKLKRVRNAFVNGIDTIEEYKASKEKLEAEKKDLEKYLTKSTSPTKTDKKKMLSNIEKVINIITDDESDMFRKSQAIQSICEKIVYSKEADEIDFFFYLS

SEQ ID NO: 9139 - protein, 643 aa, synthetic construct
MKGAMSLKKAALYVRVSTLHQIDKDSLPFQRQELENYAKYALNIEEVVIFEDAGYSAKNTDRPKYQEMMKRIRSGEFTHLLVWKIDRISRNLKDFSEMYEELKDCKVTFVSKNEQFDTSTAMGEAMLKIILVFAELERKLTAERVFSIMLSRAEKGLWNGATVPFGYVWSEEEKFPVIDPDESKIIQYIYNSYESLRSTLKVAYSLHEKRIATKRNGQWTAKTVRDILRNPFYIGTYRYNMRESGGSRRLKNKEEWVVVDNNHPGIIEKEQFDRVNKLLSDNYRGLTDVQRADIHKHIFSKMLYCGKCNSLLTAGLDAARKDGYRPSRYTCVTSGGAKRCSNYVSDIIIGPFIFNYVSNLIRLQERITPKHSLRDMESALLRGNSFIDVVGVDNESLKETYFALTGNMSGQDYSLNTKDEIQIPNIEIERLQKEKAKFVRALKRLEDLYYFGEEEDAISQKDYIFKKRDLQERLEEIDDEINILKQKNDDKTSDVFIDYAQHFLITKEMQQARQVDYRELSEIVGREALSDFMQTIIDNIVVIDKRVQSITFKNGITHTFAYRSLLQSKSSAQTKKQYKNYEGPVLEYLKENGPASRSDLQKATNITRDGIFTLLSELIERGIVIKTGQSTATRYHYNEKQNN

SEQ ID NO: 9140 - protein, 550 aa, synthetic construct
MKIAIYARKSKYSPTGESVENQIQLCKEYLQAKYKSETLEINEYKDEGYSGGNTNRPDFKKLIAKIEDYDMLICYRLDRISRNVADFSSTLTLLQNNKCDFVSIKEQFDTTSPMGRAMIYISSVFAQLERETIAERIRDNMMELAKMGRWLGGTIPMGFDSEPITFIDENMKERSMTKLIPNVEELKVIELIYEKYLQLGSMGKVVTYLLQNNIKTKKGKDFTLGSIKLILTNPIYVKANKEVVNHLKTQGITVCGDVDGKKALLTYNKTTGISNDVGTKTMVKDKSEWIAAVANHKGIIPAHKWLQAQNIKDKNKDSFPALGRSNTTIASRVLRCDKCESTMGVSHGHVNPSTGNKHYYYNCTLKKRSKGVRCDNKPAKAAEVDEAILITLENMFKTKSSIIDNLKAKNKTRRIEMISSNRVDVINKIIEDKTKQIDNLVNKLSLDDDLTDILFKKIKGLKAEIKELEDELLTLTSENIKLNEDEVVLDFTEKLLEKCSIIRTLDILEQQQIVDALIPLVTWNGDTEVLNIYPLGSPELELKEAESKKK

SEQ ID NO: 9141 - protein, 412 aa, synthetic construct
MVVTLIPKQQSPKKKRVCAYIRVSSDSESQTMSLENQKAYFEKLYCENAEFVGIYYDQGISGTKESRPGFQAMLAACFDGKIDLIHTKSVSRFARNTELLLETSRKLRNLNVDIYFEEQNIHTLSSEGEVMLSVLASVAEEELASMSSNQRWAYQKKFSRGEVLLNTKRFLGYELSDGDELVINPSEALIVKRIFHLYLSGLGTHRIAKLLNEESVPTATGANWHSSTVASILRNEKYKGSLLLQKTFRDGINGPVRKNNGNLQQYHIEDNHPPIISATEWEQVQELLNSKSIKGKSYQNRYPFSGLLKCCHCGSTLKRQISYKGKIIWSCSRYIREGKKVCQGMRVPESEMKDWVIDKPTIIREEVRIDGKKHYSYSSQVTGNSSRGQTTEDSSGGLLPSVNRTRRTAIKL

SEQ ID NO: 9142 - protein, 434 aa, synthetic construct
MAAYCRVSTELEEQQSSYENQVRYYSDFIQSNPTFELIDIYADEGLSGTSTKKRSEFNRMIKDCKEGKIDRIFVKSISRFARNTLDCIRFVRELKELGVGITFEKENIDSLDAKGEVLLTILSSLAQDESRSISENATWGIRKRFERGINRQNTTKFMGYDKDEDGNLIINEEQAKVVRRIFQMFLMGQTPESIARRLNNEGVAGWSGRANWYPSSIQKMLHNERYKGDLLLQKTVTVDFLNKKRTENNGYANQYYVEGNHEPIIEPWIWDAAQLEFERREAFKKTHEIKNYAQNIESNPFSSKVFCGVCGSAFARKHWATTQGKRSVWQCSSRYKKKGVVGCTNSHIDEETLQKAFLMGMLELSNHQQECELKWLKLIEEGNPLERYKATLLQEALADVSRGFNPDLMVGLLEKIVVGEQVVVRFVDGTEVAL

SEQ ID NO: 9143 - protein, 520 aa, synthetic construct
MTEKNIMVIPARKRVGSTAAKEKIKKLRVAAYCRVSTETEEQNSSYEVQVAHYTEFIKKNNEWEFAGIFADDGISGTNTKKRDEFNRMIAECMDGNIDMVITKSISRFARNTLDCLQYIRQLKDKNISVYFEKENINTMDAKGEVLLTIMASLAQQESQSLSQNVKLGLQYRYQQGKVQVNHKRFMGYSKDEDGNLIIVPEEAEIIKRIYREYLEGQSLVGIGRGLEKDGILTAAGKPRWRPESVKKILQNEKYIGDALLQKTVTVDFLTKKRVKNEGHLPQYYVENSHEAIIPKELFLQVQEEIHRRSNIYTGEGKSKRTYSSKYALSAITFCGDCGDIYRRTYWNIHGRKEFVWRCVTRIEQGPEVCKNRTVKEDELYGAVMTAINKLLAGGNNMIKTLEENIHAVIGETTEYQISEINNLLEEKQKELIKLANKGQDYEYLADEIDELRDKRQTFLVEDASLSGENERIGELIEFIRNNKFRTLEYDDKLVRKIIQSVTVYEDHFIITFKSGIELEV

SEQ ID NO: 9144 - protein, 551 aa, synthetic construct
MSNAEREIIVIPASESLSLQGRRNRQMRVASYSRVSTDFEEQLTSFHAQKSYYTDLIMRTPQWTLAGTYADEGISGASAEKRPDFMKMIRHCKKGKIDLIITKSISRFARNTLDSIGYVRKLKAMGVGVIFEKENINTLEENSEVVLTILASLAQEELNSLSLNVKMGKRMAMQEGKVFFQYEKCYAYKKGTDGQPEVIPEEAGIIKRIYTAYLAGESIGAIAKALYADGIKSHAKSGEWTESTLRGILQNERYCGDVLLQKTYVTDPISKKVKKNNGELPKILIKNNHPAIVSREIYDRVQQERSRRGSKRKVSKASVTEQSKYSAKYALSELLICGECLTPYKRTTWTKRSGEKQIVWRCISRLDYGTKYCKDSVTIDESSLHEAIMQAINATRGSRHEMIPYLTAQLTQTFRDNAKGSVDVEQIENRIAELKAQTMELVAQSIGNNTVGENEGRLRAMSDEIKALCDMLTEYRQSCNMENTIENRLAVITEILENEPEQSDIYNDTLVRQLIDTIKVMGEDRLEIIFKCGLNYEQSIFPKVKKLNTAS

SEQ ID NO: 9145 - protein, 465 aa, synthetic construct
MIKDQEPQKLLHVAVYVRVSSDEQAERGDSIRDQKERAVKYIDDHKNMVLQDIYLDDGVSGQKIERDDFTRLISNVKDGKIDLIIFTKLDRWFRSLRHYLNTQAVLEKYNAAWTAIDQPYFDTSTPYGRAFVAQSMTWAELEAQNGGLRVADVFRSKVKHGEVITGKVPRGYKIVDKHMVLSDEAPAMYDSIMYFVKNQSLHKTIRYMKETHGITMTLQNFKQSVLRNKKIIGHYRDNENYCPRLISNDVFEEIQGILDRNTNIRSNQRYPYIFSGLLVCDECGYKMGGCHINVVVKKKSGLVFRYKYPAYECKQYRSYKKCDNGGEIREARIEEYLLKNVRDLLNLKVTSYGTGIQPIIDNRIKKNQLRKKIARLKDLYLEEAITIEEYKIDRNKFESQLAELPDIEQPNDNLDGIKKLLETNFEDIYLTLDNHQKRLFWRSILKEIRISKSTDRNRKYTLVFL

SEQ ID NO: 9146 - protein, 606 aa, synthetic construct
MQEVEVIKARNVSSKQTRGKFLERQRVAAYCRVSTDSEDQLNSYKSQKAYYTDLIKKNKEWVFVDIYADEAITGTQVTKREEFQRMINDCMNGDIDMVITKSISRFARNTLDTLKYVRMLKEKNIAVYFEDEKINTLTMDGELLLVVLSSVAQQEVENISANVKKGLKMKMKRGELVGFQGCLGYDYNKEDKTITVNEKEAEIVRYIFNRYIEGAGGSVIGQELENLGYVTKYGSSTWAPSTILGIVKNEKYKGDLLLGKTFTVDPISKRRLDNMGEEDQFYIREHHEPIISEEVFEKAQEILNRRNKNRGNIGDGKREKYSRKYAFSCMLECGFCGSTLSRRSWHSGSEYNKVIWQCVAATKKGKKFCPDSKGIPEQAIEEAFLESYRLLCDDNKDILDEFLQRMDDTLSSSTVNKQLSKLDKEIESIERKKSKLVDMRLEDTLDKVSYEAKYSSFTEKQEQLLKDREKLQETAANEKDIKRRLRDFKKTLEQNEVLSEFDRYVFESIVEKVIVGGYDKDGNKDPAQLTFVYKTGLKNNVDGSRFKPQRKNARGRHRTAELCSDDKNEVQSLSSLSSSDTCGDVRTFVPQKFVNISTVFINRKIE

SEQ ID NO: 9147 - protein, 530 aa, synthetic construct
MLDLSGTYYMYLRKSREDRDAEAHGEGETLARHENRLKELAEQLGITISHVYREVVSGETIAARPEMMQLISDIENNRPDGVLVIELERLARGDTRDQGLIMETFKYGNTKIITPMKTYDPNDEFDEEYAEFGLFMSRREYKVINRRLQNGRRASVKEGKWTGNVAPYGYERIKLLHEKGFTLKPLPEESKIVQFVFQLFTTGTPESDHIPLGTTQIAHLLDDMKIPPRKSDHWETSVIRGMLRNYVYIGKLETGKRKQIKIIENGVPKRSRPINADCEIFDALHPPIIEESVFYTAQKKLKANFRPPTFSTTKSPLAGLIYCSECKMSMYRRPPGSKNPTETILCKTHNCPTVGSFYYLVEERLLQFLERYLKDYKIVVQNEDSGDWTDVIDRKISVLDGYQNEASILAKQLEMVYDYFEQQVYSLDLFRKRCNELTRKIDENNKLMETIQSEIIEARNRIAKKEEFIPYFEEILRSYTETEDPLKKNILLKQVIDHVYYTKIKKGNRLGQGNDLFILDVYLKLPYKDL

SEQ ID NO: 9148 - protein, 527 aa, synthetic construct
MRYFLYARKSTLDREKQVQSIESQVNELTELAGKNGWEIHEIIKETGSAKRPGRPKFNRMLAEIEKGTAQGILCWKLDRLARNPLDGGRIIQMLQDKQLKEIRTHFQTHRPEDHTIPISVELSMSTQYSRDLSENVKRGNRTKIAKGWMPGNVPVGYLNKLTENREDRTILTDPVRFDIIKKSWHRLLYERYNLNQVYNMALKDGLVSKRGLKYSKGCFYQLFKNPFYYGYFYFGDKSTLHHGAHQPMITRQEFELAQDIIHGREKPKQRKNKFDYTGLFRCAKCGSMVVGYLRERLQKNGNYHRYVYYRCTKHRDPKCDELQVKEEQMNLDTYRILEQLEIPTDFRQWAMEVLKQETSHDQELEDSQLQKRKVAIENCRKKMDKLLDLHLAGTIDQDSFSAKQKEIQKELSRLEGVLEKSSSGDDSWYKMAEQMLTFAELAKLRYQTGSQEAKRSIIGNIGLNLLISDRRPAITLLPPFEELKKIAPEARELSKSFEPVQGVAKQRVYADKYHRSSLWWAIQDLNL

SEQ ID NO: 9149 - protein, 544 aa, synthetic construct
MVNNLGKAAIYARVSSERQAEKDLSIPAQIKALRKYALERGWDVVIEYVDEAESARTANRPAFKEMIAMAKKKEKPFDTILVWKLSRFARNREDSILYKSLLRKRGISVISINEQVDESPAGHLLEGIIEVIDEFYSINLSQDTVRGMKENASRGFYNGGFTPFGYKRTKIKIGMADKTKLIPDENESNVVKKIFEMAVGGQGGKEITKALNAAGTRTKLGKQFSTTAINHILRNEVYTGALVWRFRNNGYGNSHKAASNDIIRVPNCHEAVVSTEDFGRVQQLLTRRRPVSQHPRTISSQYLLSGLLHCGKCGAAMSGCWAKSGKYFYYDCVQHQKKGKEVCNCRLMSKDKLESFVLERIRENILTDENIKQLVQLVNEELVKNSGFFEEQLSEVGQQLGQVQSKLSKLYAALETGKIDLEDLAPRIKELRSQQKELEEKRNGLLDEMNEESPQALNLKTIQEYVSSMKALLASSSFIEQKSFLRSFVKRIELNEPQVVIDYTMPLPINGLTTTEEVLRIDRFGSRGRTRTYDQAVNSRPLYH

SEQ ID NO: 9150 - protein, 538 aa, synthetic construct
MKVALYARVSSEAQDVELSIAAQLRALRDYAGKNNYQITYEFIDEAESGRTAARPEFKRMIAMSKSSIPPFEAILVWKLNRFARNRADSITYKLLLQKKGIKVISINEPLDDSPTGKLMEGIIESLDEFYSANLGQDIKRGMKENALRGFYNGSQPPLGYELVKVKDGPKQRNKLAPEADTSPGVKTVRYIFALADKGKGCKEIANILNREEYITKAGKPWGRTTVHKILCNEAYTGTLVWGARPSQGLAKNEEAVRLENAWPGIIDKETFQRIQQSMVSRQPKNTHPRTVPSQYLLSGMAFCSCGAALTGHSAKSGQYAYYQCNRKFKQGNGVCNCQAIPKTKLESAVIKQIKSKVLTEENLEELVKQVNEELESTSSHHKEKLAVLDAELDDIRQRLNRLYEAIESGKLNYDDLAPRIRELRERQSKLEKSRVLAEAEMVADSDDNFNLGMVKAYANDLKQLLNESEITDCKTFLKTFVKKIETDSRNVSLKYTLPLPGTNRRREVLPIDTFGGAGGIRTLYLLTASYGSSKQPMH

SEQ ID NO: 9151 - protein, 529 aa, synthetic construct
MDRGYCMYLRKSRADEEAEARGEEETLKRHERILLALSRKMNIVISKIYREVVSGETIAERPEIQNLLRDVEQGLWKGVFVVEVERLARGDTIDQGIVAQTFKYSDTTIITPMKTYDPNDEFDEEYFEFGLFMSRREYKTINRRLQRGRISSVKEGKYVGNIPPFGYVRKKLEKDKGFTLEPHPEQAPVVKLIFELYTKGEKLSDGSFKRLGVSLIVRKLNDLKVPTAKGGDWVPATIQGILQNPVYIGKVRWNSRPMVKKMVEGKIVKSRPRAKPEDWILADGLHEAIIDDKTFELAQYYINQNPTHPVPRRYIVKNPLSGLIVCGKCGRKMVRRPHGDKYPDTLMCPVTSCDNISSQLSFVEDKLLKALEEWLKKYKLDLRGVEKNNNNENLETKLINKSLDSINKELETLKTQFNNLHDLLEQEVYSVDTFLERSKTLNERITITNKHKKELEVQLKTISAQHTAKEKVIPKIEKILELYHHLKTPSKKNELLKEVLDKVIYIKTVNGRWHGKPDDFTLELYPKLP

SEQ ID NO: 9152 - protein, 430 aa, synthetic construct
MENSQIKRIEFVPRGIIGGKRVAAYARVSSGKDAMLQSLSAQVSYYSDLIQKHCGWEYMGVYADEAKTGTKDSRESFQALLTDCRAGKIDMVITKSISRFARNTVTLLETVRELKKLGIDVWFEEQNIHSMSTDGELMLTILASYAQEESLSVSENQKWRVRKNFEEGKPWDCTMLGYRANNGILEIVPEEAQTVKLIFKMYLDGFGTPAIANRLNEMFIPTRMNKSWCQATIGKMLRNEKYAGDLLLQKTFRADHLSKRTVVNNGELPQFFVSEAHEPIIDRATFDAVQVEIERRATTANVKQGKATAFTGKLRCGICGKNYRRKTTPTGIVWICSTFNTRGKKYCASKQIPEETFKAECADALDIEAFNETTFTERIDYITVQPENTLEFHFNDGGTATTKWKDRSRRESWTNDKRQKAREKATRRRE

SEQ ID NO: 9153 - protein, 526 aa, synthetic construct
MMARTITKIPASITSRFSNLAVSVPKQRNVAGYARVSTEKEEQQSSYEAQVDYYTKYIKERPDWNFIAVYTDEGISATNTKKRDGFNQMIQDALDGKIDLIITKSVSRFARNTVDSLTAVRKLKAENIEIYFEKENIWTFDSKGELLITIMSSLAQEESRSISENVTWGWRKRIADGKVSMSYGQFLGYEKGADGTPQIVEEEAEIVRLIYTLFLQGKTPTTIAKQLTAKGIPTPGGKEHWQCNVVESILTNEKYKGDALLQKTFTTDFLTKKMKPNEGEVPQFYVTDSHDGIIDAEMFDYVQVEFARRKALGRSYSCKSCFSAKLVCGDCGSFFGSKVWHSTDKYRRVIWQCNHKFKNGERCSTPHLTEDEIKERFVTAWNGMQNMTDEVIIDCWLAIAELFDSDAIDEEIAAKNAEAEVLIEMNRKHIAENASAAQDQTAYKKRQDDLMAKYNAVAKRIDVLKAEKETRNHQRTVLTAFMDTMERQHGSLTEFSESLWSAVVEKATVYKDGRIVFTLMNGIEIE

SEQ ID NO: 9154 - protein, 424 aa, synthetic construct
MTDTKYCLYARKSTESDETQALSIDSQIKEMLELAKRDNLNVIEIKQEKHSAKEVGQRPVFNEVIKEIREEKFNGILTWAPDRIARNAGDLGTVVDMMDNGKLKEIRTYGQSFGNSPNDKFLLMILGSQAKLENDNKSVNVKRGMKAKCAMGWRPGMAPLGYLTNREGIKGQRKIFIDTVRSPIIKQMFEKTAFEKYSGRKLYNWLISINFATRTGKRVTLSSVYTILKNSFYYGKFEYPVGSGSWYDGLHEPIITKDLFDKVQEQITSQNARCEDKEFAFTRLMKCGLCGSGITGEEKHRKLKNGSFNVHVYYGCTRYNDTYCKCGYIREEDLIEQLSGMMDELIMDGSEVKQKIECEIKRYKKFRYGVLGLKESNEKIEETLDHKKYARYILSQGTIEEKRELISFLKGKIFIANGKVSIGD

SEQ ID NO: 9155 - protein, 528 aa, synthetic construct
METTVKIIPATLPMHVSSKAQLPGKRKTAAYARVSTDSDEQQTSYAAQVDYYTKYINERPDWEYAGVYTDEGVSGLSIKKRDGFNRMIADALAGKIDLILTKSVSRFARNTVDCLTSVRKLKEKGIEVFFEKENIYTLDGKGELLLSLLSSLAQSESANIGQNTAWGLRKRFADGKVSMAYTHFLGYERGEDERPRIVESEAKTVRLIYRLFMEGRTPSSIARRLTGMGIPTPGGKEEWYNSTVESILTNEKYKGDAILQKSFTVDFLTKQTRVNRGELPQYIVQNSHPAIIDPAEFNAVQAEMERRKNLGRPSACNSPLSTRIVCGDCGGFYGAKVWGSNTKYRKVIWRCNEKYRREEKCATPHVLEEDMKRKFVAAFNSVLAYREELADNCRLAQKALCDCSGLDAEIGALSQETVVLAELVRNSIRSAASAGSAEDGIADKNAPYLERHAIALKHLHELESLRREKQNRKILLDSFIRNIEDRGECLDAFDERLWAAVTESVTVMKDGALVFRFKDGTDITIGED

SEQ ID NO: 9156 - protein, 435 aa, synthetic construct
MDNKIVWKKEAVAVMPTLKKAAAYARVSTGKGEMIHSLAAQVDYYRDYIRRQPGWVFVGVYSDEAMTGTKNNRPQFRQMIEDCRNGRIDIVITKAVSRFARNTVDLLETVRELKSYDVDVFFEEQNIHTMSAEGELMLTIIASCAEEESLSASENCKWRIKKNFQHGIPQSVSLMGYQVRKGQFRVIPEEAAVVRMIFQDYLDGMGINAIQRKLAALNIRSKQGKDWHQSIIAQMLCNEKYAGDLMMQKYIRPDHLTKIDYVNKGRAARYFVQDHHEAIIDRETFDAVQGLLEKRQRHNEPSEKGMVNPFTGKVVCENCKKHYRRKTINGKKSWQCGTFLKLGKAYCPAKQVPEEVLMNVCSEVLGLTEFDPLVFDKRIKEIRIPQHNQLLIICRDGSEILHKWQDRSRRESWTGEMRQAARECLKRRQDRGNNR

SEQ ID NO: 9157 - protein, 520 aa, synthetic construct
MVRKVTKISEELIAAKPKLRVAAYCRVSTDSDEQLVSLEAQKTHYESFIKANPEWELAGIYYDAGITGTKKEKRTELLRMLKDCEQRKIDFIVTKSISRFARNTTDCLELVRKLTDLGVFIYFEKENINTQSMDSELMLTILSSLAESESISISENNKWSIQKRFQNGTYKLSYPPYGYDYLDGEMVVNEELAAIVKRIFAEALSGKGTHKIADGLKNDGISSRRKANWTATTVRGILCNERYTGDVILQKTYTDEHFNRHYNYGEKDQYLIKKHHEAIISHEEFEAVGKLLNQRGKEKGIEKGNSKYQNRYTLSGKIKCSECGSTLKRRIQGNGNNKYIAWCCSKHIYDISGCSMRSIRDDVIQQAFITMINKLIFGHKFILKPLLQSLKAVNYLDNLIEIQTLESRIEENAERSQVLIGLMTKGYLEPALFNAQNNELRKEAALLKEQKEAISRSVNGEMTVTTEVEQLLKHVSKAEPIDSFVETLFERYVERIVVYSQVEIGFKMKCGITLKERLVR

SEQ ID NO: 9158 - protein, 522 aa, synthetic construct
MANNRSVTVIPARARIGNNVNTDEKPKLKVAAYCRVSTDSDEQATSYEVQIEHYTNYIQSNPEWELAGIYADDGITGTNTKKRDEFNRMIEDCMEGEIDMIITKSISRFARNTLDCLKFIRQLKDKNIPVFFEKENINTMDSKGEVMLTIMASLAQQESQSLSQNVKLGIQYRYQQGEVQINHNRFLGYTKENKRLVIVQEEAEVVKRIYREYIEGASLLQIARSLEADGILTAANKAKWRPETLKKILQNEKYIGDALLQKTYTIDFLSKKRVVNNGIVPQYYVENSHEPIIPREIFMQVQEELIRRANLYTGKNGKKRVYSSRYALSSIVYCGECGEIYRRVHWNNRGCRSIVWRCVSRLEEKGSDCCSPTVNEETLQNAVVKAINEALCSKNTFLETLQVNIATVLNEEDDKATDDFDERLEELQKELLNLANSKADYNTVADEIYRLRDLKQNTQVQNAERQGKRQRIEEMTEFLNEQTGELQEYDEQLVRRLIEKITIFDDKVIVEFKSSFEVDIDL

SEQ ID NO: 9159 - protein, 447 aa, synthetic construct
MATVTRLERTAAAMPAKKRVAAYARVSVDSEAPMESLSAQISHYSARIQANPSWDYAGVYADAGISGTGMRHRVEFQRLIADCGKGMIDIILTKSISRFARNTVDLLNTVRRLKAMGVSVRFEREGLDSLSGDGELMLSILASYAQEESLSISENVKWGIRKRFAQGSFLAYRMYGYRWTGDRFEIVADEADAVRFMYRAFADGMTLTEISNALAKRGILNRKGVPFGKTSVMRILDQEKYRGFSILQRTFVDDHITHRKRLNRGQLPRFEVQGTHPPIIDDGLHARVEAERERRRNLGAVRWRRATCFTGRLVCGHCGHTLTYTPNNWSGELTEFQQGHYQCSHKRKHGAKACPSKSLPVYTLRQVCCIAIGPLAGAASDAAFDPAWIDALVERVVVSSDALEFHLNTGEVLATPWKNTAKRDIWAHRRAVARQRQQDAGSSGVRP

SEQ ID NO: 9160 - protein, 526 aa, synthetic construct
MRTVSVIPASREPATGQSLGRLAPRRRVAGYARVSTDSDDQVSSHSAQVDYYTAMIKAKAEWEFVKIYTDEGISGTSTTRREGFKEMLNDALCGRIDLIVTKSVSRFARNTVDSLTTIRRLKEHKVEVYFEKENIWTFDSKGELLITIMSSLAQEESRSISENTKWGRRKRFADGQVSVPFSRFLGYDRGPDGNLAVNASQALIVRHIFTLFLQGMNPFSIARRLESEGHRTVTGRSEWDSTTIARMLGNEKYKGDALLQKSHTPDFLTKRLVENRGEVPQYYVRGNHEAIIAPDVFDLVQLEIAYRRKHVETTRGASAFRGRIRCGICGGDFGPKVWHSNSKYRKVVWQCNGKYAAKGGPCVAPNLSEDELRALFVRAVNKLISDRDAVIRGFEAIKDTVLNTSGDEAALEALKRERVDIVSLMERLTAENASRAMDQDAYTARFGQLSDRYAKVNEEIAALDEAIRDRRYRRTRTELFLKTLKKQDGLVSEFSEDLWHSLADHATVHGKEDVSFTFRNGVEIQA

SEQ ID NO: 9161 - protein, 472 aa, synthetic construct
MVGTQHAEEQYESQTKSLLNLRSGDTHMAKITRINPPTPTLAAKNRVAAYARVSVDTDEPMESLSAQVSHYSSYIQANPAWEYAGVYADAGISGTGTGKRAEFQRLMQDCRKGLVDIILTKSISRFARNTVDLLKTVRKLRELGISVRFERENLDSLSPDGELMLSILASYAQEESHSISENVKWGIRKRFEQGEFPAYNIYGYRWTGERFEIIDEEAEAVRFMYSSFAGGMMLTEISEELARRGVLNRKGKPFGKTSILRILDQEKYRGFSILQRTYVEDHITHRKRMNRGRLPRFVVEGTHPRIIDDALHKEVEAERERRRKTGAVKWRVASCFTAKLVCGNCGNSFTYTPATSTNKDDITEYQQGQYRCSNKRNNGIKACSAKNLPLRALRQACCSSLGPLFGAFEEAEFDAVWVNEQVKQIMVFADTLKFHLHDGRILTTPWKSTARRDAWVLRRQKMAGMQESEEKQ

SEQ ID NO: 9162 - protein, 526 aa, synthetic construct
MREVRVIPAIREFATGQGVDQLRPKRKVAGYARVSTDRDDQFTSYEAQVDYYTTMIKANAEWEFAGIYTDEGISGTSTNRREGFKQMIADALAGKIDLIVTKSVSRFARNTVDSLTTIRSLKESKVEVFFEKESIWTFDSKGELLITIMSSLAQEESRSISENVKWGRRKRFADGQVTVCYTRFLGYDKGPDGNLVVNFEQAKLVRYIFSLFLQGLTFHGIAKRLENEGHKTGTGNSAWHASAVKHILTNVKYKGDALLQKYYIADFLTKKPIVNKGEVPQYYVEKNHEAIITPEIFDLVQKEIEYRAQHVETRNGTHVFSGRIRCGACGGLFGPKIWHSKSKYRKVVWQCNEKYADRHHKCNTPHLYQDALQDLFVQAVNAVISRKDKIIRTLEKITEDIFDTSADEAQLEAIKVERHEIVSRMEQLNTENTNVAMDQAAYQVRFKQLSKEYTEVNKQLSALEGTIHERKSRKTKTELFLKGLKKQEGVVTEFTETLWHSLADHAVVNSKEDVRFIFKNGMEIRV

SEQ ID NO: 9163 - protein, 541 aa, synthetic construct
MVATAYSYIRMSTEVQLRGDSLRRQLEKSQKYAEAHGLALDDSLRDIGVSAFRGRNKKKGALRGFLDLVESGKIPPGTTLLVEHFDRLSREHVLEAHSLFLRLITSGIVVVTLVDGKEYSMKKCEASDLICSLSYMARAHEESQIKGERIAESWEARRKRIKDQPITTRCPAWLTFNRKTRKFEVVEERAAVVRRIFEESANGLGRYAIAKRLNTDAVPTFGRSKFWLGGAIQKFLESETAIGIFQPCRMQDGKRVPVGEPVEDYYPAVVTKELFYRSRRSIGERFHKSGPKGKRYSNLFQHLCICRECGSRMTFVDKRRSRSTGDLSRFYQCQFSLNGGACANNAKVPCNVLENAVLTGFIKEIDLGALIQSDDDKETRLRTRLSEIEITLKKKRKLADNLLEAFADSADLDLPKRKIAKMELEIKSLEKEHAELEDDLQQAVHNHESIVERQTKIQQLTDALAEADETEAYHLRATIAQALKRVIKRITCDKEGRITIHIDDTHSYIYTEFRGKRVWLDVHGASPSQQGPGKFVPLIDS

SEQ ID NO: 9164 - protein, 519 aa, synthetic construct
MRIAAYARYSSDQQREASLDDQLRNCRAWCARQGLPEPSTFQDAAISGARLDRPGYARLLAEIHQYDILLVDDLSRLGRDKDEIGKTVKRLTFSGVRLVGVSDGVDTQRRGHKIDVGLRGLMSELYLDDLADKTHRGLTGRALQGASAGGLPYGYRVAGTGCREVDEGQAAVVRRIYSEYLGGRSPREIAARLNADRVPSPRGGTWAFTAIYGDERRGIGILANPIYIGRQVWNRSRWVKHPETGRRVRQERPEAEWIITQHPELAIIDAETWERARARMGNRRYASYGRQGAPRGPGRLPTNLLSGLMRCCACGGPMVVVDKYNYGCSTNKDRGEAACASRLRVPRGMAERAILTEVRDELQSEEAFQRFQRAVTAALRAGQPDGAELQRQLKAAERDRDNIMAAIKAGILTATTKAELENSESAIRGLLAEIDLAKRTQPATVLPRAREIWRQAVDRLQEHARKSPAGREALRDIIGDQITVRQNEKSDLVAEIAFPSASQITMVAGAGFEPATFGL

SEQ ID NO: 9165 - protein, 540 aa, synthetic construct
MPKAISYIRFSTKIQSVGDSTKRQSKYINDWLKRNPDYYLDESLRFQDLGISGFSGANAKSGAFGEFLAAVESGYIEAGSVLLVESLDRVSRQDIDTAGEQLRKILRSGVEVVTLVDNEWYTKESLKDSLSMIKAMLVMERAHEESAMKSTRLRSVWAAKRERAAKGEIMSKRCAAWLKVSEDRSRFEFIPENVKAVQRVFQLRLEGLSHVKIAKQMNDEGFSTLNQFKSVTGGWSQSSVTELLSNRSVIGFKVPSKSMAVKGVSEIPYYYPSIITDEQFYAVQQLKQGSGRKPSSDLPLLTNLFKGVLRCSECGFIVVVAGVSAKRSGIYKCSMKSEGRCNSVGFSRLQTDRALVQGLLYNANRLFLNRDNGSAIGALQGELEQLQKQRERLIKLAMLADDTESMAKDLKALNSQIKDAEKAVSEVHQREQSSQLETISHLDLTVKKDRIEAQIIIKRIVKEIRLNTAEKKCDVLLHNGLRLLNFPLDMVVDGAQWLEILPLIDGDEFDFEGFSTKPRHLAFEEAPEWVKELEFNSKIQ

SEQ ID NO: 9166 - protein, 641 aa, synthetic construct
MSLKKAALYVRVSTLHQIDKDSLPFQRQELENYAKYALNIEEVEIFEDAGYSAKNTDRPKYQEMMKRIRSGEFTHLLVWKIDRISRNLKDFSEMYEELKDCKVTFVSKNEQFDTSTAMGEAMLKIILVFAELERKLTAERVFSIMLSRAEKGLWNGATVPFGYVWSEEEKFPVIDPDESKIIQYIFNSYESLRSTLKVAYRLHEEKIATKRNGQWTAKTVRDILRNPFYIGTYRYNMRESGGSRRLKNKEEWVVVDNNHPGIIEKEQFDRVNKLLSDNYRGLTDVQRADIHKHIFSKMLYCGKCNSLLTAGLDAARKDGYRPSRYTCVTSGGAKRCSNYVSDIIIGPFIFNYVSNLIRLQERITPKHSLRDMERALLRGNSFIDVVGVDNESLKETHFALTGNMSGQGQEYSLNAKAEIETPNIEIERLQREKTKFVRALKRLEDLYYFGEEEDAISQKEYIFKKRDLQERLEELDDEINLLKQKNDDKTSDVFIDYAQHFLITKEMQQARQVDYRELSEIVGREALSDFMQTIIDNIVVIDKRVQSITFKNGITHTFAYRSLLQSKSSAPTKKQYKNYEGPVLEYLKENGPASRSDLQKATNITRDGIFTLLSELIEREIIIKTGQSTATRYHYNEKQNN

SEQ ID NO: 9167 - protein, 501 aa, synthetic construct
MKPNVKEVAIYLRKSRDESDGKEDVLAKHESLLLEYAKNHNLKYKIYKEIGSSEYIDSRPKMVRLLSDVSQKLYDAVLVVDLDRLSRGDLEEMGRISRVFRDSKTLVLTPSKTYDFNNEDQAFINNFEMVFANHEYRMIKKRMLRGKLQGTKAGKWTNGRPPFPYVYNRLTKELDVDPDKVKVYELMKKMFLEDMKATYEIAWKLNELGFKTNRNSYWYENTVRRILKNEVHLGKVVYGKTSGSGSKKKLNANGVQIKDRSEWIIAEGSHQPLKTEEEHQRILAILESRRYTPKGTRTNVQVLSKLIYCGKCKRVMSFTGKASGKRYVKTCLTTDRFGNRCHNRSLNVEVIYAQLFLDLEQYEQQLLSHELKEKQGDSSTLQLALHNKQEELERLEKGINRIKDLFIDEVIDKLEMRKRIEKQQQSIQTKKVEIRSIEQSLAVIENVRTDDDRLHAIKEFKKAWNTEGISRKELNILAKQLIDRIEYIRERNNVQINIKFL

SEQ ID NO: 9168 - protein, 559 aa, synthetic construct
MKKKACVYVRVSTDHIEQDQSYQAQMTYFKEHYSDYEIIETYAERESGTSIKNRTEFQRMLKDAGLELEVKRGNINIYSTNKEPKFNYIITKSISRFSRNSEIKEVIRKLKNQGVYIVFDDINKSTESEDDVLLVGILQQLAEEESRNKSKIIKWGKKRSAEQNIIPMNIIPYGYKGDIEQNRLEIDENESKVVKYIFELYLNGNGGRKIREILTSEGYRNRKGKEFTENMILYIIQNPKYCGVNVRNRYMKNDIFNQTSQVELSEDQWLKMKNERIDIIISEEDFAKAQELINGRRKNGRGYRGYTKSQYANKIKCECGGNYIHNMYYNKDGTKRGIFVCNRRKKLGKAKSGCTSRNIFESELEEVIDEYCNGKYKKILLHEIDVANKYLDKKLAEVKKTDITNIKKKATDIENILEENKRKVEKLIDMLLDSSNTKEDIVNKRINLLEEENKKLEEEKSELNIVIKNKDDILNNINNFKKLLKELEHGTKNLTTLDKSEFIEDILFIQLDENNNIEIYDKIIIKVNTLRVSAKKWNINQNLSDNYNGIIRDFKENQK

SEQ ID NO: 9169 - protein, 520 aa, synthetic construct
MKKVITIQATPSIIRSSSDDFSLKKRRVAGYARVSTDHEDQATSYESQMRYYSEYINGRDDWEFVKMYSDEGISGTNTKLRTGFKAMVEDALNGKIDLIITKSVSRFARNTVDSLTTVRQLKEVGVEIYFEKENIWTLDSKGELLITIMSSLAQEESRSISENVTWGLRKQFAEGKVHFPYTNVLGFKAGEDGAIVVDQDEAKTVRYIFQQALLGRSPYHIAKDLTEQGIPSPSGKLHWNTTTIKRMLRNEKYKGDALLQKTYTIDFLTKKKNINKGELPQYYVENNHEAIVDRETFDAVQQVLDAKGKKSSTSIFSSKLVCGDCGHYFGSKVWHSTSKYRRVIYRCNEKYNGENRCATPHVTEKEIKQWFVLAVNQVIENKDEIIDNIKVLCSIGSLEGIDNQIKELETETEILSQMVSRLVMENASTSQDQDEYQSKYRQLSAKYESLVEGIEELEVQKLAKSKRNKDLQDFITGLKQQEGLLTDFDELLWETMIESITITKDSDVEITFKNGAVATI

SEQ ID NO: 9170 - protein, 411 aa, synthetic construct
MRTVRRIQPIKSPYKPRFKVAAYARVSDSRLHHSLSTQISYYNRLIQAHPDWELVGIYYDEGISGKEQSNRQGFLNLIKDCEDGKIDRIITKSIARFGRNTVELLTTVRQLRLKNIGVTFEKENIDSLSSEGELMLTLLASVAQEESQNLSENIRWRIQKKFEKGIPHTPQDMYGYRWDGEQYQIEPNEAKVIRKVFKWYLEGDSVQQIVDKLNQEQVLTRLGNPFTVASIREFFKQEAYFGRLVLQKTYRESFSRNPKRNKGQRNKYIIENAHEPIVTKEYFDLVLHEKERRYQLMHQESHLKKGIFRDKISCLECGCLMIVKVDTKQVNKTVRYYCRTRNRFGASSCSCRTLGEKRLLASFKSKLGIVPDKEWVENNIKHIEYDFGHRIIRVTPVKGRKYPIEIREGRY

SEQ ID NO: 9171 - protein, 533 aa, synthetic construct
MKRAAIYARYSTDLQNDKSVEDQIRLCEAHAQRIGAQIVKTFHDRAKSGASMFGRAGLSQLMQDAENGTFEVLISESPDRVSRDIADLAHIHKTLKFRGVEMNCVNGGVMDTMQIGMYGVVGQMQREEGAKKVKRGMVGVVRSGRHAGGRAYGYEPVPGKPGELRIVPDEAQIIVRIFKQYAGGTSPRTIAGALNEEGIAPPRGDKWNASTINGSGTRGYGILRNPIYDGRMIWNRVRMVKDPSTGRRVSRTNDASEHETIDVPHLRIVDEWLFQKVAERKAATGGEHKMMQPRSKRLLSGLLRCGACGGGMVIVGPDRGGNRIQCSTYRESGTCDNRRRFYIDRIEEQVIDSLRMAFADTSVIEAYVKTYEEELKRRRGNAFKSRAAAQRGLNDAKDGITKIVEKISKGLIEDDEAAVLLAGLREERNKFQAILDSIEEPANVIELQPKALLRFRSSIESLAKILRSSDGNVPMELGETFRQLVAAVVVEPTPAGEAYSVSLKAYLSSLMHSELSVIKLVAGEGLEPPTRGL

SEQ ID NO: 9172 - protein, 585 aa, synthetic construct
MAKKLYSYQRWSSAVQKEGTTKERQSFGAREYAKENGLELVEIVDDGISAFKSVNSRRGALAAFISAVEQGYIESNSILYVEALDRISRDKVLKAVGLFNDVLELGITIVTGADKKVYTAESVNENSMDLLQSILLFSRAHEESKTKQLRTNGNALALIRRFQDGNPTTIKSIGSHPWWIDASTNQHEAVKRHPEYWKVAKDAIDMFMEGKSVFSVCKYLNATYPLQWKSGKSWDHANVRKLRINPAVYGMRKITVDGHDYELENYFPPLITHGQYLRLQQIRETTKYVGRVSEEPNNINLLAGMKVFRCGHCGSTMMAMRHKDTIRYVCEKGRYGKNGCRVWSLPGELVEHCLMLVVTMAHIDMNHKGGIEKEDYTLKINDAEQQVQDLSHRISNLTTLVANGLGNVDEVIGTMRALDEQRNDLKLELEVLTRKQILAQDNTFEELMMQFFNYAHWNVIQTVDHEYRLKLRDIVKSSIGDVRAWKVDRRLYISFQIKGHEEYFNFSAGEKPYEWGYHMGEMPFTEQKKVSTESTIEIPEEMLKKMVSMYARLNDASLSMLNEAKNMLQVAGYPELDGKMFWPRK

SEQ ID NO: 9173 - protein, 487 aa, synthetic construct
MFALFLYRLKENCGMKCISYVRVSTDEQVKEGYSIDSQSELNKKFIESQEWELLEHYIDDGYSAKNLDRPAMQRLITDAKNKKFDVVVFYKLDRLVRSVSDLDNLLKIFDANNIAIRSVTEAFDTTTAIGRFLITLVAAMAQWERETISERVSINMLQKAKIGEWPGGIPPYGYKLENEKLVIDEAEAKIVREIFKLSKTLGFYSIAIQLTKRGIPSRNKGEWHVDSVRGIANNLTYAGYIRHNEGGKNYKKPPREQTYYEGIHKPIIERDEFWSLQDILDKRRTFGGKREVSDYYFSSILVCNRCGSSFSGHRGGNGRKTYRCSGKKAGKSCTSHIFLEENLIKSVFLYLNDYIKHLDFNVKDIKTDEDHTTEITNEIKQIEKLLKKKKVMYENDLIDIDELIAETQVLREREKELKKEISTMQNAKNDNTEILNIIKNIDILWQDADSYDRKNLMSTIFKRIVVDTKDDYRGSKYPREVIIVSAK

SEQ ID NO: 9174 - protein, 507 aa, synthetic construct
MKRVISYIRFSSERQAKGDSLRRQSKMVNDWLKAHPEYYLDQDLSFRDLGVSGFTGKHLKGGLGDFLTAIEKGLVKAGDTLLIESLDRLSRQDIDIASELLRRILRAGVDVVTLSDGEHYTKESLRDPLSLIKSILIMQRAHEESLRKAERIQAAWDAKKEAAKAGIKISRRCPAWLRLNDDRKSFSVIPEKVETVKRCFQLRLEGKSIWEIVRTLNDEGHQSMSQYKPGKFGQTSVQDLLKNRSVIGYFTPKGCEEIAGYYPAIIDETTFYKVQQLSHSRYGRKPVSAKPLSVNLFKGVIRCSECGHALIITGFSDTRSGIYRCPLRNENRCSAKGLSRKQTDGTLLTLLSRLDRFDSDTTNTIDTLKLHREHISSNIEKLVQLSLEIEDLNAITSKLKQLKGELSQVDADIEKETQRLKSIDVGCLSDCDLTTKAGRIEAQLIIKSAVKEVVLNTAKRRCKVTFHNGRAITLPITENPSEDVTEAIQSLSEVTERGLIDVDEVII

SEQ ID NO: 9175 - protein, 520 aa, synthetic construct
MKRITKLHESKELMQVKKLRVAAYCRVSTAKDEQLESLDAQKEHYENYIKGNLEWEFAGLYYDTGISGTKKERRQGLLPMITDCEHGKIDFIITKSISRFARNVTDCLELVRKLLTLGISIYFEKENLDTGSMESELMLSILGSLAENESISISENEKWSIRKRFQNGTYVISYPPYGYKNIDGEMVVVPEQAEIVKEIFAEVLAGKGTHTIATALTKRGVPSKKGGRWYAETVARLIGNEKYTGDALFQKTYTDSSFNRHVNFGEQDMYLVKGHHEAIITHDDFEKANAVLEQRGKEKGIEKQSTKYQNRYAFSGRIKCAECGSSFKRRIRYQTKGTYVVWCCSNHIKNIRDCSMEYITDEMIKKAFVTMMNKLAFGHQVILKPLLKSLQSINDNDKFSAIQEIKSRIEKNTEQRQVLTSLMASKYLDPVLFNKENNRLTMEAEMLRKEKEKMVYSIGGDRTKADELQKLIKFTAKGEMVSQFDDEAFLAHVEKIKVLSSTDIVFELKCGLQLKERLVD

SEQ ID NO: 9176 - protein, 529 aa, synthetic construct
MNATKNVTVIPARKRVGNTIQLEEKPKLRVAAYCRVSTDSEEQATSYEAQVEHYTQFIQKNNEWEMAGIFADDGISGTNTKKREEFNRMIAECMKGNIDMIITKSISRFARNTLDCLKYIRQLKDKNIPVFFEKEGINTMDSKGEVLLTIMASLAQQESQSLSQNVKLGLQYRYQNGEVQVNHNRFLGYTKDENKNLVIVPEEAEVVKRIYREYLEGASLTQIARSLEKDSILTAANKPKWRPETLKKILQNEKYIGDALLQKTYTVDFLSKKRVKNNGIVPQYYVENSHEPIIPRELFMQVQEEMVRRANLRSGKGGRKRVYSSKYALSSIVYCGYCGDIYRRVHWNNRGYKSIVWRCVSRLEEKDSECTAPTINEETLQNAVVKAINELLVNKEPFLQTLQKNIATIFNEENDNATDDIDGKLEELQQQLLIQAKSKNDYDDVADEIYRLRELKQNALVENAEREGKRQRIAEMTDFLNEQSCELEEYDEQLVRWLIERVTVHDDRIEVEFKSSIEIDIENRYKTCR

SEQ ID NO: 9177 - protein, 519 aa, synthetic construct
MRQVLTYLRFSSKPQERGDSIRRQTNLFERWLKDNPDAEVIDNFKDEGQSAFHGKHLKGDFGRMLRNIEDGKYIAGKTILLVESEDRLNRQKARNTENLVDLITGKGIDVICLASGKIYNAENIEELGTSIQLKIAAHIAYKQSKDKSDKVSAAWETRAKLAQEGKQQLTRMVPGWIDPDTRKLNEHAQTVKNIFNLLLAGGSLHNIARHLQENGTKSFSRRKDANGFSVHSVRTILRSESTIGTLAASQHNDRPAIPNYYEAAVDVATFNKAQEILSKNRKGRTPASDNPITINLFKGLMRCICGASVHPTGVKNTYQGVYRCNNAVDGRCKLPTIKRRAFDTRMINNVVGMLNHSENNDTERKKAELQYQIDILNKSISKGYDYLLDPTTEATPELRERLNKLNHQRKQTQTELDTLNQRESFSDKALPHLADIDLNTKEGRVEAQLLLSKYVKEITLRGSTFDILLTNGNRFENLSVAPNELYPEEEASSIKNKMNQLLDDELALLEPDLKGKMTY

SEQ ID NO: 9178 - protein, 571 aa, synthetic construct
MRTLIWYRRVSSDRQIDGHGLQRQQESFNEYLNKLKDRHLYKIEEVSDEGLSAYHGVNISEKGGLGLILERVKTGSIPAGSILVCESQSRLSRLHAIDATLILHTLNQAGIKVWSLSDNRELTTSDDTGTLLAVLDGIRNNKYSRDLAEKVSAVKKAKQHAARIDKTGSLGNVCPYWLKPLGNGKFEPIAEHVTTIRRIFAERYELHSMASIAAGLNADNIPLITKRNWKKKPSPTGWTQSTVKNILSNPRVIGTLPESERRGAVYPAVKGYYGDPIVPLEHWLSSQESLSHKGKKAVRNSNNPFGVRLFRSLIICKHCGHKMDVNGARAALSEKGSPYYGSLICRGARDNSCMCGEGGARTPALPMKLVEQALTVNLFRDLKQRDVATGAKERIALLTLEVSELEQSIQQNTADLAVIRNQNARTAILQMIDNLGAELDQKRSQLDTEQRKQQSTTVDTLEGLDLLSVDGRLEAQRVIAKNIALISIDTVTATAEITLRNGNIITGFNLKSTSDKTSSMAEATDEEKQAELTAIIGEHLPLVIPAGDPVGVAYEPMLDWPDVDADDYPNE

SEQ ID NO: 9179 - protein, 546 aa, synthetic construct
MKEQKRGAKVAIYARVSTEEQAEHGYSIDGQLDTLRQYCQQYGKVIVGEYVDRGISGKEMTKRHELKRLLRDAENKAFDEVLVWKINRLSRKTRDLLEIVEQLNRNNVYFRSYSENFETETPMGRFALQMMGAVGELERNTIVENVKMGLKQRARMGLHNGGSSLGYKSEELPGSDRKNRKTKLVVVEEEALIIRKIFTLYASGKGFRAIANLLNHEGHKTKRGNSFSCDSIREIIINPVYAGIVRYNRFEGWNEKRRKGKNANPILTEGKHEAIISQEIWDKVQTLFQQKSKVNPRVHDSKNLLTGLIRCPQCNSPMVASRTVSRLRDGTKVIRRYYSCGQFRTKGSAVCHANSVKADYAEQYVLDRMREVLTKPTILKDIVAQINRKKLEGVGPLEQELKSIAVNLQQLVEKKRKIMDVYEADVIDRNTLSMRMEELTANEDALHVRKAEISYVLGDANSQEVSYEQTKFLVERLYEVISTSSFEQSKTLLRMAIQEIQLTPEKIIGKIQMAFDEKIYSYIEDTPSVQKADGVLLCKNDIVFAI

SEQ ID NO: 9180 - protein, 510 aa, synthetic construct
MHAANQVALYLRVSTQEQVEGYSLEAQEVTLREDVKRRGKFIYQVYTDAGVSGIREDRKAFTALMRDAKNGCFGEVLVWTVSRISRKLSYFLTVIEELRKLNIEFRSMTEKFDAATPIGQFSLTMMGAVAQMQRESWMESSRLGINKRAEAGRYNGELMLGYQRIPDEEDPRGGNKLVIALGEAEIVQSIFFLYASGKGYKAIVNSLNDKELTGKMGKAFSIKAIRTILLNPIYIGKVKCKGKLVEGIHEPIISQELWEQVQKRHAIKSKAVKKEIDHDYLLSGILRCPECGNGMLPIHVTSKRKDGTFRMNYYYACGAYLNKGKTACHANSVRAGDAEEKVLEWLHEILTSPFWIYKVTEAIKQSQNGMDLPQEAERKMIQDRLTAITKQQKQILVYYENGVLSRDAFLLEAQALKIEKQELAASMEKVQSAEHQVEWAVEEIKATFHQLRFLLRKASAEKQKALIRALVTKIYVNDHRQVAELELKVPLPSTEGEEERLLRLPLKKAE

SEQ ID NO: 9181 - protein, 545 aa, synthetic construct
MKKAVIYARYSCERQTEQSIEGQLRVCQEFAEKNDILIIDTYIDRATTGTNDNRAAFQTMLKDAEKPVPWDIVLVYALDRFGRNSIEVAVNKQRLRKNNKLLISATQRTSENIDGSKNLDGILLENVYIGLAEYYSAELSQKIRRGMNESRQKRQYTGGFVLFGYDIKDKKYVINETEAEIVRQVYADYANGRIVKDICKELAERGIKNKFGRPFVPNTIYRMLRLEKYIGIVRYGDEVFENTLPPIVDMETYTKVQSIIAANKRAPSRRKSYGKFFLSGKLYCGECGSLMTGDSGTSHRGVVYFYYTCFDKKRRKGCTMPSVQKDDIENTVFKVCCDVLESDFIPAIVDTAYAIQMEELASNITVINLQGQLKEKEKALKNIMRAIEEGIFTQTTKQRLEELEKDVEVIKSKIETEKVKQQNIASKEDYAKFLKQFIGKQISNDDFKESIFQLLIRKVVLFRDKLRITFNFSPDKGKHDKNIDVDADLAEVKEAQEEYKSGAGGSNLSSPTPPLGSNPNFLSGIALFYCFQTKFHYQYQVALLV

SEQ ID NO: 9182 - protein, 509 aa, synthetic construct
MKKAVIYARYSSDSQTEQSIDGQLRVCKEYAEKNGYEIVAEYIDRAMTGTNDNRPDFQRMIKDSFNKKWEYVLVYKFDRFSRDKYQSTLHKHTLKQNGVKVISAMENIPDTPEGIILESLLEGMNQYYSAELSQKVKRGLKESRIKGLFTGGPTPYGYNVKDKKVSINEEQANIVREYMFNQYYSGKRIKDIVALLAEKGIKNSYGKPWTINMVSRVLRNPNYKGCVYADDTCYTNIFPAIVSEEVFDEVNARLKVAKRTSAHFKTDVNYLLSGKLICGKCGGLMTGDSGKGKMGKIYNYYKCFTKKKNKDLCDKKSISQEYIEDIVLLATKEFLNQTNLNELSICLADTYNKSIEKDKVLESLNKQLQENNKKLANFVRAIENGIFNDTTNERMKELEIANKDLQEKITSREMLVIKPLDKNVIYSFLCSFKDIDLTDKLACQRLVDMFINKVILFDKYCEIYFNTNGDKSKQLKLKEQPDIDSEILFESNKKEQSHSKSSDYSLMAE

SEQ ID NO: 9183 - protein, 527 aa, synthetic construct
MWQLPPLTPDEILDYLRKSRTDDPTLDVSEVLAKHEQMLDEWVDRNLPGMGPIPEENRYREVVSGETIESRPEIQKLLQRIELPRVKAILIVEPQRLSRGDLEDIGRIVKLLRYSNTLVITLNYTYDLHDERDRDLFERELKRGNEFLEYQKRIMNNGRLLSVRNGNFIGQTAPYGYKKVQIKEGKRKCYTLEPDPEKAPIVKLIFELYRDGYGMTRISDKLDALGVPSPSGGKWVPDTIPRMLKNEHYLGKVVWNRRPHSRKIVDGDIVVSRPTAEEYLIYEGKHPAIIDQTLWDAVQVRRGTIPPNKKTYNFVNPLSGLLYCKRCGRAMTRRTYKDKDGKERSAPRVACTNQRRCHTASACIDEVINEVAKVLQSTIEDFEVRVNRGDDDHLITQHKMIKQMETRLQQLQELEIAQWDEKMKGKMPSYVFERLNEQTLREIEEVKKTLAEAQKSLPSPVNLQDRLVTFKDALTALLNPEAPAKEKNNLLKACIARIDYDRVQVNKGHKKAGDSDTPIELEFTLKL

SEQ ID NO: 9184 - protein, 500 aa, synthetic construct
MSIRDKLSAIKVAIYIRVSTHWQVDKDSLKVQERELISYCQMVLGINDYVVFTDPGYSAKNTDRPDYQAMMDRIRTGEFSHLLVWKIDRISRNIIDFATMSEELKRLGVAFVSKNEQFDTSTAMGEAMLQIIMVFAQFERKQTSERVTAVMLSRAGNGQWNGGRVPYGYRWDKEAASFLLDETEAGYVRRYEEHQSLLYVVKWLNDAGIKTRRGFAWTPTSIHVILTNPWYIGQYVYNVHSDGKGIERRDESEWVCVERHHEPILSEDQFYRIKFLLMRNRRGTPTPGKSYARKHTHIFSGLMRCGICGSNMSASADKRRANGFCPSQYACASRRRKGTTCTNKYISDLAVGSFVLNYAANIIRAAHNSAADIQPDVLERKLLRGETFKSVESINSEAVQQLLTAFAAAGEAVEYRPQYAFTSSSGEGRDMDNLKARKRKLETALSRLNTLFLYDDEAMPEKDFIVERTPISSVSLRRQINGLQSLLRPVFQVAKTVQTF

SEQ ID NO: 9185 - protein, 533 aa, synthetic construct
MPKVTKIEATINPKTRLPKNQLTKRKVAAYARVSTDSDEQATSYSAQVDYYSRYIKSRPDWEFVDVYTDEGISGTNTKNRNGFNKMIADALDGKIDLIITKSVSRFARNTVDSLVNIRKLKEHNVECYFEKENIYTFDSKGELLITLMSSLAQEESRSISENVTWGQRKRFADGKFSMHFNNFLGYKKGPNGEIEIDEEEAKTIRVIYRLYLDGHSIVEIAKYLDENNYGKPNKNKGTKWSISTVKGILTNEKYKGDALLQKSFTIDFLGHKTKKNEGEIPQYYVKNSHPAIIPKEEWEMVQDEMKRRKKIGSKYQFVNSCFSSKLICEDCGAFYGRKVWHSTDKGRKVIWQCNNKFNLSKEKRCKTPHLSEEEIKSMFMKAYFQLMDKKGKYIDDLNEVKNALCDIDELEDKIREKDKEIKTVISDVESLVKSNASKPQDQLSYYKKYAELEEKYNLLKADYDKLVSQKEEKNAKAIRIEKFIQDIKNHKEEMVEFNEPLWNLLVENAIVHKDKSITFRFRSGVEIKVEAEE

SEQ ID NO: 9186 - protein, 597 aa, synthetic construct
MQQVDAFGLDRQISTVMDFLENAKLPVELGYRLDPNNHEVLESDKGLSGYKGHNFTKGSLGRFKERVRSGEITEGCLLIESVDRFSRKQGYDAIDEFTFLIKRNIDIVEVETGQIFSNKLEHRLSALSTSIERAYQESKRKARISKKSWKHRKEESLANGVALNNNTPDWLALSNDKKTYEIDIQRVQTITKIFELYRDGYGVTQIVNLLNKEGERYNGKGWNTVTVYNKLRDRRLNGYLVGKYPSIPKKDNESTSETEKRVLENLKIKREANENAKRIYPIVVEDDLFLKVQSMMDRNVSTKKQRSSTTKQRNLFNGLTKCHECGSPMIVQSMSNGGQYLRCYRQRTKDEKCNSKMLRYYVTERVLLEHIKGLNLDDIYGDKSGNLSLESLNNLLSQVNNKLVVLNEKIKSASDEEELFAIMDFKRKRIAEKEDILNQINALENESEVVRLSYDYDIEEITNQDNTVLRRKTNEHIAKVVSSVKCLRMDSSYIGAYYLYDISYHKDIIKHLLLTNNDGVLLSEISINEINNQRVYSVKEDNKIVFKVESNGDVWVLHASRQKSIDELLHYINVMMVGREPEGFAYEVNEDMIEWVD

SEQ ID NO: 9187 - protein, 550 aa, synthetic construct
MATKARVYSYLRFSDPKQAAGSSADRQLEYARRWASEHGMTLDSALSMQDEGLSAYHQRHVKKGALGVFLAAIDEGRIPSGSVLIVEGLDRLSRAEPIQAQAQLAQIINAGITVVTASDGREYNRAGLKAQPMDLVYSLLVMIRAHEESDTKSKRVRAAIHRQCQGWIAGTWRGVIRNGRDPHWLELTKPGEFKLVPERAEAVRLAVRMFREGNGAVTIMRALEEQGLQITNGGNPAGQLYKIVRNRALVGEKVLEVEGQEYRLPGYYPPLLTAEEFADLQHVAGQRIRRKGTSEIPSLIAGMRVTYCGYCGSAMVAQNLMNRGRRADGQPQHGHRRMICVGNSQGSGCAVSGSCSVVPIEHALMTFCADQMNLTRLHEGGNREASISGQLAVARAAVADTTAKIEKVTDALLSAAAGQAPAAFMRRARELEETLAGQQAEVDALEHELASAAATPPPALAQAWADLVEGVRALDYDARIKARQMVADTFERIAIYHRGIEPVQTRSWKGTIDLVLVAKRGSTRVLHVDRQTGEWRAGEELTTEALPAPL

SEQ ID NO: 9188 - protein, 643 aa, synthetic construct
MKGAMSLKKAALYVRVSTLHQIDKDSLPFQRQELENYAKYALNIEEVEIFEDAGYSAKNTDRPKYQEMMKRIRSGEFTHLLVWKIDRISRNLKDFSEMYEELKDCKVTFVSKNEQFDTSTAMGEAMLKIILVFAELERKLTAERVFSIMLSRAEKGLWNGATVPFGYVWSEEEKFPVIDPDESKIIQYIFNSYESLRSTLKVAYRLHEEKIATKRNGQWTAKTVRDILRNPFYIGTYRYNMRESGGSRRLKNKEEWVVVDNNHPGIIEQEQFDRVNKLLSDNYRGLTDVQRADIHKHIFSKMLYCGKCNSLLTAGLDAARKDGYRPSRYTCVTSGGAKRCSNYVSDIIIGPFIFNYVSNLIRLQERITPKHSLRDMERALLRGNSFIDVVGVDNESLKETHFALTGNMSGQEYSLNTKDEIEVPNIEIERLQKEKAKFVRALKRLEDLYYFGEEEDAISQKEYIFKKRDLQERLEEIDDEINLLKQKNEDKTSDVFIDYAQHFLITKEMQQARQVDYRELSEIVGREALSDFMQTIIDNIVVIDKRVQSITFKNGITHTFAYRSLLQSKSSAPTKKQYKNYEGPVLEYLKENGPASRSDLQKATNITRDGIFTLLSELIEREIIIKTGQSTATRYHYNEKQNN

SEQ ID NO: 9189 - protein, 547 aa, synthetic construct
MIDTKEGKKRVYCAAYCRKSVEERADETFGSIENQHEAILSFIASHKHEDWIALPERYDDNGFTGSNTNRPSLQRLINDIKTGKVNMVVTYKLDRLSRCLADFVQLLKLFEEHNVAFASITQPIDTSTSTGKLMLHILSSFAEFERELISERTKDKMSSARKRGQWLGGRPPLGYDITKDSKKLVVNQEDAKLIREIFALYLKGNSLLKVAQIINEKGFRTKRATSKGGKTFGGIKFGITHIRSMITNVLYLGKVYYAGQIYDGQQEAIIDEETFKKTQEILKDNRIERRATKNTECTGLLSHLLHCKICGHFMFHTYTLKHKTHKYRYYVCSNAQKRGYNSCPTKSVNAQAIEDATVDCLKKVFIDNNKKNDHPNKQEVEAILSPIWDTLYPEEKRRILKALVKEINYDSTSKKLGLMLNDSDIRLEFEVDLKQVRPLNKWHKEEEIEKEPQVRKMLILAHQIQQFVNEGRFKHPREACKWLNLSVTRMDQVMNTLFLCPAIQNGIISSNTPVINALTEFKIRPLLKEVDWHKQLTQWQTLIESKK

SEQ ID NO: 9190 - protein, 588 aa, synthetic construct
MAQAEALDRAVFYARVSTEEEKQLNALEKQVQENKDIIDSMGWKLVDGYVDEGKSGTTTKRRNEYQRLLEDIENDKFDILVVKSQDRLQRNTFEWYKFEDKIVRSKIKLYFYLENKFYQPDEDELITGIRAMLAAQYSKDLSKKLNNSNKRRIEQAKRGERVNAMGNGQTYGYTIKDKRWVIVPEEAEIVRTMYELYLELHSLRKVRNRMNELGYRNKKGKLFTEEVIGRVIKNEMHKGWVILNRHHRDFKTKEIIQKDEEEWVIVKDDHEPIVSPEVWDAVNNEIQSHRNEGNKKPRGKRMGTDPLSGKMVCACCGKVLWKHTSKNTSGTYHQWYCSGKMGRGEMACKEPATISGVKLNNYLVSLADRYLDYSTIEYSKTLLKRNTVKWLEDLKKQLTTPNDNEKIEAEIDKLESKRAKLLDAYTEDLIGKDEFKAKREEIDKLIADKRILLAPVEENPDIKDIDETIRNIDQEIELLFADEAQLEENKVKFLADHIKQIIVCANGDACVTLDRVAGAFLFIEGGKAEMIISPPEIEGEREGDFVQFDRESMSQSYGRIYYERPCKQGTFRRQNLYRIRCDEQGGDW

SEQ ID NO: 9191 - protein, 531 aa, synthetic construct
MINNPTLDKEVKTVYCLYRVSTKGQVDKNDIPMQKQACREFAARQRGWIIKKEFQEKGVSGFKISANDRDAVQELKTAALKGEFDVLLVFMFDRIGRIDNETPFVVEWFIKNGIEVWSVNEGEQRMDSHVDKLLNYIRFWQANGESEKTSLRVKTRLHQLVEEGYYTGGCAPFGYKLVKSGVVNKKGKELLKLEQEPSEVQIVKIIFEKSVKDVLGSYKMAEYINERKILTHNGAKFQSNTIKRILSNEIYCGFNVRGGVRSRRIEELQIIDDEMFAKAQNILEQRKYTHEEKTQLSKKAKSSTLLGGNIYCAHCGQLLCANSFMDKYQTKDGKWHNGGRRYRYLCSGAAMKRNGCDGQTVYTAKKVDKVVIDVLHECFKKLKVTPKDAAIEKRYKAQIKEIKQEIKKLEKETENLKRKMRDLAAEIASALIGDSKFTEEALSLAIDTAKAKIENNVNLMEEKRYQLNHKEADIQKMDYYYQQFVSWADEFDNASAERKRMILCTLFKEITIGKGYKIELLMDNSYEQFIA

SEQ ID NO: 9192 - protein, 533 aa, synthetic construct
MTVKRVYCLYRVSTLGQVEKDDIPMQKTACRDFTATKSDWKIIKEFSEKGISGFKVSAKDRDTIQEIQKDAVEGKFDILLVFMFDRIGRKEDETPFVVEWFVNNGIEVWSVNEGQQRFDTHVDKLMNYIRYWQASGESIKTSVRTSTRMGQIVQEGKFKGGVAAYGYKLEKLGRINKKNREVYDIVINDEEAAVVKMIFDLYVNSGLGTHNIATHLTKQNIFTRKGNNFTSPSIRNILKNPMYLGILRSGESWSKPFEHLRIIDDYTFQRAQELAKQRSNEYEDKRTFPRTTKSKNCLLSGNIFCGHCGARLTATPVGADYSKKDGTVVQHRYWRYVCYNRTRHKHLCNGQTGYKSSKIDSVIEELLMDFFSDFKEVSMSDFMDAQYSDKKKEFQAKLNLAQRSLKKHASDLNSLKDEIVKAIQGKSKFTPELLNDTIEKVTQEQKQAELDVAKFAEEYSDSEKIVAELKERHNRLLNWANIFEDSEIEVKKMIIAHLIERITVSTGYVIDVDLNISVEQFINYRNTIKKVHN

SEQ ID NO: 9193 - protein, 538 aa, synthetic construct
MSRNNNHGRGEALESASRTNGTIRCAIYTRKSTDEGLEQEFNSLDAQRESAEAYIASQRHEGWVCIPDRFDDGGFTGGNMERPALKRLFAGIESGGIDCVVVYKVDRLSRSLLDFARMMELFDKHSVSFVSVTQQFNTTSSMGRLTLNILLSFAQFEREIISERTRDKMSAARRKGKWVGGMPVLGYDVDPKGGRLIVNEDEAVQVRGMYQLYLEHKALIPVVQEIERRGWKNKQWTTKKGQERGGKPFTKNSLFRLLTNVIYTGKVDYKGTIYNGEHDGIVDVDLWQRVQDALRRNGSTGGKEVRNKYGALLKGILYCAPCGTGMVHTYTAKDNGKRYRYYVCLNAQQRGWASCPTKSLNAHEIETAVVEHIRGIGRNEEIIAATAAKVREESGKRMVELETEQRGHERELKRLHTRVQKLVSESFTAASNGGAAMDQLADLQDQIRTIEQRMTAIREEVIAIQRETVDEGDMARALAVFSPVWEALSPREQSRIVRLLVERVGYDGRDGRVTVTFRSAGFKALCSEADIRSREVSA

SEQ ID NO: 9194 - protein, 554 aa, synthetic construct
MRVALYTRVSTEDQAREGFSLEVQRTYLLQYARNFGWEVFCSMSGQDVYMDDGYSGGNMDRPALQRLLFDARNKQFDLVLVYKQDRLSRKLKDLLALLEEFDNLGIGYKSATEPFDTTSSAGKMAIQMLGSCAEFERNRLVERVFPGMVVGVNKGHWQGARYAPYGYRYNKEAKKLEVYPEEAKIVKEIYAMYLSGKSTSQIAGHYYALGIPSRQGGKFYNKFISNILQSKAYLGILVWNKRHYDTKAKTKNGEGKGYRYVNNDSSKVIEVPNTHEAIITQKEFDEVARLLKRNRTNSVVRFRNNVYHLSGILKCNECGGNFRGMTATVNHRTRDRRPWYRCSSKGVPYIKCNNKSVTADAINRQVWDIVDVVARNLHVLEALGDMIKLNASEPEQLYVEQLEEKETLLHRNLEKQKGLYEVFAADSINLEIYKDRAETLRNEEKKLKQDIKAVQLKILEKRNAVDLTKAAQDFLLRLRSNPSNTQMDYLVKTFMRILFKSIHIQNQEIVKFDLNQPWKMCYEEGTKWLKTDQIQAIPEAKTRRSYECFCAPSA

SEQ ID NO: 9195 - protein, 541 aa, synthetic construct
MPKAISYIRFSTKSQIQGDSTKRQSRLINSWLEQNPGYVLDEHMRFQDLGISGYSGANAKSGAFGEFLAAVESGYIEPGSVLLVESLDRVSRQDIDKAGEQLRKILRAGVEVVTLVDNSWYKEESLRDSLSMIKAMLVMERAHEESLTKSKRLQSAWANKRRDAESTGKIMSRRCVAWLKVSEDGKSFEQIPENVKAVQRVFQLRLDGLSHLKIARQMNEEGFATLNQFRSKAGQWSQSTITDLLSNRAVIGYKVPSKSMVVKGVQEIPGYYPAVITQEQFFAVQQLKEGSGRRPSSDKPLLTNLFKGVMRCSACNFIMIVTGVTDKRSGNYRCSMKYEGRCNAKGISRLQTDRALVQGLLYNAHRLNLSSGNTEVIGKLQSELETLQKQRERLVKLAMLTDDTESVAGELRSLNKQIKEAEKEIAEAYQRGQSSKLDTINHLDLTVKKDRIEAQIIIKRMIRTITVDTARKVCKIEFHNGIVFRDYPLYKIIDGARDLELLPIMGYSEIRFGKGNHHTPNHVLMANAPQWVKDAEESKDY

SEQ ID NO: 9196 - protein, 650 aa, synthetic construct
MYRPICYERVSSFDQVLSGSGLDDQRSIIDQFLDDNPENFTKNRIYITDEGVSAFKNANISAESNLGKFLQDVRGRKYGKGDALIVTSLDRLSRRSSWSENTIQFIVTSDIVIYDISTGLVLKKDDNFSKILMEIILQRSHNESLMKSVRAKVAWENKVARAALCGEVVSNRMPFWLENVDGKYSVISEQAEIVVKCFEWYVEGLSTGEIIRKINDPKWQMVKVSRLIRDRRLLGEHKRSNNEVVPNVYPIIVDSDLFATANRMMDAVMIPKKKPAEKMEYVPEVVKQIFILYDSGVGTGTIVKQIEPGWSTVNVLRVLRDKRVVDERIIDNLTFERVNQKLTKNGVAERIRKDIKIAKDDYITNLFPHILKCDCCDGNIAIHYNHVRAKYVVCRTREEKKQCDSKSIQYIRIERNIISTVMNVDFTKLLIEGNSNNNFKVIDALKIELDALRLEEQSYQSKIADRKVAGKKTSLPLMEGLTDVQDRIEETLEQLEQASVTRTVPDMSYDIESLLNPLNVELRAKARKELRHVLSKITYRVIGKHIVVRMRYFTDVLEHVLIIDNKRGSVGEVVCQIAVHNKDDVTTYETASFKLIATDEQLTIEVLQMIVLNDYVLLLNYIDGLKDGHSTNVAMWMREHMNEVLTNTLM

SEQ ID NO: 9197 - protein, 427 aa, synthetic construct
MRVRIIEPILKVQQKKKRVCAYARVSTIHDKQGESLENQVQYYENIMSSNPEYEYVGVFKDRGITGFTDNRPEFQRMLHLCREGKIDIIITKSISRFARNTAVVLYTVRELKNLGIEVRFEKENINTLSGDGELMLAVLSSFAQEESRNVSENLKWRARKQFQQGELMINTTRFLGYDKNEYGELVINIEEAELVNRIFNDYISGKSSSKIAKELNKENIPTVGNKTWHNSTIIGILKNEKYKGDAILQKYYTPEHLKKTSIRNNGVIDSYYIKENHSPIISREMWEQVQEEIKRRGKTKGNVLGESDKYTKRYPLTGMLYCSKCGSTLRRRTWNSKNSSKKIVWQCSNYIKNGKDACIGTSIDDAVISRLNIKKATIVKEEIKDGKKCYSYTSEKGSGEFSSKAITNKKENGRLLQSFNRPIGATV

SEQ ID NO: 9198 - protein, 441 aa, synthetic construct
MAAYCRVSTDQLEQLSSYEAQVNYYKNYINSHSEYVFAGIYADEGISGTNTKKREQFNKMIEDCKVGKIDIIITKSISRFARNTLDCLNYVRMLKELGIEIIFEKENIRTLDSKGEVLLTILSSLAQDESRSISENSTWGIRRRYEQGKVSVNFTKFLGYEKGKDGNLVINEQQAKIVRRIYREYLNGKSANRIARELERDGICGWNGKAKWYETTITKMLQNEKHKGEALLQKSYTVDFLTKKKAINKGEVPQYYVEGSHPAIIDKDTWEAAQIERQRRKEYAAKHGLQKIDYGIRGNPLAGKIICGECGKYMGRRTRIYKGKKLVWICANRYEEKGVRGCNSKHVNDEELNEVFTIAFNEIIENKDYYTSLWKEKAKSENILIAYKAKQFIKEIKEHNETIEYYGVDLFYKWVANIKVKNPKEFIVTLLEGTNIKVLID

SEQ ID NO: 9199 - protein, 595 aa, synthetic construct
MKPRLFSYVRFSSGKQSTGQSVERQLETAQRIANQYDLELDTLSFKDLGVSAFKSKNAAQGNLREFIDQIGKRVPVGSWLVVENLDRLSRDDVLSALDILKEILRRGITVVTGMDSKVYTHESLSTSMMDLILSIMLFSRAHEESLTKKNRVESQARSLIYKNLNREPGTPAFAIESIGGNVWWSSQQNGLIVPHPDYYSVAQKMIEMKWDGCSPGEIQKYLNEHYTPPTKDKKGTKTKWGMNLVRGFLNPTTHGRKEFILDKRDQNGQLVKKKCIDSEGKEYFENQKETFIIEDYYPALLTETDYLTLANLDKARSATRNSSNNDSLNEIGLLSGIGVLRCGKCGLPMTKNSAAKARFRYVCTSKNTNGKSCGNAGFTGQPLEHVILQLIADHIWTTAKEDKTEWFVSEIAKLDQQIKKLVRLASLTDDSDIDELATEINSYRKQKRELEFKFNEYKVERSEQVSTGWDEFRKFDTEDVTNPERKRIRLRIKQAIRSINCTTFNKRFGLFMIKYIDNSEQRVVLKYNRRSSPGEAFVDIHTVNNKVLVELAGITLHTHIEKLIEPEQYEQARKKWTQDNQVDDTPKTIIDELTQ

SEQ ID NO: 9200 - protein, 542 aa, synthetic construct
MTRVALYARYSSDRQNERSISDQVNVLIQHAAAKGWAVVGTYTDAAISGSAMANRPGLLAALAAADRGEFDLLLAEDEDRLARNLEHLAHVANRLADIGAGIATLSTDQVQDMHVAFKGLIAQDFIRNLSMKTKRGMASNAEKGLATGSRLYGYRSQPGGAVEIVPDQAEVIRRIFSMYVNDRMSSREIAERLNRDRIPSPAGRQWNASSIQGSRQRANGVLHSEIYAGVKVYNRVEMRKDRQTGRKITICKPPSEHKRIDVPHLAIIDQDLWRAAQQRLDSRQTTDPSQRASLRRRPGLLSGLTKCGCCGASYTSLSQGRLVCAAYREKGASACDNNRHVNRAEIEQRVLDGLRTRLVAPDAVAAYVRAYHAAWAEQAAQIEDRRRPLTRRIAEVERAIERGADALLSGATAAAVIGKKLEALEIEQAQLKATLEQLDAEGAPPVQLHPRAAENYARKIEQLQARLAEAADSSDDADRDLISSVRGLIQKVDIEPINKSRGSPVRVTLHGDLARFVLPQHPPSSGCALVVGGGIEPPTCGL

SEQ ID NO: 9201 - protein, 540 aa, synthetic construct
MPKAISYVRFSTRQQSTGDSTKRQSRLINSWLEQNPGYVLDEHMRYQDLGISGYSGANAKSGAFGEFLAAVESGYIEPGSVLLVESLDRVSRQDIDKAGEQLRKILRAGVEVVTLVDNSWYKEESLRDSLSMIKAMLVMERAHEESLTKSKRLQSAWANKRRDAESTGKIMSRRCVAWLKVSEDGKSFEQIPENVKAVQRVFQLRLDGLSHVKIAKQMNEEGFVTLNQFRSKTGEWSQSTITDLLSNRAVIGYKVPSKSMVVKGVQEIPSYYPAVITQEQFFAVQQLKEGSGRRPSSDKPLLTNLFKGVMRCAECGFIMIVTGVTAKRSGNYRCSMKYEGRCNAKGISRLQTDRALVQGLLYNAHRLNLSSDNSEVIGKLQSELETLQKQRERLVKLAMLTDDTESVAGELRALNKQIKEAEKEIATTHQRDQSSKLDTINHLDLTVKKDRVEAQIIIKRMIRTITVNTATKVCKIEFHNGLVFHDYPLDKVIDGARDLELLPIMGYSEIRYGIGNHHTPNHVLMANAPDWVKDEEENNK

SEQ ID NO: 9202 - protein, 519 aa, synthetic construct
MLTIGIYPRKSVYRDNSDSVSVQVQLCKDYAAIIFKDQDLDFRIYDKDEGFSGKNMNRPSFQELMEDVRNNVLDVVMVYKLDRISRNVQEFSAMYDVFQQHNVSFVSVKESFDTTTPMGRTVMYILAAFAQLERENTSERVTDNMKALGASGKWTGGKLPTGMTSVRRQIGEKEHSYLVVDKDTVWLVKKLYDLILDGYPITRIERYCRDHGIKSQTGKFLNTSQIYGILTNPVYCQNSMEAYYFFQDRGCSLPDPVLFDGTKGLIGYGKTKTDTQSQKRQNATNWTIAIGIHDYVIPAADWITAQNHLGLHKMIRTAKHDCGILKGVIRCKCGARMDIRTYIKNGIRFSYYYCTDMARQGKSKCNTGYIRIEEVEDAFLKQLRRIRFNPDGFKLHSDESDGSLRSISSINAELKQTQEAIDNLTNALTAAMDSPAASHIVTKIEELDKTMRNLETSLRQAQTRERNAKTIQETEQEIYSNICFLLDNFDSIEYTAKNELVRKIVKKCILDDKTLHIIF

SEQ ID NO: 9203 - protein, 564 aa, synthetic construct
MKKKKLKCYIYIRVSTSMQVEGYSLEAQRERLTKFADFQDIEIVREYCDAGKSGKNITGRPEFSQMLNDVAEDRDGVDFILVFKLSRFGRNAADVLNSLQYIQDFGVNLICVEDGIDSSKDSGKLTITVLSAVAEIERENILVQTMEGRRQKAREGKWNGGQAPFGYTLDSKNSTLIVNPEEAEIVKIIFTKFAHEGLGADRICDYLNQHGYTKKKVKKKELNYFARSFIMKILDNPVYIGKIVYGRHKTEKVKGSRDEYKRVMSDDYMVVDGMHEAIIDRDLWEATRLRRKDTGVKWNKTHSMDHEHILTGIIKCPICGRSLVGTVRRRKNKKSGEYKDDWYYKCLHRTKIDETHFCDFRLVLSQVELNSQVEQIILDMVADPQFKDYMVMKMDEKVDVSSLENERDQVREQLRQVVGAKKKLAEMLDRLDVSDKHYDRKYQDMHDRLDILYDRISELEDSIAEIEEKISGAYGEKITVNELYKVLLSFDRMYFKMTDLEKKRFMREFIDEIELYPERQEDGRILKQLHLGFPVFYEGSEGDTIRLLKQNTVEVVCLLSGGGV

SEQ ID NO: 9204 - protein, 641 aa, synthetic construct
MRKKKCYIYTRVSTAAQTEGYSLEAQQERLREYADYKNLEIAGEYCDAGKSGKSIVGRPAFLQMLDDISSEKDNISFVLVFKLSRFGRNAADILKSLQLLEDYEVDLICVEDAIDSSTPGGKLTLTILSAVAEIERENINVQFMAGKMQKILNGGWPGGPAPYGYRSVNKELVVEPEEAEIVKLIFDRYIQDEGTLNGVAIWLNNNGYSRISKGEVKPFTYDFIVNVLDNPTYHGKINYFRRTNIKGIRKNPKDAVEVDGIHESIIDEDLWQQAREKREASSGRQEKVDEPDRVSLLSGLIKCPACGNGLIATKNKHVNKNRGGHYKTIHYYSCRYYRKSAGRTCEFKHTYNQAKIDSAVFEIVSNLAAHPAFEKAMAMAAGGDESVEAYEKRMKEIRKDLYHQEHEKNRVGAELDNLDVLSDDYDTEYERIQAEMDDIYDRIESLELSLKKIKKKCNEAKQGVSSIEGIKKILKNFGKFYEKLTSEEQRELYRQFIERIEVYPEEQEDGRVLKSIHFRFPVRYGETDTIETWIGAEGEPDDEISFVLDCSEVQVTVAEAKATYAEIRAYVLEHTGMKVSSLYIAQIKRKYGIDVGIAYNKPEQNKNRVPVCPVEKELAIMDALKAFRMLTEDTEYMEAAV

SEQ ID NO: 9205 - protein, 508 aa, synthetic construct
MKRAVIYARYSSSNQTEQSIEGQVRVCSEYAKAKGLTIVGEYIDRAISGRTDNRPDFQRLMQDSSKHMFEAVIVYRTDRFARNKYDSAIYKRHLRKCNVELHYAAEHIPEGPEGIILESLMEGLAEYYSAELSQKIRRGIRESALKGKATGGNIALGYKIGPDKSFIVDEKEAEAVRMIFDMFVRQKPNSEICRYLNDLGIKTSRGNPFTKSSIPRIIQNEKYIGVYKCGDIRIEDAVPAIVSKEVFAMAQKENARRRTSKQAALPRAEYLLSGKLFCGHCKKKMTGVSGTGRRGGKFYYYYCPTARSKKGCDKKHVPKDWLEDLVVAETLDHILRPDALKYIANACYEIQLKDKTGDEEVEFFRRRIAENKKALDNTLKAIESGVETMTLPVRLKELELERLQLHDELKAAEARKVVLTPEHIEFMLMQYAEKGEDEQAYKKEIIECFVSEVYLYDDKLLIYYNINKNHPELAKSDLALLESDGFDQRDDASTIKWLQKRYSPKKPR

SEQ ID NO: 9206 - protein, 533 aa, synthetic construct
MNAVIYARYSSDKQTEQSIEGQLRYCYDYAKRCGYTVVGEYIDRAISGTSDQRPQFQKMISDSAKKQFQFVIVWKLDRFSRNRYDSAIYKNKLKKNGVRVVSATESIGEGDESIILEAVLEAMAETYSRQLSQNVRRGMKESALKGNSTGGTIPIGYKLVNKQLVIDEHTAPIVQYIFQEYANGTPKADIARYLNENGYRTSSGCKFSINSFSRVLTNRKYIGYYTYNGEVEIKDGCPAIIDEELFNKCQRRIAQNRRSPASKKAIAEYVLNGKLFCGYCKSPMVGDSATSATGTRYYYYSCAGRKSKKNDCHKKRENKDFIEWYVVEQTVLYVLDKQRIEIIAERVVDAYNNSFSDNGIKDLERQIRNVDKELDKLADALIDSQSEKLTARINEKALQLEARRDDLQTEITKQRIACERETLKKDDVVKWLKGFCDGDLFDKEFRQRIIDTFINAVFLYDDKLLIFYNIRNGEQVCIIEDSNEIESALSSAESSDLNGNGSPGFLCLFLQTQVFYFSLLLYFQKNLENIYMR

SEQ ID NO: 9207 - protein, 604 aa, synthetic construct
MVRLLRNRGSNTESNGEERLRNRAFLYGGGTMAYAKLKQTNPRVAIYVRVSTLHQVDKDSLPMQKQDLLAYAKLMLGTEDCVIFEDAGYSGKNTDRPKFQEMMSQIRAGGFTHLLVWKIDRISRNLLDFATMYNELKDLGVIFVSKNEQFDTSTAMGEAMLKIILVFAELERNMTSERVTATMISRANNGQWNGGRIPYGYDYDYDTHDFTPSETEAPIVQLIHDLYEKERSLVRESRILNSKGYRTRAGNEWNPVSLHIILHNIFYCGDYRYNVLKEGDRQKVKDESEWITIEEHHPPIITREQKQRVITMLDANSRINKKKNNYKSGKYTHIFSGLCFCGNCGCPMGAAPASLRADGWRYSKYSCPTRRKNAYTCTGKSTSDPIVGEFAMNYILNMLNAQRNFENVSSPDDLQAILLTGNTFSYIDSIEPDGVLDLYDILASGKVQGAVFGKGANIKPKDGEDSEIASLRAEKQKTERALDRLRNLYLYSEDAMSEKEYIIQRTTLTEKLDEINDEIGMMQSDEWQQSVSDEMFIAKASEFIISQKLTDRNYINYKRLAQSVDAEVLRNFLTSIIDSIIVTDGMVQRITFKNGLSHSFIFKQ

SEQ ID NO: 9208 - protein, 643 aa, synthetic construct
MQIAIYSRKSKWTGKGDSVENQIVMCREYIEMFIEGGDQAQIIVYEDEGFSGKNTKRPQFQKMMQDMREQHFDYLVCYKLDRLGRNLADLANLMEDLERRGTSFISIKEKFDTTTPIGKAMLYFSGVLAQMEREQIAERVKDNMIMLARSGRWLGGNTPLGYSSIKLEKEVSALKKKSMYCLTQNPEEIGIARYIFSSFMECRSLTKVFKNLLTSDIRTRQGKEFVISGIRDILVNPVYCKADQEAYQYFYDLGCQVCIDEEELDGESGLMGYAKTTSTHYKNQSQPCESWIIAKGRHQGIVSGKEFVMVQKLLACNKEKGAAFKNSRNSVSLLSGLLYCTCGHLMRPKNYPASRVTEKGERTFSYRCPYKDATHREKCDVKNVHGNTLDAKVCEEIIGLTNPDAGIIPMLEALLKKIRDTDEEVVSEKDLLQQEYNKKKEEIQKLIGSIKNLDADSVSVQYINEEIKRMDDVCRELHKRITDMESHKEENLDVTDYVKEWLEKMKHFPQIFEELSIIQKRDFLKTIIEKVVWDGEIAHIYIRNPVPGRHRDIFVRLKEKYLRQWYPKFPIWNHRIAAPAWAHDSHKLSLGNLKIYVGESRGFSFEVVVGIRNILQRQYWLHKTTTPYDYKIFYVFHENMCFD

SEQ ID NO: 9209 - protein, 457 aa, synthetic construct
MNEIKPSKLIRVGKYIRVSTDEQAKTGDSVRSQDDVLTNYINTHENMIEYDTYIDDGVSGQKLKRDDFIRLMNDVKNKNLDLIIFTKLDRWFRNLRHYLNTQETLDSTGVSWTAVTQPYFDTSTPYGRAFVNQSMMWAELEAQAGSVRILDVFETKVKYGEVLSGNAPRGYDIVDKHLVPNDDAEIIHDIFMHFFLNKSLHKTIMYIKETYGIFMTITNLKKSILQNKKYIGEFRNNKNYCPAIVDKDLFDNIQLILPNNIKSGVKRDYIFSGLIVCKNCGRKMAGCMQNIKKPSGKRYQYKSYRCPGAFVGKMCLNRKNIYESNIEKYLLENFNDLAERALADYQKKILPSAKSSNKKDSLIKKIDKLKELYVNELITLDEYKIDKEKYLSQLEEIPEENIAIDRQSILETLQKYKGLDIKGIYENLNDVEKRNIWSGLIKEIQVDSNRDYSVVFF

SEQ ID NO: 9210 - protein, 529 aa, synthetic construct
MAKVTIIPSKINPITQLPHNSLNKRKVAAYARVSTLQDEQVSSYDAQVDYYKKYIAERQDWEYVDIYTDKGISGTNRKNRAGFNQMIEDAINGKIDLIVTKSVTRFARNTLDTISVTRELKSHGVEVFFEEQNVYTFESSGELMLTIMASIAQEESRNISENVKWGKRKKYNDGITSLAYKHFLGYDKHPTDPKKGFVINEQQAQVVRLIYKMFMKGKTLSYIAKFLEEKEFKTPMGKEKWRLSTIESILTNEKYKGDALICKTYVKDFLDQKLIKNNGEVDQVYVEGHHDPIIDPNQWELVQAELTRRKNLSNSYKCKSAFSSKLVCANCGSFYGQKVWHSTSKYRRQVYQCNDKFNKSHTKCQTPTITEDDVITRFIEAYTTFMGDKSKVISDCKDIIKILDDTSEMEKEIEHHTARVNEIVVLVQNLIDKNASFPMSQEEFQSKYDEYDNEYKELNTKVNEIEESIRHKKAQSKNIQAFISDLANRPSVLSEWDEEVWNYLVEKATVNEDRSITFLFKSGEEVNVK

SEQ ID NO: 9211 - protein, 531 aa, synthetic construct
MEAIKKVTKIDRAVVAKTSAHQAIASLRRVAAYARVSTDSDEQFTSFEAQVDYYTRQITANADWTLVEVYTDEGISGTNTKKRDGFNRMIADALVGKIDLIITKSISRFARNTVDTLTAVRQLKEKGVEVYFEKENIYTMDSKGELLITIMSSLAQEESRSISENVAWGKRAKCEEGKVYLPYKQFLGYEKSPDGQPQIVEEQAKTVRLIYSLFLEGLMPSGIAKRMEAMGILSPAGKQRWQTSTVESILRNEKYKGDALLQKTFCVDFLTKKMKRNEGELPQYYVEQSHPAIVSPEVFEEVQQVLKRRREARYVGRSGCFSSKIICGECGSYYGRKVWHSNDKYRTVIWRCQHKYDNGEPCKTPHVTEDQVKAAFVAEMNRVIANKDQVLSDIRMLITTLTDTRELDEKEASAGKELEVVSASMRKLVDDYARTLIEQNVYDDQYAELLTQSRLHDEQIAAIGEQREQQKARKRELDAFYKVLKTTGPILEFDEGLWNVAVENLTIHGKGHGMLRFNTNNSLQGWSEVIE

SEQ ID NO: 9212 - protein, 445 aa, synthetic construct
MNRVIHKVQPTIPAIPQRLRVAAYARVSNDKMAMVESLAAQVSYYSAHIQRNPQWIYIGVYADEGLSGTKDNRPEFQRLISDCYAGKIDMVITKSLSRFSRNTLDTLNILRELKQRGVDVFFERENIHSNSGDGELMLTILSSYAQEESRSASENIKWRIRKKFEQGEISGWCQLYGYTIRRGKVTVDDYKAAIVRRIFEEYLAGDSATVIAKRLRLEGIPCEQGGQWKQFTVSEILRNEKYTGNQLLQKTFTKDHLSKRAKKNHGELPLYLVENAHPAIIDADTYQHAMKRMESNQKTAKRPEPKMDNQLFRRKIVCSQCGRHFIRKNTNGTPGYVCSTYSAEGKDFCLSKKIPETTLVEFSLKALGIPEFDKELFDKEIDYIVARYPNDLAFVFRDGHTCEYIWEDRSRVESWTDEMKKSAGDKTRSRKRSISHGSHQESHED

SEQ ID NO: 9213 - protein, 565 aa, synthetic construct
MNRSGKKCVLYPRVSTEMQVDGFSLDGQKNSLKRFADREEMEIVDIYEDAGKSGKSIEGRPAFKQMLCDIENGLDIDYILVYKLSRFGRNAADILNSLEHVQSFGVNLICIEEGIDSSQTSGKLLISVLSAVAEIERENIIEQTMNGRKEKARQGGWNGGFAPYGYYLKDKQLYIQEDEAEAIRIIFDKYVNGNMGFYKIANYLNLQGIPKLKRANGTLAQWSTHFVRMIIDNPVYSGKIAFGRRTREKVKGTKNEYRQVHQDEYIIADGQHDAIISEEIWNQAHEKREITGIKSPSKIGRDRAHLLSGILKCPKCGGPMYTNKHAWTNNDGTYKEIYYYVCSKARTARGKSCNYKAMLKKTDIEPLVIEAIRELIKNQDFATEIKSRIGKEIDTSTLNRELSNYESKLREVELNKTRLENEIDSLPEDTRFRERKLHDMTLRLDGLYDIIVELEEKIEDVKLRRKAVEQDAITLENIYTLLANFDKVYDKISDEEKKSLISSLIKEIEIFPCDESELPLKSILFNFPVYKDGGDVYEFLWDKSTHVSTWAVRGKRSKGFAETTL

SEQ ID NO: 9214 - protein, 527 aa, synthetic construct
MQRLVHYARASTEEERQMEALKIQCEENENFIAKTQDWVLVDKYVDEAKSGTTTIGRNEFIRMVSDLSEDKYDIILIKQIDRGWRNLADWKLFESELIKNNKKLFIRLKNEFYDIEDDGKYISTTMDNIFSEWSSRNLSRKMNNAHKTRMEKGTIVTNGKMWGYNQINADLVINEKEAEVVRLVFNLYIQGKGFRQIAKELSNTGITNRNGKPFALTTLKRMIRNEKYKGVLICGKHHKNFFTKKCEDVPESDWQIHENRISPIVDPDIWEKANIILSGKRKKLDINEKIQVAGYFNGSFALSGKIKCSLCGSNYYHGTYPKQNNKVNVWQCSQYKNYGRSSPYGCANISLKEDDLNAIIKEVAFEFWINKNETIKNVLAILDNIVEENNSSQQLNQLMKEKEKMITKKDKLLDLYSDELISKDEFKKKNDELSEKLNAIEEQLQNLMQQSKLLSNKQNRMSKIKDFLSMEFKDATGITDDFLEVLIDEIVVYPDRTIDVTINGNKYPNVSATRPDRYQHHRTQAGI

SEQ ID NO: 9215 - protein, 520 aa, synthetic construct
MKIADLYVRVSTDEQADKGYSQRGQEEMLRKYCGINQISVRKVIYEDHSAKTFVRPAWTGLLADLKKAKGKVDLLLFTKWDRFSRNAGDAYHMITILRKLCVEPQAIEQPLDLSIPENKMMLAFYLAAPEVENDRRALNTIDGMRRAKKEGRYMGVASVGYINRISDSGRKYIAIDQPQADLLKEAFEEVATGIYTVEDVRRRAVQKGLICSKTSFWKALRNPVYFGKIELKAYRDEKARLVDGQHEALISEKLYNDIQDAIDGKRKRQRPNVRELSNSAFELRGFLKCTKCGKALTGSASKGRRERYQYYHCHSSCGVRFSAPLANEAFVRELQKFKPRNATVNLFRELVVEEFSDQKKRRQKEKKRVSEEIQKQNERLAKARELLLSSVLDAKDYQIIRSEAEDQVLKLEARLLETNNQNPDMLNLESKVEKAILVLSNLAEIYQIADINRKREIIGSIYPEKLEFFESNYRTTQVNEVASLIYHINSTLPQKKTGTFNEKSSKFRLVPGAGVEPARV

SEQ ID NO: 9216 - protein, 555 aa, synthetic construct
MTRRKEYIGKGNSMATNVTAKKKVSFIPAKPVQAINGLPENTKLRVCAYCRVSSDNPEQDSSYDSQIVYYTDYINKRKDWIMVDIYADDGISGTSTKKRTDFNRMIQDCMDGKIDKIITKSISRFARNTLDCLNNVRKLKEKGVSVFFEKENIDTLDSKGEVLLTILSSLAQDESRNISENCRWGIVRQFEKGRVLVNTKRFLGYDKNEDGELIINEEEAEIVRRIYREYLEGKSYIAIAKGLMADGIKNGAGNKKWWDSTISGILENEKYYGDVILQKTITVDFLNHKRVDNKGQVPQYFIEGNHTPIISKEIFDRVQDEKERRASLIGNLAGDRNRYTSKYPFSGKVFCGNCGNTFRRRTWNSTNISKKVVWQCKTYIKEGKDACDAKAVDEAVLMDAFVRMFNRLYESRDALIKVLTDNFEKTIMKKSSAKEIKALDKKIDKLKTELKGLVQFQVKNGMDDEVYKEEYIRLSSELEELRKRRAEFDRQDSIKEALRRRVKQIIQAINSRQELLQEFDEIIFNALVDKIEVISPTHFIFVLKSGMRVEEKYNK

SEQ ID NO: 9217 - protein, 544 aa, synthetic construct
MRDQTTTIRRAAIYARYSTDMQRERSIDDQVALCREYSRKNGLRVIQSYSDRAQTSASLVGREGIMSLIDDAKARKFDVVIVEALDRISRDQEDLAGVFKRLSFANVEIIAVHEGVADAVQVGIRGLLGSMFLSDLKHKVRRGMAGVVNDGRVAGGNAYGYDVVLGKPGERTINEEQAAVIRRIFREYVGGASPRDIAGRLNAEGVPPPRGSKWNASTINGSKNRSYGILVNALYNGQIVWNRVHMVRDPDTGKRVSRFNPESEWKIAEAPHLAIVDRETYDAAQARKADRTRLVEQGASTKKAKRLLSGLLRCSICGSGMASVGFNGGRLRVQCSQNRESGSCDNNRKYNAERIEHAVVTGILSKLEDEEAAERYIREYVAERRANIDNATRSASQIEAKLAKVAGEQERLITLFQTGVLDLDRVKPRLTELEEQRKALEDEAASAREAVPIIELHPAAVERFIKLLSRAKAEYENYEMLKDPEKIEAMRELISHVIVSDSAANGYELDVFTYLSALTGDYAPGGLGGALVAEEGFEPPTQGL

SEQ ID NO: 9218 - protein, 518 aa, synthetic construct
MPKAISYIRFSTKIQSVGDSTKRQSKYINDWLKRNPDYYLDESLRFQDLGISGFSGANAKSGAFGEFLAAVESGYIESGSVLLVESLDRVSRQDIDTAGEQLRKILRSGVEVVTLVDNEWYTKESLKDSLSMIKAMLVMERAHEESAMKSTRLRSVWAAKRERAAKGEIMSKRCAAWLKVSEDRSHFEFIPENVKAVQRVFQLRLEGLSHVKIAKQMNDEGFSTLNQFKSVTGGWSQSSVTELLSNRSVIGFKVPSKSMAVKGVSEIPNYYPAIITDEQFYAVQQLKQGSGRKPSSDLPLLTNLFKGVLRCSECGFIVVVAGVSAKRSGIYKCSMKSEGRCNSVGFSRLQTDRALVQGLLYNTNRLSLNHDNGSAIGALQTELEQLQKQRERLIKLAMLADDTESMAKDLKALNSQIKDAEKAVSEVHQREQSSQLETISHLDLTLKKDRIEAQIIIKRIVKEIRINTAGKKCDVLLHNGLKLLNFPLDRVVDGEIFLEVLPLLDADEFDFDTYRMIE

SEQ ID NO: 9219 - protein, 569 aa, synthetic construct
MKKAVIYARYSCERQTEQSIEGQLRVCQEFAEKNDILIIDTYIDRATTGTNDNRAAFQTMLKDAEKPVPWDIVLVYALDRFGRNSIEVAVNKQRLRKNNKLLISATQRTSENIDGSKNLDGILLENVYIGLAEYYSAELSQKIRRGMNESRQKRQYTGGFVLFGYDIKDKKYVINETEAEIVRQVYADYANGRIVKDICKELAERGIKNKFGRPFVPNTIYRMLRLEKYISIVRYGDEVFENTLPPIVDMETYAKVQSIIAANKRAPSRRKSYGKFFLSGKLYCGECGSLMTGDSGTSHRGVVYFYYTCFDKKRRKGCTMPSVQKDNIENTVFKVCCDVLESGFIPAIVDTAYAIQMEELASNITVINLQGQLKEKEKALKNIMRAIEEGIFTQTTKQRLEELEKDVEVIKSKIETEKIKQQNIASKEDYAKFLKQFIGKQISNDDFKESIFQLLIRKVVLFRDKLRITFNFSPDKGKHDKNIDVDADLAEVKEAQEEYKSGAGGSNLSSPTPPPKGNPAKPVGLFFFYHTTVLARACVGKEKRKCRALQDCFKTAGDLRSKEMFIASQ

SEQ ID NO: 9220 - protein, 511 aa, synthetic construct
MERVAIYLRKSRQDIEAEAHGEGETLAKHKRALLQVAKEKNLNIIKIYEEIVSGESILHRPEMLELLKEIEAGSYDAVLCMDLDRLGRGGMREQGIILEAFQQSKTKIITPRKTYDLSDEFDEEYSEFETFMARRELKLITRRLQRGRIASVEQGRYLPPRPPYGYDIAKIDGHRTLIPNEEQAPVVKLIFSRYINDNLGCAKIANELNKMGLLSYTGIPWSQAAVQNVIKNAVYSGVIQWQKKECKKSKEPGKRKDTRTRPQDEWIEVEGKHEALVSKEDFQKAQKILETRTHPPYFINGALSNPLAGLIVCDKCGMMMVRRPYAKQKPHMICQNRMCNNKGSKFELVEQRLLTVLEEWLSTYKAQWGRRNKKPTPSTDAVKLREAAKESLARELAELEKQKEKLHDFLERGIYDEETYLERSQSLAERIEDAKVGIETAKASLLAEIKRSKAQLDIIPTVEHVLKVYPLTSDIQKKNTLLKSVVERAVYLKEKHQVGDDFELDILPKLD

SEQ ID NO: 9221 - protein, 474 aa, synthetic construct
MRALRPVPAIAPRAVLYLRQSVARDDSISLELQEIAGRDYCVTQGYEVVSVEVDEGLSGRNWSKRPAVQRAMASIEARDADIIVLWKWSRLSRNRKDWALAADRVDVAGGRIESATEPIDTATASGRFARGVMTEYAAFQSEQIGEQWAEVRARRFNLGLPPTGSVPWGWTSHKTYITADPDKAPYLREMYRMYLSGSGYTAIASWLNRTPAKTTNGRDWLHATIRRLLDSPIHAGKVEYLGQIRDGAHDGIITDTEWQQYQALRKDRHIAVRPRTSPYLLASIIVCHCGRKRHGKREVIKTAAGDVERRYYQCPSTTGHPRKSIAAHHVDQAITNWVKQLPHITVDAGDTTGHSIDIEALAREITGIEKQLVKLTEHLLSGLVPEPTYRDTKELLTGKATGLRLELEAAKSRQSFSPAMFLSGSEDLVESWDILETPDRQSLLRTLVRSVTVREDRKLDVITAWGTTEVIDTL

SEQ ID NO: 9222 - protein, 529 aa, synthetic construct
MTYQEGGERMKKITKIEGNLANSFIKPKTRVVAYCRVSTDSNEQLVSLQAQKAHYETYIKANPEWEYAGLYYDEGISGTKKENRSDLLRMLSDCETGRIDLIITKSISRFARNTADCLEMVRKLIGLGVHIYFEKENINTGSMESELMLSILSGLAESESISISENTKWAIQRRFQNGIFKISYPPYGYQNNDGQMIVNPKQAEVVKYIFAEVLSGKGTQKVANDLNQKGIPSKRGGRWTATTIRGILTNEKYTGDVILQKTYTDSHFNRHTNYGEKDMYLVENHHEAIISHEDFKAVDAVLNQRAKEKSIEKRNSKYLNRYAFSSKIICSECGSTFKRRIHSSGRKYIAWCCSKHISQITECSMQFIRDDDIKTAFVTMMNKLIYGQKFILRPLLNGLRNQNNVASFRRIEELETKIENNMEQSQMLTGLMAKGYLEPALFNKEKNSLEAERERLLVEKDQLTRSVNGNFTKVEEVDRLLKFATKSQMLTAYEDELFENYVEKIMVFSREEVGFELKCGIELKERLVN

SEQ ID NO: 9223 - protein, 523 aa, synthetic construct
MAVSRNVTVIPAIKRVGNNKNSESKPKIRVAAYCRVSTDSEEQASSYEIQIEHYTKYIKKNKEWELAGIFADDGITGTNTKKREEFNRMIEECMAGKIDMIITKSISRFARNTLDCLKYIRQLKDKNIAVFFEKENINTMDSKGEVLLTIMASLAQQESQSLSQNVKLGIQYRYQQGEVQVNHKRFLGYTKDENKQLVIDPEGAEVVKRIYREYLEGASLLQIARGLEADGILTAAGKSKWRPETLKKILQNEKYIGDALLQKTYTVDFLSKKRVKNNGIVPQYYVENSHDPIIPRELFMQVQEEMVRRANLRGGKGGKKRVYSSKYALSSIVYCGQCGDIYRRVHWNNRGYKSIVWRCVSRLEEKGSECTAPTINEETLQTAVVKAINELLANKEPFLSTLQKNIATIFNEENDNATDDLDSKLEELQQQLLIQAKSKNDYEDVADEIYRLRELKQNALVENAEREGKRQRIAEMTDFLNEQSCELEEYDEQLVRRLIEKVTIYNSDLTIEFKSGIERQIEM

SEQ ID NO: 9224 - protein, 546 aa, synthetic construct
MPTDSARVAGREKEKQLVCAIYTRKSTDENLNSGFTSLDSQREYCQAFIKSREGEGWRLYPEDYTDPGFSGGNINRPALRKLLSDARQGKFQAVVCYKYDRLSRNTKDFLHILDTFDRNGVAFVSVTQPIDTTSSVGRLMRSILVDFSQFEREMISERTRDKMAAMARRGKRTGGSPIIGFDIDRDNKRLRINPAEADQVREMFDSYQLTKSLSKTAKILNEKGYCMKAWVTRKNQARGGQKFNKASLWYLLQNPLYIGKITYRKEVMPGEHEAIIPEDLFQSVQKLLRGNGHGKVNKQVVERTHAYLLRGLVECACCKTTMTPSSALPRKKGKIYGRFYYYKCLSVVKMDKTACQVRSVSAKSLEEFVVKRLELLGENKEVVERIVRQSQEATGQELPLKRDERKRLTAEMGKGELEARNLVGVLASEGPQSTMREFISERLTEFGAKRQENQARLAALDSEIERLERRQIDADVVRKNLGNFLKLFQKLTEKERVEIVGLLVKRVVYDGENSRVKIALRPLPEAWGDLDHLDGGFYDRQRWLRD

SEQ ID NO: 9225 - protein, 538 aa, synthetic construct
MKRQATKQAISYVRFSSERQRGGSSVERQEAMIAEWLAANPDYSNTDLKFSDLAKSGFHGEHVKEGGGFGKLLLAVEAGVIKAGDVVLVEAIDRTGRLQALDMLTQVIAPILQAGVSIITLDDNTTYTKESVGGAQIFLLVAKIQAAHGYSQALSERVAASYKLRREQAKKSGVTPKRMTPVWLNSDGSVRDDVAPWIKTAFELYVSGVGKAAVAKRMRESGVERLAKASGPGVGGWLRNKSVIGKWETQPDTPEHQIIDDVYPSIIEPSLFYKAQLHAEKMKTQRPKKTAKHFLVGLVRCGECGKSYVMQNKDGAPHTMRCITRAQKLGCDNSHSVPKPVLDKIYSDTSVKAALEAIAQQQMGVNDKEIVTREAELQELSRRVTSLLQTVDAVGFMPELATKLKEAQKAREGAENALVILRSTVVAPPAQGWNEMGKLWTLEADDSQRLAAMLRTVGYSITVNANGQITSSHSNAMYRYDGVDRRKNRYKLIAGERLILVSKGDEAGYPYHEPFQSDEPADLVWDEADYADLHQQYQ

SEQ ID NO: 9226 - protein, 537 aa, synthetic construct
MKAAIYSRKSKFTGKGESVENQIELCKSYAKNNGYDEFYIYEDEGFSGGNINRPEFKSMMKDAKYKKFDAIICYRLDRISRNVSDFSSLIDELKALSIDFISIREQFDTSSPMGTAMMFISSVFAQLERETIAERIKDNMYELAKTGRWLGGTPPFGFSSEPTYYLDNNSKQKKMMKLSPIDEEISLVRILFEQYLSLGSLGKLQKYLIQNNIKTKRDSNWDIKALQLLLRNPVYVKSSDLVTSYLSTKGATVFGDPNGNGILSYNKKDSKDKYKDISEWILSVSKHEGVIMDNLWIKVQRQLDKNKDLAPRLVNGSEYGVFNSVLQCAKCGGKMIQKQGHTSKKTGEILRYYICTNKINSTETTCDSKNVRLDILEKHVMKELFKATADKGSLIKAIEEYKKSLESEYIDKDNIKTYEKQISQKELQVKNLIDKLSLNPNIFDLLSSRIEELNKELKELKFKKFELENTNSNLKAAIKEIDASTSMILNFKSMWEKADYSMKKLLINSLVDYISYNSDTMEVVIKPFCTNKKKGAL

SEQ ID NO: 9227 - protein, 474 aa, synthetic construct
MKKTITEISSKDTKSKKVTTKSKLNVAAYCRVSTESDEQMNSLANQKEYFEKLIKSHEEWNFMDIYYDEGISGTSLKKRDGFNKMIADALAGKIDMIVVKSISRFSRNTVDALQTIRNLRNHDIRIFFEKESIDSNDIKSEFMLTIMSSLAQEESQSLSENVKWGKRKIAQKGFVQIPYSNVLGFQQKGKYGIEIDREQAKTVVLIYDMYLHGKTTGEIIKKLIEDGTPTPTGLEASHWCNTAVLSILRNEKYCGDAILQKTYTKDFLNHKKCINYDAFPKYYVKNNHEEIIPRATWEYTQELLEKYSKRSVNVRYGDLIFCLACGSKYRRFHWYHKYYEETILSYRCLSKYDKSVNCSNIKLFEKQLDELYHETVLQLLSYYKKELVEYFKFTIPKVIKGKRKSNRIIKLLDNMISFIQSDYEYYSLHILIKKISVHPDRTLEFTILNGNIIKTSIPKYRLVDHYGRKKTSGN

SEQ ID NO: 9228 - protein, 667 aa, synthetic construct
MAYAKNKVVKLWTQKKAALYVRVSTRYQVDKDSLPFQRKKLKEYCKFLEIDKYVIFEDDGYSAKNTDRPHFQEMMSRIRTGEFSHVIVWKVDRVSRNLLDFAAMYQELKDHKVTFISMNEQFDTSTAIGEAMLKIILIFAELERNMTSERVTGIMLDRAEQGLWNGARMPVGYRWNEQTKFPEPDPDEVKIVQLIFDRYEEWRSSIKVARFLNNKNFKSKRGGEWTSRLIYDIIRNPFYIGTYRYNMRESGRGPLKPESEWIVRENNHPGIISKDQFDRCNKIMDENASRRDTSEMRARKFVHTFSGHLVCSNCGSNMIACKDHARTNGWRPSIYRCAKRSRMMTCDNSKTVNETYLGTFVFNYIANLARVQKNFTEITSTEKLESELLKGEAFEAVSGIIPDSLNSTFQALLYSNLGNGTYVPDIALLSKFDEVQDHNQIDLLNTEIEKSKNAITRLTDVYLYDPASMTKEEFAAKKKELIKKIEEMEHQLAELLDNSEDNNLTDLSFIKKASAFLVTQRIVSKSFIDYVQMAQELDNEILKNFVDQIVDRIVIKDGRIQSITFVNGLTHEFFYSRPAELPVCKKCGGRIGSTCGCRTRTFSFNGKRYQRIKVGDPRDALHGQKNPVCPECYAKEGRWHHWMCGIERCPICGKPLQTCEHGPNGKE

SEQ ID NO: 9229 - protein, 655 aa, synthetic construct
MKPTIITYLRYSSKQQADGLSEFRQSEINRKFVEKFCEEHGVDLNEVISLKDLGVSAYRGLNLTLGSFSQTIKKFKSGEIKKRFNEDGDINTYLIVESLDRITRTGPFKSTQIFTELLEYTNIVVLADGEKKIYSKKSIDSTHGMMDLFMALISLQRSHTESLMKEYRSRKSWEKKREDLLNYFTLPEDEREGLERPKNATAMCPFWLTAKKDGRGYDFIPENKKVMDFLIEKLLDGNGMTRAVRLLNDEIDNGNLKPKLKKANRKTRHFRAAAYSGLFNSVISTVKGDYLLTESYYPTEDDVEQGKYPEKHLGKRVRKEVAVLKNYYPALMTESQAAYIRKMMDERRTSGTKPNKSIKNLAQGILRCPYCNSTYIKSKDRRNVYLRCNLAREGLCNAKVIKHDVFEHNLLQFCKGLNINKIISNQACDQVLDSSLKELEQKMIPLKVRKSELEDDIEQIVKNISSIKIPSLLEKVQDDYLAKENELKKVVQEIDLIETSIMKLQQQIAMSDGDNSLQELIDLTLDESADDEIRQRFNVELKKVVKSMTVLYRDTEDNPFGYHMISIQFLDGVHRLIPVHEKMTDKIHNILPYQDAVKVDSVDFSETVILPTDYLEGLESGKYPQLDGMAKYYQENPAKYLKLKYQIDHSQEIYE

SEQ ID NO: 9230 - protein, 534 aa, synthetic construct
MNYNDNKKYTYFLYSRKSSESEDRQVQSIDDQVGRLKELAKTLDIKIKHIYTEAKTAKKPNNRPVFDEMMKKIEAGEANGILCWQINRLSRNPIDSAQVQWLLQQGGLKSIQTIDREYKPEDNVLLFNVESGMANQFILDLSKNVKRGNLCKVKNGWRPGMAALGYLNELENHTIIPDPERFDLIRRAWDYMLTGNYTVPQVLTKLNDEWGFRSKKRKRTGGKPMSVSGMYRTFTNIFYAGVLVYDGVEYVGKHKKMVALEEYDRVQEILGRKGKPRPKKYTFAFTGMIRCGECGCQITAEKKKKFIKKTGEIRYYTYYHCTRRKTDVVCTQRKSIDEKTLENLIFERIDKLAILPEFFDWAMEALNQDNDKEIVDRSKVYEMQHKSITQAQKELDNLTKMRYRELIDDNMFIKERDVLQGQIKKLQQELRETEQRAEEWLELTEQVFHFARYAQDHFENGSIEERKDVLTGLGSNFLLKDQKLDISVHKWLLPIINGYKTLEDEYKMLEPIKFASTKVKTEALTSVITRWQAR

SEQ ID NO: 9231 - protein, 536 aa, synthetic construct
MKRAALYARFSSDLQSDRSIDDQFAVCRGRAQRDGLQVVALFEDRAKSGASVFGRAGLAKMVEAAKTGVFDVLIVEALDRISRDQEDMASIFKRLTFQGIEIVTVHEGKADAIQVGIRGIVSSLFLTDLAHKVRRGHAGNIREGKHAGGLAYGYRHTPGKAGVWVIHEPEAAIIRRIYSEYVAGDRTREIIDRLNAEHIAAPRGAYWRKNTLTGSNNRHNGILGNEVYCGRLVWNRVRMVKDPDTGKRISRPNPESEWHRADAPHLKIVEPEIFDKAAAIRRERGHLAPAYRRKPRHMLSGLLRCGSCGGGMSVKGEDSGGTRVVCTRYREAGTCDNQRSYYLHTIEQTILGGLRDHLRNPEAIKLFLKTYHAERKRLAADNTNTKARLERELGEVGRKLERAMSAMLASPAAVETFTDAIATLEADKRRLNSELSSLTEPVNVVSLHPAAQARYLALVEKLAAGGKGGKPGNDTVTAIRELIESATIQKTSPGQPVVIDVKGKLEGLLKTPVFAESASGGKLVAREGLEPPTPGL

SEQ ID NO: 9232 - protein, 540 aa, synthetic construct
MNVGLYIRVSTLQQVDKDSLELQESMLKSYCKTHGHKVINLFKDAGLSAKKDNVRPALKQLIQFVKEKKIELVLVTKIDRISRSLKDLLDMICLFHEHDVAFVAITQNIDTSGYMGRFTLNLLGAIAELEREMTAERVSEVMRHRASNGKWNGGVIPYGYTTQQRIYKQSIKEKKSKAEAMGIASKLAPQPKLLYTDKDEVIILKQIFKTYIETKSIRETTRQLYLAGYKSRSNKIWATTTISRILNNPTYTGKVLYGKRKTDSKTGKLKKAEVANQTFVDGLHEKLIDDETFKTIQHILSNTSLKKSNAEKQYLLSRLLKCGKCGGSMNGHTYNKSKNEKSYAYYKCSNHFKVPSKCEGLTIPSDKLEDFVIKTLTNLSKDEVFLKDKEKMMKTLEKEASPDESKTKEDLVKLTSTEKDLLSRRDNLLEAMERKLLDDKDFQERYEKLKVDLENNRATQQKLHSFVDNVDIMKNALNASFEEISSFGLNWEYLDFEGKVAKTRAIIKEINVTEEDINIQIYLDTESSSSLSVVPRTDTD

SEQ ID NO: 9233 - protein, 667 aa, synthetic construct
MVTPDKKSEKKRYVIYTRCSTDDQAQGDFTTLDAQAHHCKNMLDAFGHDLAKIGDKGIVNDDGYSGKDLNRPGIQMIIDHVRKKAPFDGIIFFRLDRLTRNTRDLYWLIDLFRENEIDFVSVRENLDSSTAIGRVVIGILGILSAFERELTGERVKASAIARVRQGKWVGGRVPYGYTLIPDGAPLPNGRQPHKIVFDEKIAPYLKVIWEMAADNKSLTQVGLELHKLGLKTMNGKEWRRQVISRIVKNPFYKGYIQYSEEYHKGNHPALIDERLWEKANRILSARLPGHNFVQKERYYEYLLAGIIKCGECGSHMVCNFTNGRGNKKFFYYDCSRAKQALGCSNARLSATTFDKAIIDYFKRASRDQSIIIKAIGDAILESQVKLEKIDSELQEKETKLNAFRHQANKLLELAMGNTVAKGSTYKDKMNELELEIAKLEDEIDKLQAQKRVTSMNAHSGEFLHRNIAFAMQYIDQAPPEAQKSLIQALIKDILVYNDRLIINMYIEEPLEDILPKIIPTIKEKRPTEACKALVPTAPLSGDSASCQHWLPRVDSNHNTQIQNLMSYRLDDRAEKAYLRNEKIAYPSFLSAAPLRAFKKEGYFRNRADKYYQAFFCSQSSAFFAFSHVVETSLARPPAAPLTVLQPEEITAKIIKMEKTTSFFIHLL

SEQ ID NO: 9234 - protein, 583 aa, synthetic construct
MKKLYSYIRWSSQKQTVGTSLARQTEAARNYATENGLEYAEIRDAGISAFKGKNITHGALGSFIQAVKDGVIEKDSTIFIENLDRLTRSGVGTAQKLLLDLLDLGLTVVTGMDQRVYTMESANENPTDMLISLLMFSRANEESKTKQNRTNNTARALVARFKQGQPTNIKNMSNDPWWFDSSGSKYEAVKPHPVHWVAAQKAVELFLMGWGCFRVTAYLNSHLDLYPAPKPTKRQIDQGVKKWAVPNLVTMRKNPALMGVKKLTIEGYEHKLDGYYPALVTPEQFARIQDIRTGNKFVQGEQKKMISLLSGLGVLKCGLCGGPMIAYSREGRLRYVCSNGKIQKSSCKVWSVNGSIVENLTARALVYGYTHSILLGNTKTEDLTPLIESKETELGLVKKQLTNQAQAISTIGPIQELIEQVAVLSQREQSLLLELDSLKQKLALQGSENELDELIIKTLSLFSDELLGDVTHTDRMQIREVVRKCLPEITISKLKDKALRIDFRFHDYSHMTFQGVMQGKEKSYTLTRTPHDQLYTKFAAVFSDVLETSLDATDIDGYMAASDRMVAALGLPEPLGRDFFSKR

SEQ ID NO: 9235 - protein, 446 aa, synthetic construct
MNPPKPMRKVRCAIYTRKSSEEGLEMEFNSLDAQRESCEAYITSQKAEGWVPVPDRYDDGGFSGGTLERPALKRLLADIESGLVDVVVVYKIDRLSRSLMDFSKLVEVFDRNAVTFVSVTQSFNTTTSMGRLTLNILLSFAQFEREVIGERIRDKFAASRRKGMWMGGVPPLGYDVVARKLVVNQPEADLVRHIFDRFLKVGSATLLVKELNAAGYHTKSWTTQDGKHRDGAPITKNFLYKLLDNRVYLGEAVHKGEVHAGEHPAIIDRATWDKVMAVKTDNAPRKRANAVRSSTPAPLKGLIHCAHCGRAMTPSHTRKKGRLYRYYTCMKAIHSGHESCPVRSIAAGEIEAAVIGQVRALLRAPEIRARAERMAPTMSPGDLHAALDRFEALWDELFPAEQARILQLLVERVAIAPDGAEVRLRAEGLASVITDITAQAGDRSAA

SEQ ID NO: 9236 - protein, 529 aa, synthetic construct
MSSYCIYLRKSRADLEAEAHGEGETLSRHKTALLELARRMGITISATYEEIVSGETIAARPQMQRLLSEVGAGEWDGVLVMEIERLARGDTMDQGLVAQTFKYSGTKIITPLKTFDPQNEFDEEYFEFGLFMARREFTTTNRRLVRGREASAKEGKYVGSVPPYGYRKVKIPNDKGFTLEIIEEQAKVVRMIFEWYAEGAEVNGQKKRIGPYTIAVRLNELGIKSVAGKDYWTIYGVQHMLINPVYIGKIRWGYRKVKKTVTPEGMKKKSREFAQDGDYIVVDGLHEPILSEELFYKVQDLIAANPPTPIKYRNNNVNPFAGLIFCAKCGHCLSYRKGYGRHPGYLGCNIAGCDNKAAPFELIEQRVLSILNSWVKDYSVDKAQIKHEADLNVELSNAISLAEKEIETLQDQLDKVYSFFERGTYTEKIFKQRSSAIEQQITDIGEKIDRLKAEHQQVLERQNVQAEFVPSIKHLLEIYDTLEPVEKNKWLKQIIDHMVYEKNADGKYRNVDPGDFTLGILPRLPKKGS

SEQ ID NO: 9237 - protein, 524 aa, synthetic construct
MAKTITVIPPNINPLTHLPSLINQKRKVAGYARVSTDSDEQFTSYEAQIDYYTNFIKSRTDWEYVKVYTDEGISALGTKHRDGFKKMIADALAGKIDLIVTKSVSRFARNTVDSLVTIRKLKEKGVECYFEKEGIYTFDGKGELLLTIMSSLAQEESRSISENVTWGQRKRFADGKVSVGYSNFLGFEKGENDTLKVVPEQAETVRIIYKLFLEGKTTQGIANYLMEHGILSPSGKQIWQASTVASILTNEKYKGDALLQKRFTVDFLTKELRINNGEVPQYYVEGSHEAIITPEEFELVQDEMTRRKELGRAYSDKAFHSKLICGDCGGFYGRKVWHSSDEYRSVIFQCNNKFKNTVKCTTPRLTEDEIKQRFLTAYNELMGNRENVIADCELIKQTLCDTVELDNRIKQCEDELTVIMNLMQVHIKKNTEIAQSQIEYAKETERIENRYKEEHKKFETLCDDKTIRKRKSKELKVFIGTLRHKPLVLSEWDERIWITLLDTATVMMDGSIVFRFKSGGEITA

SEQ ID NO: 9238 - protein, 529 aa, synthetic construct
MNAVIYARYSSERQTEASIEGQLKVCYDYAEKQGYTIIGEYIDRALTGRNTDRPQFLKMIKDSSKQEFQIVLVYQLDRFSRNRYDSATYKAKLKKNGVRVVSARENISDDASGILMESVLEGMAEYYSRELAQKVTRGMNLNAEKCLYNGGTVPFGYKIVDKKFVIDEHTAPYVKKIFEMYSTGNTIKEIITYLNARNIKTSTNTKFNYSSLHTMLHNRKYIGFYKFGDVEVKDGVPRLISDKLFEKVQGESLKNHKAPARAKAIEEYILTTKLFCGYCKEMMVGVSGTSGNKKKFCYYSCNKARRKLCNKKNVSKDYLEDLVVNQCRELLTDENILKIAKEVVKQSRKDDSYSEIEYLEKAINKLNKEKKNLMTTLKSCDIESVKQDIFSEIGNINEEIADFEKQMSEVKNNMVVVEETEVIFFLSKLKDGNINSLKYRKLLVNIFVNQIFLYDDKITFIFNTGKEPVTLPEKFLEEYEKEHKIRSDLQKTGSPRRNRLTNRAKRFLICFFEIFVLLSCSCGYICAIV

SEQ ID NO: 9239 - protein, 422 aa, synthetic construct
MPVIVKKRCAIYCRKSVEEGLDQEFNSLDAQREAAEAFILSQKANGWVCLPKRYDDGGFSGGNTKRPALQELLDDCEAGLVDMIVVYKIDRLSRSICDFADLTKKFDEWGVEFSSVTQEINTATSAGRMMLNILITFAQYEREVITERVRDKMSASRMKGMWVGGNVPMGYDVVNKKLVINPAEAEIVRRIFQRYIEIQSPKLIAMELNEQNIKTRQGKKWDTSYIKRMLSNHTYVGEIKYRDAICKGEQEAIITREVWERCKEIQKTLNAPANRSVRQEMIAPLKNVLRCGHCGGAMMPTFSNKGGRRYYYYLCSKDAKRGTTECPVKQIPSGDIETLVRKQLQKMLSDISLVMRFAEQSEMSPVEVVDCFREEFWNEITPGEYNRLLLLLVEKAVVWEDKLELELKTNGIKSLMEEFKNA

SEQ ID NO: 9240 - protein, 531 aa, synthetic construct
MTFKNSLPHAFSDVFRDDETINVYSYVRFSSKAQSLGFSEVRQIEQINRFFEQYPSARQVERYEDLGVSAFKGKNLKSGQLAKFVERIKSKEIQPNALLLVESFDRISRVGGYDALELIISIIQSDCAIYTLFDNRLYSKRKINSSSDINLIQNILERANDESRNKSDRISDAKARNLEKGENGGIITKRCPFWIDFFDGKFVLNEHAKAVKKATELCFDMGFQSIAKELNKESTTRKYSDSSIGKLLHKPAIYGSFLAMKNDEYGRRTIVNKEIKNYYPAIISESEFHRISAKLKERQDPKMAGRKATDFKNVLRGLVFCACGSTFRFHAQKAMYVDLVCHSSASGQCDYAKKKMGVRHRYARIEEIFFAYQNKMPFDLITTKNEDIKALEKEHNEIAGQIILKEKALENTFAMLEKTSESAQKYISIKIDELSSELDKLKADEHKINLKISSIHLSSKSDINTKEIFRLLISEKGRIKINNFLHSQSVKLIITPLRKKYYSVDIYHADKHIDTIDVSPDGYTARKGIHA

SEQ ID NO: 9241 - protein, 492 aa, synthetic construct
MQAVAYIRVSTDEQAKEGYSVPAQKERLEAFAKSQGWTIIDYYMEEGQSAKDLNRPEMQRLIDDIKKGSMGIEVVLVYRLDRLTRSVLDLYKLLKLFDDNKVAFRSVTEVYDTTTAMGRLFITLVAALAQWERENLAERVRMGMAEMARQGRRPGTKEPYGYNYVDGSLIVNKTEAAIVKKIFDMYMRGYGLRTIVKWLNNPEHPVPSKTGRPWYENTVSYIITNPLYVGKFVWGRDPAEIKKHKTLFRAVAPEYIYDGSHEAILDNDTWEQAQFKLKKRKNMPPRLASSNYPLTGVLKCGLCGAGMCGSISTQKNKSGKRKVRWYKCGARDHALGCTMKYMRAETVEEKVLEYLSSITNSSDLHILADTSLRDKGNSKEQEEIASVNKEIKELTAKKKKWYDAFEVGVIGIDDLRERTKSIADKEVFLRERLSEIELVEEFSWTPEERFQMVKNINWAWDRATPEERKELIRELFEKISIFPTGEMEYEFI

SEQ ID NO: 9242 - protein, 488 aa, synthetic construct
MKVVSYSRYSSDNQREESIEAQQRAINKYCEDKGYTLTRNYIDLALSATNDNRPEFQKMISDSKSGLFQAVVVHKLDRFARNRYDSAIYGRKLQQNGVKVISVMENLDDSPESIILRSVIEGYNEYYSLNLARETMKGLKENAYTARHNGGQPPYGYSVGPDKKYIINPSEAEAVRVAYKLYCDGLGYIQISNALDELGYRTRTGKRFSKNTIYDMLGNEKYTGVYVYNKRASTSNGIKQNRKHKDPEDIIRIEDGMPAIISKNDYEKVMHMRNKNKRIGGKYKSEEYALSGIIKCGKCGGAMVGNKYQGGRDRGTLYVTYQCSTRKRTKGCDMKSINRDYIESEVYLNLKEEILDKLETKEFQINLANRMDEGGKELKIKLLSSQKKLDDINKQLENIVNAVSAGMDPTVFIDKSNDLNKQKQQLMDVISSAKFEIIEESIQMERVRDTIKRAEIDKDLTALFKAVIREVVVTEDDFVVEYLIMDRV

SEQ ID NO: 9243 - protein, 534 aa, synthetic construct
MEKQLRYVVYCRKSTDEKNKQLLSIESQRAELQKLILREGLTVVGEPLEERHTAKKVGRPVFKQMLNMIDQGEANGIIVWKTDRLSRNSIDTAAILSRLESGAIQRIQTLERTYNYNENVILLYVEFGMADQYKRDLSSSVKVGMNTKIRLGWCPGRVPVGYLNLRTSDDTISTVVKDPERFTILKKCWQRLLERRYSLQQVYEMAIEDGLTNRNGGKYCRSNFYKLFQNPFYYGYFQYMIDGNPKLNKGQHEPMITKEEFDQAQAILSGDQKPRKHSHDFTYRGVFRCGRCGSLMSGYRKTKKQNNGNVHSWTYYICARGKDRHCHEPQLGEGMIDAEIARILGELEIPPQFHQWAMDTLRDDVQRSEDYTIELLQSRQRALEISKAKSEKLLDLLLGQAINQEAYDRKQAELRKEQERLSDLMVTAEKKIEDYLKEADKVFSFAELAKGRFMTGDSEEKRYAAFMLSLNPLVIGRKPLFTLFPVFEALKKIALLVRELSHVLEPVKGVDIAMTYTDKLGENPEWWAIQDLNL

SEQ ID NO: 9244 - protein, 582 aa, synthetic construct
MRVSVNLNAQKPDTTTNAVIYARYSSHGQTEQSIEGQLAKGHEYAAAQGYTVVHEYIDRAMTGRNDNREAFQKMLSDTGKHQFQVVIVWKVDRFGRNREEIAFNKHTCKKNGVRVEYVAESLPNSPEAVILESVLEGMAEYYSIQLSQNIRRGQLESAKKCQCVGGSVPLGYTLDSDKHFVIDPQTAPVVKKIFDLYAEGATISEITGQLNEQGIRTIRKQLFTKNSLTKLLKNEKYIGVYTYKDIVRVEGGVPAIVDKSTFDRVQELLKINRRAPSHTWTKVEYLLTDKLFCGHCGSPMVGESGFSHTGAKYSYYGCIKRRREKACDKKPVRQDWIEALVLDETVKLLHDDELMEYIIDRTWEYYQVTDKVQEEKAVLEAQLAEVDKAINNLVRAIEAGIFNAATKSRMDELDAQKAALTASLADLELTSGIRITRDHIEYFLLRLRDLDVKDRECQKRLVQTFVNAVFIYDDGRVKITYNYSGQSSTITLNQIASAEKGKGFVCCLPCSTSSPRFPRGVAALFLFWGKSGVNRLPISAVLCYNGSENGRGGRKNEKAACCVPDGARLLGLCGVRGRNAGR

SEQ ID NO: 9245 - protein, 499 aa, synthetic construct
MKTAVIYARYSSDTQTEQSIEGQLRVCNEYAKNNDILILRTYIDRAMTGTNDNRPDFRQMIEDSKKHDFSIVLVYKFDRFSRNKYETTKHKKTLKDNGVKVVSATEYIPDSPEAIILESMIEGYAEYYSAELSQKVKRGMNETRQKGNFTGGTIIYGYKVENHKVVIDEEKAEVVRFIYDQYAQGVYVKDIIKTLTERGIFNRGKKFARNTVYNILKNEKYSGIYRHGNEVFTNMYPQIVPTEIYENVRKKTETNKYGTRSVEVVYLLRNKIKCGYCGSPISAECGTAKNGQKIRYYKCLGRKHQSGCKKSQVRKEILEKYVLDNVCEQMQRPEILDKMATYLLQVQENRIKQNSVLTNLTKEKRQTENTINNIMQAIELGGQSATVMKRMRELEEKLTDIEKRLTIEKSQTAFRLSKEQIIDYYKSALEKEPLQLINYFIKEIQLYDDKMIIIYNTPKTINLDESQGFSFYDKNVKMPYVIQNREYYGLKDFRVVMRV

SEQ ID NO: 9246 - protein, 476 aa, synthetic construct
MKTAIYVRVSTNEQAEEGYSIDEQIDKLKKFCEVKDWHVMGVYKDPGFTGSNIDRPGLKKLIRDVEKKKVDTVVVYKLDRLSRSQKDTLFLIEDVFGVNHTNFVSLNENFDTSTPFGKAMIGILAVFAQLEREQIKERMQMGKIGRAKSGKAMSWHWPPFGYKHKGDSYEIVELEAQIVKQIFHDYLSGISITKLKDKMNDEGHIAKDIPWSYRTIRQTLDNPTYAGYTKYKDQIFPGNHEAIVSKEVYEEVQKQLVIRQKEAYQKNNISRPFQAKYLVSGLVRCGHCGAALGLHQYAKKKDGTRTKIYKCYSRTKKRHSTMAKADHCISRDYQKEELEAAVLNEIEKLRLNPSLMKNYSVTPEVDDTPLIKRIEELDRKLEKLVNLYLDETLPLDVLNERKEAIQKEKKAIEKKLDGVEKEKPELEKSEALGILKSLKGSILALDYEKQKVIVRQLIKQITLKDDEMVIQWRFVV

SEQ ID NO: 9247 - protein, 596 aa, synthetic construct
MRKISRIEPTVPSVAAKKKVAAYARISMESERMHHSLSAQISYYNALIQKKPEWEFAGVYADDGISGTGIAKRSEFQRMVADCEAGKIDIVLTKSIQRFARNTVDLLETVRHLKDIGVEVRFEKENISSMSGDGELMLSILASFAQEESRSISENVKWGTRKRFEQGIPNGKFQIYGYRWEDDHLVVEPEEAVVVKRIFQNFLDGKSRLETERELEADGIRTRQGCVMRDSNLKQILSNVTYTGNMLLQKEYISDPINKQRRKNHGELPQYWVENTHEAIIDIETFRYIQQEMARRKELGPLANKSLNTSCFTGKIKCPYCNQSYMHNTRKPRTPNGNRLEFWVCGSRKIKGGNCPVGGSINQANMKKVLADVLGTETFDESTFLEKVDVIYVTQRCVLEIHLADGQVITRDCKNTGHQDCWTAEYREKTSEKRRKKPNCKGSSAITGKLKCVICGCNFRRMTQPSATMESGKAFYWRCGERNGCGTVGLREDVLKPFIAETLGIPQFDDAEFERQIDHIDVLSASEMLFYFKDGSTIKRTWVPPKRVGKPWTEERRAKFIESSKHRVITPEQRKVMSERMRALRKERGDKWKKEK

SEQ ID NO: 9248 - protein, 526 aa, synthetic construct
MEKRKVTTIPATINKFTAKPMDSKKKRRVAGYARVSTDHEDQQTSYEAQVDYYTTYIQGREDWEFAGLYSDEGISATNTKHRDGFNRMIADALAGKIDLIITKSVSRFARNTVDSLSTIRKLKEHNIECYFEKENIWTFDSKGELLLTIMSSLAQEESRSISENVTWGHRKRFADGKVSFAYSRFLGLDKDKETGKIVVVPEQAETVKLIFKLFLEGMTPHSIAAELTERGIKTPSGKDVWNQQTVRRMLSNEKYKGDALLQKEFTVDFLQKKMKKNEGEVPQYYVEGNHEAIISPAVFDTVQAELVKRKRGGTRYSGVSIFSNKIKCGDCGGWYGAKVWHSTDQYRKVIYRCNHKYKNEKCQTPHVTEEEVKELFIKAYNELLSEKKEIIENAEIIRKTLCKTESMIEEKQRLEDEILVLVEMTQNLVAENARVAQDQNEYQKRYDGLVQRYETAKKSYDDLVAKIEQKEAHGERIKQFIKNLKEQQCVLAEFDDALWGSMVEYVTIGKENRSVTFKDGTEITVE

SEQ ID NO: 9249 - protein, 536 aa, synthetic construct
MKRAALYARFSSDLQSDRSIDDQFAVCRGRAQRDGLQVVALFEDRAKSGASVFGRAGLAKMVEAAKTGVFDVLIVEALDRISRDQEDMASIFKRLTFQGIEIVTVHEGKADAIQVGIRGIVSSLFLTDLAHKVRRGHAGNIREGKHAGGLAYGYRHTPGKAGVWVIHEPEAAIIRRIYSEYVAGDRTREIIDRLNAEHIAAPRGAYWRKNTLTGSNNRHNGILGNEVYCGRLVWNRVRMVKDPDTGKRISRPNPESEWHRADAPHLKIVEPEIFDKAAAIRRERGHLAPAYRRKPRHMLSGLLRCGSCGGGMSVKGEDSGGTRVVCTRYREAGTCDNQRSYYLHTIEQTILGGLRDHLRNPEAIKLFLKTYHAERKRLAADNTNTKARLERELGEVGRKLERAMSAMLASTAAVETFTDAIATLEADKRRLNSELSSLTEPVNVVSLHPAAQARYLALVEKLAAGVKGGKPGNDTVTAIRELIESATIQKTSPGQPVVIDVKGKLEGLLKTPVFAESASGGKLVAREGLEPPTPGL

SEQ ID NO: 9250 - protein, 447 aa, synthetic construct
MRKITKLETKKIDLPKLKRVAAYARVSVERGRTLHSYSAQVSYYNDLIQKNPEWEFAGVYADLGISGTGIEKRNDFKRLLQDCEEGKIDIILTKSVSRFARNTVDLLKVVRHLKELGIEVRFEKENINSLTGDGELMLSILASFAQEETISISNNVKWGIRKKFEKGIPNGGFIIYGYRWKNKKLEVVPEEAEVVRYIYDNYLQNKAYQKVASELNELGYKAYKGGKFSPSSVREILSNITYTGNLLLQKYYIVDPIIKKEKKNTGELNQYYVENSHEAIISMEQFEAVQKEFERRNKLGQRANQSLHITCFTSKVKCPLCGKSYRRSGKKNRMGKDYTYYVWVCRTKSEKGAKYCGAKVIPEEELKIAACNALGWNEFDSDLFDETIEKVVPIGEDMIEFYPYDGGVIKQEWHSTARQRGWNEERKRTTTEKRLKTLEARKNAKEC

SEQ ID NO: 9251 - protein, 525 aa, synthetic construct
MPKNVRKIPASVNLYNAVPITNKKKRKVAAYARVSTDQEEQLTSYEAQVDYYTNYIKSRDDWEFVDVYTDEGISGTSTKHREGFNKMVKSALAGNIDLIITKSVSRFARNTVDSLTTIRKLKDIGCECYFEKENIWTFDGKGELLLTIMSSLAQEESRSISENVKWGHRKRFADGKVTVPFGHFLGYKRGEDGNLVIDEEQAVIVKRIYREYLSGSTAVAIAKGLTNDGIETPGHKQKWHASTVRSILTNEKYKGEALLQKYYTPDFLTKKQKVNNGEIQQYYVENNHPAIIEPEIFEMVRIEKDRRLMLNGKYSGTDILTSRIKCGECGGSYGAKVWHSSSKYKKVIYQCNRKYAGKEKCKTPAIRADDVEARFVNAVNSIFENKDEIISNLEMMLDKICNKKELSEEKEKLEKSLTEQVEKIQELIEINSRVAQNQEKYKKEYDALIKEYEETKSKFEQLEIESSKKAAKHQMIKDYINTLKKQDKPLEKFDGLMWGSLLESATIKDKDTIVFKFKDGTEING

SEQ ID NO: 9252 - protein, 531 aa, synthetic construct
MEIIKNNRCILYCRVSSKEQEDKGYSLEAQEKLLKEYADRKEIQISKIFKISESASGKQIRKTFNEMLSFVKKRKINIILCEKIDRLTRNLKDGATISDWIMVDEKREVHFVKENFVVSKNTKAHENLIWDMKVAIARFYTNNLSEEVKKGQKAKIESGGLPSMPKLGYKYKTIDGFNHREHVIDEEKAPFMKRMFELYLEGNYTLRQMSDMLYDEGLRGKNGRKVGISSIHRKLRDPFYCGYIMWNDNEYDGNHESIISEELFNEVQTKLKRRYKAGQRKTHDHLFKGMIRCADCGCLITWETQKKRQYGHCKGFKPCSQKGYVREEEMEKTVNKMLNLIKPKSQAVLDWIKRALKEKHKDKKSFTRNTKDGLNKQISLLTNRLDKIYEDKLDGLITAEYYKKKLNEFTKEKKKLLKKMNNSEDNSDKYYHVGIEILDLAYNAKDLYYSPNATNEDKRVLLQRIFDNMQLDGKTLKASFTPAYQFLSEYMPKLNTTSELLKQGSVYKKTGSFEPAHPALRRERDSNPRYR

SEQ ID NO: 9253 - protein, 529 aa, synthetic construct
MINDHKCILYCRVSSKEQEDKGYSLEAQEKLLKEYADRKEIKISKIFKISESASGKQIRKTFNEMLAFVKKRKINIILCEKIDRLTRNLKDGATISDWIMIDEKREVHFVKENFVVSKNTKAHENLIWDMKVAIARFYTNNLSEEVKKGQKAKIESGGLPSMPKLGYKYKTIDGFNHREHIIDEEKAPFIERMFELYLEGNYTLKQMTNILYDEGLRGKNGRKLAVSSIHRKLGDPFYCGYIIWNGKEYEGNHEPIISEEMFNEVQTKLKRRYKAGQRKTHDHLFKGMIRCADCDCLITWETQKKRHYGHCKGFKPCSQQGYVREEDMEKTINKMLELIKPKSQAVLNWIKRALKEKHKDKKSFTKNTRDGLNKQISLLTNRLDKIYEDKLDGLITADYYKKKLSEFTKQKKQLLKKMNNSEDNSEQYYHVGIEILDLAYNAKDLYYSPNATNEDKRVLLQRIFTDLKLDGKKLKANFTPAYQFLSEYMPKLNATSELLKQGEYYNKTGSFEPAHPAVRGVCNVIRTKI

SEQ ID NO: 9254 - protein, 531 aa, synthetic construct
MKYFAYVRKSTEGEERQALSIQSQIDKAKEFFGGLEIIEILEEKHSAFKPNNRPIFTDMIKRIENNEADGIIAWHPDRLSRNEIDASTITYLVRTGVIKDLKFGSYNFDNSPEGIMMLQLSLSQSQYFSSKLGKDVKRGLEQKFNMGWQPNMCPNGYINVRDGQHGFSKIEIDKDRYRILKKAFSLMLEGGYSVPEVLDRLNNEWGFKPKMGNSKLSRSSLYRIFTNLFYAGIIEYAGKQKQGKHKAMISLEEYDRIQLLLGRKGKPRQRSHKFAYSGIIKCAECGCSVCADLKTKFIKSKKEYKEYIYYRCTHKKPNYVCKQQAVEVKNLDEQINNELTKYEFEPDFKKLLFKILDEDKKDNPDENILITKNLKDKIQRLELEKTNLTKLSCRGLIDDDEFVKQRNDYEKEISLLRQKLVDVKNQASRNDELVKKVKFAVQARENFNNSEIKVKKDILSSLGTNQELKDRKLHILAHKWMIPIENDIKPLEGKYLTLELNKLPLTKAKNEALTSLRCELRRERDSNPRYR

SEQ ID NO: 9255 - protein, 425 aa, synthetic construct
MTDPKPSELKYVLYSRKSTESDERQAMSIESQINEMTAVAERDGIEITDIIQESKSAKATGQRPQFNQLLQRITNGEANGILAWAPDRLSRNAGDLGTIIDLMDAGKLIQIRTHGQTFTNNPNEKFLLMILCSQAKLENDNRAKNVKRGLRAKCTRGKKPGLPPLGYKLYRDPEDYSKGSKIIIDPERAPFVKKMFDYVTESNLSGRVVNDYLHDEGFRTRKGKRVTLSMTYRMFKDSFYYGEFEYPAGSGNVYKGDHTPLITKEQWKKTNSMLKTFEKTKWGTKIFYYSRLFKCGSCGSGICGDLITNRHGKQYTYYKCTKYGGKGKCHEKYIREEKLIESIAEMIDQFMDKDMRIHSRVTREVEKFNEMQRITLGENAREISSKDYIEYILKNSTNMDKRQFLECLEGQLTLRDGNIELKSTD

SEQ ID NO: 9256 - protein, 460 aa, synthetic construct
MLDFKIHCVINVGMESVAIKNSIEVTLGNVVIPKTQYCLYARKSTEQDELQALSIDSQIKEMTDMAVKEGLNIVEIRKESHSAKDSGTRPVFNQLIIDIKSGKFTGIICWAPDRLSRNAGDLGRTVDLMDQGYLIDIRTHGQRFTNNPNEKFLLMILGSQAKLENDHKGENVKRGLRAKCEQGWRPGVSPVGYIHDKYLNKGQKKVFLDEEKAPVIKEMFEKVAYDGYSGRDIYIWLVKERDFKTKNNKRLALSRIYKILKDTYYYGEFEYPIGSGNWYQGKHDPIVTKELFLKSKANLQASPKRYPGTKEFDFTQLMFCGKCGSGICAEEKFKHQKNGNTHRYVYYHCSKGKDRFCKEKAIREEELIKQLIQMIDKIDIDEISAQDKIKKEVMRFRKFSYGVFGQETEFDKRPIEADIRNYAKYILTDGTKDDKRELLGCLRSRMEIKDKGIYLKAQGI

SEQ ID NO: 9257 - protein, 564 aa, synthetic construct
MKAIIYARVSSKEQEETGYSLSAQEKLLKEYAERKSFVIVKVFSVAESASGKKEREIFKEMIAYMSKNKIHNLLCEKVDRLSRNLKEAVVVNDWVEANDERKIHFVKQNLVIHKNSKSDEKFRWDIEIVLAKKYISNLSEEVKKGQKAKIGEGWLPTKPPLGYKTIGDKGKKIHIIDEDISFLVKKMFEMYSTGLYSIKKLGDEIYDLGLRSRYGNRLVKSRIGSILSNPFYYGEFLWNGELYQGNQEPLIDKELFDKVQRVLHSKTTPKYSKHDFLFKGIFTCKECGGVVSWETQKEIIYGHCNWYHNCTKKPWYKENEIDDQMTVTFKGLEIKSERLAEWIKKALKQSRKADVGFKEENKNVLDRLIKRGEKRLETLYDDRLDKRITVEVYDEKSKKINEEIKDLNKKLSKLDIVDEKQRKSKINLFELSQNASKIYSGGDPLKKRKLIKDVFDVLYLDNGIVQFEYKDEFKLLAEAILETNRSKTAQSLKSPISIFELFNNGSIKGKTDGLTSVYPIWLPEQVQNKDMQDVVRFFEILIDMDRRQTGRSKRKQNGTNETVI

SEQ ID NO: 9258 - protein, 462 aa, synthetic construct
MVVACYVRVSTENQLENYSIEEQTERLKLYCKSKDYIIYDMYIDGGYSGGNMERPALQKLLLDVQSDKINAVLVYKLDRLSRSQKDTLNIIEDHFLKNGVDFISLNENFDTSTPFGKAMIGILSVFAQLEKDQITERFTMGRIGRSKAGYYHGGSTAPTGYDYKDGKLIVNPVTSQQVQEVYREFLNGKSINSIQRQMHEKYGGWGSATLVLNVLKNSVYIGMVKFKGVAYPGLHTPIISREQFERVQQYLNSEERESRKTTAQKTPFKAGFTLSGLVFCKRCGAKFSAEHGNYTCYSRSKSSPKRVIDPNCKNDKWKISDLDELIFDEIEHMSIDDDRLNQVVSSVKQPSAVDEASFQAEIEKIDQQIKRLLDLYQIGTLSISEISERVHSLQAEKEKLENQANENRRQMSVKERIERFKQLVSQIQYMRTQSVEKKRIYVAELIETIYIDGKEVSINWRI

SEQ ID NO: 9259 - protein, 550 aa, synthetic construct
MTANTYKPEQITALYARLSQEDALDGDSNSIVNQKAVLSKYASDNGFTNPVFFIDDGVSGVTFDRPNFNRMIAEIEAGNVATVIVKDMSRLGRDYLKVGYYTEIFFVERDVRYIAINDGVDSAKGDNDFTPFRNLFNDFYAKDTSKKVRAIKKAQGMAGEHLTKPPYGYKVDPNDRKKWIVDEEAAVVVKRIFDLCVAGNGPMRIAKTLKADKVLTTRAHYAKQKGKPLPDNPYSWNESTIVAVLERMDYCGHTVNFKSYSKSHKLKKRIPTTKEQQAIFHNTHEAIVEEAVFERVQELRANKRRPTKAERQGMFSGLVFCADCGSKLHFATCKSFNGSQDNYRCARYKSNTGDCTAHFIREEVLRKIVLNRIFVVTALFYEDITAFMELIQKQRFDEAEKDMKRKRREVGQARKRIAELDRIFKRIYEDDINGTISHERFLKLSAEYEAEQKELTEKVKAEQQEVDTYEQNKSDFDSFAAIIRKYVGITELTPTIVNEFIKKIVVHAPEKIDGKRFQKVDIVFNFVGEIYLPTDPQTEQKEANKQEKTA

SEQ ID NO: 9260 - protein, 512 aa, synthetic construct
MPQVKVIQPIAEQAKKLRVAAYARVSSDSADQLNSFATQVDYYTSYIRAKEEWEFAGMYADEAVSGTTADKRDDFQRLLADCRAGKIDRILVKSISRFARNTIDCIQTVRELGQLGVAVEFEKEEIDTGNMGSEMLLSILGSAAQEESLSISKNLKWSYRRRMKSGDFITCKAPLGYFFKNNTLVPDPKEIPIVKYIFNSYLAGKSLEEIADELNEAELKSDKKNSEQWHATIIRYILSNEKYIGDSLVQKRYTPDELPLRQRRNKGEVSQYYIKDSHPAIIAKEIYEAVQELLQQRIEQHAPKQKIRKSPLSNTMQCGLCGSAFHKHKSNDENCWFCYQHRKGKTLCPMGILYEKDIYAAFLSVHNKLLDNQDILKAMLNQLLELQTKVMFTRSDIVELNEKISELIKQNHSLTRLQTKGCIDSAIFIERSNLNNQKIEELRRELQQLQEPDEVSRIVDSTKLLLELLEEAQPMLEFEPSVFKSMVLKIVVYPERFSFHLINGLVLDEGRC

SEQ ID NO: 9261 - protein, 536 aa, synthetic construct
MPQKVVMEIPANPMLGDLRKRKRKLRVAAYCRVSTEEEEQQNSFEVQVDYYTEKITHHDGWQLAGIFADDGISGVRTKKRDQFNEMIELCRKKKIDLILTKSISRFARNTLDCIKHVRILKSWGIPVIFEKENIDTSNMNSEMILTCLSSFAQAESESISGNVTKGIRMGYKQGRFAFRYTGFAFQKGPDGEPEIIPKDAQTIRMIVREFLNGDSLKGIKEKLEKASIPSPARESKWTTQTILRILQNEKYAGDVLLQKTYTSDFLEGKVKKNNGELPQYYIKDNHPAIIPREMFFEIQEELARRRSKKPANTKKAKTNRGRFTSKYALSERLVCGDCGCYFRRVTWNIHGRKQIVWRCINRLEFGPKSCGNSPSLEESALHTAILEAIRSLVHGQQEEMAAALQDTLIHCIAGEKEEVSPIVIENKIKELEIEFDRLLVLAVDENDIIDHKLKQISETILKLKQQKKRLEYTAERSEVMESKAQEVMGLISAEDLDLTEYSDALVYRIIERITVLSKEEIRIRFVGGFEITQPLH

SEQ ID NO: 9262 - protein, 464 aa, synthetic construct
MMTNKIIRCALYIRVSTAEQCMHGKSLEAQESYLQQYASDHNMIVVGVYADEGKTARKELKKRKAIHSLLEDVKAGKIDVILFWRLDRWFRNLSDFYKVQDILDEYGVRWMSASEPGINMETRDGRLQLNVVLSIGQNEVDTTSERIKFVNEASIRQGKLIFGDANMGYGYKSGIVDDRKCMVKDPEREETVNAFYKYFFKHQNKCATLRYIQDNYDPNFSWAIMRTLLSSEFYKGTYRGFPYCPPYLTEEQWNELQKIAHKNIKRAKSGRIYLFTSLIRCPVCGQLLCGTGCKSIINRKTREKRDYCYYRCSRAHNDRICTYRHRLSQNLIEQYLLDNLDTEYRKYQIRVKKIEEEKKKIAQTKTPEKLNAELERLNLLFQKGRVEWDYYSSEYDRIEQELKDLSRIKPEVKRDLSFLEDLLQSDFKTLYVSLSPENRRAFWRSTIKQIHLNEDSTIKFVDFL

SEQ ID NO: 9263 - protein, 509 aa, synthetic construct
MYVIYLRKSRKDSDLEALGIDVLKRHEETLLELARARSLPIGAIYREVVSGDSIDARPEMVRLLSEVESGIWEGVLVMEVERLARGDTIDQGRVQRAFFYSNTLIVTPGKTYNPAIENDNEYFEFSLFMSRREYATIKRRMQAGRIRSVKDGYYVGNIAPYGWRRVKADDCKHFTLVPDEKENPVLKLMYDFMGNKKYGFQKTCSALTGMGIVSRSGKPFNPATVKTIISNPVNIGMLRWNYRKSQKAIVNGKIATSRPKADDYILVKGKHPGCISEDLYYRANSVNSSMTAPVKRSCRIQNPFAGIVRCSCCGRVMVRKKMSAKQPRDYLICQYAGCTTVAIELDELENAVLEWIRNYIADYKVNNFESADDSGQESLRSILVNLEKEKEITLKQRGSLFDLLEQGIYTKEIFFERSTALEDKIKDFDKKIESVNADIVRLDLSKKNRSTFVPKCQELLNAWDTFDAADKNTALKNVIERIDFTKTEKNARGQRHSSFSIDVFPRISR

SEQ ID NO: 9264 - protein, 536 aa, synthetic construct
MLRQTNQQPITALYPRLSHEDELQGESNSISNQKRILETYAKQNGFSNLRWYTDDGYSGANFQRPGFQAMLADIEAGKVGTVIVKDMSRLGRNYLQVGMYTEMIFPQKGVRFIAINDGVDSAQGDNDFAPLRNIFNEWLVRDTSKKIKAVKRSKGMNGKPITSKPVYGYLMDEDENFIIDEEAAPVVKQIYNLCLAGNGPTKIARMLTEQQIPTPGTLEYRRTGSTRRYHPGYECKWATNTVVHILENREYTGCLVNFKTEKLSYKVKHSVENPPEKQVIFENHHEPIIDTQTWERVQELRKQRKRPNRYDEVGLFSGILFCADCGSVMYQQRYQTDKRKQDCYICGNYKKRTHDCTAHFIRTDLLTAGVLSNLRKVTSYAAKHEARFMKLLIEQNEDGGKRRNAAKKKELEASEKRIAELSAIFKRLYEDSVTGRISDERFTELSADYEAEQRELKERAAAIQAELSKAQEATVNAEKFMNVVRRHTSFEELTPTLLREFVEKIVVHECSYDENKTRRQDIEIYYSFVGKVDLPE

SEQ ID NO: 9265 - protein, 539 aa, synthetic construct
MNDNVTLIPARRRAGNRISKEENKPKLKVAAYCRVSTDSDEQAGSYEVQVQHYTEYIGRNKDWELAGIYADDGISGTNTKKREGFNEMIDDCMAGKVDMIITKSISRFARNTIDCLKYVRQLKEKNIVIIFEKENINTLEASGELLLTIMASLAQQESASLSQNVKLGLQFRYQEGKVQVNHEHFLGYTKDEEGNLIIDEEEAKTIRRIYREYLEGASFRDIADGLERDKIKTGGKRYKWHLSTIRGILRNEKYMGDALLQKTITTDFIEKIRIKNDGTVPQYYVKDSQEPIIARDIFTQVQEEMVRRANLTSGMDGKKKRVYSSKYALSSICTCTKCGDIYRRIAWNNRGKKSTVWRCCTRVENGPSACDAPTVQESELQEATLKAINQLLSCSDSMMQVLRNNIEIALADDNSGEMERLNVILKEKQKELVKLAHAKKDYTSLADEIDILRDKKQELLVQRAEMEGVKKRVAELTDFFQGTVQELTEYDEGMVRKYIEQIKVYEDKFTVCFKAKVEIEIECENNRKIMAVNRDVNNL

SEQ ID NO: 9266 - protein, 580 aa, synthetic construct
MARRKTALRGVSAPARITKVAIYIRVSTIHQVDKDSIPMQKKDLIAYCQLILGTDNYEIFEDAGYSGKNTDRPAFQDMMGRIRKGEFTHVLVWKIDRISRNLLDFAEMYEELQSLRVTFVSKNEQFDTSTAIGEAMLKIVLVFAELERNMTSERVTATMISRANNGQWNGGRVPFGYSYDSKTSTFSIREDEAPICRKLKDLYLENKSLVYTARALNTAGYKTRSGADWTATTVWIIASSPFYAGIYRYNRYKGTENRTLNPEDEWVMIPNHHPAIFTLEEHEAMKASLKINSKNIDNPVGRMHTTANVHIFQGIAYCGKCGNKMVSTPGRKHADGYRSSNYSCPLHRKSNKCDNATVSDMIVGEFIINYILNMLNAKKTFSSIDTPEELQKHLLIGSTFSDISSIKKDGLNDFFNLLSRYGSDNSYVFAIKKPRKKKASVDPELASLRKEKEKQERALQRLQDLYLYSDKSMSEKDFILRKSEISDHLKSINAQLGLITQNTDSFLSDEEFIKQASHLLIQKELKNRKYIYYKNLATSVDPEILKTYMETILDSIYIIDGRISSIVFKNGLTHKFIYKN

SEQ ID NO: 9267 - protein, 523 aa, synthetic construct
MELLNVCIYLRKSRADREAEARGEGETLARHERILLDLAKKRGYNVGAIYKEIVSGETISARPVMQQVLHEVESGMWDGVLVVEVERLARGDTIDQGVVSRAFQYSGTMIITPSKTYDPNNEFDEEYFEFGLFMSRREYKTIKRRLNAGRISSVKEGKYCGNKPPYGYKRVKLQREKGWTLEPVPEQAEVVKMIFSWYAGYGCEQIGMAKIVRKLNDAGVATMYKKPWTVASLSKMLSNPVYIGMVRWNARKTVKSVKDGVITRSRPLAKDYLLCPGRHPAIISEELYNAAQHIRKKNPPRPVGVRNTVKNPLAGIVYCSKCGRAMVRRPYQKSGQEDTLLCPYTSCPTVSSKLSLVEESLLDGLRELVDGYKLNGDVSESDTNDMISSKEILIAEKHAEIKKLNEQKLKQYDLLEQGIYSTEIFLERSKATAATLEACSAAIERLQEELEHDRLLLEQRSSFIPRCEDLLEHYWDLDIPTRNRILRELIDKVLYTKDTKNAFLEGDKITFLLDIFPKIQENT

SEQ ID NO: 9268 - protein, 575 aa, synthetic construct
MNKIIDTLNTQKAAIYIRVSTHHQIDKDSLPLQREDLINYAKYALNIDNYEIFEDAGYSAKNTERPSYQYMMSKLRTGEFSHLLVWKIDRISRNLLDFATMYEELKTLGVTFVSKNEQFDTSSAIGEAMLKIILVFAELERNMTSERVSAVMLSRATNGQWNGGRVPYGYNYDKSTKQFSIHPIEGNHIKKLYDLYLETQSMLAVAKYFNEHGIKTKTGNNWSPTTIGKILASRFYLGEYQYNLHKDGIGGAGVASLKPEDEWITVKDHHPAIIEIEQWDKCAEIRAYNHRRSNAPKRYKRKNTHIFAGLIICGKCGSTYQATIDRARTGGYRPSIYLCSRRKQYSDCQNKYMSDITLGPFILNYISNIIKANANMGKTTTPDMFKKKLLRGDVFKDVKDIAPSGLNEMYNMIVSKKFNSDPFTSTVHRDESQPDFASERELLISEKRKYLRALDRLKTLYLYNDNAMAEKDYIIENKNILDNLKRVDERLEEIEKNSSQNFTITDSEFIEKASYFIISQELSNQRYINFNSLIQHIDTNVLKNFIQSVIKKIVVLDGRITSIQFKNGIEHDFLY

SEQ ID NO: 9269 - protein, 640 aa, synthetic construct
MRRKKDRSNGITALYERLSRDDDNAGESNSIVHQKQMLEDYAIKHGFTNLVHFTDDGWSGATFDRPSWNRLVEGVKNGEITACICKDMSRIGRDHLQVGFFTDILFREKEVRFIAINNGIDSDRQETSEFAPFLNIMNEWFVRDTSKKIKAVLKSRGSSGNAHTSNIPPYGYLKDPENPDHWIIDEEAAEVVRRIYRMTIEGKGPYQIARELSEEKIERPSYYLGKKGLGNHASNYDKENPYMWRGNQVTTLIARPEYIGKTVNFRTFKNSYKDKKTKRADKEDWVVFDDTQEPIVDEETWMLAQKLRQNVRKADPMGEPNVLTGKIYCADCGAPMYNHRQRKGRERIYYTTKGEKRISHSNPADCYECSTYNLAYQKYDRHCTCHHISTKALKSIILKTIQETCHYVSLNEQEFVYSLQEESAMKDIAVSETVKNRIERNQKRVHELDMLIRKIYEDNVIGRLPDRLFQSMLTDYENEQNELNKIIETDTADMQRIIGGQNNVERFLKLVKKYENITELTPAMINEFIDKILVHEPQGKGADRTTEVEIYLNYVGQFQVPVEQHEPTEEERIAAEKEAERLRRKRESNRKYMKKIREKSKEFAEHERIAEEKSSDSNVCVEQNATSKSNRQKVKGEKIA

SEQ ID NO: 9270 - protein, 535 aa, synthetic construct
MLRQTTQKITALYPRLSHEDELQGESNSISNQKRILETYAKQNGFSNLRWYTDDGYSGANFQRPGFQSMLADIEAGKVATVIVKDMSRLGRNYLQVGMYTEMIFPQKGVRFIAINDGVDSAQGDNDFAPLRNIFNEWLVRDTSKKIKAVKRSKGMSGKPVTSKPVYGYLMDEDENFIIDEEAAPVVKQIYRLCLAGNGPTKIARMLTEQEIPTPGTLEYRRTGSTRRYHPGYECKWATNTVVHILENREYMGCLVNFKTEKPSYKTKHSIENPIEKQAIFENHHEPIIDTQTWERVQELRKQRKRPNRYDEVGLFSGMLFCADCGSVMYQQRYQTDKRKQDCYICGNYKKRTHDCTAHFIRTDLLTAGVLSNLRKVTSYAAKYEARFMKLLIEQNEDGGKRRNAAKKKELEAAEKRIGELSAIFKRLYEDSVSGRISDERFTELSADYEAEQQELKERVARIQAELSKAQEATVNAEKFMNIVRKHMNFEELTHTLLREFVEKIVVHECSYDENGTRRQDIEIYYSFVGKVDLPE

SEQ ID NO: 9271 - protein, 538 aa, synthetic construct
MAKKVTVIKAAKAQKHTQEERRLKVCGYARVSTGSQAQATSYTAQVEYYTEKIESNPLWEFAGVYADEGISGTNVKHRDEFQMMISDCEDGNIDLILTKSITRFARNTVECIQTIRKLKEIGVGIYFEKENINTLSEKSELFITILASVAQGESENISSNNRWAIQKRFQDGTYIISTPAYGYGKDEDGNLVIIESEAETVRWIYESYLNGMGVYVIAKALNQKGIPTIRGAEKWQDGVIQDILKNPIYEGDMLQQRTYTETRFPFVRRVNNGQRNQYLIKDSHPPIVTHEEAEAVRNLMAYRVDVLHMNKSDYTKRYLFSGRIICGECGRTFRRQKIYIGKPYEKIIWTCSGHVEDKERCCMKAIREDVLHRAFTDMWNKLYTNQGTILEPLLKGLTELVAARQDSEEIRQLDKEIKDISGQSQILNQVMRKGYMDSALFMESSSKLGWQLTECRRKKTLLTRKLRRTKEIVRTEQLIQLIAEQDGLREEFDEQLFKMTAEKIVVSKEHDITFCLHNGLKLTERGGGQDAVAHANRL

SEQ ID NO: 9272 - protein, 670 aa, synthetic construct
MYLILQLDLLSVLQYNLYEHYGGNTKGESMEVEVIKANNPFDESAKIRKTDRLRVAAYCRVSTDDEDQIKSYNSMVKYYTELIKNNNQWVFAGVYADKAITGTKVDKREDFQRLIQDCMDGKIDMVIAKSLPRFARNTLDTLKYVRMLKEKGIAVYFEVEKINTMKDGEFLMTILSSVAQQEVENTSAYVKKGLKMKMKRGELVGFQGCLGYDYDVATKSLSINAKGAETVRYIFDRYVAGAGSTMIARELNEQGITTIKGNPWTTSSVMGIINNEKYKGDILLGKTFTVDPISKRRLENLGEEDRFYIRNHHEPIISEETFARAQEIRERRNGGRKSPTPGKREKYSRQYAFSCMLECGFCGASLSRRRWHSSSKYKKTIWQCVKSTKSGKRYCPDSKGIPEQVIEEAFIESYKMLCSDNKDVLEEFITRVEKTLSENTARDKLMKYQKSADNLQTKRKALLEKYLEGIVSQDIYEETDVGYERKLSDIRANIEMLEQQMEDEVSLKRRVEDFKKALSQNEVLQEFDRGIFESIIEKVIVGGYDEDGNKDPYKITFIYKTGFRNEVGNAKQRFDKTKSVGDKAKELCSHIADEVKDVCSYVSDNTCGDCSVTAKGELVEVLEFTHFYEHFTFEKTDWSERGKHLKKYIRVIVAVELDTVGAKRTPTSTQ

SEQ ID NO: 9273 - protein, 471 aa, synthetic construct
MNVIYLRKSREDLNSEDTLWKHRSTLVELCKRNNWEYTIFEEIGSSDSLDKRTEINKVIALAEEGKIRNVICMDLDRLSRNTFHSTYIQKIFRDNNVKIVTPTKTYDLNNENDILFSELQNVISAQEYRLIRKRMMQGKELGAKEGNLVGGTTPLGYYYDRNERIVKIDEDESKRYRWLIDNFLTGVFSTRTLAVEFNKYYVSKRGNKINCSSLHRILTNRFYLGEIRFKGEWYKGKHQPLITLDEFELVQKQLNGNSIVPLRQGYKKIKPLSQILRCGYCGHTLSVTVDKRYGNFIRCWHSDIITGERCCQKGIKESIVLEVLDAEIKSHMDSLRDAINNGGTEHQNKKINTLQSQIESIDTTIGKLETKKENTILMTQEGILTLAKCKEELAKIEKEIKTFNDDKQLLQKEISSTNKDYKKDLIRFEEVYESLKDATAEEFNTLIRTLVNRIVLKKEDRYTLEVDIQFI

SEQ ID NO: 9274 - protein, 438 aa, synthetic construct
MSTDQEEQLLSYENQVNYYTNYISENPLYEYAGTYADEGISGTNTKKRDEFNRMIADCRAGKIDMIITKSISRFARNTLDCLNYVRELKDLGIGIIFEKENINTLDAKGEVLLTILSSLAQDESRSISENCTWGIRRRFETGKHKMSTKRFLGYDTDETGKLVINRTQEPIVIRLYQEFLDGKTTDYIKRIFEREGVKNWDGGTKWQSTTLMSMLENEKYKGDALLQKSYTVDFLTKKRTQNKGEIQMFYVEDDHDAIISKRIWECVQLEIKRRKKYLEEHGTNSYSHRPESNPFASKIICGDCNKVFARKGWRSSTGVDRKVWQCSERYKVKGVMGCVNRHVEEETLIKAYLMAWNALVENREDFMEQWTEQLQSENLLEGYRAEKFIEYTDGAEPLTEMDTDFMLKTLDHIKVFEDGTLLVVFLDGMEIECKNEEE

SEQ ID NO: 9275 - protein, 523 aa, synthetic construct
MAEKTITVIPARKRVGSRRQVTEEKPKLRVAAYCRVSTDRDEQESSYEAQVEHYTEFIDRNPEWQLAGIYADDGISGTNTKKREEFNRMIEDCMASKIDMVITKSISRFARNTLDCLKYIRKLKEKNISVYFEKENINTMDAKGEVLLTIMASLAQQESQSLSQNVKLGLQFRYQAGKVQVNHNRFLGYTKDDEGNLVIVPEEAEIVLRIYREYLEGASLFQIGQGLEVDGIKTAAGNNYWLQSTLKKILTNEKYIGDALLQKTYTVDFLNKKRVANNGIVPQYYVENSHPAIIPREKFMKVREEMYRRAHMECGPDQKRRIYSSRYALSSIVYCAHCNDIFRRINWNNRGCKSTVWRCLSRVEKNRPSCTARTVKEELLHEVIVRAVNEVITESSSFIPALQASFERCLGDSNSAAVEGIDAHLLELQQELLKLANARQNYDALVDEIDELRAEKEELLLQEANKDGIRQRMADMVAFLQSEPEEVIEYSEALVRRMIEKITVFDDHFVVEFKSGIEITINE

SEQ ID NO: 9276 - protein, 530 aa, synthetic construct
MTYPKGGETMKRITKIEGNAILLNAVRKTRVAAYCRVSTGSDEQLLSLETQKDHYERYIKAHPDWEYAGLYYDQGITGTKKDKRPTLMQMVADCEDGRIDRVITKSISRFCRNTTDCLELVRKLLGLGIPIYFEKEDLDTGSMESELMLSILSSLAESESVSIAENSKWSIRRRFENGTFKLAYPPYGYNYIGDGEWAINEEQAKWVRFIYSETLSGKGSDAIAAELIELGAPTKKGGKWTSTSVRGILSNEKYTGDCIFQKTYTDERFNRHTNYGEMDQFYMEGHHDAIVSHEDFDAVAALVEQRAKEKGITRGDAKYQARYPMSGKVFCGECGSPLKRRMNYSTHIQYPALTCSGHLKDKNSCSQKFIREDALQMAFVTMMNKLIFAHKEVLPPLLTSLRNVSKKEAISRLSELDERLEKNAERQNTLTTLMTRGYLDPALFTQESNDLLTEAQALTEGKEHLVFSVNGEMKKTEKLADLIRFCNRGEMLTEFDGDCFSQFVERVVIHERTTVGFELKCGLTLKERIR

SEQ ID NO: 9277 - protein, 572 aa, synthetic construct
MKGQDNRKYAIYSRKSKFTGKGESIENQIELCRQHIKLHHDNVAEEDILIFEDEGFSGGNVNRPQFQAMMKQIRANQIQAVVCYRLDRISRNVGDFAKLKDEFDYYNVEFTSIRDDFDTTSPSGRAMMMMVSVFAQLERETTAERIRDNMHELAKSGRWLGGTTPTGYKSTQIVGSVTVDGKERKAYKLDIIKEEAEIISLIFSKFIETNSLTKTDTYLLQNNVTTKNGKNFTRFSIRSILQNPVYMIADQNAWEYFDSLGVEIYAEQSEFDGKHGIMAYNKTIQKSGKSNQMRDMDEWIVAVGKHKGLIAGADWVKVQDMLNQNRSKSYRKPKSNVALLSGLLYCGNCGSFMRPKLSQRTNALGEKIYSYLCETKERSRCQLCNSKNPNGNELDKMICEQIKLISEDSSYFMTNLVNVQKKLEGNREEYNQQLDVLKKELQENEQQIANLVDTLAKTPNTPAFDYITEQINTLHEKNEKIKNRINELESLTKNHLYSSEEFDRTKELLKSFGQSFDTMSVEQKRMALRAFIRRIIWDGKNVHVVLFGDTESEIDYTDLAEENPEPNRGDSE

SEQ ID NO: 9278 - protein, 538 aa, synthetic construct
MSTAPNVTIIPAKVQTAESRSKYHQLRVAAYCRVSTAQEEQQNSYQVQIAYYTDLINRKKEWTLAGIFADEGISGTQTKKRTEFNRMIRMCRNKKIDLVITKSISRFARNTVDCLEYVRQLKDLGIGVIFEKENINTLTMTSEFMIALYGSFAQAESESISKNVSWGKEKAYREGKVQFQYKYLLGYKKGEDGKPEIVPEEAETVRLIYTLFLDGYSMSRIKKLLENKGILTSQGKKVWNESLIRSILKNEKYAGDALLQKTFTSDCITHKIVKNHGERPMYLVTDHHEPIIDRDTYNRVQQELARRSSKRKISDKTTTEQGKYSSKYALTELLICGKCGTPYRRTTWTSRGKKLIVWRCISRLEHGKRYCPDSPTIKEEQLHKAIIRAINNYYSCGNDVEKILKANISNVLECHGQEEIAAIEKRLKEIDKARSDLISLIATGGCDEDKLDSEFEKLYEEEQSLSERLAMLKSKNQTSAETQAKLDKIIDMIEHEKFELETFDNVLIRKLIECVKVLSKTEILVIFKGGYEVRTEIE

SEQ ID NO: 9279 - protein, 508 aa, synthetic construct
MTTVTIIQPTISEEQNHKLRCAAYCRVSSNSEDQLNSFMAQTRYYEKAFEKSDREQLVDIYADEGITGTREDKRDEFQRMISDCRKGKIDRIYTKSISRFARNTKDCLKNIRELKSLGITVFFEKENIDTAKLTDEMMITIMGGLAQEESVSISKNLKWSYQKRFEKGIVNVFSAPFGFKLNNGALIIDKIQAQIVEEIFDMFLNGIGYQRISEICQSKYKVYKDKFSYYGIRYILSNEKYIGDSVYQKTFTTNNLPYRKIQNNGQLNKYCIQNTHEAIISIEIFEKAQKLIESRKHKNIVSESPFRGKLICANCGTKYKRKDSRNKIYWVCRKHDNLAELCMNKRVEEKFIKQSFIRLHNKLWHDYKQILVPLQTALQDLKFRKFSGKTQVMDISKEIAKLREQTHVLARLKTKGFLDEAKYIEQTTELTAKINKLQAELKKFTRSDDEDETLDQIEMLIDFFERRDKPITEFEELAFESIVEKIIVINQHELEFHLIGGLKFKEKI

SEQ ID NO: 9280 - protein, 518 aa, synthetic construct
MSYCIYLRKSRKDLEAEQHGEGETLARHEHTLLSVAKRQNLIIGAIYREVVSGETIADRPVIQQVLHEVESGLWDGVLVMEVERLARGDTIDQGMVQRAFQYSNTLIITPLKTYNPANEFDQEYFEFGLFMSRREYKTIKRRMQAGRYAAVQEGKWPFNSAPYGWDRKKLESEKGWTLILNETEAPVVKLIFSLFTGSDRVGVTFIVHHLNDRGIKPRNGGKWTESTIREILSNPVNDKKVAIGKRKQSVQIVDGSPVKTRPRSGNYDIIVEGRQPRLIEHDMFAEAQSYLGLGTPKPPESYGTKNPLAGLLICNECKKRLQRRPAANPAFKNGAKYDMLICKTDGCPTVGSPLTLVEKQLIACLEDWVSGYELKSLLPESNVPEKQKLVDAAQHNHALLIQQNERLHDLLEQGVYSTQTFLERSQKLQERIRESTTQLAILEKDLEYEKEKDANINNFLPACKSLLAYYWELSIPERNKALKILLEGVEYKKTEKNKRGKKDTPTFELTLKPRIPRI

SEQ ID NO: 9281 - protein, 437 aa, synthetic construct
MQIKEINATKLPDIGIKRVAAYARVSSEKGEALHSLSAQISYYNEYISNHIGWEFAGVYADEGISGTKDSRPEFQRLLADCRKKRIDLVITKSITRFARNTVTLLDTIRELKLLNIDVLFEKENLHSLGANGELMLTLLAMYAEEEARSASENQKWRIQKMFEEGRPNTGRMLGYCLKDGQLTIIPKEAEIVRMIFDDYLSGMGRLAIAKKLNAIHVPTVRGCDDWREGSIYRILHNEKYTGDMILQKTYVEDFRTKKGVINRGEKRKYFVENSHEAIISKEIFERAQAEAERRKAKIKLPEKRMKTIFTGMLICACCGKHFNRRVANASTKYAKPAWICATFMRKGKKYCNNRQIPEKILIAKTKEVLGLPSLEDIDLKDYISEIVCGKDYDLTYVMNSGEEVKTIWHPYSRKDSWNEEMRQQARNRTLERSTLYE

SEQ ID NO: 9282 - protein, 528 aa, synthetic construct
MNNAKRVTVWEPIDIQAMCEEESEIPKLKVAAYARVSTEQDEQQSSYEAQVDYYGKYIRSNPAWEFVGIYADEGITGTNTKKRDGFNRMIADAKAGKIDLILTKSISRFARNTVDTLQTVRELSALKIEVIFEKEGIRTLDKQCEVMLTIMSSLAQEESRSISENVRWGMQKSMQDGNISLPYKRFLGYRKGEDGRPEIVPEEAEIIRDIYKMFLDGKTIRTIADTLTEHGIKTPGGKDRWSVSTIKSILSNEKYKGDALRQKTYTVDYLSKTVRKNNGEVKQYYVSNSHDAIIDEDTFNLVQAELERRSNFRSALRDNSMFSTKIICGECGYFYGRKVLHSNSKKHRKVVWYCNHRYDGDEKCASPSISESDIKKYYLEALEKLLSNKDSYITECQERLENEDVLVQLKETRQQAEISLEDLMAEIQGVVHENARKSQDQQKYRAKFNKFVQQIDEQKKRMAVLKAEELKLVGMREKLHRFIETLKNCKDATVFKEQEWNNLVERAVVKTESLDFEFKNGERIKITI

SEQ ID NO: 9283 - protein, 501 aa, synthetic construct
MGRKVTRVAFNVPEIPKKKNVAAYCRVSSGKDAMLHSLAAQVSYYSELIQSHGEWEYAGVYADEAKTGTKDTRENFVRLLSDCRAGKIDLILTKSISRFARNTVTLLETVRELKLMGVDVYFEEQNIHSMSTDGEFMLTILASYAQEESRSASENQKWRIKKNFEEGKPWSSTLLGYRNVDGRFEIVPEEAQTVRMIFDWYLEGLGATAIRDRLNAMGIKTRLGNQWNRSPILKLLRNYTYTGNLLQQRTYRENHITKKCIINQGEKPMYLAEGTHEAIIDMDTFNQVQEEIKRRAERYKSPEGKKCETYPFTGMVRCGCCGKNYVRSGTQSYRTWTCRTRRKEGLKHCDAEIIPEEELIRLTAEILSGEVTEDAVRDKITVIRAEKDRTLVFCFKNGKETVKQWREHETVHVCTEEQKRQISRKNSGRKRTEEQRRQQSERMKEYWKDREFPEEQRRRQSEQMKAYWNDREASEGHRQTVSRLMKEMRAKETGKGAQNDG

SEQ ID NO: 9284 - protein, 526 aa, synthetic construct
MANVTVIPATRNFHTGIRKDAVVQKKTAGYARVSTDSEEQQTSYEAQVDYYTNYIKNNPEWEFVGVYTDEGISATGTKHRDGFNQMIQDALDGKIDLIVTKSVSRFARNTVDSLTTVRKLKEKGVEVYFQKENIYTLDSKGELLITIMSSLAQEESRSISENVTWGQRKRFADGKVSIAYSSFLGYQKGEDGQMEIVPEEAEIVRLIYRMFMQGKTPYAIAKYLMEKKVPTPTGKQRWQHRTIENILTNEKYKGDARLQKCYTVDFLSKKRKVNEGEVPQYYVEGSHDAIIAPAEWQMVQLEMERRRNMGRSHNCCGTFSAKLKCGDCGEFFGSKVWHSNSKYKRTIWQCNAKFKGESKCTTPHLYEQRIQELFLEALGRLLENRETVMDDCRAVMDVLGDCSTIEKELESVSSEMEVVTGLIQKLIVENATRKLDQNDYRRKYEGYVNKYAALESRMDSLKKDRESREIKFGIFSGFLFELSELEELPLEFDVKLFHSLVDYATVYHDGRVVFAFRNGAEVETRI

SEQ ID NO: 9285 - protein, 516 aa, synthetic construct
MAYLIYLRKSRMDMEAEARGEGETLARHRTALLALARRMGLEIGAIYEEIVSGETIAARPQMQRLLSEVEAGQWEGVLVMEVERLARGDSIDQGIVSQAFKYSGTKIITPAKTYDPANEFDEEYFEFGLFMSRREYKTIKRRMVAGRIASVKEGKYMGKTDPYGYFRVKVPNGKGYTLKLNPPQAAIVREVFNLRLQGVGCYMIARRLNARGERTSAGIAWSAQSVRNVLRNCLYAGFVTWGHKAAQPVVRSGVLTKPRRYVADYVKVKGMHPALVSEADFDAVQHLLDSTPGLPLKKGHEIKNPFVGLLYCGKCGHVITYGAAAAAPPCTGRLDCRWAACDNVSSFCADVEDAVLHALQLWLAEYEVDTDQQNSVGRELDDRAAQAQDEIRSIHTAQRKLRTQLDRAAELVEQEIYTPEYFVSRRNQINAQLTELDRALAKASERALCIDRERRASPSMLPKLQHVLEAYPTAQSAQEKNDLLRTVISRIVYLKNAPERSLGDSTIYVEISRKFE

SEQ ID NO: 9286 - protein, 520 aa, synthetic construct
MPRKPAKHPAKPKRGKKLEIEEPGVLYGRYSSHNQKDISVEQQFEKGYELAAEYGIRIIDTYADRAVSGRTDKRRDFQRMMTDAAKGKFRYVIAWKSNRMGRNMLEALINEARLQDLGVRVLYVEEDFDDTAAGRFAARSMMNVNQFYSENMAEDIKRGLYDNAANCMVANGHLPYGYKADETLHYAIDEPKAAVIREIFTRVSCGEAFVDIMASLNVRGIKTSYGRPWGRSSFQKILSNERYRGIYIYGDVRKEGGIPRIISDELYFKVQEVITTKKNPQGRHRVNGDYLLTGKLFCGHCKSPMTGVSGTGRSGNLHYYYVCQKRRTEKTCDKKNVRRDEIELQVAQAIKDYALKDDVIEWIADSTVAYNERKEAESKVGILEDQLAGTEHGIKNIMSAIEQGIITETTKSRLVELESERATIKANIAAARADIVTVSRDDIISGLEMFRDGDVHDKKYQARLFDTFLVAVYAYDDDLRLVFSFSGNKNTIQIPIESAVNAVENNEAECSFKLCSAPPI

SEQ ID NO: 9287 - protein, 513 aa, synthetic construct
MPQVKLISPITRQEIRKIRVAAYCRVSSNSADQQNSYANQIRVYTSLIQRKKEWELVEIFADEGLSGMNAQNRTEFQRMIKMCEQHQIDLIVTKSVSRFARNAKESLEYVRKLKLLGVGVQFEKEGIYTLALGDEMLLNTFSAIAQEESKAISQNQRLSIVKRMQSGEYVDSNAPYGFRLVDKALVVYEPEAAIVRMMFENYLSGQSASEIARDLNSRGIKTKTGKSTWRSTKVAYILGNERYCGDCKYQKTYRDTTVPFKQFRNRGQEDMFYASMTHAPLIDRDTFDKVQLLLKKRQDVFGKSTTQNIYPLTSRIQCSECGSYFRRRQVSGIVKWGCSKHIQDRTQCGSNYYSEERIYDAFIAMVNKLRFSEYDILGQTLLRLESAELKRKQKNTAAREISRNIADLNAKLVMVEQLHAKGYLKDEVHKAQVREINDQLRRLKRERQCEFSSGITHMIEELTRLKKLLEELEEPLDRFDEKLFTEIVQAISISRRDEMTVTLIGGLRFTEML

SEQ ID NO: 9288 - protein, 547 aa, synthetic construct
MNVTKIPKKTISVIEPKRSLIVNREQYHQRRVAAYCRVSTDSEEQLTSYTNQKKVYTEMIAAKPEWEFAGLYADEGISGTRADKRPQFQKMINDCLSGKIDYIITKSVSRFARNTVDCLDHVRMLRARGIGIYFEEQNIDTLQIDSELYLVIYAGFAQSESESISKNVTWTFRKRFQEGKPIFNYKCLLGYRKGADGEPEIVPEEASIVERIFNMYLSGETINRISTKLREENLQIPGKRFSFSASMIKGILRNERYCGDSILQKTVTIDCIGKVRRKNTGEAPMYYVQNSHVGIISRELFHKTQEELARRMSREPNSTKTATTATGKYSRYALSNVMICAECGSRYKRVTWTSRGKKRVVWRCISRLDYGKRYCKTSLTVDETALHAAIVRAINRFNEEDESTYMALMRATIGEAIGLTGGTDEIDLLRRKIDGLNRKMVSLINESVESGEGIESHEAEFKELSDTIELLQGRIQKLEEALASDQVNDSRILQLQQIIADRASKKMEYDDTIVHQMIECVKVYPDGRLDIIFGGGYLIEERLEKEN

SEQ ID NO: 9289 - protein, 474 aa, synthetic construct
MKVGIYSRVSTQEQAREGYSIGEQVERLKNYCAAKGWILYKTYTDAGFSGANTDRPGMQQLISDVADGKIDMVLVYKLDRLSRSQKDTLFLIEDVFIKNNVNFASITENFDTSTPFGRAMIGILSVFAQLEREQFRERSIMGKDARAKEGLHHGGGAPTGYDYIDGQLIINKEEAELIKEAYRLFLEDDMTMMGIAAKLSVFSEKFKYDHRIRKMLTNPLYAGWTHCRDELYKGQHEAIISQEVFDKVQTKLKIRAENNPHYRNAFNRTSLLAGILWCKKCGARYFKRVRRYEKGSKVYYYNKYQCYSRSSYKNMVRDKSCKNKIWTMDVLDKTVIDEIKALVANPAEVDNIIKLNQSNNNITEKKEFYKKRIKEIEKQMNKLTDLYSIDGIDIDFVAKKITALNTDKKRIESEMNAINEHKPLISAEDAKKRLSGISNILDNGEFTEKVKVITSLINRIEVDDDDIYIYWNFV

SEQ ID NO: 9290 - protein, 537 aa, synthetic construct
MYLEVSNTMDYHVALYIRLSKEDESEGPSQSVQNQESLLREFVQQHRLSVYDTYVDDGWSGTSFDRPSFQRMIADIEAKKVNMVITKDLSRLGRDYILTGHYMERYFPEHRVRYISLLDGIDTGVDSTANDITPFRAIMNDMYAKDISKKIKSVKRDKQRKGQFIGGKPVYGYKMHPTEKNKIVIDEEVAPVVRRIFALALSGMSCRKIATTLNKEGIPTPATYCGWKVGTPGPYTGLWSSERISEMLKNETYIGNMVQGRSVKISYKSKKCLKQDPANWVIVEGTHEPLVDAETFQKVQLLVNSRKHTRSRTYDFLLKGLIFCHECGYPLAVLNRKNARGEDVLYFVCRTYQRFTKAGVCTCHSIKEKTVTDAVIRKVREVCRAYLDPDELLPMAQEAVEHAQKQSSLETELQAIQARINSLTANLDRMYTDRLNGLLPEEDFQRIFGRVKLEREQLEEKRQALEFQKKSPVRSEDRARELVQRFIETAGESRELLVSLIERVELTEDKEVIIKFRFAQLDEASQNSQGIAPFETA

SEQ ID NO: 9291 - protein, 508 aa, synthetic construct
MYGMYLRKSRADDPNETMDETLAKHEKLLFDLAESMHIDRSEIIVLKEVVSGESIANRPEIQRGLKLIMDGVIDQGMFAVDSQRLARGDTLDQGTILRVFSLTKVKIITPLKIINPADEFDEDYFEFDLFMGRREYKMINRRMQRGRHISVQEGYYVGSIAPYGYNRCRYNKSYSLEINQEEYHIFALMKDMAIEGMGTTNIANKLNEMGFKPRKGDRWTTATVRGILINKTNLGLIKWNSRKEVKKFDNNEIVKTRPINKEAEYYPGLHPAIITQEEYDTIIEQMKARNNAPIKKNMKIRNPLAGLIVCADCGRNMVRRPYKKNQDSLICPTSNCKNVASYVSVVEERIIESLKAILNQYKTFVDDYDHSNKDKYVSSKKTRIETLDKEIEKLHGQINKACEMLELGAYSVALFRERKKTLDDKIRSLEKEKATIEKESEDEKVEQYRKAIPKIEKAVSLYFDASIEERNKLLKSVIEKCYYKKEVPGSRWKNDAMKEFKLEIHMKV

SEQ ID NO: 9292 - protein, 519 aa, synthetic construct
MWDIIKIVNGKEKRFMKKKRVAFFSRVSTMDQHSSIENQQKIFTQWLERNPDCEYYKMYEDEGISGAKGYKRIKWLQMLEDGKNELYDVVVCKSFSRFGRNIVETLSAIKELRTKGIRCVFLEDGLDSEKDASKFGLFAWLAEEEANKTSNRIKTVWDSFNKEGKIHVTVAPYGYDYSVQDKNFVVNEDEREVVKNIFNLYLQGYGFNRIAQMLIENNIPTKKGGSWAGATIQSILTNEFYIGTLVQGKTRTIDATMKENIKIDESEWFRHENRHEAIVDIEVFKKVNRQIEERSKKAKGYYTKEHGNAKRNSNKSLFSNLLICGECGSMMTIKRKKKEKYKPHYQCLNYDRISLKCGHKSNRINESELVQIVKNKLINLSEDNFRRLKNMQIKNRDKKDVKVIEKEITMINKKIEQQINLSNNLLMLFTNGTIKEEQFKLQNESIYKALNGFMERKNVLEEELKVDVSKEQETVVFTGIEYILNKPVEEWKNSELKEFIENIKIFIDGTIELKVKYFN

SEQ ID NO: 9293 - protein, 438 aa, synthetic construct
MIRVALYIRVSTEEQALHGDSIEAQKQALREYAEKNQYKIIDYYIDDGFTATSLNRPNLQRLLNDIKEGKIDLVIFTKIDRWSRGVRNYYKIQDVLDTHKVHWKTIFENYDTSTAAGQLHINIMLSVAENEAAVTSERIKAVFNNKVKNKEVITGKVPKGYKIENKKLVIDKETVHIVENIFSHFEIHQSKRATMNFLREELGVNLSYKTISNMLSNSLYKGEYRGVINYCPAIIDKKRFDKIQLLLKRNISSNTANRVYLFSSLLVCSHCDHNMGGFNTKHNDKFFFNYRCNFNYYRKLCSNNHCISEKKLERKVIEQFKLQLYDYIVDNELKKKNNPKKSNKTEIENKIKKLNDLYINDFITLEEYKEKHAFYKSKIIEDEDFKDTYNIEMYRKMLNIDFKEKYIKLEREDKRAFWRSFIEEIKIDHDGNIKLKFQ

SEQ ID NO: 9294 - protein, 541 aa, synthetic construct
MKKVAIYSRKSVFTGKGESIENQIEMCQEYYIRNYGNYVEFIIYEDEGFSGGNTNRPKFKEMINNIKSKEFDTLICYRLDRISRNVADFSSTLELLQANNIDFISIKEQFDTSSPMGRAMVYISSVFAQLERETIAERVRDNMLQLAKTGRWLGGQEPFGFTAERVTYLDENYNERSLMKLSDIKNELDVVKLIYDKYLETNSITQVVNWLQDKMLKGKNGGEWSTSQVQKILTSPLYVKSSDDTHSYLKGLGINVYGDPNGNGYLSYNKTKKITIDRDITEWIYTVAKHQGIIEDDKWIMVQSILEKNKHKKVKRLGTGKSNNAILTGVLKCGMCGSNMIIKQGHKSKKEPNLRYDYYACSSKDNSRGKKCSNKNIRVDRLDSIVLSQLSAYNKEYLYEKLKDLLDISKQNNFKNNQLNSLKNDITLKEAQISNLVKQLSSAPNQTVSDYIMQEINKLSDEVKTLKSSLDDVSNENNTYNSDIKNLELIISMLDNFENNFNLSQDVTKKRLLLQTIIKEIKWNGETLETDLTLFHDDKKK

SEQ ID NO: 9295 - protein, 460 aa, synthetic construct
MKRKLNNDKTILRVAIYVRVSTEQQAEDGDSIRDQLNSCETYIKAHENMILAGEYIDGGISGQKTKREDFQKLLSDVRANLIDLIIFTRLDRWFRSLRHYLNTQEVLDKHNVSWTAIRQPFFDTSTAQGRTFVNTSMAFAELEAQNASERIKGVFKDKVSHSEAISGRTPIGYSIVDKHLVPDKDAPIVVAIFEHYQAHSSMGETLRYMQDAFGIVRSRSSLKRMLQNKKYIGIFRDNESYCEPIITKELFYDVQRLLKLNIKTCKNRHDYIFSGLIRCVDCGYVMSAASNHNHYVRKSGEEVDHFYSVYRCHANRLHRCVNNKVFFESSIEKELLKRVRPELEQYICDYKLETAPVVQNKARIHKLQTKLSKLKELYLNELITLEEFRTDKADFEYQIEELQKEEQKPVKDLSSLEEFLKLDFENIYSSFTAPEKRRVWRSIIKEIQVNHHKNINIVFL

SEQ ID NO: 9296 - protein, 506 aa, synthetic construct
MNVVIYARFSSHSQTEQSIEGQLKVCYEYAESNHYTVVGEYIDRAISGTTDNRAEFQRMISDSDRHTFEGVLVYQLDRFARNRYDSAINKAKLKKNGVRVLSAKENIADDASGILVEGVLESMAEYYSVELSQKIHRGMAINAEKCLSNGSNPGLGFKVDAERRFYVDEEEAAIVREIYERYASGETKAEIIRDLKRRRVKTSLGKEFSPNSLSRLLSNKRYIGVYLYKGKETPGGMPRILDDDLFYRVQSMMNKNKSAPARTHGEGEYLLTTKLFCGHCKKMMVGYGGTSKTCRQYHYYMCKNARRKKCGKKIVSKSYIEDRVVNECLKMLTEEKIRFIAKKVAEECTKSPDNLTAKALKKAIREADTAIENLWKAIEQGQAVEMLTDRLNKRMAEKAELEAQLAIEENKKITLTEAQILAFLDYVCEMPADDVNKRRAIINIFVHSIYLYDDHFTLIINASKKPLSIDNIPLDDIETAFEGETGASEGCSSLSTPAPPRYDKSA

SEQ ID NO: 9297 - protein, 534 aa, synthetic construct
MAYCLYLRKSRADMEAESYGEGETLARHEKLLLDVAKRGHYNITQIYREIVSGDTIAARPIMQKLLQEVERGVWEGVLVIEIERLARGETIDQGIVAQAFKYSGTKIITPLKVFDPANEFDEEYFEFGLYMSRREYKTINRRLQRGRIAAVNEGKIVTGKAPYGYERVHCIGEKGWTLRPSETESKVIQYIFDIYVNGKRQSDGTVMYPGTIIVAKELTALGIKSPSGRDAWDDTSVRELLLNPVYIGKIRWGRHKMKRISENGTTKMQRIIVPDNEQIIVDGMHPAIVSEEIFYRAKERLRKGRFVPQNKLHGPLTNPLAGVVVCGKCGYHMIKHRGRAGKPDGLGCRHCDNNGARLSVVEDCILQGLAEWLSKYRLKWDGNSSTQSDLRYEEVKKAIIRAESEIQTLQQQLDRTHDLLEQGIYDTETFLARSRSISSKISDNMDRQSELKKELTELVLLDERKKDIIPKVEKLLDVYKNLSDPVAKNELLKGVLEKVTYIRTTKPTKFTPLDDFEITLYPKLPNSQEKEVVP

SEQ ID NO: 9298 - protein, 514 aa, synthetic construct
MPTVTVIQPTIAEEKAVKIRCAAYCRVSSDSEDQLNSFMAQTRYYSQVFEDSETEELIDIYADEGITGTREDKRDEFQRMLKDCRKGKIDRIYTKSISRFARNTRDCLKNVRELKSLGITIYFEKENIDTANMTDEMMITIMGGLAQEESTSISQNMQWSIRKRMANGTYIVSHVPYGYMKSGGKMIVNPREAEIVKRIYEDFLNGKGLLRISNDLNAGSIPKNSKGEPWNKNVVRYVLTNEKYIGDCLWQKKFTENVFPFRKSKNQGQVDSYYITDAHEPIISREDFTKVQTLLKQRGEYYGNTEFKQYPLTMKIFCDNCGKIYRRKNINGKIYWVCRTHDNRAKDCPNKAIAQKLIYISFIRLCNKLWYNYKQILVPLQTSLQDLKLKRFSGNTNVMDIHKEIAKLKEQTHVLARLKTKGFLDEAKYIEQTTELTAKINKLQVELKKLSRSDDEDETLEQIEMLFDFFEKRDKPITEFEESTFESIVEKIVVIDQHELEFRLIGGLKFKENI

SEQ ID NO: 9299 - protein, 538 aa, synthetic construct
MSTASNVTIIPAKAQTEINRDKYHQLRVAAYCRVSTEQEEQQNSYQVQIAYYTDLINRKKEWTLAGIFADEGISGTQTKKRTEFNRMIRMCKNKKIDLVITKSISRFARNTVDCLEYVRQLKDLGIGVIFEKENINTLTMTSEFMIALYGSFAQAESESISKNVSWGKEKAFREGKVQFQYKYLLGYKKGADGKPEIVPDEAETVRLIYTLYLDGYTLLNIADTLMAQGRRTATGENIWSKGEVQRILKNEKYVGDALLQKTFTVDCITHKVVKNNGERPMYLVTDHHAPIVDRDTYNRVQQELARRTSKRKISDNTKTEQGKYSGKYALSELLICGHCGTPYRRRIWSRNGKKQVVWRCISRLEHGKKYCPDSPTIKEEQLHKAIIRAINNYYSCRNDIVRILKANIGTVLECQGQEDILAAEKRLREIDQARNDLVGLIASGGCDEDKLDSEFAKLYSEEQQLNERLENLKLQNKTSEETQAKLDEIMDMIEHEKFELETFDNVLIRKLIECIKVLSKTEILVIFKGGYEVRTEIE

SEQ ID NO: 9300 - protein, 560 aa, synthetic construct
MNKKIKCDIYTRVSTTMQVDGYSLDAQKEKLKRYAEFQNMEIVNEYSDEGKSGKSVEGRPEFQRMLDNIENGTDEVQFVLVFKLSRFGRNAADVLNSLQRMQDFGVNLICVEDGIDSSKDSGKLMISVLSAVAEIERENILVQTMEGRKQKAREGKWNGGFAPYGYELVNGELQIAEDEAEIIRLIYDKFIHTNMGISAIAAWLNQHGYKKKKRQNNTLDAFAASFIKGVLDNPVYCGKLAYGRRKNEKVSGTRNEYRIVKQENYMLHDGIHEGIVSETDWELAHQKREKTGVKYEKTHSLDHEHILSGILRCPLCGSDMYGNVNRKKKKDGTLYKDYFYYACKHRRLVDGHKCGYRKQWSEEKINNAVEEIIRKLVKNPKFEEAILNKIGSRIDTEEIEKEIERLEKQHRQLTGAKARLGQQMDSLDIMDKFYKKKYQDMETRLYRLYDEIEDVENSIEEVKNRLLNIRQQKISEENVYQFLLYFDKLYDKFTDLEKKEFLNSFVEQVDIYEQEQPDGRFLKHIKFRFPVYFGGRETQELCWDNESTVETVMLLQRKNM

SEQ ID NO: 9301 - protein, 520 aa, synthetic construct
MNVAIYARKSKATKKGESISNQIELCKKYFLNTTNEDVNFLIYEDEGWSGGNINRPQFTKLMNDAKLKRFTALICYRLDRIARNVADFSSTYKILEENNIAFISITEQFDTSTIMGRAMINISATFAQIERETIAERIKDNMLELSKTGRWLGGTPPLGFKSVQIAENNKKMYKLEVVEEEMEIVRLIYKLYPQYKSTVPIARYLVSNHIKGKNGGDFSRNTVLQILKNPVYCCSDSEAIKYFENKGSILNCINNKELGLMVYNKRKGGKKENPIDEWIIATGRHPGIIPSTQWINCQNILEEIKNRTSPRQATGNKFLLSGLLKCAKCGSSMCSWSRTNKGIYYRSYRCELKNRAANRCDSKMINAEELENFIIELLKNLNMEEIISVKKNKTNNTSLKNELTSLNKSLNENEKLLKGLIKKLALIDDIEILAMIQTEIKKIKSENENINKKINEINLSMFDIEDEFRKEQILLESHKLFKDTIDLVQDVETKRNLIMNFIDYFTYDSETNEVGYKIRL

SEQ ID NO: 9302 - protein, 575 aa, synthetic construct
MINNYVTMDNSIQELIKRINRVPRIAIYCRVSTTEQAETGYSIDEQERLLIDWCNKNGLEVFNCYSDRGISGKNIKNRPALKALLKDVEDKKVDMVISWKLNRISRKLADVLKIMDLLEKNNVTFKSYSEPFETTTHVGRMQMQMMAMIGEFERGTISQNVKVSMCAKARAGEWCGNRVLGYDLVPMEGTENNKRRKSRLEINKEEAEIVRIIFNEYASGKGYKAITNKLNKLGCKTKKGNNFSQGSIRDILMNPVYIGKVRYNVRQNWSEKRRRNINPEPIVAEGIHKAIIDNDTWDKVQVMFQSKSGKPSRVYDGFYPLTGILKCPKCGAGMVISRTTNVLANGTKKRIAYYCCGAWKNQGTSICNSNTIRVEKANEYVFNKLSSVLSNDEMIKAIVRNINKERIKRVDPSKSELERIDKELENIDKKKRKIFEAYEDDIITREEFLTRKDELNQRAKVLQESKEPLLVTLADDVSEEISYEFIKSVLDNFGKLLNSKESREQKKKLLHMIISKITINELREVDSINLTINDKLVDYISREEGVSIKDAPSSFMLRNIGMNVLSLDIVIANDM

SEQ ID NO: 9303 - protein, 542 aa, synthetic construct
MSRRAVCYSRFSTDLQNERSIEDQEALVRRYCQLHDLKLVELYSDAAQSGASLFGREGLLELLSDAKAAKFDCVVVEELDRLSRDMEDLAGIHKRLTFAGIDIIAVHEGTASTVTVGLRGLVGQLYREDNSRKVRRGLQGLVREGRSAGGKPYGYKADPANKGRLLLMEEEAAVVRRIFEDYAAGKSPRSIARELQIEHAPVPRGGASWSANTIYGWAVRGSGILRNHLYAGQLVWNKVRMVKDPDTGRRVSRPNPPSEWQITDVPEYQIVPTELFDRVQEMIAPRARTRKEVGSMRRPVRLLSGLLRCGSCGAGMSTKGKDKSGRYRIECSRQRDTGSCPNPQTFYLDRVEQAVVNVLRKELKHPKLLVEYVQAYNEARVEYASKLQKKRSVLEKRVRDLDAECERLISFIAKGVGNTDRLGAQYQLRCDELDAAKLELSREPEPLTAVTLHPAALKAYAEDLERLSEAMNSRLSAGYTEISRLLRELVHSVVVRRGKEPGEIEITLNGKLRSLLAQPLVKSGVGGVVVAAGGIEPPTYGL

SEQ ID NO: 9304 - protein, 513 aa, synthetic construct
MMNYQTDMQATKAVIYCRVSSQKQLREGDGLESQRARCEEFAKYRGLEVVEIFKDDASGSLVNRPAMKAMIAFLKSRKEPHIVIIDDISRLARGLEAHLTLRDKIRKAGGILKSPSIDFDDDDSDSSLMEHVLASVSQHARQKIRETTRNRMRGRMMNGYWSFRAPIGYKFERVAGHGNLLVRDEPVASLIQEIFEGYASGRFAGPAEIMRYLEAHPVWPRSRREAMTVERVLELLERVHYAGYLNYPKWNIHMLAAKHEPIVSLVTFNAVQDRLKGNAKLPARKDINADFPLRGFVECDDCGQPLTACWTKGRNARYPYYLCQTKDCCSYGKSIKRDALEDEFKEVLAALSPSRELYELATEMFRDLWNARVASAQGNRAHLAAEVTRLEKQIEQLVDRIVNADSDALIGAYENRLRSLEAAKVEAKEKIANCGRPLADFDTTYRTAMEFLENPSKMWVFGDLVDKRAALKLTFEGRIRYKRNEGYRTAKAAIPFRIFNGLSLEDSEESEMV

SEQ ID NO: 9305 - protein, 538 aa, synthetic construct
MTTTRAVLYARYSTDKQRETSIADQLRAARARVEREQWATVATYSDEGVSGSTPVALRAGGKALLADALAGRFEILVLEGLDRLSRELGEAETMVKRLEHRGIRIIGTADGYDTEARGRKVMRIARGLVNELYLDDLREKTHRGLAGQFDRGLSAGGRTYGYRTEPSPDGKGRIQTIDAAEADIVREVFQRFADGHSVRNIVHALNERGVRSARGGTWAVSAVQGSSVHGLGMLNNELYVGRVVWNRRQWLKNPETGKRRYVERPREEWQERDAPELRIIDQALWDAVHARARSGPARGTRVGRGATPRTLFGAGVLRCAACGAAIVGVNRERYGCSAHKERGPAVCPSPFTVRRELLEQRLLTELREDLLAPEALRTLREEVRAVLASVARENDVGNARRRITELDAEIGRLVDAIAAVGLSQALQARLRAAEDERAKLAHQESQGAALRIEVEEIVSRYRQTVLRLQEVLAGGDDLARTRTILADMLGPVVVGRDPETGETYAEMEKPAERLLVAAVGGSLGLVAGAGFEPTTFGL

SEQ ID NO: 9306 - protein, 584 aa, synthetic construct
MPSIQDLLNSHNGSHDAAEDIRQRASLAYLRVSTEDQDENAQRTDIERYAAQNAIAILKIYRDHARSASSDHENRTAFWEMVNEAKADDRVSCILVWDESRFFRDDVQATLVKADLRAHGVRVIPVKHPYNHDTIDGLLLEKLHQALAQIESMKIKERVVMGMKHNCQQRDPETGWLYKNGGRAPYGYRVERVQRGLDIRGLPKWKQLWVKDDEMEAGRPRWEWVRVILLDWYVGKHLSDKQIAHRLNELGVKPQEGGASWSYVTLHYLRQPEKLLTYAGYYIWHKHSRRNEFGQKRGRNKRPPSEWLYIENAHEPILTIEEAERIEKESLRRRKPQSGGVERRTQSSPHLLTGGLATCGRCGSNLIGHARYGGRRKRLEYYVCSLADRSGGTVCGGASLSVRLIHEGIWNFISERFPMTEAALQAATQRLNASIAKHYEQPHMECERWEKRLQETEDAKERLREAFRKGADSQWIAEESKRLRTEEEEAKQFLKTAQLKLHARPRPVTATDVRRTLEDLKTTMEYGEVEEKRKIIRGFVKNVTWHPDTKRAVVKFYTPPMSGVSVGSGGGTRTPDTRIMIPLL

SEQ ID NO: 9307 - protein, 544 aa, synthetic construct
MKAVLLCRVSGREQEITGYSLPAQERLLKGYTERQGYVVAKIFSISESASGRKKREIFNAMFTFVKKNNIKVIIIEKADRFTRNFKDSVDMYEWLEEDEERQLHSVKDSLILHKNSRSQEKLNWDIRVVFAKNYIDNLSEEVKKGQAEKLAEGWLPCRPKPGYKTVGEQGHKIHVPHEVYAPIMRKHLELYATGEYSVEKLANMMFEAGLRTSTGGKIHKSRVHQLLKDPYYIGKNVWGGKIYQGSHEPLITQEVFDKIQSVLAGKNTPKINRHMFLLKQLLKCAECGGTITWEIHKGIIYGHCNHYRNCSQKKWTREDEIEKQLITGFEGLQLRNTRIAEWLKKALKESHQDAIDYETSSLKELQDRLSQVEKRLDRLYDDKLDEKIAKAFYDQKYRQYTQEKADIVAAIEKHTKAKNSHFDLGVNLYELSQRAKEIYLKAKECHLLEEQRRLISLVFTNMTLNEGILAYQYSPAFKLIYNAVVETNGSKVANLGELGAKTFEPAKHPDKSTQKGSLQPFRPSWLRDMDSNHDKQIQSLLSYH

SEQ ID NO: 9308 - protein, 544 aa, synthetic construct
MIRAALYARYSSDQQSSASIADQHRICRERASREGWQIEGAYEDAAISGASMILRPGIQRLLADAQAGKFDIVLAEALDRVSRDQADVATLFKHLQFARVPLVTLAEGEISELHVGLKGTMNALFLKDLAKKTHRGLRGRVEKGFSAGAVGYGYRMIRRLSSEGELVRGEREIDPAEALIVERIFREFAAGKSPLAIARGLNADGISGPAGKAWRDTSIRGDVRRGTGILNNELYVGVRVWNHKHSVKDPSTGKSVTRLNPEAEWVRNAVPELRVVSDGLWAAVKRQQATLAERHAAVKEAAQARALHGARRPAYLLSGLLECGVCGGVYAIVVGDRYGCAGHHRGHACTNGRTIRREVLERRALAGMTDKLVSADKIEAAVAAYTAHINRENRERRIEADADRRALAKIDKAVAGIMAAIEDGLYQPAMKARMAELEREKAEVAARLAEAPRGVPDIHPGIAEIYKRKVERLNETLADPETRLDASSDIRAIIGNIVLHPGAKRGEIHAILHGSLMGILGFANDNPSPDASRVITSVASGSPG

SEQ ID NO: 9309 - protein, 522 aa, synthetic construct
MSQPTAAVTGQPPLAIRCAIYTRKSTEEGLDQDFNSLDAQRESAEAFIQSQQQEGWLCLPDRYDDGGYSGGSMDRPALKRLLADIGAGRIDCVVVYKVDRLSRSLLDFARILETFEEHHVSFVSVTQQFNTATSMGRLILNVLLSFAQFEREMISERTRDKMAAARRKGKYVGGRPILGYDVVDRKLVVNPSEAEQVRQIFQLYLEHRSLMPVVKELNRRGWRTKRWTTKKGRTMGGQLFTKNRLYQLLTNHAYVGKVRYKGEIHEGQHQAIVDGDLFQQVQATLQQNGRGGAERNKYGALLRGLLRCAACHCTMVPTYTSKGGRRYRYYLCRQAQQRGWQSCPVPSVPAGQIEEFVVEQIKGIGRDPALVAATLAEVRRQAEESLQRLESERATLNRQRRDDEAELRRLACSHESNGERLARLADLQERLRLVERRLTEIDEKLVTLSGNLVNEQEVAKALAEFDVVWGALSQQEQARVLRLLIERIDYDGREGNLSITFRPAGIKMLPAEMTTSEGEEAP

SEQ ID NO: 9310 - protein, 514 aa, synthetic construct
MKAAIYVRVSTEEQAERGFSIQAQKEECSKKAIELGCDESSILEFADEGISGSILERPALMAALNMLRNDNEIKYLICLDSSRLSRSVSHQLIIVDEIKKSDVQLIFIKTSYEDTPEGRFQLTVMSAVDEYERARLRFRSELGKRAKANNKKLTHSPGLYGYDYNKDTDTLSINEEESKNIKLMYSWAIAEEIGPNAIAQKLNELGIPTKKDKLWQKTTVKRILNNTAYKGTLYIRRYDTTDVKLNKYKEAADKAKRKERLREEWIGVSVPSIIDEDTWNRVQELMINARRKWRGYSQAEYLLSALCRCGLCGSTMHGNLISSKNKKRRYYVCTARSPGIVGMEKCELSFTSADTLELLVWEKVVSWLKNPDELEKEIKSGIPDDLGEKEKRLNDLENEISNYIKEKERVATMFQKGLIDELSSEKRLKEINTRSNTLQQLQQSLYNEINAHRVSNKELDGIKYIASKVVDVLDNLEFKEKYDIVKSLVEEVILTNETVIIKAIIPALIQNMDI

SEQ ID NO: 9311 - protein, 448 aa, synthetic construct
MRVLIYTRVSTQGQKEGYSLESQKSACLKKAEELSAEVIYHLEDTYTGAELERPALNQLRELVQSRQIDAVICLDPDRLSRNLADLLLLTSEMDRSNVELVFVNFTWESTPLGRLFLEMRGAIAEFEHALIRERTLRGKRQKAREGRLPSFVEPYGYRFNPKDDCLNVVQREAAVVSYIFREYNRGCNSGRILAEKLNKQRIPAPSGAKWHPSTVLRILSNRTYLGVLDVGGIEIEVPKLIGEEDFAKAQEIKALNRRRSLRRTKKEYLLQNLLTCSLCGSSLKVSAHCVRGKSYSYYVCPKRRGKLCLLKPLPTEALDHLVWVEFEKRFAHAAPKFREYEKKLEKDRRERLLESKNKELGNIKHREEKLLDLLLSGVINPEVYREEKKSVERSKKVLLEDIERLGQEVPDAPYSTKVPPNLRKKALEIFTEKILVTATGEIRVYALI

SEQ ID NO: 9312 - protein, 508 aa, synthetic construct
MLSDARDGKIDIILTKSISRFARNTVDLLKTVRELKDLGIEVRFQKEKIHTLSEDGELMLSLLASFAQEESKSISENVKWGIRKNFQKGIGNSFHIYGYRWTGKEFVIVEEEAKIVRLIYDNFLNGISAEKTEKQLEEMGVKSYTGGHFGNNSIRQILKQERYTGNTLFQKTYIEGGKTKYNNGELPQYYARNTHPAIISEETFNKVQEIRQRKRELGAFANPHIKTSALTSKIKCTHCNRSFQRAGKKNKTGHTRCWMCATRKAGQGNPCGTGDINEEQLKKIISEVLDIDEFDDEVFLEKVDHIDVTGKDHLEFFMTDGSLIHRTYASTARKDAWTPEYKERYKRIKRSKDTNGLKNPATPYTGFIRCARCGNSFSGQRRTLKDGTTEYYLRCRTKISECPSNTIQESTLNALVCDVLGLDEYSEEAMDKAMDYCEIADNIVYFHFRDGHFEERQYEEKKRGTPWSKERRKKALKGMKEYWSDPEHRKEASERMKKIRKEKKWSSR

SEQ ID NO: 9313 - protein, 523 aa, synthetic construct
MEEKMTVTLLPARKKACSVKNDEENPKLRVAAYCRVSTDSDEQETSYDAQITHYTAYINGHPDWELAGIYADDGISGTNTKKREEFNRMIEDCMAGKIDKVITKSISRFARNTVDCLNYIRQLKDKNIPVYFEKENIDSMDSKGEIMLTIMASLAQQESQSLSQNVKLGLQYRYQQGEIQINCARFLGYTKNENKKLIIVPEEAEVVKRIYREYLEGASMLKIARGLEADGILNGAGRKKWHTSNINQILRNEKYIGDALLQKTYTTDFLTKKRVKNHGIVPQYYVENSHEAIIPREIFMQVQEELIRRRIVHTSPNGKKRTFSSTHCFSNMIICGGCGEFFRRIHWNNRGKKSIVWRCISRLENTGQFCNARTVPEGTIEQVLVNAINQTLCDKDSFLSVLKNNIETVISHENDTKLAGIDKRLEELQTELVKLANSKADYDKVGEEIYRLRDEKQKVQLEVIGRDELKKHIDDMSEFLKGQPTAITEYDESLVRRLVEKITVYEDKFTVEFKSGVTADVRE

SEQ ID NO: 9314 - protein, 520 aa, synthetic construct
MKKVTKIDPNTAETAENPRLKVAAYCRVSTDSSEQIESLDTQIKHYESYIKANPDWEFAGIYFDEGITGTKKEKRAGLLQMVSDGESGKFNLIVTKSISRFARNTTDCLELVRKLLDLGIFIYFEKENINTGSMESELMLSILSGLAESESVSIAENSKWSVIRRFQNGTYKISCPPYGYDTVDGKLVINEPQAEIVRHIFTEILSGKGTQKIANALNQRGIPSKKGGHWTATTIRGIAGNEKYTGDAIFQKTYTDAHFSRHYNYGEKDQYLIKSHHDAIVSHEDFEAAQMIIEQRGKEKGLEKQDKKYQNRYPFSGKIICGECGGKFKRRIHSTGRHNIAWCCLTHILDIERCSMKYIPETDFEYAFVTMMNKLIFGHQIILKPLLMSLRGIKSEDSIEKLHDLDEKLKENEKQRQVLIALQTRGYLDPAVYNRSNNELIQEAERIQRQKESLSRFINSDNTNLHEVSELLQYATKSEMLDTFDGKLFTRFVERIIVYSRAEIGFELKCGLTLKERLIR

SEQ ID NO: 9315 - protein, 502 aa, synthetic construct
MAKIRRIEPNIPRLGGRKRVAAYARVSMETELLHHSLSAQVSHYSSLIQSNPEWEYAGVYADEGITGTSTKKRDEFNRLMKDCDAGKIDLVLVKSISRFARDTVDTLNATRHLKDLGIDVFFEREGIHSMSGEGELLLTLLASFAQAEAESISANEKWSVQKRFERGEPNTGILCFGYDWNPETKSLTINEEEGKWVKYIYEQYLGGASIKGLTLDLKEKGVRGKRGDLMGRTTLRRILSTETYVGDLLLQRYFSPEIHKPKLNEGEMEQILVSNAHEPLVSREDYAKVQERLNRRAKAAHNHGYEKTFFAGLVKCGKCGYACNHVLYHRQPADKAYIECNKRKTKECDLLPIREVELKTIMEQVAGRKENVERIILYDGHIDFLMKDGTVKSHIREFTPLGRKATPFSGKIFCGYCGSSIVRCGSSNRRKCWMCSIKKTDKNGCNHELMSDGELYGAAKSILGTEENLDMEIYLHIEKTISYNDRIEFYMKEGGKKVWQRR

SEQ ID NO: 9316 - protein, 524 aa, synthetic construct
MAKTITRIPASVNRYTAKPIAEKTKRRVAGYARVSTEHEEQATSYEAQMDYYTNYITSRDDWIFVGMYSDEGITATNTKKREGFNQMIEDALAGKIDLIITKSVSRFARNTVDSLTTVRELKEKGVEIYFEKENIWTLDAKGELLITIMSSLAQEESRSISENTTWGKRKMFADGRASIGFKHFLGYDRGPDGEFIINEEQAVTVRYIYKRYLEGYSTYKIACELSEMGVKTPAGKDKWHPSSVMSILQNEKYKGDALLQKTFTKDFLTHKLVVNNGEVPQYYVEGHHEGIVTADQFDQVQAEILRRKGMQKYSGVGLFSSIIKCGECGSWYGAKVWHSNDKYRKVIYRCNNKYADGCKCKTPHINEDELKELFIKAANELFSEREEILANTKVMMEMVCETDSLDRDLQDSITELNIISEQMQIAIAENSRVALDQDEYEKRYAELTARYEKAKAKYDDIAEQIESKKAKRELFKGFIRTLEKQDGLMEDFDAGIWSSLVQEVIVKTKDDIRFIFKNGFEVRV

SEQ ID NO: 9317 - protein, 520 aa, synthetic construct
MKKITKIGVNETLIQKKKLKVAAYCRVSTASDEQLISLEAQKAHYENYIRSNDEWEYVGLYYDEGITGTKKDVRAGLLSMIADCEDGKIEFIITKSISRFARNTTDCLEMVRKLTDLGISIYFEKENINTGSMESELMLSILSSLAESESVSISENSKWSVQKRFQNGTFIIAYPPYGYDNDNGTMVIVPEQAEVVKEIFASCLAGKGTHAIAKELNARGLKSKKNGKWGAGAVNAILTNEKYTGDVIFQKTYSDSSFNRHRNYGERDRFLCENHHEPIISREDFDRVRAVLDQRAMEKGNGTDTYRYQNRYCFSGKIKCGECGGTFKRRQHYKPSGDYVAWTCKTHLEDKTKCSMLYISDEGIKLAFLTMMNKLVYGHNAILKPLLRTLRGMDDKDRLLRIQELECQMEENTDKKQTLTSLMAAGFLEPAVFNKENNAILAEEQRLRTEKDKLVSFVGGDKVRMKELQKLMAFTSKGEMLTAFSDEMFLGFVESITVETRAKIVFHLNCGLNLTERLVM

SEQ ID NO: 9318 - protein, 529 aa, synthetic construct
MTYQEGGERMKKITKIEGNLANSFIKAKMRVVAYCRVSTDSNEQLVSLQAQKAHYETYIKANPEWEYAGLYYDEGISGTKKENRSDLLRMLSDCETGRIDLIITKSISRFARNTTDCLEMVRKLIDLGVHIYFEKENINTGLMESELMLSILSGLAESESISISENTKWAIQRRFQNGTFKISYPPYGYQNIDGQMIVNLKQAEVVKYIFAEVLSGKGTQKVANDLNQKGIPSKRGGRWTATTIRGILTNEKYTGDVILQKTYTDSHFNRHTNYGEKNMYLVENHHEAIISHEDFEAVDAVLNQRAKEKGIEKRNSKYLNRYAFSSKIICSECGSTFKRRVHSSRRKYIAWCCSKHISNITECSMQFIRDEDIKTAFATMMNKLIFGHKFILRPLLDELRSKNNAKSFRRIEELETKIVNNMEQSQVLTGLMAKGYLEPALFNKEKNALEAERERFLAEKDQLTRSVNGNIAKVDEVDRLLKFATKSKMLTAYEDELFENYVEKIIVFSREKVGFELKCGITLKERLVN

SEQ ID NO: 9319 - protein, 523 aa, synthetic construct
MEATKNITVIPARRRVGNTAKESEIPKLRVAAYCRVSTDSDEQATSYEAQVEHYTDYIRKNPEWELAGTFADDGISGTNTKKREEFNRMIDEAMAGKIDMIVTKSISRFARNTLDCLKYIRQLKEKNIPVYFEKENINTMDAKGEVLLTIMASLAQQESQSLSQNVKLGFQYRYQQGQITVNHNRFLGYTKDEKGQLIIDPDEAVVVRRIYREYLEGASLQQICRGLEADGILTGAGKKKWRPESVKKILQNEKYIGDALLQKTYTVDFLEKKRVPNNGLVPQYYVENSHEAIIPRDLYMQVQEEMVRRANLHSGKNRKKRVYSSKYALSSIVYCSKCGEIYRRVAWNNRGKRSNVWRCCNRVENGPGACDADTIQETELQNLVVRAINMALGKKDTMNETLQKNVEAVLTGADGIPLDEIDSRLGELQKELLKVANSKGNYDAIADEIYHLREVRQNALVAGAEREGMKQRISEMQQFLSEQTQEVTEYDEQLVRRLIEKITVYDEWVTVEFKSGTSVKVRR

SEQ ID NO: 9320 - protein, 520 aa, synthetic construct
MKRITKIGVNETLIQKKKLKVAAYCRVSTASDEQLISLEAQKAHYENYIRSNDEWEYVGLYYDEGITGTKKDVRAGLLSMIADCEDGKIEFIITKSISRFARNTTDCLEMVRKLTDLGISIFFEKENINTGSMESELMLSILSSLAESESVSISENSKWSVQKRFQNGTFIIAYPPYGYDNDNGTMVIVPEQAEVVKEIFAACLAGKGTHAIAKELNARGLKTKKNGKWGAGAVKAILTNEKYTGDVIFQKTYSDSSFNRHRNYGERDRFLCENHHEPIISHEDFDRVRMVLDQRAMEKGNGTDTYRYQNRYCFSGRIKCGECGDTFKRRQHYKPSGNYVAWTCATHLEHKEQCSMLYISDEGIKLAFLTLMNKLVYGHQAVLKPLLRTLRGTDDKDRLLRIQELELRIEGNTDRKQILTNLMATGVLEPAVFNKENNALLAEEQRLRAEKDKLVSFVGGDKVRMKELQKLMAFTSKGEMLTAFSDEMFLGFVESITVETRELIVFHLNCGLNLTERLVI

SEQ ID NO: 9321 - protein, 501 aa, synthetic construct
MPVITTIHATLPSVKRRIRVAAYARVSDDELLHSLSAQVSYFSSYIQSNPEWKYVGVYADEAITGTSRKNRDDFNRLVEDCEAGLIDLVLVKSISRFARDTVDTLQVTRHLKELGIDVYFERERIHSMSDDGELLITLLASFAQEESRSISENIKWAIRKRFQQGIPNGHKAPYGYRWDGEMFRIISEQGKVVKDIYRRYLAGEPAYSIAKGLEADGVVGQSGVPMDDSTIKNILSSISYTGTMVLQKNYINENHVRKYNKGELPQYAVEEMFEPLVSVEDFAKAQQIKQERAEAMPNKDFKKTAFSGMVKCGCCGCSVSRRTTKYGKKWNCNTRERKGKGECELRPIYETELMDAAMTALGTETFDEDEVRRRVEQITIHLDRVEFLLNNGSVKKVMRAYKKGYSGFSGKLTCGCCGGKLESDTWKMGSAGQKEKVKVWNCKNCSAKRVLDDEVRLAAQEILQSKDYEPLFASTIEDMVVFDDRFELNDKERKKSVWQRK

SEQ ID NO: 9322 - protein, 528 aa, synthetic construct
MAKKVTVIPATINRFDFQPITSIRRRRVAGYARVSTDTEEQATSYEAQVDYYTTYIKSREDWEFVKVYTDEGISATNTNRRDGFNEMVQDALDGKIDLIITKSVSRFARNTVDSLVTVRKLKEKGVEIFFEKENIWTLDAKGELLITIMSSLAQEESRSISENTTWGKRKAFADGKVSLAYSNFLGYDKGPNGEFVINEEQAKIVRLIYKLYLEGFSHYKIAQKLTEMGIPTPMGKDKWWCSTVIQILTNEKYKGDALLQKEYTTDFLTKKKKKNEGEIPQYYVEGHHEPIIPPETFDLVRAEIIRRQKIGTKYMGNSIYYAKIRCGNCGGIYGAKVWHSNDKYRRVVYQCNNKYQRSKKGCNCKTPHLYENQIQDAFVSAFNQVMEDKDELVENMDVIIRVACDCTELEKKLTDVRDEIKILIQRTQEYVSENARKEQDQIEYLRRYDEMVERYEALREEEGQLKAEIEERKLKAGVIREYINRLSEQDEVLTEFDSDLWCGLVDFITVYAKGDIRVTFKDGTEIKA

SEQ ID NO: 9323 - protein, 518 aa, synthetic construct
MKTVTKIDQVESMLIRKTRVAAYCRVSTDNIDQLLSLDTQKQHYENYIKSNPEWEYAGLYYDEGISGTKKDKRDGLKALVNDCEKGLIDLVLTKSISRFSRNTTDCLELVRQLLKYDVYIQFEKENIHTGSMESELMLAILASMAKDESVSISENEKWSIRRRFMDGTFIIGYPPYGYANVEGEMVVIPDQAEVVKKIFADTLDGRSTHSIAQELNQQGVPTKKGGKWQASTINGIISNEKYTGDVLFQKTFTDDNFNRHSNNGDCDQFFCENHHEAIISHETFDKANEVIRQRGIEKGNGGDTSKYQNRYGFSGRIKCGECGTTLKRRTITVVGGYYIAWCCAKHIEDKDSCSMKAIRDDDLKRAFLTMMNKLRFGNDLVLKPLLVSICTSNAKKNEFDIEKIEKAMTDNEEQRKQMNALLTKGYLELSVFYNAHNKLVTEYEELISKRDMILRMDESGYTVESSIKDLVEFLGKSDTFTEFDDDVFERFIEKIIVKSREEIVFEFKFGLRLTERLG

SEQ ID NO: 9324 - protein, 526 aa, synthetic construct
MAGKSITVIPAKRRVGNTVGVTEKPKLKVAAYCRVSTDSEEQATSYETQVEHYTTYISKNPEWELAGIFADDGISGTNTKKREEFNRMIDECMAGHIDMIITKSISRFARNTLDCLKYIRQLKEKNVPVYFEKENINTMDTKGEVLLTIMASLAQQESESLSKNVKMGLQFRYQNGEVQVNHNRFLGYTKDEKGHLIIEPEGAMLVRRIYREYLEGKSLKNIADGLTAEGYLTAAGKAKWRPDGIRLILTNEKYMGDALLQKTYTVDVLTKKRVNNNGIVPQYYVENNHEAIIPRELFMQVQEELQRRANLRTGNANSKKKRVYSSKYALSTIIFCGKCGDLYRRVAWSSKEKGKSYVNWRCVNRIENGPTVCDAETISEQEIQNAVVRAINKTLGGKDIMLEKLKKNVVSVLLDDKCVTTEYLDSRLAELQEELVKAVGDQDRIDKIAEEIDDLRTKKSTLILKSAERDALMDRIEEMRIFLEQQTSRITDYDEQLVRRMIEKIVVFPDRFEFTFKSGTSITLKR

SEQ ID NO: 9325 - protein, 483 aa, synthetic construct
MKNKIRKCGYARVSTLAEEQEHSLVNQTEYYKQLIEKDDNAVFVGIYADRKSGKNTRQRPQFMEMIKAAKRGEIDYIITKSISRFARNLVETLKVIRELREISVGIYFENESIDTLDATSDFIISIYSTIAESELTSMSENVKWAARKRFRNGSVELNSNIYGYTLKEGQLIPEPEEAVVVKEMFERYANGEGYRKIANSLNDRGIKKKLTDTLWKDTDIKRILDNEKYVGDALLQKTYNKDFRQVKNNGEVPQYYVENNHEPIVDRETYEKVQEIKEKKSRQYKQAPAIVSPFSGKIKCKECSCGYKRRLNNRNTPYEKWIWSCSTYVMIGRKYCSGHNIREDDLKEHFLSSYNEAASFEPHEMQDLGEAIKDLLAQERELIALRARKYLTKEAYGEQHEELLKQLKEYETEYAMESRRLGDSRGHKAAFCYTDRLVRSLEVAEIDGYKITFKFKNGAVISRIFNNHTNRKATWAKKLGGVQ

SEQ ID NO: 9326 - protein, 433 aa, synthetic construct
MNRTITKIEALQELPKRTRVAAYARVSSGKEAMLNSLAAQVNYYKQLIQNNSDWVFVGVYADEALTGTRDTREEFQALIEDSRNGKIDMIITKSISRFARNTLTLLEVVRELKALEVDIFFEEQNIHTLSGEGEMILTFLATFAQEESRSVSENMKWRIKKDFEEGIPWGGKDSYGYKLENRNLVLVPEEAEIVRLIYKLYLEGYGDMQIGKILNERGYKPKFSEKWNRASIRGVLINYNYTGNLILQKTFRENHLTKLTKLNYGELDKYCVEDNHEPIISKETFFAAQELRRLKTVNIKQSNNDSIFKGRIRCGQCDKMYTFRKTKYNDVWLCSTARQKGTSECSSKQVLDAKIIEASNHILKMTTFNRHTFDIAVETVIVLPDNKLLFKLRDRKEVEYIWKYDPRSAGWTDKMKKAARIKAMNRYRGNGNG

SEQ ID NO: 9327 - protein, 521 aa, synthetic construct
MAKMAKVTVIPSTIDPLSQLPIGSKEKLKVAAYARVSTNTDEQYTSYEAQVNYYKGLIRERLDWEYVDVYSDEGISGINTKRRAGFNKMINDALDGKINLIITKSISRFARNTLDTISYVRKLKEKGIEVYFEKENLWTLDQKSELILTIMASIAQEESRSISQNVTWGKRVAFQEGRVSFAYSTFLGYKKENDKIMIVEEEAETVRRIYRMFLVEGKTATGIAKYLKEHEVKTPSGKNTNWTKNTVTSILSNEKYKGDALLQKTFTDNFLEQTVVKNTGQILQYYVENSHPAIIDKDMWELVQIEMERRDNLGAKYSSSDIFSSKLICGDCGGFYGKKKWHSNTKYERSIYQCNNKFDKNKDVCQTPHLREDEIKEKFIEAYNLTMKDKSRIKKDLKEVINLLTDTTEIEKEINKINEELLVVVELATKAIKESSKLDNSNETKYQNLVDRHESLSLKLNRLTKEKTDKENKATKLKLFLSVMNKSEDKLSEWNEDVWMLMVESGIVNRDKTIIFKFNGS

SEQ ID NO: 9328 - protein, 536 aa, synthetic construct
MLQELNISAQKITALYCRLSRDDDLQGDSNSIINQKNILQKYAEDNGFKNIVTFVDDGYSGTTFNRPDWTRLMEHVNRDEVATIIVKDMSRLGRDYLKVGYFTEILFPENGIRFIAINNGVDSDKPTDNDFTPFLNIINEWYAKDTSKKIRAVFKSKADRGETLTFLPPYGYMKDPNDKHKWLIDDEASIVVKEIFRLCISGLGVSKIANELNNRNIMPPGYYKITHGQWNKDLDYSNTKWSPAIVSEILNRQEYIGNTVIFKPDPYKRNKRKFKPMKPEELKIIENTHEAIIDKDTFDVVSNIRAHKRKNTKLGYVPKLAGKLYCSDCGEVLYYVCPREKYHNPAYFVCSSYRKHRCEHTHAIREADVEAIILADIKRLTSFVKNNEDEFVAKVSDYSKSELNKALKNATKEIDTATARYKKLDSIIQNLYEDKLEGNLTDERFNKLSESYEQEQKSLETRIKELQDFVNKENEKYLNASYLINLVKKYTEINELTDEIVQEFIQKVVIHHKVKIDGVKTQQVDIYYNGIGHIEI

SEQ ID NO: 9329 - protein, 536 aa, synthetic construct
MQSTSTQRISEIHVNTMPTLAESIHNYYSTPSLKSKKLRTAAYARVSSETEMQDNSLENQIIYYTNHIRSNPKYHFAGVYSDRGKTGTKIESRVGFKRLIRDSLNGNIDLILCKSISRFARNVVDTVETVRLLKDNGVRIIFEKENIDTADLKSEVLLVLIGAVAQEESRNTSENITWANTKRYEQGEVKFSRILGYTKDKNQDWIVVEEEAKVVREAFQEYLNGSSFAQISKSFIRKGYKKKDGKTDWNPQGIMYLLSNERYVGDAHSQKTYTIDYLSHKVAVNKGDREMYIIENHHKPIVDRETFEKVQELLLKKSKKGKTVKEKKKYPLSKRIVCGNCGANFQRFYCRDIATWRCGSQGKSNLLCNMKGVKEDEILKAMVKIFNKKYLRGRKNDVSTIITNMIKDIRNSVDAREFQQKQYRLELERALLEENKAIIKNNGKDLESLKDKRVVIEDKIKESEAWWNLFDEDDDYRNSAIELLENMDSLDIKVLKEKVNDINFLRAWVVRVKILSPILFSVTWLNGEETEIELKK

SEQ ID NO: 9330 - protein, 549 aa, synthetic construct
MNMNNNDNSNPRVRVIPAKQKVNISTPKSESQKLRVSAYARVSTLVHQNSSYELQKQYYQEFINSKPNWELYKVYSDEGISGTSTNKRVGFLQMIQDAKDGKFDYIITKSISRFARNTLTCISVVRELKSLPKPVGVFFEKENIDTLDSKSEFLLAILSSIYQEESKNISDNTKWAYQKAFSQGRIFCPTTYFLGYDTDEDGNIFIDEEQAKVVRRIFSDFLKGKGSSTIANELMRDGVLTARNKPVWTSDSVRKILKNEKYMGHCLAQKTVTIDFLTHKRVKNDEHQPQFFVKNCLPQIISEKDWYKTQQELKRRNDMAHDPDNKFRTKFSSKSPFSNKLVCGECGRPVTRRRLTSRIDYKKYNFTAWHCRAASQRDPEFKDCKAKYVWEEELEKAFVKSLLEMKEKKKLIVKEVENVVKSRSLTKTEENRLKELEEQLENLSLRISDLASREPSSNDSIYDATMRNLIYEQEIIQMEHEKLDKINQENLYLKSKLKDLIKYLDEPIEAFRDDIFLDTVEKIILNNNQNLCFVFKCGYKEYANATKRR

SEQ ID NO: 9331 - protein, 430 aa, synthetic construct
MKKRIINITPEARLITVKKRVAAYARVSCDKETMLHSLAAQIDFYRNYIINNPEWEFAGVYADEAKTGTKDSREQFQQLLADCRSGHVDVVITKSISRFARNTVTLLETTRELKELGINVFFEDQNMDSVSEEGELMLTLMASVAQEESLSCSDNCKWRIRKGFEQGQPNTCTMLGYRLVNGVITVIPDEAVIVQEIFNLYLSGCGAQGIANTLNENGISSEKISIWHHDTIRNILRNEKYMGDLLLQKKVSSDHLSKRQSPNTGQLPQYYVSDNHEPIVSKDTFEAVQKEIAFRAEKHTQKSGTASVFTKKIRCGICGKNYRRKTTPYNIVWCCSTFNTKGKSYCASKAIPEGTIKRVIAGALGEGTFSEECFTAKVKRIDAMPSNILRFIFKDGSVAEYIWQDRSRSESWTPEMREKARQATARRCNQ

SEQ ID NO: 9332 - protein, 551 aa, synthetic construct
MSGKTITVIPAKPTSFSASLPGMIKRRKVAAYARVSTDKDEQISSYDAQVDYYTQYIKSNPEWEFVEVYADEGITGTNMKKRDGFNRMVQDALDGRIDLILTKSVSRFARNTVDSLTTVRSLKDKGVEIFFEKENIYTLDSKGELLLTILSSLAQEEVRNIASNTAWGRRKTFADGKVTFAYSSFLGYEMGEDGNSRIVEEQAEIIRHIYSEFPAGKTAFDIAARLTEEGIPTPMKKKVWQASVVKSILHNEKYKGDAILQKRFTVDFLTKRTKLNEGEYPQYYIENNHPPIVSAETFEMVQEEFARRKAAGGFMRCVSPFSGRIICGDCGGFYGRKVWHSNTAYRTYEWHCNNKFTKRKYCTTPTVKTESIEKCFMDAFNSLLARKDEIAENYRICLAAITDDSEYVRRRDELDKRIEDETERTREFLFKRSKSDSDLDRVNEQYNKYIAVLDDLQRERQEMNSKIALCAAKKSQVKSFLKLLRKQKTLLTQFDPLLWQAAVNHMIIYHDMTVKFILRDGSELPWIIERGVRSYVKRAKESDGSAVSEKE

SEQ ID NO: 9333 - protein, 504 aa, synthetic construct
METKRIIPLFRSVSTERTDDSPLKRMGAYCRVSSDKDEQLNSLSAQKEYYEKALTEDASCDFVGIYADEGISGTQVDKREGFLQMMEDCRAGKINGIITKSVSRFGRNTVDTLVYTRELRSLGIDVFFEKEDIHSINPEGELLLTLISALSQNESTNMSENVKWGVRRKYEKGEAGSLPLGKFYGYSQKKRVITINEDEATVVRRIYTDYISGFTATQIAERLTAEGVPTERGNNVWHLSVVRKILRNEKYKGDTLFQKTLIADPISHRRIKNDGILPQYYAENSIPAIVERDVWELAAAEQHRRENYCKEHSVTIYRPGSEEFPLSGRLVCQTCGHTYVLLESKVKSVKGKKYWRCSSYHGGNGTPVNGMEFIPRGQPLRDVDANNRWVKYYRRNKRKLPQPRQMLCTDIEIEAGKSEKAFIRGWNLLVSKKQRYQATLKRTADTTDDILLRYRATELSRILDEMGTIKEFNYAFSLAVLEKIEVTPQGKLTFCFLGGVRLTV

SEQ ID NO: 9334 - protein, 564 aa, synthetic construct
MLAVIYIRVSTEDQAREGYSLEVQEEKCRQRARELGCGRVEVYHDDVTGEILNRPELMMVLDRLKQGGVDYFICYDPDRLARSLMNQLVITEKVEKAKVKIDFINFEWKNTPDGKLFYQLRGSIAEFEKAKILMRTNDGKRKKAEKGLLTHNPRLYGYSFDKEKDILIINEEDARVLRMMYSWVLEAGPGQYVGPYAVARRLNDMGIPPPREPKNKDKEALWHRATVRRILTNETYTGVLHLRVEDSTGVKNNRYRPQEEKISRKKRPREDWCSTQVPPIIDRQTWDEVQYRLRDARRVRPGKAIEQYMLSGMVQCGVPGCGHTMHGNRIRKKGKVKDHLEYYRYYVCTAKSPGITGVDRCASSNVPAERVENIVWDKVAGWLADPKVLAEELKDQGLGDNLKSINDEIMTVGRLMEEASTERARIIRGYQKGTIPEEEADRILLGIKDRIGRMEKRLEELNGESRRQQLMEEEQQALREAVDEFAGRLEELTFEEKQYVIRLLVDKVIVEGRNIIIKGRIPGIFPGISGPVNSVYQFDNGNRTLGGGSVQECYPDGRNHHPVQ

SEQ ID NO: 9335 - protein, 503 aa, synthetic construct
MYVAFYGRVSTEEQADRGNIAGQVDFARKYFSLHGGEEKVEGYGIYLDEGVSGTLPLDARPGGAALMADARSGKVGAVYFYRLDRLARSTRVVLDTYKELENLNVSIKSMTESFDTGTPVGKFFMTLLASIAALERDTILERTQMGKERKAREGCWTSGPPPFGYRIGPDKRLSVYCPEAETVRLIFRLYSGGMTMVPLAEYLNARDIPTPNVSKEWKRAAAGTWQAGHISIILRSTVYRGEYFTMRRSKKGRGGTVIKVPAIVTGEEFDRAAALMAQNGDLSRRLRGRAYPLGGLIYCGLCGRAMVGNSGGSGRRYYRCSGTVNRGRGRECSSGQVRAGDLERVIWEDIKEFIKNPGNYSQKVVQRLEDQKKKVSPENEEVGDLERAIAAKRSARSKVLSLAARSLVSEEEAERELQSLAGDLDLLIRRRDGLLDYKSRLEENRVTPESAPLLMKKIALMMERTEPRGDIIKLLAERVVVTAKGPMNEGDCHVSVYYRFKEP

SEQ ID NO: 9336 - protein, 556 aa, synthetic construct
MSIPVAIYARVSTEEQADNFSIASQLDLLKNYCRSMQYKIYSEYVDPGYSGTTQNRPALQRLLKDASEGKFKLVIVYRIDRFFRSVKDLLLIVDHMDRLGIAFCSVTEPFDTSNPIGKFMLSLLGSIAQLERDTFIERSQLGKLRRAQEGYVVLSNPPLGYDYDRENGQLMINEQEAETVRLIFSEYIKPDNSTISIAKILKALGRPTKKGGKWDGERVYSILVKSVYVGEWVYKSRKTSVKVFVPPIINQTTFNKAQELLKERRNMIHRTNKRQYLLRGILKCKKCGWDMGGTTQYLYKRKSGKKIGKPRSEKHYYRCCKNISAIHYPERELKRCSATWVKGAELENKVLEHLIDILSNPDRLQEAVCSQDNSLENTKKELNQKFKEIEQAISRCDKEKERILKAYREELIELEDLGKEMDRIKERHQNLVRQTEELKLKIAMEDTKIKGIKTLIERYQGINVHDILNAPFKEKREFLMKLVKVIWIDTKEDGSIHLDIECIIPELNSHPPSGGNSTPGNNGTNNRKNGDANSESCTIPPLASHGPPRFPQRYRL

SEQ ID NO: 9337 - protein, 562 aa, synthetic construct
MYRSEELMHTVGYVRVSTKRQANEGVSLDVQRDRIEAFALENGWILSEVYIDRGASARDDSRPEFQRMLLDAMAKPAAFSGIIVYDRSRFYRNAAKAELTIRELRRNGIEIFSVTQPNGNDEAGDMVRQLIAVVDEHSSRETAKRVRGTMIHNAKLGFWNGAAPPYGYKTEIADRRGKKDKKRLAVDEIEAPVVELIFRLAEEGDQRSGPMGVKSIAEYLNTRGYRTRRGNLWHVGPLHGLLTNTVYQGEYTYNAVDSNTRIKRPKEDHIVVACPAIIAPRRFAAVQASLRSRNPKLSAPRVVTGPILLTGLLQCAKCGGAMTMRTGKSGRYTYYACASRQARGTAACEGCSHPMRHVDEAVTEALVSEALTPTRLDGILRRIESDRRADRKNSAELLRMQAELANARQRINRLMTMVEQGLVEASDPELGVKLTAAQKDRDIAAAGIERVRRLIGPELELEPERIVAFSNYMKDRVRNGDIPFRKAYIRSIIDHIVIGDTQATLSGRRDGLRALVATHNGGGQAVPTGIQEWCTRLDSNCGEVEQTGQTRNLKNDLQSLVA

SEQ ID NO: 9338 - protein, 550 aa, synthetic construct
MSRKKQVYEKITALYCRISLDDGGDNESMSISNQKIMLRDFAEKHGMFQYEYYVDDGYTGRNFNRPAFQRMIADIEAGKIGCVITKDLSRLGRNYIEAGSYIEIFFPKHNVRYIAITDGVDSLTRQEMDITPFKNILNDMYSRDISKKVLAGITTRSRQGKFCGGTPPFGLMRDPEDKGHLIIDPETAPIIRKIYDYALDGLGCMRISKRLMEEKIPITHVKANTEFDANYYSWGGARISHILRNPFYKGAHLVFRTHQKGIRSNTYDIIPRDQWEVIEGCHEAIVTPEEWEQVQAIIDRKPPIMKGNACPFYNLFHGLVYCATCGKSMQVRYEKVGRTGKNRFTGEMREPIDKAYYICQTYNRMGCKVCSSHKIEARDLYNLVLKDIQELAAQAMKDADAFYQHLSSRMERRYLVDASQTEKERKRLEARNQEIDVMFLSLYTDKAKGILTEQRFMKLTAALEQEQESNQKRLHDLAMMQSRADAQESEVRTFIKEIRRYSAIEELDEAMLNRLISRILIGEVKKVDGQKVQKVKIVYNFVGEIPEIAA

SEQ ID NO: 9339 - protein, 591 aa, synthetic construct
MTRKAKTCFIYVRVSTKMQVENGESIEAQLYDLRQYAKRENLRILHEYIDDGYSGKNITGRPHFQEMMEEIKSGVHVDYVLVFKLSRFGRNAADALSSLQFMQDYGTNLVCVKDGINSEAQMGKMMIAFMSAFAEMERENILVQTMAGREQKAREGKWNGGQAPFGYRLVKNEKGKGHLEIDEDEAEIVRIIFREYTKNGKGVHAIASWLNTQGYRKKIRGNSKYEHFAPGTVKNIIRNPVYAGKIAFGRRRTTPVKGERNVYHMVKQDNFDIYEGEHDAIIDEATWNAAQKRLAEDSHPFPEAKPDGHTHLLTGMLVCPVCERNMIANVSRGKRKKDGTIGKTTYAYTCKYSKKQFGHDCTFTRQFKQEYIDREVIEVISRAAHSAVFEERVREELDAAVDIEKLEADVARIGKALENNSAARRMLSRQLDALDASDRSYERKYEDMQARLDKLYDESADIEDALDAAEAKLESAKEKQVTTARVYEMLDEFQEKFDTYDPAKQKEILQQVVERVEIDPDANPKKGDAIVKRVRFKCPVSFYRTLPEEAYDVLGINEFNRLETTEYTPDGNSRVDGNHDETIVLIQKKNS

SEQ ID NO: 9340 - protein, 522 aa, synthetic construct
MGNVMVIPARRQVGNTVKQSAQKKLRVAAYCRVSTDSEEQETSYEAQVTHYTEYIQKNPEWELAGIFADDGISGTNTKKRDEFNRMIDECMAGNIDMVITKSISRFARNTLDCLQYIRQLKDKNIPVYFEKEAINTLDAKGEVLITIMASLAQQESQSMSQNIKLGLQYRYQQGKVQVNHNRFLGYTKDDNGHLIIDPEQAEIVKRIYREYLEGSSMDKIAYGLMADGILTGAGKTKWHTSTINKILRNEKYMGDALLQKTYTTDFLTKKRIKNNGTVPQYYVEGDHEAIIPKELFMQVQAELVRRRVVHVSPTGKKRSFSCNHCFAQMVFCGDCGELYRRVHWNNHGCKSIVWRCISRLEPTSAEKNCTNRTVNELLLQEVTVKAFHQILTERDVFLKTLQQNIAKAVVNADTLSPDSIQARLEELQKELIKKANNKQDYDAIADEIFRLRDQKEQSELDSHHREEAMNRIKELQDFISEQKTDITHFDEALVKKLIEKITVFADRFTVEFKSGITIDIES

SEQ ID NO: 9341 - protein, 522 aa, synthetic construct
MGNVMVIPARRQVGNTVKQSAQKKLRVAAYCRVSTDSEEQETSYEAQVTHYTEYIQKNPEWELAGIFADDGISGTNTKKRNEFNRMIDECMAGNIDMVISKSISRFARNTLDCLQYIRQLKEKNIPVYFEKEAINTMDSKGEVLITIMASLAQQESQSMSQNIKLGLQYRYQQGKVQINHNRFLGYTKDDNGHLIIDPEQAEIVKRIYREYLEGSSMNKIADGLMADGILTGAGKTKWHTSTINKILRNEKYMGDALLQKTYTTDFLTKKRIKNNGTVPQYYVEDDHEAIIPKELFMQVQAELVRRRTVHVSPTGKKRSFSCNHCFAQMVLCGDCGELYRRVHWNNHGCKSIVWRCISRLEPISAEKSCTNRTVNELLLQEITVKAINQILTERDLFLKTLQQNIAKAVVGADTLSPDGIQARLEELQKELIKKANNKQDYDAIADEIFRLRDQKEKSELDSHHREEAMKRIKELQNFIARQETDITEFDETLVKKLIEKITVFADHFTVEFKSGITIDIEA

SEQ ID NO: 9342 - protein, 560 aa, synthetic construct
MKKRRCYIYTRVSTSMQVEGYSLEAQKERLRKYADFQEMVIVGEYSDEGKSGKSIEGRQEFMQMLRDIEEGKDRVEFVLVYKLSRFGRNAADVLNSLQRMQDFGVNLICVEDGIDSSKDSGKLMISVLSAVAEIERENILVQTMEGRRQKARDGKWNGGFAPYGYKLLNGELEIAEDEAEIIRIIFDKYIHTNMGVNGIAAYLNEHGYKKKKRQNNTLDAFATSFIKGVLDNPIYCGKLAFGRRKTERVPGKRNEFRIVKQDSYILSDGIHEAIISEDDWNLAKQKRNINGVKHEKIHSLEHEHILSGILKCPICGKGMYGNVNRKKKKDGTFYKDYFYYACKHRYYVNGHKCDYRKQWNEEKVNDAVAEVIKKLVNNPKFEAAIRAKINSKIDTGELETEHENLKKQLRQVLGAKNRLGQQMDNLDISDKMYDRKYQDMQDRLNGLYDEIERLESLIDDIVSRKEYIRQQKISEDGVYQYLLYFDKLYDKFTDMEKKEFMNSFVERVDIYEDEQPNGRFLKHIKFKFPVFFDGEEIQELSWDNETTVETVCLMSRVEGK

SEQ ID NO: 9343 - protein, 581 aa, synthetic construct
MPEKIINCAIYTRKSTEEGLEQDFNSLDNQYEFCTNYLKSLNDPALQLLPARYDDGGYSGGSLNRPALQRLLADIRCGLVNRVIIYKIDRLTREIRDFFKLLDVFEKYNVEFVSVKENQYYNTTTAIGRLMVNMFLVFAQFERENAGDRIRDKIATSKAKGMWMGGCPPYGYDIGDRCLVINETEAQNVRFIYQTFCNTHSLADTTDALNSGGIRTKRYTTRQGRTFGGRKYSVKTVQRILQNPLYKGMVAHRGKQYPGQHAAIIDAVQFDMVQAVFAAHKEKRETRRPKMPSSGGERETAALTGLIYCGCCDSAMTPSYCCKGDIRYHYYRCYRRASKLEDKCPINQIRTSEIDRVVMEQVLAILKSRDFFVQYISHHHEFDVSTAFALFNSLDDVWNSLFETEKRRILRELLAKVTIYKDKIVLDVKKAGLAGVFAELSQNNRLAEVEYKENETFQISVAYRATRLANGAKIIVPATAKEESRFNGSLRLARQIAKGFAWRKMMESGLSLQELTASAKTNERDIRFAMRLSMIDPAIVESVLSGKSPEFLTYAFMKKHPIPLLWSDQRKLYGFEERKQQ

SEQ ID NO: 9344 - protein, 576 aa, synthetic construct
MKYTNQFGESVQISASDEIWLNDEFFAREMAKLPPDAPRAGLAYRVSTKGQVDHDDIPMQKIECRKFCAQHGWRVVLEKAEKGVSGSKISATKRDAIQELKAEAEKGNIDILLVFLFDRLGRIESETPYVVEWFVKHGVEVWSTREGQQKIDSHTDKLINYIRFWQAAGESEKIAERVATRIQQLNSSGHYSGGTVAYGYRAVHKGRVNKKGQPVKDLEVAPEEAAIVQELFELAAFEGKSAYAMAEMLNNRGLRTHSGAKFTPVHILRILRHEGYLGYIVTRSVKSQHLPELEIISPELFQKANEMVDMRCTSNAEARKVAHKSDNNTLLAGLVYCAHCGAKMSGFMHHDRYKLRDGTVKESLKPKYNCYQRAQKLRDCDGQALYLADRVDGIVLEVVRELFSSIRCAPRDKLLEQKIRQEYQDKRKQKTAMEKRLQDCEHALERYEAEVLRCLDGESGFSQEMLARLIAKAEAELRAARQEYAKVLQEAEDDRELAQKIKECYRQFCGWTEEFELAPLARKRMILSELLEKVEVGKGYQVTVHVKLTYKQFLELCQTEETSENPLRNATDGNVA

SEQ ID NO: 9345 - protein, 445 aa, synthetic construct
MNVIRGVGYIRVSTAEQATRGLSLDAQEAEIRTYAKAHGIELFNIYVDAGITARKRLDRREAFGQMMKDVDAGLIDEIIVMRLDRWFRNIYDYHKMMNEHLIPHGVNWSAVKEDYDTKTTNGRLMINLRLAIAEQECDTDGDRIRDIHDNQIANGIWIGGCAPPGYRIENKRLSIDPDMQPAVSYFFERLLSCGSVRRAMLDMNERHNLHFEYGQAIRMARSTTYCGVRRENYNYCPTYISQDEHAQIMAALEHNVRVRSADNARIHIFSGLLVCACCGRRLAANTVRKKSVTWTAYRCHRAFGDHVCDNRHLVDERKVEAWLLDYLENGLSDYIVSASVADAQPVVVDNTAAIRERQERVKELFINGFIDLQEYKRRAAELEAKIQVPEKQPPRSMEKLKSLLERGVRAIYNDLSRGERQEFWRSIIREIPVNNGAVSGDPIFL

SEQ ID NO: 9346 - protein, 543 aa, synthetic construct
MNLTKAKETKTRVCCLYRVSTKGQVDKAENDIPMQKKACHEFAESKGWTIIKEHAELGVSGFKVAAADRDELQEIKREAEKQEFDILLVFMFDRLGRKDNETPFVLKWFVEQGISVWSTVEGEQRFDSNVDDLLNYIRFWQASSESQKTSVRIKTRMKQIVEDGHYMGGTVPFGYRAVYKGRMNKKGRPVKDLEIDPREGEIVREIFFKVAREGYSAHGIARMLNERNIVTHGGARFQTNHVLRMLRHRGYTGYMIAKENTSGFIPELQIVEESIYEDAMAIVEQRKKENEQRRSVAQSSYNKTLLAGNLYCAHCGTRLSGFWHKDRYRLADGTVKEVMAPKYNCYAKGLKVRPCDGQQLYKAEIVDEIVEGIAKDIFAMISRMPKDPTIEAQLKKNIQNKENLLRELDAKLQSAKKELELYEAQIIKCIEGKSKLSEATLARMISRAEDSVAVYEKEIEKARMDKQNQKDTAAQIEDFYKEFKGWADEYESAALERRRVILSQLFNRIEIGRGYEVKVEIAMSYKQFLNLSENTQTGNRTVA

SEQ ID NO: 9347 - protein, 509 aa, synthetic construct
MPKVTVIPPSINRTTWQSTTTPTRRKVAAYARVSTDFEEQLTSYEAQISYYTNYIQRNPDWEFVKIYTDEGISATSTKHREGFNSMIADALDGKIDLIITKSVSRFARNTVDSLTTIRKLKEHHVECFFEKENIWTFDSKGELLITIMSSLAQEESRSISENVTWGQRKRFADGKVSLPYAHFLGYRKGENGLPEIVPEEAETVRYIYQRFIDGLTPYKIANELTAQGVPTPCGKEKWSASTVKSILTNEKYKGDALLQKKFTVDFLTKKQQINEGQVPQYYVENSHPAIITPEEFDFVQSEFQKRCMKPYSSTSIYATKIICGDCGSYFGAKVWHSNSKYRRVIYQCNSKFKGSHFCTTPHLYEPEIQEKFLQAFAQYFSQKDVVIKNCQFALNCLKKQESKKKELQDELVAVNEKLKEYIQHGGEDFDALNAKYEELSAQLDAEEAAESDRKRRIAKMQKILQTLKKTDSVLETFDESVWNAVLENLTVFHDGSLVFLFRDGTEIKV

SEQ ID NO: 9348 - protein, 430 aa, synthetic construct
MERKVHRVQQRPSKPKLLKVVAYARVSSGKDAMLHSLAAQIDYFQNLIRQHPGWEFCGVFADEAKTGTKDERPEYQKMLEKCRNREVDLVITKSISRFARNTVTLLETVRELKSLGIDVWFEKENLHSTSGDGELMLSILASFAQEESKSVSDNMKWRIRNDFQQGKIGSITIFGYRRNADGVLEIEESEAKIVQMIFADYCSGMGQCAIAKKINAMGISTRQGNFWTGQRVKEILVNEKYVGNMLLQKYYRQDPIGKRKMKNQGELPKYFVEQSHEAIISAELFEKVQNLVKKQTKQFSHPGATNRYPLSGMVQCAACGKSYQRKIYKQGAVWMCATYLRQGKSHCPTAKQISERILYEKICSALQIKEFDVEIVKSKIENILVSPNWLTFLFKDNTEKAISWKNYSRSESWTPEMRQAAAERSRKCQK

SEQ ID NO: 9349 - protein, 457 aa, synthetic construct
MAPRLLRAIASFLRCRSIINQTQGIYMKHKQAEQAPVAPLKYCLYSRKSTEAEDKQALSIESQVKEMQALAERDHLHIVEIKREAHSSKEVGQRPIYNEMLSEIKQGKFNAILTWAPDRLSRNAGDLGSVVDLMDQGKLIEIKTYGQKFTNNPNEKFLLMILGSQAKLENDNKAVNVKRGLRTRCEMGWRPGVAPTGYLNEKHVDKKCQCRIDPRRAPVIKQMFEKVASEQWSGRKVYRWLREINFKTHRGKPLVLANIYIILRNPFYYGDFEYPVNGGQWYTGKHTPIIDKILYDKVQMTLNQNYIPKTESKEFAFTKLIHCGYCGSGISADEKFKKLKDGGTNRHVYYFCTKARNIDCKNPAINEPNLITELIEVMDKVDLDELGIKSRIEDEISRFNKFRTGVLGHKQEKMSLDIDVRNYTKYLLRDGTLMEKRELLSCMKSKLILREKKVCFI

SEQ ID NO: 9350 - protein, 478 aa, synthetic construct
MHYTTFRYENKGFLESWLPTSYQLTPPRLSREVASFLRYMETTQMPVGAMAREIQAPIKVKYCLYARKSTESEEAQILSIDSQIKEMLQMAERDHLEIVEIKKESHSAKEAGQRPVFNEIVEEIKKKKFNGILTWAPDRISRNAGDLGRIVDLMDQGILHEIRTYGQKFTNSPNEKFLLMILGSQAKLENDNKVVNVKRGLRARCEMGLWPCTAPTGYLNSKNTDKRCHVEIDPHRAPTIKKMFEKVAYEKCSGRRLHAWLKDEMKFKTKGDKVFSISNIYITLRNTFYYGSFEYPKGGGQWYTGKHTPIITKELFDKVQEQMMEYTRNSEHKEFAFTKLMTCGLCGSGITADEKFKKQNNGNIHRYVYYGCCRYQDKDCKSGYMREENLIEQLAGLMDEIDLDEIGMKQRIKDEIERHKRFNVGILGLKEATVKVADVDIRNYAKHVLRGGTILEKRELLTCLKSKVVMNNKQIRIA

SEQ ID NO: 9351 - protein, 568 aa, synthetic construct
METNLKYFIYARKSSEDSQRQIASVQDQINALATMAVRESLSVARLPFKEERSAKDPGRPIFNDVLDRIQAGEANALLCWDIDRLSRNPIDNGRLQWMLQKSVIKVIKTPGRAYYPEDAGLLMSIEGGRATDYVMRLSKNVKRGLNSKAMRGWRPSGGPIGYLNVGIEKGSKTIAIDPERFELVRKMWDLFLTGTYAVSKIREIAINDWHLTTLPHRKIGGKALSMSHMYNIFNDTFYYGCYPWTDPESGERKLIKGNHQPMITELEYRRAQVLLGKRGKPQPHTREFAFTGLMRCGECDSSITAEEKNQIICTACKHKFAYENKTTCPKCAADISEMSNPTILNYVYYHCTKKKDRDCSQKTVRLDDLEKQFNAILGDLTIDEDYLKLAIDYLNDKGRESGSEEKAMQVSLQSAYNNCETRLSNLSREFTSPLNSKYDLYTPEEFKKQKMELMTERERLAKEMGGTSEKFDRDLETTERVFVFCTFAQKHFNTPDLQKKRTIFGTIGSNLTLKDRKLSIERLHPYLLIENELKNQRSLLEGLEPEKEGYAERKEAAFAASIPDWLPE

SEQ ID NO: 9352 - protein, 571 aa, synthetic construct
MSTPRTKAYSYIRFSTPEQAKGDSYRRQRAAAETYCMQNDLELVKDEGYLFFDRGRSAYKGKHLDDTSQLARFLNYVQDGVIESGSILIIESLDRLSREHVRAALPRFLDILGSGVQIYSVSDNKLYSKDWDERDLLIGIFQMSRAHSESSLKGERVSKAWKQKQKDARETKKPLGQACPYWLKLEGGKYVEISERVEVIREIFKLAVSGHGHRAIAKILNADNVPIFGSSSRNASGAWGSSSTGKILSNRAVLGEYQPTGLIDGKRGALGEPVLGFFPAVISEDLFFEAQSARTTRNVSKATKSAANFNLWQGLAKCSLCGESMHLVNKGSPPKGGKYLRCYGSAKGRCTNKIVQLVGAERAYMEILAKVDSLSLVQDSQNKIRKEIAKIDLQLDLVKKRQAEIESQIQDVSGELPGFVIQAALRVDQELKELKNKRNELKRDSQREKIINKADFFSKLDLISFEGRARANYLLKALRVQVRIERQENTVYYAVEADSVLTFVMKQVSELIEYYPYTGELTEILRSQGDDGAFATMHSGMVARAFELFELVREQSRIESMLANKTVPKKI

SEQ ID NO: 9353 - protein, 580 aa, synthetic construct
METLKIDRSKPLAIAYVRWSSTVQGGDDKDSYDRQTSPLEFFTSSTGVPVVETIIDPGRSAFTGENSKVGKLKSILDRIESGEIRKGDFLVVESIDRITRMRVLDGVALIQDGILKKGVKLYTTTDNKIYSYEDPDKDFENLLMISLIAKRANEESEIKSKRRRSAWNKAKTKATDGVPFNAHNPPYGLRYDPEENCFEIVEDEAIEIKEIFEGLKYEGVSNTLKKVNLTSKRKWSRKTVHLMLTSRYPIGTLMSQKRDGKKKVFERYIENYYPAILTHKEFQDALQAMKLRGKVKDYGRNTEGYLNIFKHCVKCAVCGQSLMFEKSINQKGIKYGYFHCYTRKETLSHCDVPRFRFDFAFGALLQMVKQLTGDELEFDDIHSWAREMPADYNSTVTNDEIEMEDFGNQFLSLFSKSTATEAIKAEFYEAENELAKAKSLYENMTASFSQYKDGRIPSFFIQQMADAELAYENAKADIDALSAQIDNAESSLEIYSYKDIIELYSTDEGRLKLNHFFKSNGFKFVFNYEAKTRTLFMAVLDKADSEIYRVGKKFSLHNPLKEFGINNLNVHMNTVVKPNH

SEQ ID NO: 9354 - protein, 536 aa, synthetic construct
MSEKAVIYCRVSDTKQRVEGHGLDSQEVRCIEYAGRCDYEIVKVFKDDASGGIADRPRFLEMLSYLEARKSDAHVVIVDDINRISRSLEVHLMFRERLKAIGARFESPTQKFGEGADDRMVEMMLVNVAEYQRLKNAEQTKNRMWGRMKNGYWVFQAPRGYKYEKVGAHGKLLVRDEPVASILQEALEGFASGRLQTMSEMKRFLETFPEYPRDTKEGEVRIQRIRDLLTRVVYAGYVEHEAWAIPKTPGHHEPLISLETYQKIQDRINGKSPKVPSKINLNTLVPLRGFVKCGDCDRPLTGSRSKGRSKYYVYYDCHNKVCPSYRKGIKKEQIEGDFEELLSTMRPSKYLFRLLHAMLKDLWDAQAERGVAMVDAVKKELLEIERDIERLVDRTLDTTNGTLAKRYEQRIGDLEARKLVLAEQQGKVGQPQTTFERTFRTAMRFLSNPLILWNSDRLEDKRAVLKLTFADQIAYHRNQGFRTADLSLPFKALGSVYGGEKEMVRVRGLEPPRIAPLEPKSSASTSSATPAINRLL

SEQ ID NO: 9355 - protein, 477 aa, synthetic construct
MLTLAYCRVSTEEQVEEGYSIEGQADKLRAYSTLRDLGPVTVISDPGRSGKNMERPGLQQLLAAVEAGHVSHVIVWRLDRLSRNLGDLILLADKLGELGVALHSVSENLDLSSASGRMFYNILGTFAQFFREQLAENVKMGNERAVKEGRWINRPKTGYDLIDGELVANADAERVREIFRLRAAGLSYRSIEDATGITYSTVRNILDSRIYVGEVLHNDQWFPGRHEPLITPAEFHAAHRGFGKGVARSKDVLSGRVRCGLCAKRMAVAQNGQGSTFYRCRHRGEGCEQPARSTKGLARAAVLGLGLIGRDERLQAAIRRQLASGAATTQETTSKRRGASAAVALAKLAQDRRKLLELYYADKISADGFSAEETRLCAAIEIERARALDEQHEERHKSDLELRFDQVAAILQDLDVDAVWTRADDAERRVLVEELVEWVTVFPDHLEVTVTGSPALNVLYGEVGLKESDFVGVGGPT

SEQ ID NO: 9356 - protein, 540 aa, synthetic construct
MSTNRRAAIYARFSTDLQNERSVEDQIAVCRALAEREGIEVVSVHHDAARSGASIFGRNGLITLIAQSELLPCPFDTVLVEHADRLSRDMEDLSGLHKRFAFRGIEIRAVNSGTMDTAMVGLFGLVGQMQREEGAKKTKRGLSGVVRSGRSAGGRLYGYSPVPGKPGELAIAEDEAAIVRRIFAAYLAGQTPREIAHALNRDGVAAPRGARWNASTINGNTKRGNGLLQTELFAGRRVWNKVSMLRDPSTGKRVSRPNPPDQWQSAEVPDLAIVDAETFAAAQARKAARAVHWTNPLLRKPRHLLSGLLRCRCGSGMSSHGKDRTGRTRLRCTAATESGSCPDPRMFYLDNVEEKVLGALRAEMNDPAVMTEFIAEYQAERMRLAARRNKNRSRLERNLAQAARELQRVINLMVASEGDVPELMAQAKDLSARKKIAEDALASAPGEVKVITLHPTALARYEQMLTRLQDGLSKGMGANDTEAAAALRDLVTHIIVGPGTNKGEVEVQIFGRLNALMGGNDGGSLRVGSGGNGPSLPSER

SEQ ID NO: 9357 - protein, 529 aa, synthetic construct
MEIKRFAKGVEIAKAKSTNNCVIYTRVSTKEQADTNMSLETQKKGCEAYVLKYGYNVLAYFGGTYESAQTDERKEFKRMIEFCKKQKTKVSYIVVYSLERFSRTGDNAIWLSRQLRGLGISIISVSQPIDTSNPSGVLQQNILFLFSQYDNDLRKQKSMDGTKEKLINGIWCTRPPRGYDTVKRNGERFIEINDTGKLLRKAFLWKAQEQLTHSEIVKRLAASGLKITIKTLHAVFTNPFYCGMLSHSALGGELVKGKHEPLVSQEIFLKVNDIKPRNYGKLKNEKYTNTPLKGLLKCETCGELMRGYIVKKKGLYYYKCNSDKKCGCNKSAKDLHNQFQGILEELTLEEKYVDVFKDQLRLIYTELNANKDKANAEFQQQINEVETKLERLEERFINEEIKPDLYEKFAKKFRQEKQAIEENMKGCPVSGSNLDYFINRSVEISTELPSLWASSDYSNKQKLQNLIFPEGIYYNKKKDESRTTKVNSVFLQIARLKQVSGENEKGLQAEKPLKSLWVVPTGIEPVSKV

SEQ ID NO: 9358 - protein, 543 aa, synthetic construct
MKTITKVAIYSRKSKFTGKGDSIENQIELCKIYIKNHFGDVEVFVYEDEGFSGGNTNRPEFKRLIEDAKEKKFEALVCYRLDRISRNVADFSVLIKELESYDIDFVSIKEQFDTTSPLGRAMMHISAVFAQLERETIAERIRDNMLESAKSGKWLGGITPTGFCSVEKVEIVDGKEYKSCYLVPIEEEVKKVRLIFEMYLQFESLSKVETYLLNNDILTKNNTDFKKFSIKNILTNPVYCIADSIIYDYFINNNYAVSVNKEKFDGESGVMGYNKTNQKAKQQRQRKESEWIISAGEHKGIISSQDWIKAQILITQNRSTVRRNTCSKEALLSGIIKCSKCGSCMRPKMNRMTTDGSRRSYYYVCELKERSKRQKCDQQNANGIYLDDLIENYIKSMNTDKNKVIEKLREKTKDVNHKKLDNKIEALDKQIEQNNKIIDNLLSTLETAPSQVVEIILQRINDIVEQNNKINLAIEKAAQIENKNKNLEANLEFVESLILSFSKAYDTLDFETRKHYIKCIVEEIVYKSKDDIDVYFLGAKTKK

SEQ ID NO: 9359 - protein, 560 aa, synthetic construct
MRACIYARVSTEEQALKGHSLGEQIKHSKLKAIELGAVGDIAEFVDDGYSGDDSERPNMIELTSRVEQGEFDLVVCYDLDRWARDLGDQIMFARSVEKYARLEFVTHSRGDKESPEDTMFFYMKGAFAEYEKAKIRQRTIAGRKAKAQKGMVSCTGGWAGHPGPFGYDYDAERSQFVINEKEAGIVKKIYTMCDNEGMGISKITIALNEERIPSPKGCRWHTSTVGRILHNEAYAGTFNNFKRKTCSKSGKTLSVEIRPQEQWIPVKIPSIISKVQWEGVQRKISQNAAISRRRKHQYLLVGHIYCGECGRRVYTTPKTTNTGAHLYYRCAGRKREVTLTPCEVPMFPANSIGGMRGLDDMVWNFLDSALKNPDLITREVNKAKDNSEAEIIEELLRKLDKKQKQIDDLEKQVDEAWEMRLEGYVEPDELKKRIQKIEQKKKSVIQEISNTKNKLLYIEEKQNFSQNIENYCKLIADKLDSLSFDEKKEIIKLLDVKIHIYANKTVEIEWPFSNELIKVGELSHEGYCWASRYINSRVQRKGTCCNKKFWISVSSQKSYN

SEQ ID NO: 9360 - protein, 562 aa, synthetic construct
MKTVIYARFSSTLQNARSIEDQVALCRERCEREGWDVLDVFTDFAISGAAGIDESARPGLNALLARVEAGGVDQVLAEATDRIARHQGDAFAIRERLTFAGARLFTLSDGEVTEITATFRGLMDAQFRKDLAAKVKRGQRGTISQKRFAAGIAYGYRKANRLDGNGELIRGLREVDEDQADVVRRIFREFAAGFSPRQIADRLNADGVPAVQPRSGGNSFWRGSTIYGDRKRKNGILQNQLYIGKLIFNRTRKIVDPKTRKALIRANPESEWLVQDVPELRIVDADLWEAVQDVLGRVQSRRPERSRRPKHMLSGIVRCGVCGGAWTVIGRERWGCSRHREGGPAACGNNRTTRTAPMEERVLKGLQDHMLDPELVEIYVREYHLEHARRAKELSRESDRLKKRHADAVAKVERLVMAVADGADEFVEIREVLGKARAERDALASELEQLEQLPVVALHPSIIADYRAQVAKLNAALAENPEARLEAIPKLRALINSVHVHPKPDRAKGVTIEVTGKLNSMLALATGTDAPQPGGMSMYGNDGAGEGIRTLDPNLGKVVLYP

SEQ ID NO: 9361 - protein, 591 aa, synthetic construct
MEAKILKTNLNTCELIKVCAYARVSTDSKEQQNSFENQQSYFSREINKSGYKLTKIYADEGLTGTKLYNKPQFNKMLYDAGLDVIETKSNGKKHIYSQVSERKPLFNEIWIKNTSRFARNTLSSEIIDQLRQKNVYINFIEQNINTKDLSQDFLLKLMQVFDEQDSKDKSSKVHWGHQEGARKGIIMTNSNIYGYTYIQAENRLEIVTHEAEVIQKIFKLYSEGLGIRRIINYLKENDIKTRKHKDFQKSTISKILDNEKYAGYSVRQKYDTGMVIIGKHYPKKRDKSEWIMEKNVKIPAIITSQLFDQCQSIRENKISVKNQKGIYKGTSEYAELIKCHNCGSNFTRNMDKENIFYNCGNKKKNGTIACNSINVKLDYLENAITLIAIEYYNYVYSSKKILIAYCEKVRKKIFEKLDQDNEEVISCKTRELDVLIEKLNKLNDMFFFQNSIDEQYYLSAKERFDIQIEDLKHEIRTLSINDDEHKNEIIEIENIINKIENIGAKKEYEIEEIKQEIISYEIRKAKDIHRMYQEVNIPEIGFKFKMNDQIKSLTDKYLKDINENEVVMTNVSEEAVIQIYSNGEISIYFRK

SEQ ID NO: 9362 - protein, 519 aa, synthetic construct
MKRITKIEANEKLQKAPKKLRVAAYARVSTDSREQLVSLDAQRSHYETCIKSNPDWEYVGLYYDEGISGTSMAKRDALLKMLDDCEAGKIDFIIIKSISRFARNTTECLEAVRKLIKLKVFIYFEKENINTGDMENELLLTIFSSLAESESISLSENEKWSIEKRFQNGTYIVASPPYGYKNEDGLMVINEDEVDVVRYIFAECLAGKGGHVIARDLNDKGIPTRRKREWTPGTVNAILRNEKYKGDVLFQKTFTDETFVRHINNGEKAQYYVTEHHEAIISVEDFEAAQAMIDQRSKDMKIKQGDAKYQNRYPFSGKIVCGECGATWKRRTHSESKIKYYAYACNTHLKKKDQCSMQFIREKSFEVAFLNMINKLAFTKKVLLQPLLTSLKAINQEAAIARINKLEAALEANFNKRQQLMNLFAKEYLEPAVFNDQNSGLLAEAKNLSDEKEALYASVNHEYEHVEALNKLIKYVNSSRIFSEFDVDAFEEHVDYIIVFKRYEIGFVLKCGLTLRERL

SEQ ID NO: 9363 - protein, 524 aa, synthetic construct
MISLASNVTVIPAKKTIGTQKATDKKQKTRVAAYCRVSTDSDEQETSYEAQIQHYTSYIESHPDWVLAGIYADDGISGMNTKKRDEFQHMINDCNDGKIDMVITKSISRFARNTVDCLNYTRALKNKNIGVYFEKENINTLDAKGEVLMTIMASLAQQESESLSANVRLGLQFRYQQGKVQVNHNWFLGYTKDADGHLIIDPEQAEVVKRIYREYLSGKSFLQIKRSLEADGILNGAGNEKWHESNIKQILTNEKYIGDALLQKTYTVDILEKKREANKGQVPKYYVEDSHEAIIPKDIFLKVQEEIARRANLTKGTTKRKRIYSGRYALSGIVFCAYCGDIFRRIKWNNRGCKSTVWRCVSRVEKDGPDCPARTVHEKLLQEVVIKAINEAFREKEAILPLLRENIESSLEEVTSNQIAAIDEQMKSMQQELMATVNSKNTGDELGLEIRRLRDEKQALQNEQASRQDLKKRIDDLMRFLNDLPCELIEYEEDYVRTLLEKITVYDDHIIVEFKSGIEIQIDE

SEQ ID NO: 9364 - protein, 530 aa, synthetic construct
MREVRVIPASRDFSTGQEHTRFAPQRRVAGYARVSTDSDDQYASYEAQVDYYTTMIKGKPEWTFVKIYTDEGISGTNTKRREGFNTMVQDALSGKIDLIVTKSVSRFARNTVDSLQTIRKLKEKKVEVYFEKENIWTFDSKGELLITIMSSLAQEESRSISENTKWGRRKRFADGQVTVGYSRFLGYDKGPDGNLVINPEQAKLVRYIFSLFLQGGSLHGICKRLEREGHKTGSGNSTWHISSIRIILTNVKYKGDALLQRYYVADFLTKKPVLNRGEVPQYYVEHNHEAIIQADIFDLVQKELEIRKKQRQTLIRTSPTSNIFSGRIRCGHCSGFFGRKIWHSNSKYRKAVWRCIRKYDDKQHICTAPHLYEDEIKSIFINAVNKLITNKEAIIQDFEAMGDVVFDTSQEEDKLEHVNRDRVEIVKLMEQLAAQNASRVMDQKAYQNQFEDLSARYAKINETATALEEAIQDKKCRKTKTRLFLKTLSKQDSVITDFSETLWNSLLDHITVYSKEDVRVTFRNGEEVSG

SEQ ID NO: 9365 - protein, 503 aa, synthetic construct
MAGYARVSTDSDDQYASYEAQVDYYTTMIKGKPEWTFVKIYTDEGISGTNTKRREGFNTMVQDALSGKIDLIVTKSVSRFARNTVDSLQTIRKLKEKKVEVYFEKENIWTFDSKGELLITIMSSLAQEESRSISENTKWGRRKRFADGQVTVGYSRFLGYDKGPDGNLVINPEQAKLVRYIFSLFLQGGSLHGICKRLEREGHKTGSGNSTWHISSIRIILTNVKYKGDALLQRYYVADFLTKKPVLNRGEVPQYYVEHNHEAIIQADIFDLVQKELEIRKKQRQTLIRTSPTSNIFSGRIRCGHCSGFFGRKIWHSNSKYRKAVWRCIRKYDDKQHICTAPHLYEDEIKSIFINAVNKLITNKEAIIQDFEAMGDVVFDTSQEEDKLEHVNRDRVEIVKLMEQLAAQNASRVMDQKAYQNQFEDLSARYAKINETATALEEAIQDKKCRKTKTRLFLKTLSKQDSVITDFSETLWNSLLDHITVYSKEDVRVTFRNGEEVSG

SEQ ID NO: 9366 - protein, 438 aa, synthetic construct
MERIITRVPIQHTQALRLTKVAGYARVSSDKDAMLHSLAAQVDYYQNLILENPEWIYAGMYADEALTGTKGNRPAYQKMLSDCREGKIDRIITKSISRFARNTLDLLDAVRELRAMDVDVYFEEQNIHTTDGDGELLLTILSSFAQEESLSASENQKWRIQKNYHEGKPATTIWIYGYRCRKEVYTIVPEEADVVRMIFTDYLSGLGKNAIMRKLTALNIPTRTGGRWTETSVMQMLRNEKYAGHLLLQKVFITDHITKQTKPNRGEMPKFLVKNHHEMIIDEATFEAVQREIAVRASQKSGKQAQSTSVFSGIIRCQRCGRYFHRKVANGGSKYAKQSWACPTYVNQGKQFCDAKRIPEDILIVQCCEILGLAVFDENAFRKTVAEILVPSDGQLLFKLHDGTERRTVWHHPSRSVSWTDEMKAEARAAAGKRNAHA

SEQ ID NO: 9367 - protein, 525 aa, synthetic construct
MPEVTMIPASIARISAKASTGVQCRRVAAYARVSTDSEEQLTSYEAQVDHYTKYIQSREDWIFVGVYTDEGISATNTRKRDGFNKMVSDAVAGKIDLIVTKSVSRFARNTVDSLTTVRKLKDKNVEVYFEKENIYTFDGKGELLITIMSSLAQEESRSISENVTWGVRKRMADGRVNLPYKHFLGYRKGEDGLPEVVKEEAAIVRRIFRQFMEGKTPSMIAKLLQADGILSPGGSQVWQVATVRSILTNEKYKGDALLQKRYTVDFLTKERKLNHGEVPQYYVQNSHAAIIEPEEFDAVQAEIARRKEISRPNTCGSVFSSKIVCGDCGGYYGPKVWNSNRPNRKIIWRCNDKYKHEPHCQTPHVTEEEIRVQFVEAFNRLLGMKEQVIADCRIARETLRDCSSLEREIADLRKEQERVAELARIAIMEHASVAESGVDALQEGYLPKHDALAQRIVQLEAVCRRRVEKCDLIAKFIRTLAKQETIIDTFDGKLFVAVVDTVTVNRDGGAMFYVINGTCLPESPM

SEQ ID NO: 9368 - protein, 531 aa, synthetic construct
MANIRVIPATEQIVSAQAANATSNRRVAAYARVSTDSEEQMTSYEAQVDYYTKFIKSRSDWEFVTVYTDEGISAVNTKKREGFKQMVADGLEGKFDLLVTKSVSRFARNTVDSLTTVRKLKEKGVEVWFEKENIYTLDSKGELLITIMSSLAQEESRSISENVTWGQRKRMADGKISLPYKQFLGYRKGEDGLPEIMPEEAEIIRLIFRLFMEGKTYSAIAKHLVKNGIPTPAGKENWQACVVQSILSNEKYKGDALLQKTYCANFLTKKMVKNTGQVQQYYVEDSHPAIVDPDEWDAVQAEMERRKKRGSIGRCGSSFAGKIVCGECGGFYGKKVWGSYKSDKTYRKEIYQCNEKYKHKEKGGRPCGTPFITEDEVKERFLTAFNKLMENRDGLVSDCRMAQSTLCDTTAIDSELNELHREIEVIAELSRKAIYENARTAQNQSDFNERNNGYLDRHRQATERVDELEAMKRNRIAKSKTLDAFIRDIEKRPLALAEWDEALWLAVIDQVMVSTDSTMTFQFRNGSEITA

SEQ ID NO: 9369 - protein, 483 aa, synthetic construct
MKTYGYARVSSREQSQNSNALEQQIERLKAAGASEILIDVESAWKGKQRPNLDKLMAMVRSHHIDEVVVTRLDRLSRQGLKSFQIRALDEPFDLTTAAGRAMAGQLVVFAQFHSDQKAESIIHGWEHLRERKIAVNPPFGYCKVNDHHELDHTLFLCLIDGQQEFSKADIARDIVNAFLERKTLRLALREINTRYGIQTFAHNNKAGEKKKGGRVAQGVFKFSPAGLRNWLLNPVLRGHLPYLRRDSDRLQIHYDTHPDHKLISDAEFREIESILAHNQQVRGYGSTALKYPCSGLVFCAECRASCYSLSGANNYHKAKKLGIPPDLNYYFQCKNWALRSCNNKKVIRMEVVEAAVINALIQKAAQITAVAQTVTKPTIEPESPEMQKLQSQLFQLQQVNAIAPNDAIKTAMAQIESQITQLRYSLSKSQEINTASHELLLWAFSDPELWMNASNDDKKRVYRELVEAVVVQDAQVVEVRLKI

SEQ ID NO: 9370 - protein, 576 aa, synthetic construct
MKTIKKIDVKSIALPARKRVAAYARVSMESDRLTHSQSTQISYYNDLIQNNPEWEFAGVYADNFISGTSVERRAEFKRMIQDCEDGKIDIILTKSISRFARNTVDLLNTVRRLKELGIEVQFEKERIRSLSGDGELMLTLLASFAQEESRSISENIKWGARKRFQKGIPNSRFRVFGYQWEGEHLVVIPDEAVIVKRIYQNFLDGKSRFETEREFAAEGITTRRGFRWSDHSIKTVLTNITYTGNLLLQKEFTADPITKKHIKNTGQLPQYFVENTHEPIIDMKTFRLVQEEMARRRELGPFANKSINTTCFTRKLRCGKCGSPFIRCTRSSRVKYHSTLQPSNGRYHVWSCGRHRKNTSLCESNEIPEIILKMCCSEVLGLDEFDEQIFTKRIDVPYKGLLLFNFIEGGVISKEWHSTARKDCWTDELKAQQKKWLNDYRAKGIGSHSAFTTRIICGCCGDTVKRQAEHKSEKQLVFWRCRNSCGIRGIREEELKEISAGILGLEEFDSEAFMNRIDHITMVRSGFMEFTFKDGHNELAEYRTKNRQPKWTDERRKAMSERLKQLKEAKRNDSNS

SEQ ID NO: 9371 - protein, 529 aa, synthetic construct
MTVTVKKVQTIPATLTRFTSAPIASKQKRKVAGYARVSTDHDDQFSSYTAQVDYYTNYIKGRDDWEFVDVYTDEGITGTSTKRREGFKRMIADALDGKIDLIVTKSVSRFARNTVDSLTTIRQLKENGTEVYFEKENIWTFDAKGEVLLTIMSSLAQEESRSISENCTWGQRKRFADGKVTVPFKHFLGYDRGEDGNLVLNKKQAEVVKQIYAMFLKGMTPYTIALKLTEEKIKTPAGCDIWSKTTVRNILTNEKYKGDALLQKTFCEDFLTKKMKLNQGEVPQYYVENNHEAIIDPQTFDMVQAELARRTSGNNRHSGVHLLSHKIKCGDCGGWYGSKVWHSNDKFRRIIWQCNNKYKNKDKRCTTPVFDENQIKERFTIAVNKLLTGSAKAISVCEEALAANLDPAELEQKQQVLLTEMQTLDSALRQLFQQNATTVQDQSEYRKSYDEITQKFSKAEEQKKRVDQKLSNLLEHRGIIENFIKKLKEQNGQISEFSENLWCGLLDYVTAYADGRLVFRFKNGSEFEG

SEQ ID NO: 9372 - protein, 578 aa, synthetic construct
MKTIKKIDVKRIVPPTRKRVAAYARVSMESDRLAHSLSAQISYYNDLIQNNPEWEFAGVYADSFVSGTSVERRAEFQRMIRDCEDGKIDIILTKSISRFARNTVDLLKTVRRLKELGIEIQFEKESIRSLSGDGELMLTLLASFAQEESRSISENVKWGTRKRFEKGIPNCHFKVFGYRWEGEHLVIIPEEAEIVKRIYQNFLDGKSRLETEKEFAAEGITTRRGYHWSDHSIKTVLTNITYTGNLLLQKEFVEDPITKKHVKNTGQLPQYFVENTHEAIIDMKTFRYVQDEMKRRQKLGPLANKSLNITCFTRKIRCSKCGCFFTRCTRSIKIKYFSTLQHTNGHYYVWDCGRHRMNTSLCETSEIPEILLKKCCTEVLGLDEFDEQIFSKRIERIDVPYKGLLIFNFTEGEVLSKEWHSTARTDCWTDELKSKVRESRRNYLLRGIGPYSPFTSRIKCGCCGEYVKRQSEHKSENHKVFWRCRNRCGIKGILEDELKSISAEVLGIKEFDGELFMSRIDHITTIKSGLIEFFFKDGHIELCKYTTKTRQPKWTEERRKAMSERLKQIKEAKKNGSK

SEQ ID NO: 9373 - protein, 528 aa, synthetic construct
MAANRKVQTIPATLGRFTSAPITSTHKRKVAGYARVSTDHDDQFSSYTAQVDYYTNYIKSRNDWEFVNVYTDEGITGTSTKRREGFKRMITDALDGKIDLIVTKSVSRFARNTVDSLTTIRQLKENGTEVYFEKENIWTFDAKGEVLLTIMSSLAQEESRSISENCTWGQRKRFADGKVTVPFKHFLGYDRGEDGNLVLNKAQAEVVKRIYAMFLRGMTPHTIARKLTEGKIKTPAGRDTWSCTSVRNILSNEKYKGDALLQKTFCEDFLTKKMKINQGEVPQYYVENNHEAIIDPQTFDMVQAELARRTEGNNRHSGVHLLSHKIKCGDCGGWYGSKVWHSNDKFRRIIWQCNNKYKNKDKHCTTPYLDENQIKERFTIAVNKLLAGSASAIRSCEAALSATLDTSKLEQKQQNLLAEMQTLDSALRQLIHQNATTAQDQNEYRKSYDAIAQKFSSAEEQKKLVDKKLSDLLKHSNIIENFIRKLKEQNGQISEFNENLWCGLLDYVTAYADGRLVFRFKNGSEIEG

SEQ ID NO: 9374 - protein, 597 aa, synthetic construct
MSANQKPRAYSYIRFSNATQAAGDSYRRQREAAEAYCTQHGLELVDAKEYSFFDQGRSAYKARHLDDTGELARFLAFVQDGTIPKGSTLLVESLDRLSRERVKDALPRFLDLLNQGINVVTLADGRLYTSAYNELDLIISIVQMSRAHEESATKGKRVSAAWRRKQDSARTESLPIGKLRPLWLDYTPDGYIPNPERVEVVQRIYKLAQDGYGHRAIAAQLNQSGVPSFSADRKNASGLWGNSGIARMLSNRAVLGEYQPHQFIDGKRVPVGAPITGFYPPIITEDEFYAAQQAVSSRRQSQATKPGKRFNVWQGVSQCGICEGPMHISKRGNSRILRCFRNIQGLCPAKPILLPRSEEVFREILAKVDSLALVQSNQGKLQRQIAVCDGRIAEAQERIESLQSQILNLSGALPVSIISVMQRLEEDLSRHQQERDSLKEDIAREQIINKDEFFSRLDLVSYEGRARANSLLKSLNVEVAIERIGELRGKKAPVHYRVSKEGLPIFSFLDTSGELEFLPLTTPSIAIAEVQGEVIRPEFHQYVLTRERQFAWEASERTRLEELCKTSSFKDVASAEGISVRELKRILAGERSNRSAP

SEQ ID NO: 9375 - protein, 544 aa, synthetic construct
MINNLGKAAIYARVSSERQAEKDLSIPAQIKALRKYALERGWDIVFEYVDEAESARTANRPAFKEMIEMAKRKEKPFDTILVWKLSRFARNREDSILYKSLLRKRGISVISINEQVDESPAGHLLEGIIEVIDEFYSVNLSQDTVRGMKENASRGFYNGGFSPFGYKRTKIKVGMVDKTKLIPDENEVNIVKKIFEMAMGGQGGKEITKALNAAGTRTRLGKQFSTTAINQILRNEVYTGALVWRFKNNGYGNSHNTGPSDIIRVPNCHEAVVSTEDFERVQQLLTKRRPISQHPRTISSQYLLSGLIHCGKCGAAMSGCWAKSGKYYYYGCVQHQKKGKGVCSCRLIGKDKLENFVLNRIRDNILTDENIKQLVQLVNEELIKNSGYFEEQISEIGQQLGQVQGRLSKLYSALETGKIDLEDLAPRIKELRSQQKELEEKRNGLLDAMNEESPQALNLTTVQEYVSSMKTLLVNSSFIEQKSFLRSFIKKIELNEPQVVIDYTMPLPINGLTTTEEVLRIDKLGSRGRIRTYDQAVNSRPLYH

SEQ ID NO: 9376 - protein, 519 aa, synthetic construct
MTAKNRAVAYVRVSTKRESQKDSPEHQKAAIEAYASELGLDIINTYEDRDTATSIVARPEVQKMVADAQKGLFDTILFSSLSRFSRDALDSISLKRMLVNALGIRLISIEDLYDSAKDDNEMLFGIVSIVNQKQSEQIGIASRRGIRQSALKGNFTGSRAPYGYKKVIVNGRKTLEVVPEQAKVVQMIFDLYVNQKMGEKEIVKYLNEKGIPSAKGGTWGVTSVQYILQNEVYTGRNVFCKYTVVKVYDDISDMHNRRRKLVRRETSEWERTEFRTHEPIIDDEMFDKAQKIRLIRGGGMRGGRKKFSNVFAKMIFCKHCGSAMVSMSGKGSEKYRYLVCSRRRRHGDAGCHNNKWVPYYPFRDDLIGMLVDRLSKAIDSESLADEAAKSATIDERDFEKEISHIQRKIQDNRRLLFEIRRQNMLGEIDNEQYAFEREQYEHEIEKLEKKLDELEKKKADADDKERLKAEIKEAIDELTSIESYDDTEKTRIILSKMIERITVDVDGNIDVYTPLGKIL

SEQ ID NO: 9377 - protein, 510 aa, synthetic construct
MFSSNNEMHQIAALYIRVSTEEQATEGMSVSGQIETLTQYCNLFGIQIYKIYKDLGISGKDTTNRPGLNELVEESKKGLFNSVLVWKISRLSRSLKDLLILVDNFDKDGVSFISYSEKFDTSTPVGKMTLQILGSIAEFERNTIIENVKMGLKERIRQGNKSGGHIYGYDWKDKKLIINEHEAAAVKKAFELYGNEDYGLNTIAIYLNQNGYKTKRDVRFTHFAVGTILENPTYIGMVRHNTRTVDEYVLPGNHEPLISKEIFDKVQTRRKSRSTLSERNHEKGTFLISGIARCPLCNAILEASYAVSRKVISTGDVEYRYRYYKCSRATKKDDCTFKGVRADYLEKELIDKIIGLANNKASVKKSIEQSYKESMKDIKPLQDELNRSNIQANKLQKAKNDYFEMFEAGEVDDKQIFAERIKKLSNEISILNARKSDLEAGIQMYSNEPVALDSVINIFDKFQKLMQLASPEDQKKLIRTLVKEVILNEDRSIDYVTLILGADSSKQYKF

SEQ ID NO: 9378 - protein, 535 aa, synthetic construct
MAVRNVSVIPAKAMQELKGLEVTAKPRVCAYCRVSTDNEEQLSSYEAQVTHYTGYIKNNPDWEFAGIYADQGISGTNTKKRLEFNRMIEDSMANKIDMIITKSISRFARNTLDCLQYIRQLKEKNIAVYFEKENVNTLDSKGEFMISLLGSLAQEESNSLSQATRMGIVFRFQSGKVKVNHNKFLGFTKDENSELIIVPEEAEVVRRIYREFLEGKSTLKIARGLQVDGILTGAGKTKWWDTTVYQILKNEKYMGDALLQKSYTVDFLTKKRVKNKGIVQQYYVEDSHPPIVPKAEYAAVQAEFVRRSSMRGYSKTGKSNFTSEYPFSGKLFCQNCGSKLRHTFFGTGKNKRGYWLCINHQMNGDKACNMRSLNERHLEQAFVRAMNKVIGGKDAFIATLMQNIYRGLETIEEEFTVEQIDVRLQDLQREIMSLVRLNAKTGLDMRVYDKEYSTLGAEIERMRERRQKLKDKQAEQVLRVNRIQEIEEYLLAQESPLEKFDEDLFRRVVERVKVQSMVEAVFVFKTGVEVREILG

SEQ ID NO: 9379 - protein, 525 aa, synthetic construct
MTTNQPTKAVIYCRVSSTKQKTEGDGLASQETRCREYAAYRGYDVVEVFRDDVSGSLKERPGMRGMLGFLKKHKKVPHVVIIDDISRLARGVEAHIELRAAIAVAGGILESPSVEFGEDADSELREYLLATVAQHQRRKNAEQTKNRMRARAMNGYWVAKAPIGYRMERKPGHGKFLVRDEPFASIIANALQGYASGRFETIVEVKRFLEAQPAWPKDKHGEVHQERVNELFARPVYAAHMTHEQWGLHLIPAKHEPLVSLETWLAVQNRHSGMAKAPVRKDFREDFPLRGFVTCGHCGEPLTACWSKGRSATYPYYLCDTRGCAMARKSIRREVIEGDFEKLLGNLQPSEGLFNLAFQMFRDLWDAKVANVRSQSDHLSKEMLVIGRKVDQLLDRIVDASSDSVVRAYEKKIKELEAEKAVLADKIANSGKPVRSFGETYRTAFDFLANPLKLWHSPRIEDRRAVLKLVFTEKLPYVRGEGYRTAKISTPFKMLGGVNMPEKVMVPRAGIEPATRGFSIRCSTN

SEQ ID NO: 9380 - protein, 532 aa, synthetic construct
MAEKEITSVNYARVSDRKQSEQDVSIPTQIEVGERRAAELGARVLRVFTDDAKSAWREKNRPAFDAAIDMACAMEATYFICWDSARFARNKYEAMVNKRLLDDAGVQLVYISSPIDRATDMGWAMDGVMEIFNELQSRRISADTRRSMMRNARLGYWVGGRAPFGYISLPAPDNPKRRKLVPVPAEVDLVREIFAMRAHGQGAFQIAAWLNSRGILRRGAKWSKQTVINELRNEVMIGNIVFGRRGRNSRGVRDRNNWIVVPSHEAIIERPLWDQVQALMDEAADITKADGSPKSTHAFTGILRCGKCGSSMQIETSRGRGGKLYFYYRCRRSMQNRECDPRRIRADLVDDWLSNVILKRVLSRRNVASIVELMEAEAGNWAAEHRKRRAAVLATIGRLQEANDKLYSVLELYGKDAPNLGDMTTRLRQNNAKQKDAEAALAAIDAERPPASSMTSVEIDELTGFLHNLVKDDQNAARTRSFYNSFVDSITLDGEELLVSYNPNRLLAPPKEVVRSKRKWRPKLDSNQRPPD

SEQ ID NO: 9381 - protein, 539 aa, synthetic construct
MRNINFKYFLYARKSSESEDRQMASIEDQIREVEKLAEKYNIKIVDVIEESKSAKEPGRPLFNDMLKRIHKGEAEGILTWKLNRLARNPIDGGQISWMLQQNIIKHIQTFEREYYPTDNVLLMQVEFGMANQYVKDLSIDIRRGLRQKAERGWYPLPVLPIGYMHKAKFTLGVDDEIIPNPEQFQILKKLWQLFLTGGYSVAGIKRKGDVMGFRTKSNQLCPKATYHYIFRNEFYCGYFNWKDKDDNIIRCKGKHKTIVSPSEFQKTQILLHERANHISIDKKYNFPYRGLITCGECGYGITPDHKLQAICTNCKCKFSIKNMTACPRCKTELSNMEKPSIIDILYYHCTKYKGKCSQGSITKKEIDSAIENELKKITITKDFHLWAMEALMADGQNIKEDENAVIRLKKRKTELENRLSGLINIRADGEINSEQFNQSISKIHKEIASIEFEIEEIKSQKIKWNSETEDSYNFALNVLERFKKGNDSVKNDIVKGLVSNLKLREKKLDFTIQKPLLKVKEAFSLYRSKRVVSNLKTPL

SEQ ID NO: 9382 - protein, 537 aa, synthetic construct
MKTTESVFSTRFGKKNTSVVKKVTTGNVVVYTRVSSKEQADTNLSLETQKKAIEEYAHRNNLNIIAYFGGTYESAKTDGRKEFKRMLEYVRKSNGKISQVLVYTLDRFSRTGGAAIKLTTDLREKYGIDVFAVTQPTDTSNPSGVLHQNIQLLFSEYDNQLRRQKVIAGMREKLKRGVWVQKPPLGYDIIRINNEKKIVLNEEGKKLKLAFNWKINGLMNEEIVVKLNAMGVPMYKQKIHKIFTNPFYCGLLSNSLLDGQVVEGVHEVAVSKEDFLKINNIISGSPQYGIAHNPENKNIPLKVFTKCSKCGEPLTGFLVKAKNIYYYKCRRKGCSCSKNANELNKQFVTLLQKFQVKESLKTIIISQLENTFIDLIKSNTEKLKAIKTHLTEITKKIDLVEEKFYVLGEMNKETFEKFHTKYKSEQNQILKELNSSQNPSSNHKNILDKAFYLCGNMHEMWASGNMRLRERIQRLVFPEGIWYDKEFDTVQTKKVNSIFSAIACCVGDSDCKQKGTNPFLSGQSHLVISEGFKPPTF

SEQ ID NO: 9383 - protein, 436 aa, synthetic construct
MAKEDKNRKTQYCLYARKSSESDERQAMSIDSQIKEMHALASREGLFIKEVREESHSAKASGGRPVFNQILVDIEQGEFSGLLTWAPDRLSRNAGDLGKLVDLMDQEKLHKIKTYSQSFGNNPNEKFLLMILCSQAKLENDNRGINVKRGLRAKCEVGWRPGGAPLGYLNVMSNGNRIEQILIDKERASIIKQLFIRVAEKGHSGRVLKKWLDTIGFTTKTGHKLALSKVYATLKNPFYYGEFEYGNVWYKGAHEPLISKELFDKVQAHLVVAPKKWHEKIFPFKVLCICGSCGGGVTAEERYKKLKYGGSTKHVYYHCARSVDYECDEPYITEKDLIQQLAAHIGTIKINEKLLTKRLKEEIERFHTLRSKVLHKEYLDGNLNEFDYPERDPVPHDTAQAYLLHVLQAGTAEERQQILSVIQTKFTLRNRVLRIK

SEQ ID NO: 9384 - protein, 508 aa, synthetic construct
MKKAIAYMRFSSPGQMSGDSLNRQRRLITEWLKVNSDYYLDTVTYEDLGLSAFNGKHAQSGAFSEFLDAIEHGYILPGTTLLVESLDRLSREKVGEAIERLKLILNHGIDVITLCDNTVYNIDSLNEPYSLIKAILIAQRANEESEIKSSRVKLSWKKKRQDALEAGTIMTASCPRWLSLDDKRTAFVPDPDRVKTIELIFKLRMERRSLNAIAKYLNDHAVKNFSGKESAWGPSVIEKLLANKALIGICVPSYRARGKGISEIAGYYPRVISDDLFYAVQEIRLAPFGISNSSKNPMLINLLRTVMKCEACGNTMIVHAVSGSLHGYYVCPMRRLHRCDRPSIKRDLVDYNIINELLFNCSKIQPVENKKDANETLELKIIELQMKINNLIAALSVAPEVTAIAEKIRVLDKELRRASVSLKTLKSKAVSSLGDFHAIDLTSKNGRELCRTLAYKTFEKIIINTDNKTCDIYFMNGIVFKHYPLMKTISAQQAISTLKYMVDGEVYF

SEQ ID NO: 9385 - protein, 508 aa, synthetic construct
MKKAIAYMRFSSPGQMSGDSLNRQRRLITEWLKVNSDYYLDTVTYEDLGLSAFNGKHAQSGAFSEFLDAIEHGYILPGTTLLVESLDRLSREKVGEAIERLKLILNHGIDVITLCDNTVYNIDSLNEPYSLIKAILIAQRANEESEIKSSRVKLSWKKKRQDGLESGTIMTASCPRWLSLDDKRTAFVPDPDRVKTIELIFKLRMERRSLNAIAKYLNDHAVKNFSGKESAWGPSVIEKLLANKALIGICVPSYRARGKGISEIAGYYPRVISDDLFYAVQEIRLAPFGISNSSKNPMLINLLRTVMKCEACGNTMIVHAVSGSLHGYYVCPMRRLHRCDRPSIKRDLVDYNIINELLFNCSKIQPVENKKDANETLELKIIELQMKINNLIAALSVAPEVTAIAEKIRVLDKELRRASVSLKTLKSKAVSSLGDFHAIDLTSKNGRELCRTLAYKTFEKIIINTDNKTCDIYFMNGIVFKHYPLMKTISAQQAISTLKYMVDGEVYF

SEQ ID NO: 9386 - protein, 580 aa, synthetic construct
MTPIESMARRGRTPKVVLYARFSSDNQRDESIDAQLRAMHEYCSKLGAIIVTEYIDRAKSATTDDRPEFLHMIDDAKNEEFDFVIVHKLDRFSRNRYDSAHYRHELKKHGISLVSVIEQLDDSPEGIIMESVLEGMGEYYSKNLSREVMKGMKESALQGLATGGVAPFGLAIDTQTRKYIINEDEAPAVRFIFEQVSNGVGYTRIIQQLNEMGYRTRKGKLFGKNSIHEILRNEKYKGVFVFNRSQGKDCTGKRNNHYRKDEEEIIRIPGAIEPIVDENTFDAVTRIIASRRRATPINAKEVYLLAGKVYCGECGSAMTGNRKHAGRNKTLYVTYRCGGSHLKGRIDCKNKEISRDKLENFVMKELARVIFNDETLNNIIAEYQEFCARNNENGIQKIEVIQKKLQAVQGKIDNLIQLMAETGSKNVVLTLGKLEKEQEQLETELAKAEAELNYPTIDENKIRAAYKTAREQFLFGELPEKQLLINHYLNKVVVYKEHIEVFLNKLPTYLLTLDDGMFTARWGSPKNEESPTTEPQKGSVVSENGGGDGSLSEPLASPLKAAFSAAFSIKSIDTSLCVPL

SEQ ID NO: 9387 - protein, 565 aa, synthetic construct
MPEEADSSSDSKAKRIAIYCRKSNDENLTNNVTSIDSQKMCCRSYIDIQKAKHWEEYPEVFDDPAESGKSLKRPAMQRLLKCVQEKKIDGVIVYKLDRLTRNSRDFHYLLELFERQNVAFVSATESIDTKSPQGRLMTAIMVQFAQYDRELDQERSRDFHLSRARKGLWTGGLAPLGYDLKDKMLVINPEEAELVNRVFNLYVEYRSTIRVAQELNQLGFRRKVYKKIEGNKKAYGGKAFDMDSVLRILQRKVYIGTVRNTRTEQEFQGKHEPIVDMALFEQVQKLIVEHNHRGGEVHYNANKHGFLFKGLVGCGECGSAIVPTYRKKKGKTYLYYKCLAQSKGLPNKCAITPLGARKFESFVVENIAAIGWDRPFLEKITLLAQKKAKENVGPLEKEHQILEGRLKNIKRELRRLVDLVKVGSASGEVAEEIQRLEETKKGLIGRMSAIEVLTAHNKKVVYDVDAIQGTLQRFAMFINRLPVELQVKMIRVLVEKIIVFKDKIVIKVPETPVGEIQKLLDTKLLFGGCLLRERWGANNNHKQNDHRIGVVELDKEWRPQRDSNP

SEQ ID NO: 9388 - protein, 547 aa, synthetic construct
MKTKNLQLKDFFGTSVWSYTRVSTKEQFMNNGSIETQVKRIKNFAKENGLNITDEFDAEYESSKKINTQSTLKELINKLKKTHYSKRPKIILIWSPSRFGRAGAEHIQLFVSLRKEFNVYLYSVSTGHNTFNERAENEFSTQLLYAQKENFNRQDTIIPGLINALNNGKLFGRTPKGYDHYGPRVTNPDKVQAKQEIKINNEGLIFREAFKKKIYESYTDKQIIVWLASKGIRMAYQSLSNMWRNEFYAGRVCNSLLDDTYVKGNWEQLISKTEFNKLQKIINGTTKIGIEKLNGKTETPLVPKYLICGDCNITMTSYKNKKKNLFYYKCNSCNKTANAETKPSSNSEGVNTAFLNLVDNFKLNDNLKELFIEQVKVILEDEKDNSKDKKRILTSEINDLKEKMDLMEYRFAVNEISRDIFERQNQKLKESMNQKMIEIENLPRKKSNQEKAIKYFTKIAVNPSQFYENLEYNQKRVLQKLLFPEGLQYSLKNKEYLTSKAGALFELTDCFSITYDDKIKKTHQENPDKSHLVPGVGIEPTHLSTRV

SEQ ID NO: 9389 - protein, 539 aa, synthetic construct
MHVALYARVSTTRQAEKDLSIPDQLNQMREWCKANGHLIVQEYIEAGASATDDKRPEFQQMLSDALASPPPYQAIIVHSRSRFFRDLLEFLMYEKKLKRAECRVISITQQTSDDPAGEMASKMFSLFDEYSSKENGKHTLRAMKENARRGFFNGSRPCFGYRAVECFMEGDNTRKKKRAEIDPSESSTVRHIFDYYLNGHQGKVMGAKDIALHLNATGISLRGNVWNKSRVHEVLSNRAYIGEYYFNKRDHKTKTLKDESEWILLNVEPIIDSAIFESTRAKCESRSPAKISPRLVTSLILLTGLLKCGCCGAGLTTATGKGGLYRYYKCNTRINQGAKQCSTPAIPMDKLDGIVMDAMLEKILVPDRLKLMLTELRKLQKTKANDQEELQKPLNRELAEIQAGTTRLYEAVEKGLLPQDEFLQQRAQKLKARREEIMLELAGLKRRQAMPLDMLNPKQVDQFAKVMRSIMTERRNTTGKAYLRLLINEIRIEENQATITGKNSALAFAMLENTKVDTVVPTFVPNWLPDLDSNQGPAD

SEQ ID NO: 9390 - protein, 491 aa, synthetic construct
MKYLIYARVSPKGSSWDGNETSVKMQIQMCRDYIKARGGTVLRELSDEFFSAKDKNRPGLQELLAELKSGTAEWDTLIVYRLDRLTRSLRDGGEIFEMLRENAKGFVSITENIDFSSPVGRAMMSIINVFAQFEREQTAERVKHKMVSIAEKGEFPVSVPPFAYMRGEKHDNVLKVDPRKAEIVKDIFNMYASNIQTMDIAKKYHGTISKQGILNMLRNKAYAGKIVYAGKEYQGKHDRIIQEELFDKVQAKLPQTTNGGRSRPKSQKYPYILSGLVHCHCGRYMTPASMKSGSFHYYRCTDIVNCKTYVSAPAIENAVLGKINQLDTQPEMIMEITDEIKRQKTEFLKENKPNIANLNNAIINVNLEINKIENAFLSGLVNSQNKDFWNEKLSKLLEEKKELSLRKENLQKVVSNLETELFNDADFLTQQLKTFNDALKNNPNDPDTRRTAILANIKEITRTGDERFYLKLNYSTPNGKDWLPRLDSNQD

SEQ ID NO: 9391 - protein, 559 aa, synthetic construct
MKTKLYSYIRFSSMRQNDGSSYERQIRMAREVAAKYDLELVNDYQDLGVSAFKGANSKTGALSRFLDAIGRSVPVGSWLFIENLDRLSRADIVSAQELFLSIIRRGITIVTGMDNKIYSLDTVTANPMDLMFSILLFIRGNEESQTKRNRTNSSALIKIKAHQENPQNPAVAIEEVGKNMWWTDTTSGYVLPHPVYFPVVQEIVELRKNGRSTAEILDHLNETYAPPPAVSNKKHSKWSRAMVERLFHTRALIGIKEVSVDGVNYELKDYYPRVIDDATFYHLKKNIGARAWNFGEKEEVKPIPLLSGIGLLKCDHCGCAMVKVKGTNKRSDQYRYTCDATRSRRLDCEHPNWSFRGDQLEKAVLQLLADKIWIAEDKANPVPALKVQVDEISRKIDNLIALSAMTGATKELADQITTLNSERETLYNQIKMAEEEMYSVDSQGWEKLAEFDLEDVYNEERLKVRFKIKQALKRIGCSRIDRNKNLFVLEYIDGKTQRVVIENSRGTRKGRIFIDLKTINDRQILESNGLVLHPCLDMLTDKNWKPEEEIPGPLQEFGI

SEQ ID NO: 9392 - protein, 430 aa, synthetic construct
MESQRVELKLKYVLYARKSTESEERQILSIDSQVKEMLQIAERENLEIVDIRREFHSAKDSGQRPVFNEILADIKNQRYNAILTWAPDRLSRNAGDLGSLVDLMDQKLLQEIKTYGQRFTNSPSEKFLLMILCSQAKLENDNKSVNVKRGLRMRCEMGLWPAPAPTGYLNEKRIDRKGYVVVDPERGPVIKQMFEKVAYDGWSGRKIYHWLKFDMNFRSATSNKPLTLSNIYRLLQTPFFYGTFEYPLGSGNWYKGLHTPLITREVFEKAREQLKRSEIKYVDKQFAFSRIMTCGRCGSGVTAEDKYKKLASGDVAHYVYYGCNRSRNLQCKEGYIREEEVIKQLIAVIGELEMNEGIIKKKFDEEYMRMAKFQKAFLNVHDNGSLGRDFDAKRYASHVLNTGTTEEKRELLSCLKSKLVLKQKILTLQN

SEQ ID NO: 9393 - protein, 508 aa, synthetic construct
MKKAIAYMRFSSPGQMSGDSLNRQRRLITEWLKVNSDYYLDTVTYEDLGLSAFNGKHAQSGAFSEFLDAIEHGYILPGTTLLVESLDRLSREKVGEAIERLKLILNHGIDVITLCDNTVYNIDSLNEPYSLIKAILIAQRANEESEIKSSRVKLSWKKKRQDALESGTIMTASCPRWLSLDDKRTAFVPDPDRVKTIELIFKLRMERRSLNAIAKYLNDHAVKNFSGKESAWGPSVIEKLLANKALIGICVPSYRARGKGISEIAGYYPRVISDDLFYAVQEIRLAPFGISNSSKNPMLINLLRTVMKCEACGNTMIVHAVSGSLHGYYVCPMRRLHRCDRPSIKRDLVDYNIINELLFNCSKIQPVENKKDANETLELKIIELQIKINNLIAALSVAPEVTAIAEKIRVLDKELRRASVSLKTLKSKAVSSLGDFHAIDLTSKNGRELCRTLAYKTFEKIIINTDNKTCDIYFMNGIVFKHYPLMKTISAQQAISTLKYMVDGEVYF

SEQ ID NO: 9394 - protein, 429 aa, synthetic construct
MSKFFLYARKSTDEPDRQILSIEAQITELREFGEREHLEIVQEFVESQTAKEPGRPVFNQMLSLIEKEFAQGILAWHPDRLARNSVDGGRIIYLIDTTKIRELKFPTFWFDATPQGKFMLNIAFGQSKYYIDNLSENVKRGLRQKVRRGEYPGVAPTGYLNDKVNHKMVKDPERYRLVQKLFELYATKNYSLKDLRNEITEIGLVSRNGKRLTVSNIQMILRNPFYYGAFKFNGELYEGKHEPAIAKKLFDKVQEVMSEKSRPKKRGEKTYIFRGLLKCGECGCAITAETQKGHSYYRCTKKKNVCSQPYIREENLASQISDILQKVYLPEDWADNMLAQLETDEASTAQSDALFAQNLKNEVKACEGKLDMLLDAHLEKTITSEEYIAKKNKILARKIDIEQKLKDFERKGRSLARTDEKSHFSRSPS

SEQ ID NO: 9395 - protein, 424 aa, synthetic construct
MVVPITVKYCLYARKSTEAEDQQALSIESQIKEMLALAERDGLMVAEIKKEAHSSKEVGQRPIFNQMLAEIREKKFNGILTWAPDRLARNAGDLGSVVDLIDQKLIVEIRTYSQKFTNNPNEKFLLMILGSQAKLENDNKVVNVMRGLKARCEMGWRPSQPPTGYLSEHRTDKKCQVKVDPHRGHTVKQMFEKVGNEQWSGRKVFRWLVDSGFKTKTGKTLTLGNIYILLRNTFYYGEFEYPVGSGNWYQGKHTPIITKELFDKVQVVLNEKFIPKTESKEFAFTQLIKCGYCGSGITADEKFKKLKDGGVNRHVYYFCSTARNIDCKNPAITEPGLINEFIELIDRIDLDELGIRASIELEIARFNKFRIGVLGHKKESHNADIDIRNYAKYLLRDGTITEKRELLSFMKSKLIIKDKKIELS

SEQ ID NO: 9396 - protein, 508 aa, synthetic construct
MKKAIAYMRFSSPGQMSGDSLNRQRRLIAEWLKVNSDYYLDTITYEDLGLSAFKGKHAQSGAFSEFLDAIEHGYILPGTTLLVESLDRLSREKVGEAIERLKLILNHGIDVITLCDNTVYNIDSLNEPYSLIKAILIAQRANEESEIKSSRVKLSWKKKRQDALESGTIMTASCPRWLSLDDKRTAFVPDPDRVKTIELIFKLRMERRSLNAIAKYLNDHAVKNFSGKESVWGPSVIEKLLANKALIGICVPSYRARGKGISEIAGYYPRVISDDLFYAVQEIRLAPFGISNSSKNPMLINLLRTVMKCEACGNTMIVHAVSGSLHGYYVCPMRRLHRCDRPSIKRDLVDYNIINELLFNCSKIQPVENKKDANETLELKIIELQMKINNLIVALSVAPEVTAIAEKIRLLDKELRRASVSLKTLKSKGVNSFSDFYAIDLTSKNGRELCRTLAYKTFEKIIINTDNKTCDIYFMNGIVFKHYPLMKVISAQQAISALKYMVDGEIYF

SEQ ID NO: 9397 - protein, 559 aa, synthetic construct
MKTKLYSYIRFSSMKQADGSSYERQKRTAAEIAAKYDLELVTSYQDFGVSAFKGANSRTGALSRFLDEIGRSVPVGSWLVVENLDRISRQSIIEAQELFLSIIRRGITIVTGMDGKVYSKESVNANPIDLLLSVMLFARANEESQTKRNRTNSSALIKIKAHQENPQNPAVAIEEIGKNMWWTDTTSGYVLPHPVFFPIVQEVVELRRNGRSTAEILDHLNATYTPPPAASHKRHSNWSRAMIERLFHTRALIGIKEISVDGVKYELKDYYPRVLDDAEFYHLKKSIGVRACNYGDKEEVKPIPLLSGVGLLKCEHCGSAMVKVKGTNKRPNQYRYSCDAMRSSRIACVHTNWSFRGDQLEKAVLQLLADKIWIAEDKANPVPALKVQIDEISRKIDNLITLSAMTGATKELADQITTLNSERETLYNQIKMAEEEMYSVDSQGWEKLAEFDIEDVYNEDRIKVRFKIKQALKRIGCSRIDKYKNLFVLEYIDGKTQRVVIENSRGPRKGRIFVDLKTINDRQILESNGLVLHPCLDMLTDKNWKPEEEIPGPLQEFGI

SEQ ID NO: 9398 - protein, 596 aa, synthetic construct
MSANQKPRAYSYIRFSNATQAAGDSYRRQREAAEAYCAQHGLELVDAKEYSFFDQGRSAYKARHLDDTGELARFLAFVQDGTIPKGSTLLVESLDRLSRERVKDALPRFLDLLNQGINVVTLADGRLYTSAYNELDLIISIVQMSRAHEESATKGKRVSAAWRRKQDSARTESLPIGKLRPLWLDYTPDGYVPNPERVEVVQRIYKLAQDGYGHRAIAAQLNQSGVPSFSADRKNASGLWGNSGIARTLSNRAVLGEYQPHQFIDGKRVPVGAPITGFYPPIITEDEFYAAQQAVSSRRQSQATKPGKRFNVWQGVSQCGICEGPMHISKRGNSRILRCFRNIQGLCPAKPILLPRSEEVFREILAKVDSLALVQSNQGKLQRQIAVCDGRIAEAQERIESLQSQILNLSGALPVSIISVMQRLEEDLAKHQQERDSLKEDIAREQIINKDEFFSRLDLVSYEGRARANSLLKSLSVEVAIERIGELRGKKAPVDYRVSKEGFPIFSFLDTSGELEFLPLTTPSIAIAEVQGEVIRPEFYQYVLTRERQFAWEASERTRLEELCKTSSFKDVAAAEGISVRGLKRILVGRSNRRAP

SEQ ID NO: 9399 - protein, 499 aa, synthetic construct
MPLDATLTLKDEGLSAYHQRHVKQGALGVFLRAIEDGRIGNGSVLVVEGLDRLSRAEPIQAQAQLAQIINAGITVVTASDGREYNRAGLKAQPMDLVYSLLVMIRAHEESDTKSKRVKAAIRRQCEGWLSGSYRGLIRNGKDPQWVRLTSDGWVLIPERVAAVKRALELYRQGLGAGRAALVMHEEGFQLTVGGISGLQIYRTIKLPALRGVKRLSLDGENYELEEYYPRILSDAEWSDLQHLAGQRLRRRGAGEIPGIITGVGLAYCGYCGTALVAQNIMKRRRSDGSIADGNRRLQCTSYSKNAGCSAGGSCSVVPIERALLSFCSDQLNLQRLLQVGDDGKSVRQKLLVARAALDKITAQVEKVTDALLEDESGASPIAFIRKARELEEQQGVAEQNLKRLEFELAAMSSAVQPVQADRWQELAAQVRADDYAAREKVRQLIMDTFDRIVIYMRGMSAKDREGQEIDVQLLSRTGQHRLIQINRRSGDWVASEDWG

SEQ ID NO: 9400 - protein, 431 aa, synthetic construct
MKRAISYIRFSSEKQSRGDSLRRQAKMVTDWLKAHPEYYLDESLTFRDLGVSGFTGKHLQGGLGDFLTAIEKGLVKAGDTLLIESLDRLSRQDVDQASELLRNILRSGVDVVTLSDGEHYTRESLKDPLALIKSILIMQRSHEESLRKSERIQAAWDAKKEAAKAGIKISRRCPAWLKLNDDRKTFSVIPEKVETVRRCFQLRLEGKSIWEIVRTLNDEGHQTLNQYKAGKFGQTSVQDLLKNRSVIGYFTPKGCEEIAGYFPPIIPETDFYKVQQLSYSRYGRKPASDKPLSVNLFKGVIRCSECGHALIITGFSDTRSGIYRCPSRNENRCNAKGLSRKQTDSTLLALLSRLDRFDSDMTNTVDTLKLHREHISNNIEKLVQLSLEIEDLSAITSKLKQLKGELSQVDADIEKETQRLKSIDVGCLIVT

SEQ ID NO: 9401 - protein, 520 aa, synthetic construct
MKKITKIEQNRDFEGKKKTRVAAYCRVSTASDEQLVSLKNQKVHYDHYIKANRDWDYAGIYFDKGITGTKKDKRDGLLSLIADCECGKIDLVITKSISRFCRNTTDCLELVRKLLDFGVHIIFEKENLNTGSMESELMLSILSSLAENESVSISENEKWGVRKRFQNGTFIISYPPYGYQNEDGEMVIVPDQAEIIREIFASALSGKGTGAIADDLNTRAVPTKKGGKWTSATIWGIIRNEKYTGDALFQKTYTDESFNRHKNYGDQDQYLVQGHHEAIISHEDYEKANAALKQRGREKGISDQTEKFHNRYGFSAKIKCGECGSNYKRRINYKPSGSEIAWCCSRHIENTAECSMKYILDDRIKAAFLTMMNKLIFGQKLILKPLANSLKGQNDNSRLERINELEIKLEKNIEQRQVLTNLMASGYLDPALFNKESNELSRQAELLRDEKENLIHFIGGDMSRTEELKKLIKFVSKSEMLTQYDDELFLSYVERITVLSRKELVFELKCGLKLRERLVK

SEQ ID NO: 9402 - protein, 523 aa, synthetic construct
MELSRNVTVIPARRRVGNTVNEQKKPKLRVAAYCRVSTDSEEQATSYDAQVAHYTHFIEKNSEWELAGIFADDGISGTNTKKREEFNRMIEACMAGNIDMIITKSISRFARNTLDCLKFIRELKEKNIPVFFEKENINTMDSKGEVLLTIMASLAQQESQSLSQNVKLGLQYRYQNGEVQVNHNRFLGYTKDEDGNLVVDSVEAEVVKRIYCEYLQGASLAQIGKSLEADGILTAAGKARWRPETLKKILQNEKYIGDALLQKTYTVDFLTKKRVKNNGIVPQYYVENSHEAIIPRDLYMQVQEEMVRRANLHSGENRKKRIYSSKYALSSIVYCPRCGDIYRRIAWNNRGKHSFVWRCVSRVEHGPSYCDAQTVQETELQEAVVKAINIALGGKDDMLIALEQNIASVLALEDEGSMESINAKLEELQKELLKRANAKKDYNDLADEIDRLRELKQNAMAENAEREGLKQRIAEMQEFLAEQVEQIEEYDESLVRRMVEKVTVYEEKFSVEFKSGTRVDVKR

SEQ ID NO: 9403 - protein, 536 aa, synthetic construct
MNGARNIRSVTVIPATPELFMQIDEKPSRKKRVAAYARVSTNLEEQQSSFEAQLDYYTKYIKDKPEWEFVEVYTDEGISATSTKKRDGFNRMIKDALDGKIDLIVTKSVSRFARNTVDTLTNVRLLKEKNIEIYFEKENIYTLDSKGELLIAIMSSLAQDESRSISENVTWGKRKSFSDGNISLPYKSFLGYVKGENGLPQIVEDEAMTIRLIYKLFLEGHTPSSIAKQLMALNILSPTKRQKWPVSTVISILKNEKYKGDAILQKRYTTDFLTKKTKTNEGEVPQYYVENSHPAIIPPETFGLVQEEFARRKSKGGYTACQSCFSSRIICGDCGSAYGSKVWHSGSKYQHTIWQCNNKFKKKDKCSTPHLYDETIKKLFVEVMNHLIKNKTEIFKNYRLMIEKLTDCQNLKEELKQVDEECSSIEMMVDAFVSENTRVAMDQEEYQRRYNAYAESYDKLRNRHMALTEEIRKRKARKSQIHAFLDILEKRDQLLTEFDETLWRRTILEMVVFSVDEVNFRFKDGAEIKWPMKGNI

SEQ ID NO: 9404 - protein, 435 aa, synthetic construct
MMRKVIKIDPVAIKLPVKKRVAAYARVSSGKDAMLHSLSAQISHYSETIQSRLDWQYAGVYADEAATGTKDNRAEFQKMLTDCRNKKIDLIITKSISRFARNTVTLLEVVRELSSLNIEVYFEKENIYSLSGDGELMLTILASFAQAESLSVSENCKWRIRKGFLEGELVNLRFMYGYRISRGLIEIDEEQAQIVRMIFDDYLGGMGCTQIAKKLRELNVKRIRDGIWTAERVGEILKNEKYAGNSLAQKKYVSDHLTKKLITNWGQLPKYYAENTHPAIIDQETFDKAQVLLASKRKTSGKKEKAVYAFTEKIVCDKCGKHYNRKATHGYVYWNCRTFLHFGKSVCHTKQIPEVILMQVSAEVLGLDPFDEEIFHQQIKEIRVPDDFKLKFVFHNGDTVEKGWHNKSRKDSWDEKKRQEARKRQSLIMERGLAN

SEQ ID NO: 9405 - protein, 540 aa, synthetic construct
MQIRRAGIYARFSTDLQNDRSVDDQIALCRDFAARNGLTVVKDYFDKARSGASVFGRDGLLSLLDDARAGRFQTIIVEALDRLSRDQEDLAGIHKRLTFAGVEIIAVHDGRADAIQVGIRGLVSTLFLADLKNKIRRGQAGVIRDGRHAGGKAYGYKPTPGQPGVLRIDDEEAAVVRRIFEEIAAGKRPREVAYGLNEDGIAPPRGRAWGASAIYGSSSRGYGILRNPIYHGVLVWNRVTMVRDPETGKRVSRINPESEHKTAEAPHLAIVSRELAEKAIAIASRGPSKAADGKVQIKRPKRILSGMLRCSHCGGGMSIHDRYKNGIGIRVKCTRHIESRSCTNDKKYRLDKIEDAVISGLRQQLSNPALLVEYVKAFREEMREDAAKLERDRSKIERRVADLSGRLERLIQGMARGILPIEAIEAQYKPIEEERDRLKAKLAQQPAPAVIELHPQAVAHYRKSVQHLAQRLNDLDDRADAETVAAFRELVDRVIVHDRPGKMVEVEVVGHLSSLLGRPAEILGGRVVAGEGLEPPTRGL

SEQ ID NO: 9406 - protein, 524 aa, synthetic construct
MKHNVILYMRVSTDEQADKGYSQRYQDEMLRRFCQVNDLNIAGVFFEDYSAKTFNRPEFKKMLLMIRKSKGSLASQLLFIKWDRFSRTASDAYQMIATLKKLGVSVNATEQPLDLSVPENKLMLAFYLAAPEVENDRRAMNIYSGMIRAKKEGRFMGMAPIGYVNKTINEKKQIVKTEKEKYIRFIFETIAEKKYSSESVLKKVREMGLICSKNNFWNILRNPVYAGFIPVPAMNGQPAYMQQGQHEAIISPALFYLVQDILDGRYKKQREKLKFDDQFPLRGLIRCTSCGATLTASTSLNKRKQPYSYYHCTSRCGQRYRAELVNEQMVKELHKLTPHPAVKELLKLVALNMTRDLRQQTTRDLKRIKEELICVTREKEKALQLLLADSIAADDYSLIKNRSEQATFKLEKELADLSQLSGDNPMIEECITVLEDLPNLYASSTAEQKREILCSMFTEKLEFSKLGFRTLPLNEAMQLIFNTGAAFRQNKKGQTGLNFSLSHQVIPLGLEPRAHTLKVYCSTN

SEQ ID NO: 9407 - protein, 575 aa, synthetic construct
MSRKNRSVKANKILPNVLGTYIRVSTPNQESKGYSLGIQRELGQQKAKELGWTYKEYNDGSISGDIEPINRPMVKSLLEDIADDKIGGLFVIKLDRLSRDGDYIDGQVMITMLKKAGIKVFANDMERELQNPAAEMAVRIESVISSYERYLIRERTSSGIRKSIKSGNSANGGAIMAYGFDRKDKKMVINAKEAKVVKQIFELYKKGFGTQRIAGILNDKGIPTKRNTIAAGNMLVKKTITNKSGEKETIKIVKHGKDFVWRDSVVYSMLTNTLYKGEKQWNELIIPVPQIVDADTFDLVQSLLKERTRFKKPIKNQFLLKGLIRCGECGKSFYGHKRADLRDKAYKCLSNRYKAEWCGNRGIGIDYIEDLVWSELLNFEKKVIDTYKWMETDKAVKVYEATIKKSDAIIKDNLEMMDSLTEKYIANKIGDKDYNKFKSRYEAAIEKANAAKSDVENDNFLLVNKKQILDVVKEFTKGMKQTTTFEGMQSYVRAFVDKIVIQSGSPAEGDYYQNVAIYYKMDQFTQFYLKGEVDVMYKRNWHRLRSESKALTVMIHQDVKNRAESFGEALHVTGF

SEQ ID NO: 9408 - protein, 549 aa, synthetic construct
MIGNEVPDKLRAFSIFAKGEIKQKVSNAKCVIYTRVSSKEQTKGMSLETQRKDCELYATRNKIPIMGSFGGTYESAKTDERKEFNRMLTFVKKSKEKISIIIVYSVDRFSRSGANAIYIADQLKKQGIVVFAVTQPTDASTPSGRFQQNIQFIFSEYDNQLRREKCMAGVKEKLLAGIWCTSVPFGYDIVRSEGQPKRIVLNAKGKLIKYAFELKAMGMSNEDVRSQLAGKGLKLSNQRVSDMLRNPFYCGLVVHKALEGRILEGIQEKAVSKEVFLKVNGILARKHKSGYTMEPENEDIPLKRFLKCEQCGQFLRAYKAYKNQQYYYKCNTKGCCCNKRADELHKTFAEMLDQYVLNIENEGIRYVISQQIVATYNQLTEEGELQRSHIDNELEEVTKRLERLEERFVMEEITKAMFDKYAGKLQEEQQELEVSLGKTGSRVSNLENCVQKAINLSSKLATVWHLSDYKGKQELQFLLFPDGIYYNRKTEGCRTPKVNEVFSYISSLQRTLGQKESGNSNMKLDVPAWVVWAGIEPATQGFSVLCSTD

SEQ ID NO: 9409 - protein, 542 aa, synthetic construct
MRKTNVMDNFYALSKFGKAQRRKQAARPGIKNAVVYTRVSSKEQADKNLSLESQRNAIEEYASRNSFLIAEFFGGTYESAKTDGRKEFLRMLNYVKKSKGKITHILVYILDRFSRTGGGAIQLAEDLREKYGVDIIAVTQPADTSNAGGVLQQSMQFIFSKYDNDLRRLRAIKGMSDKLAKGIWVTKVPMGYDIIWTNDVKQIVINEIGKKLRRAFQWKAGGMKNEEIILRLRALGVPMYKQQLTKIFKNPFYCGLIAHGLLDGQVIEAKHEPLISKSLFLKINEINMKSAGHGVAHKKEVDEIPLKVFVMCSECNTPFTGYEVKAKGLWYYKCRTNGCRCNKSAKEFHGMFLQLLSQYSIRPQLIDPIMAKMRLLWKEINKDAIANEAGLKKQISEVEKKMENLEEGYYVNREMSRELFDRFYSKLNQERMELAKQLSKSGETISNPEVAIGKAVELSSELATVWDSGGFRDKEKLQKLLFPEGIVFDRKIGAFRTTKVNSIFQLIASLQSIPEHEKRGQTDALHRLSPLAEREGFEPPDL

SEQ ID NO: 9410 - protein, 499 aa, synthetic construct
MEEKKRVGIWVRVSTEFQVKEDSPEHHEQRARYYAEAKGWEVIEVYRLEAISGKTVMELPETQKMLRDIQTGRITALVFSKLARLARNTKELLEFSELFRKSNADMISLAENIDTSSPSGRLFFTIIAAMAEWERAEIADRVAASVPIRAKMGKPLGGQASFGYTWNGKELVINDKEAPIRKLLYELFAEHKRKKTVAAKLNGMGYRTRNGSNFTNTTIGRLLRDSTAKGIRIANYTKSLGDGKKWVIKPESEWITITCPAIVTEDLWDECNRILDQQETKKKPTKKTVHLFTGILLCECGHKMLVPSDGKKYICNGCRKNRIAKEDIEEIYYENLKSFLLKDSDIEKFLSKADSAIAEKESHIKTLNQEKKRLEIEMDKTMQLYLAGQIPKDSFGKYYNPLDEQLKQIVATIPTIQAEVDFMKIEYLNSDTIISEAQSLYDRWNTIDTYGKRTIVEQITECITIFGDEIRIKFSYNPAFFRNHPDWERNLKGSSKRSA

SEQ ID NO: 9411 - protein, 520 aa, synthetic construct
MTTPTRPTKALIYCRVSSAKQATDGHGLESQEARCRHHAQSIGCEVEAVFPDDVSGGGDFMKRPGMVALLSYLDAQRGRKNYVVIFDDLKRFARDTEFHIKLRHAFRMRGASIECPNFRFEDTPEGEFIETVLAAQGQLERKQNSRQVVQKMTARASAGYWLFLPPVGYRFADVTGHGRMLVRDEPVASVVAEALNGYASGRLQTLTEVQRFLQAQPAYPKARNGEVHMSHIAQLLTRQLYAGYFSIESWGLHLVRGQHEALITLETHEAILARRQGVRNAPARKDLSADFPLRNFVVCGCCGEPLTACWSKGRSKRYPYYLCDTRGCGEYRKSVRKEKLEGEFDVMLASLQPTATLFHAAFAMIRELWEMKLGNIQQRRTLWEQELRQLNGQVEQLLDRAVEATSSQLAAAYERRIHDLELRKAVLNEKIATTTQTGPSFGRTYRTAFEFLANPCRLWRSERVEDRRAVLKLVWGQRLAYDRKTGYRTAETALPFKVLETLRVLCERVVEPIGIEPTTF

SEQ ID NO: 9412 - protein, 679 aa, synthetic construct
MSHTEWDFEMDRADKRAIIYARVSSPNQVRKGDGLASQEATCRQYAERMGYDVVEVFRDNVTGGVTDRPAMGALIKFLRTRRADKLVVIVDHPNRFSRDIRGHWDLRDLLTAAGGRLESPNMKFGDSSAERLVENLMMSTAQYQREQNAEQTKDRMKGRLLNGFWPFIPPRGMRQERVAGVGNILVRVEPEASVIAEGLEAFATGRLCSQAELARWLNEHPDFSKGRRTRITNQQAHDLLTNVLYGGVVEKADWGVTRRKGRHEGLVSYETFERIQQRLIDGSRAPMRTDLNVDFPLRGAVVCASCDHPLTACWSTSKTGAKHPYYMCFKRGCSEYRKSIRRDVIEGEFAGVLDQLTPSAKLMDLAMAMFKDAWDQRSAQASAMAAHYKRELATVETSIARLVDRIVESTTDAVVRACEARIAEHERTKLVLLEKAGQTLPKAGKFDELFELAFEFLANPSKLWDSGRYDYRRLVLRMTFSDKLAYSAKTGFRTPETTLPFNVLGGLGEGVEGMAERKGFEPLRRLPAYTLSRRAPSTTRPSLRAAGAGDIGLCRTGRDEGAEHPSKGGGNILMEGGAARPENMGCGAVPARRRHTLCRPDAACKKGRTPWWFTGRRGSGGGKWRHAAPAPDHRYIADRLRGDPGDHRRHQIAGRQRHRDHAAARQLDPDAPAKPCGGS

SEQ ID NO: 9413 - protein, 566 aa, synthetic construct
MVKENRDFSNAVEAKPAYIYARFSSLNQRDGHSIERQLGYARLFAEQHGWEIIEELKDEGKSAYKGANREVGSALYEFELKAREGYFQNGVVLICENVDRLSRQGAKAAAKLIWSLNEAGVDVATYHDGHIYTAGDDADMMDLFSVIIKASVAHEESAKKSKRSVAGWTRIHGDIANGDKRAYSRQCPAWLKIEDGRYVVDEHRAAIVKQIFDWYVNGIGSLSIIRKLRAMNELSWSSEKRYKGTKEWTPRYLHKLLTSPAVMGEYITLKGEALATDYYPAVIDADTFYKAQAVRKARTTLGGDERKRSANLFSGISKCGCCGYGAVFQRRVHTNKKPAFPPRIHTYLRCNAARYKEDACSNGVTIRYEVVEQAVLDRMLPLIVTYKHENRVLSAFDVQIADHQRQLEAQQKQLDNIVEAIAQGIAAKALAQRADVIEAQIETLTAQIDEAKRQRGLEAAKPAKDRDARAIDKLRSDLNSDDEEIRFETRAQVNSHLSRLLTAIYINDDRTFTVDVDEGFSATFSADGDVIGYRLNGKLIDEDVMRHILLENRTAIADAAFGKLTP

SEQ ID NO: 9414 - protein, 590 aa, synthetic construct
MTLPVTIYARFSNQEQAQGSSKTRQLKLCREFIADKDGWEFSDDRVLIDEGLSAFSGANRAPGGLLYQFEQQAAAGMYRGGHVLVVEHIDRISRQGHDEVLPFVKKMTEAGVTVAVASGRRIYHAYERVTLGAVIEAVVAAELAREESENKSRRLKAAQNKRVAEAQEFAAEGQHLSRTATVPAWIDIKRISKRSERPLYRMTLNEERAQILREIFQLTIDGYGTPAIAKKLNERGEPVWNHLGQQSNNGWTVGYLTKLVLNRAVMGEWHPMNRPRGAKESSKGIAVLNHYPQAIDAAMFVKAQAARQGRKNTSGAWQITHNNLFSGIAKCGHCGGRMKQEVTVRKGQKRKHANGYYPAGKTFSYLKCHNALNKVWDEDNQSLRCENRNWVRYEALEHAVLSVALKFVVVHHDVAADGRQESLRIDIAERQRFIEEKQRQVDNLVGSFSKSGSPATERLMLQLEAELRDDQAAVRELERGLAGHGDATSLEEYEGRLSALLEAIESDDEEERAASRVRVKQSLGRVITRMNSYDDRLTLVEFGNALRVIFDNQGEEVFNAYINQTIHGPNGEIDWHPDFPDAEYEYAEVP

SEQ ID NO: 9415 - protein, 545 aa, synthetic construct
MRFHEEDKHNVTNAVIYCRVSSKAQTKRGDGLNSQETRCREYARYKGYDVRQVFSDDLTGKNADRPGLQSLLKYLKADRKNPHVVIIDDLSRFARRVPIHFELRESIALAGGILESPSVELRDDADGELHEYILASVSQHQSRKNAEQTLNRMQARCWNGYWVFQAPIGYRYEKQAGHGKVLVRNEPHASIIQEALEGYASGRFDSQTEVKRFLETQPAFPKDLPNGEIRNQRIKDILTRVVYAGHMEVPNWNIPLREAQHQGLIDLQTWQRIQDRLKDGARAPARKDLSEDFPLRGAVLCGDCNKPLTACYSRSKTGKKHAYYFCYQKGCPSHRKSIPSAKIEGAFEKLLQSMTPTQGLFDITKAMFKQAWGVRESQRVQQRATLKAELADFDKQIEQLVDRIVNSESATVIKAYEQKIAKLEHSKLITAEKIKTMAKPRHSFEDLFELACDFLSNPWKLWASDRLEDKRLVLKLAFAKRLAYHRERGFSNPNFSIPFKELGSFCGEKSEMAHRGGFEPPTPRFVVWCSIQLSYRCLRTKPVRS

SEQ ID NO: 9416 - protein, 441 aa, synthetic construct
MNVLRAALYPRVSTEEQAKFGLSIHDQQNDLEEYAKANGMKVVGIYPDAGFSARKKIEKRPAMMELLAAVQRNEIDIILVTKLDRWFRNIGEYYKVQEILEAHNVCWKTIYEDYDTSTAAGRLKINIMLAVAQDEADRTGERIKKVLDAKKSRNEVCTGHLPKGYKIDGKFAVIDRAAEPDVKTFFSVFLETGSIHNAISAVPNLKLQYRTASKMLDNRGYVGEWHGLSIPPYLTAEEFDRVQTLRRRLQRKVAQNRTYIFSGLLVCGDCGRRIGGRPRKLVNGESYVYSCDGAYQYKGCPNHANIMEATIEQYLLETIDAKIEIFANTKDEPKQNSKEIEEKAKSLQKKLAKLSDLYLDDLIAKDEYAKRYADLTAQLESAESLLRKPPAKSAKDLSEAFFSGWQDIYKELSRENKKVFWKLKLKEIRLYQDRRIDFDFL

SEQ ID NO: 9417 - protein, 457 aa, synthetic construct
MSEKNIISDGKVMRAALYPRVSTEEQAKFGLSIHDQQNDLERYAKEHGMKIVGVFADAGFSARKKIEKRPAMMALLDAVRRDEVDIVLVTKLDRWFRNIGEYYKVQDILEAHNVSWKTIYEDYETTTASGRLKINIMLAVAQDEADRTSERIKKINEGKRLRREALTGDKPLGYTIVNKKFVKDPQTALAVDAFFRKYMACGSVSATQDYIREEFGLTIPYQGANKMLRSTAYYGVYYGVDGMCPPYITKEQYDQIQTMRRKVIKRTDENRIYLFSGLIVCGDCGGRIGGKVNQDHKTFHYNCSNHFCRRKPCGNNRSISEKKLEKYLLDTVECKLESYKTEFSAVQENVVEKDYRSEINALRGKLSRLKDLYLNELLTLDEYKKDYASITEKIHELEIKQQPPRPSNLPQIQKLLSHNWRDMYGALSPMQKREFWRIIIKEIRWYPDRHIEFDINF

SEQ ID NO: 9418 - protein, 431 aa, synthetic construct
MMKKIVKDITPELRANDTIKRVAVYARVSCEKDTMVHSLKAQIDYYRKFIMKNPGWKFAGIYADEGKTGTKEAREQFQALLTECRNGNVDMIITKSISRFARNTVTLLSITRELKELGINVYFEDQKMDSMSSEGQLMLTLMAGIAQAESKDCSDAVKWRIRHGYEHGRASSFKILGYRWDDGNVVMVPEEAPLVKRIFDLYLSGKGANAISKILNSEGVTAAGITKWAPTTIRNVLMNEKYYGDLLLQKSFVEDHINKRKVINNGELPQYFIEDDHEAIIDRQAMSDVKNEIAIRRARFYHGQGKESCLTSKIKCPYCHANYHRKKINGISKWSCATSNRKGKSMCPKSKDIREDVLLAILAHQLGYKDFDEKLFAEQVDYIECFDDHIITHFYDGSIKNSKWSNPSRKDSWTDDMKEKARQRGLNQYGK

SEQ ID NO: 9419 - protein, 597 aa, synthetic construct
MANKVVKVIPARPQGIIIDQAGVIKRKRVAAYARVSTEKDEQTNSYEAQVNYYTNYIQANPEWVFVGIYSDAGITGTSTKKREGFKRMIDDAMNGKIDLILTKSVSRFARNTVDSLVNVRKLREKGVEVYFEKENIYTLDTKGELLLTILSSLAESESVSISQNTTWGQRKRFADGKVSFAYSNFLGYDMGQDGKLHINEEQAKVVKRIYEEYLLGYTPSYIAKRLTADNIPTPQRKKVWYQGVIDSILTNEKYIGDSILQKTFSTDVLTKKRKKNEGELPQYYIENNHPAIITDEIFEMVKEEMARRKSAGLMTNVSCFSGRILCGDCGGYFGRKVWHSNQPNRTIVWQCNKKFSNPDACGTTSIKEKAIEEAFVRAFNEMFSRKDEIIENYKLCIDVICDDSKFHERKNELDKALEEKTIVIKDFLLKCSKTEENIEESNARYDVLIKEFEALNAERQKCLDMISSLAAKRVKINSFLNILNSTEGVINSFNEVLFQKSVNHMVINHDLTIDVIWRDESKTTTYIERGVKEVKKSAPRIKPEKVLSDHICLCCGKQLYITPGKVQRIFCNKKCGETYRRAKAKEARLENNTISHA

SEQ ID NO: 9420 - protein, 501 aa, synthetic construct
MEIQIREGNSRQKQKLKVCAYCRVSTDADEQENSLENQIRHYKEVITSNPDYEYAGVYSDFAISGFKEKRPGLQKMLADARKGKIDLILTKSVSRFARNTSIVLEATRKLKELNVGVFFELQNINTLSGEGELMLTILAAFAQAESESGSVGAKMVYQRKYEAGIPVQYLERSFGFKKDERGVYIADEEEAVWVRKIYDMAAQGYTLAAIKRYLNENNVKTAGGAKWLDSTVLRILENEIYKGDYIMHKYFVNEERKLVRNRGEVDAWYIEDDHEAIVSPKLWQRAQDALEAKRDYLAEGSVIEEFTEENYPYMNKIYCSKCGYPLYKRIYSKGNRLNWGCSGMKRYGKSFCDGINIPDGVLRSAWHFEENTYIDEKASDKGVKEFSYLKERSWKRRHKKKQPPSIPENTEAEYPYREKIYCALCGSRLVRHVDTKSHKVTWVCNGRKRKGKDFCDGTRIPDTILKGWGEIKKDIYIQRKDDKNGKKRYSYTSKKPSGIGA

SEQ ID NO: 9421 - protein, 463 aa, synthetic construct
MARSVTVIPARNRQASGHRAAPQKKIRVAAYCRVSTDQEDQLHSFEAQVDYYTKYINDHENYEMAGIYADEGISGTNTKKREQFKRMIADCEKGKIDLVITKSISRFARNTQDCLMYSRKLKNLGIGIIFEKENINTLDSTGELLFTILSSLAQDESRNISENCKWGIRTKFKNGEMHLNTFKFLGYDKDENGKLVINKEQAKTVRRIYRDFLIGINPAQIAKELTEEKVPGCLGQTKWYPSTVTGILKQEKHMGDALLQKTYTADFLTKRQVRNNGEIAQVYVKDSHKGIIDKQTWNAVQEEFDRREKFMESHGTDRYSYGADCMPFCEKVFCGECKSLFTRHSWSSRGIVQWQCKNHRKDGKVACTNAYVDNADLEKGFVKAFNRLVTDRDKHMERWQQMKSDGTPLEKIRAGQMMEAVGNEPLTRFVPEIAQLVLCEVTVLGAKKYEFFFLEGSRVKVSV

SEQ ID NO: 9422 - protein, 522 aa, synthetic construct
MITRNVTVIPARKRIGNSANAEELPKLRVAAYCRVSTDSEEQATSYEAQIEHYTNYIKSNSEWELAGIFADEGITGTNTKKREEFNRMIEECMQGKIDMIITKSISRFARNTLDCLKYIRQLKEKNIPVYFEKENINTLDTKGEILLTIMASLAQQESQSLSQNVKLGIQYRYQQGKIHINHNRFLGYTKDKDGNLVIVPEEAEIVKRIYREYLEGSSMLQIARGLEADGILTGAGNPRWHTSTVNKILRNEKYIGDALLQKTYTVDFLSKKRVPNNGIVPQYYVENSHEPIIPREIFMQVQEQLVKRRCVHISKNGKKRNYSNNHPLSQMVFCGNCHEIFRRVHWNNRGKKSIVWRCVSRLENTGLFCTASTILEDTLKEKIVDAINVAVSGKNSLLAILKKNIETVLSEDLDESTADIDKRLEELQTELIQLANSKEAYDNIVNEIYRLRDLKQETLSRNALRQDKRDRIAEMTDFLNTQTGDITEFDDKLVRKLVEKAIVYDDRLVVEFKSGLEIEVNL

SEQ ID NO: 9423 - protein, 522 aa, synthetic construct
MRKVTRIDGNNALQDFKPKVRVAAYCRVSTDSDEQMASLEAQKDHYESYIRANPDWEFAGIYYDEGISGTKKENRTGLLRLLADCENKKIDFIITKSVSRFARNTTDCIEMVRKLTDLGVFIYFEKENINTQRMEGELVLTILSSLAENESLSIAENSKWSIRRRFQNGTYKISYPPYGYDYVDGKLFINKEQAEIVKRIFSEALAGKGTQKIADGLNLDKIPTKRGSHWTATTIRGILSNEKYTGDVLLQKTYTDENFKRHYNRGEKDQYMIKDHHEAIISHEEFEAAQEILRQRGKEKGIIKGSSKYQKRYPFSGKIKCAECGSSFKRRIHGSGDRKYIAWCCTKHIKDASSCSMKFIREDAIHQAFVVMINKLIFGHKFILRPLLQSLKKTNYSDNITKIQEMETKIKENTERVQVIMGLMAKGYLEPALFNTQKNELLKEAAILKEQKEAIKRAIDGSQTILVEVEKLLKFATKADKQIDAFDSKIFEDFIEEIIVFSQEEISFKMKCGLNLRERLVK

SEQ ID NO: 9424 - protein, 522 aa, synthetic construct
MGNVMVIPARRQVGNTVKQSAQKKLRVAAYCRVSTDSEEQETSYEAQVTHYTEYIQKNPEWELAGIFADDGISGTNTKKRDEFNRMIDECMAGNIDMVITKSISRFARNTLDCLQYIRQLKDKNIPVYFEKEAINTLDAKGEVLITIMASLAQQESQSMSQNIKLGLQYRYQQGKVQVNHNRFLGYTKDDNGHLIIDSEQAEIVKRIYREYLEGSSMDKIADGLMADGILTGAGKTKWHTSTINKILRNEKYMGDALLQKTYTTDFLTKKRIKNNGTVPQYYVEGDHEAIIPKDLFMQVQAELVRRRVVHVSPTGKKRSFSCNHCFAQMVFCGDCGELYRRVHWNNHGCKSIVWRCISRLEPGSADTNCTNRTINELLLQEVTVTAINQILTERGTFLKQLQTNIAKAVVSADTLSPDGIQARLEELQKELIKKANNKQDYDAIADEIFRLRDQKEQSELDSHHREELMKRIRELQDFIAGQETDITEFDEALVKKLIEKIIVFADHFTVEFKSGLTINIEA

SEQ ID NO: 9425 - protein, 573 aa, synthetic construct
MKAVIYARYSSDSQREESIEGQLRECAAFAEKNGITVLRHYIDRAYSAKTDNRPEFQSMIKDSGKRLFDIVIVWKLDRFARNRYDSARYKATLKKNGVKVVSATEIISEGAEGIILESVLEGYAEYYSADLSEKVVRGMTDNALKCKFNGGSLPIGYVIDDEQHFQIDPLTAPFVLEAFKRYDGGATMKEVRDALNAKGVTNQRGGELTFNSIQHMLNNRRYMGEFSYRDVVIPDGIPAIVPQDLFDRVQEKLAKNKKAPARHKAEDDYLLTTKLFCGYCGAYLCGESGTSRTGKVHHYYKCVSVKKKRTECHKRPVRKEWIEDLVVGETMKMVMDDKAIKAIVSMLMDLQDRDNVNVPLYEQQIREADTAISNLLNAIQQGILTRSTKERLEELENRRDELENRLACEKLAKPKVSAEFMTFWLHRFRKLDVRQQSHRKMLIDAFINAIFLYDDKMVITFNYKEGTKTITFAELQEAISNKNGSDLDCLAAPQKKKSPSGWFLFLCAFYPSVSPSARRKECIGATLVYVNPSSYPLPTNHPHPARAFHPETRYPCRCSCPARPTGWVRRRFR

SEQ ID NO: 9426 - protein, 529 aa, synthetic construct
MPYCLYVRKSRADAEAEARGEGETLTRHINALLELAKRRQLNVTKIYREIVSGDTIAARPIAQQLLNEVGQGMWDGVLVMEVERLARGDTIDQGIVAQTFKFSGTRIITPIKDYDPNDEFDEEYFEFGLFMSRREYKTINRRLQRGRLASVKEGKWLGSCAPYGYERVKLANDKGCTLAPYPPEAEIVTLIFSLYTQGEQQNDGTFRRLGVSLIVRKLNELRIRPRVSEHWSPATIRDILINPVYIGKIRWNWRHGVKKMVDGQVREFRPRAPIEDCILVDGLHPAIVDNETFALAQEYMANNPRQPVPARQKVMNPLAGLVICAKCGRRMTRRPYGGRQPETLMCKDTACDNISSALHLVEARILDALRNWLAEYKLQLGEDSSAANNKVVAAANEKALQQLTAEHATLCKQLDNIYDLLEQGIYTTDQFLDRSRKLSERISQNEHDAAVLNKSLAADKMREISRRQLIPKVEHVLEVYSSLPSAKAKNDMLKEVLEKVVYIKTSDVRKGGSPDNFQITIYPKLPKTD

SEQ ID NO: 9427 - protein, 436 aa, synthetic construct
MERTIRQIEMTVPVQPRLKRVAAYARVSSGKDAMLHSLSSQVSLYSQLIQNHEGWQYCGVYSDEAFTGTKENRQGFQSLLTECRAGNIDLIITKSISRFARNTVTLLQTVRELKLLGVDVYFEEQNIHTQSADGELMMTILASYAQEESLSASENQKWRIRKNFEEGKPWNGTVLGYRIENGQYVVVPEEAAIVRRIFEEYLDGFGFNAIAQHLNADGLTTRYGNPWHHSGVQKLIRNYCYTGNLLLQRTFRENHITKKTLPNQGELPMYHATETHEPIVSMTLFEAVQREADARAEHYNHTKVKVTYPFTGKLECLGCGKNYRRKVTTARVVWICATFNSKGKAACASKQIPEETLMAVTAQVLGTPKFDEHLFAAAIEKIQVGKNNALHYIFRDGRCVDTTWADRSRAESWSPEMKEAARQRQMQRRKDEWLDQ

SEQ ID NO: 9428 - protein, 525 aa, synthetic construct
MARSVTVIPSTINPVTRMPSTTVQKRRVAGYARVSTDSDEQFTSYEAQIDYYTNFIQRHADWQFVKVYTDEGISGTNMKRRDGFNQMIADALAGKIDLIVTKSVSRFARNTVDSLVTVRKLKEKGVEVYFEKGNIYTFDSKGELLITIMSSLAQEESRSISENVTWGQRKRFADGKVSLPYNQFLGYRKGPDGLPEIVPEQAEVVHRIYSLFIEGKTTCGIAKILTAEGIPTPSGKQNWQASTVESILTNEKYKGDALLQKAFTVDFLSKKMKRNEGEVPQYYVENSHPAIIPPDEWQIVQREFARRKALGRKYSGGSVFSTRLVCGDCGAFFGSKVWHSNRPCRKTVWRCNGKYEGDHRCGTPNLDEEVIKERFLAAVNILFSIKDTVLDDCRIMQTALTDCSAIDSELESLVGELEIVAELTKRCIEENSRNAQDQAEYAARYNGLVERYEKAKERMDTLQTQRAERQDEADAIGAFMFTLCEMETAAQEFDPKLWLVSVDRAMVHSDGTMTFRFTSGVEIIA

SEQ ID NO: 9429 - protein, 563 aa, synthetic construct
MSRKNQSKSGNQKIAALYCRLSLEDGRENESMSISNQKLLLKDYAEKNGMFQYEYYVDDGYTGRNFNRPSFQRMIADIEAGKVGCVITKDLSRLGRNYIEAGSYIEIYFPKHNVRYIAVTDGVDSLTRQEMDITPFKNILNDMYSRDISKKVLAGITARSRQGKSCGGTTPYGLMRDPDDKGHLIINPEEAPVIRKIYDMALDGMGCMRISKRLMEEKIPITRLRTSTERNENYYYWSVSRISHILRNPFYKGAHLVFRSHQKGIRSNTVNLIPREEWEVIENCHEAIIQPDEWQRVQEMIDAKPRIMVGNACPYDNIFHGIIYCATCGKSMQVRYEKVGRTDINRTTKQKREAIDKTYFICQTYNRLGRNACPSHKIEARDLHEIVLKDIQELAALALKDADAFYKRLTRRMEQRYMADKSEVQKECDRLLARNQEIDDIILNLYTDKTKGVLSEQRFLKLTGAMEAEQESNKNRLHDLGEIIRNSDEQECDVKAFIEEIRQYATITELDEAVLHRLINRILIGEVKKVDGQKIQKVKIIYNFVGEIPAETEVQGQTNQENA

SEQ ID NO: 9430 - protein, 509 aa, synthetic construct
MQFYSYKDSVAFYLRKSRMDPDSESVDETLSRHADTLMKLAQKLELNVVEIYKEVVSGDGLFTRPEMVRLLQDIEHDKYSAVVCMEIDRLGRSSQKDGGIILETFQEHNVYIITPNKTYNLNDEIDEQSVEMQSFIARQELKSIKRRLRKGVEKTVEFGCHVGEPPYGYRRAYIDKRPTLEICEDEAKVIRMVFDMYVNQGLGSQIISDTLNSMGYKPRKNDRFSRTTIRFYLQNPTYIGKIVWNKRKHIKKKFPTDKNRSVLNPEDKWIVSDGMHKPIISQELFDEAQRIRLTRSHPPSFTGELKNPFAGLIYCKNCGGAMQRQFSKISGNRLLCPQKGCNRSIKTEYVENYILRFLKQILQKCNSAFENHMQSENDKRSEMIKINIKDIQNEIKSLNKQKSSLHDLLEKGVYDIPTFLERSKVLAEKLNGAEKALAEKQEQLKDIETAPPIKEAVPILKHLLYEYDNLSVPEKNALYKQLIKRMTYTRTKDQSNNDFTLQIEWRYVL

SEQ ID NO: 9431 - protein, 578 aa, synthetic construct
MKTAIYCRVSTDDQEARGTIDAQVEFATKYCDLHEIEITAWYKDDGITGTLPLESRPEGLRLLEDAKAGKLDTLLIYKLDRFGRYARIILNGVHQLEELGVQVRSMTEPFDTGSPAGRFLLTILAGVADLERDNILARMAIGAERAAKAGKWLGGIVPFGYFVNDDGFLEVNENKMTGCEMSEADVIRLIFQLTAEEGMSTIQIADRFNAMQLPTRYVIDNRKIMRGKRKVSTSGYWHPSRILSILRSATYKGIHHYGKRSKKEVISREVPAIVSEDIWERSQEVIEDNRIDSLRNSKQRYLLRSLIKCGSCGLTYCGVPDVRHNKRYYACSGKTKYRGPIGKCRSKNVSAEWLEELVWNECVNFILSPGEAVKKINEDQTIIKIDYSHELQLVEGKLSQKQDERMMILDAYRRNIISEPDMIVQVSRINTEQTLLEQHESELKKAIATSDRLDTQQSEAIKLLTDLQPRLKTGDPLSFEEKRAILKLLINEIRIHTIEDPDCDELRRKVKVTIDFSISRCSSNLLTTRTGISGCYQQKRGRKRIISLGSGDGNAPLFQGLTQYLQDLTRELRQFVKK

SEQ ID NO: 9432 - protein, 509 aa, synthetic construct
MGTYIKMIAAIYIRKSREDKARPGFRLTAQREQLPAFARSQGWQIEVYDDGHASAARGKTEDLKERGRLETDIRAGKINIILVIELSRLSRDDSMQDYVAWLHLCGQHGVKLATTSRILDPAMPSDWMLLLMEGGFSSVEMKVLQGRMKEGRDQAFKGGKFLGGKCPPPYVHDKAKGQPVIDPQALTDIRKVWELAETMSAKAVAQQTGWPHIAVRRAISDERLLFYQALRLDPQTGEHIPCEWPPCMEADQAARIMANRKNRLSGYNRAIAAGLLSNLGLFTCGYCGRSVRAWKNGRVRKDGTRLDYYGCKANETQRLCAKSRMVPQHIIDERVTTNLLGTMDNIAELQAAWLATQGDDNTSGQLTELDRKEADQQARKKRLVAAVAEGIIDFADAKTTRSDIEAAILAIQKQRTGLQATVTTTPDWDSLSFTGEEFAVLTRDEQREVIGLAIANIRLYSTYLIIEYRFPRTMTGDRTARVHLPFRKPATTAGSRQYYKLKPTEPKKP

SEQ ID NO: 9433 - protein, 433 aa, synthetic construct
MRVRIIEPIKPSEPKRKRVCAYARVSSASEAQGESLENQTTYYRNLIEANPEYEYAGVFADQGRTGTKEERPAFQKMLALARMGEIDLILTKSIARFARNTAIVLEMARELKELGVEVFFEKENISSTSGDGEVMLTVLSSFAQEESKSASENLKWRYRRKFEEGKVVINATRFMGYDKNQQGELVINQNQAEIVRRIFNDYVEGKGSFVIARELNAEGVSTVAGGTWHSDTVLRMLRNEKYKGDVRQQKTYSKDPISKKKCINRGELNCYYIENNHPPIVSKELWDEVQGLIRQRAEAKGNVKERQRSYQNRYPLTGMLFCGKCGAPLRRRTWGSTYACRKIVWQCSTYVTQGKRVCQGIAVDDAEVGKLNIRIPTIVEERMKNGKKHYRYTSKGEPDKPCGKSGIKEKTCSRLLPGIDRSGRAVIKLRSPG

SEQ ID NO: 9434 - protein, 545 aa, synthetic construct
MDTNLMTPNMMPNMTSNSIMTPPRQVTIIPATREVHSAAIEDTAVKKRVAAYARVSTDKDDQQTSYDTQVTYYTRYIQEREDWVFVKIYADEGLSGLRMTKREAFKTMIADALAGKIDLIITKSVSRFARNTVDSLTTIRKLKEHGVECYFEKENIWTMDSKGELLLTIMSSIAQEESRSTSENVRWGKRKAMADGRYSVAYSKLLGYKKGPKGGLVIDEEQAVLVRRIFSLYLQGHIPSQIAKILTAEKILTVVGKQKWTSHTVLSILRNEKYKGDVLLQKFYYPDFLTKKQVRNHGEVQQYYVKDSHEAIVSPEVFDHVQRLLTMKKSGKRQNRPNLLSTKIICGDCGGTYGSKVWHSTDKYRRVIWQCNDKFQGVKCSTPHLTEEQVKELFIKAVNLLLDKRRGIIATYERIITVELDTAELEKKQRIASERLIRIEEENAELITQNATLVLDEEIYKAQHDEILARYEETSKELQELNAKINDMVARRETIRRFWHEFEKLEPVTEFDNILWISLLDEMIVYSKERIVFVFRDGSEVEVTT

SEQ ID NO: 9435 - protein, 640 aa, synthetic construct
MDEKVRCACYTRKSVENATLDRDFNSLVSQREACENYIASQKGKGWICLSDHYDDGGYSGGNMNRPAMQRLKADIEAGKIDMVVCFKIDRLSRSIIDFVELQKFFEEHGVHFVSVTQDINTSTSSGRMLLNILITFASFERDLIIDRVKTAIEGGKKRGKFCGGVPMLGYRSDPYTKKLIVDPDEAKTVRLIFEKYVALESIQATVSEINRLGLRTREWVSVSTGKKHAAKPWNSTSIHRILTSPIYAGYVSHYDTNYEGEHEAIIPRPEWEKVQQMLEARSPLPRGQQRQRHFHPFDGHVICGHCNCALTPTYTKKQGRKYCYYICSRLNKDADHDCPVKRVPAGDLEHAVVSMLSGLFQAPSILRETLKAVRHKEELLRKNCERDVELLQAQLDEMKKQALKEDFNFEEVKKAADLLAEAKRKRNLLREPVSEDEVIAALGDAAGLWEFMFPGARHELLQLIVGDIVVYPDRISFVLKVDGLKDLASEMAVSGYFNEAHGDPAKLPETEQEILDDGSVRITMKMESKHIDGHRRVVIPAPGAERLKQTSLLRAINNARLWMDKLINGEATNVTDLSKQLGLKTGYVSRILSLNSLAPDIVEAILAGIEPDGLSITKLTEQPIPEDWNEQRRLYGFPTR

SEQ ID NO: 9436 - protein, 521 aa, synthetic construct
MNIEVIPQKIHKDTKLSLAAAKKVQVAAYARVSTDSDEQYTSFEAQVSYYTKKIQENPRWELVKVYADEGISGTSTKNREAFQDMITDAKNGKINMIITKSVSRFARNTVDSITTIRKLKEIGVGVIFEKENINTLDSTGELLLTIMSSLAQEESRSISENVTWGIRKRMSDGKYSLGYSRFLGFEKGKDGKPIINKEEAEIVKRIYREYLEGKSTHQIVSELEADKIPTPAKKVDKDGNLMCNWRPSTIISILANEKYKGDALLQKTYVTDFLSHKAKKNNGELSQYYIKDSHEAIIPPEEWEMVQVETARRNKPSYKHSGATVFSSKVVCGDCGAYYGLKVWHSTDKYRKTIYQCNHKFKRTEKCSTPNLSEERIKQAFIDSLSQLDRAQVLEDCNLAIETLRNDDTSEVRVRRLNAEIEVVVELVKKNPNMEQVEIDAYVTKYEDLVKKLNAEEHHLESKCAAIKRVEVFAANLKNLEPIIAEFSPRLWNLLLEKAIVGRDDTIKFVYYSGIENTVKI

SEQ ID NO: 9437 - protein, 453 aa, synthetic construct
MSTINYTNTAPLQLPKFANGKPISKEVVKEEPIRYCLYARKSSEDDERQALSVDSQIKEMLEQAQREDLLVVDIRKESHSAKQSNQRPVFNQLLLDIAQRKFNGILSWAPDRLSRNAGDLGSVVDLMDQELLKDIRTHGQRFSNSPNEKFLLMILCSQAKLENDHRGENVKRGMKAKCEMGYRPSKSPLGYLPDLTSPRGMRSIILDPERAPIIKQMFEKVYFNGWSGREIFQWLNEIGFSTRSGKKITLSSVYRTLNNPYYCGVYEYPKGSGTWYTANHPAIISKQLFEDVQERLAVVPKSSPGTIEYNFTKLLKCGYCGSGVTAERKIKKFKNGTSRVYIYYHCTQARNIICKNPYIKEEELLNQLLNIIDTIPIEKIEAQQRIQHELFRYHNFTQGVLNSTVSKEMVLPQIDAREFARYILKNGTKEEKRELLSCVNAKLILNDRKIHLE

SEQ ID NO: 9438 - protein, 542 aa, synthetic construct
MIAIYSRKSKYTGKGESVENQIQLCREYAIKHLGVGESDIVVYEDEGFSGGNIKRPEFQKLLQDIGHKKISILICYRLDRISRNVADFSGILELLIQNNVDFVSIRESFDTSTPMGKAMVYISSVFAQLERETIAERIRDNMYELAKTGRWLGGAAPLGFESKQMDFTDEDGKDRRYNILSALQEEKTIVQTLFKEFLKLGSISKLQKFTYTHGLKSRNDKDFHINTLKTLLANPVYCVADKNVYKYLSDKGVEIFSPKSEFKGKYGLSCYNKTSKDNKKITRPKDYSEWIVAVAKHEGIISSNDWIKAQNIIANNKDKAIRQVRNPKALLSGLLFCKHCGSHLRPKYHNRKGTSDDDRIFYYICEMKERSRKMRCDVPNISGNYLDKLFLEQLRQMTIDNFDFAQAFDVSANGISSSVSGIDALIDGLNEKLRETDKAIAALVANLAQGSYEKSVVDVIMEQANALTAKKKGIEKEIADLKAQQANSEEIMKSVISVKDALSVINSAFDSLTVFQQRDKLKIIIDKILWDGENIDILLRGT

SEQ ID NO: 9439 - protein, 581 aa, synthetic construct
MNSITSPRPQHTRHVKAPTSGIDGPGRVAIYARVSTGKQAEQDLSIPDQIAQAESWAAQKGADVVARFVEPGASATDDRRPEFQRMIDAATGPDRPFDTVLVHSMSRFFRDQYLCEMYLRKLARAGVAVVSITQNFADDPTGQLIRKVVGIFDEYQSAENAKHTTRAMKENARQGFWNGSKPPFGYRAEAAGQRGAKIKKRLVIDEAEAATVRRIFGMALGREGPLMGVKAIVSRLNGEGVSFRGKQFQISNVHRLLTRHTYLGEHAFNLRHAKTGQSKPESEWVVASIPPIIDRADFDRVQQTLDARNPKKTPPKSLSGPTLLTGLIRCAHCGSGMTIRTGKSGRYRYYVCAGRAQKGESKCRGRSIAMEALDGMILDALSDRLFTPDRLRVILESYISRGAEADSERQRRLGLAKKRQTEISGKINRLLDLVANGLMDPGDPSLAEKLQALKAQRSAVEQDINLLASSASNSGNLITDAKIERFARAMRQAMHNDDPAFRKAYLRIFVSEIVVEIDTVTINGPHSTLVAAVGRDLGPGAIDGAQIHREWRPVGDSNPCYRRERGTTSVRERPISSLTPM

SEQ ID NO: 9440 - protein, 514 aa, synthetic construct
MTAAAIYARFSSELQDERSLGDQIELCRQYAQRNGWRVAGVYSDAATSGASMHNRPGLAALLESARAGDFQVVLTESLDRLSRDLEDIAGLYKRLRFSGLEIVTLADGSVNKMHVGLKGLMASIFLDDLAQKTKRGHIGRLNAGKLPGGKLYGYDVVLGDPGARRINPDEAAIVRRIFSEYAAGRSPREIVRDLNAERVPAPRGGLWNASTISGSVQRQNGIIQSRLYVGEIVYNRETMVKDPATGKRIHRVNPSSAWIVHPVPHLAIVTPEIFEAVGQRRQSLSQGPLTQRRRPKHLFSGRVQCGCCGHPLIVVRPGEVGCSGRLNKAVCENRSSTQIRKIEDRVLGVIAGELLTSEMVAAAVAAYKLERERLAAKRAKVKARAAHDLAGVEAKIARIVTAIETGGDVPSLAARLAQLEADRKAIQARTADAIPDNVLAVYPNAAQRFRRQVESLAASVNRRDARGDEARELIRELVSEIVVTPAPGRPTIEVRGDLAALFPARGIDGSGTRT

SEQ ID NO: 9441 - protein, 525 aa, synthetic construct
MRAILYARFSSDLQRAASIADQHRALRESLPRLGLIEHSATSDAAISGSTLARPGLEHGLLEIEAGRASILLAESLDRISRDLEHVARIAKRVHFVGGRIVTLSEGEIGALHIGLSGTMAQLYLEELARKTKRGLRGVVDEGRIAAGRSYGYRPTADRGVFEIVPEEALVVQRIFEEYAAGVGTRTIAQRLNADDLPGPRGALWRANTIVGERAALTGIINNPIYIGKIVWNRSTWRKDPLTGKRRCFPLPREEWVEVEAPELRIVEQSVWEAVRATQGSFQARRPGRRTTRPLSGLLVCGECGTKLTIIGRERYGCPQNKELGTCSNGRSLRVADAERRVMDGLRTHLCNRELAEAYAAAYADERKKLRRQQIAADAKARRELEGAEREQKRLVEQLGKAPAAALDAIMARLGEVSRDVQRLRETVTPIEESDVIDLAAWDVNYLARNLDALWRQLAADEVEAAEARRALGALMQRIVFTPAEERGKYTLQIEGDLAAVMTLASGADRVLLVAGAGFEPATFRL

SEQ ID NO: 9442 - protein, 620 aa, synthetic construct
MPRVAIYARYSSDSQRDASIEDQVRLCRERAEREHWTIVNVYSDHAVSGASLMRPGIQQLMHDALAGKADIVLSEALDRISRDQEDIAGIFKRMQFAGVAMVTLSEGEISNLHIGLKGTMNAIFLKDLADKTRRGLRGRVEKGKSGGGNAFGYDVVKRVGDGGEYARGERSINEMEAEVVRRIFIDYTKGISPKAIANALNKEGVSAPTGGTWGASTIYGNRERGTGILNNELYVGKLVWNRLRYIKDPDTGKRISRPNPESAVIRQDVSELRIIDQTLWNRVKEIQGEYNKKEMPLWKKNRPKALLSGMTKCGVCGGGFTIINNDRIGCAAARNKGTCDNKRTMGRVELEALVLDALKANLMDEELCKEFCQAYTGRVNELRVKHNASLAGYRAEMSKLERERQQIIRSISEGVPGSLLKDRAIIVEKRREELGNLLETTEEAPVLFHPNMAAHYQKEVKDLIGSMEDPATRSEAGTILRSLIDRIILSPQEGANGLSVDLIGDLAGILSIATNRGRLVVSNELSKLQPVNEACSEESGVGPGSAAGEASPTERLSRLNAESSMAMVAGGRSGHSEPMAMVAGNRLRRQTNGPTQKGPANAGPLAMVAGAGFEPTTFRL

SEQ ID NO: 9443 - protein, 519 aa, synthetic construct
MENENKAVIYARVSTTRQADDGLPVESQIEHGYRKAEALEADVLRVFTDAGISGRTDERPAFREAVRYCKAYGVQYFICWSTSRFARNKLDAALYKRELEKNGTRVIYVSVDLDNRTDSGWMMESVLEIFDEHYSRQVSADTLRSMVKNARDGHFNGGRIPLGFATAEDGKRKRLVIEENEAILVRDIFALYLRGEGAKAIAVQLNTACRFNRGRKFSTNTVINMLKNQIYTGHVVFNRTNNMTGKERPQEEWIITKSHAPIIDEESFMEVQKLFGDRAPTTGGGSPHSGFVFTGLLKCGKCGAAMQIESAKGRSKYYHYYNCSANMKGTGCQVRRISASDFDDWLIDVVMDKVLSKETIASMIEDLNEIAGKWIKDRAARRTAIVAELRETESRLRNLYSVLELHGKDAPNLGDLTNRMRELKTQRDMKEEQLVRIEEEEMPKVDIGDQEIAEMTELMRELVRTTDDPKRLRTFFSSFINKVAVTENGVEIYYDKAKVMDRSGVQWLPDLDSNQGPAD

SEQ ID NO: 9444 - protein, 519 aa, synthetic construct
MENENKAVIYARVSTTRQADDGLPVESQIEHGYRKAEALEADVLRVFTDAGISGRTDERPAFREAVRYCKAYGVQYFICWSTSRFARNKLDAALYKRELEKNGTRVIYVSVDLDNRTDSGWMMESVLEIFDEHYSRQVSADTLRSMVKNARDGHFNGGRIPLGFATAEDGKRKRLVIEENEAILVRDIFALYLRGEGAKAIAVQLNTACRFNRGRKFSTNTVINMLKNQIYTGHVVFNRTNNMTGKERPQEEWIITKSHAPIIDEESFMEVQKLFGDRAPTTGGGSPHSGFVFTGLLKCGKCGAAMQIESAKGRSKYYHYYNCSANMKGTGCQVRRISASDFDDWLIDVVMDKVLSKETIASMIEDLNEIAGKWIKDRAARRTAIVAELRETESRLRNLYSVLELHGKDAPNLGDLTNRMRELKTQRDMKEEQLVRIEEEEMPKVDIGDQEIAEMTELMRELVRTTDDPKRLRTFFSSFINKVAVTENGVEIYYDKAKVMDGSPTWIRTRDLRINSQSI

SEQ ID NO: 9445 - protein, 512 aa, synthetic construct
MENENKAVIYARVSTTRQADDGLPVESQIEHGYRKAEALEADVLRVFTDAGISGRTDERPAFREAVRYCKAYGVQYFICWSTSRFARNKLDAALYKRELEKNGTRVIYVSVDLDNRTDSGWMMESVLEIFDEHYSRQVSADTLRSMVKNARDGHFNGGRIPLGFATAEDGKRKRLVIEENEAILVRDIFALYLRGEGAKAIAVQLNTACRFNRGRKFSTNTVINMLKNQIYTGHVVFNRTNNMTGKERPQEEWIITKSHAPIIDEESFMEVQKLFGDRAPTTGGGSPHSGFVFTGLLKCGKCGAAMQIESAKGRSKYYHYYNCSANMKGTGCQVRRISASDFDDWLIDVVMDKVLSKETIASMIEDLNEIAGKWIKDRAARRTAIVAELRETESRLRNLYSVLELHGKDAPNLGDLTNRMRELKTQRDMKEEQLVRIEEEEMPKVDIGDQEIAEMTELMRELVRTTDDPKRLRTFFSSFINKVAVTENGVEIYYGSPTWIRTRDLRINSQSI

SEQ ID NO: 9446 - protein, 600 aa, synthetic construct
MTADNTIYAMGYARVSTAKQAVESESLDIQADRIERHIIGHGWTVKPMDGVLQEPFTGTTDERPVYQEALRYIRKNRGTIRYFVVMTIDRFSREGAFKYQQMKAELAAEGVELRDISGVIQPRVNSLQHLGFKYGWSETSPSDVGEVVLAETASHERSRILTRLVEAQIRLTQGGYHLGPANDGYVVKRVFVDGKKKLAQFPDPERAEFVRVMFRMRAEGTTSDEEIVKHLNGLGFRTKPFNRWNRAKTVVVGHKPGMPLTVKHFQCLIQRPAYCGITVRRWTHGKAVRARGGEALIPIAQFNAANRGRVFIEEHEDGSVRISYNHMPSRQPPKRHKFSLRWPLKNVVACPRCRKPLFASASRGKSGHYFTAYHCSRGHARYSVPQAKLEQAFSTFVATLHFEPKFFACFETLLVDAFHDAQAQWTNERRTSASKIATLEERKTQLALAFAETTSASVRKVLEQQVTALDDSISEVGQQHQAFGSAEGDVQTFLTYARTLLEHPQKILDNIEHLREQLAIYGLFFERPPTFDDIVFGTPLLRLTFALSRQVAMQQSRAVHRQSLDWNTLHQEIERWKEAEWAIDAILRRLHLQDSAFAAA

SEQ ID NO: 9447 - protein, 476 aa, synthetic construct
MVEAAKTGVFDVLIVEALDRISRDQEDMASIFKRLTFQGIEIVTVHEGKADAIQVGIRGIVSSLFLTDLAHKVRRGHAGNIREGKHAGGLAYGYRHTPGKAGVWVIHEPEAAIIRRIYSEYVAGDRTREIIDRLNAEHIAAPRGAYWRKNTLTGSNNRHNGILGNEVYCGRLVWNRVRMVKDPDTGKRISRPNPESEWHRADAPHLKIVEPEIFDKAAAIRRERGHLAPAYRRKPRHMLSGLLRCGSCGGGMSVKGEDSGGTRVVCTRYREAGTCDNQRSYYLHTIEQTILGGLRDHLRNPEAIKLFLKTYHAERKRLAADNTNTKARLERELGEVGRKLERAMSAMLASTAAVETFTDAIATLEADKRRLNSELSSLTEPVNVVSLHPAAQARYLALVEKLAAGVKGGKPGNDTVTAIRELIESATIQKTSPGQPVVIDVKGKLEGLLKTPVFAESASGGKLVAREGLEPPTPGL

SEQ ID NO: 9448 - protein, 552 aa, synthetic construct
MTALKQIEKPRLDAAKSAIIYCRVSSKKQTVDGAGLDSQEHRCREYANERGYVVKEVFPDSQTAKGDFMDRPGMKALLAYLDDNRHEPHIIIFDDLKRFARDTEFHWNLRRTLAERNAVPECLNFRFEESPEGRFIETIIAAQGQLEREQIGRQSVQKMRARLERGFAVFRAPVGYKYVKAKGGGKVLKIDPILGPIVKEALEGYASGRFASQTEVRRFLENQPDYPKDMTGGLIRPQTIPRLLSKEIYAGLVGAPNWGIPFRPGQHDPLVSMEIFQRIEERLNQRAFVPRRADNVVDFPLRGAVCCSSCGSPLTSGWCKGKTKRYPYHWCHNPLCDLKGKTIARDKMHEELSSVISEVTPAECLAPLFRAILRKRWEMQAERVQDAQKSIEKQIADNDTVVSQLVERTLGASSPALAAAFEKKIEEVERETLLLRSKQSKITRPKVSFDELFELSLRFFSMPKKLWESDVYELQRLVLKLVFKGHLPYARGQGFEHLPFSETFRLINTLGNKVSDKMTDFSSDCKMVPRGRIELPTSPLPRVRSTTELPRH

SEQ ID NO: 9449 - protein, 553 aa, synthetic construct
MKRAALYARYSSDLQSDRSIEDQFAVCRQRAERDGHQVVASFEDRARSGASVFGRPGLAQMIDAAKGGSFDVLIVEALDRISRDQEDMASIFKRLSFQGVEIVTVHEGRADAIQVGIRGIVSSLFLTDLANKVRRGAAGNIREGKHAGGLAYGYRPTPGKPGEWVVHEEEAETIRRIFDLYVAGDRSRDIAAKLNADRIPPPRGAYWRGNTLTGSNNRHNGIIGNEIYAGQLVWNRVRMIKNPDTGKRVSRPNPEAEWHRTDVPALRIIDPELFATANAIRLGRGHASPAMRRKPKHMLSGLLRCGSCGAGMSVKGADRGGTRIICTRFHESKACDNQRTYYLHKVEQTLLSGLRRHLVDPSAIKLFLKTYHDERKRLAADGVNIRAKLERDLAEVERKIERATTALLTSTAAVQTFVDAINALEIDKRELQSRLDEIAAPIKVVALHPAAQAQYLAAVESLSETVTNHGATSETAMAVRELIETVTVRKTPPGAPIDLHVEGRLAALLQEPMFPEGSMSGGRVVAGSRYQKRKSSQLIAFIRARRRNFVANR

SEQ ID NO: 9450 - protein, 524 aa, synthetic construct
MTTAPIENEPVNALIYCRVSSRKQATEGGGLESQEQRCREYAELHGYNVVAVFPDDVSGGGDFINRAGMVALLAFLDAQEDKQYTVIFDDLKRFARDTEFHIKLRREFALRKATIKCLNFNFDDTPEGKFIETIFAAHGELERQQNGRQVTQKMKARAKQGFCVFRAVVGYKYIKSKHGGKILVRDEPLASAVQEALESFASGRFESQAEVKRFLEGQPSFPKDTKTGEITYQRIGKMLTQPLYAGYIEVPNWGISLREAKHDGLIDFETFEKIQNRINSDARIPARADISEDFPLRGFIACNDCGNALTACWSKSQTGKRYPYYLCATKRCVSNRKSIPRQKLENEFAALISSLQPSNDLFKVVKSMFNLAWTQRLTQAKAHQEGFKQQALVVDEQINDLLEKIVNISNLSVIKSFEKRIVNLERQKLLLAEKGKKTTPTKATFDELFELAFTLLANPKKIWDDGQLAMKRNLLKLVFLDRLSYCRKTGLRTPNLSLPFKMLKGDFEGHKLMVHRGEFESPTP

SEQ ID NO: 9451 - protein, 539 aa, synthetic construct
MEASLVPKTLAKRKAVIYVRISDAKQNIKGDGARSQESACRDYARYNNMLVVDVFVDVMSGKYAARPKMGEMLEFLNAHHDENYAVIIDDISRLARNYIAHMSLREEIRAAGGELYSPSMEFFDDPKRQMPEKITAIVKEQERIDNAARVLSRQIARTKNGYYTFPAPTGFRYTKDKSGRGGKVLVRDEPVASIIADVLEKFASGYLGSQGEIKRYLESNPAFPTGASGKIGKSRVKTMLTQPIYAGYIEYAPWGIPLIKAQNAALISLKTYLKIQDHLDGVPKQAVRLDINPAFPLRGLISCSCCDKPLRAGRSKGRSRYYPYYVCHTKSCEHYGKSIKQEKIQGEFVELVKTLRPAPELLELVRVMFKDVWEKHVSSFKQRHVAAIHSLNGLEKKIDNLVDRIIKTTQPTLIGAYEAELVKLEAQKLVAQEQIDEISDSNGVKLPDFENAYRTALRMIANPLLLWESHEVSHKRGLVKMAFGGRLSYCRNSGYRTPDLSLPFQVIQRLSRNIQEKNMNKAKMVDDTGIEPATPTMSM

SEQ ID NO: 9452 - protein, 611 aa, synthetic construct
MKNRIAIYARYSSDLQSDASIEDQVRICNEKAKQQGWHVVTEYNDRAISGASIMQRSGLQNLIRDAMAGKFDIVLAEALDRLSRNLHDISGLYQQLQFAGVRVITLSEGEINTMHIGLKGTMNELFLKDLADKTRRGLRGKIEAGKHVGLCYGYKVKKQFDANGEAIKGDREIDEEKAKIINRIFHEYAIENKSPKAIAAQLNVENIPCPSGRSWGQSTINGNRKRGTGILNNVLYIGQMVWNKTRFIKTPEGKRVPRFNPENEWIRKDVPKLRVIAQELWDAAKARQKKLDNKGGYLGTKRRPKYLLSGLLKCGCCGGGFPKHNSERYGCSNARNKGDSVCTNRKTIKKDEAESVVLDALQTHLMREDLIEIFCAEYTKHMNELRSAENASIKQYKIEQTKLEREKNNIIKAIKDGVPASMLSDELQKIATRQTELDGLVCDDTKAEQPILHPSMARHYKRSIADLRNTLAGATTNQGEAHEHVRALIDRIVLTPKEGQNELSIDLYGDLAGILNIATRGVNMNANNNITRKISSLAANDNLPVSKSAPLVAPSCYQLYILGIAKLLSTAKDITNPSSVSLEALLSSLKASIANQSNSIIAPISSCKGGA

SEQ ID NO: 9453 - protein, 525 aa, synthetic construct
MTEAKTKKAVIYCRVSSTKQTTHGNGLDSQETRCREYARYRGHEVAEVFSDDISGSVEGRPGMKAMLKYLQARRNSKIVVIIDDISRLARGLEAHIRLRSALASAGAILESPSIEFGEDSDSQLVENLLASVSQHQRQKNGEQTKNRMRSRMLNGYWVFQAPQGYRFERQSGGGKRLVRDEPLASIIQEGLEGFASGRFSSQGEVKHFFESQPLFPTCRHGVVLHERVNQLLNQVLFAGHIEYPKWDVPLRKAQHEGLISLETYERIQDRLQVKPYAPARKDIDADFPLRGFVACGDCNQPMTACWSKGRNSHYPYYICRQRGCPSEKKSVARAKMEDGLRDLVRALTPSHALFELASQIFRDLWDAKLGASKDEKTHLRIEIGNIEKSVTQLLERVMEAESTTVIKAYESKIEALERKKLILLEKIEKCGKPARDYQSSFQTALKFLSNPWNLWETGRIEDRRAMMKLVFGGRITFDRKSGFQTPDISFPFKMLTGLSSPEKGMVPLRGFEPLTPALRMRCSTN

SEQ ID NO: 9454 - protein, 561 aa, synthetic construct
MAKDNSNTKAVLYLRMSSDQQEQSIPGQRAELKSYAKKHGYEIVGEYLDEAISGDDTHKRTGFLAMRNDCSSGEFSVVLCWDQDRFGRFDLLECGYWITPFRESGVRLETIAQGKIDWEDLVGQLIYSVNQMGKAQFLRDLSRNTVRGMLSSARNGTAGTGGPNPFGYHSKDGKVTVVPDEARTVRLVFELYLKPAGSARSIAAELNRRKIKAPRGKTWRDSSVRAILSRRKYTGTFVYGAQNAGKYFCWRDGEIVPRRKTDKSNKSDPIVIENTFEPIVSQEVFDRVQRKLEANKANRARKKARQYLLSGLVKCGDCNGAMVGRTSRLIPHYACARYHHSGRSLCFNNRLPEAPLVSCIVQRIQERYLSKPALDRLKKALEKEQERTRPRPRDLTQLRNEIARLGSRIDNAEDAILDAPPDLRPGLYRKLEEMVEARKGLTTEMETLLRYNASENDSQAEIERAMEALRNLGEALDKAKPNDTKALLASIVTKIELFYDHKETDSGRKTSEFTHGLIYVRPDANEARSADPKSPLMSKKGWFNEASEEPWPCSRVDDTIG

SEQ ID NO: 9455 - protein, 581 aa, synthetic construct
MKRAVIYARYSTDLQNDQSVEDQIRLCEAHAEKLGLNVVGELFDRAKSGASMFGRPGLARLMQKADADEFDVLVAEHPDRISRDIADLAHIHKTLRFRRIEINCVNGGAMDTVQIGMYGVVGQMQREEGAKKVKRGMVGVVRSGRNAGGKAYGYRPVPGRKGELEIVEKEADVVRRIFSLYASGIAPRAIAATLNDERVPAPRSKRWNASTLNGNGQRGNGLLLNPIYAGKLIWNRVHMVKDPSTGRRISRINPEIEHEEIEAPHLRIVYDALFEAVQNRKASRGGARSRSTPKYKRLLSGLLRCGGCGGGMAINGSDRSGPRVICSTHKESGSCGNGARYYVEKIEQQVIDTLRAQFADTRIIDIYVKEYEAERRREAAEKRRNRATLDRELEQAKTAITRIVERLAKGLIEDDDAAAILPGLRANRNRLQRELETFEPPSNVIEIQPRSVRAFRENIERLAEVISKRGETPPVELAQSFREMIAGVIVEPRKAGEPYRCCLTEIFGRRREHPGLTGSWRETQENKTLKGRLRAGRASVFDTDVGPETAASRPPTTICANLQGVLKIDLRPLRRLQSLEK

SEQ ID NO: 9456 - protein, 591 aa, synthetic construct
MKGKNGSSKAVIYCRVSDTKQTTRGTGLHSQETRCREYASFRGHDVVQVFTDDASGGLINRPGMQAMLSFLRQNRRQPHVVIIDDISRLARGIQAHLELRAAISKAGGILESPTLEFGEDSDSQLIENLLASVSQHQRQKNGEQTLNRMRARALNGYWVFHAPVGYKYERVSGQGKVLLPDEPCASILREALEGYACERFSTQAEVKRFLEAQPEFPKTPRGEVTNQRVNDFLTQPLYAGYLELPKWDVSFRPAKHEGLISLETFKTIQNRLNGTARVPARKDISQDFPLRGFVLCGCCGTPLTANWSKGKAAHYPYYLCRQKDCAAKGKSIRRELVEEEFEALLKALRPSAELFEWASSLFRDLWDQRAKTMKEQGKSVKAELSQIERKIAQLMDRLVEADSESVIRAYEKRIGDLETDRMIIRERIEKCGTPLATYEETFEHSMTFLANPWNIWENGSIEHRQTVLKLAFADQLAYDRESGFRTPEISLPFKMLGDICSGNLEMAHRGRFELPTPRFVVWCSIQLSYRCLLSLMAGQLVACGRLRIGKLIKRGGHCKRLNRICVKSCREIGSCRHAVHWILSALISGYP

SEQ ID NO: 9457 - protein, 536 aa, synthetic construct
MRTVVYARYSSQLQNSRSIEDQIAVCRERADREGWTIVDVFTDYAISGAAGIGEAQRPGLNAMLAAIDAGGIDQILTESTDRIARHQGDAFAIRERIQFAGARIFTLMDGEVDDITGTIKGLMDARFRKDLGARVKRGQRGAVQQGRAAAGIAYGYSRANRLDERGELIRGLRAIDADQAAIVVRIFTEYASGQSPKAIAARLNAEGVPAPRGQTWRTTTISGDRKRQNGMLNNRLYIGELIVNRTSKIANPVTRRSVIRPNPEKDWVVEQVPILRIIDDALWASAQAMRERLQGIPFDKTRRPKHLLSGLGQCGVCGGGWVKYNRDQWGCGRYRDGRGCENGRSISNQQFEKRVLAGLQDELLHPDLVASYVRAWHVENARRAQVTTRERAKMERRHEEAVRRVDRLIEAVACGADDFREIREVLAKARADRDSLAAQLADLDALPVIALHPGLADDYRRQVAALNDALGENDASRLEAVPRLRSLIDRIVLTPHPSGRGVTVSITGRLDEIVRLATGRTASALTPAKKRLAALT

SEQ ID NO: 9458 - protein, 508 aa, synthetic construct
MLYARVSTAEQEREGFSIPAQLKLLREYAALNGIDIAGEHVDVETARKTGRTQFDAMLAYLKRHTTVKAILVEKTDRLYRNLKDWVTLDELGVEIHLAKEGVVLSQDSRSSEKFMHGIKVLMAKNYIDNLSEEARKGMNEKAAQGYWPSLAPLGYRNVRNDDGKKVIVVDPEIGPRVARLFEYASTGQFSLNELAAKGRKLGICYRRSGKPIGTSTLHYLLRNRLYSGSYEWNGRIYQGRHEAIVTPELWEVVQDVVDGRAAANIRADSKDFVYSGLMTCGHCGCAVVAEIKKQKYVYYHCTGYRGKCPERYVRQEVLDEHFENLLKQLRLDTEVFELLRSALKESHADEVVEREEARKRLSDEADKLQRRMDMIYLDRIEGRITAEYHDRIIIPWREERAQVIRNLEHLNSVDEAYVDDSIALLELVTNAHKGFSATLPKHKRRALNLVLSNCTWANGALTATFRQPFEMLRDLTPQTSCHPVSKSADSAEFQDLVTPTGLEPVFSP

SEQ ID NO: 9459 - protein, 555 aa, synthetic construct
MRENKPIEEAKRRAAIYARFSTDLQNERSIEDQLSLCQTYAGRDGLSVIRTYEDRARSGGSLMGRDGLRQLLDDAREKSFDVVVVEALDRLSRDMEDLAGIHKRLSFLGIEIRAVHEGVVNTVLVGLRGLVGQLYREDNAHKVRRGQAGRIKQGLAGGGSTYGYAAIAGRSGERVVVEAEAQVIRRIFQEYVDGRTPREIAHDLNKERVSPPRGRAWNASTINGNLERGAGILQNELYVGRLVWNKVRMVKDPDSGKRLSRPNPKSDWQIAEVPHLAIISSELFTAAQKRKEERGRTHPSRQRRPRRMLSGLIRCGSCGSGMATNGRDKSGRVRIRCSADTESGTCPDAKTFYLDRIESAVLSGLKAELRAPKVISEYVRTYLEERKRLASASVAKRQGLEQQLGKLNREIDRLVDAIAKGLGDPSILGPRSTALGAERKRISEELQNAPPAAKEVALHPAILKRYEEQLGRLEEALAKGISAGDGEAAEAIRDLVETVTVFRDPERPGGVTVEIAGRLNALLGEKAYPNRVKGVWGKMVAGEGRATRSKIEAKS

SEQ ID NO: 9460 - protein, 522 aa, synthetic construct
MRTLIYARYSSQLQNPRSVEDQIAACRKRADDEGWEVVAAFHDRAISGAAGIEDAQRPGLAALLAALDAGGIDQVLTESTDRLARHQGDAFAVRERIEYAGARLFTLMDGVVDEITGTIKGLFDARTRKDLAVRVRRGHKGNITMGRATGGVPYGYRKVARLDEAGEPVRGLREPDPDTAPIVQRIFRDYAKGQSARAIAAALNAEGIPSPRGGIWRASTIAGHRKEATGMLTNPVYIGQLHYGRTKMVSDPRTRRRSSRMGDGEVTIGQAPHLRLIENDLWQAVQDQLEARASTRPERQRRPKHLLSGLGQCGICGGTWVATRATYFGCGQHMGGKACTNTRLIRTSEYEERVLGELKEQMLAPDVVEAYLEEYRTEHARRAGELGRNRARIERRIGDAGRKVERLVAAIADGGAEFTAVKSALAAAQKELAEAEKERASIEALPQLALHPGLARQYRAAIEQLAVELKDEATRLEAAPRLRSLIARIVVTPSKGKRGVDLEIVRHIDEVLDLAQPDRRRA

SEQ ID NO: 9461 - protein, 606 aa, synthetic construct
MTSAYTDSNDELQQDIAVPVEHPADDVEPGARAVIYLRVSSTGQVKTDYDPEGISIPAQREACLRKAKDLGLTVIDEYVEPGRSATEMTKREAFQRMLARVRAQGDVDYVIVYMLSRMARNRYDDAIVMADLRKRGVTLVSATEAVDDSPVGQLMHGILATFNEYQSRQSGADIANKMGQKARTGGTLGRAKIGYLNHIDHSDGRVIRTIVLDDERAPFVQLAFELYDTGDYTLDELADELYDRGLRTRPTAKHPAKKVSINKLSQMLRDRYYIGYVTYKGEEVRGRHEPLIDEDLFDRVQDRITARSAAKERRRVHHHYLKGSLFCGRCRRAGVTQRMIIQRTVNSKGSEYLYFFCRNRQNSSCDAPHVNAELVEDAVERHYATIRFSQSFISDVRAQIDTVISEQEKSARLLHQQLSSQLAELDTQEENLIDLAADGTLPQTKVKAKLRDIERQRRHLNQRLDTASADLTDAARLIDVSLKLLERPEQLYRRCNDEQRRLLNQAVFHNIYIEDEEVTDHDLQEPFSQLHAIQQTQRSTRDTQHSMPAVPVPRDSKRATRQARGSSSPSGVAVLLQGLQSGTCSSSTSKVELTGFEPVTPTLPVW

SEQ ID NO: 9462 - protein, 415 aa, synthetic construct
MRHYQDYIAQHDDYDLVDIYTDEGISGNNTKKREGFNRMIADCREGKIDRILVKSISRFARNTLDCIKYVRELKELGIGVTFEKENIDSLDAKGEVLLTILSSLAQDESRSISENATWGIRKRFERGEVQVNATKFMGYDKDEEGKLIINPEQAQVVKDIYDMYLDGYSPEFIARYFNKEGVKGWSGKANWCPGAILKMLQNEKYKGDALLQKTFTVDFLTKKRVQNDGQVNQYYVEDSHEGIIDEENWETVQLEIARRKTYREEHQLKSYIMQSEDNPFTTKVFCGACGSAFGRKNWATSRGKRKVWQCNNRYRIKGVEGCYSSHLDEATLEQIFLKALELLSENIDLLDGKWEKILAENRLLDKHYSMALSDLLRQEQTDFNPSDMCRVLDHITIGLDGEITVCFLEGTEVDL

SEQ ID NO: 9463 - protein, 418 aa, synthetic construct
MTVRKIESKTRKPKRLRVCAYIRVSSMEEEQLASFENQIAYYHNHYKDRSDVDFIGVFMDRGISGKKTARPEFQRMLELCRQGRIDGIHTKSISRFARNTETILSVSRELKLLGVDIFFEEQNIHTLSSEGEVMLTVLASYAEEELTSHSFNVRWGYQRKFQRGEFHINAKRFLGYDVVDGQLVINQEEAEIVRGIFEAYISGKGANRIAKELNANQVPTVTNRQWHESTIRNVLSNEKYKGDWHFQKFYTPSLGHQTQLNQGHVDSYYMEDHHPAIVSKELWQQAQECRQRRNGTTNPAVYAKRYPYTGKLFCPYCKKSLRRQLPYRTPTWMCATYLKQGKSTCEGIKIKESLLDSWKLDLTKQYTIKKKENDRGKADYTYTCQEGAGGDNTPTRPQVEGSCLLSSVHRPRRTAIKL

SEQ ID NO: 9464 - protein, 430 aa, synthetic construct
MSTDQEEQLSSYENQVNYYREFISKHEDYELVDIYADEGISATNTKKRDAFNRLIQDCKAGKVDRILVKSISRFARNTLDCIKYVRELKELGVGVTFEKENIDSLDSKGEVLLTILSSLAQDESRSISENATWGIRKKFERGEVRVNTTKFMGYDKDENGRLIINPQQAETVKYIYEKFLEGYSPESIAKYLNDNEIPGWTGKANWYPSAIQKMLQNEKYKGDALLQKTFTVDFLTKKRIANDGQVNQYYVENSHEAIIDKDTWELVQLELARRKAYREEHQLKSYIMQNDDNPFTTKVFCKECGSAFGRKNWTTSRGKRKVWQCNNRYRVKGQIGCQNNHIDEETLERAVVMAVELLSENVDLLHGKWNKILEENRPLEKHYSTKLAEMINKPSWEFDSYEMCQVLDSITISEDGQISVKFLEGTEVDL

SEQ ID NO: 9465 - protein, 413 aa, synthetic construct
MSVKKIRVNRQKHRKRVCAYIRVSTTNGSQLESLENQKQYFENLYSNRDDIDFVGVYHDRGISGSKDNRPNFQAMIEDCRKGMIDIIHTKSIARFARNTVTVLEISRELKAIGVDIFFEEQNIHTLSSEGEVMLSVLASIAEDELRSMSGNQRWAFQKKFQRGELVINTKRFLGYDVDENGELIINPEEALIVREIFALYLAGNGTHRIAKQLNEKGVATVTGAKWHDTTIRQMLSNEKYKGSVLLQKYFHDGVNGPKKLNQGELEQYLIEDNHEAIISKEDWQAVQDKLNSRRWQQGRNKTYKFTGLLKCQHCGSTLKRQVSYKKKIVWCCSKYIKEGKAACKGMRVPEVDISNWTVTSPVTVIERDRDGEKYYSYSSQESADQYSSSGQEENQGSRILSSVHRPRRTAIKL

SEQ ID NO: 9466 - protein, 513 aa, synthetic construct
MRRKKVEGGNRLVAYYRYSGGSGQTEQSIEGQRRDCENYARLHGLTIVHEYIDRHISGKTDDRAAFQQMMNDGDKGAFDMVICWKTDRFARNRYDSAVYKKRLRDNGIEILYAAESNVEGAEGIIIEGLMEALAEYYSAELAEKMRRGMRESALKGQAINRCRSLGLTTDENKKYVIDEKTAPTVRFIFEHYAAGESSTSIVDQLNAKGLRTSQGNLFNKCSIPRIIQNEMYRGVYTSKAYNVRIEGAIPAIIDDDLWKRAQAMMKTNRQLKAKYEPKAEYLLSGKLFCAKCGCTMKGVSGHSGGNGEVYRYYACSNPQCRKRNIPKDDLEGKVIRSICDHLLQPETMELLAETMVEVQKADMEKPNAERDVLEQELRDVRRRSKNIMDAIETGSANHQLVARLDDLTQQENTLTYQLSTMEAEKPLLFTKEQYLFLLQQFYAQPTEQDDAYKRRLINTFVTNIEVSDSELLIYFNISEETENKNKNAPQLNFDKSSSTEKRLVQPKESEHTL

SEQ ID NO: 9467 - protein, 502 aa, synthetic construct
MEFIREDCIYARQSVDRKDSISIESQIDFCKYELKGGSCRVFKDKGYSGKNTDRPEFQKLLGEIRKGKVRRVIVYKLDRISRSILDFATMMELFQEYDVEFVSSTEKFDTSTPMGRAMLNICIVFAQLERETIQKRVTDAYYSRCLKGFHMSGQAPYGYQLEPTVVEGIRTKKMVADPVAADHVRLMFEMYAEPETSFGDITRYFEEHDIKIYGKSMFRTFLSQLLRNPVYAQADLELYEFFKSQGAAIVNDASDFAGTNGCYLYQGRDVKEDKDRCLKDQILVIAPHEALISSDTWLKYRKKLMANTTFQQGRKPKNTWLAGKIKCGHCGYALKATHVPNSTGYFRCTKRTENKGCPGCGKIRKEEFEQFIFSAMQEKFKDFQILHGREEKVNPKLTAYQVELAQVEAEIEKLLDTLTGANATLLAYANKKIEELDTRRQTISKAIAELSVETISPQQIKKLSYYLDNWDSIDFDDKRKAADGLISTIKATNDHVQIEWKI

SEQ ID NO: 9468 - protein, 493 aa, synthetic construct
MTAVIYARYSSDNQREESIEGQIRECTAYAEKNGITVIKHYIDRAFSAKTDNRPEFQQMIKDSGKKLFDIVLVWKFDRFARNRFDSANYKMILKKNGVHLISVMEPIAEGSQGILVETLLEGMAEYYSAELSEKVIRGQTENALKGKCTGGTGTIGYKIDDDKFYHLDPLTAPLVLEAFQRYDNGDKMVEIVNFLNDKGVRNMLGGKMTHSSVNTMLKNRRYIGELSFRDIVVPDAIPVIVPKDLFDRVQKRLDKNKRAPACGKADEEYLLTTKLFCGKCGALMFGESGTSATGRTYYYYKCANVKRRKGCNKKTVQKDWLEDLVVRETMKLIQDDAVIDKIVQLVMDVQNQENTTIPLLEKQLREVNKKLDNLMKAIEDGLYARTTKERLEALESQKGELTVKIADEKLKKPSFNEDFIRFWLMKFRKFDISQKKQRKALIEIFVNAIFLYDDRMLITFNYKDGTQTVRFEDTLTADGVEGKSSDLSSSAGP

SEQ ID NO: 9469 - protein, 536 aa, synthetic construct
MPRKKKLQEVGGLRLVAYYRYSNGGQQTEQSIEGQRRDCEAYAKAHGYKIVHEYIDRHISGKSDSRPAFQQMISDSDSHLFDAVICWKTDRLARSRYDSIIYKTRLRKNGVKILYAAETVVDGPEGIIIEGLMESLAEYYSAELAQKLRRGQRESALKCIALGGNRSFGYDIGPDKHYCINEKQAPAVRYIFEQYAAGATAADIVRELTARGYRTSRGNPFNKNSICRIITNEMYLGVYKYADIRIEGGVPAMIDRELFNRCQTQLAFNRAHGGGKGAPRADYVLVGKLDCGLCGHAMKGASATGHTGSKHYYYTCTQHVEKKCSKTSIEKNYLEQVIVDGVAKYVLTPEKISQIVDCMMELQAKEQEPKGNPEKDALEAELAECRRKQNNILEAIEEGGSARLAARLRALEEQEAQLTFALGEINNAPAPPQFSREALTFMFEQFRREEDEVDEEYRRRILDTFVSSILLYEDRAEVKFNITDQKTGDFERVILPISTNKKPPEDDDATSNSEGSTALRLVEAMGVEPMSEKSSA

SEQ ID NO: 9470 - protein, 426 aa, synthetic construct
MRVKAINKRPASVLQKKRVCAYARVSTDSRRQEDSLENQMETYERMITGNPEYEFIGVFADQGISGYCENRPQFQRMMEKARAGEIDLIITKSISRFARNTVTVLKFARELKELGVGIFFEEQNINTLSGDGEMMLAVLASFAQEESRSMSENNKWSIRKKFERGEVMITTSRFLGYDKNEYGDLIVNRKEAEIVSLTFDLYLLNVGSSRIGELLDYLGVKTVTGTTWESGTINGMLCNEKYKGDFHLQKYYTPENKRNHTRKNNGEVQSYYISENHEPIVSPEVWEKVQEVREQRKRDRNIGQDSTMKFQNRYPLSGMLICPYCGKTLRRRQVYKKKIQWLCSTYIEKGVKACKGIRIDDAELQGLNITEQTVIEEVVKNGKKHYCYTSKADFDCGIRNSTVSAEIEDGSVLPSVNRPRRTVIKL

SEQ ID NO: 9471 - protein, 523 aa, synthetic construct
MRFFSYGRKSVFSDKSDSIDNQFRMNREYCESKFSGQVDSWQQFSDEDFTGANTSRPDLQRMLSFIKAGFCDVLVVYQLDRLSRDVRDFANIYALLEEHGVMFISIKENIDTTTPIGRAMMYVTVVFAQMERETIAARVTDNMLGLAKKGYWTGGNPPVGYVRKHIVVNGKKHCSIEVDPDGARYVTQIFDTFLAYNCSLQGMETRFKNQGIRTQSGKFFSTTQLHKMLTMPYCVEATPEVYDFYAAKGCIMDPGSPREMWDGSVGVIIYGRSTEKNKKHQAQPPEKWTVCLGKHKPFMPAEKWLAVQSRFTQNKCIKDAKWPVPLLKGVLRCKCGNLMQVSRKKKVDGTCSSWYYCRKRMRQGVDACDMGQIKCDLLDEEVLELFRGITADPALIQKFVKAEAPADVPDLKAAQARVSACERKIGRLAASLALAEDSAASKYIIAEMERLDVELGALKREASLAEMESHRAAASAKDAKATAAEIAKLIHGLDGFDDKEKNAIARAVIQECTWDGERLFITL

SEQ ID NO: 9472 - protein, 480 aa, synthetic construct
MRTAIYVRVSTLEQAQEGYSIDEQIDKLKKYCAAKDWNVYQIYKDPGFTGSNTNRPGLNALISAAKRNLFDTVLVYKLDRLSRSQKDTLYLIEDVFGKMGISFVSLNENFDTSTPFGKAMIGILAVFAQLEREQIKERMSMGKLGRAKSGKAMAWNKSPFGYRYENGNYVIEPIEAQIVKRIFDEYLSGTSITKIRDHLNEEGHIGKKAEWPYRSIRSILDNATYAGFSKFKEELFEGNHEAIVTKEAYFTTQKELEIRQKEAYKKNNNPRPFQAKYMLSGLMRCGICGSTFEVNLRNVRKDGTRLKKYRCASHSSKRHNYTIKRNPNGCTSPTYDMEELENAILAQIEKLRINTDIIQEKSLTQSDVDTNSYEIKLKQLNSQLEKLIDLYLDMEIPKKTLEIRKKSIIHEIDSIETKLESLKENNNNQVSVKELMRELSNIKSSVYTLPYDQQKNLVRKLIKNIVVYPERMEVHWVFEK

SEQ ID NO: 9473 - protein, 502 aa, synthetic construct
MSETTQIGVIYARYSSDKQRDESIDGQIRECMAYAEREGITITNTYIDRALSAKTDDRPEFRQMILDSNKQAFNYVLVYQLDRFSRNRYDSAIYKAKLRKNGIRVISVKENIKDDPSGIILESVLEGMAEYYSAELSQKVMRGMTDNVLQGKWVGTVVPYGYKLSNNRQLEINEHEANVVRKLFDMYLQRHTLSEMASYMNANGHLTHKGKPFNTNSIKAIISNEKYIGVYSWGSERIENAIPPIIDKSIFEKAQHKRNLRAKKKGNRSELYQLCGKLECGRCGGNYVGSTGTSKTGALHHYYVCSNRRRKNACQAQNIRRDALDDIVISQTLAILNKPNVVNKIAKYAASSGKNLQSETVAQIDIIDAHIRDLKKSLDNYMTAIANGFISDVLKHRIEATEQELKDQIEIKTNLENTIIPVELTEDHIRFFLLKMAKENPSTLRGRARIIEAFVHHVTIYEDHIEIVFNYKNELSEFHDKTLESSLLNDLVTQKGFEPLAF

SEQ ID NO: 9474 - protein, 484 aa, synthetic construct
MKKEKVIPIDSLDLVDLYIRVSTTEQALEGYSVAEQEHRLRQYCAAMGHRIHKVHIDAGFSGASLDRPGIKETIKDVQKHLVRRVIVWKLDRLSRSQKDTLIMLEDVFLENGCDFISMMESFDTSTSFGRAIVGILAAFAQLERENIKERTMMGRQARLAKGHYNGSRPPLGYSFIPGSNDLQVDPYQAAIVREIFKLFLSGISINAIARKMEEKYPTVRTWNNTMIRRTLKNPVYIGKVNDNGILRDGIHEPLISEIDFQMANAILVHNSKIKKQSCRSRSLLTGLLYCGDCGARMHPRRIARGYPLRRYVCYSVSRTSKSMIKSDHCTNRLHPYTQEELEQIIIDEIKKLAADEDYISEVIRNSSAEVPADDTELFQERIEELNRQTDKLLNLYQIGAIELDQIQERLAALKQERESLTAALKESQTKTDINMDHLKIMSYASAFQVALESGDPEYTNSIIRLLIDKIIVLNEDIEIHWTFC

SEQ ID NO: 9475 - protein, 514 aa, synthetic construct
MRRKKVEGGNRLVAYYRYSGGSGQTEQSIEGQRRDCENYARLHGLTIVHEYIDRHISGKTDDRAAFQQMMNDGDKGAFDMVICWKTDRFARNRYDSAVYKKRLRDNGIEIFYAAESNVDGAEGIIIEGLMEALAEYYSAELAEKMRRGMRESALKGQAINRCRSLGLTTDENKKYVIDEKTAPTVRFIFEHYAAGESSASIVEQLNAKGLRTSQGNPFNKCSIPRIIQNEMYRGVYTSKAYNVRIEGAIPAIIDDDLWKRAQAMMKTNRQLKAKYEPKAEYLLSGKLFCAKCGCTMKGVSGHSGGNDEVYRYYACSNPQCRKRNIPKDDLEGKVIRSICDHLLQPETMELLAETMVEVQKADMEKPNAERDVLEQELRDVRRRSKNIMDAIETGSANHQLVARLDDLTQQENTLTYQLSTMEAEKPLLFTKEQYLFLLQQFYAQPTEQDDAYKRRLINTFVTNIEVSDSELLIYFNISEETENKNKNAPQLNFDKSSSTEKRLVRVARIELTAS

SEQ ID NO: 9476 - protein, 502 aa, synthetic construct
MEIQIREGSREQKRKLKVCAYCRVSTDADEQENSLENQVRHYETVIKANPDYEYAGVYSDFAISGFKEKRPGLQKMLADAEKGKIDLILTKSVSRFARNTSIVLEATRKLKELNVGVFFELQNINTLSGEGELMLTILAAFAQAESESGSAGAKMVYQRKYEAGIPVQYLERSFGYTKDERGVFVADEAEAVWVRKIYKMAAEGYTPASIKRYLNENGIKTVGGVQWVDSTVFRLLENEIYKGDYIMHKHFVNEERKLVRNRGEVDAWYIEDDHEAIVSPELWQKAQDALAAKRDYLAEGSVIEEFTEENYPYMNKIYCAKCGYPLYKRIYSKGNRLNWGCSGTKRYGKTFCDGINIPDGVLRSAWHFKENTYIAEKASDKGVKKFTYLKEQSWKRRHKKKQPPAIPENTEAEYPYREKIFCALCGSRLVRYVNPQSHKVTWVCSRRKRKGKDACDGTRIPDTIIKGWGEIKKDIYIQRKDDKNGKKRYSYTSKKPEGADRA

SEQ ID NO: 9477 - protein, 554 aa, synthetic construct
MNVTLPITSRAALYLRVSTTRQADVDLSIPDQRLQTAAYCERQGWSVVAEYVEPGASAMDDSRHEFQRMIERASDDDRPFDVIVVHSFSRFFRDAFGLEMYIRRLAKHGVRLVSITQELGDDPAQVMMRQVIALFDEYQSRENAKHVLRAMKENARQGFYNGSRLPLGFTLEEVEKRGHRTKKRIIVDPVEAELVRLMFDLYLQGDGTSGPMGIKEITKHLNAKGHRTRLGARYGVGTIHGILTNPVYVGEWSFNKRSSKTGQVKPQHEVIPISVPAILNRSTFDKVQKALRAKNPHNSPPRVISGPILLTGLAYCACCGSAMTLRTGTSKSGRVYRYYSCSTSGRVGKSACKGRTVPMEKLDHLVTRHVAERILMPERLEALLQSVVDRRVKADAEVQARIDELSRERTTAEDKLRRLYQLVADGITEPDEMLKEQIAKLKADRDRAHSALERIENQGAAASRLDPDKLARFGQLMRSNITEGEVPFRKAYLRSLIDAVEVDQHVVRIHGLRTVLERAVLADRATQPGVRGFVRKWRALGESNPSLHRERVAS

SEQ ID NO: 9478 - protein, 565 aa, synthetic construct
MTAPLRAALYLRVSTARQAEHDVSIPDQRRQGEAYCQARGYQLVETYVEPGASATNDRRPEFQRMIEAGTLKPAPFDVVVVHSFSRFFRDHFELEFYVRKLARNGVRLVSITQEMGDDPMHVMMRQIMALFDEYQSKENAKHVLRAQKENARQGFWNGARPPIGYRVVEAEQRGAKVKKKLEIDPLHADTVRLIFDLALNGNGRSGPMGVKAIVSHLNRNRIYTREGGRWGIGQLHRVLTRRTYVGEHQFNSRSKSKQKKPESEVVVVAVPPLIDAKVFDAVQEQLQARNPKIVPPRVVSGPTLLTGICYCAQCGGAMTIRTGKSGRYRYYACSIKARQGETGCAGRAIPMETLDTLVATHIEQRLLQPERLQEILASMLTHRQERLERRREHIAELSKRGTEADQRLRRLYDAIESGVADITDPALKERIDGLKAIRDQAQADAARAQTSLATSGEDAVTPAMVARFADIARKRMRIEGGGYRRDHLRALAQRVEVGAKEVRIIGSKGDLLRTLAAVSGGKSATLGVPSFGLKWRKGWDSNPRWACTHGGFQDRCLKPLGHPSI

SEQ ID NO: 9479 - protein, 464 aa, synthetic construct
MPEKILRCAIYIRVSTFEQSVHGKSLQAQKECLEQYATDNNMSIVSVYADEGKTARKELKKRKAIHALVEDVKMDRIDVILFWRLDRWFRNLSDFYKVQDVLDEHGVRWISVSEPGINMETRDGRLQLNVVLSIGQNEVDTTSERIKFVNESSIRQKKLIFGDANMPLGYKTGIVDGKKCMVKDPETEHMVEDFFRYFKNHNTKKGAIRYMQETYGIDFSYSMLRTMLSSEFYKGTYRGYPYCPAYLSEKEWNEMQIISKRNIKNTPSGRIYLFTGLMRCPVCGQKLVGTGCSSIINRKTGEKRTYCYYRCNRALIDHICTYRHRVSQNLIEKYLLENLEREYEKYKVRTNQISEELKKQKKAKDPEKLRKEMERLNLLFQKGRISFDYYDKEYQRLEKEYSVSADFPEEEETRNLHYVEELLKTDFRQMYDSLSPENKRSFWRSTIQEIYLNDDNTIKAVDFL

SEQ ID NO: 9480 - protein, 502 aa, synthetic construct
MSETTQIGVIYARYSSDKQRDESIDGQIRECMAYAEREGITITNTYIDRALSAKTDDRPEFRQMILDSNKQAFNYVLVYQLDRFSRNRYDSAIYKAKLRKNGIRVISVKENIKDDPSGIILESVLEGMAEYYSAELSQKVMRGMTDNVLQGKWVGTVVPYGYKLSNNRQLEINEHEANVVRKLFDMYLQRHTLSEMASYMNANGHLTHKGKPFNTNSIKAIISNEKYIGVYSWGSERIENAIPPIIDKNIFEKAQHKRNLRAKKKGNRSELYQLCGKLECGRCGGNYVGSTGTSKTGALHHYYVCSNRRRKNACKAQNIRRDALDDIVISQTLAILNKPNVVNKIAKYAASSGKNLQSETVAQIDIIDAHIRDLKKSLDNYMTAIANGFISDVLKHRIEATEQELKDQIEIKMNLENTIIPVELTEDHIRFFLLKMAKENPSTLRGRARIIEAFVHHVTIYENHIEIVFNYKNELSEFHDKTLESSLLNDLVTQKGFEPLAF

SEQ ID NO: 9481 - protein, 480 aa, synthetic construct
MAMHKVAIYVRVSTTNQAEEGYSIDEQKSKLTSYCEIKDWNIYDIYTDGGFSGSNTERPALERLIRDAKRKLFDTVLVYKLDRLSRSQKDTLYLIEDVFLENNIEFVSLLENFDTSTPFGKAMIGLLSVFAQLEREQIKERMQLGKLGRAKSGKSMQWAKTSYGYDYVKETGTLSVNPYQALIVRKMFEWYLSGMSITKLRDALNEQYGQDKEWNYRTVRVILSNPVYCGYNQFKGQIFPGTHEPIISEEDFNKAQEEIKTRQRTAAQRFNPRPFQAKYMLSGIAQCGYCLAPLAIKMGMRRKDGTRLVKYECKQRHPRKTKGVTVYNNNEKCDSGFYFKDDIEHFVLTEISKLQTDSDYIDKLFSNTDKETIDRDSYQKQIDNLTAKISRLNNLYIDDRISLEELQKRSSDFMAERAALEKELDADSSVRAVERKKDIRRVLDTKDIFMLDYEQQKAIVRALISKVRVTSESIVILWKL

SEQ ID NO: 9482 - protein, 687 aa, synthetic construct
MQSAFFFIPFFGSWRKGLFMAYVRNKKKILKFWSKKKAALYVRVSTRYQVDKDSLPFQRKKLKEYCKFLGIEDFVIFEDDGYSAKNTDRPHFQEMMSRVRDGEFSHLIVWKVDRVSRNLLDFAAMYQELKDHKVTFISMNEQFDTSTAIGEAMLKIILIFAELERNMTSERVTGIMLDRAEQGLWNGARMPVGYRWNPEIKFPEPDPEETKIVQFIFGEYERVRSTTKIARYLNHNQIASKRGGQWTSKLIRDIIRSPFYIGTYRYNLRESGRGPLKPESEWIVRENNHPAIITKEQFDRCNAIMDENGTSRDTSELRARKYVHTFSGRLVCGKCGANMIASKDRARANGWRPSMYRCAQRSRMMDCDNSKTVNESYIGPFIFNYAANLARIQKNFKNIKTLEQLEKELLKGPEFENMKVSKESLRRTFDALAFQEVGKGAYLPDINLSDGDDDYTAAEQLSILKRELDKCKTAIDRLTDLYLYDPDSMTKEEFAKKKRDLVNKIAGYEKQIEASQATGDKDDLADLEFIRKASAFLVAQRIVSKKHVDYIQMALDLDNEILKDFVDQVIDRIEILEGRVQSIRFVNGLVHEFTYSTPADLPVCQKCGGRIGSTCGCRTRTFDFAGKSYRRIKVGDPGDKFHGVAGAVCPECSAQVGRWHHWKCGIERCPICGEQLIACEHGPNGKD

SEQ ID NO: 9483 - protein, 572 aa, synthetic construct
MRKRIVGYARVSTEKQDLERQKILIREYCSNNNYDLVKIISEKVSGAKKDRESINELLAVTKDTADMVVVSELSRISREKECLTVLNTINDILENGLDVLFLDDTSKVYSAYTELNVIDIITLTVKAHSAAEERDKITARMRTGKITKLNINPYMYTGSLVPYGFKVIDNPDYKGQKCNIPARKLMVIDESKTKDVQFIYQLVLNGTTLRDAAEEVNKLGLRTQLNKPFCETSISKMIKNPIYNGRRRFKGLNLPLMDKIISDNDWNRAQICVSQNQLFKGKTTKNFNPLKGLVFCPCGYALMLHKMIRKDGSGYFVMTCCKKNDKEYRKKCRNSGIVSHVLLPTVWKCVKDTLLLSEYTTKTTSEVHRINGIIEGLEDRISGLIDEIDSHKKEMARLSKAITLVTVKGLITQYENEYVTEEAKVTEIEAKINNIRDEISNYKANITKINSITYNSQLTNLTDQEKASVYQKVLSKVVYYSIDYFRGFIVISYKNGLENIIAINKTTTGYISPLPSSFSFNAETRKIRVTIAKKQTSIKEFSLSDIENIEYSFKELEANFTPQQWDIQSQIL

SEQ ID NO: 9484 - protein, 545 aa, synthetic construct
MSGATNKITALYCRLSQEDARLGESLSIENQKTILLEYAKKNHFPNPVFFVDDGYSGTNYDRPGFQSMLVEIEAGRVGIVITKDLSRLGRNSALTGLYTNFTFPQYGVRYIAINDNYDTIDPNSVNNDFAGIKNWFNEFYARDTSRKIRAVQKAKGERGVPLTVNVPYGYVKDPENPKHWLVDPEAAAVVKRIFSMCMEGRGPTQIANQLWVDKVLTPTAYKLSHGRSTNAPAPEDPYRWDKRAVSLILERREYTGCTVNFKTYTNSIWDKKRHLNPVENQAIFPDTHERIIDDDVFEKVQEIRSQRHRMTRTGKSSIFSGMVYCADCGSKMQYGSSNNRDFSQDFFDCSLHKKNGSKCKGHFIRVKVLEGRVLSHVQRVTDYILRHENYFRKVMEEQLRVESSEKLTVLKKQLARNEKRIVDLKRLFMKIYEDNANGKLSDDRFDMMSQSYDAEQKQLEEESLSIQQEIEVQEQQIENIEKFVQKAHKYVHIEELTPYALRELVSAIYVDAPDKSSGKRVQHIHIKYDGLGYIPLDELEAKEKA

SEQ ID NO: 9485 - protein, 453 aa, synthetic construct
MIKGACYVRVSTDNQLENYSIEEQTDRLKAYCKAKDIQIVKIYTDGGYSGGNINRPALQQMLQDIGKGLIDSVIVYKLDRLSRSQKDTLMLIEDCFLAKNVDFVSVNENFDTSTPFGRAMIGILSVFAQLEKDQITERFTMGRIGRAKNGYFHGGGNTPTGYDYIDGELIINDYEALQVKDLYNRFLKGYSIHNCWQYMHQKYGGWSNEVSVRNVLKNELYIGKVKFKGVAYQGNHQPIISEEIFRQVQDLFNSSRRTSDTFKRSPFKANTLLSSLVYCGKCGARFHGEHGNYSCYSRTKGDKKYIVDPNCKNKKWKIEELNKLVLDYITRLDFSKLQNSHPAPVPVTDYSLRLTEIDKQIEKLIDLYQVSGIPLESIQKKMDALTKEKEALLNVSKPKNVPITTLAEMITARDTLMSLADTGSLDEKRACLTMIIDRITIDDDNVNIKLKHL

SEQ ID NO: 9486 - protein, 526 aa, synthetic construct
MPKVTIIPATVNPLTHLPKAAVQKRRAAGYARVSTDSDEQFTSYEAQVDYYTRYIQSKPEWEFVKVYTDEGISGTNTKHRDGFKEMISDALAGKIDLIVTKSVSRFARNTVDSLVTIRKLKENGVECYFEKEGIYTFDGKGELLITIMSSLAQEESRSISENITWGQRKSFADGKIHLAYKHFLGYKKGEDGRPAIVEEEASVVRLIYRLFLDGKTQAGICRYLEDLEIPSPSGKAKWSKTTVTSILTNEKYKGDALLQKSFTVDFLQKKTKQNEGEVPQYYVESSHPAIIEPDEWDHVQAEFARRKALGNAYSGKSIFSAKLVCEDCGGFFGSKVWHSTDCYRRTVWQCNNKFKGGERCLTPTVDTETVQQLFIKAYNQMMGNRKQIIEDCEIMRKKLTDFKSLDADIERQFEETQIVAELVKAAVKDNAVTAQSQEAYLKKYEALTKRYETAAAELERLQNLRTLRSQKDKAMALYIRTLKKQPTVLSEWNDTLWTVMVEKAIVHRNSEITFEFYNGTKVKVRQ

SEQ ID NO: 9487 - protein, 464 aa, synthetic construct
MARSVTVIPARSQKVRTGHKAVQEKKIRVAAYCRVSTDQEDQLHSFEAQVEYYTKYINEHENYEMAGIYADEGISGTNTKKREQFKKMIADCEDGKIDLVITKSISRFARNTQDCLAYSRKLKNLGIGIIFEKENINTLDSTGELLFTILSSLAQDESRNISENCKWGIRTKFKNGEMHLNTFKFLGYDKDENGKLVINKEQAKTVRRIYRDFLIGINPAQIAKELTEEKVPGCLGQTKWYPSTVTGILKQEKHMGDALLQKTYTADFLTKRQVRNNGEIAQVYVKDSHKGIIDKQTWNAVQEEFDRREKFMESHGTDRYSYGADCMPFCEKVFCGDCRSLFTRHSWRSRGIVQWQCKNHRKDGKVACTNAYVDNADLEKGFVKAFNRLVTDRDKHMERWQQMKTDGTPLEKIRAGQMMEAVGNEPLTRFVPEIAQLVLCEVTVLGAKKYEFFFLEGSRVKVSV

SEQ ID NO: 9488 - protein, 502 aa, synthetic construct
MEIQIREENSRQKQKLKVCAYCRVSTDADEQENSLENQIRHYKEVITSNPDYEYAGVYSDFAISGFKEKRPGLQKMLADARKGKIDLILTKSVSRFARNTSIVLEATRKLKELNVGVFFELQNINTLSGEGELMLTILAAFAQAESESGSVGAKMVYQRKYEAGIPVQYLERSFGFKKDERGVYIADEEEAVWVRKIYDMAAQGYTLAAIKRYLNENNVKTVGGAKWLDSTVLRILENEIYKGDYIMHKYFVNEERKLVRNRGEVDAWYIEDDHEAIVSPKLWQRAQDALEAKRDYLAEGSVIEEFTEENYPYMNRIYCARCGHPLYKRIYSNGNRLNWGCSGTKRYGKSFCEGINIPDGVLRGAWHFDENMYIGEKQTDKGKKEFTYLKEASWKRRHKKKEPEPIPENTETEYPYREKIFCGSCGSRLVRHVNTKNHKVIWVCNGRKRKGKDFCDGTRVPDTIIKGWGEIKKDIYIQRKDDKNGKKRYSYTSKKPKGADRA

SEQ ID NO: 9489 - protein, 502 aa, synthetic construct
MNNKICMYLRKSRADEELEKTLGEGETLSKHRNALLKFAKEKKLNIVEIKEEIVSGESLFFRPKMLELLKEVEAKKYDGVLVMDMQRLGRGDMKDQGIILETFKNSNTKIITPQKTYDLNNDFDEEYTEFEAFMSRKELKMINRRMQGGRVRSVEEGNYIATNPPYGYDIGFINKNRVLKINEYESNAIKLIFKLYLNGNGASFIANELNNLGYKTKLGNNFSNSSVLTIIKNPVYIGKIAWKRKDIKKSRTPGKVKDTKTRDKSEWIIADGKHEAIIDMNTWDKTQEILKGKYHIPYQLTNSPANPFAGLITCGVCGKKMVMRKARGINRLMCIYKCGNKSTRFDLVESDCFEALKEHLKNYTAEVENELIEENTNIYTYQVSQLKKELTTLNNQRLKLFDLLERNLYDEDTFLERSKNINDRIDTVSSTLKSIEKLLKKKTKSSYQEDIQFFQSVLDAYNETEDIAKKNSLLKTILYKIEYTKLNRSKEHVIKVFPKLRK

SEQ ID NO: 9490 - protein, 530 aa, synthetic construct
MIAAIYSRKSKFTGKGESIENQIQLCMDYAKNLGVNEFLVYEDEGFSGKSMDRPKFKEMLKDAKDKKFDYLICYRLDRISRNVSDFSTLIEDLNKLNISFVSIKEQFDTSTPMGRAMMYISSVFAQLERETIAERVRDNMYELARTGRWLGGMPPYGFISTQINYYDENMNQRKMYKLKVDEDTIEIVKLIFDKYLELRSLSKLYKYMYENGIKGTRGGNLDPSALSLILKNPAYVKADKSVVDYLRKSNIDVMGDIDNIHGILTYAKNTDSPIAAVAKHKGVIDSDKWIEAQRLLNANKAKAPRAGTGSKALLSCLLKCSKCGSNMRITYKNSKSGTIYYYICGTKKSLGVSACDCRNIRSDKAESKVIDELKNKSIKSIMSSYKDSKLENSKNSKNIKTEINSINNQIKEKETYIDNLVMQLAKVTESSASTFIINKLESLNNDLSNLKSQLESLNTMSMENNQVDININMLIDNLNKFNKEIDTSDINKKRLLLSTVVDYMTWDSDTDTIKVNLIGINSSNTIASGK

SEQ ID NO: 9491 - protein, 502 aa, synthetic construct
MKKVAIYSRKSVLVEGSVSIETQINMCKDYINNKFHNAKFKVFEDEGFSGGNTNRPAFQKMLRMAQLNEIDIVVCYKVDRIARNTLDFLKILELFKENNVELISISEGFDPNTQMGKVMLTLLASFAEMERTNIQQRVKDNLLSIAKKGKWTGGSPPTGFKNGLNGGLEWNKQDMILDVFNMKYEKEKNSNIIKYIKEKYNHNFLGGTLATTLRKPIYVKSSPSVSLYLKTKGYIVQGDEDNIHSYLTYTDKETKYAIVSDIVGLIEPSVWISINKDMDKNISREGNRFSKKFWLTKTIRCKYCGQTFCGQTKTTKTKHYNKHGEEKIYISTYSYYSCRDAVRGKLKTCTNTKRVKQEILESKVSELIHLLKDKKTFNSSYFSNKIDNSSKIDTIKKQIKSIDKTINNLTDKIALLSNEASLIFISKLEELVKEKSILKDNLLQLELQELNSNTKKDSSLVYNNILAFNDELSVDDKRKIAMSLFKEIIYDPETDSLDVTFM

SEQ ID NO: 9492 - protein, 628 aa, synthetic construct
MKAAFLIRCSTKNQDLNRQTRDLTRLAKSMGYEYDLENLVYGEKITGKDDVTKKNRDSIDRLLRAAKEQRFNVVLVSEVSRMSRDPASGRIYVRLLINMNIPVYFKDIDLWTINPETGKKVRDAELVIGAAFDAAWKYLKSMKTQIASARRNELDNNRISIGQPYFGYKRYEGTDKSKKNQIVVNEEEAEVVQAVYNEYLKEGATLKSTALAITNMYGEKLNRKFSLGTIEHILTYESYATGIKKVNLKDPDTDEVEVFDVSTPIIIDKELYEAATNKRKKNRVKDEPYPNQQVYLLSKLIKCPDCGYTLTPRRKAGEFGQTYRLVNGKPAVSWLCMSGINNITDCTNRTSIANEKLEPIIWELVKKELIGYANMNDEKREEQIRECEEKIEYQNYSIQNFTKEIDKLKKRLSTAYQFSINAAEMAGDDEDMRTMAMEEFNRTAKGVRQEMKNFEKSIEQAKGELEKLRDLKTFYSQPTLPKDYLEQIEGNFTEKRNLVKQLITKIVPYRITTFKKKERESGVKTCNKMITVKNGAVLLEVYTIGGVYNVFYNANSKFQVKTAYYVHGEYATFQNGIRKYPAYDEGEYFVISNANMVMETDDIDEVVTVNEFVDIAIANNWVIEYQYQ

SEQ ID NO: 9493 - protein, 580 aa, synthetic construct
MYNMSPYSLSRSFRDKPCRAVIYGRASTEHEAQVKALQNQMQWYDDVARFHPQWNVINRYIDQGITGTQVYKRDAFMRMMEDAKQQKFDLIVTREVCRFARNTVDALVCVRQLAAIGIEVYFVNDNIWTLDGDGELRLTIMATMAQEESRKISERSLAGQRVSREKGVLYGNGNIFGYTRNKLTKQFEIDPNQAETVKMIFDLYDSGMGETLVAKELTRLGRKNGVGKVKWDAGKVSKIIKRKNYLGYTVYCQSYSNNYLEQKRIKRDESEFVYVKGGFPQIISEEQYERCNAIRRSRTKRLTDEKGRTRSFGIQQAQNVWGRKMRCRCGSPMLRHRWRTNNAGKPIYGYECKRHHDTPRIRLQNEQGNPTPICEIKPVGQSKLELMASKIFERVWGDQREIVLQTCKMLDACYKPDADRRADLMKAKDDSIQLLQQQLDDLVVVRARGEIEQDKFLQRTIEIQQQMEALRQSKAQIASEDYNPGRLDMEAIEAALCEAVEMHDGLVSEDFIDLFVSQVTPLSDSRFAWCLDFSPQPTVAFLNLDGQRKYTTCSMDSKLHFGPFADEEGHTIPFPGSLRR

SEQ ID NO: 9494 - protein, 579 aa, synthetic construct
MAKCILLVRVSTDSKKQELSLREQESELFELALSKGYKEEDIIAICKQESALKRRYATNDEKDAIEIKQQGLQEMEDAIKNDSSINCVFAWEISRISRREKVLFDELEFLTDRKIQLIILKPYIELLNSDGSLNPSSKMQFSMFAALADAEMRNKSDRFRRTKESRRKEGKYVGGWLPYGYTVEPSTKKIIINEEEAAIVKYMFNEYLKGRTSIYKLANELQERGIIDYDNKHSAFTFAYTILRNYSYAGLQSTVRQKGRKASTNVYPAIVTKEMVDKAIEMSEQAKSKPKTDVKNIYYCKSLLKCADCGRIYVARLNKAVYHCSNENNKCNNAEISINLADTILWNVAMTLKISQMLHQSEEDKTAYQTQIEVLKQKIEKINIDIENNNKAYTLLNKRIIMQKITEEDGELIEKELDSTKKELEKKLNEYNNKVAEIEQILFNMNTSIAFNHINVDNIADIEDDSLRYEIIHEMIDYCMVEKVADSIVKLELYAKYIDAAYTYYVTTRNRKIYNKDFRIEEAYTSNTTHLVDFKILQRYKRQGKANKEYQKQYYLKNREKLIKQSVEGKRRRKSKPEN

SEQ ID NO: 9495 - protein, 541 aa, synthetic construct
MPKAISYIRFSTKIQSVGDSTKRQSKYINDWLKRNPDYYLDESLRFQDLGISGFSGANAKSGAFGEFLAAVESGYIEAGSVLLVESLDRVSRQDIDTAGEQLRKILRSGVEVVTLVDNEWYTKESLKDSLSMIKAMLVMERAHEESAMKSTRLRSMWAAKRERAANGEIMSKRCAAWLRVSEDRSHFEFIHENVKAVQRVFQLRLEGLSHIKIAKKMNDEGFYTLNQHKSIKGGWSQSSVTELLSNRSVIGFKVPSKSMAVKGVSEIPNYYPSIITDEQFYAVQQLKQGSGRKPSSDLPLLTNLFKGVLRCSECGFIVVVAGVSAKRSGIYKCSMKSEGRCNSVGFSRLQTDRALVQGLLYNTNRLSLNRDNGSAIGSLQSELEQLQKQRERLIKLAMLADDTESMAKDLKALNSQIKDAENAVSEVHQREQSSQLETISHLDLTVKKDRIEAQIIIKRIVKEIRLNTAGKKCDVFLHNGLKLLNFPLDRVVDGAQWLEILPLIDGDEFDFEGFTTKPRHIALEEAPEWVKEMEEQPSQPL

SEQ ID NO: 9496 - protein, 502 aa, synthetic construct
MKKVAIYSRKSVLVEGSVSIETQINMCKDYINNKFPNAKFRVFEDEGFSGGNTNRPAFQKMLRMAQLNEIDIVVCYKVDRIARNTLDFLKILELFKENNVELISISEGFDPNTQMGKVMLTLLASFAEMERTNIQQRVKDNLLSIAKKGKWTGGSPPTGFKNGLNGGLEWNKQDMILDVFNMKYEKEKNSNIIKYIKEKYNHNFLGGTLATTLRKPIYVKSSPSVSLYLKTKGYIVQGDEDNIHSYLTYTDKETKYAIVSDIVGLIEPSVWISINKDMDKNISREGNRFSEKFWLTKTVRCKYCGQTFCGQTKTTKTKHYNKHGEEKIYISTYSYYSCRDAVRGKLKTCTNTKRVKQDILESKVSELIHLLKDKKTFNSSYFSNKIDNSSKIDTIKKQIKSIDKTINNLTDKIALLSNEASLIFISKLEELVKEKSILKDNLLQLELQELNSNTKKDSSLVYNNILTFNDDLSVDDKRKIAMSLFKEIIYDPETDSLDVTFM

SEQ ID NO: 9497 - protein, 480 aa, synthetic construct
MTMHKVAIYVRVSTTNQAEEGYSIDEQKAKLTSYCDIKDWNIYDIYTDGGFSGSNTERPALERLIRDAKRKLFDTVLVYKLDRLSRSQKDTLYLIEDVFLENDIEFVSLLENFDTSTPFGKAMIGLLSVFAQLEREQIKERMQLGKLGRAKSGKSMQWAKTSYGYDYVKETGTLSVNPYQALIVRKMFEWYLSGMSITKLRDALNEQYGQDKEWSYRTVRVILSNPVYCGYNQFKGQIFPGTHEPIVSEEDFNKTQEEIKTRQRTAAERFNPRPFQAKYMLSGIAQCGYCLAPLAIKMGMRRKDGTRLVKYECKQRHPRKTKGVTVYNNNEKCDSGFYFKDDIEHLVLTEISKLQTDSDYIDKLFSNTDKETIDRDSYQKQIDNLTAKISRLNDLYIDDRISLEELQKRSSNFMAERSALEKELDADSSLKAVERKKDIKRVLDTKDIFTIDYEQQKAIVRALISKVRVTSESIVILWKL

SEQ ID NO: 9498 - protein, 510 aa, synthetic construct
MSYFIYARKSRKDAELEALGIDVLERHITTLLELAKTLSLPIGAIYREVVSGDSIDARPVMTQVLSEVEACMWDGALVMDVDRLARGDTIDQGRVQRAFFYSNTRIVTPNKTYDPANEYDNEYFEFSLFMSRREYATIKRRMQRGRERSSSDGYYVGNVAPYGWERVIAPDGKHYSLAPHQTEAPVLDLMYDLCGNKQYGYQKACTYMSNMGILARSGKPFTPSTLKGIISNPANIGKVRWGHRKTVRAVKDGRVVKSRPKATDYILSDAAWAPRISPDLFKRANQPKGCFSAPVRNDRPIQNLFAGLVRCSQCGRLMVRKKAQTKTPYDMLICQYTECSTVGIRIDELEEALLGWLKDYIAKYEFSDTHEEDTAAIAAKELIVTNFEAEHQTLLKQRESLFDFLEQGIYTKEIFIERSNALEQRIRDCMNNITAAREDLHTTIARQANRKNFVPKCKNLLSEWDSLTVSEKNSALRQLIDRIVLTKTKRNKKNQKNSEFTIDVYPKVPK

SEQ ID NO: 9499 - protein, 416 aa, synthetic construct
MAHISVVTPVRSPAPKLVNVAAYARVSTNGTEQLASLSAQVSYYSRLIQSTPGWAYVGVFTDEGITGTSTKSRQGLADLMDAARSGGVDIVLCKSISRLARNTIDLLATVRELKDLGVAVRFERERIDTLSADGELLLTLLASFAQEESRSLSQNVKWAIRNRYKSGGTNSFVVYGYKWADGQFTIIEEEAKIVRLLFANFLDGISPEKTATMLNAEGKRSRGGGRFYGSVFRRMLENERYKGCQMLQKMYRPTIQAPTRSLNDGELPRYWVDNALPAIIDETTFDAVQKEIAHRREVGPAATPSKNTGVFTGRICCGACGKNYQRKTRTYKSGTSYKFWRCWSACTGNGNPCRGHNLRETLLEHACADMLGTQGFDPVQVGEQVVMIEAFEHQLTFHLADGTMMPVGLTSEGWLA

SEQ ID NO: 9500 - protein, 616 aa, synthetic construct
MTDYSKITALYSRLSVGDEDRDGGESNSIQNQKIFLENYARGQHLTNIRHYIDDDESGRFFDRSAYSRMMDDVENGKIGVCIMKDLTRWGRDYLQVGNAMEIFRRNNVRFIAVNNGIDSEKPDTLEFAPFINIMSEWYAKDISKKVKTGIKTKGMSGKPIVTEAPYGYAKDPDNKDFWIIDEEAAEVVRLIFRLFIGGKNRNQIAVYLTQEQIPTPTFYMKDRGRGTCKNKALNEDNRCKWNKATLTNILTRQEYCGDVVNFKTTKHFRDKHNHYVDRSQWHITENVHEPIISRSDFETVQRILENAPVRRPNGDGEIHPLSGLLFCKDCGAKMHIRIDYRNGGKRHVAFCSEYHKGKAKNPKCHSPHIMDADLLMQTIAEVLKKIEDYSISNRAEFEALVKKNLAMQQTDQTKKQQKRIPQITTRLEQIDKVLNKLYEDNALGAISQDRYEQMSQKYSEEYYALKAELATLQEQLSAYENAGGRAQKFLKLTERHAAFTELTPAILNEFISRIEVHERDQKRARYAIQHISIYFNYIGKFENEVTQLAEPTEQEIRQMREEIEEAKKEKSRAYHRNYSREYRAKNLEKQREYDRMKAREYRARRKAQAAAAQPTQ

SEQ ID NO: 9501 - protein, 576 aa, synthetic construct
MKKNFKMPGSSSETPIRVAIYVRVSTVYQIDKDSLPMMKQDLTSYCKYILNTDDFVIFEDAGYSGKNTDRPAYQKMMSQIRQGLFTHLLVWKIDRISRNLLDFANMYAELKDLGVTFVSKNEQFDTSTAIGEAMLKIILVFAELERNMTSERVTATMINRASNGVWNGGRIPFGYSYDKPTQVFSIDPEENKVYNFMVETYEDTQSIVHTSRRLNEAGYRSRNGNMWSPVAVWTILRNPWYKGVYRYNYYKIPGRKAIKDESEWVIVENHHPASIDPDRFDRIQATLDKNARYRNTPGRKTAQKNVHVFSGLVWCAECGSAFTASPGKLHVSGYRPSKYGCPNVRKTKTCHAKYTSDVVLGEFLLNYILNILNAQKQFAYIHSTDDLQKRLLHGSTFSNVDHVDPDGLASLLNMLEKCSGSDPVLLKRPRSKPKMDPELKRMMADQKKQQRALDRLNDLYLYSDDSISEREYLVRKQQITDRLQEINEAIGMMSQEPWMRTMNDEEFIRQASSFILTQKLADKQYIYYENLAESLDPEILKNFFVSILDSIILRDGRPETVVFRNGLSHTFTYKDS

SEQ ID NO: 9502 - protein, 623 aa, synthetic construct
MKAAFLIRCSTKNQDLDRQTRDLTRLAKSLGYEYDIENLVFGEKITGKDDVTIKNRESIDKLLRAAKEQKFDVVLVAEVSRMSRDPASGRVYVRQLINMSIPVYFRDIDTWTINPDNGKRVRDAEQVIGAAFDAAWKYLRSLKTQVASGRRNELDNNQISVGQPFFGYTRYGGKDKSKKNCWIVDEVAAEVVVFVFNEYIKDGSTLKSTALATTAKYGELLGRKFSVGSIEHILTYESYHTGIKKISLTDPDTEEIEVFDVKVPILVDTELFEKATAKRKNNRVKSEPYPKQTTYILSKLLKCPYCGYTMTPRAKGNDSRGKTTNERYRIINGKKALSWLCMSGINNATSCNNRISVANEKAEPIIWELIKKELIVFANLNNEERELKVEELTEKITHLASNIDNYNAHKSSLQKQLSKAYTVATMADESVLAMAMTEFNKTARNIRKEMSDCDSAIEQIKGEIDNLVNLKIFYSQPNLPSDIIEKAETDEAEKRKLVKELINKIVPYKITTFKKQHRDRGLVTLNFGVVLLEVYTVNGIYYVFYNANDRGDIRQAYYISGVFAKFQNSINKFDAYKEGEYFVISNADMVMETEEIDELITVNQMVEIAINNGWVLSYCYKQK

SEQ ID NO: 9503 - protein, 578 aa, synthetic construct
MRKVSKIEPISPSLPPRKKVAAYARVSMETERLNHSLSAQVSYYSNLIQSNPEWEYAGVYADNAVTGTKSSSREEFQRMLEDCEAGKIDIILTKSISRFARNTVDLLEAVRHLKELGIEVRFEKEHINSLSGDGEVMLTLLASFAQEEVRSLSENVKWGTRKRFEQGIPNGRFLIYGYRWEGDHLVVEPEEAKIVRLIYDNFLKGLSAEATEKQLEEMGVKSMKGMHFPNSSIRAILQNITYTGNLLFQKEYTLDPISKKTRKNHGELPQYFVENTHEAIIPMETYQAVQAEIARRQELGALANWSINTSCFTSKIKCGLCGASFVRNTRKNRAKTSQLGERYTFYGCGTNKRKGAHCFSGTIREDVLKEECAKALGLPEFDEDTFSGRVAKVTIPATGTMVFELTDGTSFEHHWSRNAKKESWTAERRKAVSEYRRSRETGWKCYHTFTHFIKCGRCGANYRCQTHKRVDGTVVRSWYCSSPTAVDCSKVGIREDTLKALIADVMGLPEFDEELFNQQLAYATVPADNEIAFHFRDGHEVSRTFAQKRQMPRHTEERKKHMSEVMKAKWRERHAEND

SEQ ID NO: 9504 - protein, 571 aa, synthetic construct
MKTTDQPQVKQYVIYSRKSKFTGKGESIENQIELCRQYIAMHFGEDEAEHALVYEDEGFSGGNLERPQFKQMMKDSQKIEFAAIVVYRLDRISRNIGDFAKLIEDLGDRHIDFISIREQFDTSSPMGRAMMYIASVFSQLERETIAERIRDNMHELSKTGRWLGGTTPTGYASESLSSVTVDGKVKKACKLKPIPEEIQLVKTIFSVFTESGSLSKTDQYLLEHRCVTKRGKQFTRFAIRGILTNPVYMIADDTAYQYLKENNVDLFAEPSEFDGEHGIMAYNRTLQRPGKATQIRPMEDWIVAVGKHPGIISGANWVRVQSMLDVNKSKSYRKPRSNVALLSGLLRCGECGDYMRPKLTGRTNANGELIYTYMCSTKERSHGTVCSMKNCNGNTLDAKIVEEIRKVATDKKDFVQLLSKTKKVINDNKASYEAELTLLVKNHAETEARIKRLVESLSVASETSAKYVMEQIDELHRQSEQEQTRIAELEKLARQSNALSQNLFFYRDMIESFADTVDSTTIEERRRLLRTIVKKVVWDGKNVYVYLFAEDGELNLPPIGQLMCPSGEDSE

SEQ ID NO: 9505 - protein, 504 aa, synthetic construct
MEDFIYARQSVDKEDSISIESQIELCLREVGNNPHRVFRDKGYSGKNTERPDFQDMMAAVRAGGARRIIVYRLDRISRSVLDFANVISELQKYGVEFVSITERFDTSTPIGKAMLMIVMVFAQLERETIQQRVMDAYRSRSRKGYYMGGRVPYGFELENTVMEGIKTCMYKPIPEQIQVVQLIFSLYAMPQVSFADVVRYLSQNGIKNPNGKNFSRMRIRDIITNPVYAKADASIFEFFHGQGTEIINDISQFIGTNGAYLYTGNKAAKRKSISLDGHVLVLAPHAGCIDADTWIRCRRKCLNVRQIAKPVKAKNTWLAGKIKCIDCGHALSLKSYPRKRSADARYYICNSKYVSASCDGVGAIQASGIEDIVFDEMSHKLKEFNKLSFKEKHGDPIELTKLKIRAEEIEKEIATLIDKIVSASTATMEYINERIDALDEEKKTVKEKIAQMSAEMYDRQNIGVISDYMSKWNDISIDDKLTVVDTLIESIHVGHGKVKIAWKI

SEQ ID NO: 9506 - protein, 544 aa, synthetic construct
MEQKVLQRKVNYIAPTLNTETESETAYRQIRVAAYCRVSTQMEEQLNSYEVQVKHYTDKINSEPKWSFAGIYADKGISGTSAKKRDEFMKMIRACKRHKIDMIITKSISRFSRNTLDCLKYIRILKELNVDVFFEEQGLHSKDAGAEFYITIYGSIAQSESENISANVKWGKQQSAKEGKVTFSYNSFLGYKKGTDGKPEIVEDEAKIIRMIYDKYLGGDSIRKIADYLTEKQISTPTGKKEWYYGTVKSILSNEKYKGDALINKIYVVDCISKKVKKNDGERAQYYVENNHPAIITPEKFNRVQEEMARRSSKKKVKQVGTKTELGKYSGKYALSEILICGECHTPYRRCTWTTKDGNKKIVWRCISRLDYGKKYCHHSPSLEENILQSAIVRAVQNNLVKCSELLKKLKQHIRTGLSSEETEDKTIDIQIEIARLDKEYVDLLNRITSDMENAEALESQLEKIVLKKHSLQKELQIYENSSSRQTNTKTRLDEIFQIIEGLKNHPMEFNDVIIRQIIDCVIVESKEKIKVVFVGGYEVEQDL

SEQ ID NO: 9507 - protein, 452 aa, synthetic construct
MGYYLDEGISGTSLKKRDEFKRLIKDCENRKIDCIITKSISRVARNTSDLLTVLRMLKTLGVRVYFEEQALDSDKMNAELFVTLPGLAAQQESINISDNMRWSYRKRMESGDFNTTYPAFGYRISNNEFIVNEDEAKTVRTIFALYLQGMGKQAIANTLNENNIPSRKGKWHCFSVDYILNNERYMGDALLQKTYTTEFFPFVRKKNKGECAKYYIENSNVAIISKETFNAAKELQRRKSVQHSNASYPLSRVIRCCECGHNYRRIVTNNKVYWGCSYKASLKTDCTTQTLLESDIYSAYLAMMSKLKKHKSEILDNMINQLEYIEDTTNPNQASISAVDKQIADLSTQNLMIARLRTKSILSESEFSKQALEINSKISKLRSKRKLLLSDDSAEETICNLKHLSEIIDKFDYCDGFNEEMFSDTVEQIKAGYDNKLVFTLSGGLELTEIVK

SEQ ID NO: 9508 - protein, 635 aa, synthetic construct
MPKITRIEPGIKALPAKKKVAAYARVSKDTERLMHSVSAQVSYYSDLIQKNPEWEYAGVYADFGITGTLVAGRSEFVRLLEDCEAGEIDIILCKSISRFARNTVDLLNTVRHLKDIGVEVRFEKEQINSMSGDGELMLSILASFAQEESRSISENVKWGIRKRFKNGEIGAANKHILGCQYDDEQKKYIIIPEEAEAVRWVFQMYIDGVTLRDIADRMNKAGIRTTLGNDFQEASVRQLIFNEVYAGDIRRQKCYIEDPITKRKVPNRGELPQYYITDSHEAIIDRNTYAKVKAEMERRSSLVNPTYCFTGKFKCAVCGANFTRKKSNVRGKEYVDWICRSKKEPGVTCKSHNYPEHKLMEICAELMETDGFDEAAFTESVKSITSLADGSIEIQLYGGKIRRWQMPPKPIKPKKTKPESKRPKHLFDGKIFCGKCGRRFGRAMSDTTYGVHLYWYCRAKSNHGITCDSVNYPDTEIRDIFCRVMGKKTFDEDFFTKTVDRMVVQAFGSIDFHLKDGTIKTFETLKLRSNRHETTSTDEFTGMIQCACCGNLYHRYCRYGKYVYWRCSGKHKVRTECNGQDMADFNIRKVSAYILGMDDFDGKAFTEQIDHITALEDGSLEYIFKDGRAKKWQRT

SEQ ID NO: 9509 - protein, 558 aa, synthetic construct
MSKRVRTLLRVSSRQQLHDDDIPIQRAEAEQFIAKQKDWVFDKEYLEKGISAYHNGVDDREVLQEIMQDAKQGEFEILLAYMSDRIGRQEEYSFYVAELNRMGIEVWTIKDGQLKTEEHIDKLLNYIRFWQNEGESKKTGMRVHDTMVEMVKDGRFVGGKAPYGYKLVLSGEISNHGRALHKLVIVPEQADIIRQIYSYAVNQGMGYQKIANTLNENGVPAPILDKWKGGTVRSILTNPIYMGYIAYNRRKNGHANSTRLDRKEWTYAREQNPEIAIVSQELWERAQEIREARKNKINAARQATNELYMEQYNVPFSTRGRLALTGMVYCGYCGKRLKNTGYANHWTCKKTGEKKVSYVGRYGCPNGCKPRSTYSQEYLESIVFATVETYLENLKKIDISKELEAMQEQQTKDIKREIKDLEKTIKSLTADIETLEEKLPEAIRGEFAFSVDKLSAIISDKESLKKEKEIQKNSLQKQLEEISLQSNELMTFVEAMPKWNEIFSQADVQTKQMILSTLIDKIIVKDDDITIKFKIRLDNFLDEKLLESSGVDVPEQRL

SEQ ID NO: 9510 - protein, 503 aa, synthetic construct
MAGRITQVTFGSPQLPRDKNVAAYCRVSSGKDAMRHSLAAQVSYYSELIQNHAGWEYAGVYADEAVTGTKDSRKNFKRLLSECRAGKIDMVITKSISRFARNTVTLLETVRELKTLGVDVYFEEQNIHSLSADGELMLTILASYAQEESRSASENQKWRIKKNFEEGKPWSSTLLGYRNVNGRYEIVPEEAETVRMIFAWYLEGAGATTIRNRLNAMGIKTRLGNSWSRSPILKLLRNYAYTGNLILQTTYREDYITKRSVKNNGEKPMYHAQGTHEAIIDMDTFNRAQEEIQRRAEHFASPDGNKSTARYPFTSMVKCSRCGKSYVRSGSPKYRIWTCHTRRKDGLNCCGAEIIPEEELFRLTAEVIGGKVTEDAVRDKITVIRAEKDRTLVFCLKDGKETVKQWREHEIKYICTEEQKRQISLKNSGRKRTDEQKRQQSERMKEYWKTHEFTEEQRRLISEKKKAYWSDREASAEHREMLRQRMKEVRTMRKNGGKEENDG

SEQ ID NO: 9511 - protein, 525 aa, synthetic construct
MANVTVIPATRNIHTGIRKDAVTKRKTAGYARVSTDSEEQLTSYEAQVDYYTSYIQSRPEWEFVKVYTDEGISATDTRHRDGFNEMIKDALDGKIDLIVTKSVSRFARNTVDSLSTVRKLKERGVEVYFQKENIFTFDSKGELLITIMSSLAQEESRSISENVTWGKRKRFADGKVSLAYSTFLGYKKGEDGQMEIVPEEAETVRLIYRMFMQGKTPYAIAKYLTEQEIPTPTGKSGWRHRTVENILTNEKYKGDARLQKCYTVDFLSKKRKANEGEVPQYYVEGSHDAIISPSEWQLVQLEMERRRAAGRSNCCSPFSAKLKCGDCGAYFGSKVWHSNSKYKRTVWQCNAKFKGEHKCTTPHLYEQRIQELFLEALSSLMENRDSLIDDCRAVMHVLGDCEAINREMEEVRSEMEVTTGLIQKLIDENATRKMDQNDYRKRYDGYVSRYAALESRMNGLEKERKEREFKYDIFSGFLFELGEIHELPLAFDDRLFYQLVDYATVYSDGRVVFTFRNGTEITTEM

SEQ ID NO: 9512 - protein, 535 aa, synthetic construct
MEKVYNAYLSEKINNSFGGYAIYLRKSRADAETEARGEGETLARHEKMLLDLAEKMGIKIDKIYREIVSGETIEARPEIQKLLSDVKKGIWKGVLVVEVERLARGETMDQGIVAKAFKISDTKIITPMKTYDPNDEFDEEYFEFGLFMSRREYKTINRRLQRGRVSSVNEGKYVGSVAPYGYERVKIKGDKGYTLRKNSESNTVKIIYDLYAYEDLSLHEVVRRINEMGLKPRKNDKWCVASVKDILANPVYIGKVKWNWRKEVRVYKNEKLIKTRPRNDEYILKDGLHKAIIDDRTWKIVEAKRSLNKLPIPRVNTVQNPLCGLVYCAKCGKKMKRRPYTDRSKEPTIYCDNPKCDNISSKLHFVEEKVIEGLRKWLEHYQLDYKEHIEKINCSRIESIEDTIKSLQEEVKKENDKLLNIFNFLEDGTYTKEMFKSRSESVSQNVARLNNSIEEYEARLEQEKIVDKGKAVLVPKIENLLDVYNLLKTPEEKNELLKTVITQVTYLKTEKAIKKNSDPTNFIINLYPKINKANV

SEQ ID NO: 9513 - protein, 521 aa, synthetic construct
MRVAIYCRLSREDDDKLHENDESESIQNQKSMLINYAIERSWDIYNIYCDEDYSGIDSERPEFNKLLEDAKNHKFDIVLCKTQSRFTRDMEMVEKYLHNKFVEWNVRFVSLVDHVDTLDKGNKKSRQINGLVNEWYLEDLSENIRRTFDSKRKQGLHIGSFVCYGYKRSPENKNKLVIDEESSDVIRLIFNLYEQGNGITKIAQILNDKGILTPTKYKQSQGINFKNQGKNIDYWCESTVSKILKNEVYIGNLVQGYNKKVSYKSKQMKNQPKSEWIIVENTHEPIITREQFYKVQEIFKSKTRRCKNGEVHLFTNKLVCLDCGTKLYKCRNDRNYIYFSCKGSKKLYGNCTTHSIGYENLKNLVTEKIREKILAFYNFDNISDDLFVSNDNLNKAKLLQNKVELLSKEMKDINNAIKELYLNKVSGKVPEEVFEDLNSSFLSDKSAKQKELTKLENDLSNLKEKELNSKFIKEQKEKIINHFKDFKELNYDIVNSFIDYIEIGEKDRKTKTQDIIIRWNF

SEQ ID NO: 9514 - protein, 506 aa, synthetic construct
MERYLMYLRKSRMDTDFDEISVEETLNRHRRILESFCKERRLNVVDVLEEVVSGESLSSRPKMLRLLELVNTGMYAGVICIDIERLSRGSSLESGYIMQVLQTNNCKIITPSKIYDLQNESDEQFTDMKFMFSRYELKTITKRLVRGRNQSASEGKFLGSVAPYGYRAYKLVGMKGNSLRIEPKEAKVVRMIFDMYGKQGIGYNTIAHELNQMNIPSLTGTWGQTSITNILNNEVYLGMIRWKHEPTKRVVKDGMLTKKRVTSKDYELYEGLHEPIIDQEQWDRVKAVQSSRNHASVHKDKKLMNPFATILFCEKCGAVMKRNVPAKTQNTSPWYRCPTRGCNCRTIKCDFLEAEVVKAMSQWWGEYTIKIKEDKVAQTDSTETALSIVREQLTELQLQQDKICEYLEKGIYTIEMFTKRNDTLTREIHKVQAAENELLKKQGAQKDIHDVEKEIIPTTQHILDSYPQLSVEEKNRLWKIVMERITAYRTPGGEVSIHIYPKLPMR

SEQ ID NO: 9515 - protein, 481 aa, synthetic construct
MKTAAVYTRVSTDEQAREGYSLDAQLKAIKKYAQNNDILIDSKYIFSDEGISGRKAEKRPAFMEMIKQAKSKPKKFDLILVHKFDRFARNREDSVVYKSLLKKEYGIPVISISEPLDPDDKMSVIMEAFLEAMAEYYSLNLSGEVKKGQLEKHSKGELQTNPSFGYDVSNNKLIINENESKVVKMIFEQYAIDNLPMMNIAKNINALNIKTKRGSHFENRTIYYMLNNPVYIGKLRYTPGRRNSYDFDDPNTILVDGQHEPIIDLELWNSVQMKLAKNAKWKKPKQHIDLNPKHWTKGLVRCKECGCTMVTCGKTKLRCNGYNKGKCSNSTTLLITEIYDLIINNIKQIMKNGKIEHIVANRKEKKENNQYLILQHQLEQLSDKEIRIKEAYREGVDTIDEYKENKNIILREKSRLLKELETVEKPKIENKKKEIIENGKKIYEILIDKKISLKEKNEVAHILINKVEYDPNSNTLELYYN

SEQ ID NO: 9516 - protein, 538 aa, synthetic construct
MKKAVLYARVSSNRQEKEGFSIPAQIKFLREYALNNDMDIVEEFVEAETAKETGRKRFNAMVDYLQNIEGEKIILVEKVDRLYRNLLDYATIDSIKGLAVHFVKENEILSEDSRSSIKFVIGIKVLMAKQYIDNLREEAEKGLNERIEQGYALYPPLGYTYGDDGTHKHAIIIDTERAPYAIRAFELFVYDNLSASAINDILYNEGLRNRDGNKYAVSTIQRMFRNVMYVGDYMYQGKYYPDGRHTPLISRELFQLAQNKLNNANDTTRQHDIEFPYIGLFKCGVCGCSYTAERKVKPSGKEYIYYHCTGKGKIKTCKKESYISQDKIDKIMAEILKGLENIPQTLIDEIKDTLKETHDLKNNYSDNAQKNITKRINEIDRLIQAGYQRMLKHNNPMEEELWNNNYKQWRAEKEQLRIEQARIDKADDEYYKQSELILKFCKNAHNFFLKATPSEKRTICEIIGSNFIATGKDIDITLYPVFYDIIEMNNAKASGKARFELTETQAGTKKEPLEKALNLNGGNDEARTRDLMRDRHAL

SEQ ID NO: 9517 - protein, 662 aa, synthetic construct
MSIRSKFNEDEIRNLDKEKYMYNVSFDDIMQYSDKVFDVAALIRESTDSEEQQRAFAVQRDVVLDLISKKDNFRLDKNNIFEELGKSGLKAVDRPAFQLMCNRASQYKFDILIVDAVSRLARSIRELFDVIYDFQELGIGIIILKEKYWTYNMTHTDILRLAIDAGLAQAESMNTGCRVGDHMLELAKKGQLLGGDMFGYRLKKAVDDMGNRMPNKNSLVQEPVEAYVVKTIFDLYTSDDKDIAKTSSSICKYLIENNMRTYKGNLRWTPSKVIRILANTKYMGYQLPEKSKVIDTVRKKKVLTHIEPVKDVLDANGNLIEKGNLVRISCEPIVSEETWWKAYDRRMSRSSKGSENIKGRKSGLRVSADALGRKAYCSCGYCLSRQYTHVATETKSATYRYKCRWQVDHTSKYTIEAALKENNVVCDNPAVSDVKLWLCEKQVFSYMFKNGKSAVLQALEIIERCKHEEEVLEDGTSLQTLETRRDELKKKRKKLLALSLEDDYDMNDYKELKAEIDEEIATIEDSIAHFEIEKAKQQKKVFNIEDIRQRLNTIINLRDYKVSDEVIDMFVERIIYRGVVDGNDEFVWVMNLSGECTDTSAKYKIRGYDKNYADSLKSDKNFNIVARMLIPMEECKRFCQEEAGRRFKKKYWNPITIKIAIA

SEQ ID NO: 9518 - protein, 487 aa, synthetic construct
MESYAVYVRVSTDRDEQISSVENQIDICRNWLERNGFKWDERCIYKDEGISGTLFTDRPAIQLLLQKAKAKKINTVVFKSISRLARDLKDSLEIREVFLGHGVRIISVEEGYDSTKAGKNDMAFELWSLFSAQYSRTLSSSITAALAVKVRRGEHIGKVPYGYNRVNQKLVINKEEAEVVQRMYKWYNSGWGYKKITNELNKLGVRSKTNKVWQMTSVQRILQNPIYKGTFILNQYTNVKIGGKKKQIRNPKEKWFIFTNHHPKVVDEQTWDQANQKNITLQKTKITPWNEFRELAKCAVCGSNMIIVQSHLKKKNGERTEWKYLKCSQYRRAGKSGCINHVPIQYRYFRQFIIELLIKKGESVTLKLQNNVEQGKKEKIKKLQQLMNVNEQKKQSLLDLYLEGLINKEEFEKKRNDLEKVVMKASQELFIIQQNDAVQIDIKTIKEAFEQLHKRKQELFHVFNTLIEKIIIHQDGTIDITYTFEKP

SEQ ID NO: 9519 - protein, 537 aa, synthetic construct
MKAAIYSRKSKFTGKGESVENQIELCKSYAKNNGYDDIYIYEDEGFSGGNINRPEFKSMMKDAAAKKFDAIICYRLDRISRNVSDFSTLIDELKVLGIDFISIREQFDTSSPMGTAMMFISSVFAQLERETIAERIKDNMYELAKTGRWLGGTPPFGFSSEPIYYLDNNSKQKKMMKLSPINEEISLVKLLFEKYLTLGSLGKLQKYLIQNDIKTKRNSAWDIKALQLLLRNPVYVKSSELVIGYLSVKGATVFGDPNGNGILSYNKKDSKDKYKDISEWILSVSKHEGVVDDNLWIKVQRQLDKNKDLAPRLVNGSEYGVFNSVLHCAKCGGRMIQKQGHVSRKTGEILRYYICINKINPSDNTCDSKNIRLDKLEKSVMKELFKATDDKGSLIKAIEEYKKSLESESIDKSSIKSYEKQISQKELQVKNLIDKLSLNPNIYDLLSSRIEELNKEIKELKFKKFELENTNSNLKAAIKEINASTSMLLNFKKLWENADYSMRKLLINSFVDYISYNSDTQEVVIKPFCTNKKKGAL

SEQ ID NO: 9520 - protein, 542 aa, synthetic construct
MKQLKKKRIGLYARVSTEMQTDGYSIQGQLNQLTEYCQFQGYEVVNEYTDRGISGKTMQRPELQRMLKDANEGKLDCIMVYKTNRLARNTSDLLNIVEELYKINVEFFSLTEKIEIASSTGKLMLQILASFAEFERNTIVENVYNGQRQRAIEGYYQGNLPLGYDKVPDSKKELMINQHEANIVKYIFDSYAKGHGYRKIANALNHKGYVTKKGKPFSISSITYIISNPFYIGKIQFAKYRHWSDKRRKGLNEEPIIADGKHAPIIDRNLWDKVQFKRQESRKKPQVHGKGTNLLTGIVKCPKCGAAMEASNTTNTLKDGTKKRIRYYSCSNFRNKGSKVCSANSVRADVLEKYVMDQILEIIKSKKVLKQLVEKVNEKSQIDVSSLNHDIAYKQSQCEEIKAKMHTLTKTIEDSPDLDSVLKPTILSYQDELNQINNQIYQLEQDKQAEAPHYDADMIANVLQAIFKDIDKLEKSQLKSLYLTIIDRIDIRKDEHHKKQFYVTLKLNNDIIKQLFNNHPLDEVLPSTSSLFLPQTLYITIE

SEQ ID NO: 9521 - protein, 523 aa, synthetic construct
MAVSRNVTVIPAIKRIGNNKNSESKPKIRVAAYCRVSTDSEEQASSYDIQIEHYTNYIKKNKEWELAGIFADDGITGTNTKKRDEFNRMIEECMAGNIDMIITKSISRFARNTLDCLKYIRQLKDKNIAVFFEKENINTLDSKGEIMLTIMASLAQQESQSLSQNVKLGIQYRYQQGEVQVNHKRFLGYTKDENKQLVIDPEGAEVVKRIYREYLEGASLLQIARGLEADGILTAAGKAKWRPETLKKILQNEKYIGDALLQKTYTVDFLSKKRVKNNGIVPQYYVENSHEPIIPRDLFMQVQEEMVRRANLRGGKGGKKRVYSSKYALSSIVYCGQCGDIYRRVHWNNRGYKSIVWRCVSRLEEKDSECTAPTINEETLQTAVVKAINELLANKEPFLSTLQKNIATIFNEENDHTTDDIDGKLEELQQQLLIQAKSKNDYEDVADEIYHLRELKQNALVENAEREGKRQRIADMTDFLNEQSCELEEYDEQLVRRLIEKVTIYEDKLTVEFKSGIEIGIEI

SEQ ID NO: 9522 - protein, 529 aa, synthetic construct
MTYQEGGERMKKITKIEGNLANSFIKPKTRVVAYCRVSTDSNEQLVSLQAQKAHYETYIKANPEWEYAGLYYDEGISGTKKENRSDLLRMLSDCETGRIDLIITKSISRFARNTTDCLEMVRKLIDLGVHIYFEKENINTGSMESELMLSILSGLAESESISISENTKWAIQRRFQNGTFKISYPPYGYQNIDGQMIVNPKQAEVVKYIFAEVLSGKGTQKVANDLNQKGIPSKRRGRWTATTIRGILTNEKYTGDVILQKTYTDSHFNRHTNYGEKNMYLVENHHEAIISHEDFQAVDAILNQRAKEKSIEKRNSKYLNRYSFSSKIICSECGSTFKRRIHSSGRKYIAWCCSKHISNITECSMQFIRDDDIKTAFVTMMNKLIFGQKFILRPLLEGLRNQNNAASFHRIEELEIKIENNMEQSQVLTGLMAKGYLEPALYNKEKNSLVQERERLLAEKDQLTRFVNGNLAKVEEVNHLLRFATKSKMLTAYEDELFENYVEKIIVFSREEVGFELKCGITLKERLVN

SEQ ID NO: 9523 - protein, 506 aa, synthetic construct
MSIIHVVHNLLESFEWLHTAGFRPITMSRPVQVDHYKELIQKEPPWEFAGIYADDGISGTNTKKREQFNKMIAACKVGKIDLIVTKSISRFARNTIDCLKYIRDLKAINVAIFFEKENINTMDAKGEVLITIMASLAQQESESLSQNVKMGIQYRYQQGKVFVNHNHFLGYTKDAQGNLVIEPEEAKVIKRIFYSYLNGMTMKQIADSLKADGILTGGKTKNWRSSSVAKILKNEKYMGDALLQKTYTVDFLNKKRVKNEGIMPQYYVENDHPAIIPKSVFMQVQQIIKQRRNGITTKNGKHRRINGKYCFSQKVFCGKCGDILQRNMWYRPEKVAVWRCASRVRRNKTGRRCMIRNVKEPLLKEATVEAFNQLIEGHELASKQIKANIMKVIKNSKGPTLDQIDQQLEEVQMKLIQAANQHQDCDALTQQIMDLRRQKEKVQSRETDQQAKLHSIDEINELVNLHKYGLVDFDEQLVRRLVEKITIFQRYMEFTFKDGEVIRVNM

SEQ ID NO: 9524 - protein, 628 aa, synthetic construct
MKAAFLIRCSTKNQDLNRQTRDLTRLAKSMGYEYDLENLVYGEKITGKDDVTKKNRDSIDRLLRAAKEQRFDVVLVSEVSRMSRDPASGRIYVRLLINMNIPVYFKDIDLWTINPETGKKVRDAELVIGAAFDAAWKYLKSMKTQIASARRNELDNNRISIGQPYFGYKRYEGTDKSKKNQIVVNEEEAEVVQAVYNEYLKEGATLKSTALAITDKYGEQLNRKFSLGTIEHILTYESYATGIKKVNLKDPDTDEVEVFDVSTPIIIDKELYEAATNKRKKNRVKDEPYPNQQVYLLSKLIKCPDCGYTLTPRRKAGEFGQTYRLVNGKPAVSWLCMSGINNITDCTNRTSIANEKLEPIIWELVKKELIGYANMNDEKREEQIRECEEKIEYQNYSIQNFTKEIDKLKKRLSTAYQFSINAAEMAGDDEDMRTMAMEEFNRTAKGVRQEMKNFEKSIEQAKGELEKLRDLKTFYSQPTLPKDYLEQIEGNFTEKRNLVKQLITKIVPYRITTFKKKERESGVKTCNKMITVKNGAVLLEVYTIGGVYNVFYNANSKFQVKTAYYVHGEYATFQNGIRKYPAYDEGEYFVISNANMVMETDDIDEVVTVNEFVDIAIANNWVIEYQYI

SEQ ID NO: 9525 - protein, 485 aa, synthetic construct
MPTSDLKIAAAYIRVSTDDQEEYSPDSQVRLIREYARKNGYLLPEEYVFQDDGISAATARKRPAFNRMIALAKEKERPFDAILVLMFSRFARNREESVLYKGLLRKQGISVISVKEPAVDGPFGTLIESIIEWFDEYYLINLSAEVKRGMSEKFLRGEAMGTAPFGYRIDSANKTFTVDPERAEIVCDVFRSYADGAGLRDIAVQLGDAGITTRRGNRPDSRFVEYMLRNPVYIGKIRWTPGHKTRYSRVHIADGVEVVDGKHPPIVSMDLWEAVQRRMDQRKAAYGRYQRQTPAAWMMRGLVRCSACGATLIMVGRSSSCPFLQCHSYAKGACHTSHSLSLRRANAAVLAGLRRSVGTLTFHMIPHLTSAPSRTADYGRLLEQERRRLARCKDAYQAGVDTLEEYRDNKARLEERIRRIEEQAASAAAAPESLDKAAYGKKAADILRFLETSADEGAKNEVLRSVVDHITYEKASRHLAIYFYT

SEQ ID NO: 9526 - protein, 443 aa, synthetic construct
MNNQLRGQGASPAIAKEFPIKVRYCLYARKSTESEERQILSIDSQVKEMLQIAEREGLEIGEIRRESHSAKATGQRPVFNEIINDIRLGKFGGILTWAPDRLSRNAGDLGKLVDLMDEKLLLEIRTFGQRFTDSPNEKFLLMILGSQAKLENDNRGVNVKRGLRTRCEMGLRPGVAPTGYLNEKHADRRCQATVDPERAPIVKKMFEKVANDKWSGRKIYHWLKFEINFKTKGNKNLSLSNIYIILQNPFYYGTFEYPEKSGRWYQGKHEPLITKETYDKAQEQLKRDHIVRSEIKEFAFTKVITCGSCGSGVTAEEKYKKLKDGTTQRYLYYGCTRSRNLHCKNGYVREEELIDQLVKVMDQMDINEIGMRHKFEEEVARLTKFQMSFFADVKKLKPDKTIDLRSYAKYLLREGSVIEKRELLACIKSRLVLTQKVLTLENK

SEQ ID NO: 9527 - protein, 558 aa, synthetic construct
MLKANNNGKKKHYIIYTRCSTDEQAQGEFTTLDAQAHHCKNMLDAFGHDLASFGKNGIVRDDGYSAKDLNRPGIQSILESINKKREFDGIIFFRLDRWTRNPRDLYAMIDLFKEHDIDFVSVRENLDSSTAIGRVVIGILGLLSAFERELTGERVKSSVLARARQGMRTGGKAPIGYKLIKDGPQLPNGKQPTRVIIDETMAPHIKVVWEMAANNKSLTDIGQELIRRGVQTVNKHIWRRQSISLILKNPFYKGYINYNGEMNRGKHQPLVEEKMWDKANKFTSAKMPGRRYWKQKSGYEYLLSGLLKCGCCGSSLVSVHCAGRDKNKFYYYECGRSRQALGCTYKRISAPTFDKAVLDYFKRASQDQEIIVRAIGTAIRESQIKFEKIEEKLIERRIRLNTLRHEVETLLNLAMKNSISQGATFKTKMDKAEAEIKMLEEEISKLEEEKKVAQLNAQSGKHVYSNVKIAMQHIDQAPPEVQKDLLMALIENITVYENKIVMTMYIEAEVLPKILLNASGKEKSLTPINDQDEALNCQNTETMAPKGSVSYWRPLKGG

SEQ ID NO: 9528 - protein, 545 aa, synthetic construct
MTPAEAPATFGGLEPWLGYIRVSTWREEKISPDLQKTAIEAWARRTGRRIIDWIEDLDATGRNFRRKIMRGIERIEGREAVGIAVWKYSRFGRNDVGIAVNLARLEHAGGQLESATEEIDARTAVGKFNRRILFDLAVFESDRAGEQWKEAHQWRRAHGIPATGGKRLGYIWHPRRIPDPARPGQWTIQEERYEVDEAARKDIETLFERKLGARGDAGYGSLAGWLNRLGYRTGVGTMWKADSLRRYMLSGFAAGLLRIHDPACKCDYTGNGGTCTQWTYIDGAHEAIITPEAWEKFLDHVEQRRRMSPRARNPVYPLTGFVRCGSCRSDCGAMSANRAGGRIYGYAYACGMYNRAGGTVCAWGVWVQRFIVEEEVLTWLRREHAAGIDAAPAAPRPAADRAAADRDRAARERSRLQAERTRIETGLANLAADRALNPDAYPAGVFEQARGRLLAQQADVTAALEQAAAVEAAPVREDFRPVIGHLLDLWDALDAQEKNALLRQLVRRVVITRGARGIRGKEGSGKHTVTVHPLWEPDPWAAAAA

SEQ ID NO: 9529 - protein, 576 aa, synthetic construct
MENFDLKGFAKGKKQQKEQIGGNAIIYTRVSSSEQVDGQSLEVQIDKCREYAKVRSYTVVGEFGGTYESAKSDKERKEFNRMLAFIKQSNKKGSSQPVKTVIVFSTSRFSRTGSTTIIEEVEARGAYVVSATSNYDPRTPVGKYMQLMELANARFQNDEKRATTIENSVKALLKGRWIGKAPRGYDQKTTKKEQIITINEEGKLIRKAFLWKANNKLSNEEIRHRLAAEGFHICKQKLSELFKNPFYCGYMAHKFLQRDIILGNHPPLIPKEIFLKVNGELSKNHSGYEQKIDKEYAPLLGSIKCPCCGKNLSASISTKMRKRFGRTDIGYYVCSRKGCKYNSSTKKVHEAFEEEVNRYALSDKVSELLKMQLTITFEYMNQENRERAKSIKANIKAKEKELEQVETNYALCTDAKKQSICEKVMTKLEKEVRDLKNEFSKVNTEILNLDKFIDFAFKMRSNLFGLWELQGLEGRRRLQKLVFPDGFIYDKNNEHIEPKRVNQFFLLKYSYPTGNGDKKKETNRGKHDSSLRVLEAGLEPAQPQWPRDFKSLVSTDSTIRASSTRESGKRDSNSRP

SEQ ID NO: 9530 - protein, 490 aa, synthetic construct
MTNKNLLAITPHRKEPGRQRIAAYCRVSSRSDEQLNSLANQIDFYRSRFENDDTVVFVGIYAEEGLSGTQAESRPQFMKMIEDCRSGHIDCIWTKSVSRFGRNTVDTLIYTRELRSLGIDVFFEKENIHSTESSGELMLTLMAAFAESESETMSANIKWGKRRRYEQGITGSITLNGMYGFRQNKGVVTIVEDEADLVRRIYKDFIDGYSYGEIADRLLADEVPTRMPGASWAKTTVQHIIRNEKYCGDCLFQKAFIANPITHQQVRNNGELPKYLVEDCLPAIVDKETWKLAQAVAARHTPHRQAPNERYPFTGKLFCGICGKPYCYYHYTTTNKKPLAAYRCMSHKTQSAVEVPGQTYTPPHKATFNRNASAKLIAYRERYCKPPKERPMLCTDVRIPIDLPQKAFCRAWNLIVAKKLRYQATLRSTVDNAEDVLVRYRAEEMCLLIDEIGKITEFSYPLMLKTLDRVVVNTNGKLSFIFQSGIKITV

SEQ ID NO: 9531 - protein, 548 aa, synthetic construct
MANKTVKKIEATKPTLSAQYSTFTRKRKVAAYARVSTAKEEQENSFEAQVSYYTQKIQANPEWAFVEVYSDEGITGTNTKKRDGFNRMIEDALAGKIDLILTKSVSRFARNTVDSLVTIRQLKEKGVEVFFEKENIYTLDAKGELLLTIMSSLAQEEARSISENTSWGRRKSFADGKVSLGYSNFLGYDKGPDGELVINEEQAKIVRRIYSEFLAGKTPGGIAKGLTADGIETPGHKKVWQASTVLNILKNEKYYGAAILQKEITVSYLTKEKRPNTGELPMYYIEKDHEPIVSPETYQMVQEEMRRRREAGSNMQCVSIFSSRIICGDCGGYYGRKIWHSSTKYTAWHWHCNAKFQKRKYCETPTLKEESLEETFVEVFNGLIADRDEIMENYRLCIDTVTDDSEYRRQLEDLNNGCGEVQTLIRSLLMTYSRQDTTDDIPEKLQEYEERLDTMARLKQELDLKIAACAAKRVQITGFLNELMKHDAPLAKFDPLVWQAVINYATVNRNCTITFTFRDGTEKTVPIKNGVRPYTKRTKPQEGDGNDE

SEQ ID NO: 9532 - protein, 434 aa, synthetic construct
MKKTIVNIDPAVAETPRTKRVAAYARVSCGKDAMLHSLAAQIDYYRDYIMMNPEWRFAGVYADESKTGTKDNREQFQLLLTECRSGNIDMVITKSISRFARNTVTLLETVRELKSLGIDVFFEEQNIYTMSAEGEVMLTLLASFAQAESLSCSDNCKWRIRKGFEEGRASTCTMLGYRLVNGEITLIEEEAEIAKRIFDLYLAGYGLQKIANTLNEEGMYSIFGNEWHPTTVRKVLTNEKYCGDLLLQKVYRENHLTKRKCHNTGELPQYFVEDDHPAVVTRQIFMAVQDELKRRAKEKTQPVGSKSSFTGKIRCSCCGKNYRRKTTPYNIVWCCSTYNSKGKKYCPDSKVIPEETLKRVAAEILKTDGFSDEAFETQICTIEAHPGNLLRFIFTDDSTTDYVWKDRSRSESWTDEMKAAAGRKTKERNANHGK

SEQ ID NO: 9533 - protein, 509 aa, synthetic construct
MEINKIVVNDKDPDKKINVAAYCRVSTDNTDQLESLDAQRSHYESFIRLHSDWKYAGTYYDSGVTGTKADIRDGLQNMISDCHAGKIGLILIKSVSRLARNTVDCLNIIRDLKNIGVSVYFEKENINTSRMDGELMLTLLSSMAEEESASISQNVKWSVKNNFRNNSFKQVYMPYGYKKDTDGNMIVDSEKAEIVRQIFYACISGQSTHSIANMLNQINIPTSRNVKWSSTSVRGIIGNERYTGDAVFQKTYTDSRFKRHRNKGEVDQYFAQNHHEAIVSHDTFEKANAVIAQRASEKGILTGNEKYHTRYAFSGKIICGECGDKFKRRIHDKGSEIAWTCATHIEDKNKCSIKYVRDDEIKAAFVTMLNKLIFSRKVLLLPYLHELKDSNPNNKVMDELKNNLAQNNSKYDILRNLRAKNIIDDVVYRQEMNFLNKNSAEIREEISRLGYTEISERISQTEKLLKLNEIQDEFNEQYFNDFTDRIIIFKRNEFGFQLRCGLTLKEVQK

SEQ ID NO: 9534 - protein, 530 aa, synthetic construct
MEQYLIYLRKSRSDLEAEAHGEGETLSRHEHTLLELAKRQHLNVTDIYREVVSGDTIAARPMMQRVLSEVEQGVWSGVLVMEVERLARGDTIDQGIIAQTFKFSGTKIITPIKTYDPDNEFDEEYFEFGLFMSRREYKIINRRLQRGRLASAKEGKWPSGLAPFGYRRVKLKNEKGCSLEPIEEQAAIVRMIFDLYTVGLQDEDGSARPLSLGSIATRLNDMRIPSPSGSQWARITIRGIIKNPTYIGMVRWGSRETKKKVVDGKVVSVRGPADPEKECVFKGIHPPLIPKETFELANDKLARSENTSTHKEKVVRNPLAGLLVCSECGRQMMRMINPVHPDMPVVRCPRRGCPNCSSYLPIVEERVIQGLSEWMKGYELEWSSAAESSSVSSVGVREKALASAEAELRKLQQQLERTHDFLEQGVYDTDTFLSRSRMLSDKIAVAKDSVARCSRELTEEKLRETSRRDIIPKVRNLLDVYPLLETAEEKNALLKEVLEKVVYQKLNEKRKKSPDGFTIEIYPRIPKSEK

SEQ ID NO: 9535 - protein, 521 aa, synthetic construct
MKTHYRVLRVAAYCRVSTKQEEQLNSYENQVEHYTERINSENGWTLEGIYADKGISGTSVKNRDEFNRMIRRCKQGKIDMIITKSIARFARNTVDCLKYVRLLNDLGVDVYFEEQGIHSNQPGAEFYITIYGSIAQSESENISANIKWGKAQAAREGKVVFRYKNFLGYRKGEDGQPEIVPEEAETIRLIYDRFLAGDSLKGIAKLLEEKGIKSPTGKAEWQFSTIQSILSNERYKGDAIINKTYITDCISKKVRVNNGERPKYYVENSHPAIIDSATFGRVQEELARRSGKRKISRKAKTEQGKYSSKYALTELLVCGECKSAYRRCTWTASGKKKIVWRCINRIEYAKKYCHNSPSVEESVLQRAVMAAIMETANQNAEVLRTLKMHIGIGLAGEKSEDNSIDLQIRIAEIDAEFKKMLDRVSTDTIEAFDEETATRLMNEKSRLQQQLDNIADAEQRRENAKSRLDDIYTILDGIKNRPMEYDDQIVRQLLECVVVDSKEQITVIFKDGLKSVQPLTE

SEQ ID NO: 9536 - protein, 514 aa, synthetic construct
MNITEITSTKKQTAERLRLAPYCRVSSDSTDQLHSFAAQIRYYSDYAKKHPEYQLVDIYADEGITGTEMKKRDELNRLIADCRKGKVDRIIVKSVSRLARNTEELLVLLRMCKEIGVSVYFEEQGIDTEKLNMEMIVTFPGMAAQQESVNISGNLRWSYQKRMQSGDFNCTCPAYGFDLKDGELVINETEAAVIRRIFDLYLQGYGTLAIAKMLNEDGIPRKHGYEKWLPSSINYVLNNERYMGDALLQKSYTTETLPFRKMKNDGRLPQYYVENSNPAIVSRETFQAAQNLLRSRKTERCKRKSYPLTGKLRCPECGRAFRHQVVNGKAHWIGSCRSSGATDCQHRHVREDIVYDIFTDMVIKLKTYRAELLGTLIHQMETMQDRTSRNQERIRQIAKEIADLGAKNHIIARLHTSGAMNAADYAMQTSEIGNRLTELRIERRQKLTEDEDDQLLATLKDLNGILDEYEPTVEFDNGLFDEIVESITVNSSEQLTFKLIGGIALTEQIPKKGR

SEQ ID NO: 9537 - protein, 523 aa, synthetic construct
MNENVCIYLRKSRADQEAELRGEGETLARHERILLDLAKSRNYSVGAIYREIVSGETISARPVMQQLLREVEAGSWDGVLVVEVERLARGDTIDQGVVSRAFQFSDTKIITPTKTYDPDNEFDEEYFEFGLFMSRREYKTIKRRLNAGRIASVKEGKYCGSKPPYGYERVKLHGEKGFTLQPVPDQAEVIKMIYSLYSGAFGDRIGVSKIVRKLNDMGIKSPSGKDWVPISVQDVLANPVYAGMIRWNGRKTVRAIQDGVVTQSRPRSKEDDILLFPGRHPAIVSKEMYDSVQQIRKKNPPRPISIKNTIKNPLAGIVYCSKCGRAMVRRPYQKRGQDDTLMCSYTSCPTVSSKLSLVERAVLNGIQDLVDEYRLNDTVPGPDINNAVKSKEKLIAEKEHELEKLNVQKMKQYDLLEQGIYTTEVFLERSNSIASSINSCQDSIECLKEEIRHDKELIDQQSSFIPRCENLLEIYWSLDTAAKNKMLKELIERVNYTKDVKNAFRMGNEATFVLDIFPRIQSN

SEQ ID NO: 9538 - protein, 538 aa, synthetic construct
MQENYIVGIYARLSRDDERAGESVSIENQKEMLSRYVREQGWTLYDYYCDDGVSGTTFDRPGLNRLMQDATDHKINLVLCKDLSRLGRDYIEAGKYTDFVFPSLGCRFIALNDGVDTLRKNNEMLVILKNVMNDLYARDTSSKIKAVKLSTFKSGKYVGCYAPLGYKKSEADKHVLEIDPVTAPVVRHIFDLRLQGYGFRKIALQLNAEKVPAPRSFYYMAEGRENLRGETPFWNDVTVKTILRNEVYIGRMVQNKTGTVSYKNHKQVSKPESEWIKVENTHEPLIPQETWDAVQRMDNHPARGRSGKSGTVALFGGLLRCMDCGSSMRYMRDYRKKISEKEPEYKAYVCNRYASGGKNACSSHYINQKVLTQIVMTDIRCKAMWAQNSRETLRTRLLAREQNASVERTRTLQAELNAIGKRLPELDKLIQSAYEDKVLGRIPESVCVNLLNQYEAERREKQERHKELTGQLAASRETESSVDAWLDMMQDYAQLEELDRPTLVRLIQKIEISERYTVDDHEERDIHIYYNFVGYIEA

SEQ ID NO: 9539 - protein, 558 aa, synthetic construct
MGLRSKYTEQQICKLEKKEFMKEASFDDIFIDYGHDLNVLILCRESTAHEDQQKALNDQVERMKGIVDRHRQLHLVDDGIIIEDAKSGLAMDVRPKFQATIKRAVAEDIDVILVQEASRFSRNTGDFFYNMNILQNSGVGILIMEGGFWTYFMAPGDYPRLANEVAKGQAESLTTAKRVNRGIETYRSRGQLVSGNMFGYDLVKAVERKNNTYKINPVDGATVQLIFDMYVNKGIGTELIATHLNAHNYPTAKRTGEWSASKVRRVIMNEKYANLIMYGKFQIVDTSTKKKIATHIKPVRTTTYDKDGNIIQERNVQYGTWEPLVDEETWWKAQEIMASRSNSYNLKDDTGKSKRCANGLRTSNDAYANKAYCCCGHTLSPQYTHTATDTKYAQFRYNCRWQINSHTDAYRKKHGLPPSDCTCKLPAVTDVAMRLMSIKVFEYLFTDIRDTIDDTVRIIELANKQAVDSINNSGVSVEDLEATYAKLNNRLSRFADMYADGDLTREQYRDKKSSVEEELKHTKELIDSKKLAISEQKKKSLDIEAIKARLNTYVDLKG

SEQ ID NO: 9540 - protein, 605 aa, synthetic construct
MMIRTYLRRSKNDEGKQQFSLDVQREGCQTFVRQRFELADLQHTEYLDDGKAGDDFHSRVGMRRLILEALPGDIIICRDQSRLGRDAIEVTLAIRDLVRDRGCRLYYYVTGQEVQFANAIDQATTFIQGTGHQMELEAIRSRTREALRSRVREGRIAGGRCYGYDLVRKSDATGRGYTLAVVNAKQAEVVRRIYAEYLAGAGLKAIAKALNREGVPSPTAGRRGSRSWSPGGIRPMLQNARYRGVYMHGRIKKVRRGGRTMSVKADPSEVISVDVPEWRIVDDETWFAVQEIFRPRAAAADGPPRVARPVAKYPLAGIATCGMCGGSIGAAFTKRRGERVKAYACRRHHQCGGKACSVTVHQPMDEVEQALIDHLEREVLTADCAPELVARIQRAAKARLPTPDEDLGALEADLAQARSEQGRIARAIALTDDVAELVTELNQRRSRIRYLEGQLEAAQREPNELAELLEQVEARARAKVAELRTALRESEDLRTVFASLFRDGLRFTPEWVETEAGRRHIWRITGPAHVDPGPLPVATPQPSAGVVSRPEATDFTGSLGGGPLCKATPTGFEFIICLRKVQTISRTSMDLRHLRIEPVPSCPTQ

SEQ ID NO: 9541 - protein, 520 aa, synthetic construct
MKRITKIEENMLLEKRKLRVAAYCRVSTARDEQLVSLAAQKAHYENYIKSNDEWEFAGLYYDEGISGTKKEKRDGLLAMVAACERGTIDFVITKSISRFARNTTDCLELVRKLLDLNIYIYFEKENLNTGSMESELMLSILSSLAESESVSISENEKWGIKRRFQNGTFIISYPPYGYDNVDGEMVIVPEQAEIVKQIFADTLAGKSTHEIAEELNERGVATKKGGHWTPGTVNAIIGNEKYTGDVLFQKTYTDSSFNRHQNRGELDQYLMQDHHEAIISREKFELANAVLKQRGREKGNGHDTGRYQNRYGFSGRICCGECGGKYKRRMHYKPSGQYVAWACANHLKDKESCSQKYITDDALKLAFVTMMNKLVFGHQMVLRPLLQSLRGLNDQSRLLKIEELETAIEKNREQKQVLTNLMASGYLEPALFNKESNELVAEAEALRQEKDGLMRSVNGDMVKIEELQRLLRFTSKGTMMTEFDDEIFLSFVERITVLSRKEVVFEWKCGLSLKERLVEP

SEQ ID NO: 9542 - protein, 523 aa, synthetic construct
MELSRNITVIPARKRVGNTAAVGQRPKLRVAAYCRVSTDSEEQASSYEVQVAHYTQFIQKNPEWELAGIYADDGITGTNTKKREEFNRMIQDCMDGNIDMIITKSISRFARNTLDCLKYIRELKEKNIPVFFEKENINTMDSKGEVLLTIMASLAQQESQSLSQNIKLGLQYRFQNGEVRVNHSRFLGYTKDEEGNLIIEPVEAEVVKRIYREYLEGASLLQIGRGLEADGILTGAGKTKWRPETLKKILQNEKYIGDALLQKTYTVDFLNKKRVQNKGIVPQYYVENSHEPIIPRDLYMQVQEEMIRRANLHSGANRKKRVYSSKYALSSIVYCSKCGEIYRRIAWNNRGKHSTVWRCCTRVEHGPTACDAPTIQELDLQAAVVQAINLALGNRENMMATLQENVEAVIRQGDESSSEGIEAKLLELQKELLKLANSKKDYNSVADEIDRLRELKQNALVESAEREGLKQRIREMREFLEQQSTAVTEYDELLVRRLIEKVTVYDERFEVEFKSGAKVDVER

SEQ ID NO: 9543 - protein, 515 aa, synthetic construct
MSYLVYLRKSRKDLENPFMTTEEILNRHECILLDLAKKMNLSVGGIYREIVSGDSISARPVMQKLLREVESGMWEGVLVVEVERLARGDTVDQGIVQRTFQYSETLIITPQKTYNPSSESDQTFFEFGLFMSRQEYKTIKRRLKSGVMSAVHEGKWPYNSAPYGYRRYKLANQKGWSLEFDDQERPIAELIYHLFCDEKRGLGYISDYLEVRNIKSRTGGRFTESFLREFLRNPVNDGKVFYGRRKVVTKIVNGSSVRTRPRADEYIEVAGLHDPLIPHDLFLKAQERFRVSTPRNPSSYTVKNPLSGLLVCSECGRKLQRRPASTSKRGAPYDVLMCKTRGCPTVGSAVEVIEREVLHALEGIVRGYEADVPSVPSLVPQKEELLHNAVLHRADLNKQQERIYTLLEQGIYSTDVFLDRSKALEKQMQEVEHSIEIFKNELEEEKIKHDNWKSFVPTCKQLLDIYWTLTPDARNAALKEVIDRIEYKKLTRNPKGMCDVATFELTLYPKIPSKS

SEQ ID NO: 9544 - protein, 525 aa, synthetic construct
MSRTVTAIPATKKLGNVTTPSGVPARRRVAAYARVSTEMEEQTSSYEAQIDYYTTYIRSRSDWRFADMYSDEGISGTSMKRREGFQTMINDALAGKIDLILTKSVSRFARNTVDSLTTVRKLKDAGVEVYFEKENIYTFDAKGELLITIMSSLAQEESRSISENVTWGHRKRFQDGKIMVPYASLLGYKKGADGSLVIDETQAPTVRLIYQLFLDGMAISEIKTELAARKILTPRGKEVWSTSTVRSILSNEKYKGDALLQKTFTTDFLTKKMKVNEGEVPQYYVTGNHEPIIAPRIWDQVQYELATRHGNISSAKVGLFSTRLKCAQCGSWYGRKTWASNTKYKYTVWQCNHKYAGDKPCSSATVKDEDIKNAFVQALNQLIARQPRQSQLLQIFDSMFDTSRLEEQAAACQTKIVELTEQIEALIAKNQQRALDQDAYQNKYTELDTACRKTLACKASLEADIAANTAKHAAVTTALGDLAGEPVNDFRPAQWSALIDHAIVDEDGIRFVFRTGEQVRIALKG

SEQ ID NO: 9545 - protein, 463 aa, synthetic construct
MRRKTTAPVEKILLRVAIYIRVSTDKQVKDGDSMRDQLATGQKYIDSHENMILVDTYIDDGISGQKLKRDDFQRLIDDVRAGRIDLIIFTRLDRWFRNLRHYLNTQDILDKHGVSWTAIEQPYFDTSTPHGRAFVNNSMIWAELEAQNDSDRILGVFDDKVDNGEVLSGSTPLGYTIVNKHLVPDDDAPTAVAIFQYYRKTGNLSMTLRYMESEFGLVRSAASLKNMLTNTKYIGEFRDNKNYCPATIDRDLFFDVQRLLKINIKSGKKHDYIFSGLVVCDDCDHIMSGCQQRAGGRVRADGTRIVYKYSVYRCRQGVNLHRCPNRKLVFETTLEKMLLERIRPELENYIAEYEVANLPALRTDAKRRSVEGKMQKLKDLYLNDLITMDEFKLDREKLLMQLEKINAEDSRPVKDLSYLKNFLKMDFESVYDSLSIPERRELWRSIVKEIRVDHDKNIHIIFL

SEQ ID NO: 9546 - protein, 492 aa, synthetic construct
MAAIDFNNVVDLYIRVSTSEQAEEGYSVAEQEERLRSYCAAFNYIINAIHIDPGFSGASLDRPGIKKVMYDVEHGRCKKVIVWKLDRLSRSQKDTLILLEDVFLANDCNFISLMESFDTSTPFGRCIVGILAAFAQMERENIKIRTMMGRQARIRDGHFHGSRCPLGYKFQYAPDGTLLSNDLVVDPYTSKLVQEVFRLFLSGSSLSSISAHMASTYGCSMYDWSNSTAIRRILSNPIYMGKVRVGNELYPGIHEPLVSETDWYMVAAMLKHNKEQQKRTYAYQISGGAYADNLLTGLLFCGDCGARMYARRVSQNKKKYICHSVAKTSPAMIRSDHCTNRLHPFTVHQLDEMVINEILKLSLDRPGFDMLCDQPDESSKSEDKEIYEERLAEVNRQLDRLVKLYQTGLIDLDNISARLGDLNQEKIFLEGNIATINEITPADLRETAWKSIQSLQSVLDNGDMDEVHRIIHTLIDKVVVFNADVTIYWSFC

SEQ ID NO: 9547 - protein, 526 aa, synthetic construct
MAKVTIIPSKINPITLTPVGQVSKRKVAAYARVSTDSDEQYTSYDAQVTYYTNFIKGKPNWEFVKVYADEGISGTSTKRRDEFKEMIESALNGKIDLIITKSISRFARNTLDTISITRQLKAKGVEVYFEKENLWSLDDKTEFLLTIMASIAQEESRSISQNITIGKRWGMKEGKVSFAYKNFLGYKKVDGKIVIDEAQAETVRLIYMMFLKEGKTCTGIAKFLKSKGIPTPSGKSCNWTKNTVYSILMNEKYKGDALLQKKYTADYLEHRVVTNNGELPQYYVENNHPAIIEREVWELVQTEMMRRSMLGAAYSGNSIFASKLICGDCGKPYGKKKWHSTSKYAKEIYRCNAKYNKGQAQCQTPNLTEEDIKARFIKAYNLVMCDKKQVIEDTLAVIELLTDTTDLDVEIADLQAKIERISSDVSLMVRENARTQQDQIKFASKYEELTKEYETQKAALEKAVKEKAYKTGKATKMCAYLEAMKQADDFLKKWSDEVWILMVETATVNRDNTITFRFTGGKEITI

SEQ ID NO: 9548 - protein, 440 aa, synthetic construct
MIQKKITKIDAAPRLERLINVAAYARVSSGKDAMLHSLAAQITYYQNLITSHQGWKFAGVYADEAFTGTKDNRHEFQRLIQDCKDGKIDMVIVKAISRFARNTVTLLKTVRMLKSINVDVYFEEQNLHTLSAEGEMVLTFLASFAQEESRSVSENMKWRIKKDFEKGLIWGSKTQLGYRIVDRRLVVVPEEAELVRRIFSLYLDGYGFQGIANLLNAEGQTSVLGNKWSKTAIEAIINNYNYTGDLVLQKTFRVDHLTKHKQMNRGEKTQYLVEDAHEPIITKEQYMMAQTLKKQRAQHFNLLDMTKQINLFTGIVWCGACGKHYRRKKQERRMWWTCSTFNTAGKGACNSKSVPEEVLIEITKKVLGVKEITAEIIKSKVDHIDVLKGNRLVFHLKNGSTIEETWKSLSRKDNWTPEMKEKARQRAIAQYRRKEGKHNG

SEQ ID NO: 9549 - protein, 490 aa, synthetic construct
MKAALYTRVSTDEQAEHGFSLEAQKKRLIEYCNKNNIEIYKLYSDEGISGHSIIKRKALQEMLQDAKEHKFNYVIAYKTDRISRNLLDLLTIKNQLDEADVELLLSDEAIDTKDDAGMTMFSIMGAFAELERKKITERMMAGKRQKLMNEHIKLKNGRVPYGYLYDDENKKYIIDESRRSIVELIYKLASQGWSYNKITRHIAVETAANSSDSKKKWYISDIRAILTNPIYKGYSGISYYYNFNDRAKKPKNSAILYKATNVEPYFTEEYWDTLYSQLEKKTQYFKRKHPIDSYIFSDVLFCATCGLKIGTRQHHANYLYYVCNSKHKMYDSDHICDYAININKFNNWFIEFIRGIDENNIKLSVSKPKDLDKELQAVRSQISLKEKNREVLLDKLMNGVIDDTEYRLASNMVIASLNSLKSQEKELSDKMDSLKEKEQTKRYNRLKIKALKVLVNDWDNLTDQAKKTLINSSINKIMITKDGIQEIEFN

SEQ ID NO: 9550 - protein, 597 aa, synthetic construct
MANKVVKVIPARPQGIIIDQAGVIKRKRVAAYARVSTEKDEQTNSYEAQVNYYTNYIQANPEWVFVGIYSDAGITGTSIKKREGFKRMIDDAMNGKIDLILTKSVSRFARNTVDSLVNVRKLREKGVEVYFEKENIYTLDTKGELLLTILSSLAESESVSISQNTTWGQRKRFADGKVSFAYSNFLGYDMGQDGKLHINEEQAKVVKRIYEEYLLGYTPSYIAKRLTADNIPTPQRKKVWYQGVIDSILTNEKYIGDSILQKTFSTDVLTKKRKKNEGELPQYYIENNHPAIITDEIFEMVKEEMARRKSAGLMTNVSCFSGRILCGDCGGYFGRKVWHSNQPNRTIVWQCNKKFNNPDACGTTSIKEKAIEEAFVRAFNEMFSRKDEIIENYKLCIDVICDDSKFQERKNELDKDLEEKTIVIKDFLLKCSKTEENIEESNARYDVLIKEFEALNAERQKCLDMISSLAAKRVKINSFLNILNSTEGVINSFNEVLFQKSVNHMVINHDLTIDVIWRDESKTTTYIERGVKEVKKSAPRIKREKVLSDHTCLCCGKQLYITPGKVQRIFCSKKCGETYRRAKAKEARLENNTISHV

SEQ ID NO: 9551 - protein, 497 aa, synthetic construct
MRYAIYLRKSRADDTSEPLEVTLQRHRQMLEKYMQQHDIAVQDEDVFEEVVSGDSLYARPQMLRLLEAVEAGTYTGVLCVDIQRLGRGSMQDQGMILDAFKWSDTKIITPTRTYDLSNDMDETYTEFESFMGRQEYKMIKKRLRRGLNATIENGGYIANAPYGYDKTKIGKTPSLKINEAEAKFIHMIFDLYQGGMGALTIATTIDRLGARPRRGEHFARSTVLKILKNDVYRGKIVWNRKTCVRPGQRGNEHHLTIYNAPEKWTVVDGLHPAIIDNEQFEAVQRILAGHYHPPANTGKRINPLAGLVLCGNCGRPLQRIAIQSAGGPLLGCQVPGCIVSSKLEYVEQAVLLEIQKEFDKLCANAEQKQQESQIDYAAMAKSIDAEISTAHQQLGRLYDLVEQGVYTIEVFNERRGALLSRISALEDERKNLVPPQQLDLEKMRANIEAVFDAYPTADFNTKNQLLKSIIDKIVYNKQKGVQPKGFTLEVFLHCLYL

SEQ ID NO: 9552 - protein, 514 aa, synthetic construct
MNQELFAIYLRKSRKDLELKEYDVLERHRRILLDFANSRNIPINKEDIYEEVVSGETIQDRPVVQQLLKKIEAGYYKAVLVMEIERLARGNTIDQGIIAQTFQLTNTLIITPNKTYDTNNEYDNEFLEFGLFMSRREYKAITRRIQAGRIQSVKEGNFIGSVTPYGYDKEKLKGTKGYKLIPNQEEAENVKLIFKLFVESSYGTSNLAYKLNDLGIRSRTNSIWTPAMVRNILKNRVYIGFVSWGKRANVKKLNNNEINKSRPINTDYIEARGKHEPIIDDITFYKVQELLKSSSIKKVPCEKSLKNPLSGLIKCGKCNLNMIRRPYPQNKHEDLLICRNKYCDNISTSLHLVEKKLLNSLEQQLNEFYFYISNYEQEYIKSTKNYNLQIKKIDKEIIKLKTQLSKACEFLELGAYSLELFKERSNSINLKVENLEKEKLNLEELSKNNIIERITQYIPLLEKCLKNYWSLDTEGKNSILKELISEIYYTKNVKGSRWNHDNIDKFSLDIKLRI

SEQ ID NO: 9553 - protein, 562 aa, synthetic construct
MKRVNCLYRVSSKQQLHGDDIPVQREECMAYLGEHTDWEFNREYVEKAVSGFKTSVKDRDILQEILTDAREKTFDVLLVFMSDRIGRKEDESPAFVTTLNDLGIEVWSVKEGQLKTAEHVDKLMNYIRFWQAEGESRKTSMRVKAAQETFVRDGKFVGGKAPFGYRLEYSGAISNHGRALKHLVIDKEKAKIVQQIYDYAYYYHYGALKIAKTLNEQNIQAPVDTWKACTISQILQNPVYMGYIAYNRRQHSKCGGSFERTPMEQWIMSDEQNTELVIVSREKWEKVQEIRESRKKNMKDARDDKQGKYVYTSSGQLVLMGLVYCGYCGKRLTNGSKYDYWETKEGERRKKFVGRYRCTQMANGSLTCSGKAYYRAEEIEPIVYTVVTSYLNSLKEADTYDDILKLQEEQRILVKHELEQLQKEIKAIKKDIETLEQNIPSALRGEGNFSPVQLSALMDKNKQQLIELEHRLEIKNKEYKEMECKKKDIKNIGSMISNWGELFMECSIPERKVMLSKLIERIDVKENDIKIKFKISLEEYMGEKDGRKGIGSPTTLYTPCSA

SEQ ID NO: 9554 - protein, 484 aa, synthetic construct
MKKEKVIPIDSLDLVDLYIRVSTTEQALEGYSVAEQEHRLRQYCAAMGHRIHKVHIDAGFSGASLDRPGIKETIKDVQKHLVRRVIVWKLDRLSRSQKDTLIMLEDVFLENGCDFISMMESFDTSTSFGRAIVGILAAFAQLERENIKERTMMGRQARLAKGHYNGSRPPLGYSFIPGSNDLQVDPYQAAIVREIFKLFLSGISINAIARKMEEKYPTVRTWNNTMIRRTLKNPVYIGKVNDNGILRDGIHEPLISEIDFQMANAILVHNSKIKKQSCRSRSLLTGLLYCGDCGARMHPRRIARGYPLRRYVCYSVSRTSKSMIKSDHCTNRLHPYTQEELEQIIIDEIKKLAADEDYISEVIRNSSAEVPADDTELFQERIEELNRQTDKLLNLYQIGAIELDQIQERLAALKQERESLTAALKELQTKTDINMDHLKIMSYASAFQIALESGDPEYTNSIIRLLIDKIVVLNEDIEIHWTFC

SEQ ID NO: 9555 - protein, 541 aa, synthetic construct
MGTTKNAVIYARYSSHSQREESIEGQLRICHEYAKAEGLAIVGEYIDRAISGTTDARPDFQRMIDDAKKKQFSYVIVYRLDRFARNRYDSVLYKHELKQCGVKVVSATEGIGTGDESILLEALIEASAEYYSMELSRKIKRGRQDSAMKGNFLGGAVPLGYKVVDSKFIIDDETAPIVRYIFERYAAGIGKKQIIDELTAKGYMRRTGKPFTYRAFDSVLRNRKYTGEFTQTGITVEGGCPAIIDTEMFEKVQARLEINRRAPAKAKAKTEYLLSGKMFCGYCGEPMIGISGTGRHGKTFYYYSCVGRRGKSGCKKQHEKKDFIEWYVCEQTVQYMQDPERLSHVAKRIIEINDAEFDGGKVKELERAVENCDNDIRKLVDALTTIPDAGRAALYDKIERIGAAKADMEIDLAKVRVLSEVRYKQEDVEAWIRSMCRGDLMDFEFRRQLIDVFINSVYLFDDRVVIVYNIKNGKQVSAIDVLNAVEELDGVELFPDSAEDSSAGGSGSFLVTDAPPYMKNPNLFPIGNGFGFLIFIKDIID

SEQ ID NO: 9556 - protein, 501 aa, synthetic construct
MEIQIREGSREQKRKLKVCAYCRVSTDADEQENSLENQIRHYETVIKANPDYEYAGVYSDFAISGFKEKRPGLQKMLADAEKGKIDLILTKSVSRFARNTSIVLEATRKLKELNVGVFFELQNINTLSGEGELMLTILAAFAQAESESGSVGAKMVYQRKYEAGIPVQYLERSFGYTKDERGVFVADEAEAVWVRKIYEMAADGYTPASIKRYLNENGVKTVGGVQWVDSTVFRLLENEIYKGDYIMHKHFVNEERKLVRNRGEVDAWYIEDDHEAIVSPELWQKAQDALAVKRDYLAEGSVIEEFTEENYPYMNKIYCAKCGYPLYKRIYSKGNRLNWGCSGTKRYGKSFCDGINIPDGVLRSAWHFEENTYIDEKASDKGVKEFTYLKERSWKRRHKKKQPSAIPENTETEYPYREKIFCALCGSRLVRYVNPQNHKVTWVCNRRKRKGKEACDGTRVPDTVIKGWGEIKNDIYIQRKDDKNGKKRYSYTSKKPSGIRV

SEQ ID NO: 9557 - protein, 408 aa, synthetic construct
MEAEDQQALSIESQIKEMTALAQKENLIIAEIKREAHSSKEVGQRAIFNQMMAEIREKKYNGILTWAPDRLSRNAGDLGSVVDLMDQGLLTEIRTYGQKFTNSPNEKFLLMILGSQAKLENDNKSVNVKRGLKMWCEMGWRPSTPPTGYLSEHRTDKKCQIRLDPKRAPIIKQIFEKVGNENWSGRKTFKWLNEIGFKTKTDKKLTIGNVYILLRNTFYYGEFEYPVGSGNWYQGKHDPIITKELFDKVQINISEHFIPKTESKEFAFTKLIKCGYCGSGITADEKFKKLKNGGANRHVYYHCCKSRNIECKNPPINEPNLIEELVNLIDKISLDELGIKERISQEINRFNKFRIGVLGHKKEARNTEIDIRNYAKYLLREGSIYEKRELLSLLKSKLILKERKVELE

SEQ ID NO: 9558 - protein, 665 aa, synthetic construct
MTGKNQAKQSIAVIYARVSSTQQKTQGHGLESQEVRCREFATYKDYQVVEVFRDDASGSLTDRPGMKAMLTFLRRQRGDTIVIVDDISRLARSLEAHIKLRAAIASVGGILQSPSIEFGEDSDSQLVENLLASVSQHQRQKNADQTKNRMRARAMAGYWPMRAPIGYKFERVAGHGKMMVPDEPVASVIREGLEGFASGRFGLQSEVMRFFASHPSYPAKARSCITVERVREMMNRPIYAGKITISEWGLHLVDAKHRAIISYETFLRVQERMKGAAKAPARKDLNRDFPLRGWVSCGGCGKPLMGCWSTGRSARHAYYLCQRKDCPDYGKSIKRDDLESEFAELLRSMRPSVSLFNLAVGTFRYFWNERSLTRAEQVRSFKQDVSSIDKKIGQYLDRIVEIDSRSLVKNYEDRLHSLERDKALITERIANCGRPLGEFDATFRTAVEFLGNPCNLWESPQLEDKRAVLKLVFAEPLAYRRGSGFRTAVTSSPFKILSDLQNGGEGMVPRRGLEPPRPCERQHLKLVRLPIPPSGHGVGERLYGAPNPLSTAPKNNLRISSSRSARCALARWLRPRPRPRPRPRARARARARAPREAYASIPPGATQTAGPRCRAGAGQSDRAAGSLRHRTPRAIALPPRRSPPRVTSDRSRCASFLILSKLASP

SEQ ID NO: 9559 - protein, 520 aa, synthetic construct
MTEKNIMVIPARKRVGSTAAKEKIKKLRVAAYCRVSTETEEQNSSYEVQVAHYTEFIKKNNEWEFAGIFADDGISGTNTKKRDEFNRMIAECMDGNIDMVITKSISRFARNTLDCLQYIRQLKDKNISVYFEKENINTMDAKGEVLLTIMASLAQQESQSLSQNVKLGLQYRYQQGKVQVNHKRFMGYTKDEDGNLIIVSEEAEIIKRIYREYLEGQSLVRIGRGLEKDGILTAAGKPIWRPESVKKILQNEKYIGDALLQKTVTVDFLTKKRVKNEGHLPQYYVENSHEAIIPKELFLQVQEEIHRRSNIYTGASKNKRIYSSKYALSAITFCGDCGDIYRRTYWNIHGRKEFVWRCVTRIEQGPGVCKNRTVKEDELYGAVMTAINKLLAGGNNMIKTLEENIHAVIGETTEYQISEINNLLEEKQKELIKLANKGQDYEHLADEIDELRDKRQLLLVEDASLSGENERINELIEFIRKNKFRTLEYDDKLVRKIIQSVTVYEEHFVIAFKSGIEMEI

SEQ ID NO: 9560 - protein, 518 aa, synthetic construct
MKKITKIKPKRAEKKKLKVAAYARVSTGNEDQLMSLEAQKAHYEKLIEKEPDWIYAGLFFDEGISGTKKKGRDGLSALLQACKDRQVDFILTKSISRLARNTIDSLEIVRELIELDTGIYFEKERINTKSMESELMLSILSSLAESESKSISANQKWSIKKRFQNGTFVIVYPPYGYENCDGKMVIHEEQAKIVKEIFASYLSGKGVHDIAKLLNEKQISSKRGGKWSGTTIRDMLKNEKYIGDVLFQKTYTDDQFKRHRNKGEKDRYLIKNNHQAIISREDYEKAQRLLGQKAREKGNGDNTSKYQNRYEFSGKIRCSECGGTFRRRHHYKPSGNFIAWACNEHIKDINKCSMKYVKDEDVKWCFTTMINKLIFGHEKILLPLLQALKNSKTEDAVERLAKLNEELEKISERKQTLVTLITSGLLEPSIYSKEKAEIDQEYKLLEERKDHLENSFLGNKKHVEELEKLISYTKKANMHQDYPEEIFKEVVDEILVIDRKSFEFKLKCGLSLREEMIE

SEQ ID NO: 9561 - protein, 520 aa, synthetic construct
MDSKVIVIPAKKKIGNTITKEETKKLKVAAYARVSTDSDEQATSYEAQVEHYTSFIKKNPEWEFAGVFADEGVSGTYTKKREGFNRMIEEALKGNIDYIITKSISRFARNTLDCLKYIRKLKEHNIPVYFEKENINTMDAKGEVLITIMASLAQQESQSLSQNVKLGFQYRFQQGQITVNHNRFLGYTKDEDGKLVIVPEEEKIIKRIYREYLEGSSLRDIKEGLEKDKILNGAGNKKWHISNLDQILTNEKYMGDALLQKTYTVDFLNKKRVVNDGIAPQYYVENSHEAIIPKEIFMRVQEEKLRRANMTSGKGKRRVYSSKYALSSIVYCSNCGDIYRRIKWNNRGKKSTVWRCCTRVQQGPKACNADTIKEEDLHQVTIDAINRLIEEKIELKEIVNKNIEKVISKDPEGKIEEIDNEMLEVQEELLKVANAKEDYSHLANRVQELREEKENILLGLAEEQATQNRLQEMKVFLNQQKMILYEYDESLVRKLIERIEVYEEEFKVIFKSGLEVEIDR

SEQ ID NO: 9562 - protein, 647 aa, synthetic construct
MNTKVKLIKASNTGARNRNALHLDLKRVAAYCRVSTDSKDQLESYKSQVDYYTNLIKNNKNWTLAGIYADEATTGTTATKRADFMRLISDCQNGDIDMIITKSISRFARNTLDTLKYVRLLKENNVGVVFEEENIDTLTMDGELLLTILSSVAQQEVENTSAHVKKGLKMKMEKGELIGFQGCLGYDYDPITKSISINEEEAKIVRYIFKRYLEGNGGSVIGRELEEQGYLTPRGKTKWSDTTVLGIIKNEKYIGDILMGKTFTVDPITKRRLANFGESDKYHIENHHEPIISREDFEKAQEIRLRRAQNRNTIANKDRKREKLSRQYAFSSMLECGFCGEILSRRTWHTSSIYKKINWQCVKSTKKGKKYCPHSKGIQEAAIEKAFVESYRQLCHADSTVIDDFLKIVEEEINDETLVKDLKKLENQLNRIISQERKLVDLHLEDSIDEEVYAKKYKKLTKQKEELLDEKKTLELTIKDENSIKERLKQFKKVLENKEIIEEFNRTVFESIVDKVVVGRIDKDGKVHPYDLTFYFKTGVKDSQDSNNFKDKRKNAKDNDINKLCSHKNDEDKNLCSQAKDNACGVHSVDTKSEIVKILHFKQFYKHYVFNEDGDGGRKKVLKNYIDVYVCIDMVCGDTKGELGSEE

SEQ ID NO: 9563 - protein, 612 aa, synthetic construct
MIEYHNKITALYSRLSVGDEDRDGGESNSIVNQKAFLERYARDKKLINIRHYIDDDESGRFFDRSAYTQMISDVEQGKIGIVIMKDMTRWGRDYLQVGNAMEIFRRNNVRFIAINNGIDSIDQNTLEFAPFINIMSEWYARDISKKVKTGIKTKGADGKPVATEAPYGYIKDPENKDYWIVDKEAAEVVKLIFRLFMEGKNRNQIAVYLKEKEILTPTFYMKQQGRGTAKNKPLNEENRYNWNKATLTRILKRQEYCGDVVNFKTEKHYRDKRNHYVDKSKWQITENVHEPIIDRPTFENVERMLKNAPVKRPNGDGEIHALSGLMYCKDCGTKMHIRTIHKNEKVQHVTYCSEYAKGKAKHPKCNSPHRIDVDEVMENIAEVLRKIAQYSLENKAEFEKLVKKSLYKEQTEEVKKNQKRMPQITDRMEQIERVMNKLYEDNALGNLDTERYEQLSRKYAEEYYTLKAEKEEIKERLSECENANQRAKKFIRLAESYSNFEELTPTIINEFISKIAVHERDVKRAKYVVQRIEVYFNYIGKFENELTKQIEPTEQEMIQMREEIEEAKREKSRAYHRAYSKAYRAKNLEKCREYEKLKAREYRAKKKLQATT

SEQ ID NO: 9564 - protein, 520 aa, synthetic construct
MKKITKIDELPQGQLPNTNLRVAAYARVSTDSDEQLESLKAQREHYERYIKSNPEWEFAGLYYDEGISGTKMEKRTELLRLIRDCKQGRIDFIITKSISRFARNTVDCLELVRKLIDIGVYIYFEKENLNTGDMESELMLSILSGFAAEESASISQNSTWSIQKRFQNGSYVGTPPYGYTNIDGEMVIVPEEAEIIKRIFAECLSGKGGGTIAKGLNKDKIPASRGNHWSAGTVIDMLRNEKYMGDVLLQKTYTDSNYNRHPNTGEKDQYYYKDNHEPIISREDFAKVQDLIDERAKMKCKGMKENIYLNRYALSGKIVCGECGRNFRRKTNYSAGRSYIAWSCIGHIEDKESCSMLFLRDGEIKATFTTMMNKLAFSNKLILEPLFKSISQIDEESDRERMDAIDKRMEQLMEERNTLITLMAKGFLEPALFNQERNVLDSEMKNLSTEKTNLVSNSASGVLRANEIKDLINYVSADNFNGDYTEELFEEFVVNIIVNSRDELTFNLKCGLSLKEKVVR

SEQ ID NO: 9565 - protein, 556 aa, synthetic construct
MSNTKRTGQTALYERLSRDDEMQGESNSITNQKQLLESYAKRNGFVNIYHYTDDGVSGTTFDREGFQKMIKAVEENKVSTVIVKDMSRFGRDYLKVGFYTEILFKEKGVRFIAINNGIDSEKQSESDFTPFLNIMNEWYARDTSRKIQSIFRARMEEGKRVSPSVPYGYFRNPKNKQELLVDKESSKVVKRIYRLVIEGYGVTQIADILTKDKVLIPSAYAEIHYPENNHSSKKRGIEDPYFWTPTTVGYILEKQEYMGHTVLGKTICLDYKTKKRRKAKEDELIIFKNTHEAIIDEETWNNAQRLRKTVRRSPKYGTTSHPFTGLLICSDCGGKLSYREPAEHKEKKYDCDYCFVCQHYRHRKGSCSMHYIKVKTVNEILLKSIKEITNFAKEEKQEFLKVMNKLSDEKREEKYQEDKEKLEKLSSRNEELTTLITKLYEDHALGKIPVKHFDRLFNTYDTEQQDLEKQIQYFENEIESYHQRKVDTDKFLKMIEKYTDIEELTVPMINEYIEKVVVHEATGGRKGKDRKQQVDVYFNFIGNCQVPQKVDIEKMA

SEQ ID NO: 9566 - protein, 467 aa, synthetic construct
MLKAALYARVSSEEQAKRENSIPAQLRALREYCQKNNIEIFKEYKDEGITGQISKRPAFQQMLSAAFSGKINVILVHKFDRFARKVELSRSVKNSLQAAKVNVVSITEPIEDSPMGFFMEGLYELMAEYYVRNLSAEVFKGMNERALKGKHMGQMPYGYYCKDGNVYVNETQAEVIHKIYRFYDKGWGHMKIAKWLNESKIPTYKGIIGGWQTFQVKQILKNSKYIGENLWNGTVYPADFPAILEPALFHRVQEKSNLMTRTHTYRGNNYTKHHLLGLLYCGECGSIMRVKPNQDWQRRKFDTYTCRDASQYRGDCRFTKIFDAAKLESEVDAYLRSVLAGAPISLIVSKDAEKVKPADSSKSQIEKINAELKRAKDAYLSGVFDLDEYREIRQGLEKNKKILEAKTEDAPAPLQANEKEDILRKKIKSAWDLYENVQTAEEKRTILKTFIHKILIYRDKWEVVFYI

SEQ ID NO: 9567 - protein, 541 aa, synthetic construct
MARKKESTQPRLVAYYRYSGGSRQTEQSIEGQRRDCEAYARAHGMTILREYVDRHISGKTDDRAQFRQMIDDSAKRTFDLVICWKTDRFARDRYDSAVYKKQLRDNGVSVIYAAESNIEGAEGIIIEGLMEALAEYYSAELAEKARRGMRESALKGQTLGRTPPLGLTVDSAKHYVIDPAGADTVRLIFELYASGLSIASIIRRLNGMGLRTVRGNPFDKSSISRIIRDERYRGVYVSKKFDVRIEGAIPPIIDDDLWERTQKMIKLNRQSRAPHSAKADYILSCKLYCGECGCLMKGICGHNPSGRVYHYYSCPGRSLGRPCTRKNMPKDVLEKLVVESTSNLLLRPENIQQLADAIVSLQQAEASRPDPERAALEQALAEIRRKIGNILSAIENGTASAALTSRLSDLEQQESALDHQLASLSTPEPFTLSRDEVIFLLEQFRVSPSERTNAYCRRLVDTFVDKVELTNRELIIHFNISKSTENKNSQSNNGCSTGKRLVGDERIELPQVESESTALPLCKSPIFCCISRHRAGQRVLL

SEQ ID NO: 9568 - protein, 570 aa, synthetic construct
MREAALLLRCSTNLQDYNRQKNDLLALADKLGFNVREEYIFGEYVTGKDDIRKGNRQSIQSLIDVCLESMVDAVLIWEVSRLSRNFIYGVTTIDKFNRDYKIPIYFRDKRKWTIDIETGKIDIDFEKDLRKYFEQAEAELITLRSRLASGKRDAAGLNQVIGSVASFGYDRVNKRNVINPVTSLVVKEMYEKYLEEGATLLSVSSYLSAKYPQYIVKLRSAGSIRNILVNKANTGILVYTIYDEIDDIGYRYEVMQPSIISVEVYNAVLAKLKKNRTITAYPHSKKHLLQKMLFCYECGTCYTPSESLKRGTCYYRCGQKTAHIKPCNNSMSLNESIIDSVIWKFLKEQLFSESELNKEQREIAIEKEEENRKNIVTDIEIVEGAIANTYKDLDSLEDMLITRRITSERFDKKKAKIDTKLGELKHQKDKLKERINAIDFNIKRLNNLDYTQSFFDEVENDLEKKIALLKEYVQFIYPYMIGKNIVLLKTHTVDGIYYIFYRIYKGNFSKDKIQRTAYYIHEALAEFKPNGNNNFYAPNPSILGIDNEDLYYFVDEMEEVCENNGFEFEY

SEQ ID NO: 9569 - protein, 537 aa, synthetic construct
MKQPIYNTALYLRLSRDDELQGESSSITTQRSMLRQYAAENGLNVIAEYADDGWSGTNFDRPDFQRMVEDIEAGKINCVVTKDLSRLGRNYILTGQYTELYFPSRGVRYIAINDGVDSANGESEIAPFKNIINEWVARDTSRKVKSAMKVRFAEGAHYGAYAPLGYRKDPDIKGKLLIDEDTRWIIEKIFDLASHGMGAAKITKTLIEEKVPTSAWLNFQKYGTFAHIFEGQPESKRYLWTIGQVKNLMKDETYIGNSVHNKQSTVSFKSRKKIRKPEEEWYRVEDTHEPLVDKDVFRQVQEQIKGRRMERKDRTTQIFAGLVKCADCGWSLRFGTNKQNKTPYSHFSCSYYGQFGKGYCSAHYIRYDVLYAYVLSRLQYWSQEAEQDEGNLLHRLLKTGDRERAAAKKKAAAELKKAEKRQREIDNLFMKMYEDRAAEKITEHNFSMLSTKYQNEQAELSEKIQTLQEQLAKSEQENSDAEKWIALIKQYSNPAELTAPLLNTLIVKIVVHNTVTNADGEREQEVEIYYRFIGKID

SEQ ID NO: 9570 - protein, 584 aa, synthetic construct
MKEVEVIKARNDLQTRTRGKTIELMRVGAYCRVSTDSADQLNSYKSQVAYYTDMIKKNKEWVLADIYADEAITGTQVAKREDFQRMINDCMNGEIDMVITKSISRFARNTLDTLKYVRMLKERNIAVYFEDEKINTLTMDGELLLVVLSSVAQQEVENISANVKKGLKMKMKRGELVGFQGCLGYDYHKDTKTITVNEEEAEIVRYIFNRYIEGAGGSVIAHELENLGYKTKYGSSTWVQSTVIGIIKNEKYKGDLLLGKTFTVDPISKRRLENFGEEDKFYIRNHHEPIISEEVFEKAQEILARRNVNRGKIGEGSTKREKYSRKYAFSCMLECGFCGGTLTRRNWHSSSQYSKVIWQCVTATKKGKKFCKHSKGIPETAIEEAFVESYRLLCDDNKDVLEEFLQRMDDTLSSSVVSKQLAKAEKEIGALEKKKSKLVDMRLEEIIDKETYESKYADLVSKQEQLVEERKKLQETSDNEKDIKKRLKEFKKTLEQNEVLDKFDRYVFESIVEKVIVGGLDENGNVDPAQLTFVYKTGLKNNVDGAKFKPQRKNARGRHRTEELCSHDSNEVDKMCSDSSNDTR

SEQ ID NO: 9571 - protein, 482 aa, synthetic construct
MMNTINKVAIYVRVSTNMQAEEGYSIDEQIDKLKSYCQVKDWTVYDIYKDGGFSGGNINRPALEKMIVDAKKKRFDTVLVYKLDRLSRSQKDTLFLIEDVFSKNDISFLSLQENFDTSTPFGKAMVGLLSVFAQLEREQIKERMQLGMIGRAKSGKPMMFTNVSFGYTYSPKTQQLTINQAEAVIVKQIFNEFLGGMSPLRLMAYLNENNILRNGKEWNYQGIQRILRNPVYIGKIKYNNVIYPGLHEPIIDEESYYKAQKLLDARQDEMRVKGKNRQFKAKYMLSGTAKCGYCGAPLRIKIGNKRLDGTRLRVYQCCNRYPRKYAVVTYNDNKKCNSGNYQKEDLEQYVIAEIRKLQLKPEKIDKLFNKVSKIDTVQINKQIASIDNKINRLNDLYLNDMIDIDKLKADAEKFKEQKRVLEKELDKDLKIQEQEKNKEDFKKTIGFKDVTKLDYEEQSFIVKSLIDKILVKKGFIKILWKI

SEQ ID NO: 9572 - protein, 484 aa, synthetic construct
MKKEKVIPIDSLDLVDLYIRVSTTEQALEGYSVAEQEHRLRQYCAAMGHRIHKVHIDAGFSGASLDRPGIKETIKDVQKHLIRRVIVWKLDRLSRSQKDTLIMLEDVFLENGCDFISMMESFDTSTSFGRAIVGILAAFAQLERENIKERTMMGRQARLAKGHYNGSRPPLGYSFIPGSNDLQVDPYQAAIVREIFKLFLSGISINAIARKMEEKYPTVRTWNNTMIRRTLKNPVYIGKVNDNGILRDGIHEPLISEIDFQMANAILVHNSKIKKQSCRSRSLLTGLLYCGDCGARMHPRRIARGYPLRRYVCYSVSRTSKSMIKSDHCTNRLHPYTQEELEQIIIDEIKKLAADEDYISEVIRNSSAEAPVDDTELFQERIEELNRQTDKLLNLYQIGAIELDQIQERLAGLKQERESLTAALKESQTKTDINMDHLKIMSYASAFQVALESGDPEYTNSIIRLLIDKIVVLNEDIEIHWTFC

SEQ ID NO: 9573 - protein, 506 aa, synthetic construct
MTNNKDLQTGVIYARYSSDKQRDESIEGQIRECTEYAQREGILITKIYTDRALSARTDNRPEFLQMICDSANQSFNYVIVYQLDRFSRSREDSAKYKGILRRNGVRVLSAKEHITNEPAGIILESMLEGMAEYYSVELSQKVKRGMTENALKGKMNGAAIPLGYDLTESHHLAVNAHEAKAVRLIYDLYLKQHSMAKISNILHSKGYTTKRGRKISTSVIKNILSNEKYIGVYSWGDIRIEDSIPPIISRKIFDEVQKVMPNRIKNKGRRSEMYNLCGKLICGECGGHYAGSTATSRNGEKHHYYVCTNRRKYHACTAPNIRRDELEDLVINKTLNILNEPQIIERIAHLVMSGYSNVTQEAKTAIQSINNKIKAIDTELDNCMSAIKQGFITDRLKSEIESLENERQDLLEQKANHESAITPIKFTAAHIEYFLERMATENPTTKTGRSRILDTFIKSVTIYNDRVEIIFNYKNELPEFSNQCEGGSHFKVLVGPPGIEPGTDRL

SEQ ID NO: 9574 - protein, 413 aa, synthetic construct
MNIRTIEAKNNKRKKRICAYVRVSTTNGSQLDSLENQKVYFEKLYAEREDVDFLGVFCDKGISGSKYDRPDFQTMLDACRKGQIDVIHTKSISRFARDLINVLEISRELKTLGIDIFFEEQNIHTLSNEGEVVLTVLASLAEEELQSMSGNQRWSFRRKFQKGELLINAKRFLGYDLNEKGELVINKAEAQIVRTIFYSYLEGMGTHRIAKKLNEGKIPTVTGKKWYDSTIRNILKNEKYKGSLLLQKYFHDGVNGPKKLNQGQVEQYYIEDNHEGIVSKEIWERVQVKMKSRSRIQGTNKTYKFSRMLKCQYCGSTLKRQVSYKKKIVWCCSKYIKEGKNSCKGMRVPERDIEDWKLSSPVIVLERIEDGEKHYSYTGQKGTSNSHISNSEKNQSSRLLSSVYRPRRTAIKL

SEQ ID NO: 9575 - protein, 428 aa, synthetic construct
MSTDQDEQLSSYENQVNYYREYILKHEDYVLVDIYADEGISATNTKKRDAFNRLIQDCRGGKVDRILVKSISRFARNTLDCIKYVRELKELGIGVTFEKENIDSLDSKGEVLLTILSSLAQDESRSISENSTWGIRKKFERGVVQVNTTNFMGYDKDEKGNLIINHEQANIVRYIFDRFLEGYSPEFISKELREQEIPGCTGKAKWCPSAIWKMLQNEKYKGDALLQKTYTVDFLTKKRIDNDGQVNQYYIENNHEPILDREKWEIVQLEIARRKKFREQHKLQFYIMQKENNPFTTKVFCAECGSAFGRKNWTTSRGKRKVWQCNNRYRIKGQIGCLNNHIDEEMLEKAFMKAVGQLQKHRSDVVAKWQKLEQGTNLLYKHYSKQMYQILDLDKFDGVIMNQVLDRISISEAGHIVVTFLEGTEVEL

SEQ ID NO: 9576 - protein, 527 aa, synthetic construct
MYELTQSMESLSVDEIIVYLRKSRSDSPEMSVEDVLKKHEEMIQDYANTHFGSPIPEKNIYREVVSGETIDSRPQVKIVLQKIESPQIKAVLIVEPQRLSRGDLEDCGRLINILRYTNTMVLTLTHSFNLQEEYERKFFEMEITRGNDYLEYTKRILRRGRESSAAKGHYIGSVDPYGYRKIVIKKDGVNCHTLEIVPEEANVVKLIHELYAYTPGGIGFTNIAHKLDSMNLKPKKAAHWTPAIISSILCNPLYLGLIRWDTRKVVKYINNGQLEKSRPRSSDAKYYKGLHEPIISQELYDACMARRGTNPSLRRNKALCNPFAGLLYCGTCGHAMSLKIYKNHNSVSQIILCNHQSYCHTKSVLYSAFLERFISSMENTIHDFELALLADDGNAQAVNQSIVANLETRLKKLQEKDMRQKDAYEDGIYSKEEFLERNIKTQQEIASTITALTAAKETKENYVDYGEKIRRFRDCINALNDPELSATEKNQFLKSCVSKIIYYNNMESKAGVGRYVENVFSLEIQYI

SEQ ID NO: 9577 - protein, 463 aa, synthetic construct
MRRKATAPVEKILLRVAIYIRVSTDKQVKDGDSMRDQLATGQKYIDSHENMILVDTYIDDGISGQKLKRDDFQRLIDDVRAGRIDLIIFTRLDRWFRNLRHYLNTQDILDKHGVSWTAIEQPYFDTSTPHGRAFVNNSMIWAELEAQNDSDRILGVFDDKVDNGEVLSGSTPLGYKIVNKHLVPDDDAPTAVAIFQYYRKTGNLSMTLRYMESEFGLVRSAASLKNMLTNTKYIGEFRDNKNYCPAIIDRDLFFDVQRLLKINIKSGKKHDYIFSGLVVCDDCDHIMSGCQQRARGRVRADGTRIIYKYSVYRCRQGVNLHRCPNRKLVFETTLEKMLLERIRPELENYIAEYEVANLPALRTDAKRRSVEGKMQKLKDLYLNDLITMDEFKLDREKLLMQLEKINAEDSRPVKDLSYLKNFLKMDFESVYDSLSIPERRELWRSIVKEIRVDHDKNIHIIFL

SEQ ID NO: 9578 - protein, 514 aa, synthetic construct
MAKRKFNKGGEVRLVAYYRYSGGSGQTEQSIEGQRRDCETYARLHNMTIQKEYVDRHISGKTDDRAAFQQMITDSDKGAFDMVICWKTDRFARNRYDSAVYKKRLRDNGVEIVYAAESNIAGAEGIIIEGVMEALAEYYSAELAEKMRRGMRESALKGQAISRCRALGLKTDEHKRFVIDEKTAPTVRFIFEHYAAGESATSIVDKLNAKGLRTSQGNPFNKSSIPRIIQNEAYRGVYVSKSYDVRIEGAIPAIIDDELWERAQTMLKLNRQLKAKNEPKADYILSGKLYCSCGSLMRGMSGHSATGEVYRYYTCPNKNCHLRNIPKDDLEGKVMQSISDHLLQPEAMEALAEAMVEVQKADAEKPNAERVAIEQSLADVRRRSKNILDAIENGTANAQLCARLDDLTEQEQTLSFQLSSLEKEKPVVFTKEQYLFLLEQFLMEPSERTPEYGRRLVNAFVTSMVVSGRELVINFNVSDETVNKNKKTSQTNLQKESSSGMRLVRVARIELTAS

SEQ ID NO: 9579 - protein, 581 aa, synthetic construct
MAYAMKVPAASADDRIVAIYVRVSTGYQVDKDSLPFQKKELKAYCKHILHVDMSRVEIFEDAGRSGKNTKRPAYERMMQKVRAGLVSHVLVYKIDRISRNLVDFSLMYDDFKYNRVTFVSLNEQFDTSSAIGEAVLKIILVFAELERKLTSERVKDIMIGRANEGKWNGARVPYGWDWDSSAMWPVHSEKEAPFGRAMYEMYLEVKSTGKIRDYNNAHGIPTKRGGEWTSKTVGDFLRNPMNKGDYRYNYRESARGRKKPIGEVVYLEGVFDPLIDPEIWEKVNKIMDINRDKRNMGGLHPVEKNCNVFAGLIQCGSCGSGYLVGKKDKRRKNGFTPSMYYCSAKTRAIHCQNLNVSDVKIGPFVINYISAMARVSNERRKIKTPEDLEEMLLSDKAVFADIMGLSSDSLNNTFELLTGKSATGGALWRADLVDQEGAAADPAEIESLKDQIRKYERAKERLEDAYYFSDDGMSEKEYLEKKNRFDSGRVAAENKLKELTETHIASGVDESAFMKSASAFLLTHKIRAGSHIVYSDLAGMVEEESIKEFFNLVLDHITVKDRRVTEIVFANGLSHKFIYRY

SEQ ID NO: 9580 - protein, 428 aa, synthetic construct
MVKTTPQLKKITVKPTKPRLLRVGAYARVSTEHDRQLSSIAAQVSHYSRLIQSTPGWEYAGVFIDEGITGTTTKKREGFNDLMNAARSGQIDVILTKSISRFARNTLDLLQGVRELKSLGVAVKFERENIDTSTADGELLLTLLGSFAQEESRSISQNVKWGIRKKYADGQLHSRQPYGYRYSEGELHIIDHEATVVKRIFNEFLAGISPEKTAARLNSEGIKPRYTNKFQGKRLRTILENEVYIGNASLQKTYRPQIANHCTKPNQGELPRFIVENSHEPIIDHQTFNAVQIELAKRRKHGRAASPGISTNAFTSHIVCSVCGKKYHRRTKKRGNRSRKIWWCETATKGKGNPCRAPQLPETILKTICLDLLGLTDWDDTQILTKLDKITVFPNRYLTFTLTNQNEPVIVDLAQWRKPSDCHRNNQA

SEQ ID NO: 9581 - protein, 523 aa, synthetic construct
MTATATTRRKRVTAIPATKTLRHNADSFSHAIKRRVAAYARVSTEQEEQASSYEAQIDYYTRHIQSRTDWEFAGMYADEGITGTNTRHRQGFKTMIADALAGKIDLILTKSVSRFARNTVDTLTHVRQLKEAGVEVYFEKENIWTLDSKGELLITIMSSLAQEESRSISENVTWGHRKRFADGKVMVPYKSLLGYKKGDDGNLAIDQTEAPAVRRIYARFLQGATPQTIAKELTTDQILTPHGKNIWSASTIRSILSNEKYKGDALLQKSFTTDFLTKTKKTNEGEVPQYYVTGNHEPIIEPATWETVQAELARRSGKGTASTHPFATRIKCADCGGWYGRKVWHSTSKYRRYIWRCNNKYKPGYHCTTPHVTEQQIKEAFVHALTERVSNDAVLDGAMQLLDDTVYNTTELENRQTEIATRMEETVALMNQLITENANTAHDPDEYDARWHQLEQRYQQQEQEHQAINDQITDLTTRRAQAVAIHDYLVTRSPLEYSNEAWNMLVMQAAVKTDGTIRLYFKD

SEQ ID NO: 9582 - protein, 508 aa, synthetic construct
MKKAIAYMRFSSPGQMSGDSLNRQRRLIAEWLKVNSDYYLDTITYEDLGLSAFKGKHAQSGAFSEFLDAIEHGYILPGTTLLVESLDRLSREKVGEAIERLKLILNHGIDVITLCDNTVYNIDSLNEPYSLIKAILIAQRANEESEIKSSRVKLSWKKKRQDALESGTIMTASCPRWLSLDDKRTAFVPDPDRVKTIEIIFKLRMERRSLNAIAKYLNDHAVKNFSGKESAWGPSVIEKLLANKALIGICVPSYRARGKGISEIAGYYPRVISDDLFYAVQEIRLAPFGISNSSKNPMLINLLRTVMKCEACGNTMIVHAVSGSLHGYYVCPMRRLHRCDRPSIKRDLVDYNIINELLFNCSKIQPVENKKDANETLELKIIELQMKINNLIVALSVAPEVTAIAEKIRLLDKELRRASVSLKTLKSKGVNSFSDFYAIDLTSKNGRELCRTLAYKTFEKIIINTDNKTCDIYFMNGIVFKHYPLMKVISAQQAISALKYMVDGEIYF

SEQ ID NO: 9583 - protein, 580 aa, synthetic construct
MYNMSPYSLSRSFRDKPCRAVIYGRASTEHEAQVKALQNQMQWYDDVARFHPQWNVINRYIDQGITGTQVYKRDVFMRMMEDAKQQKFDLIVTREVCRFARNTVDALVCVRQFAAIGIEVYFVNDNIWTLDGDGELRLTIMATMAQEESRKISERSLAGQRVSREKGVLYGNGNIFGYTRNKLTKQFEIDPDQAETVKMIFDLYDSGMGETLVAKELTRLGRKNGVGKVKWDAGKVSKIIKRKNYLGYTVYCQSYSNNYLEQKRIKRDESEFVYVKGGFPQIISEEQYERCNAIRRSRTKRLTDEKGRTRSFGIQQAQNVWGRKMRCRCGSPMLRHRWRTNNAGKPIYGYECKRHHDTPRIRLQNEQGNPTPICEIKPVGQSKLELMASKIFERVWGDQREIVLQTCKMLDACYKPDADRRADLMKAKDDSVQLLQQQLDDLVVVRARGEIEQDKFLQRTIEIQQQMEALRQSKAQIASEDYNPGRLDMEAIEAALCEAVEMHDGLVSEDFIDLFVSQVTPLSDSRFAWCLDFSPQPTVAFLNLAGQRKYTTCSMDSKLHFGPFADEEGHTIPFPGSLRR

SEQ ID NO: 9584 - protein, 519 aa, synthetic construct
MKKVTKIAETANSKVKLKKIRVAAYCRVSTDSDAQLESLEAQKTHYENYITSRDDWEFAGLYFDEGITGTKKDKRPELLRLIDDCKAGKVDFVITKSISRFSRNTTDCLELVRKLLALHIPIYFEKENINTGSMESELFLAILSSMAEGESVSISENSKWSIQKRFESGTYKVSYPPYGYDWNGEQMIINPEQAAVVKEIFAALLSGKGTHAIADDLNRRGIPTKRNGRWTATTIRGMLSNEKYVGDCLFQKTYSDSRFVRHNNHGEQTQYMVKDHHEAIISREDFEAAHAFIHQRATEKGVVKGSDKYQNRYTFSGKIICGECGDTFKRRIHSCTGYKYAAWCCNTHIKNKDKCHMLFVKDDDLKQAFITMMNKLVYAHRIILKPYVDALKNTSSDDTLRRIQEIQTLLAQNTEKRETLTKLMTQGIIDPILFNKETNELLSQADSFRDEINALKNAVSGDVTKVTAATALLHFTEKGGILQEFDDDLFKEYVNRIIVRSRNEVCFELKCGLTLRERM

SEQ ID NO: 9585 - protein, 522 aa, synthetic construct
MGNVMVIPARRQVGNTVKQSDQKKLRVAAYCRVSTDSEEQETSYEAQVTHYTEYIQKNPEWELAGIFADDGISGTNTKKRDEFNRMIDECMAGNIDMVITKSISRFARNTLDCLQYIRQLKDKNIPVYFEKEAINTLDAKGEVLITIMASLAQQESQSMSQNIKLGLQYRYQQGKVQVNHNRFLGYTKDDNGHLIIDPEQAEIVKRIYREYLEGSSMDKIADGLMADGILTGAGKTKWHTSTINKILRNEKYMGDALLQKTYTTDFLTKKRIKNNGTVPQYYVEGDHEAIIPKELFMQVQAELVRRRVVHVSPTGKKRSFSCNHCFAQMVFCGDCGELYRRVHWNNHGCKSIVWRCISRLEPTSAEKNCTNRTVNELLLQEITVKAFNKILTERDFFLKTLQQNIAKAVVSADTLSPGGIQARLEELQKELIKKANNKQDYDAIADEIFRLRDQKEQSELDSHHREEAMNRIKELQDFIAKQKTDITEFDEALVKKLIEKITVFADHFTVEFKSGLTIETEA

SEQ ID NO: 9586 - protein, 507 aa, synthetic construct
MKRVISYIRFSSEKQAKGDSLRRQSKMVTDWLKAHPEYYLDQDLSFRDLGVSGFTGKHLKGGLGDFLTAIEKGLVKAGDTLLIESLDRLSRQDVDQASELLRNILRSGVDVVTLSDGEHYTSESLKDPLALIKSILIMQRAHEESLRKSERIQAAWDAKKEAAKAGIKVSKRCPAWLKLNDDRKSFSVIPEKVETVKRCFQLRLEGKSIWEIVRTLNAEGHQTLNQYKAGKFGQTSVQDLLKNRSVIGYFTPKGCEEISGYYPAIIDETTFYKVQQLSHSRYGKRSVSDKPLSVNLFKGVIRCSECGHALIITGFSDTRSGIYRCPLRNENRCSAKGLSRKQTDGTLLALLSRLDRFDSDTTNIIDTLKLHREHISSNIEKLVQLSLEIEDLSAITSKLKQLKGELSQVDADIEKETQRLKSIDVGCLSDCDLTTKAGRIEAQLIIKSAVKEVVLNTAKRRCKVTFHNGKVIDLSITENPSEDVTEAIQSLSEVTERGLIDVDEVII

SEQ ID NO: 9587 - protein, 499 aa, synthetic construct
MSKKAVIYARYSSDRQRDESIEGQVRVCEDYAKRNDLTIIHIYSDRAMTGRTDQRPEFQKMIRDAALQTFDVVLVYKLNRFARNRYDSAKYKHKLKKQGVRVISAMENIADDPSGILLESVIEGLAEYYSAELAENVTRGMTENALEGKWPGGTVPLGFKLDGNRHLIIDEPNASTVRDIYQRILDGQTMASVIKGLNEQNKLTAKGKPFSKNSLRTILKNERYRGTFLWNGIRKENAIPSIVDSSVFEAVQKIMNFRKKSRSCPRQENYLLSGKLYCGSCGEKMVGISGTSKRNTLYYYYACDGKLKKNGCLRKNIRADVLEKIVVDQTTKILSNDEALKAIAAQAVDIQELRKESLNVQSLKNQIKDIEKKLKNCIDAVENGLASESIGNRIEEYEHTLKRLKFTLSQELLNGGVQKLTKNRIEYFFMAVREKVKTADRYKSILLSSLIRCVILYDDYIEIQYNYRSELPLLENPVRVKCSNTHSLVDHQGFEPRTP

SEQ ID NO: 9588 - protein, 480 aa, synthetic construct
MTTHKVAIYVRVSTTSQADEGYSIDEQKAKLTSYCEIKDWNIYEIYTDGGFSGSNTERPALEQLIRDAKRKLFDTVLVYKLDRLSRSQKDTLYLIEDVFLENNIEFVSLLENFDTSTPFGKAMIGLLSVFAQLEREQIKERMQLGKLGRAKSGKSMQWAKTSYGYDYIKETGTLSVNPYQALIVRKMFKWYLSGMSITKLRDALNEQYGQDKEWNYRTVRVILSNPVYCGYNQFKGQIFPGTHEPIVSEDDFNKTQEEIKTRQRTAAQRFNPRPFQAKYMLSGIAQCGYCSAPLAIKLGMIRKDGTRLVKYECKQRHPRKTKGVTVYNNNAKCDSGFYFKDDIEHFVLAEISKLQTDSDYIDKLFSNTDKETIDRASYQKQIDNLTAKISRLNDLYIDDRISLEELQKRSSDFMAERTALEKELDADTSLKAVERKKDIRRVLDTKDVFTLDYEQQKAIARALISKVRVTSETIVILWKL

SEQ ID NO: 9589 - protein, 521 aa, synthetic construct
MKRITKIEGNAILLNAVRKTRVAAYCRVSTGSDEQLLSLETQKDHYERYIKAHPDWEYAGLYYDQGITGTKKDKRPTLMQMVADCEDGRIDRVITKSISRFCRNTTDCLELVRKLLGLGIPIYFEKEDLDTGSMESELMLSILSSLAESESVSIAENSKWSIRRRFENGTFKLAYPPYGYNYIGDGEWAINEEQAKWVRFIYSETLSGKGSDAIAAELIELGAPTKKGGKWTSTSVRGILSNEKYTGDCIFQKTYTDERFNRHTNYGEMDQFYMEGHHEAIVSHEDFDAVAALVEQRAKEKGITRGDAKYQARYPMSGKVFCGECGSPLKRRMNYSTHIQYPALTCSGHLKDKNSCSQKFIREDALQMAFVTMMNKLIFAHKEVLPPLLTSLRNVSKKEAISRLSELDERLEKNAERQNTLTTLMTRGYLDPALFTQESNDLLTEAQALTEGKEHLVFSVNGEMKKTEKLADLIRFCNRGEMLTEFDGDCFSQFVERVVIHERTTVGFELKCGLTLKERIR

SEQ ID NO: 9590 - protein, 521 aa, synthetic construct
MKKVTKIDGVQKNTAINSRLRVAAYCRVSTGSDAQLESLEAQKSHYEQYINSREDWQFAGLYFDEGITGTKAEKRPELLRLITDCEARRIDFVITKSISRFSRNTTDCLALVRKLQSLEIPIYFEKENINTGSMESELFLAILSSMAEGESASISENAKWSVKRRFQNGTYKLGYTPYGYDWDGKNMIINPEQADVVKRIFADILSGKSTNTIADELNAEKVPSKKNNHWTSSTIRGILANEKYTGDVIFQKTYTDETFNRHTNYGEVDQYMAPDHHEAIISHSDFDAANALVNQRAAEKGIEKGSDKYQQRYAFSGKIICGECGDTFKRRIHTCNTYKYVAWACNTHLKNKESCHMKYVRDDEIKTAFITMLNKLIYGYRLILTPYLKVLENSSGDEAIHRIQHLEQLIAQNSEQREALTKLMAQGYIDQILYNQETNALLLQAETYRSDIEAITIGMTGDAAKVTETNLLLHFVSHTDMLTAYSEELFENYADHIEVMSRNEIRFVMKCSLTFTERIDD

SEQ ID NO: 9591 - protein, 489 aa, synthetic construct
MRIAAGYIRVSTHMQEELSPDAQKRLLIEYAKKNDMILSNEFIFMDKGISGKKAEKRPDFMKMISMAKQKPAPFDVILVWKFSRFARNQEESIVYKNLLRNKCKVDVVSITEQTGDDMFGKLIERIIEWMDEFYSIRLGEDVTRGMVENAMRGNFQSSPALGYRVVRKGELPQKDPEESKPVEIAFKKYVYGNMGFIEIARYLNSLGYRTKKGKLFEARGIKYILTNPIYKGWLRWNYRNPDGSKKAKDDWIIVKVPGLEPTVLEELWDSANEKIELADKIVVKKSKPSSVKRHWLSGLIKCSACGRSLSTSIHTEKRYGRTYTNFQCYGYLKGKCSVSHQVSEKKIVPIVLSMLKEDSLKKEVPFEVLTDHKNTDEISIIKTQLEKIDMKELRIKEAYRNGIDTLEEYRENKDIIVRERLALQDKLECLSVPADEIKADMPNRIKSVYDIVSNESATKDEKYAAINSIVKKIIYRKSDGEIDIYYYYS

SEQ ID NO: 9592 - protein, 525 aa, synthetic construct
MSRTVTAIPATKKVRSAAASSGVPARRRVAAYARVSTEMEEQTSSYEAQIDYYTTYIRSRNDWQFAGMYCDEGISGTSMKRREGFQTMIDDALAGKIDLILTKSVSRFARNTVDSLTTVRKLKEVGVEVYFEKENIYTFDAKGELLITIMSSLAQEESRSISENVTWGHRKRFADGKVMVPYKSLLGYKKGEDGSLVIDETQAPTVRLIYQLFLDGMAISEIKTELAARKILTPRGKEVWSTSTVRSILSNEKYKGDALLQKTFTTDFLTKKMKVNEGEVPQYYVTGNHEPIIAPRIWDQVQYELATRHANISSAKVGLFSTRLKCAQCGSWYGRKTWASNTKYKYTVWQCNHKYAGEHPCSSATMKDEDIKNAFVQALNQLIARQPRQSHLLQIFDSMFDTSRMEEQAAACQTKIVELTEQIEALIAENQQRALDQDAYQNKYTELDTAYRKTLARKTSLEADIAANTAKHAAVTTALGDLAGEPVSEFRPAQWSALIDHAIVDEDTIRFVFRVGEQVSMALKG

SEQ ID NO: 9593 - protein, 520 aa, synthetic construct
MAGKNITVIPARKRVGSTAAKEKIKKLRVAAYCRVSTETEEQNLSYEVQVAHYTEFIKKNTEWEFAGIFADDGISGTNTKKREEFNRMIEECMEGNIDLVITKSISRFARNTLDCLKYIRQLKEKNIAVYFEKENINTMDAKGEVLLTIMASLAQQESQSLSQNVKLGLQYRYQQGKVQVNHNRFMGYTKDEEGNLIIVPEEAEIIKRIYREYLEGKSLVGIGRDLEKDGILTAAGKPRWRPETIKKILLNEKYIGDALLQKTFTVDFLTKKRVKNEGHVPQYYVENSHEAIIPKELFLQAQEELHRRSNIYTGADKNKRIYSSKYALSTITFCGDCGDIYRRVYWNIHGRKEFVWRCVTRIEQGPEVCKNRTVKEAELYDAVMTAINRLLAGGDNMIRILEENIHAIIGDTTEYKISEINTLLEEKQKELISLANKGKDFESLADEIEELREKRQTLLVEDASLSGENERINELIEFIRTNKYRTLLYDDTLVRKIIQNVTVYDDHFVICFKSGIEIKV

SEQ ID NO: 9594 - protein, 521 aa, synthetic construct
MKKITKIDELPKSQSSKSKLRVVAYARVSTDSDDQLVSLKAQREHYENYIKSNPEWEFAGLYYDEGISGTKKEKRPELLRMIRDCESNRIDFIITKSISRFARNTTDCLELVRHLMDIGVYIYFEKENLNTGDMESELMLSILSGFAAEESASISQNTTWSISKKFQNGSYIIGTPPYGYANINGEMVIVPEEAEIIKRIFAECLSGKGGSVIAKGLNRDKIPARRGNHWSSGTVIDMLRNEKYKGDVLFQKTYTDSNFNRHINNGEKDQFYCKDHHEPIISREVFSKAQKLITQRAKSMSKTANKKAYQNRYVLSGRILCGECGSKFKRRTNYSVGRSYIAWSCKGHIEDKDSCSMLFLRDGEIKATFSTMMNKLAFSKKLILKPLYDSINKIDEECDLARIDAIDKRMEQLTEERNTLIGLMTKGFLEPALFNKERNVLDKEMKNFTAEKTNLVMSFTSGSSQADEVKALLDYVSADNFDGNYTDEAFEKLVENIIVNSRDELTFKMKCGLSLIEKVVR

SEQ ID NO: 9595 - protein, 523 aa, synthetic construct
MRFFSYGRKSVFSDKSDSIDNQFRMNREYCESKFSGQVDSWQQFSDEDFTGANTSRPDLQRMLSFIKGGFCDVLVVYQLDRLSRDVRDFANIYALLEEHGVMFISIKENIDTTTPIGRAMMYVTVVFAQMERETIAARVTDNMLGLAKKGYWTGGNPPVGYVRKHIVVNGKKHCSIEVDPDGARYVTQIFDTFLAYNCSLQGMETRFKNQGIRTQSGKFFSTTQLHKMLTMPYCVEATPEVYDFYAAKGCIMDPGSPREMWDGSVGVIIYGRSTEKNKKHQAQPPEKWTVCLGKHKPFMPAEKWLAVQSRFTQNKCIKDAKWPVPLLKGVLRCKCGNLMQVSRKKKVDGTCSSWYYCRKRMRQGVDACDMGQIKCDLLDEEVLELFRGITADPALIQKFVKAEAPTDVPDLKAAQARVSACERKIGRLAASLALAEDSAASKYIIAEMERLDVELGALKREASLAEMESHRAAASAKDAKATAAEIAKLIHGLDGFDDKEKNAIARAVIQECTWDGERLFITL

SEQ ID NO: 9596 - protein, 526 aa, synthetic construct
MPKITMIPATINPLTHLPSVAARKRRVAGYARVSTDSDEQFTSYEAQVDYYTKFIQSKPEWEFVKVYTDEGISGTNTKRREGFKEMIADALAGKIDLIVTKSVSRFARNTVDSLVTIRKLKENGVECYFEKEGIYTFDGKGELLITIMSSLAQEESRSISENITWGQRKSFSDGKVHLPYKRFLGYEKGEDGRPAVIESEARIVRLIYRLFLEGKTPAGICKYLEELGIPSPGGKQTWSKTTVTSILQNEKYKGDALLQKKFTVDFLEKKMKPNEGEVPQYYVTGSHPAIIEPDEWEQVQAEFARRKTLGKAYSGKSVLSAKLFCEDCGAFFGPKVWHSTDQYRRTIWQCNGKFANEERCHTPVVDTETIQRLFIKAYNLMMQDRVQIIKEIEAWRQKLMDFGTLDADIERQLEETQVVAELVKAAVKENASTAQLQEAYLKKYEALTKRYEKAAAELERLQSLRTARSQQDKKMVLYIRTLKKQPEVMHDWNDTIWTVMIEKAIVHKDGQITFVFQNGTEIKVGA

SEQ ID NO: 9597 - protein, 437 aa, synthetic construct
MPRAITIIPKPPKLDNKKRVAAYARVSSGKDAMLHSLSAQVSYYSDLIQKHDDWLYVGVYADEAKTGTKDSRADFQRLIADCRARKIDIVITKSISRFARNTVTLLQTVRDFKAWGVDIFFEEQNIHTQSSDGELMMTILASYAQEESRSASENQKWRIKRNFEEGMPWNGAMLGYRLKNGRYEIIPEEAELVRRIYTEYLSGDGYLTIAKRLNEDGIPSRFGKQWGQSVISKILSNYTYTGNLILQKTFRENHITKKTIINNGELPKYHAEDAHDAIIDLATFQAVQAEKARRAARFIKKPTPKKTYPFTSLLVCDSCGKNYRRKVTRTGPVWVCGTFNSQGKAACASKQIPEETLQKVTAEVLGQADFSEALLHRLIKSILVCSGNVLIFRFFDGSEFTRIWQDRSRSQSWTDEMKAAARQKALERRNPKCLKSQ

SEQ ID NO: 9598 - protein, 491 aa, synthetic construct
MPEALNAVIYARYSSDRQTEQSIEGQLRECYAFAKANDIAVIDTYIDRAISGKTDNRPAFQKMIEDSAKRQFQAVIVYRLDRFTRNRYDSAIYKARLKKNGVKVLSAMENLNGSPESIIMESLLEGMAEYYSVELSQKITRGMRENALKGKALGGQRVLGYKVNSDCYFEIDETTAPVVVDIFKLYSSGKTVKEICDILNARGVKTARGGAFNKNSLHTILTNKKYIGIYKTKYGEIVGGIPAIIDKELFEMVALRMEQNKKAPARAKAEINYLLSTKLFCGKCRSAMVGESGTSKTGKKYYYYACVKKKREKACDKSNVKKDWIEDLVIQRTVTDILKDDVIEKIADRLVELQKAEAAESGTMLYLQNSLAEIQVSIKNIMTAIEKGIITESTKTRLTELEDEKRNVEIEIAKESIARRIISREQIIYWISSFKDGDITSEKYRQQLIDTFVHAVFVYDDKIVITYNYSGENNTATISDLDLSSPPCELG

SEQ ID NO: 9599 - protein, 590 aa, synthetic construct
MKTVEKIERKLPVLKTRKRVAAYARVSMESERMQHSLSAQVSHYSALIQKNPEWEYAGVFADYGISGTGTKKREEFNRMLAECEAGNIDIILTKSIQRFARNTVDLLNTVRHLKDLGIEVRFEKENINSLSGDGELMLSILASFAQEESRSISENVKWGTIKRFKQGIPNGKFSIFGYEWQDDKLVIVPEEAEIIRWMYAEYMKGASRIEIGRALMDRGIYTRQGKPWVDSNVKVILKNITYTGNMLFQKEYCEDPITKHRRKNYGEMPQYFVEDTHEAIIPMDEWQAVQAEFKRRRDLGPFGNKSLKLSAFSTKITCGCCRKHYRHSGKRNTAGEVYYIWICQTKSQKGVSACPSKNIPEKMLQNTAAEVLGLDEFDEDVFSQQIEEVIVIGDDTLTFRFYDGHEVTTKWQSTAKTDWWTDERRKLWGERHKRKDTNPNRNTFYEFTGFIKCGCCGANYRCQSGKRKDGTPTRSWYCTGPRSKCRNPAIRDETMKRLVTEILGLDEFDEAAMDAQIESATILDHMVTFHFRDGHIESRDFLDKRHGTPWTEERREKAKKSMKAAWTDERREAMSERIKKIRSEKKWPNP

SEQ ID NO: 9600 - protein, 523 aa, synthetic construct
MAKSVTTIPATLSRFTAAPINSTKKRRVAAYARVSTDNEEQLTSYEAQIDYYTNYINGRDDWEFVGVYPDEGITGTNTKKREQFRQMVADALDGKIDLIITKSVSRFARNTVDSLTTIRKLKEHNVEVYFEKENIWTFDSKGELLLTIMSSLAQEESRSISENCTWGQRKRFADGKVTVPFNRFLGYDMGPDHNLVMNPEQAKLVKRIYGMFLQGQSPFQIARTLTEEGIPSPGGKDHWNPSNIKSILTNEKYKGDALLQKTFTVDFLTKKKKANEGEIPQYYVKDNHEAIIDPETFEMVQTLMATRKKGRNRKSSVSIFSSKVKCGDCGSWYGPKVWHSNDAYRKVIWQCNHKFDGEKCATPTLTEDEIKELFLRAANQVIDQKEQFIAIYEQVLSRSLDTTALESELSDLEAEINIAAELIEECIKENAHVALDQDEYQKRYDALVARFDKAKARHTEVTDLIAERMARKHQIEAYLKNLRSREPLTEFRETDWLAMVNYITVHSKKDIWVTFKDGNEIKA

SEQ ID NO: 9601 - protein, 498 aa, synthetic construct
MQIEVRKADMRKEKKRLKVCAYARVSTEASEQENSLENQVSHYTEMIQSNPAYEFAGVYADFGISGFKESRPQFQKMMQDAKNGKIDLIITKSVSRFARNTAIVLKASRELKERNVGIFFELQNINTLTEAGELLLTILAAFAQAESESASESSKMAYLHRIENGEVVAYLERSYGYEKDENGEYRAKEPEASVIREIYDLVIQGVNCTNIARVLNARNIQTVQGAEWTASTVFRIVENEIYKGDVLMQKTFIDGKRHQVQNRGEKAMYYAKDNHPPIVSEKTWEKAQRKLEDMRAERAEHSVIQEFTEENYPYMNHIFCAKCGWPLKPRVYSHGHRLSWDCSGQKRGTKKFCTGIHVLDNDLRKMKIEGNRYFSETVDKYGEVHLKHVGERTWKNKHKKKKFNHKDLYPELNEENYPYYKRLYCARCESRLGRYISHGTVRWICSSYKRKGQAKCPGVRIPDEIIKEWNLPDGKIYIMGKEDKNGEKHYSYTSESAL

SEQ ID NO: 9602 - protein, 516 aa, synthetic construct
MARKKKVSPGNRLVAYYRYSGGSQQTEQSIEGQRRDCEAYARQHGLTIVHEYIDRHISGRGVESRLAFQQMIADSSKHLFDLVICWKTDRFARNRYDSAVYKKKLRDNGVRILYAAESSVEGPEGIILEGLMESLAEYYSAELAQKMRRGMRESALKGRAINPSRPLGLTTDEHKRFIIDEKNAPTIRFIFEHYAAGESSASIVEQLNAAGLRTSKGNAFNKCSIPRIIQNEAYHGVYICKAYDVRIDGAIPAIIDDDLWKRAQKMLTLNKQHRAPHSSHADYLLSGKLFCGCCHSLMRGISGHNCRNDVYYYYACGNKADGGTCKKKNIQKDVAENLVVNAICENILRPDTLEDLADAIAAAQQADVNQPDPERAMLEQNLADVHRKINNIIESIENGTASSRLSARLADLEQQESTLNYQLESLKEVHPLVLDRERILFLLEQFLISPNERTEDYNRRIIDTFVNRIEIADTEMLIYFNLSEASASEKQKNSQPNSCSTGNHLVRVARIELTAS

SEQ ID NO: 9603 - protein, 534 aa, synthetic construct
MLKADGKYCIYLRKSRADRDTQLYNGSKQDVLKRHREILLSTSKNLGIHISKIFEEVVSGDTIAARPEVQKLLGEVENNIWDGVLVVEVERLARGDTKDQGTIADTFKYSDTLIITPQKIYDPSSEFDEEYFEFGLFMSRREYKTINRRLNRGRIKSVKEGKWIASEAPYGYRKVKIKGDKGYTLSFLEGEIDVVRMIFNWFRVGELQENGTYKTLSPDNIGVRLDSMGIKPRKAEKWSRATIRDILTNPTYAGMVRWGYKKEEKRMVGGILSTERIRSKDFHLYDGIHPAIITKEDHYSILRKLTANAKSSSVNNNNKLKNPLSGLVYCENCGHLTTRLGQNSKNKYETIKCPNRNCDNVSAPLFLVEEKILASLSDWLSKYKLECDNKDFAAEELHLKQALISNLYKEKEKVKRQLDKTYTLLEQEVYTTEIFVQRNKALTDQLQAINNNIIDLETDYNAELNTKYEYEELIPKMENIIDIYFKIEDIQTRNELLKSVLEKVLYKKTERNKKGNALNANFEITIYPKLPKKK

SEQ ID NO: 9604 - protein, 515 aa, synthetic construct
MQYLIYLRKSRADREAELRGEGETLARHEKALLELARRQHLPIADIYREVVSGETIASRPMMQQLLSEVEQGVWDGVLVMEVERLARGDTIDQGIVAQAFKLSDTKIITPIKTYDPNNEFDEEYFEFGLFMSRREYKTIKRRLNNGRQASVKEGKYVGNRPPYGYERIKIENDKGYTLKPLEKEAQVVRMMFRWYAYGAHGISTIAEQLNEMAIPSKTGKQWVYPTVRDILQNPVYVGKIRWGWRGQRKRVKNGSVSVSRPRSDDYLLADGIHPPIVDQQLFDQVQKKFSMHKPLPASAREMKNPLAGLVICAKCGAKMQRRPYQRENIRTGLICPNNKCRNVSAPFDDVEQMLIEVLAEYIKEEKLRISNGHTQIDDSVLQILQNQLADLREETVDLNKQNDNIHDFLEKGIYDVDTFLQRSQKISSRITEIEEKQKTLQQEIIEENKRIESATSIIPMTEQLLLQYENMSALEKNSMLKEVLRCVKYERECSIRDGGTADNFTLYLYPKISHK

SEQ ID NO: 9605 - protein, 562 aa, synthetic construct
MKRVNCLYRVSSKQQLHGDDIPVQREECMAYLGEHTDWEFNREYVEKAVSGFKTSVKDRDILQEILTDAREKTFDVLLVFMSDRIGRKEDESPAFVTTLNDLGIEVWSVKEGQLKTAEHVDKLMNYIRFWQAEGESRKTSMRVKAAQETFVRDGKFVGGKAPFGYRLEYSGAISNHGRALKHLVIDKEKAKIVQQIYDYAYYYHYGALKIAKTLNEQNIQAPVDTWKACTISQILQNPVYMGYIAYNRRQHSKCGGSFERTPMEQWIMSDEQNTELVIVSREKWEKVQEIRESRKKNMKDARDDKQGKYVYTSSGQLVLMGLVYCGYCGKRLTNGSKYDYWETKEGERRKKFVGRYRCTQMANGSLTCSGKAYYRAEEIEPIVYTVVTSYLNSLKEADTYDDILKLQEEQRILVKHELEQLQKEIKAIKKDIETLEQNIPSALRGEGNFSPVQLSALMDKNKQQLIELEHRLEIKNKEYKEMECKKKDIKNIGNMISNWGELFMECSIPERKVMLSKLIERIDVKENDIKIKFKISLEEYIGEKDGRKGIGSPTTLYTPCSA

SEQ ID NO: 9606 - protein, 506 aa, synthetic construct
MNGVIYARYSSENQREESIDGQLRECTAFAQHNDIQIVGEYIDRAFSAKTDNRPSFQKMIKDSAKGEFDVIIVWKLDRFARNRYDSAHYKNILKKNGVKVVSATEAISSGAEGIILESVLEGMAEYYSAELAEKVSRGMKENALKCKYNGGSVPLGYYIDESKHFQIDSSVAPFVVECFEHYADGMTMKQLRDELNMKGVKNSRGGKLSIDVISRMLTNRKYLGEYTFQDITIKDGIPAIVSTSLFEKVQDRLTKTKKAPSSHKADDDYILTTKLFCGKCKSFMVGESGTNAQGKKYRYYKCVNHKKHQGCDMKSIRKDLIENMTIKYIREFLNDEDLINTLIDLAYDAQHKENEQLPLLRKQLAQTEKGIKNIVDAIEQGISTKSTRERLLDLEQRKNDIEMSISKESIENPMLTKKQFKFWFDQLKKLDISKSEQRQKLVDLFVNSIIIYDDHIKFFFNYKEHTETITFDELNNCSDLPDSPRPKGLPNGSPCFLPKIAKNRIK

SEQ ID NO: 9607 - protein, 549 aa, synthetic construct
MNIQQTASTPKLVTMIPADPQMTERDIRNKHLRIAPYCRVSTDKKEQLSSYEAQIEYYTEKINANPDWTLVRLYADEGITGTSAKKRKAFLQMIRDCERGKIDLVITKSVSRFCRNTLDGLNYVRRLKRHGVGVYFEKENVNTLFMDNEMILTFMMSQAQAESESLSGNVRWGHRKNFKDGKVYYHCKNFLGYRWGADGQPEIDPEQAAIVRRIFSRFLLGHSVRQITTDLMADGIKTATGKTVWHDSVVQKMLCNEKYIGDALLQKTYIADLFTREKRVNNGELPKYYVHDCHPAIIDRETFQKVQEEIARRSSLKKTSSKAKTQLGKYCGKYVLSELLVCGECGSPYRRVIWTQKGAKRVVWRCQNRLEHGRKICKQSPTLDEGDIHDAVISAMNELFRMQAAKDAVKAGIAAVLAGEEQTLSLPAVEHQIRNLQERQLELFQLIVSAGADCTDYDEELQQVYMAKTKLMAQKAELEKEHRGAAAFDSRLAELDMALEQASGALTDFDELTVRQLVSNIKVLDKDSLLICFKDGTEITQTIQRRRSA

SEQ ID NO: 9608 - protein, 522 aa, synthetic construct
MEVSKNVTVIPARKHTRKSKDEEKPKLQVAAYCRVSTDSDEQATSYDAQIEHYTAYINGHPDWELAGIYADDGISGTNTKKREEFNRMIDECMAGNIDMVITKSISRFARNTLDCLKYIRQLKDKNIPVFFEKENINSMDSKGEVMLTIMASLAQQESQSLSQNVKLGLQYRYQQGEIQINCARFLGYTKDENKHLVIVPEEAEIVKRIYREYLEGASMLKIARGLEADGILNGAGNEKWHTSNVNQILRNEKYIGDALLQKTYTVDFLTKKRVKNNGLVPQYYVENSHEAIIPREIFMQVQEELIRRRIVHTSPNGKNRTFSSNHCFAQMIICGNCGEVFRRVHWNNRGKKSVVWRCVSRLENTGLFCDARTVPESQIEQVLVTAINQALCDKDAFLVTLQNNIETVIIHETDQTLATIDKRLEELQTELLKLASSKADYEDVADEIYRLREEKQKVQLENVGRDELKKRITDMGDFLRKQPTAITEYDEPLVRRLIEKVTVYEDKFTVEFKSGVTVDVSK

SEQ ID NO: 9609 - protein, 520 aa, synthetic construct
MKKVTKITENTSDFTERPKLRVAAYCRVSTESDDQLVSLDTQIKHYESYIKSNPDWDFAGLYYDEGITGTKKEKRPELLRMIADCENKKIDFIVTKSISRFARNTTDCLELVRKLLDLGIFIYFEKENINTGSMESELMLSILSGLAESESVSIAENSKWSVKRRFQNGTFKISYPPYGYDTADGKLVVNETQAAVVRFIFSEILSGNGTGKIANELNRRDVPSKKGGRWTATTIRGMVGNEKYTGDAVFQKTYTDTHFNRHYNYGEKDQFLIKNHHDAIISHEDFNAAQAIIDQHGKEKGVEKYQDKYQNRYPFSGKIICGQCGGKFKRRIHSTGRHNIAWCCTNHIADAKKCSMKYIPESHFEYAFVTMMNKLIFGHQTVLRPLLMGLRGINSEDSVAKLHALDKKLEENAEQRKVLVTLQTRGYLEPAVYNKGNNELLQEAERIQRQRESIARFINSDNINLHEVSELLQYATKATMLKGFDGELFTRFVERILVYSRTEIGFELKCGITLKERLVR

SEQ ID NO: 9610 - protein, 523 aa, synthetic construct
MRFFSYGRKSVFSDKSDSIDNQFRMNREYCESKFSGQVDSWQQFSDEDFTGANTSRPDLQRMLSFIKGGFCDVLVVYQLDRLSRDVRDFANIYALLEEHGVMFISIKENIDTTTPIGRAMMYVTVVFAQMERETIAARVTDNMLGLAKKGYWTGGNPPVGYVRKHIVVNGKKHCSIEVDPDGARYVTQIFDTFLAYNCSLQGMETRFKNQGIRTQNGKFFSTAQLHKMLTMPYCVEATPEVYDFYAAKGCIMDPGSPREMWDGSAGVIIYGRSTEKNKKHQLQPPEKWTVCLGKHKPFMPAEKWLAVQSRFTQNKCIKDAKWPVPLLKGVLRCKCGNLMQVSRKKKVDGTCSSWYYCRKRMRQGVDACDMGQIKCDLLDEEVLELFRGITADPALIQKFVKAEAPADVTDLKAAQARVSACERKIGRLAASLALAEDSAASKYIIAEMERLDVELGALKREASLAEMESHRAAASAKDAKATAAEIAKLIHGLDGFDDKEKNAIARAVIQECTWDGERLFITL

SEQ ID NO: 9611 - protein, 415 aa, synthetic construct
MKKIYYIPVKKENMEPLRVAAYCRVSTKKETQLASLAHQIMAYTEQISDHPGWVFSGIFWDCGRSGLRKKGRNGLKHMLESATEGKFDYIITKSAKRVSRDTVELLQIMRYLKERGIQMYFEIENVNSFDPDAEAAITLSGAMGQEESRNLSENIQWGIQRKFEEGLFSSYKHFMGYRCVEGELVIVPEQAKVVRLIFELYLRGYTFSQIKKYLEDNGIKTVTGKEVWSANVIQQMLKNEKYKGDMMLQKTFTEDYLNGIRKKNVGQRTRYYVKGSHPAIISSEIFDKVQAEMLNRARLFRTADGNQISSSNRYSSKYLLSNLLVCGDCGGRFRRRTERGKIVWRCGTRMEKGKTECKNSPTLNDRYVRDMLGKVVCNGEYDENIVKDRVKRIDVYEKQLIICYAEKGEYQICEL

SEQ ID NO: 9612 - protein, 440 aa, synthetic construct
MAAYCRVSTDQEEQLLSYENQLNYYTGYINNNPLYQFAGIYADEGISGTNTKKRDEFNKMITDCRSGKIDMIITKSISRFARNTLDCLNYVRELKELGIGIIFEKENINTLDAKGEVLLTILSSLAQDESRSISENSTWGIRRRFEKGQHKMSTKRFLGYDTDEDGKLVINRKQAAIVKRLYFEFLSGKTVDYIKRIFEREGVVNWDGSTKWQATTLQSMLENEKYKGDAVLQKSYTVDFLTKKRVMNQGEIQKFYIEDDHEAIIEPWIWECVQLEIERRKCYLDEHGTKSYSNNTEKNPFASKIICGECNKVFTRKGWRSSTGETRKIWQCSERYKVKGVMGCANRHVEESTLEKAFVMAWNGILENKQYFVHKWAEQEKSEDLLEVYRAKDFLKLNKEVILAENLELDFLLRVLDYIKVCENGQVLVVFLDGTEIECK

SEQ ID NO: 9613 - protein, 426 aa, synthetic construct
MRIRILEPIAEIKQKKKKVCAYARVSTDSRRQEDSLENQQETYELLIRSNPEYEFAGVYSDQGISGYCEKRPGFQEMIRKAKTGEIDLIITKSISRFARNTVTVLKVARELKGLGIGIFFEEQKINTLSGDGEMMLAVLSSFAQEESRSMSENNKWTIRKKFEQGEVMINTERFLGYDKDEYGGLSINVKEALIVAFLFDMTLFGLGSSRLKNLLNDLGVKSVTVGDWHEGSIGGVLKNEKYKGDCHLQKTFTPENKRNQTRQNRGEVQSYYITDNHPAIVSADLWERVQEERNRRKKERNIGSDGTAKYQNRYPLSGMLVCPYCGKNLRRRQVHKKRIQWWCSTYIEKGKQVCHGIRVEDTEVQKQSITEPTVVEEVELNGKKHYRYTSKAEFGNRCQQRPECAEAADGSVLPGINRPRRTAIKL

SEQ ID NO: 9614 - protein, 451 aa, synthetic construct
MQRVAIYMRVSTDQQAKHGDSLREQQETLDEYIKQNKNLKVVDKYIDGGISGQKLNRDEFQRLLDDVKNDQIDLILFTKLDRWFRNLRHYLNTQEILEKHNVSWNAVSQQYYDTTTAYGRTFIAQVMSFAELEAQMTSERIKSVFSNKIQQGEVVSGKVPLGYKIENKRLVPTPDKDIVIDLFDYYVRVGSLRKTTTYLEEKHGIVRDYQSVRKLLTNEKYIGKLRNNPNYCEPIIDKDVFETVQLRLSQNVKTSGSHDYIFRGLVRCADCNGSMSCSTLKSKYIKKTDGEVSYYIRSCYRCTRRRNNPTRCKNKKTYYERALERYLLDNIQTNIAMHVRTLKKEVTKKDSVKRKKDALFVKIERLKKAYLNEIIELDEYKRDREMLENEIANLKEPKINKNIAPLKKVLSDDFFEKYEKASINQKNELWRSIIESIEVSVDGYITINFLP

SEQ ID NO: 9615 - protein, 522 aa, synthetic construct
MAEKSITVIPARRRVGNTVNQEQKPKLRVCAYCRVSTDSDEQATSYEAQVEHYTTYIQRNAEWEFAGIFADDGISGTNTKKREEFNRMIEECMAGHIDMIITKSISRFARNTLDCLQYIRELKDKNIPVFFEKENINTMDSKGEVLLTIMASLAQQESESLSKNVKMGLQFRYQNGEVQVNHNRFLGYTKDEDGHLIVEPKGAEVVKRIYREYLEGSSLKQIGMGLEADGILTAANKKKWRPETLKKILQNEKYIGDALLQKTYTVDFLTKKRVKNNGIVPQYYVENSHEAIIPRDLYMQVQEEMVRRANLHSGANQKKRVYSSKYALSSIVYCSKCGDIYRRIAWNNRGKYSIVWRCVTRVGHGPQCCDAPTVQETELHEAVIKAINQALGNKDSILETLERNIEEVLMETDNSGAEDIEEKLCVLQKELLKLANDKKDYTEVVDEIDRLRQQKQDALVEKAEREGMKQRILEMKEFLIKRKREITTYNEQLVRKLIEKITIYDDKFTVEFKSGTSVDIEK

SEQ ID NO: 9616 - protein, 651 aa, synthetic construct
MKNKKIKCDIYTRVSTTMQVDGYSLDAQKEKLKRYAEFQNMEIVNEYSDEGKSGKSVEGRPEFQRMLDNIENGTDEVQFVLVFKLSRFGHNAADVLNSLQRMQDFGVNLICVEDGIDSSKDSGKLMISVLSAVAEIERENILVQTMEGRKQKAREGKWNGGFAPYGYELVNGELQIAEDEAEIIRLIYDKFIHTNMGISAIAAWLNQHGYKKKKRQNNTLDAFAASFIKGVLDNPVYCGKLAYGRRKNEKVSGTRNEYRIVKQENYMLHDGIHEGIVSETDWELAHQKREKTGVKYEKTHSLDHEHILSGILRCPLCGSGMYGNVNRKKKKDGTLYKDYFYYACKHRRLVDGHKCGYRKQWSEEKINNAVEEVIRKLVKNPEFEEAILNKIGSRIDTEEIEKEIDGLEKQHRQLTGAKARLGQQMDSLDIMDKFYEKKYQDMETRLYRLYDEIEGVENSIEEVKNRLLNIRQQKISEENVYQFLLYFDKLYDKFTDLEKKEFLNSFVEQVDIYEQEQPDGRFLKHIKFRFPVYFGDRETQELCWDNESTVETVILLSRKAPDAEIKVRLDMSELDITSAESKATYKEIQEYVQNKYDLHVTNLYIAQVKREFGIIERENYNTGEGKAKVPQVTAEKREAIIDALKYFQMIE

SEQ ID NO: 9617 - protein, 581 aa, synthetic construct
MARKRTNLIGNTPSVRETKVAIYIRVSTIHQVDKDSIPMQKKDLIAYCQLILGTDNYEIFEDAGYSGKNTDRPAFQNMMGRIRKGEFTHVLVWKIDRVSRNLLDFAEMYEELRSLRVTFVSKNEQFDTSTAIGEAMLKIILVFAELERNMTSERVTATMISRANSGQWNGGRIPFGYSYDPKEKVFSIREDEASICRELKDLYLLNRSLAYVSRALNEKGYKTRAGVSWSPHSVWIIASSPFYAGIYRYNRYKGVESRTINPEEEWVMIQNHHPAIFTLEEHQTMRSIMKSNQRNMDNFPGRVHLSTKTHIFQGIMYCDKCGSKMVSTPGRLHVDGYRTSNYGCPLRRNTKKCNNPTVNDIVIGEFVINYILNMLNAKKTFSTINTPDELNAALLSGSVFSEVSSVEENGLNSFFNLLSRYGSDRSYIFSVKSPRKKKAAVDPELSKLRKEKEKQERALQRLQDLYLYSETSMSEKDFIIRKSEISSHLDNINRQLGLMTQDQASFLSDEEFIKQASHLLIQKELKNKKYIYFKKLVSTMDPDILKAYMETILDSIYTADGKITAITFKNGLTHRFIYKDK

SEQ ID NO: 9618 - protein, 559 aa, synthetic construct
MKKKKAYVYTRVSTSMQIDGYSLDAQEERIKQYAKAYDIEIIKTYKDAGKSGTSITGRNEFIAMLNDIEAGKDKVDYVMVFKLSRFGRNAADVLQSLQVMENHNVNLICVDDSLDSSKDSGKLVITILSAVAEMERENILSQTMEGRKQKAREGKWNGGFAPIGYSLDNGELVVNEYEAKAVRMIFDLYANSDMGANGVSKYLVSLGINKPIRQNGKNPYFSASLIRQILDNPVYNGKIAYGRRKTIKDKNTGKIKLEKSDHYIIAQGNHEPLIDDELWNAVQEKRKSQAKKYEKINRGKDERVHILSNLIKCPYCGAGLYGNKSRKRNKNKEGEHYKDYYYYGCKHRKMMNGHKCTFNKQIRAELIEKEVETIITQIVSNPTFAKKIEEKINIQIDTKEIDEVINKHLAKIRQLTGTKASLINQIDSLNFEDKHYDRKYTDLNLRLDAIYDQLEYAEMQLNDSRKRKEAILEEKITSDNIYKILVNFNSLYTVLSDIDKKRLLNELIEEIQIYDEKPKNGTWIKSVVFKIPLIDHDLDFSLDNKDNVETICLMSRLKD

SEQ ID NO: 9619 - protein, 515 aa, synthetic construct
MQYLIYLRKSRADQEAELRGEGETLARHEKALLELARRQHLPIADIYREVVSGETIASRPMMQQLLSEVEQGIWNGVLVMEVERLARGDTIDQGIVAQAFKLSDTKIITPIKTYDPNNEFDEEYFEFGLFMSRREYKTIKRRLNNGRQASVKEGKYVGNRPPYGYERIKIENDKGFTLKPLEKEAQVVRMMFRWYAYGAHGISTIADQLNEMAIPSKTGKQWVYPTVRDILQNPVYVGKIRWGWRGQRKRVKNGSVSVSRPRSDDYLLADGIHPPIVDQQLFDQVQKKFSMHKPLPTSAREMKNPLAGLVICAKCGAKMQRRPYQRENIRTGLICPNNKCRNVSAPFDDVEQKLIEVLAEYIKEEKLRISNGHTQIDNSILQILQNQLADLREETVDLNKQNDNIHDFLEKGIYDVDTFLQRSQKISSRITEIEEKQKTLQQEIIEENKRIESATSIIPMTEQLLLQYENMSALEKNSMLKEVLRCVKYERECSIRDGGTADNFTLYLYPKISHK

SEQ ID NO: 9620 - protein, 522 aa, synthetic construct
MGNVMLIPARRQVGSNARKQEEEKPKLRVAAYCRVSTDSDEQATSYEAQVKHYTEYIQKSPDWEFAGIYADDGISGTNTKKREEFNRMIDDCKAGNIDMIITKSISRFARNTLDCLKYIRQLKDMNIPVLFEKESINTMDAKGEVLITIMASLAQQESQSLSQNVKMGLQYRYQQGKVQINHNRFLGYTKDADGNLVIDPEQAETVKRIYREYLEGLSMDKIAAGLERDGILTGAGGKKWHTSTINKILRNEKYIGDALLQKTYTTDFLNKTRVKNNGLVPQYYVEGDHEAIIPKDIYLQVQEELVRRRVVKTSANGKKRSYSCNHCFSQIVICGECGEMFRRLHWNNRGVKSIVWRCISRLESTGLECHARTINELLLQDVVVKAINQMLGDKSSYQAQLQLNIATVIRASQATAIDSIDEKLMALQQELIQKANSKEDYDEIADEIFRLRELRQKTTVDTAARDEQIKRINDLQDYISQQTTYLTEFDESLVRRWIKQITIWDDHITVELKSDVSIDVDA

SEQ ID NO: 9621 - protein, 521 aa, synthetic construct
MKKITKIDGVQKNTAINSKLRVAAYCRVSTGSDAQLESLEAQKSHYEQYINSREDWQFAGLYFDEGITGTKAEKRPELLRLVTDCEARRIDFVITKSISRFSRNTTDCLALVRKLQSLEIPIYFEKENINTGSMESELFLAILSSMAEGESASISENAKWSVKRRFQNGTYKLGYTPYGYDWDGKNMIINPDQTAVVKRIFADILSGKSTNAIADELNAEKVPSKKNANWTSSTIRGIIANEKYTGDVIFQKTYTDENFNRHTNYGEVDQYMAPDHHEAIISHSDFDAANALVNQRAAEKGIEKGSDKYQQRYAFSGKIICGKCGDTFKRRIHSCTTYKYVAWACNTHLKNKESCHMKYVRDDEIKVAFITLLNKLIYGYRLILTPYLKVLENSSGDEAIHRIQHLEQLIAQNSEQREALTKLMAQGYIDQILYNQETNALLLQAETYRSDIEAITIGMTGDAAKVTETNLLLHFVSHTDMLTAYSEEFFENYADHIEVMSRNEIRFVMKCGLTFTERIDD

SEQ ID NO: 9622 - protein, 472 aa, synthetic construct
MQEKIQRCAIYIRVSTAEQAMHGKSLEAQTEYLTNYAHQHNMVIVGVFADEGKTARKNFKDRKAIKALLKLVKEDAIDIIIFWKMDRWFRNVSDFYKVQDILDAHQVKWIATAEPNMNLDTREGRLNLNIMLSINQNETDTTSERIRFVNEASVRQGKVVSGAQPFGFMIKIFEDGKKKVVKDPDTESIVDEFYEYYFVHQSKRGAFVYLCNKYGPVITMRQVEKLCNNTMYYGRYRDNYNYCPAYITEEQYNQLQEINKRNIKLYMSYEETGEIYLFTGLIPCPICGRPLSANRTTKNSHTGKPFKRAYRYYRCQNWIYKKTCTYSKLANEATIEKYLLDHIEEAKRQYLNEIIVYNSVSEKVPVEKKKNDKEKLLKELDRLNNMYQKGRISEDKYDAEYDRINNELKAITEIPVPRIKRSVEELEAILCEDWKNMYDKLSRENKRAFWRSLIAEIRLNEDSSFVKSIELI

SEQ ID NO: 9623 - protein, 484 aa, synthetic construct
MNQKKTVPISAKLLESAADIYIRVSTTEQAQEGYSVEEQERRLQQYCKAMDIKIHQIYVDAAYSGSSLERPGIQEVIRDVRAHKVKKVIVWKLDRLSRSQKDTLIMLEDVFLENNCDFVSMLESFDTSTPFGRAIVGILAAFAQLERENIKERTSMGRIARIAKGHYSASHPPLGYHFIPGSNDLAIEEYESNIVQEIYTRFLSGESLNGIAESMKNKYGENLRTWNNTFIRRILVNPVYMGKVRQNDKLYDGIHEPIISETEYYMVAALLEHNRQINKQSRRSESLLTGLLYCGDCGARMQPRRVASGYKLHRYICYSVSRTNKAMIRSNNCTNRLHPFTLEQLDNMIIEEVLRLAVDKEYLQSILEKDTAPKVDETELFRERLVEVKKQMDKLLNLYQIGAVDISDIADRLESLKEEKEALQHNIDRSAAETPLPIEKIQSYVQLFKEALESGDNDTARQIIRMLIDKIVVLNEDIEIHWSF

SEQ ID NO: 9624 - protein, 501 aa, synthetic construct
MNIREDAIYGRQSVDRKDSISIESQIEFCKYELRGGNFRQYTDKGYSGKNTDRPKFQELMADIKRGLIKRVVVYKLDRISRSILDFATMMETFQAYNVEFVSSTEKFDTSTPMGRAMLNICIVFAQLERETIQKRVTDAYYSRCQRGFHMSGAAPFGFQLEPTTIQGIRTKMMKPDPETADIARLMFEMYAQPSTSFGDIARHFADEGILIYDKDLTRGFISQMLRNPIYAQADLEMYEFFKSQGTVVINEAADFAGTNGCYLYQGRDVQARKNKHLKDQILVVAPSEGLVSADVWLRCRKKLMANTTFQNGRKAKNTWLAGKVKCGRCGYALMSVGNPSGVQYLRCSKRADNKSCPGCGTLRTREFEQFIYGEMVKKMAQFHTLTGKRETVNPKLTALKVELAHVEDEIEKLLNTLTGASAVLISYANTKIEELDAQRQTLSKEIAALSAESMSPEQIERLSVYLNRWEEIDFDDRRQVADSLISQIRATGECVAIEWKI

SEQ ID NO: 9625 - protein, 521 aa, synthetic construct
MKKVTKIESVQNAETVKQRLRVAAYCRVSTGSDAQLESLNVQKSHYERYITSRDDWQFAGLYYDEGITGTKTEKRPELLRLIADCEAKKIDLVITKSISRFSRNTTDCLELVRKLLSLNIPLFFEKENINTGSMESELFLAILSSMAEGESASISENAKWSIKRRFQNGTFKLSYAPYGYDWDGTNLTVNSEQAAIVKRIFSDVLSGKGTNAIADALNAEAVPSKKNGRWTSSSVRGMLANEKYTGDVIFQKTYTDDNFNRHKNHGEVDQYMMSKHHEAIISHEDFEAANALVDQRALEKGIQKGNGKYQQRYAFSGKIICGECGNTFKRRIHSCSTYKYVAWTCNTHINDKNACSMKYIYDEELKAAFITMMNKLIYSHKFLLKPYLKALENSSGEEAVQRIQHLERLLEQNSEQRETLTKLMAQGYIDQILYNQEMNTLLLQADSYRSDIETITTSMTGDAAKVTETAMLLQFVAHSEMLTEYSEELFEELADHIEVQSRNEVLFILKCGLTFTERMGD

SEQ ID NO: 9626 - protein, 522 aa, synthetic construct
MGNVMLIPARRQVGNTARKQEEEKPKLRVAAYCRVSTDSDEQATSYETQVAHYTEFIQKNADWEFAGIYADDGISGTNTKKREEFNRMIDDCKDGKIDMIITKSISRFARNTLDCLKYIRQLKDMNIPVQFEKESINTMEAKGEVLITIMASLAQQESQSLSQNVKLGLQYRYQQGKVQINHNRFLGYTKDADGNLVIDPEQAEIVKRIYREYLEGLSMDKISAGLEADGILTGAGKPKWHTSTINKILRNEKYIGDALLQKTYTTDFLNKTRVKNNGIVPQYYVEGNHETIIPKDIYLQVQEELVRRRVVKTSANGKKRSYSCNHCFSQMIICGECGEMFRRLHWNNRGCKSIVWRCISRLEPTGLECHARTVNELVLQDVVVAAINQMLGDKSGYQAQLQLNIAAVIRASQATSLNNIDAKLMALQQELLQKANSKEAYDEIADEIFRLRELRQQTTVDTAARDEQIKRINDLQDFIAQQTAHLTEFDESLVRRWLKQITVWDDHFTMELKSGLSIDIQA

SEQ ID NO: 9627 - protein, 484 aa, synthetic construct
MKKEKVIPIDSLDLVDLYIRVSTTEQALEGYSVAEQEHRLRQYCAAMGHRIHKVHIDAGFSGASLDRPGIKETIKDVQKHLVRRVIVWKLDRLSRSQKDTLIMLEDVFLENGCDFISMMESFDTSTSFGRAIVGILAAFAQLERENIKERTMMGRQARLAKGHYNGSRPPLGYSFIPGSNDLQVDPYQAAIVREIFKLFLSGISINAIARKMEEKYPTVRTWNNTMIRRTLKNPVYIGKVNDNGILRDGIHEPLISEIDFQMANAILVHNSKIKKQNCRSRSLLTGLLYCGDCGARMHPRRIARGYPLRRYVCYSVSRTSKSMIKSDHCTNRLHPYTQEELEQIIIDEIKKLAADEDYISEVIRNSSAEVPADDTELFQERIEELNRQTDKLLNLYQIGAIELDQIQERLAALKQERESLTAALKESQTKTDINMDHLKIMSYASAFQVALESGDPEYTNSIIRLLIDKIVVLNEDIEIHWTFC

SEQ ID NO: 9628 - protein, 668 aa, synthetic construct
MAYAKAKKHLKIWTKKKAALYVRVSTRYQVDKDSLPFQRKKLKEYCKFLGLEDYVIFEDDGYSAKNTERPHFQEMMSRVRSGEFSHLIVWKVDRVSRNLLDFAAMYQELKDHKVTFISMNEQFDTSTAIGEAMLKIILIFAELERNMTSERVTGIMLDRAEQGLWNGARMPVGYRWNNEAKFPEPDPEEVKIVQLIFDKYEEWKSSIKIARYLNNNNFKSKRGGQWTSKLIHDIIRNPFYIGTYRYNLRESGRGPLKPESEWIVRENNHPSIIDKAQFDRCNKIMDQNGSSRDTSDLRARKYVHTFSGHLVCGKCGANMIASKDRARANGWRPSMYRCAQRSRMLDCDNSRTINESYIGPFIFNYIANLARVQKNFKNITTVEKLERELLKGETFDGVAGILPEGLNLTFQALSFRQVGNGTYIPDVDFLGDSDGASDRDQIELLKSEIEKSKNAVTRLTDVYLFDPDSMTKEEFATKKKELAKKIEGMERQLADLLDDSGNDDLADMSFIKKASAFLVAQRIVSKSFVDYVGMAQELDNEILKDFIDQIVDQIVVLDGRVQSITFINGLKHEFRYATPAELPVCQKCGGRIGSTCGCRTRTFDFSGKRYQRIKVGDPRDTLHEKKNPVCPECFAHEGRWHHWNCKIETCPICGGRLAECEHGPNGKK

SEQ ID NO: 9629 - protein, 516 aa, synthetic construct
MKRVYCLYRVSTKGQVDKDDIPMQKTSCREFAERNGWTILKEFQEKGVSGFKVSASDRDAIQDLKTAAEKKEFDVLLVFMFDRIGRIDDETPFVVEWFIKHGIEVWSVNEGEQRMDNHVDKLMNYIRFWQANGESQKTSARVKTRLNQMTLDGKFTGGVAPFGYKLIKSGEINKKGKELMDIVIDDDEAPIVKKIFEMTVKEGYGSYRMADYLNSHGIRTHNNSKFQCNTVNRILKNRLYCGYLVSGGVESPYIERLHIIDENIFDQAQFILKQRSSKNEEKQQIARTTKGSTLLSGNIYCAHCGQKMVSTSYIDRYDRADGSQYRVRRQRYICTNKAMKRGACDGQSAYVAHRIDGAVLATLRDYLAKIKSTPKDIALEKRYKSEISEYRRKQTKLEKLKRQVVELSAEIGRSLLGESRFTPDILSTSIDNTNDLLHKKEIELNDIKFKLANQQNAMGKLDFYYSQFRTWADEFDNSTMEQKKMIACQLIREVKVSRGYELEIIFDLNYEQFLSL

SEQ ID NO: 9630 - protein, 522 aa, synthetic construct
MELLNVCIYLRKSRADREAEARGEGETLARHERILLDLAKKRGYNVGAIYKEIVSGETISARPVMQQLLREVESGMWDGVLVVEVERLARGDTIDQGVVARSFQYSNTLIITPLKTYDPNNEYDEEYFEFGLFMSRREYKTIRRRLTAGRESSAKEGKYCGSKPPYGYSRVKLVGEKGWTLQPVPDQAEIVKLIFNLYVHGVSGERIGMAKICRKLNDSGIKTMDGGLWTISRVQAILRNPVYEGMIRWNSRKAVKHIKDGQITISRPFAQDYILVKGRHPAIVSRELFQQAQDIVNKNPARPLNSLHVLRNPLAGIVRCGKCDHVMTRKSPNGRQGDLIRCPYSSCSNISSKLPLVEKALLDGIQELVDGYRLNNSVSDQEYSLSISEREKMIQGKLKEIDILKKRKQRQYDLLEQGIYSTEEFLERSRATAAELSACDAVILSLKQEIEHEQELQFQRSSFIPKCEDLLANYWTWDTSTKNRFLRELIEKAVYTKNAKNTWKNGDDISFTLDIYPKIQQK

SEQ ID NO: 9631 - protein, 482 aa, synthetic construct
MNAVIYARYSSAGQRDVSIDDQVKVNTKYAIEHKMTVIRVYADRAVSGTTDKRPQFQKMIADSNKKLFDTILVYKTDRFARNRFDSAIYKKKLKDNGVKVVSVMEPIPEGYGGDILEAIYETMAETYSKSLSENVNRGMRGNAAKGLANCRPSFGYQIDKATRKYIVDPVNGPIVTKIFDMAAAGKSGKTILQELAKTGIHKSACWLYTLLHNERYTGVYIYDDIRIEGGMPMLVEPKTFHQVNSASQKRKKNPQAKPETYMLSGKIYCGYCGNKIGGEYCLNHAREKYAKKYSYYVCLGRKTKTAPDCQKRRISADFLEHEIVVALHKELTRRGVPERLADCVVEYQKKEENPELNYLKAELSDTSSRLSNVMKAIERGLDNEVTSARMEELIKRKKELLSKINTEQLLNPTFSKEQIVAYITEKLTGNPDDRKYAAGVINTFVTRVDLFDDYVVVCYDAKPGENTVNVPLTVRTRTFWWA

SEQ ID NO: 9632 - protein, 509 aa, synthetic construct
MEKAVIYARFSSENQHTESIEAQVAECSAYCRRKGYVVVKTYADEALTGTSTTKRRSYNKMLSDARKGVFDIVIFHKIDRNARNEIDYYRFKQSILALGLTYEYAAQPIDATPEGQFMEAVMVGQAAYYSRNLSKETKIKAIPFAKKSNFMGGVPPLGYKIVDKKYVINEDEAHIIRKIFAMYLAGKSYASILDDLNGSGYRTRHGNIFGKNSLHDILRNVKYAGTYIYNKVVKLPNGSRNSHGEISPEAIINQGALPAIISEIDFERVQEMLNKRKNSPGQFTSKRSYILSGLVRCGICGRTYLGHTKTIRGKVYSYYECSGSYSKGRKEKCKNAHLNAEKLEDMIINAVLDNICEEDLDNILEDAERIINGNAEVKEQLSNLEKKKTGLKVRMNNLYSAVERSGMDEFDLERLTTLKTELRTIEKEISQLRVLPELHVTREELQACWKDFVFALKQKTDPTLVKSVLERTTSVVVMPDELIVTIDVASVLVPGTGIEPVRVSLPEGF

SEQ ID NO: 9633 - protein, 501 aa, synthetic construct
MEIQIREGNSRQKRKLKVCAYCRVSTDADEQENSLENQIRHYEEVITSNPDYEYAGVYSDFAISGFKEKRPGLQKMLADARKGKIDLILTKSVSRFARNTSIVLEATRKLKELNVGVFFELQNINTLSGEGELMLTILAAFAQAESESGSVGAKMVYQRKYEAGIPVQYLERSFGFKKDERGVYIADEEEAVWVRKIYEMAADGYTPAAIKRYLNENGVKTVGGAEWIDSTVFRLIENEIYKGDYIMHKHFVNEERKLVRNRGEVDAWYIEDDHEAIVSPELWQRAQDALEAKRDYLAEGSVIEEFTEENYPYMNKIYCAKCGYPLYKRIYSKGNRLNWGCSGMKRYGKSFCDGINIPDGVLRNAWHFEENTYIDEKASDKGVKEFSYLKERSWKRRHKKKQPASIPENTEAEYPYKKKIYCALCGSRLVRHVDTKSHKVTWVCNGRKRKGKDFCDGTRVPDTILKGWGEIKKDIYIQRKDDKNGKKRYSYTSKKPSGIGA

SEQ ID NO: 9634 - protein, 463 aa, synthetic construct
MARSVTVIPARNRQASEHRTAPQEKIRVAAYCRVSTDQEDQLHSFEAQVDYYTKYINDHENYEMAGIYADEGISGTNTKKREQFKRMIADCEKGKIDLVITKSISRFARNTQDCLMYSRKLKNLGIGIIFEKENINTLDSTGELLFTILSSLAQDESRNISENCKWGIRTKFKNGEMHLNTFKFLGYDKDENGKLIINREQAKTVRRIYRDFLWGLNPAQIAKELEEEQVPGCLGQTKWYASTVVGILKQEKHMGDALLQKTYTADFLTKRQVKNNGEVAQVYVKDSHKGIVDKETWNAVQEEFDRREKFMQRHGTDRYSYGAECYPFCEKIFCGECGSLFTRHSWKSRGIVQWQCKNHRKDGKVACTNAYVDNADLEKGFVKAFNRLVSEREKHMERWNAMKADGTPLEKIRAVQMMEATENGQLQKYVPEAAQLVLEEITIFGAKKYEFAFLEGSRVKVSV

SEQ ID NO: 9635 - protein, 455 aa, synthetic construct
MKYAACYCRVSTDEQARFGFSIQAQKDALEKYCKENGYKYEFYIDEGISASSMKKRKALNEMLSKSSTFDMVLFTKLDRLSRNVLDANNINKLLIDNNCTMKAIDEDDIDTSTADGTFIFNLKVSLAQREIGKTSERINFVFKNKREKGEITSGTKKYGYDIVDKHFVVNEKEAENIKNLYKEFINNNGNLKETYKYFIQHFEGKGYDAMSNYLKETAYIGKYKLYRKNIYIDNYIPAILDIEIWEKVQNLRKKKTVGRKITYPDLFSGLIYCHNCGNRLAKKTDYRVKNIVVRYVCDNSYRYKVGIDEKHCTNNKVIKEKDIENYLLNNLDKELSNFIAKVSVIPNTKKINNTPKIKSLEKKINKLKDLYLDDLINKETYAKDYKKYTSELLSLKNTTTQEPLKKDYSHLKQILNSDYKKIYDELNKTNKKKFWFSFINKIYVENGEIKEITFL

SEQ ID NO: 9636 - protein, 581 aa, synthetic construct
MSKIIAIGHARVSKGDSEEIKNSLASQKREILNIIGKYGLQEDEINWYIEEEARSAYSERSDWSVFNDAIAEACSNPNIKYFFDYSQERFCRNRVMSQSYKMKLRKAGVKLIFVSNNIDDPDSDDGFIADCTYEMLSEMYSRKVGKDTLRGCKENAITRDPQTGYVYKNGGSAPFWLKSKKIVIGQDKFGEDIKKVIWVENDTIHTAKLNGKMVSKTIWEWARYYFVELRLNQKLGIEKARDILNELEIPAPRKKYWVTTCLYESENNEALIGKSIYNKRKFARNGGGKLKDESEWVIAENAHPALLTEEEFGGLKILRKTKLKRNGTVTKFQSNNEHLLIGYPEKFTCASCGHKIISSGNVYTCGKYNTNGKKGCGASYFSVNCEWLENKILDEIMHNFSDETIKRTYKDFVKQYKIDDNKKSALKNIKKAIDNKESAKNNLIQSMSLMSSKNPLAINAVIEELEKISQELQELQAELAKQSEEKVIKIPTFESYKKALLKSKMLLIRSNTAENKKLIWNFVNSIRLDPVERQVIVEFNSNPFGCLFSNGKIPDNKIEGAFAPSMKLVAGAGFEPTTFGL

SEQ ID NO: 9637 - protein, 531 aa, synthetic construct
MARTITVIPSTINPLTRTSATSIEKRKVAAYARVSTDSEEQLTSYEAQIDYYTKYINQNREWQFVKVYTDEGITATNTKRRDGFNEMVADALAGKIDLIVTKSVSRFARNTVDSLTTVRELKAHGVEVYFEKENIYTFDGKGELLITIMSSLAQEESRSISENVTWGQRKRFADGKVTMPFKHFLGYDRGEDGVPVINEKEAEVVRLIYNLFLHGKTAVGICRYLESLDIPTPSGKSKWRQSTVMSILQNEKYKGDALLQKKFTVDFLTKKQKVNEGEVPQYYVEGSHPAIISNIDFDMVQAEITRRQALGRSYSGTSIFSSKLICGSCGGFYGKKVWHSTDAYRREIWRCNNKFSSKGKCDTPTLDTDTIKQLFLKAYNRLMGNREQLIKACEAMRSIINDCEKLETEIESLNEEIQVVSELVNQCIKENAATQQSQEEYNRKYNRLVARYEKAMVRLNEVTAERDSRNQRDRDIRIFISALKEKPLVIEEFDEELWICLLESATVYSDSKVMFRFKNGTEITEQSQESS

SEQ ID NO: 9638 - protein, 440 aa, synthetic construct
MPKTITKVAYPPRLQSKKKVAAYCRVSSGKDAMLHSLSAQVSYYNELIHKERDWEFVGVYSDEALTGTKDSRTDFQRLIADCRAGKIDMVITKSISRFARNTVTLLQTVREFKAMEVDIYFEEQHIHTMSADGELMLTILASYAQEESRSASENQKWRIKKNFSEGKPWSGTILGYRYFQGRYIIVPEEAELVRRIYNLYLKGLGTNAIAQTFNEEGLRTKNGHEWYKSTIDKILKNYNYTGNLLLQKTYRENHISKITRINNGELPKYHATETHEAIIPLETFATVQKEFARRAEKYAKNDSSPKRYPFTQKIVCGICGRTYRRKTATGRVAWSCSTYDTKGKVACASKKIPEPILMQCAADVMGSTEFDAVAFELRIDHIEAFNGNRLIFYFKDGTAKEVYWKDRSRSESWTPEMRKAAGQKTKQRLMEEKQWQEQSL

SEQ ID NO: 9639 - protein, 412 aa, synthetic construct
MKIKVIKPKTETELKRKRVCAYVRVSTDSLEQEDSLDNQSAYFADYIRSNPAWEFAGIYADQGISGFKENRPQFQKMIADARAGKIDLIIVKSVSRFARNTETVLKFSRELKSIGVGIFFELQNINTLSGPGELMLTIIAAFAQAESQGASDNANLTYRRKFKAGIPTHDLKFTFGFDSDEGGNIYIIEEQARTVRLIFDLAQKGVWPSKIKQYLNKNNIPACSGGKWDDTGIFRILKNPAYKGDMVLQKTYLDANRIRHKNNGQKDQWYIAENHPAIVPPQQWDEVQEILLARSEKLAPRPPQMPSQPRSSRNQYPLTNKLFCPFCGQKLHHKWSNKGKNEYWACSTNVKVGSKACRGIWLPAEIADSWGEITEPTTVICYEDEYGMRHFTAYPKSEYELSDECPYQRKEN

SEQ ID NO: 9640 - protein, 468 aa, synthetic construct
MARQIVHIPAQRNIANRAVAPDTKLRVAAYCRVSTEQDEQLNSFENQVTYYTEFINRNPNYELAGIYADEGISGTSTKRREQFNRMIADCEAGKIDLIITKSISRFARNTQDCLNYSRKLKDLGIGITFEKENISTMDSTGELLFTILSSLAQDESRSISENCQWGIRSLFKQGVVHINTNRFYGYDKNEDGRLVINPEQAKVVRWIFESYMDGINPDIIARRLMEKKVPGCMGEPKWTVDTIMGILQNEKHMGDAILQKTFTADYLTKKQVKNEGQLAQYHVKDDHEAIVSKELWQVTQLEIQRRKDYMKRYGLRTMGRNTDEQPFTNRVFCGVCGQLFWRRTLYRLNGNIKAWMCASRCKGKSVKGCINDTLLEADLHKAFMMAWNAILENREEFLENWRTQLADPNPLVTFRAKQFMRLTEKTKPMKTLDVSIVSKTLDHCDIKPLGVIDFYFLDGSHIGLVTKD

SEQ ID NO: 9641 - protein, 684 aa, synthetic construct
MSILQTIKTIIRVVLYLRLSDEDKNKLSKEELSQSIKNQEIMLRDYAEEQGWEVVGVYNDDDWSGSDATRPDFNRMIEECKNGNVDIVLCKTQARFARDMELVEKYVHNLFHEWNVRFITVVDRIDNARKETKKTSQILGLTDQWYLEDTSLNIRETLKSKRKDGQLTSSFATYGYMKDPENKNHLIIDPISAEVIKRIYDEYLSGTGLDKIARRLNEDKILSPYEYKLLNGSKLKIPVIKDYVNYGYIEKTGTYMLDVSFTNKEEYILKDLVSFNYITTDMKSFNNKCDIVLKKYTNNRTKIYYSENDNIDINNFNIDDCILLNENDVIPKTAKVIISHTKELDRTHTINYQFEITLKENREHEDYYINICGKATDEIKKSDFIHNIRKKFKWSSSTIRTLLTDEVYIGNMVQFKSTTVSYKNHTVVWNDDETRIRKDNTHEPIIAKDIWYTVQERLENTARSCKGGTVHPLCNKVYCSNCNQIFTKTGNRRSDGTGYLCCKDKKTNWSNCDNKASIREDQLHQFILEKMNEMLKKFYEEDDLKEMQNEVIEQDLYKDKLNSLEKELQSINKELQGKSTYFQKLYEDRTNGILPEKEFLILMNKYKDDNEKLEERQKIVKKEISSTLAKKETVKTKKNIFKKYRHIEELSIEIVEDFIDKILIGSYDETTNSRDIKIIWNFTI

SEQ ID NO: 9642 - protein, 529 aa, synthetic construct
MNRTAARSVTVIPPTINPLTHLSRVAVQKRRVAGYARVSTDSDEQFTSYEAQVDYYTQYIKRNPEWKFVKVYTDEGISGTNTKHRIGFNEMIADAMSGKIDLIVTKSVSRFARNTVDSLVTIRKLKEKGVEVYFEKENIYTFDGKGELLLTIMSSLAQEESRSISENVTWGQRKRFADGKVNLPYKQFLGYRKGADGFPEVVPEEAIVVHRIYTRFMEGLTPGAIAKELTADGIPTPSRKQCWQTSTVESILQNEKYKGAALLQKCFTVDFLTKKRKVNEGEVPQYYVEHSHEPIITPEEFDKVQTELARRKHISRQYSGKSIFSSRIVCGDCGSYFGSKVWNSTSKYRRVIWQCNGKFKGEHKCETPHLDEETIKVQFVSAFNAIIESKDNILEDCRLMQTTLTDCTGIDAEIESLLEEIEVVTELTKRCIAENSQTAQNQEEYAARYNGLVERYEKAKARLEQLRTTKAAREAQTEAIGAFMFEVQELDALTEFDEKLWLTVIDTVTVHADGRMTFKFQGGKTLTSY

SEQ ID NO: 9643 - protein, 434 aa, synthetic construct
MERVVERVDALIPAQPKALRVCAYARVSTGKDAMLHSLSAQVSYYSKMIQSHNGWMYCGVYSDEAVTGTKRERAGFQHMIEECRQGNIDLVITKSISRFARNTVTLLQTVRELKILGVDVFFEEQHIHTQSSDGELMMTILASYAQEESLSASENQKWRVRKAFENGEIINLRFLFGYDITPDGIQVNEKYAAIVREIFERFNNGESMSSICRDLDTRGHKGVLGGTWCAERMRNTLSNEKYLGNALLQKQYRNNHIEKKLLPNRGELPMYYAEGTHEPIIDQATFDKAQERLSMLAQQAANRKKPTRSVFSGLIHCGLCGNTYKRVTYRKKHYWNCTTFQTKGKSECAAKRIPEETLEVLTCEVLGAVSFDPDMVRSKITAIRAEKNNVVVYCMDDGSEIVKRWKDRSRAESWTPEMKEKARQRALQARRKKE

SEQ ID NO: 9644 - protein, 463 aa, synthetic construct
MSRSVTVIPARNRQVSGYRAAPQKKIRVAAYCRVSTDQEDQLHSFEAQVDYYTKYINDHENYEMAGIYADEGISGTNTKKREQFKRMIADCEKGKINLVITKSISRFARNTQDCLMYSRKLKNLGIGIIFEKENINTLDSTGELLFTILSSLAQDESRNISENCKWGIRTKFKNGEMHLNTFKFLGYDKDENGKLIINREQAKTVRRIYRDFLWGLNPAQIAKELEDEQVPGCLGQTKWYASTVIGILKQEKHMGDALLQKTYTADFLTKRQVKNNGEVAQVYVKDSHKGIIDKETWNAVQEEFERREKFTQKHGTDRYSYGSECYPFCEKIFCGECGSLFTRHSWKSRGIIQWQCKNHRKDGKVACTNAYVDNADLEKGFVKAFNRLVGEREKHIERWNSMKLDGTPLEKIRAGQMMEATESGQLQQYVPEAAQLVLEEITIFGAKKYEFAFLEGSRVKVSV

SEQ ID NO: 9645 - protein, 532 aa, synthetic construct
MIATKPTQEKIMKTVYCLYRVSTKGQVDENDIPMQKQSCREFAEHQPGWVIKKEFQEKGVSGFKVSANDRDAVQELKTAAENKEFDILLVFMFDRIGRIDNETPFVVEWFIQHGIEVWSVNEGEQRMDSHVDKLMNYIRFWQANGESQKTSMRVKTRLHQLVEDGIYTGGCAPFGYRLVKSGVVNKRGKELLTLEIDPIEKEMVITIFEKTVKDGYGSYVMAQYVNDRKVLTHNGAKFQSNTIKRILQNPIYCGYYNRGGVTSKRVKELQIIDDAVFDEAQKILEQRKYTNEKKTQLARTAKSSTMLGGNIYCAHCGKKLCANSFVDRYTTKDGTTHDGGRRFRYLCSGKAMKRNECDGQSVYSAAKVDGIVLDALHKCFDKIKATPKDAAIEKKYRTQISQIKSEIKRLNKETETLKRKLGELTEEIANSLLGDSKFTPDVLSMAIETTKGKIADNVHRIAEKQNQLNDKETDMNKLDYYYEEFVSWADEFDNASAERQRMIICKLFKEILVGKGYSVQILMDSSYEQFLM

SEQ ID NO: 9646 - protein, 526 aa, synthetic construct
MPKVTMIPATINPLTHLPSVAARKRRVAGYARVSTDSDEQFTSYEAQVDYYTKFIQSKPEWEFVKVYTDEGISGTNTKRREGFKEMITDALDGKIDLIVTKSVSRFARNTVDSLVTIRKLKENGVECYFEKEGIYTFDGKGELLITIMSSLAQEESRSISENITWGQRKSFSDGKVHLPYKRFLGYEKGEDGRPAVVESEARVVKLIYRLFLAGKTQAGICKYLEELGIPSPGGKQTWSKTTITSILQNEKYKGDALLQKKFTVDFLEKKMKPNEGEVPQYYVTGSHPAIIEPDEWEQVQAEFARRKALGKAYSGKSVLSAKLVCEDCGAFFGPKVWHSTDQYRRTIWQCNCKFASEEHCHTPVVNTETIQRLFIKAYNLMMQDRVQIIKEIEAWRQKLMVFGTLDADIERQLEETQVVAELVKAAVKENASTAQSQEAYLKKYKALTERYEKAAAELERLQSLRTARSQQDKKMALYIRTLKKQPEVMHDWNDTIWTVMIEKTIVHKDGQITFVFQNGTEIKVGA

SEQ ID NO: 9647 - protein, 433 aa, synthetic construct
MPRAITIVPKPPKLEQKKRVAAYARVSSGKDAMLHSLSAQVSYYSDLIQNHDDWLYVGVYADEAKTGTKESRADFQRLIADCRAGKIDMVITKSISRFARNTVTLLQTVRDFKAWGVDIFFEEQNIHTMSGDGELMMTILASYAQEESRSASENQKWRIKCNFEEGIPWNGVMLGYRLKNGRYEIIPEEADLVRRIYNEYLFGDGYLTIAKRLNEDGIPSRFGKQWGQSVISKILSNYTYTGNLILQKTFRENHITKKTIINNGELPKYHAEDAHDAIIDIETFQAVQAEKTRRAARFLKKPAPKKAYPFTSLLVCDGCGKNYRRKVTKTGPVWVCGTFNSMGKAACASKQIPEETLQAVTAEVLGQMDFPEELLRRLIKSILVCNGNVLIFRFFDGSEITRTWQDRSRRQSWTDEMKATARQKALERRNQNA

SEQ ID NO: 9648 - protein, 603 aa, synthetic construct
MTKAYSYIRISSKKQEDGHGLARQVEATQAYAEQNGLTLDQELQDIGSGFKGDHVKAGHLGRFLDLVKQGQIPTGSTLIVESLDRLSRQEPLVAQRQLIDLLLAGMTIVTLMDRQVYHRDRDYTQLIVALSIMQRANDESQTKSERSKSNVQANRIQALQGHKRHVQTLVRWIDQRMVPGTKSKIAMATFEFSLNKHADTVREIFELRDIGMGARSIAKYLNDRNVPVLKPGMSKTQKWKDPIIRLILQNEAAIGTYHVFETVDGKRVQMGEPIRNYFPAAVDEDLFWRVQGKNKQLTTRGAKGRVHTNLFTALSCCATCGNRLRIKHSGGIKKEGDDPRYRLYQCMGYETMGKTVCNTKRKSVPYEPLEKAILDHATEFYLASDLAGNRAYRESDLKRMISDLSANIAKNEKQRANFIAAVGSAEDAEDRLAYQTQASAARQQIEADKSQLAEYEIALRELNEQEVERSNVAEMIAMERLRWTTASDDEVMQSRSRVSLALRKFISRVEVNLDQQETIVFVAGGLKGYRFDTAGNLTGKYDLTPSFQTINGETPYTMEHLTNHMNALGFKDAEKATANEAAAQILSLAGISPEAKPKALHSK

SEQ ID NO: 9649 - protein, 544 aa, synthetic construct
MAETAKKISMIPAKVQYDRNVKLSEKKMKVAAYCRVSTELEEQDSSYEAQVEYYTSKISENENWKNAGIYADDGKSGTNTKKRADFNAMIQDALAGKIDMILTKSVSRFARNTVDSLVTIRKLKEKNVAVVFEKEGINTLEGTGEILITILSSLAQEESRNISENIRWGVVRKFEKGKVIVNCTKFMGYTKNEDGDLVIVPEEAEIVKLIFRLYLEGYSTGKIAKHLEEQGIKTATGQDKWHSTVIDKMLRNEKYMGDALLQKTYTVDFMTKKKVKNTGIVPQYYVEDDHEAIIPKELFYRVQEEMMRRASLCKAAVTRKKNQRSRYSSTYALTGMLICGKCGQEYRRVTWARNGKKKVVWRCSNRLTNGVKKCGESETLEENTLNRAVMEAIHRITSDDMEFMENFRQNIIHVIGNYSTAKESEEYEEKIKEKQEEMVALIAENAKTGSYTPEFDERYRTIAEEINALKEAQKTARNEKWMADSYEQRIQDIDHYLSTSTCQIPEFDNDLVRRLISTIKVESSEKLLIQFQSGIVMEQEIRYE

SEQ ID NO: 9650 - protein, 538 aa, synthetic construct
MVKKVTVIKAAKEQKHTQEERRLKVCGYARVSTGSQAQATSYTAQVEYYTEKIESNPLWEFAGVYADEGISGTNVKHRDEFQMMIADCEDGNIDLILTKSITRFARNTVECIQTIRKLKEIGVGIYFEKENINTLSEKSELFITILASVAQGESENISSNNRWAIQKRFQDGTYIISTPAYGYGKDEDGNLVIIESEAETVRWIYESYLNGMGVYVIAKALNQKGIPTIRGAEKWQDGVIQDILKNPIYEGDMLQQRTYTETRFPFVRRVNNGQRNQYLIKDSHPPIVTHEEAEAVQNLMAYRVDVLHMNKSDYTKRYLFSGRIICGECGRTFRRQKIYIGKPYEKIIWTCSGHVEDKESCCMKAIREDVLHRAFTDMWNKLYTNQGTILEPLLKELTELVAARQDSEEIRQLDKEIKDISEQSQILNQVMRKGYMDSALFMESSSKLGWQLTECRRKKTLLTRKLRRTKEIVRTEQLIQLIAEQDGLREEFDEQLFKMTAEKIVVSKEHDITFCLYNGLKLTERGGGQDAVAHANRL

SEQ ID NO: 9651 - protein, 564 aa, synthetic construct
MSLPSHGFTILRNAPDSARGATARSARRAAGAAEPMPTGSGRQLAVLYARYSSAKQNPMSCEDQLALCRETAANLNFEIAAEFFDAAASGRTLLRNRPGVCEMKARVAKGDVAVLIVEGIERIGRRARDIAEVSEWFESQNVDLVAANGGRIPWKLVPFHGAIAEFQSRETADKTRRGQVGTTRRGRVSAGLAYGYRVAPGAAEFNRVIDPAQAEVVRRIFEDYAAGLSPRQIVSTLNAEGIPSPTGMAWNDSTLRGNAQTRDGILRNEAYVGTLVYGRNRFTRDPDSGNRLSRPGEANSIVYVDRPELQIIPEDLWNRVQERLEKAYKLRVAQKRQLNETHRARHLLTGILRCGCCGGSITIVNGERYGCYNRKSKGLSVCGNRRTILRPKLEEAVLARIRAGLLTPDLARHFAAEVRRLWEEQSAGQTNAPARLKTDLARVKRSIENLINRLEGDDPGPHILERLRDREAEAARLTTELAALEAPAKNRQPPSAEELVAAYRGHVDRMESLLRDPAMIVEANDLLRHMLGHVSVHPDADRPRGFRIEITGDLLTFLLPSASK

SEQ ID NO: 9652 - protein, 501 aa, synthetic construct
MEKDEQLTTYREYPYLVYARVSTDKDEQKDSLTNQVDICRYWLEQNHFEWNDRSILEDKAKSGTMFLERTAMQLILKKARNREIKMVVFKSIHRLARDLKDALEIKEVLLGHGVRVVTIEEGYDSEFEGKNDMKFEMFSMFAAQYPKTQSVSISAALAAKVRKGHHIGKIPYGYDRVNQKLVIKEDEAAVIRKIFDWYNNKGYGQKTITNKLNEGLENGSILPPKSGGTWQLTSVQRILKNRTFCGDFILNQYTNIKVDGRKKQIKNPESKWTIIKDHHPAIVSREEFEKANNKEVVNKRRKVTPWNEFRGLIKCGHCGSNMVVMQSWKKKKDGSKTYWKYLKCSKYRRSNKCINHPPITYESFREMILERLKEETKKESFNLGSEITDYTHDKINQLKRKIKLINEKKERLLDIYLDGLLNKFEYDKKRNNLQNDLEKLENELYIYNNKEKQDMEIQYIKNAIEALNNTNKDLYNVFNALIEYAIIFENGCIELKYTFYN

SEQ ID NO: 9653 - protein, 523 aa, synthetic construct
MNENVCIYLRKSRADQEAELRGEGETLARHERILLDLAKSRNYSVGAIYREIVSGETISARPVMQQLLREVEAGSWDGVLVVEVERLARGDTIDQGVVSRAFQFSDTKIITPTKTYDPDNEFDEEYFEFGLFMSRREYKTIKRRLNAGRIASVKEGKYCGSKPPYGYERVKLHGEKGFTLQPVPDQAEVIKMIYSLYSGASGDRIGVSKIVRKLNDMGIKSPSGKNWVPISVQDVLANPVYAGMIRWNGRKTVRAIQDGVVTQSRPRSKEDDILLFPGRHPAIVSKEMYDSVQQIRKKNPPRPISIKNTIKNPLAGIVYCSKCGRAMVRRPYQKRGQDDTLMCSYTSCPTVSSKLSLVERAVLNGIQDLVDEYRLNDAVPGPDINNAVKSKKKLITEKEHELEKLNVQKMKQYDLLEQGIYTTEVFLERSNSIASSINSCQDSIECLKEEIRHDKELIDQQSSFIPRCENLLEIYWSLDTAAKNKMLKELIERVNYTKDVKNAFRMGNEATFVLDIFPRIQSN

SEQ ID NO: 9654 - protein, 501 aa, synthetic construct
MRDMDSARLRVACYVRVSTREQAEKGYSVSEQQERLKAYCLAKDWVVAQVITDPGFSGAKLERPGMQQLISLVQTKKCGAVLVWKLDRLSRSQKDTLYLIEDVFLKNGCAFVSMNENFDTSTAFGRAMIGILSVFAQLEREQIRERMAVGRVGRAKAGLFHGGGYAPIGYDYKTIAEGGDGLVVNEYEAMQVREVFSLYLQGWPVNRIRKYMAAHYTTKDGDWGSDTTVRDVLKNPLYTGKINWAKKVYDGQHEPLISQETFDAAAARLATSSWKRTCSDGMERNSPFKSTHLLGGIIWCARCGARYFASGNYSGRGENKRYWPYYVCYSRAKSAKHMIRDPNCRNDRWAVAKLDAIIEGEIRKLAFDPAALELAVSGPQQDEDVAQRRAALQQRLNDLRAQMGRVLDLYQMGGSLPASMVGDRVAKLQAEIDGVEAALAEAVEEPPTQRLDAARAALVGAEDVLDNGTLDERREFVHSLIRRIDLDGENIDIHWSFSPEA

SEQ ID NO: 9655 - protein, 506 aa, synthetic construct
MEKQTAVIYARYSSDRQREESIEGQIRECKAFAAANGYRIIGTYIDRAMSARTDQRPDFQRMIHDSDRHLFQFVIVYALDRFSRSRYDSAIYKNRLKKNGVRVLSAKENIRDDPTGVILESLLEGYAEYYSLELAQKVRRGMADNLLEKKWVGTVIPFGYKKGIDSRLYVDESKRQAVIDIFQMYSDRYRLVDIIAYLNAHHFTNAQGRPFSRNSLNNLLVNSIYTGTFRWAGTVYPGYAPRIISDELFNKVQKIKEGRKRNMIKNTSPDYELTGKLFCGRCGRPMVGISGTGKSGNTYFYYKCSGKTHGRKDCDAKAIRRDAVESAVYNATVAMLKQPHAIKVITEQAILAQEREQGNSEVDRLKHEKAALDAKIRNISKAVAAGLTADEIISQANEYSDRSKDLEALIRIEELKEKAFTLTPEAVTFFLEKLLEKAETGNATLSTFWDFIRCIKINGYIAEIHFNYIAVPATLDNPIRVKIETNEECSNDDVLVDHQGFEPRTP

SEQ ID NO: 9656 - protein, 502 aa, synthetic construct
MEIQIREGNRRQKQKLKVCAYCRVSTDADEQENSLENQIRHYKEVITSNPDYEYAGVYSDFAISGFKEKRPGLQKMLADACKGKIDLILTKSVSRFARNTSIVLEATRKLKELNVGVFFELQNINTLSGEGELMLTILAAFAQAESESGSVGAKMVYQRKYEPGIPVQYLERSFGFKKDERGVYIADEEEAVWVRKIYDMAAQGYTLAAIKRYLNENNVKTVGGAEWLDSTVLRILENEIYKGDYIMHKYFVNEERKLVRNRGEVDAWYIEDDHEAIVSPKLWQKAQDALEAKRDYLAEGSVIEEFTEENYPYMNRIYCARCGHPLYRRIYSNGNRLNWGCSGTKRYGRSFCEGINIPDGILRGAWHFDENMYIGEKQTDKGKKEFTYLKEASWKRRHKKKEPEPIPENTETEYPYRKKIFCGLCGSRLVRHVNTKNHKAIWVCNGRKRKGKDFCDGTRVPDTIIKGWGEIKKDIYIQRKDDKNGKKRYSYTSKKPKGADRA

SEQ ID NO: 9657 - protein, 506 aa, synthetic construct
MPRQTKKFQATATKGIIWARVSSREQEDGYSLDAQIENSKSYAARKGIDIIKIFEIIESSTQGDRKQFHDMINWVKRQKQRIAIISDKVDRLQRRVSEVPVLEELRKAGKIELHFSRENKVIEKDTNGSDLACYRMIVVMAENYTDCISDNVKRSFKQMRKEGKWAHKAPVGYRNVKDSKGNSDVVIDPDRGFLITALFKEYASGIYNLEQMTKKAQEIGLTMPGSKKLYKQTIRNILSNRFYAGEMYGYGEYYKHQYKTLIDWKTFNRCQEVLEGRMNHKEQKHEHLFKGIMKCKECGTMISPYISIHAAKKKGGEKIAYKYLFCPKCKGTHINEEKGIEKIKQALGSLKSLPNGVLEKMMHCLQDLVYEDHRIELEHKKYLERKLLECDTKQERWHELYAEASITRNIHSKKIKELAQEKEKIAEQLLGYNHIAQQNFITLNYLTRLYFHADQIWDFPKNEQKQKILKLLCSEILLDGKNIVISIRKPILELAKIGSCQIWQGQ

SEQ ID NO: 9658 - protein, 503 aa, synthetic construct
MLRAALYARFSSENQREESILAQFRDSTEYCKKHNYAIVAKYADEAKSGTTTIGREQYKLMLKDAQKGKFDVVVFHKIDRNARNELDYYITKHKLEEAGVKYAYSRQDIDSTSPEGQMMESMLVGMAAYYSRNLSNEIKKGLRENAIQGKCTGGRLPYGFSVDADKKLIINEKEAAAVRMIFDLYSTGVHYGVIRKRLFNAGYRNRAGKEFTIASIYEILRNRKYVGDLYLGKTLFRKGKRNTHQTSANVQYFENVIPTIVSRDIFEEVQVKLDQNKRRSGAGKAKAIYALSGLIYCGKCGSAMVAHSTKNSRGIKNYYYRCPKGRLVGDEKCPQKFINRDDIESTVYQLIRKLFTAPDAHEQIKRIIAKNDMGVKVPNYTDQVKRLKKQESDASKRLDKLYDLYMTDREDEFTSAKMAQLKEEILRLRAQIKEAEDRQAIAQSTTFDIDKIIDTFQKQLKQKQSPEFIKTLFELAVKNVTVYPDKIKVVLLVTQERFELPTP

SEQ ID NO: 9659 - protein, 559 aa, synthetic construct
MSKTVAIYVRVSTGKQADRDSIPFQIQECSNYVKHFLKTENFEVFKDAGRSGKNTHRPEYQRMIEKVKAGMISHVVVYKIDRISRNLVDFSIMYNDFKEHKVAFISLNEQFDTSSAIGEAVLKIILVFAELERKLTGERVRDIMMNRALEGKWNGARVPYGWDWDTKKQCPVHSDTEAEYARMMYRLYDESHSTCVVRDYCNAHDIPTKRGGEWTSKTVADFLRNPMNVGDYRYNYRKSARGKRNDPSEVIYVKDVFPPLIDRELYERVTHQMDLNTFGLGKDGRKVVSKKTHVFGGLIVCGLCGAFYHSDSDTPRADGFLPSQYRCGAHNRKIHCKAKGTSDVKLGPFIFNYISNLVKASKSKKLLHSVSDLEQILLTGPEFEQVAGIADAGLDVTFDTIMHGFKPKRYTAAPYTVIRSGDSDALTAKRDKTIRALERLKKLFLFEDDAMSEKEYLMSKRELEGTLSDIENELSALEADTADTKYDDMSFISTASGFLIAHQIASGEHINYRELACAVDAKVLKDFANSVIERIVLLDGRVASIEFKNGLVHEFLYRE

SEQ ID NO: 9660 - protein, 499 aa, synthetic construct
MNVAIYARVSTDVQAEHGYSIGTQLEACRKKAADMGSVVIKEYVDDGYSGGFLERPALDQLRDAVADGLFDAVIIYDADRLARKLIHQLILVDEFEQAHCHPLFVIGEVAATPEGQMTLQMKGVFAEYERAKIRERTMRGKRAKLRAGKAICDSHIYGYNYDKETSTYTINKAEAEVVKMVYKWYVEDRIGGCAYIAQCLNEKGIPTPSGRGKWCNSTVRNLLHRPHYTGRYFANALYHKKTGPNTYARIPRPQDEWIEMTCPQIIDEELHQRALSVKSTHRTFKTWAPSKTPGLLQGLAYCGKCGGRIYITRSGHQNKVKYYMCNFVSPRKGKTCDTRYMKVELTDNIFWEALQDACRDEEKLLAYINRRKGPQDNAQPKQVRRHDLTSRLEKIQAERKVVMEWFSSSLLSQAEATDKLSTLKAEESQIREDLASLDSPKSQPEKLSAADICDIINNCPDTPEARRQAVLNTIERVNLTRLDDNYGTQYIIDFDIFFK

SEQ ID NO: 9661 - protein, 456 aa, synthetic construct
MTGLNRKQKMKLRLALYVRVSHEEQAKHGYSLSAQKDTLKEWAKANGHTIAGWYIDEGVSARKLVKRRPQMQRMLKDVQAGNIDMIIFIKLDRYFRSVAEYHATQTILEANDTHWKAILEDYDTTTTDGRLKINMMLSFAEAEADRTSDRIIYTNKHKIKKKQPVTGSQPHGYMVETQESGTKRVVKNPNQEDAVAEVFSHFAKYHSVSGTTTYMNLDYGYSISYNTVRKILTNPIYTGNYRGVEDFCPAYITEDQHRENLKIVESKNIPKTRSGNVYIFRGLLICPECGSKLTSQYTMKCGKNYKNYRCSRAHKQRLCSNRLMISELKVEEYLISNIRPEIEKYIAEIEIFGTNKKPKYNRADILAEMERITYSFNKGRMPMDKYDKEYEELEKKLEACDHDDTQVDAEHFKAFLESDVLDIYGTLPDEDKRAAWNSILKEIHVDLERNFTPVFL

SEQ ID NO: 9662 - protein, 528 aa, synthetic construct
MKRVIAMVRSSTIKQSIEDQHNEMVEFLKLEGYSEDEIEWVEEQGASAAKVDDEYQAMIAKVKSIIETTPSIKAFAVWHLNRAFRTEDSYVDLKKFLIAHKVNLICKNPYLRLLTPTGEVDKGMELAAGLLAILAKQDQEERVEKFSRAKRGNAKKGKYNGGILKYGYCLDENNYVVPNEPEAEIIRTIYNMYATGKYSAVTLTKELMDIGITRNGKPFTTYFVSRMLCETAYAGYTDRKGSHRKFIPIVDKTLWDKVKEIREKNYTNVPRTKTLNLGTKILKCPECGGNLNRDKNHYICWRHISTSMPALSGNKCGYSLCVPANPSESIFWHIGATLHMNHLMNATKEVLPSYNQTLVTLEKKLDVQTKRLEALQRKKNKVVDSYIDEIITKPQRDEKLAKIASDINICESTIQILKSDYKKTLEIISKLEDEDAYAEALADALFGTMEERDTKKMFDIVHTYIDHATVQRVQYGTPDPRSKRPNALEYTITLVGGKVVYKYLYIASKHLYYEWQKNKWVEVYIEVL

SEQ ID NO: 9663 - protein, 414 aa, synthetic construct
MAAVSEIGAKKDKKKVAAYARVSTLMEQQEESYETQRKYYETLIRNHPEWEFAGIFADRGISGTQADKRKDFMRMMEAARNGKIDIILCKSISRFSRNVVDTQHCVHELKSLHVEVLFEKEGISSFDGTADMIFSIMASVAEMESRSISENVKWGVRRRQEAGTFHVGSNHMLGYDEIDGKLTPNQDAWIVKLIFEEYAQRIPISDIIKHLSEKGAKRMRSKRQFTISSIYAILENEAYIGDRKYQKAPPKNYLTHKPDSKNTYTSKYLYDEHEAIVPPYLWNAVVERMERERAETEKGIKRKSNSHFLYGKVICGECGEPYRRHGAKDKNGCYKTWRCRGRVNGTGCQGRHIREDELMAAIVRKMGWDNGVLTPEGLVTFDEIEFEESVEKVIVKPDTVNLVMKKGWERKIAV

SEQ ID NO: 9664 - protein, 558 aa, synthetic construct
MSTNVYNDIINKSESGDSPSSKPQLTVIKPVKRKQGTIKVAAYCRVSTDMEMQQNSLDTQMEAYKRVISEHPGWELSGIYADKGISGTLVRRRTEFLRMIEDAKNGNIDYILAKSISRFSRNTVDALSYIRLLKDIGVSVYFEKEHLDTGSTTSELILTILAAVAQEEIMSISSNLKMGRRMRAEAGMPAWSRTYGYRLEKVHTGGKYSDKAAEQWVICEEEAKVVRRIFQEFIEGWSTTEIGKHLNEDGVPTARGYGEWASMTVSRILSSEKYLGDVLIQKFYIKDPIKHVMVRNKGTITQYYIKDHHPAIIDRETGEIAKKVAALRDNHNGTTQYPFYGLLKCPFCGENMVRAPVYLHNRYYVWTCGGKSPAEPVNVDQTNVGTVKEEELSEETVGFTRAARSQCQPYGISEKSILEAIRAAAEAAGKDIRREGEEGVKQDTIGKNSRSRGRGNQVGAMKYSVLSYKKLVAEVSSITIQLWDQLIVTWAEGDSTAVQLNWDESKLPKPDAVVDTDAIAKMVAKMTDDIQNAIIEDGELVPKVYGFGSKRFKEEKDK

SEQ ID NO: 9665 - protein, 425 aa, synthetic construct
MMRKVIRKIDALPALETPKRVAAYARVSSGKDAMLHSLSAQVSYYSDLIQKHPGWQYAGVFADEALTGTKEERPEFQRLLKESRDGKIDMVLCKSISRLARNTVTLLETVRELKSLGVDVYFEEQNIHTASTEGELLLTILASYAQEESRSASENQKWRVRRNFENGMPWNGTMLGYRNEQGVLKVVPEEAEIVKFIFESFLAGNGKPWIAKALNQRKVTTRFGKQWTKTGIDRVLRNYSYTGNLLLQTTFSENHITKAKCINTGQLPKFHVEESHEAIIPVETFEAVREEMRRRAEHYPNRSPSTPSLRGKVVCGLCGKHCRHKITNSYPMWICGTYVGLGKDACPAKAVPESVVDGFVEEFGGTDQISRVTVYGGNRLVFTLADGTEAERLWKDRSRSESWTPEMRKAAGDKTRERKAKRCRE

SEQ ID NO: 9666 - protein, 524 aa, synthetic construct
MPRVTTIPATKDKFTALPKSSIAKRRVAGYARVSTDSDEQFTSYEAQIDYYTSYIKSRGDWEFAGVYTDEGISALGTKHRDGFNAMIRDAMDGKIDLIVTKSVSRFARNTVDSLVTIRKLKEKGVECFFEKENIYTFDGKGELLLTIMSSLAQEESRSISENVTWGQRKRFSDGRFSLGYSHFLGYEKGDGDQPLKIVPEQAEIVRVIYKLFLEGRTTQGICNYLVAHNVPSPAGKRTWRSSTVRSILTNEKYRGDALLQKTYTADFLKKQLKTNTGEVPQYLVEGSHEAIIAPEDWDAVQDELARRKALGRAYSDKAFHSKLICGDCGAFYGRKVWHSTDKYRCEIFHCNRKFEDGRKCETPTLTEAEIQARFLKAYNEFIQSRDAVVKDCELLRKALCDTESLQLEAETAQEEMAFTAGLMREHIKKNASVEQDQSMYAAETERIEQRYNAALERRDRLLEQIEAGKRKSRALAAFIATLKKQPLVQEEWNERLWITILDTATVMADGRIVFRFKDGSEITA

SEQ ID NO: 9667 - protein, 425 aa, synthetic construct
MRRDEESSSLCSRLASTEEQARHGYSIGAQVDSIRAYAKEHGYQIVGEYVDEGISARKPYKKRPALLSLLEAVEADRVDVILFIKLDRWFRNVAAYHQVQPILEKHNVAWQATLEDYETVTASGRFKVNIMLSVAEDEADRTAERIRFVQEAKRAKGEWLNDSVLIGYKLEDKKVVPDPEQLPIIEDLFQTFIDYRSCAVCRDLLHDKYKINRSFTTIRWLLHNKRYIELIGHDQFQRAQEILQTRSQRNAGRTGSVFLFTSIIYCKECGGRVKAGRVKGTAYYSCYLHDEFGSYRCRNRKHLPEHKIESFLLENLESAAKDRNAEIAAETKPKKDKARIQKKMDKLKDLYLDDLISKEIYEKDYRALESELYAWEPQQIPIDLSSISDAVKMYSTLTMENKKAFWSRTVKRIEIDASGQIFLIL

SEQ ID NO: 9668 - protein, 526 aa, synthetic construct
MNAVIYARYSSQNQTEQSIEGQLRDNYAWAKQQGITVIGEYIDRALSGTKDSRPDFQRMIADAANEQFEMVIVWKLDRFARNRYDSAVYKAKLKKHGVRVVSVMERITDSPEGIILEGLLESMAEYYSANLSENTKRGKRETALKGYWNGGHPPFGYRLQDRKLVADEKTAPTVRYIFEQYAAGVSKQDLIAELEKKGVLTYYGRPLTLASFNSVLRNQAYIGKSTYKGEVVEGLSEPLIDEKTFWKVQEQIKARSRAPAARKAKVDYLLSGKAFCGICGQPMVGIGGTSRSKHVYHYYRCSHRKHPYDCRKKNERKDTVERFVVEQTLRFVLTPEQMDYISKAVVAEYKKEFSVSQVQELRSAIGRIEIEIEKLVDAAIEAPKIARQKMYDRMEALEAQKADLEESATRLSVASRIALTEKEVLAWMKQFCDGDAGDEAFRKRIIDVFVNSVYLYDDKIVIFYNIRGGKQVSFRDVKTALDDESRAESECSYLNTIASARVTKYEHYYVFVSGVLGLVVMKPDKK

SEQ ID NO: 9669 - protein, 529 aa, synthetic construct
MTVTVRKVQTIPATLGRFSSAPIASKHKRKVAGYARVSTDHDDQFSSYTAQVDYYTNYIKGRDDWEFVDVYTDEGITGTSTKRREGFKRMIADALDGKIDLIVTKSVSRFARNTVDSLTTIRQLKENGTEVYFEKENIWTFDAKGEVLLTIMSSLAQEESRSISENCTWGQRKRFADGKVTVPFKHFIGYDRGEDGNLVLNKKQAEVVKQIYAMFLKGMTPHTIARKLTEEKIKTPAGRDTWSSSSVKSILSNEKYKGDALLQKTFCEDFLTKKMKLNQGEVPQYYVENNHEAIIDPQTFDMVQAELARRTSGNNRHSGVHLLSNKIKCGDCGGWYGSKVWHSNDKFRRIIWQCNNKYKNKDKRCTTPYLDENQIKERFTIAVNKLLTGSVNAIRACEEALAATLNTSELEQKQHSLLTEMQTHDSALRQLIHQNATTAQDQNEYRKSYDAIAQKFSSAEEQKKLVDKKLSDLLKHRNIIENFIRKLKEQNGQISEFSENLWCGLLDYVTAYTDGRLIFRFKNGSEFLG

SEQ ID NO: 9670 - protein, 575 aa, synthetic construct
MKTIKKIDVKRIVPPTRKRVAAYARVSMESDRLDHSLSAQISYYNDLIQNNPEWDFAGIYADSFISGTNVERRAEFQRMIRDCEDGKIDIILTKSISRFARNTVDLLKTVRRLKELGIEVQFEKERIRSLSGDGELMLTLLASFAQEESRSISENVKWGARKRFQKGIPHGRVRVFGYRWEGDHLVIIPNEAEIVKRIYQNFLDGKSRLETEREFAAEGITTRNGCRWRDHSIKTVLTNITYTGNLLLQKEFTDDPITKKHIKNTGQLPQYFVENTHEPIIDMKTFRFVQEEMARRRELGPFANKSLNTTCFTRKLRCGKCGSSFIRCTRSIRVKYHSTLQPANGYYRTWNCGRHRKNTALCETNEIPETIIKKCCSEVLGLDEFDEQIFSKRIERIDVPCQGILLFNFVEGGVISKEWHSKARTDCWTDELKNKHRESRRNYMLKGIGPFYPFTCRIKCGCCGENVKRQSEHKSVNHKVFWRCRNGCGIKGIPEEELKEISAGILGLEEFDSEAFMKQIDHITMVRSGLMEFTFTDGHTEQAEYCIKVRQTKWTEERRKAMSERLKQLKEAKKK

SEQ ID NO: 9671 - protein, 481 aa, synthetic construct
MITTNKVAIYVRVSTTNQAEEGYSIDEQKDKLSSYCDIKDWSVYKVYTDGGFSGSNTDRPALEQLIKDAKKRKFDTVLVYKLDRLSRSQKDTLYLIEDIFIKNNIAFLSLQENFDTSTPFGKAMIGLLSVFAQLEREQIKERMQLGKLGRAKAGKSMMWAKTSYGYDYHRDTGTVTINHAQALAVKYMFESYLSGRSITKLRDDLNEKFPKEIPWNYRAVRMILGNPVYCGYNQFMGEIYKGNHEAIISKEDFDKTQEELKIRQRNALENNNPRPFQAKYILSGISQCGYCGAPLKLLMGMVRKDGTRFIRYECHQRHPRKIKGVTVYNNNEKCDSGFYCKDALENYVLTEISKLQDDTSYLDKIFSGDNAETIDRESYKKQIEELSKKLSRLNDLYIDDRITLEELQSKSAEFISMRATLETELENDPAIRKDKRKADMRKLLNAEKVFSMDYESQKVLVRGLINKVRVTAEDIVIKWKV

SEQ ID NO: 9672 - protein, 488 aa, synthetic construct
MEKARAVAYIRVSTERDAQLHSYEFQEHYWQSAFEDDPDTELIGIYADKGISGHSVQKRPKFLVMMQDAREHKFDKIYTKSVSRFARNTTQLLEAVRELRDLGIEVVFENENIHTFQPTSEIFLTIAATIAENDLEVDSARQRWSIQHRCENGWISVGSGLFGLKLTADNELEIVPEEAAVIRYIYESYVDGGIGSKRIADALNAAGVQSRNGYPWDAKHIIGLLRNEKYKGDVIMGKSVRHFGEYHKNPNAEYAPRYYMEGTHEAIVDKDMWEAAQRILEERSRNHCRTRIAHSFTGMIECGCCGKNYLHKVNNSQCKWQTDIWACRTYLRDGKKACGNSRIKDTVLKEKFISAYNEFIERRPQGDSMVALQEVLEDLRQQEQELAELMMQRLITKAAYEEERKSVKMQITDISEKISERRAKRVPESEYVPITEFSEEKTKRFLSKVVVTMFTVTFVFYNGAKITRTYDNGQPGNKVGWNKKKEES

SEQ ID NO: 9673 - protein, 453 aa, synthetic construct
MATATRRVVRTMPQMFIDVADNQSERLQVAAYARVSTEKEEQEDSFERQVEHYKQLIYSKPDWQFVDVYADPGISGTRAEKRPDFLRMIEDCRAGKIKKVLVKSISRFARNTVDALQYIRELKDLGISVYFESENIDTLTPGGEVLLTILAAMAEQESRTISSNIKWAWQRKFQKGDIILNTGLMLGYRKIGKDDEGHDVYEINEEEAEIVRRIYREFIAGYSITQIAKRLQADGVKTKLGRESWRHNVIESILTNEKYTGNALLGKTFKPDVLTKYRQKNDGKKAPIYYVEGSHPAIIEKGLFDLAQQEMQRRRDANDNKVGGGRYSSRYPFSGMLVCGICGSKLRRQVRTMGSGKRTASWGCCNRISNGRAVCDSHHVNEDVLEATYLTAMRRLVDSAEEVVEAVRDGAELALEPENKAAMDRIDEETIQLQEAALALHKAKQRMEIGSVE

SEQ ID NO: 9674 - protein, 573 aa, synthetic construct
MAKVKLPDKPRVAIYTRVSTLHQIDKDSLPMQRQDLINYARLILNTEDYVVYEDAGYSGKNTDRPKFQEMMQQVRLGMFTHILVWKIDRISRNLLDFATMYSELKQLGVVFVSKNEQFDTSSAMGEAMLKIILIFAELERNMTSERVTAAMLSRAANGQWNGGRVPLGYDYDPETKTFTVNESEAAVVKIIHDKYEQERSLVSLARYLNGHGYRTRTGCTYSPSTLLIILRNVFYCGDYRYNVLKDGDRQKRKKESEWITVKDHHPAIISREQKDEIARILKENRRLECERRGIYSKKKNVHVFGGLVICGNCGHAMTSTIRPADQDGIRWSVYVCPTKRRSEYLCKGRATSEVVLGEFVFNYILNMLNVQKNFDSINSVEDMEKMLLSGSTFRDVDGIERAGLDDLYNMLASGLTEKAPFDSSVEVRKKPVVSDIELENLNTEKTKIERAAERLQSLYLYSDDSISQKDYIIQREKLMSQLAEVNEQIGMVMSNADEKDVSDEEFVHAASKFILTQKLEGRTYIYYKRLATTVSREVLRSFVMSIIENITIYDGRVQTIVFKNGLSHTFILK

SEQ ID NO: 9675 - protein, 525 aa, synthetic construct
MWMLPQMSVDDIIMYLRKSRTDDPALTVQEVLSKHEQMLDDWVARNIPDDGRRIPEANRYREVVSGETIESRPCVQEVLRRVESPRVKAVLVVEPQRLSRGDLEDIGRLVKLLRYSNTIVITLQYTYDLRDERDRDMFERELKRGNEFLEYQKRIMGNGRLLSVQNGNFIGQKPPYGYNKVVIKEGKRKCHTLEPDPERAPIVKMVFEMYAGGTSASQIAKTLRTMGVTTADGGKWVTSSVKQMLTNDHYIGMVHWNKRKTVKVVEDGEVVATRPRNSDFLVYPGKHQPIIEKELWDAVQAIKGNIPPIKNRAKYANPFAGLVVCQCGGKMVRQQYVRDGVERCAPRLVCPNQAECHTASCSLPEFTGAVIEALEKGIKNFELMMADAPEDDASQQERLVAQLEKRLAELDRLELAQWDKYTQEAMPKHVFDALNKKVVQEKEETLQALKTAMETVPISVDYEKKRETFAAAVRTLQDPNASVKEKNLLLKQCIERINYNRKPKESDNRRFGNPEPLELEFQFKV

SEQ ID NO: 9676 - protein, 514 aa, synthetic construct
MAKRKFNKGGEVRLVAYYRYSGGSGQTEQSIEGQRRDCETYARLHNMTIQNEYVDRHISGKTDDRAAFQQMITDSDKGAFDMVICWKTDRFARNRYDSAVYKKRLRDNGVEIVYAAESNIAGAEGIIIEGVMEALAEYYSAELAEKMRRGMRESALKGQAISRCRALGLKTDEHKRFVIDEKTAPTVRFIFEHYAAGESATSIVDKLNAKGLRTSQGNPFNKSSIPRIIQNEAYRGVYVSKSYDVRIEGAIPAIIDDELWERAQTMLKLNRQLKAKNEPKADYILSGKLYCSCGSLMRGMSGHSATGEVYRYYTCPNKNCHLRNIPKDDLEGKVMQSISDHLLQPEAMEALAEAMVEVQKADAEKPNAERVAIEQSLADVRRRSKNILDAIENGTANAQLCARLDDLSEQERTLNFQLSALEKEKPVVFTKEQYLFLLEQFLVEPSERTPEYGRRLVNTFVTSMVVSDRELVINFNVSDETVNKNKKTSQTNLQKESSSGMRLVRVARIELTAS

SEQ ID NO: 9677 - protein, 599 aa, synthetic construct
MIDNCVRAVFYARVSTQEEQQLKALPKQIQENRDKIREKGWVLVDGYVDEGKSGTVIKRRDEYQRLLEDMELNKFDVVVVKDQERLQRNTRDWYNFIDRLVQNKLKLYFYLDNTFYSPDNALITGIKAIMAEEYSRNLSKKMNNSNKRRIEKARAGEEVSAMGNGQTYGYSIVNGKWVVDESQRELVKKMYEFYTELHSIRKVRDALNEQGYRNQRGNLFTDENIGRIVKNVMHKGWVILNRHHREFDSKETIEKLEDEWVIVKNDHEAIVSEELWDAVNDEIQSHRNKGNSGTRGKRGGTDTLSGKMVCNCCGRVLWKHASQGSYKSKEGRKYTYKRYTQWYCSGKMGRGELACTDPATISGVKLQKYLVEMADMFLDYSTVEYSKNLLKRRTISWLEDLRDKLTTPTDNGKIEQDLKALEGKRGKLIDLYTDELISKEEFKSRSVDLDAEIEKKKTLLVPVEENPDIKAIEDTIANIDAEIEALFEDEAMVEEKKVQFIQEHIKKIYVSKNSDVFIVLDNVAGAFLFIDKEDTRIEVVPVAEYNPKELSEEGITENDFVPFDRESMPQHHGSKHLHPSGPQTAPRCCFRDRFSCDQP

SEQ ID NO: 9678 - protein, 628 aa, synthetic construct
MKAAFLIRCSTKNQDLNRQTRDLTRLAKSMGYEYDLENLVYGEKITGKDDVTKKNRDSIDRLLRAAKEQRFDVVLVSEVSRMSRDPASGRIYVRLLINMNIPVYFKDIDLWTINPETGKKVRDAELVIGAAFDAAWKYLKSMKTQIASARRNELDNNRISIGQPYFGYKRYEGIDKSKKNQIVVNEAEAEVVQAVYNEYLKEGATLKSTALAITDKYGEKLNRKFSLGTIEHILTYESYATGIKKVNLKDPDTDEVEVFDVSTPIIIDKELYEAATNKRKNNRVKDEPYPNQQVYLLSKLIKCPDCGYTLTPRRKAGEFGQTYRLVNGKPAVSWLCMSGINNASDCTSRTSIANEKLEPIIWELVKKELIGYANMNDEKREEQIRECEEKIEYQNYSIQNFTKEIDKLKKRLSTAYQFSINAAEMAGDDEDMRTMAMEEFNRTAKGVRQEMKNFEKSIEQAKGELEKLVDLKTFYSQPTLPKDYLEQIEGNFTEKRNLVKQLITKIVPYRITTFKKKERESGAKTCNKMITVKNGAVLLEVYTIGGVYNVFYNANSKFQVKTAYYVHGEYATFQNGIRKFPAYDEGEYFVISNANMVMETDDIDEVVTVNEFVDIAIANNWVIEYQYQ

SEQ ID NO: 9679 - protein, 488 aa, synthetic construct
MEKTRAVAYIRVSTERDAQLHSYEFQEHYWQSAFEDDPNTDLIGIYADKGISGHSVQKRPKFLVMMQDAREHKFDKIYTKSVSRFARNTTQLLEAVRELRDLGIEVVFENENIHTFQPTSEIFLTIAATIAENDLEVDSARQRWSIQHRCENGWISVGSGLFGLKLTADNELEIVPEEAAVIRYIYESYVDGGIGSKKIADALNAAGVQSRNGFPWDAKHIIGLLRNEKYKGDVIMGKSVRHFGEYHKNPNAEYAPRYYMEGTHEAIVDRDTWEAAQRILEDHSRNHCRTRIAHSFTGMIECGCCGKNYLHKVNNSQCKWQTDIWACRTYLRDGKKACGNSRIKDTVLKEKFISAYNEFIERRPQGDSMVALQEVLEDLRQQEQELAELMMQRLIPKAAYEEERKSVKMQITDISEKISERRAKRVPESEYVPITEFSEEKAKRFLSKVVVTMFTVTFVFYNGAKITRTYDNGQPGNKVGWNKKKEES

SEQ ID NO: 9680 - protein, 540 aa, synthetic construct
MATATRRVVRTMPQMFIDVADNQSERLQVAAYARVSTEKEEQEDSFERQVEHYKQLIYSKPEWQFVDVYADPGISGTRAEKRPDFLRMIEDCRAGKIQKVLVKSISRFARNTVDALQYIRELKDLGISVYFESENIDTLTPGGEVLLTILAAMAEQESRTISSNIKWAWQRKFQKGDIILNTGLMLGYRKIGKDDEGHDVYEINEEEAEIVRRIYREFIAGYSITQIAKRLQADGVKTKLGRESWRHNVIESILTNEKYTGNALLGKTFKPDVLTKYRQKNDGKKAPIYYVEGSHPAIIEKGLFDLAQQEMQRRRDENDNKVGGGRYSSRYPFSGMLVCGICGSKLRRQVRTMGSGKRTASWGCCNRINNGRAECDSHHVNEEVLEATYLTAMRRLVDSAEEVVEVVRDGTELALEPENKAAMERIDEETIQLQEAALALHKAKQRMEIGAVEYASRVKEYSERMKELEAERNELQGTAAKYAEVRMWLDTFIEQTMQSDTLTTVDGTTMKMLVDRIHVRNDGIVVEFKCGVAIEQEYVK

SEQ ID NO: 9681 - protein, 511 aa, synthetic construct
MAKAKAATNDISKLAVIYARYSSHNQTEQSIEGQLAAGHRYADLKGYTVVHEYIDRAMTGRNDNRDDFQKMLSDTSKKQFGVIIVWKVDRFGRNREEITFNKYRCKKNGVRVEYVAENLPDSPEGVILESVLEGMAEYYSLQLSQNVQRGLLESAKKHQVIGGNVPLGLMMDEHKRYAPDPKTAPTVKLIFDMYAEGSTTSEIINHLNSIGMRTKAGKPFIKSSLTTVLKNEKYIGVYKYKDIIRDENVIPPIVDKEIFYKVQELLKVNRRMPSHKWSYSDYILTDKLFCGKCGTAMVGESGFGKMGVKYSYYMCAKRRKDKTCDKKPVRQEWIEEIVLQRVQGILQNDELLEFIAENTWQYYLAQDESMEKLKGLQAELDKVEKSAANLMKAIEAGIFNDMTKARMDELDDQRAVIKKAMAEIEIEKGFKLTKDHILYFLEQFKKLDYKDRDCQRRLIDVFVNSIFVYDDKLRIAFNFGGSDGTITLNEVDKADHGEGFVCCASCPVLRP

SEQ ID NO: 9682 - protein, 502 aa, synthetic construct
MSETTQIGVIYARYSSDKQRDESIDGQIRECMAYAEREGITITNTYIDRALSAKTDDRPEFRQMILDSNKQAFDYVLVYQLDRFSRNRYDSAIYKAKLRKNGIRVISVKENIKDDPSGIILESVLEGMAEYYSAELSQKVMRGMTDNVLQGKWVGTVVPYGYKLSNNRQLEINEHEANVVRKLFDMYLQRHTLSEMASYMNANGHLTHKGKPFNTNSIKAIISNEKYIGVYSWGSERIENAIPPIIDKNIFEKAQHKRNLRAKKKGNRSELYQLCGKLECGRCGGNYVGSTGTSKTGAMHHYYVCSNRRRKNACKAQNIRRDALDDIVISQTLAILNKPNVVNKIAEYAASSGKNLQSETVAQIDIIDAHIRDLKKSLDNYMTAIANGFISDVLKHRIETTEQELKDNIEIKTSLENTIIPVELTEDHIRFFLLKMAKENPSTLRGRARIIEAFVHHVTIYEDHIEIVFNYKNELSEFHDKTLESSLLNDLVTQKGFEPLAF

SEQ ID NO: 9683 - protein, 583 aa, synthetic construct
MNKIIHKIDVRKPMIKKKVKVAAYARVSMDTDRLRHSLSAQISYYNNLIQNNPDWEFVEVYADLGISGTSTKNRQEFNRMIKDAENGKIDIILTKSIQRFARNTVDLLNTVRHLKEIGVEVRFEKENINSLSGDGELMLSIMASFAQEESRSISNNVKWRIRKQHEKGIPNNRTKLYGYRWEGDKIVIVEEEAKIVRLIYENYLNGISAEKTEKQLAEMGILSSTGKRFPAITIRQMLKNINYTGNLLLQKEYVVDPITKKTKKNKGELPMYLVENNHEAIIPKEIFDKVQEKIALKRKLGVFGNDAINTYPFTSKIECNHCKCNFRRKTTICFSKKNYRWLCRRADKKGRKVCDSRSLPEEKLEERIAEVLGLKKFDNEIFQEKIEKIIVMNDDEINIKFYDGKLVKTKLNLGPKKNWESGRSEKYSLYAKEGIPISDFTNIIKCGYCGKYFSRNTSHYGEKTWICREQFLRCKKTGSKRKSVPEIILKESVCEVLGLKRFNKEIMRENIDCIIVKENEVTFKLKNGGVVKKELVISRRKCRKYTEEERKKCSRRMIEVWKNKKEKNNAKESNNNTCDDKEV

SEQ ID NO: 9684 - protein, 533 aa, synthetic construct
MQKKVTTIPATIKKFSQTSINQVNKIKVAAYARVSTDHEDQVSSYEAQIDYYENYIKGRSDWEFAGMYSDEGISGTNTKKRIGFQSMVNDALEGKIDLIITKSVSRFARNTVDSLTTVRKLKEKGVEIYFEKENIWTLDSKGELLITIMSSLAQEESRSISENCTWGQRKRFADGKVSVPYKTFLGYDKGKDGNLAINKEEAKIVKKIYSLFLQGYNIGSIASILTSEGIRTPRGKEQWYHGTVKSILSNEKYKGDALLQKTFTVDYLTKKAKKNEGEVEQYYIKDNHEAIIPRETFERVQRLLKKKSEDKYKHSSVSIFSSRIKCGSCGANYGSKLWHSNSKYRKTIWQCNEKFKNEVKCETPHICEEEIKEIFIKVINEVIKKKKTIQDEGIYFIKSVLNTEELESEKENLEEKINTIVKNINLCIADNSKKVQDQKRYEESYNKLVFKYERLQSELCKIKEEILDKQIRKDEIQYFLKNIEEQVPIAEFDDTLWCNTIECIIVNIDNNCIVKFQDGTEIKVDRQFLKGTY

SEQ ID NO: 9685 - protein, 440 aa, synthetic construct
MIQKKITTIDAAPKLERLINVAAYARVSSGKDAMLHSLAAQITYYQNLITSHQGWKFAGVYADEAFTGTKDNRHEFQRLIQDCKDRKIDMVIVKAISRFARNTVTLLKTVRMLKSINVDVYFEEQNLHTLSAEGEMVLTFLASFAQEESRSVSENMKWRIKKDFEQGLIWGSKPQLGYRIVDRHLVVVPEEAEMVRRIFNLYLDGYGFQGIANLLNAEGQTSALGNKWSKTAIEAIINNYNYTGDLILQKTFRVDHLTKHKKLNRGEKAQYLVEDAHEPIITKEQYMMAQTLKKQRAQHFNLLDMTKQINLFTGIIWCGACGKHYRRKKQERRMWWTCSTFNTAGKGACDSKSVPEEILIEITKKVLGVKEITAEIIKSKVDHIDVLKDNKLVFHLKNGTTAEETWKSLSRKDNWTPEMKEKARQRAIAQYRRKEGKHNG

SEQ ID NO: 9686 - protein, 526 aa, synthetic construct
MAKVTIIPSKINPITLTPVGQVAKRKVAAYARVSTDSDEQYTSYDAQVTYYTNFIKGKPNWEFVKVYADEGISGTSTKRRDEFKEMIESALNGKIDLIITKSISRFARNTLDTISITRQLKAKGIEVYFEKENLWSLDDKTEFLLTIMASIAQEESRSISQNITIGKRWGMKEGKVSFAYKNFLGYKKVDGKIVVDEAQAETVRLIYMMFLKEGKTCTGIAEFLKSKGIPTPSGKSCNWTKNTVYSILTNEKYKGDALLQKKYTADYLEHRVVPNNGELPQYYVENNHPAIIEREVWEMVQTEMMRRSMLGAAYSGNSIFASKLICGDCGKPYGKKKWHSTSKYAREIYRCNAKYNKGQTQCQTPNLTEEDIKTRFIKAYNLVMCDKKQVIEDTLAVIELLADTTDLDAEIANLQTKIERISSDVSLMVRENARTQQDQIKFAARYEELTKEYETQKAALEKAVKEKAYKTGKATKMRAYLEAMKQADDFLEEWSDEVWILMVETATVNRDKTITFRFTGGKEITL

SEQ ID NO: 9687 - protein, 466 aa, synthetic construct
MKRIITQVEFPAEAPKLTRVAAYARVSSGKDAMLHSLSAQVSYYSDLIQKHPGWQYCGVYADEALTGTKDARENFQRLLNDCRAGKIDLIITKSISRFARNTVTLLETVRELKLLGINVYFEEQNIYTLSADGELMMTILASYAQEESRSASENQKWRIRANFQNGLPWNGLVLGYRIEDGIYVQVAEEAALVKLIFSLYNGGWGTYKIAKYLNKEGYRTRLGNLWTQGSLQKLLNNYAYTGNLLLQTTFVEDHITKKGRINRGQLPMYHAEDSHEAIISMAEFQTTQETRKERAAVFAHTSDPNVVYPFRGKLHCMDCGKNYRRKVVSRGPAWVCGTYNTKGKEFCPTSKVIPEETLMAVTAEVLGTDTFDEAVFLAEIERIEVGTENRLTYCFKDGSKATAVWKDRSRRESWTADKREAARQTALQQEMPERYSDGRFKKKDRGCLPPSGDQRATQHTQRRPQL

SEQ ID NO: 9688 - protein, 528 aa, synthetic construct
MSRSARSVTVIPASINPISHLPIALQRKRRVAGYARVSTDSEEQQTSYEAQVDYYTRYIQSKPDWEFVKVYTDEGISATNTKKRDGFNQMVADALAGKIDLIVTKSVSRFARNTVDSLTTVRKLKEKGVEVYFEKENIYTLDSKGELLITIMSSLAQEESRSISENVTWGKRKQFADGKVALPYKHFLGYQKGPDGLPQIVPEEAEIIRRIYSMFILGSTPCAIAKQLTEDGIPTPSGKSKWSPSTIESILSNEKYKGDALLQKTYTVDFLTKKMIVNDGKVPQYYVENSHPAIVQPWEFAIVQAEIKRRRSLPRRYSGQSVLATHIICGDCGDYYGSKTWHSTSKYRRTIWQCNSKFSGNQKCHTPNLDENRVKDAFLAVFNTLIENRDALIEDGIIIQQTLTNCDEIDSQIAAMVQEQEVVTELIRKCIAQNATDALDQEDYAKRYAALMDRFEAAAAKLAELNEKKQARDDQACMISGFLFELRERDEALTEFDPYIWAITLDVVTANSDGSLVFKFRNGLEVAA

SEQ ID NO: 9689 - protein, 545 aa, synthetic construct
MLKADYLSSLGIESIINYLRKSRADEEHERKTGEDVLRAQKELMDRFLDPLGIPFEQRLEVGSGDKIATRPVFQSVLQELQAGKYQAIAVKEISRMGRGSYTDMGIIYDLLVEKRIFVITPYKLYDPANSADLRQIRFELFMSREEFETTRERLFGGRVNNAMEGRWVAGAAPFGFVYNKTTKKLEINEDEAAVVRQIFDYYVNGVPDKNGKKRDVSFRALATYLKRYTPIRTPRGYREWRPIQLRQLITNERYIGTMRFRTTKRVGGKQVPRPEEEHIIVPDAVPAIIDRETWERAQAKVADSAHKPRTRMDFSPCELAGLCICMRCGRRMVRQYSVQHYRKQNGEVNVYHKEFLWCTTAGCTFVKYRSIEEDLLELLRHFRDLDADRLEEQISAILAAEKAPQSHDDMTEYIDQRERELKARMRFIYEKYETGIYTDEMFIERKTEIDVELKQLEEMKARAETAANEEQKAEIDTQAVKKNLTSILDAYNAADDKSDRNRILRAVFDHIHVELIERGRGRIPAKYVLYPVLKKDLTRSGFLVL

SEQ ID NO: 9690 - protein, 523 aa, synthetic construct
MAKSVTTIPATLSRFTAAPINSTKKRRVAAYARVSTDNEEQLTSYEAQIDYYTNYINGRDDWEFVGVYPDEGITGTNTKKREQFRQMVADALDGKIDLIITKSVSRFARNTVDSLTTIRKLKEHNVEVYFEKENIWTFDSKGELLLTIMSSLAQEESRSISENCTWGQRKRFADGKVTVPFKRFLGYDMGSDHNLVVNPEQAKLVKRIYGMFLQGQSPFQIARTLTDEGIPSPGGKDHWNPSNIKSILTNEKYKGDALLQKSFTVDFLTKKKKTNEGEIPQYYVKDNHEAIIDPETFEMVQTLMTTRTKGRNRKSSVSIFSSKVKCGDCGSWYGPKVWHSNDAYRKVIWQCNHKFDGQKCATPTLTEDEIKELFLRAANQVIDQKEQFIAIYDQVLSRSLDTTALESELSDLEAEINIAAELIEDCIKENAHVALDQDEYQKRYDALVARFDKAKARHTEVTDLIAERMARKHQIEAYLKNLRSREPLTEFRETDWLAMVDYIAVHSKNDIRVTFKDGTEIKA

SEQ ID NO: 9691 - protein, 590 aa, synthetic construct
MKTVEKIERKLPVLKARKRVAAYARVSMESERMQHSLSAQVSYYSALIQKNPEWEYAGVFADYGISGTGTKKRDEFNHMLAECEAGNINIILTKSIQRFARNTVDLLNTVRHLKELGIEVRFEKEKINSLSGDGELMLSILASFAQEESRSISENVKWGTIKRFKQGIPNGKFSIFGYEWQDDKLVIVPEEAEIIRWMYAEYMKGASRIEIGRALMDRGIYTRQGKPWVDSNVKVILTNITYTGNMLFQKEYCEDPITKHRRKNYGELPQYFVEDTHEAIIPMDEWQAVQDEFKRRRDLGPFGNKSLKLSAFSTKITCGCCGKHYRHSGKRNTAGEVYYIWTCQTKSQKGASACPSKNIPEKMLQNTTAEVLGLAEFDEDAFSQQVKEVIVIGDNTLTFRFYDGHEVTAKWQSTAKTDWWTDERRMLWGERHKRKDTNPNRNTFYEFTGFIKCGCCGANYRCQSGKRKDGTPTRSWYCTGPKDQCHNPGIRDETMKRLVADVLGLDEFDEAAMDARIENATILDHTVTFHFRDGHTESRDFLDKRHGTPWTEERREKARESMKAAWTDERREAMSERIKKIRSEKKWPNP

SEQ ID NO: 9692 - protein, 540 aa, synthetic construct
MKQPYNTTIYNTALYMRLSRDDENYGDSVSIETQRTILQQYAKEQGLHVVGEYVDDGWSGTNFERPDFQRMMDDVEAGKVNCIVTKDLSRFGREHVMMDYYLEFLFPEKRVRYIAVAENEDTEKGLSDFVPFKNLFNEWFAKDTSRKVKAAFKAKFATGQRIGAYAPIGYRKHPEIKNKLIIDEETRWIVEKIFDLAFHGRGAASITSILIAEKVPTPGFINFQRDGTFANIYAGAPEEKSYAWTIAQVKSIMKDETYIGHTIHYRETNISFKNKRRVRKPQSEWVRVENTQEPIISEQVFRQVQEQIANRRRKCKDGTTQIFSGLVKCADCGWSLSYGENRQNSKPYGHYHCSKYGQGTRQCSMHYIRYDVLYAYVLSRLQYWSGLVQHDEERLLKRLLNANDKGQAAARKKQAAELKKAEKRKSEVDTLFARMYEDWAVGRITEYNFSMLSGKYQSEQAELDEKIEQLQSAITTESQNAADAEKWIALMKECVNPTELTAELLNTLIEKIVVHEAVKGEDGSREQEVEIFYRFIGKID

SEQ ID NO: 9693 - protein, 427 aa, synthetic construct
MDRIIKRVDFPIIMQPQFLKVCAYTRVSSGKDAMLHSLSAQVSHYSEMIQSHTGWVYCGVYSDEALTGTKSDRDGFQQMLTDCRAGKIDMVITKSISRFARNTVTLLETVRELKSLGVDVFFEEQNIHTMSADGELMLTILASYAQEESRSVSENQKWRVKRNFEAGIPWNGRMLGYRMQDGKYYIIPEEAELVRRIYREFLDGMGRNRIAAKLNDEGIQPTRYGEEWHPQTIAKILRNYAYTGNLLLQRFYCESYITKKTVPNNGQKTMYHAERTHEAIIPLEEWKAVQTEIERRAEQHKSKSPAQPSFFYTGRIQCAKCGKNFRRKTTAARVVWICATLNTKGKKHCASKQIPEATLDELVRQVTDDPFSVKKIIADDGNTLHFHFSDGSVVTRTWTDRSRAESWTPEMKEKARQQSLARRRQKS

SEQ ID NO: 9694 - protein, 528 aa, synthetic construct
MNTAVRTVTVIPPSINPMTHLTDTPLYKLRVAAYARVSTDSDEQFTSYEAQIDYYTQYIQRNPEWTFVKVYTDEGISGTNTKHRAGFNEMIEDALAGKIDLIVTKSVSRFARNTVDSLVTIRKLKEKGVQVYFEKENIYTFDGKGELLLTIMSSLAQEESRSISENVTWGQRKRFADGKVNLPYKQFLGYRKGADGFPEVVPEEAVIVRRIYTRFMEGLTPGAIAKELTADGIPTPSRKQRWQTSTVESILQNEKYKGAALLQKCFTVDFLTKKRKVNEGEVPQYYVEHSHEPIITPEEFDKVQTELARRKRISRQYSGKSIFSSRIVCGDCGSYFGSKVWNSTSKYRRVIWQCNDKFKGEHKCETPHLDEETIKARFVTALNAIIESKDNILEDCRLMQATLTDCTGIDAEIESLLEEIDVVTELTKRCIAENSQTAQNQEEYTARYNGFVERYEKAKARLEQLRATKAAREAQAEAIGAFMFEVQELDALTEFDEKLWLTIIDTITVHADGRMTFKFRGGKTLTSY

SEQ ID NO: 9695 - protein, 541 aa, synthetic construct
MRIAIYSRKSKFTGKGESIGNQVEMCRDYIATNYNGEEHSIQVFEDEGFSGKNLDRPQFKKMIEIENVIPFDLIVVYRLDRISRNVGDFASLIEKLNKKNTSFVCVKEHFDTGNSMGRAMMNIAAVFAQLERETIAERIKDNMYLLAKEGHWLGGTTPLGYKSIEGTNGKRTHFELIIDESQIDLVNIIFSKYKQLGSINGVETYLFVNGYKTQKNNYWHKSNVKRILTNPIYCIADIDSLNYFTELGCNVCFTLDDCNGKKGIYPYNRFSGQKREMQSYDRWIITISEHQGILAGKEWVAIQQQLKANSKDGFGGKANERRSTNNTSLLSGVLFCSCGAYMRPKKYPSGNTFYICENKMDKKITECNNSNINADELDKIVLNELFSFDIKDGVVDSQIQNLKEQIANVDSDLQKQIGRLKKQIETNKNTVNKFMNIVALSIENDTPEQVVEVYNQKINELLNQNKITQKRIDELQDTNIVQTKMTNRLNSLTDAIVYLKENFDKLTIVEKRGFVKEIVDRIVWDGKNINIFIKGISELSE

SEQ ID NO: 9696 - protein, 524 aa, synthetic construct
MNKLRAAAYCRVSTDRAEQSGSLASQRSFFDDYIRNSDSMTLVGVFYDEGTSGTTTLNRYGFNKMISLAVSGGIDIILTKEVSRFARNTVDTLNITRMLRAKGVGIIFINDNIDTRDSDGELRLSIMATIAQEESRKISERVKWGQQRKMEQGVVFGRSCLGYDVKDGKITINADSAEIVKRIFTEYTVLLKGAESIADGLNAEQIRTVNGGRWSGAFIRKVLRNVKYVGDLEQKKTCTPDFLTHKKRLNRSEHIYIRNHHEPIISRELWEQTQAEISRRKPTDTSRHSDRYVFSGKVYCGVCGSVMVSRVKTLKNGKIYHALRCSGRIGGKSCNNETLNVTALKACVKRIFTDMPIDKTAVINAVIKGLSRTDKPDIPALRRKIETLNAKKRRAVDLMLDGLITQQELIEQKSYYDSIIEKLSQEISSDRSVFETDKIRKNAERFLDFTSDPLWLLVIRADYIHGTLTVYLKGIENGFTTCFTATGRGDSYRVITGNTVRSQGIIPGTMQVQKNWFRHDVNDK

SEQ ID NO: 9697 - protein, 525 aa, synthetic construct
MWMLPQMSVDDIIMYLRKSRTDDPALTVQEVLSKHEQMLDDWVARNIPDDGRRIPEANRYREVVSGETIESRPCVQEVLRRVESPRVKAVLVVEPQRLSRGDLEDIGRLVKLLRYSNTIVITLQYTYDLRDERDRDMFERELKRGNEFLEYQKRIMGNGRLLSVQNGNFIGQKPPYGYNKVVIKEGKRKCHTLEPDPERAPIVKMVFEMYASGTSASQIAKTLRTMGVTTADGGKWVTSSVKQMLTNDHYIGMVHWNKRKTVKVVEDGEVVATRPRNSDFLVYPGKHQPIIEKELWDAVQAIKGNIPPIKNRAKYANPFAGLVVCQCGGKMVRQQYVRDGVERCAPRLVCPNQAECHTASCSLPEFTGAVIEALEKGIKNFELMMADAPEDDASQQERLVAQLEKRLAELDRLELAQWDKYTQEAMPKHVFDALNKKVVQEKEETLQALKTAMETVPISVDYEKKRETFAAAVRTLQDPNASVKEKNLLLKQCIERINYNRKPKESDNRRFGNPEPLELEFQFKV

SEQ ID NO: 9698 - protein, 556 aa, synthetic construct
METKKGAIYARVSTDKQEYTRQLEELKEYANRNNISIEYIFEETESGLNSERPEYNKLINLTKEDIDIVLIWELSRLSRKSIEIQTDIRNFKNKGINVFIYDRGISIFDSNGEENSFINMLIGMLSAVAEEEIKTMKKRVVATKRHNVFMKGYSYTSHPPFGYTRVEKKMVISEPEAKIVKEIFDLSINGSSQYSIAVKLNADGVPTTSTKNALWSASTVSKMLQNTAYYGKAKYLDTFIDCPAIISKETFDLSQIKRKQRLTRSATKVGNTFLLRNLIKCKHCGTYFTNAKDKIHHQYKCTRLMNRTFQESKCTSPAVNFHNMNYLIWDIVSRYFREVYVDDRKRNNEANLLEAIEDKNRIKQSIDNEIKKENKKVGIIYSGLQELKIEFPDLIDLQEREKKKLSNIQSNIKRLNSEKEMLDNEIASLKSRMKDLSDVENMDLTTLDYNTKYDFLHRFIDYIYITKNVPDKSKLYYGESDKRYKVEIFLKSGNKVECKYHPQKKEYTINGVVNDMSEVPDGATAYQVTDKTILIEQTIKFPSVVPKIEPETEKAG

SEQ ID NO: 9699 - protein, 435 aa, synthetic construct
MAAYCRVSTDQDEQLSSYENQVRYYEEFIRQNILYELVDIYADEGISGTNTKKRTEFNRLIADCRKGKVDRIIVKSISRFSRNTLDCLKYVRELKELGIGVTFEKENIDSLDAKGEVLLTILSSLAQDESRSISENATWGIRKKFERGEVRVNTKKFVGYDKGEDGNLVINPQQAKIVRRIFHDFLEGESPESIAKTLREERVPGWNGKPNWYPSSIQKMLQNEKYKGDALLQKTYTVDFLTKKRSANQGQVNQYYIEGNHEAIIAPKEWELVQLEMERRKNYREKYGVKNYIIQCAQNPFTSKVYCKECGGQFGRKNWTTSRGKRPVWQCNNRYKIKGIQGCVNRHIDEETLQQAFIRALEILRENKNQLLKKWANFSEEQKLEKYHSEQLKKLVESDQTVFDGRRMCQVLEKIALGENGTISIRFLEGTEVDL

SEQ ID NO: 9700 - protein, 407 aa, synthetic construct
MKSGKTRVCAYARVSTMTEKQQDSLTNQQAYFIHFYQNQKDVDFIGVYYDQGISGKLAKRPGFQQMLENCRAGKIDVIHTKSISRFARNTELLLAVSRELKAIQVDIFFEEQNLHTLSNEGEVMLTVLASYAEEELRNMSENQRWAFQKKFQRGELVINTKRFLGYDKDENGELIINPEEAKIVQRIYNLYLSGMGVHAIAKLFNQEKVPTVDGGKWYSSSITNILKNEKYKGDAILQKYYFAEIKAKQRLNQGQVQQYLITDNHEAIVSREDWEAVQKRLKQNRKTNLSIDYNRRYPLSGLLKCEHCGSTLKRQKYYKGKVVWVCSKYIREGKDSCIGMRVPDSAVQDWSIHEPTVVKEENIGGKKYYSYSSKENDTSRAETTHSENPNGGLLPSIHRPRRTAIKL

SEQ ID NO: 9701 - protein, 428 aa, synthetic construct
MSTDQDEQLSSYENQVNYYREYILKHEDYELVDIYADEGISATNTKKRDAFNRLIQDCRDGKVDRILVKSISRFARNTLDCIKYVRELKELGIGVTFEKENIDSLDSKGEVLLTILSSLAQDESRSISENSTWGIRKKFERGVVQVNTTNFMGYDKDEKGNLIINHEQANVVRYIFDRFLEGYSPEFISKELRELEIPGCTGKAKWCPSAIWKMLQNEKYKGDALLQKTYTVDFLTKKRIDNDGQVNQYYIENNHEPILDREKWEIVQLEIARRKKFREQHKLQFYIIQKENNPFTTKVFCAECGSAFGRKNWTTSRGKRKVWQCNNRYRIKGQIGCLNNHIDEEMLEKAFMKAVGLLQEHRSDMVAKWQKLEQGANLLHKHYAKQMYQILDLDKFDGVIMNQVLDHISISEAGQIVVTFLEGTEVDL

SEQ ID NO: 9702 - protein, 413 aa, synthetic construct
MNIRKIEAKNNKRKKRICAYVRVSTTNGSQLDSLENQKVYFEKLYAEREDVDFLGVFCDKGISGSKYDRPDFQTMLDACRKGQIDVIHTKSISRFARDLINVLEISRELKTLGIDIFFEEQNIHTLSNEGEVVLTVLASLAEEELQSMSGNQRWSFRRKFQKGELLINAKRFLGYDLNEKGELVINKAEAQIVRTIFYSYLEGMGTHRIAKKLNEGKVSTVTGKKWYDSTIRNILKNEKYKGSLLLQKYFHDGVNGPKKLNQGQVEQYYIEDNHEGIVSKEIWEKVQVKMKSRSRIQGTNKTYKFSRMLKCQYCGSTLKRQVSYKKKIVWCCSKYIKEGKNSCKGMRVPERDIEDWKLSSPVIVLERIEDGEKHYGYTGQETSANGHISNSEKDQSSRLLSSVYRPRRTAIKL

SEQ ID NO: 9703 - protein, 542 aa, synthetic construct
MKKFPIDLSCLTEEEISQFQEDPYTLYNGDQDVALYLRYSSTGQSDQSIEGQLRDCRAFCKANHYRIVAIYVDRATTARKDVEKRVHLMEMIADSAKQNWEYVIVWKLDRFARNRNDSAIMKMRLRKNGVKVLSATEHLTDSPESIILESVLEGMAEFFSAELSQKVTRGMRESALKCHSVGGHIPLGYKVENHKLVVDPDTAHIVQEAFSLYANGESVAAICRKFNSAGYKTAKNTEFNRSSFKAMFRNTRYIGTYTYKDIVIENGIPAIIDKELFETVQRRLSKTATAPARGKAKVDYLLSGKLFCGHCGASMNGESGAGRHGKVYHYYSCYTKKRKLGCDKRPLKKDYIEGIVARDALNLLTDQLIDEIADMAIRQSEQDLINDTHIPQLTAQLSEVEKSITNITAAIEKGIASETLMNRLVQLEHEKKTLNKEIKAEEKFVYRIDRDQIVFWLSQFKYGNIEDENFRRWLIDLLVNSVTVWDEPDGYKITTAYNLTSCKTKTFRVEKNPAAEEATGFDFGESECTKKPHQFGYFKRNA

SEQ ID NO: 9704 - protein, 407 aa, synthetic construct
MKSGKIRVCAYARVSTMTEKQQDSLTNQQAYYSHLYQNKKDVDFIGVYYDQGISGKLAKRPGFQQMLEDCMAGKIDVIHTKSISRFARNTELLLEVSRELKAIQVDIFFEEQNLHTLSNEGEVMLTVLASYAEEELRNMSENQRWAFQKKFQRGELVINTKRFLGYDKDENGELIINPEEAKIVKRIYNLYLSGMGVHVIAKLFNEEKVSTVDGGKWYSSTITNILKNEKYKGDAILQKYYFAEIKAKQRLNQGQVQQYLITDNHEAIVSREDWEAVQKLLRQNSKRDARIDYNRRYPLSGLLKCEHCGSTLKRQKYYKGKVVWVCSKYIREGKFACIGMRVPDSAVQDWSIHEPTVVKEENIGGKKYYSYSSQEKDTSRAEATHSENPDGSLLPSVHRPRRTAIKL

SEQ ID NO: 9705 - protein, 521 aa, synthetic construct
MNRKVTTIQANKQLSHQSKLPSIKKKKVAGYARVSTDNEDQTSSYETQMKYYEEYISSRKDWEFVKMYSDEGISGTNTKKRLGFQEMVNDALAGKIDLILTKSVSRFARNTVDSLSTVRKLKDVGVEIYFEKENIWTFDSKGELLITIMSSLAQEESRSISENITWSKRKQAAEGKVTFPYNNVLGFKPKEDGGFEVDKEQAKIVRYIFGQFLSGKNPNQIAKHLTENKIPTPRGKTRWSYSSVRSILTNEKYKGDALLQKYYIADFLNKTQKRNNGELPQYYVENSHEAIIDKEVFDAVQVQLSENKKWYTEKNYFGKIRCGCCGSSYVRHLWHSNDKYKETIYRCKDKYKNEEKCDTPHIRDDEIQRWIVSALNKVIDNRKEIIGNIKLLMKMIKEDRGSDDEIIQLEEKLEDIRTDVEKLIITNSRIAQDQEEYTRKYNKLIEEYKLLEKQLEQRNLDLLSKNKRVRELKIFIDSLEKQGELLTEYDTKLFNYLVDTIIIHKGKRIEIHLKNGEVISI

SEQ ID NO: 9706 - protein, 413 aa, synthetic construct
MNIRKIEAKNNKRKKRICAYVRVSTTNGSQLDSLENQKVYFEKLYAERDDVEFLGVFCDKGISGSKYDRPDFQTMLGACRKGQIDVIHTKSISRFARDLINVLEISRELKTLGIDIFFEEQNIHTLSNEGEVVLTVLTSLAEEELQSMSGNQRWSFRRKFQKGELLINAKRFLGYDLNEKGELVINKAEAQIVRTIFYSYLEGMGTHRIAKKLNEGKVSTVTGKKWYDSTIRNILKNEKYKGSLLLQKYFHDGVNGPKKLNQGQVEQYYIEDNHEGIVSKEIWEKVQVKMKSRSRIQGTNKTYKFSRMLKCQYCGSTLKRQVSYKKKIVWCCSKYIKEGKNSCKGMRVPERDIEDWKLSSPVIVLERIEDGEKYYSYTGQKGTSNSHISNSEKNQSSRLLSSVYRPRRAAIKL

SEQ ID NO: 9707 - protein, 430 aa, synthetic construct
MSTDQDEQLSSYENQVNYYREYILKHEDYELVDIYADEGISATNTKKRDAFNRLIQDCRDGKVDRILVKSISRFARNTLDCIKYVRELKELGIGVTFEKENIDSLDSKGEVLLTILSSLAQDESRSISENSTWGIRKKFERGVVQVNTTNFMGYDKDEKGNLIINHEQANVVRYIFDRFLEGYSPEFISKELREQEIPGCTGKAKWCPSAIWKMLQNEKYKGDALLQKTYTVDFLTKKRIDNDGQVNQYYIENNHEPILDREKREIVQLEIARRKKFREQHKLQFYIMQKENNPFTTKVFCAECGSAFGRKNWTTSRGKRKVWQCNNRYRIKGKIGCLNNHIDEEMLEKAVVMAVEQLSKNVDLLHGKWNKVLEENRPLEKHYSLKLAEMINKPLWEFDSHEMCQVLDNIIIAEDGQITVRFLEGTEVDL

SEQ ID NO: 9708 - protein, 416 aa, synthetic construct
MEICKLPPKPAQLRLTRVAAYVRVSRESERLTHSFSAQVSYYNKLITNTPGWEYAGVYSDYATTGTSTTGRGEFNQMIEQALAGSIDIILTKSISRFARNTVDLLSTVRALKAAGVSVRFERENIDTANAEGEVLLTLLASFAQAESESISANAKWGIRKKHKDGLLHSRNPYGYRYHHGQLDIIEEEAVIVRRVFAEFLEGISPEKTCKQMNQEGLRSRGGGKFSASVTRDWLENPAYIGTAILQQYFSAHAGDNTPTLNRGELDKYIVEDSHPPIIERSVFDAVQAELARRRATGGRGLTPTGGSSALTHRITCTICGRNYHRRTRRLAHSTYKYWWCESATKGKGNPCHAHQLREENLHTIILRQLSLEKWNNQQVIERIERIEASPNWHLTIHLSSGNTTTIDYRTGEEVTA

SEQ ID NO: 9709 - protein, 413 aa, synthetic construct
MNIRKIEAKNNKRKKRICAYVRVSTTNGSQLDSLENQKVYFEKLYAERDDVEFLGVFCDKGISGSKYDRPDFQTMLDACRKGQIDVIHTKSISRFARDLINVLEISRELKTLGIDIFFEEQNIHTLSNEGEVILTVLASLAEEELQSMSGNQRWSFCRKFQKGELLINAKRFLGYDLNEKGELVINKAEAQIVRTIFYSYLEGMGTHRIAKKLNEGKVPTVTGKKWYDSTIRNILKNEKYKGSLLLQKYFHDGVNGPKKLNQGQVEQYYIEDNHEGIVSKEIWEKVQVKMKSRSRIQGTNKTYKFSRMLKCQYCGSTLKRQVSYKKKIVWCCSKYIKEGKNSCKGMRVPERDIEDWKLSSPVIVLERIEDGEKHYGYTGQETSANGHISNSEKDQSSRLLSSVYRPRRTAIKL

SEQ ID NO: 9710 - protein, 428 aa, synthetic construct
MSTDQDEQLSSYENQVNYYREYILKHEDYELVDIYADEGISATNTKKRDAFNRLIQDCRDGKVDRILVKSISRFARNTLDCIKYVRELKELGIGVTFEKENIDSLDSKGEVLLTILSSLAQDESRSISENSTWGIRKKFERGVVQVNTTNFMGYDKDEKGNLIINHEQANVVRYIFDRFLEGYSPEFISKELRELEIPGCTGKSKWCPSAIWKMLQNEKYKGDALLQKTYTVDFLTKKRIDNDGQVNQYYIENNHEPILDREKWEIVQLEIARRKRFREQHKLQFYIMQKENNPFTTKVFCAECGSAFGRKNWTTSRGKRKVWQCNNRYRIKGQIGCLNNHIDEEMLEKAFMKAVGLLQEHRSDVVAKWQKLEQGANLLHKHYAKQMYQILDLDKFDGVIMNQVLDHISISEAGQIVVTFLEGTEVNL

SEQ ID NO: 9711 - protein, 507 aa, synthetic construct
MQKNTTIENTTKAVIYARYSSDRQREESIEGQLRVCEDYAKRNGMTILHVYADRALSGRSDQRPEFQMMIQAAATQAFDTVLVYKLNRFARNRYDSAKYKHKLKKYGVKVVSAMENIADDPSGILLESVIEGMAEYYSAELAENVMRGMTENALECKWPGGTVPLGYKLDVAHHLIIDDPAAKTVRWIYQMALEGRQPASIIRELNAAGCRTAFGRPFGRTSLNTILKNERYIGTFLWNGIKKPNAIPAIVNPEEWQKVQEITKAKKKCIAKSRGENYLLTGRLFCGQCGGSMVGTAGTSKMQRVYHYYDCGNHLKRKGCTTKAIRADKLEDLICDTTTQLLSNQDAIKAIAKQAISAQKEQGPSLVLQSLQNQKADISRKLQNCIKAIEEGLISQTVTNHIQDYEKQLQTLNDDIRREELMSRIPQLTEKHIEFFFWSISQQIKKADKYKSILLSSLVRSVIIYEDFIEIQYNYKKKLPILQNPVKIKSSYLNNVVIHPGFEPGTP

SEQ ID NO: 9712 - protein, 539 aa, synthetic construct
MDVVGYCRYSSEGQRDGFSIEAQQRAIREFCERENYNLIRFYVEEARSGTNDNREAFQDMIEDAKLKKFKAIIVHKFDRFARNKYDSVFYKRKLRDLNIKVISICEPLDDSPESVILESLYEGMSEYYSRNLSREVLKGKKEAALKCQHNGGIPPYGYTVDKEMHYVIVPEEAKIIRTIFEKAEIGFSHAAIARYLNERGLRNRTGNRFGREYITRILVNELYKGTFVYGKKSKRTNNDIIKVENAVDPIVSPYLFDKINKIYNEAFAINKEKREKAKARDAGIDYLLTGYAICGCCGAPLTGFHSHKAYQTSTGADRVYSSYFYRCAKKAKRETVLSGMTKGCVLKNLRKDNFEDFVLGAVENIIFSEENLKLIVEKAKQLILDKINKKIDNSKIINEINRIGNQLNKLLDIFLDGTIDKESYNAKKNELEKMQNYFREQIKTYPRIDVEKLTPEMLKNAIDKFISSANADTIEYKKKTLSTFVDSVIVDNERIVIYFKFPINTSDNEKKSEFSCDNHFLHKQTTVSIFEVCGNMSNG

SEQ ID NO: 9713 - protein, 584 aa, synthetic construct
MKKNNVEIIKADSLVRRRGVNVERHLKRVAAYCRVSSDSDDQKNSYESQVRHYKDYISQRSDWELVEIYADEGISGTQVGKRQDFQRLINDCVNGEIDYIVTKAIARFARNTLDTLKYVRMLKDMQIGVYFEEENIDTLTMDGELLLTILSSVAQQEVENTSAHVKKGLKMKMQRGELIGFQGCLGYDYDVETKQLSINKKEAKIVRYIFARYLEGIGGKIIARELDELGYKSPRGLDHWNDTTVLGIIKNEKYKGDILMGKTFTVDPISKRRLSNFGEEDKYYIKDNHEPIVSKEDFEKAQEIRLRRAGNKKTAANVNGKRERYSKMYAFSSMLECGFCGSILSRRSWHCRSDYRKVVWHCVTSIKKGKRFCRHSKGLEELAIEGAFMEAYRQLYHSNEKIVSDLLETIESELNDNSLNKELKKITNKLRTLLKKEENLVNLRLEGKISDSIYNEKYTEISSEKEYLSEEKVNVETTLKSEIDVKKRLTEFKQLLSSQKLLTEFDRTVFESIVDKIIVGGVNSDGEIDPAMLTIIFKTGETQNKDGKQFKSKRKNAKLESDKLCPQNSDEDKKLYSQVTDNTC

SEQ ID NO: 9714 - protein, 501 aa, synthetic construct
MEIQIREGSREQKRKLKVCAYCRVSTDADEQENSLENQVRHYEMVIKANTDYEYAGVYSDFAISGFKEKRPGLQKMLADAEKGKIDLILTKSVSRFARNTSIVLEATRKLKELNVGVFFELQNINTLSGEGELMLTILAAFAQAESESGSAGAKMVYQRKYEAGIPVQYLERSFGYTKDERGVFVADEAEAVWVRKIYKMAAEGYTPASIKRYLNENGIKTVGGVQWVDSTVFRLLENEIYKGDYIMHKHFVNEERKLVRNRGEVDAWYIEDDHEAIVSPELWQKAQDALAAKRDYLAEGSVIEEFTEENYPYMNKIYCAKCGYPLYKRIYSKGNRLNWGCSGTKRYGKSFCDGINIPDGVLRSAWHFEENTYIDEKASDKGVKEFTYLKERSWKRRHKKKQPSAIPENTETEYPYREKIFCALCGSRLVRYVNPQNHKVTWVCNRRKRKGKEACDGTRVPDTVIKGWGEIKNDIYIQRKDDKNGKKRYSYTSKKPSGIRV

SEQ ID NO: 9715 - protein, 433 aa, synthetic construct
MSGRITTVSKPPKLERKKRVAAYARVSSGKDAMLHSLSAQVSHYSDLIQRNSDWLYAGVYADEAKTGTKDSRADFQRLIADCHAGKIDMVITKSISRFARNTVMLLQTVRDFKAWEVDIFFEEQNIHTMSADGELMLTILASYAQEESRSASENQKWRIKRNFEEGMPWNGAMLGYRLKDGRYEVVPKEAELVRRIYNEYLAGDGYLSIVKRLMEEDVPSRFGGKWNQSVVSKILSNYTYTGNLLLQKTFRENHITKKTVINHGELPKYHAENTHEAIIDMKTFHAVQTEKARRAAQFNKKPAPRTTYPFTSLLVCDNCGKNYRRKTTKTGIVWVCGTFNTLGKSACASKQIPETTLQQVTAEVLGAKAFTREQLHSRIQSIRVCNGNILIFCFKDGSEVTRTWKDRSRSESWTDEMKKAARQKALERSKHNA

SEQ ID NO: 9716 - protein, 526 aa, synthetic construct
MPKVTMIPATINPLTHLPKVAAQKRRVAGYARVSTDSDEQFTSYEAQVDYYTKFIQSKPEWDFVKVYTDEGISGCNTKKRDGFNSMVSDALAGKIDLIVTKSVSRFARNTVDSLVTIRKLKENGVECYFEKEGIFTFDGKGELLITIMSSLAQEESRSISENITWGQRKSFADGKVHLAYKRFLGYEKGEDGRPTIVESEAKIVQLIYRLFLDGKSQASICRYLEDLGIPSPGGKDKWSKTTVTSILQNEKYKGDALLQKSFTVDFLEKRMKPNEGEVPQYYVEGSHPAIVDPDEWDHVQTEFARRKALGRAYSGKSVLSAKLVCEDCGGFFGSKVWHSTDRYRRTIWQCNSKFKVEERCHTPTVNTETVQRLFTQAFNRMMENREQIIKDCETMRRALTDFAELDAEIERQLEETQVVAELVKAAVKENASTVQSQEAYLRKYEALTERYEKAAAELERLQNLRTTQSQQDKAMALYIRTLKKQPVVLREWSDTIWTVMVEKAIVHRNGAITFVFKNGTEVKVGE

SEQ ID NO: 9717 - protein, 435 aa, synthetic construct
MAAYCRVSTDQDEQLSSYENQVRYYKEFIRQNPLYELVDIYADEGISGTNTKKRTEFNRLIADCRKGKVDRIIVKSISRFSRNTLDCLKYVRELKELGIGVIFEKENIDSLDAKGEVLLTILSSLAQDESRSISENATWGIRKKFERGEIRVNTTKFVGYDKGENGNLVINEEQAKIVRRIFRDFLQGETPESIARSLKEEGVPGWNGKANWYPTTVQRMLQNEKYMGDALLQKTYTVDFLTKKRSENQGQVNQYYIEGNHEAIIDKEEWELVQLEIERRNQFRHDNYINFYIIQCEQNPFTCKVFCKECGGLFGRKNWTTSRGKRPVWQCNNRYKVKGIQGCTNRHIDEETLQQAFLRAVEVLRENKEKLRDKWDNFREEQKLERYHAAKLKETLNSNQEEFNGRKMCQVLEKISLGEDGNITVKFLEGTEVNL

SEQ ID NO: 9718 - protein, 413 aa, synthetic construct
MNIRKIEAKNNKRKKRICAYVRVSTTNGSQLDSLENQKVYFEKLYAEREDVDFLGVFCDKGISGSKYDRPDFQTMLDACRKGQIDVIHTKSISRFARDLINVLEISRELKTLGIDIFFEEQNIHTLSNEGEVVLTVLASLAEEELQSMSGNQRWSFRRKFQKGELLINAKRFLGYDLNEKGELVINKAEAQIVRTIFYSYLEGMGTHRIAKKLNEGKIPTVTGKKWYDSTIRNILKNEKYKGSLLLQKYFHDGVNGPKKLNQGQVEQYYIEDNHEGIVSKEIWERVQVKMKSRSRIQGTNKTYKFSRMLKCQYCGSTLKRQVSYKKKIVWCCSKYIKEGKNSCKGMRVPERDIEDWKLSSPVIVLERIEDGEKHYSYTGQKGTSNSHISNSEKNQSSRLLSSVYRPRRTAIKL

SEQ ID NO: 9719 - protein, 504 aa, synthetic construct
MTKDLQTGVIYARYSSDKQRDESIEGQIRECTEYAQREGILITKIYTDRALSARTDNRPEFLQMIRDSAHQSFNYVIVYQLDRFSRSREDSAKYKGILRRNGVRVLSAKEHITAEPAGIILESMLEGMAEYYSVELSQKVKRGMTENALKGKMNGSAVPLGYDLTESHHLDVNAHEAKAVRLIYDLYLKQHSIAKISDILHSKGYLTKRGRKISPSVIKTILSNEKYIGVYSWGDIRIENSIPPIISRKVFDEVQQVMPTRIKNKGRRSEMYNLCGKLICGECGGHYMGSTATSRNKEKHYYYVCTNRRKYHTCTAPNIRRDELEDLVINRTLEILNQPSNIARIVDLVMSGYNNTTQEAKVAIQGINNKIKAIDTELNNCMNAIKQGFITERLKGEIENLESERNNLLEQKANHESTLIPIKFTADHIEYFLERMAKENPTTKAGRSRILDTFIKSVTIYSDRVEIVFNYKNELPAFNTQCATGSHFRVLVGPPGFEPGTDRL

SEQ ID NO: 9720 - protein, 650 aa, synthetic construct
MPDALAPDPFTAMAAQLTPKRAVSYIRVSTREQAQRGGSEEGFSLPAQREANKRKAQSMGALVVKEFADRGESARSANRPELQKMLAYLKEDGGIDYVIVHKLDRLARNRADDVEINRAFEEAGVRLVSTSENIDQTPGGMLLHGIMSSIAEFYSRNLANEVIKGMGEKARNGGTLGKAPLGYLNVRARDENGREIRTIALDEERAPLIRLAFTEYATGQWTTKRLAAHLHDRGLTTVPTARKPAKAVTGAQLHRMLRHPYYKGVISFQGVEYVGAHEPLVDEETWSQVQAVLDFHRFGERERQHNHHLKTTVYCGLCGARLLVQNTRNSKGDLYPYFICARRQRTHDCSFRAVLIDVVEERMSDLYRTIQLGSQDRQLVEQYVREELRHLERDKDRTVRSLTTRRTNIEDKRRRLMHAHYEGAVPLELLKEEQTQLTAELDHIARQLTAYQADISEVRQRLAQALDLLEDCHRLYQAAPAHLKKLLNQVFFKRVLVNPAVDEDGRVILPEDGTNDGRGRNAADAAAGDCPIGESDGPLQRATAPRLLADASSDASLAANLRLPFACLTSRLMHKVARQHRATLLHDNTRENRDAQVDCPVINTVCNDEALTSGGERFASSTNNPDRVTHDLGLGKAIVVPPLGFEPRTL

SEQ ID NO: 9721 - protein, 521 aa, synthetic construct
MNRKITTIQANKDLSRQSKLPSIKKKKVAGYARVSTDNEDQTSSYETQMKYYEEYISSRKDWEFVKMYSDEGISGTNTKKRLGFQEMVNDALAGKIDLILTKSVSRFARNTVDSLSTVRKLKDVGVEIYFEKENIWTFDSKGELLITIMSSLAQEESRSISENITWSKRKQAAEGKVTFPYNNVLGFKPKEDGGFEVDKEQAKIVRYIFGQFLSGKNPNQIAKHLTENKIPTPRGKEKWSYSSVRSILTNEKYKGDALLQKYYVADFLNKIQKRNNGELPQYYVENSHEAIIDKEVFDAVQVQLSENKKWYTEKNYFGKIRCGCCGSSYVRHLWHSTDKYKETIYRCKDKYKNEEKCDTLHIRDDEIQRWIVSALNKVIDNRKEIVGNIKLLMKIIKEDRGLDDEIIQLEGKLEDIRTDVEKLIITNSKIAQDQEEYTRKYNKLIEEYKLLEKELEQKNLDLLNKNKRVRELKIFVDSLEKQDELLTEYDTKLFNYLVDKLIIHKGKRIEIHLKNGEVISI

SEQ ID NO: 9722 - protein, 595 aa, synthetic construct
MENCVIYARFSSHGQNEQSIEAQVRICKEYAENKGFDVVNLYTDKARTGTNDARPAFQKMIADAKTGAFQYILVYMFDRFARNRRDSIIYKEMLKDKYGVKVISALEPIAEDEGGEFYEMFLEWNAEKYSKRLSKRVRDGLDTSIANGTFCGGFIIYGYKLELEPVPGKQGKFIKRVVINEEEAKVIRYVFEQYDKGVSKKQIATDLNAQGIRVKGKPISHKTFDNYMKNTKYTGEFYFGERLCTNMYPPIIDKEMFERVQQRLASNRYFLGGKETAKEPYLLTGKLFCGHCGAEMVAGGGKSKTGKKYYYYECKQKKKKLCTKRIEHKDKLEKFVVRKVIDFLSDEVNLNIVTQDVLKHFNSRTDEREIKSIRKRIADIQEEADAAANAFIEAKSPLLKQRIEKRMQECEVLLADLEKVKARLVIERGQKLTEQDIKAFVNMILQGDVEDLEFRRRLIDNLVYKVYVSDDDTYIYFNIKGGNHIEEITLEDTKAALKETNRVQTQRDPARQTTALAQSRNRKEKPNCFSFSFSSILPRLRYAPECGHRPRDASLCYAIPSRFALLTNPSSSAKLDRVETQGVVHGLLFLGSNGG

SEQ ID NO: 9723 - protein, 435 aa, synthetic construct
MISDCRKGKIDRIYTKSISRFARNTKDCLKNIRELKSLGITVFFEKENIDTAKLTDEMMITIMGGLAQEESTSISQNLRWSCRKRMANGTYELSCPPYGYKKVNGKLVICPEQAKVVKEIYDSYLSGIGMISIMKNLNERNIPCCKNSERWHMIGVSYILTNEKYTGNTLLQKTYSTNTLPVRRFKNNGNADQYYVRNTHPAIIQQETFDKVQRLISEKNQKQPRGTPHNSVLHKHIFCGSCGSILIRKSCRKKYYWSCRKHDLAAVDCPTKQISEDKIHSAFIRLYNKLVYNFKPVLTPLQQALQDLKYKNTKSGTTIIEKYKEIAKLKEQTHVLARLKTKGFLDEAKYLEQTTELNSKIAKLQTKIKKLNVSDEEDETLEQLDMLIGYFEKRQKLMVEFEELAFESIVDKIVVKNQNELEFHLIGGLELAEEI

SEQ ID NO: 9724 - protein, 456 aa, synthetic construct
MRNKEIAPALVRVALYIRVSGEEQKIKGLSLEAQQERLEAYARERGWVIVGIYIDAAKTARKNIHKRTEFQRMMDSVKRDEVDILLFARLDRWFRSVADYYKVMEILQAHNCDWKTTDEEYDTTTANGRLYINVKLSIAQNEADIDGERIDVVFDSKIAHGTVVSGSAPFGFRVNEEKRLEVVPEDAVIVQDAFNYFENTVSQRATVRYVRETYGVNWCDATFRRMLKEKLYTGVYDRGGRYNDQFCPAIISRQQFDRVQALLTRNVRSAPSGKVYIFTSILTCAECGHKLVGYKSSDYYYYRCNQHFQRGRCSHNHSAREDVVEQWLFEHLGEELERCQLEWDVEAAKKKASVARTDKAALKRKLTKLKELYVNDLIDIEDYKKDYQIYVSALNQIPEPAQEAPPDFAAVRRLLDNSFRTIYDTLTREEKRTLWRSVIKEIRIDNDQNITGVVFW

SEQ ID NO: 9725 - protein, 412 aa, synthetic construct
MRTVRRIQPMMTPQKPKLRVAAYARVSDSRLHHSLSTQVSYYSRLIQSHPDWELVGVYYDEGISGKEQSNRQGLQDLLKACDDGKIDRILTKSIARFGRNTVDLLSTVRVLRQKNIGITFEKEGIDSLSSEGELMLTLLASVAQEESHNISENLRWQIKKKFEQGQPHTPQDIYGYRWNGENYVIEPDEAKVVRQVFQWFLDGDNVPMITKKLNEQGVLTRLGNPFTVSSVREFFKQEAYFGRLVLQKTYRDPFSRNPKRNNGQKNKYIVEDAHEAIVSKSYFDVVLQEKERRYKVMHQESHMHKGTFRELIECSHCGKIMITRVDSKKVHRTIRYCCRTRDRFGTSSCPSKTLSEKRILATFEDKIGFKPDKNWVTENIKKVIYDSSVGLITVFPIKGRKYELKVRKEHFL

SEQ ID NO: 9726 - protein, 521 aa, synthetic construct
MKNVITIEANAPRNSELASILLPKKRRVAGYARVSTDHEDQTTSYESQMKYYTEYISSRSDWEFIKMYSDEGISGTNTKLRVGFKSMIEDALAGKIDLIITKSVSRFARNTVDSLTTVRKLKEVGVEIYFEKENIWTLDSKGELLITIMSSLAQEESRSISENVTWGLRKQFAEGKVHFPYTNVMGFEKGENGEIVVNQEEAKTVRYIFQQALLGKTPYSIAKDLTQQGILSPSGKNHWSSVTIRRMLRNEKYKGDALLQKTYTIDFLSKKKNINKGELPQYYVENNHEAIVDKETFDAVQASLDRKEKGKGSTTLFSSKLVCGDCGHYFGSKVWHSTSKYRRVIYQCNEKYKGEKKCTTPHVTEDEIKDWFVSAINKVISNKDEIIQNLEMLLDVGESSDLERKLVELETEVEVVTQMVSNLVKENAIMPQDQDTYQKKYSNLVERHDALVSEFESIEKQLLEAARHQKDLKEFLETLNQQSGLISEFDDLLWETMVDKVNVSHNRKVTFKLKNGSEVVA

SEQ ID NO: 9727 - protein, 468 aa, synthetic construct
MTRRTAVYLRISDPKGDTADRFGLAVQERTCREYAERNGLTVQRVYTDAITGVTETRQGFGQLLADAAAYTDVVIYAVDRLARHPRAGYALLETLQAAGLQVHTAIEGMLDLEDDAGALNFGVRIVMADAERRRIVRRLSEGKRSKVRAGKPLRPLNGYGYQRGEVYEPHAQWVRWIYTQALSLGTQEIREELRRLGVPSPGGAAGWDRDSIRKLLTNSVYRGEYVYGRDRVTRRPLADAVSCPAPRIVSDETWYAVQRALQYRSTGAGRRGSRTDVYPLTGRLRCAQCGAAMVGGKGSESKRTGVEYRYYKCGDRALAVHTRKGCTHRSLYRTTELHEVVWEALQNLAREPGTLAQALTRPAPVTVDTTAAVRDLDNQLAKARNAYLRGIDSEDEYAETKAMLTAQRARLLALAEQGQPQGVADTEHVQRALTDALRQDDLHVAALRLGLLVRVEPGGGVRLTLDPG

SEQ ID NO: 9728 - protein, 470 aa, synthetic construct
MTRRAAVYLRVSSAAQADDDKFGLDVQASAVHHYAERHGLTLTDTYTDTIAGTRHRRENLDLLLDRAPAYDAVIISSVDRLGRRNRINYAVLDELLDTGLEVHSTDMGIVDPEDEGSMLQFGVRSLFAESDHRRLVSKLHKARVAKVAGNPLKGRQGQPIWPLNGYGWRRGVQDPLESRWVRYMYDRLQYVGTTVLARELDELGVRTRGGKEWVPENIRRIISNPVYKGVYEFGRLSHGQGTVKARCEVPALVSPELWESVNRRMAERTARSGSTTAERQALFPLAGHLRCGECGRRMRPLTLTSRPGGYYACSWRTTTKISRTGEPCTHSRHYRSADLNSLVLSTLDGLQVSDEALAAMVQTPPPAAPDHTAALADLARREDRLEAAYLAGAYTPQEYAERRGDVRRQREALLATPLPLPVPTVDVSALRARLLSLRGLPLHEQADRLGLTVVISPSGEVELKLDPPVA

SEQ ID NO: 9729 - protein, 565 aa, synthetic construct
MQNSSDKNINRVAIYIRVSTNHQIDRDSLPMQRQDLISYTKLLLNAEQYVIFEDAGYSGKNTDRPKFQEMMKQLRHGLFTHLLVWKIDRISRNLLDFATMYQELKELGVTFISKNEQFDTSTAIGEAMLKIILIFAELERNMTSERVTATMISRASNGLWNGGRVPYGYNYDPDKKEFKINPAEAEVVKLIHDKYEELHSLIRESRVLNERGIITRAGNLWNPTTLQIILHNTFYCGDYQYNVCKEGNRQKQKNKSEWVKIHNHHEAIISHEQKERIIALLDCNRRLNKKVVKSEKYVHIFSGLLYCSNCNKPMGASPSSKINGYQYSRYTCPTKRQLQCDSKSVSDQTVGEFVFNYILNLINSQRDFKSISSKNELQKHLLKGSSFNDIKSIDSDGLNDLYNVLLSGNINQDIYSNDVSFKKEDSSNLSRTKLLSEKQKLERALDRLTNLYLYSEQTLSEQNFLSHKMQIDDKLNEINDQLSFMESDDWQQSISDAEFIVKTSSFIISKKLDGRNYINYKRLATSIDKEVLKSFVNSVIDSIIISNGSIETITFKNGLSHTFIR

SEQ ID NO: 9730 - protein, 527 aa, synthetic construct
MYELTQSMESLSVDEIIVYLRKSRSDSPEMSVEDVLKKHEEMIQDYANTHFGSPIPEKNIYREVVSGETIDSRPQVKIVLQKIESPQIKAVLIVEPQRLSRGDLEDCGRLINILRYTNTMVLTLTHSFNLQEEYERKFFEMEITRGNDYLEYTKRILRRGRESSAAKGHYIGSVDPYGYRKIVIKKDGVNCHTLEIVPEEANVVKLIHELYAYTPGGIGFTNIAHKLDSMNLKPKKAAHWTPAIISSILCNPLYLGLIRWDTRKVVKYINDGQLEKSRPRSSDAKYYKGLHEPIISQDLYDACMARRGTNPSLRCNKELCNPFAGLLYCGTCNHAMSLKIYKNHNSVSQIMLCNHQSYCHTKSVLYSAFLERFISSMENTIHDFELALLADNGNAQAVNQSIVANLETRLKKLQEKDMRQKDAYEDGIYSKEEFLERNIKTQQEIASTITALTAAKETKENYVDYGEKIRRFRDCINALNDPELSATEKNQFLKSCVSKIIYYNNMESKAGVGRYVENVFSLEIQYI

SEQ ID NO: 9731 - protein, 484 aa, synthetic construct
MCTKNVGIYIRVSTQEQANEGYSIDAQRDRLTAYCRSRAWNIYNIYIDGGFSGSNMSRPALSQLLDDIKAKRVNCVLVYKLDRLSRSQKDTLYIIEDVFLKNGIDFVSLNENFDTSSPFGRAMIGILSVFAQLEREQIKERSMMGRVERAKNGLWHGGGHEPFGYNYIDGQLIINDYEAAIVKDIFELFNDKIPIYQIQQIISNKYGKDFHESVIRSTLSMVLYTGKISYGGETYDGQHDAIISTDTFKRAQDLLEIRKKKYHNRPFKSKTLLGGLLYCAHCGARYLAKGNYSGRGINRSYRPYYTCYSRAKSNKKYIIDPNCKNPSYAVPVLDDIILNEIRKLFTCHDYFENIVQSSTPPPAPNNDLEIEVLSKQIISIQGQISRLLDLYQLDGIGIDDIHDRINSLQEEKIKLQETITKLSTPQLSETEKKLSPNDVLSLKDSIESIILSNDVSAKQNLVHTLIQKILVNEEENSFEIIWNF

SEQ ID NO: 9732 - protein, 524 aa, synthetic construct
MRSVTVIPASVNKFSAQPLSATEKRKVAAYARVSTDEEEQQTSYAAQCDYYERYIKSRADWAFVKVYADEGISGCNTRKREAFKAMVQDALDGKIQLILTKSVSRFARNTVDSLTTIRKLKEHGVEVWFEKENLKTFDPKVEMLLTILASLSQEESRSISENVNWGIRKKMTDGKFSLGYSHFLGYDKGADGSLVINEEEAKVIRRIYALYIKGMSPYGIAKVLTEEGIKTPGGKTRWSDSTVKSILRNEKYCGRALLQKTFTPDFLTKKTVKNTGQVPSYYVEHSHAPIIDPDVYDMVQRMMEGRKRGRDRISSISIFSSKLRCGDCGSWYGSKTWHSTDKYKRVIWQCNHKFCGTKCSTPHFTEDEIKELFVRAVNLLLTEKEEIISTYEMMRDKLFSTTALVEERRALENELNVTARLVEDCIKENARIAQDQTAYEERYQSLVERYESAKKRYDEIVEQISDRTIRGEQVSIFLGKLREQDLIDTFDDDLWLSMVDFITVHDKSKVTVTFKDGSEIKLDR

SEQ ID NO: 9733 - protein, 555 aa, synthetic construct
MPEVRKIEPTVTVLKPRKRVAAYARISMESDRLNHSLSAQISYFSELIQRNPEWIYVGVYADSGISGGDIRRRAEFQRLIDDCNAGRIDIVLCKSISRFARSTVDLLETVRHLKSIGVEVRFEKENIHTLSSDGELLLSILAGFAEEESRSQSENAKWAIRKKFERGKQWHVAAYGYRWNGETFVVCEEEAEAVRVIFDNFLKDVPLGHTAKWLKENGHACSIPFIHYVLENPVYVGDVILQRYFTENPRTHNVFKNTGQLPRYLVTDNHEPIIERETFEKVQEKIKVSYEFNPAAHRILKPSCFSAKIICSKCGARFVKGVTKTNRHDGLQEHWFCYGKIHKRMCDARNIRGCRLWEACCEVLGLTVFDENVFARTVEKILTTDTDSLVFHFYDGTVTTARIHYFSQDEKKYTDPHRKPFGYTWSQNGYVIVPKEAEAVQLVYQYYAEGWNITDISRELESKGYQSIRGRFSRRVVTTVLDSDFYIGNRTIKGQFTESGVDEVIENDHAPIVSKELFDTVQKRRTVELKKQERRIATRRRIDNEKRNGHPRQRQ

SEQ ID NO: 9734 - protein, 481 aa, synthetic construct
MKTTNKVAIYVRVSTTSQVEEGYSIDEQKAKLSSYCDIKDWNVYKIYTDGGFSGANTDRPALEGLIKDAKKRKFDTVLVYKLDRLSRSQKDTLYLIEDIFIKNNIAFLSLQENFDTSTPFGKAMIGLLSVFAQLEREQIKERMQLGKIGRAKAGKSMMWAKTSYGYDYHRETGTITINPAQALAVKFIFESYLRGRSITKLRDDLNEKFPKEIDWSYRAVRAILDNPVYCGFNQFKGEVYPGNHEPIITEDVYNKTKEELKIRQRTAAENVNPRPFQAKYILSGIGQCGYCGAPLKIILGVKRKDGSRFKKYECHQRHPRTLRGITTYNDNKKCDSGFYYKDDLEAYVLTEISKLQDDAGYLDKIFSEDSAETIDRESYKRQIEELSKKLSRLNDLYIDDRITLEELQNKSAEFISMRATLETELENDPALGKDKRKADMRELLNAEKVFSMDYESQKVLVRGLINKVRVTAEDIVIKWKI

SEQ ID NO: 9735 - protein, 502 aa, synthetic construct
MSETTQIGVIYARYSSDKQRDESIDGQIRECMAYAEREGITITNTYIDRALSAKTDDRPEFRQMILDSNKQAFNYVLVYQLDRFSRNRYDSAIYKAKLRKNGIRVISVKENIKDDPSGIILESVLEGMAEYYSAELSQKVMRGMTDNVLQGKWVGTVVPYGYKLSNNRQLEINEHEANVVRKLFDMYLQRHTLSEMASYMNANGHLTHKGKPFNTNSIKAIISNEKYIGVYSWGSERIENAIPPIIDKNIFKKAQHKRNLRAKKKGNRSELYQLCGKLECGRCGGNYVGSTGTSKTGTLHHYYVCSNRRRKNACQAQNIRRDALDDIVISQTLAILNKPNVVNKIAKYAASSGKNLQSETVAQIDIIDAHIRDLKKSLDNYMIAIANGFISDVLKHRIEATEQELKDQIEIKTNLENTIIPVELTEDHIRFFLLKMAKENPSTLRGRARIIEAFVHHVTIYEDHIEIVFNYKNELSEFHDKTLESSLLNDLVTQKGFEPLAF

SEQ ID NO: 9736 - protein, 521 aa, synthetic construct
MNRKVTTIQANKQLSHQSKLPSIKKKKVAGYARVSTDNEDQTSSYETQMKYYEEYISSRKDWEFVKMYSDEGISGTNTKKRLGFQEMVNDALAGKIDLILTKSVSRFARNTVDSLSTVRKLKDVGVEIYFEKENIWTFDSKGELLITIMSSLAQEESRSISENITWSKRKQAAEGKVTFPYNNVLGFKPKEDGGFEVDKEQAKIVRYIFGQFLSGKNPNQIAKHLTENKIPTPRGKEKWSYSSVRSILTNEKYKGDALLQKYYIADFLNKTQKRNNGELPQYYVENSHEAIIDKEVFDAVQVQLSENKKWYTEKNYFGKIRCGCCGSSYVRHLWHSTDKYKETIYRCKDKYKNEEKCDTPHIRDDEVQRWIVSALNKVIDNRKEIIGNIKLLMKMIKEDRRLDDEIIQLEEKLENIRTDVEKLIITNSKIAQDQEEYTRKYNKLIEEYKLLEKELEQKNLDLLNKNKRVRELKIFIDSLEKQDELLTEYDTKLFNYLVEKIIIHKGKRVEIHLKNGEVISL

SEQ ID NO: 9737 - protein, 521 aa, synthetic construct
MNRKITTIQANKQLSHQSKLPSIKKKKVAGYARVSTDNEDQTSSYETQMKYYEEYISSRKDWEFVKMYSDEGISGTNTKKRLGFQEMVNDALAGKIDLILTKSVSRFARNTVDSLSTVRKLKDVGVEIYFEKENIWTFDSKGELLITIMSSLAQEESRSISENITWSKRKQAAEGRVTFAYNNVLGFKPKEDGGFEVDKEQAQIVRYIFGQFLSGKNPNQIAKHLTENKIPTPRGKEKWSYSSVRSILTNEKYKGDALLQKYYVADFLNKTQKRNNGELPQYYVENSHEAIIDKEVFDAVQVQLSENKKWYTEKNYFGKIRCGCCGSSYVRHLWHSTDKYKETIYRCKDKYKNEEKCDTLHIRDDEIQRWIVSALNKVIDNRKEIVGNIKLLMKIIKEDRGLDDEIIQLEGKLEDIRTDVEKLIITNSKIAQDQEEYTRKYNKLIEEYKLLEKELEQKNLDLLNKNKRVRELKIFVDSLEKQDELLTEYDTKLFNYLVDKLIIHKGKRIEIHLKNGEVISI

SEQ ID NO: 9738 - protein, 521 aa, synthetic construct
MSNITIIPARPQRANSQQNETEKPKLRVAAYCRVSTDSDEQATSYEAQVSHYTEQITRNPEWAFAGIYADDGISGTNTKKREEFNRMIADCMDGRIDMIITKSISRFARNTLDCLKYIRQLKDRNIPVFFEKENINTLDANGEVLLTIMASLAQQESQSLSQNVKLGLQFRYQRGEVQVNHIRFLGYTKDENGRLVIDPEQAEVVRRIYREYLDGYSTDKISAGLEREGILTGAGNPRWHTSTVAKILRNEKYMGDVLLQKTYTVDYLSQKRIKNNGIMPQYYVENDHEAIIPKDIFMRVQDELVRRRLVKVSPNGRKHGFSSNHVFSQMIVCGECGELFRRVHWNNHGCRSIVWRCLSRLQPTGVICHARTVSEEVLKNVVVQAFNELLGSRSTYQKRLRDNLAVVLRGYEDEQALEIDKRLAELQQELINYASRKEDYNDIADEIFRLREMKQKNFTDTAVRDEQVKRINELNEFIEQQDSEMTEFDESLARRWLKEIVVWDDRFSVELKSGIVVEIEL

SEQ ID NO: 9739 - protein, 502 aa, synthetic construct
MKELIPAVVYARFSSSGQREESITGQLRDCKKYAENHGFEIINEYIDEAKTGTSDNRPSFQKMIKDSESKRFNAIIVWKLDRFARNRYDSAIYRARLKKNGVKIYSAMENISDSAEGIIMEGLMESMAEYYSANLSENVKRGNRESALQLKTLGRKIFGYGRSEDDHYIINENEATVVRRIFNEYTSGKSIQDIIKGLNNDGIMNSRNNPWNKSSLKNIIGNDKYIGTYRFMDYVVPDGMPAIISKEMFSVAQEIKDRHKKSPARSRESRYLLTGKLFCGHCGSPMTGEYGVSKTGKKYHYYRCIKANKHKCDKKRAKKDWIENIVVAELLNQLNDLTYIDQLADRFMEYQKKQQSDDSELKVLQDRLHGVNKSLNNMVKAIEMGIITPTTQARMEELEEQKQQLHTSIEQLKFSKPPMIERDEFLFWIDTLKQDTGNYDYKEKLIDIFLNAVYLYDDGYIDIGTNLIKGTKRIDSSTLEQLCLLLTVDISHAYTHDFFSFL

SEQ ID NO: 9740 - protein, 413 aa, synthetic construct
MNIRKIEAKNNKRKKRICAYVRVSTTNGSQLDSLENQKVYFEKLYAERDDVEFLGVFCDKGISGSKYDRPDFQTMLDACRKGQIDVIHTKSISRFARDLINVLEISRELKTLGIDIFFEEQNIHTLSNEGEVVLTVLASLAEEELQSMSGNQRWSFRRKFQKGELLINAKRFLGYDLNEKGELVINKAEAQIVRTIFYSYLEGMGTHRIAKKLNEGKVPTVTGKKWYDSTIRNILKNEKYKGYLLLQKYFHDGVNGPKKLNQGQVEQYYIEDNHEGIVSKEIWEKVQVKMKSRSRTQGTNKTYKFSRMLKCQYCGSTLKRQVSYKKKIVWCCSKYIKEGKNSCKGMRVPERDIEGWKLSSPVIVLERIEDGEKHYSYTGQKATANSQISNSEKGQGSRLLSSVYRPRRTAIKL

SEQ ID NO: 9741 - protein, 428 aa, synthetic construct
MSTDQEEQLSSYENQVNYYREYILKHEDYELVDIYADEGISATNTKKRDAFNRLIQDCRDGKVDRILVKSISRFARNTLDCIKYVRELKELGIGVTFEKENIDSLDSKGEVLLTILSSLAQDESRSISENSTWGIRKKFERGVVQVNTTNFMGYDKDEKGNLIINHEQANVVRYIFDRFLEGYSPEFISKELRELEIPGCTGKAKWCPSAIWKMLQNEKYKGDALLQKTYTVDFLTKKRIDNDGQVNQYYIENNHEPILDREKWEIVQLEIARRKKFREQHKLQFYIIQKENNPFTTKVFCAECGSAFGRKNWTTSRGKRKVWQCNNRYRIKGQIGCLNNHIDEEMLEKAFMKAVGLLKEHRSDMVAKWQKLEQGANLLHKHYAKQMYQILDLDKFDGVIMNQVLDHISISETGQIVVTFLEGTEVDL

SEQ ID NO: 9742 - protein, 562 aa, synthetic construct
MTSARVAIYIRVSTTHQVDKDSLPMQRQDLIAYAKLMLHTTDCVIFEDAGYSGKNMDRPRFQSMMKQIRQGLFTHVLVWKIDRISRNLLDFASMYEELKSLGVTFVSKNEQFDTSTAMGEAMLKIILVFAELERNMTSERVTATMISRASNGQWNGGRVPFGYSYDSEKKEFYINEKEAPIVRLIHDTYEQNSSLLNLTRILNDSGYKTRAGNEWSPISVRIILKNFWYTGCYQYNRLKDGCRQKEKDQSEWVTIPNHHPALISLKQKERIVEMLRSNYKLIAANNIYYTSNNVHVFGGLITCAFCGRRYIATTDTKKGWKMGRYGCPTRRYSKTKCLNKSISDLTLGDFVFNYFVNLLKVQKHAKEITTTEELQRQLLSGYTFSSVKGLSPQSLLDTLRLIHTLNPSEKIYGKTKAIKKIAKPDKQLFTLRAKQSKLKRALDRLTTLYLYSESSMSEADFVAKKAEITDNIAKTEAEISELVKTDIHSDITDSEFLRKASEFVISQQLVSRNYISYERLARTVDVNITREFIVGTIEQITVRDGHIDSILFRNGLYHKFIY

SEQ ID NO: 9743 - protein, 557 aa, synthetic construct
MKKKIKVYIYTRVSTAMQIDGYSLDAQKSRMKAFADFNDYEIVGEYEDAGKSGKSIEGRVEFNRMMEDIKSGKDGVSYVLVFKLSRFGRNAADVLSTLQVMQDFGVNLICVEDGIDSSKDAGKLMISVLSAVAEIERENIRVQTMEGRIQKAREGKWNGGFAPYGYRLEKGQIFINEEEAAAIRVIFDQYVHTDTGANGLAKYLATHGIHKIQRQNGKNPLFDAALIRRILKNPVYCGKIAYGRRRTEKVHGTRNDYRLVEQDDYLLVDGLHEGIVSEELWHEAQVKLLAQAEKYEHVNRGKDTKIHLLSGIVKCPVCGVGMYGNKSIKHKADGSKYKDFYYYGCKHRTMTHGHKCDFKKQINEELLDSAVAEVIVKLVSNPKFAAMMQEKISMKVDTSAIEKEIAAHEKQLRQSYSVKARLMEEIDSLDPDDRHYIKRKADLDDRLYKMYDKIEDTENQLVAARAKKMAIEAEKLTGDNIYKVLIYFDKLYSVMDDQEKRQLMESLLSEVQIYEERQPNGQWLKSIKFKLPIIAEDMSLSLDNDAHVETVGLFTKQ

SEQ ID NO: 9744 - protein, 498 aa, synthetic construct
MQIEVRKAEMGKEKKRLKVCAYARVSTEASEQENSLENQVSHYTEMIQANPAYEFAGVYADFGISGFKESRPQFLKMMQDAKNGKIDLIITKSVSRFARNTAIVLKASRELKERNVGIFFELQNINTLTEAGELLLTILAAFAQAESESASESSKMAYLHRIENGEVVAYLERSYGYEKDENGEYRAKEPEASVIREIYDLVIQGVNCTNIAKVLNARNIQTVQGAEWTASTVFRIVENEIYKGDVLMQKTFIDGKRHQVQNRGEKAMYYAKDNHPPIVSEKIWEKAQRKLEDMRAERAEHSVIQEFTEENYPYMNHIFCAKCGWPLKPRVYSHGHRLSWDCSGQKRGTKKFCTGIHILDNDLQKMKIEGNRYFSETVDKYGEVHLKHVGERTWKNKHKKKKFNHKDLYPELNEENYPYYRRLYCARCGSRLGRYISHGTVRWICSSYKRKGQAKCPGVRIPDEIIKGWNLPDGKIYIMGKEDKNGEKHYSYTSESAL

SEQ ID NO: 9745 - protein, 465 aa, synthetic construct
MARSITVIPASQPYRVGGRTQQKTRNLRVAAYCRVSTDQEEQLNSFENQVEYYTKYIQDNPLYQMAGIYADEGISGTNTKKREEFKRMIRDCEEGKIDLVITKSISRFARNTQDCLEYSRRLKNLGIGIFFEKEHINTLDASGELLFTILSSLAQDESRNISENCKWGIRSKFKKGIPQVDCTKFLGYDKGEDGKLIVNQEQAKIVKRIYREFLDGYNPAAIAKMLMEDHIKTGTGREEWRSASVRAILKNEKYMGDALLQKTYTADFLTKKVKKNHGEVEQFYVKESHEAIIPKEQWEAAQLELERRDSYMQELGLTFYGYGSEVNPFSCRVVCGKCGAVCGKKSWKSRGVEFWQCNNRSKNHGVKGCASENLPYENLLKGFITAWNQIVAEREQYLPKWEKKKKEGNPLEKLRAEQMIELTLQPPLTKMLPELGQMVLERVIVQGKEIMVIRFLDGTEIKVRI

SEQ ID NO: 9746 - protein, 521 aa, synthetic construct
MNRKITTIQANKHLSHQSKLPSINKKKVAGYARVSTDNEDQTSSYETQMKYYEEYISSRKDWEFVKMYSDEGISGTNTKKRLGFQEMVNDALAGKIDLILTKSVSRFARNTVDSLSTVRKLKDVGVEIYFEKENIWTFDSKGELLITIMSSLAQEESRSISENITWSKRKQAAEGRVTFAYNNVLGFKPKEDGGFEVDKEQARIVRYIFGQFLSGKNPNQIAKHLTENKIPTPRGKEKWSYSSVRSILTNEKYKGDALLQKYYVADFLNKTQKRNNGEIPQYYVENSHEAIIDKEVFDAVQVQLSENKKWFTEKNYFGKIRCGCCGSSYVRHLWHSTDKYKETIYRCKDKYKNEEKCDTPHIRDDEIQRWVVSALNKVIDNRKEIIGNIKLLMKMIKEDRALGDTIIQLEGKLENIRVDVEKLIITNSKIAQDQEEYTIKYNKLIEEYKFLEKELEQKNLDLLSKNKRVRELKIFIDSLEKQDELLTEYDTKLFNYLVDTIIIHKGKRIEIHLKNGEVISI

SEQ ID NO: 9747 - protein, 481 aa, synthetic construct
MITTNKVAIYVRVSTTSQVEEGYSIDEQKAKLSSYCDIKDWSVYKIYTDGGFSGSNTDRPALEGLIKDAKKRKFDTVLVYKLDRLSRSQKDTLYLIEDVFIKNNIAFLSLQENFDTSTPFGKAMIGLLSVFAQLEREQIKERMQLGKIGRAKAGKSMMWAKTSYGYDYHRETGTITINPAQAVAIKFIFESYLRGRSITKLRDDLNEKYPKHVSWSYRAVRAILDNPVYCGFNQYKGEIYPGNHEPIISKEEYDKTQSELKIRQRTAAENVNPRPFQAKYILSGIAQCGYCGAPLKIMLGVKRKDGSRLKKYECHQRHPRTLRGVTTYNDNKKCDSGFYYKDKLEAYVLEEISKLQDNADYLDKIFSGDNTETIDRESYKKQIEELSKKLSRLNDLYIDDRITLEELQSKSAEFISMRGTLEAELENDPALRKDKRKADMRELLNAEKVFSMDYENQKVLVRGLINKVQVTAEDIVINWKI

SEQ ID NO: 9748 - protein, 521 aa, synthetic construct
MNRKITTIQANKQLSHQSKLPSLKKKKVAGYARVSTDNEDQTSSYETQMKYYEEYISSRKDWEFVKMYSDEGISGTNTKKRLGFQEMVNDALAGKIDLILTKSVSRFARNTVDSLSTVRKLKDVGVEIYFEKENIWTFDSKGELLITIMSSLAQEESRSISENITWSKRKQAAEGRVTFAYNNVLGFKPKEDGGFEVDKEQARIVRYIFGQFLSGKNPNQIAKHLTENKIPTPRGKTKWSYSSVRSILTNEKYKGDALLQKYYVADFLNKTQKRNNGELPQYYVENSHEAIIDKEVFDTVQVQLSENKKWYTEKNYFGKIRCGCCGSSYVRHLWHSTDKYKETIYRCKDKYKNEEKCDTPHIRDDEIQRWIVLALNKVIDNRKEIIGNIKLLMKMIKEDRVLDDEIIQLEEKLEDIRVDVEKLIITNSKIAQDQEEYTRKYNKLIEEYKFLEKELEQKNLDLLSKNKRVRELKIFIDSLEKQDELLTEYDTKLFNYLVDKLIIHKGKRIEIHLKNGEVISI

SEQ ID NO: 9749 - protein, 521 aa, synthetic construct
MKNVITIEANAPRNSELASISLPKKRRVAGYARVSTDHEDQTTSYESQMKYYTEYISSRSDWEFIKMYSDEGISGTNTKLRVGFKSMIEDALAGKIDLIITKSVSRFARNTVDSLTTVRKLKEVGVEIYFEKENIWTLDSKGELLITIMSSLAQEESRSISENVTWGLRKQFAEGKVHFPYTNVMGFEKGENGEIVVNQEEAKTVRYIFQQALLGKTPYSIAKDLTQQGILSPSGKNHWSSVTIRRMLRNEKYKGDALLQKTYTIDFLSKKKNINKGELPQYYVENNHEAIVDKETFDAVQASLDRKEKGKGSTTLFSSKLVCGDCGHYFGSKVWHSTSKYRRVIYQCNEKYKGEKKCTTPHVTEDEIKDWFVSAINKVISNKDEIIQNLEMLLDVGESSDLERKLVELETEVEVVTQMVSNLVKENAIMPQDQDTYQKKYSNLVERHDALVSEFESIEKQLLEAARHQKDLKEFLETLNQQSGLISEFDDLLWETMVDKVNVSHNRKVTFKLKNGSEVVA

SEQ ID NO: 9750 - protein, 539 aa, synthetic construct
MARAAKQDSNSEIIDGVIYARYSEGPNQTEASIEGQVRECKEYAKRNGIRIINVYSDSKHTGTNDNRAEFQKMLRDSRRGGFSVVVVWKIDRFGRNRAEMAQNKALLKLQGVKVVSAKEYIPDSPEGIILESVLEGMAEYYSANLSQNIKRGMKENALHCKSNGSGKSLGYIVDKDGYFEIEPNEATIVKTIFQKYDEGMKIADIWREIVASGAKTKRGKDFTQYGISRVLSNRAYIGEYRYGDIVTPGGMPRIIDDDLFNRVQERRALSKKTPASRRSNSDVDFLLTGKVFCGHCKGTMRGMSGTSKTGRKFYYYACHDKIFKHNKCTKKNVKKEWLETEVTRITRDDILNKETIEFIADRVVEIQRQEQEDKSMLRYYEQQLRDTQSAINNIMKAIEAGIITSSTKSRLFELEEQKSIIEGEIEREKIITPVIEKEQVIFSLERFFGGDINNKEYQRNIIDMFVNKVILYDNKIIITYNISSQNEISVDVVEQAAFAALDECSSKLSLAPPAGACPCTQFRFTLCKAVFLLPLINFI

SEQ ID NO: 9751 - protein, 565 aa, synthetic construct
MQNRSDTNINRVAVYIRVSTNHQIDRDSLPMQRQDLISYAKLLLNTEQYVIFEDAGYSGKNTDRPKLQEMMAQIRHGIFTHLLVWKIDRISRNLLDFATMYQELKELGVTFISKNEQFDTSTAIGEAMLKIILIFAELERNMTSERVTATMVSRASNGLWNGGRVPYGYNYDPDKKEFKINPDEAEVVKLIHDKYEELHSLIRESRVLNESGIITRAGNLWNPTTIQIILHNTFYCGDYQYNVCKEGNRQKQKNKSDWITIHNHHEAIISREQKERIIALLDCNRRLNKKVVKSEKYVHIFSGLLYCGNCNKPMGASPSSKIKGYQYSRYTCPTKRQLQCDSKSVSDQTIGEFVFNYILNLINSQRNFESISSKNELQKCLLKGSTFNDIKSIDPDGLNDLYNVLLSGDIKQDIYSNDVSFKKEDSSNLSRTKLLSEKQKLERALDRLTNLYLYSEQTLSEQNFLSHKMQIDDKLNEINDQLSFMESDDWQQSISDSEFIVKTSSFIISKKLYGRNYINYKRLATSIDKEVLKSFVNSVIDSITISNGDIKTITFKNGLSHTFIR

SEQ ID NO: 9752 - protein, 407 aa, synthetic construct
MKPEKKRVCAYARVSTMTEKQQDSLTNQQAYYNYFFKNKKDVEFVGVYYDQGISGKLAKRPGFQQMLEDCRAGKIDVIHTKSISRFARNTELLLAVSRELKTIQVDIFFEEQNLHTLSNEGEVMLTVLASYAEEELRNMSENQRWAFQKKFQRGELVINTKRFLGYDKDENGELIINPEEAKIVKRIYNLYLSGMGVHVIAKLFNEEKVSTVDGGKWYSSTITNILKNEKYKGDAILQKYYFAEIKAKQRLNQGQVQQYLITDNHEAIVSREDWESVQKILRQNSKRDARTDYNRRYPLSGLLKCEHCGSTLKRQKYYKGKVVWVCSKYIREGKAACIGMRVPDGVVQDWSIHEPTVVKEENIGGKKYYSYSSKENDTSRAEATHSENPNGGLLPSIHRPRRTAIKL

SEQ ID NO: 9753 - protein, 435 aa, synthetic construct
MAAYCRVSTDQDEQLSSYENQVRYYKEYIQQNPLYELVDIYADEGISGTNTKKRTEFNRLIADCRKGKVDRIIVKSISRFSRNTLDCLKYVRELKELGIGVTFEKENIDSLDAKGEVLLTILSSLAQDESRSISENATWGIRKKFERGEVRVNTTKFVGYDKGENGNLIINEEQSKIVRRIFRDFLQGETPESIARSLKEEGVPGWNGKANWYPTTIQRMLQNEKYMGDALLQKTYTVDFLTKKRSENQGQVNQYYIEGNHEAIINKEDWDLVQLEVERRNQYRQDNHINFYIIQCEQNPFTCKVFCKECGGLFGRKNWTTSRGKRPVWQCNNRYKVKGIQGCTNRHIDEETLQQAFLRAIEILHEKKEQLLEKWNSLNEEQKLEKYHAAQLKGLLDSEQEVFDGRKMCQVLEKIMLGEDGSITVKFLEGTEVNL

SEQ ID NO: 9754 - protein, 548 aa, synthetic construct
MKFKYPAMGTTKNAVIYARYSSHSQREESIEGQLRICHEYAKAEGLAIVGEYIDRAISGTTDARPDFQRMIDDAKKKQFSYVIVYRLDRFARNRYDSVLYKHELKQCGVKVVSATEGIGTGDESILLEALIEASAEYYSMELSRKIKRGRQDSAMKGNFLGGSVPLGYKVVDSKFIIDDETAPIVRYIFERYAAGTGKKQIIDELTAKGYMRRNGKPFTYRSFDSVLRNRKYTGEFTQTGITVEGGCPAIVDTEMFEKVQARLEINRRAPAKAKAKTEYLLSGKMFCGYCGEPMIGISGTGRHGKTFYYYSCVGRRGKSGCKKQHEKKDFIEWYVCEQTVQYMQDPERLSHVAKRIIEINDAEFDGGKVKELERAVENCDNDIRKLVDALTTIPDAGRAALYDKIERIGAAKADMEIDLAKLRVLSEVRYKQEDVEAWIRSMCRGDLMDFEFRRQLIDVFINSVYLFDDRVVIVYNIKNGKQVSAIDVLNAVEELDGVELSSDSTEDGNAGGSGSFLVADAPPYMKNPNLFPIGNGFGFLIFIKDIID

SEQ ID NO: 9755 - protein, 538 aa, synthetic construct
MPEVRTARVTVIPAKKDRLPIAALGVEEKKRLRVAAYARVSTNNEEQLTSYEAQVDYYTRYIQSKEEWEFVEVYTDEGISATNTKKRGGFNRMVEDALAGKIDFIITKSISRFARNTVDTLTTVRKLKEKGIEVFFEKENIRTLDGKGELLITIMSSLAQEESRSISENVTWGQRKRFADGKVSLPYGRFLGYQKGPNGLPEINEQEAQTVKLIFRLFLYGKSPSAIATYLTGEGIPTPGGKTKWRAKVVESILTNEKYKGDARLQKKFTVDFLTKKQKVNEGEVPQYYVENSHPAIIPPEVFDLVQYEYKRRKADGHWTSSIHPFSGKIFCGNCGGQYGSKIWDSNTEYRRLVWQCNDKYKGNRCHTPHLTENEIKAAFLVAFNTVLNDKAEIMAAYGEVMEALTDTSDFDSEREQLQSEADVVMELIRKCISENAHKAQDQEEYQRKYEGYCSRFEKAQKRLAEIEEICLERTAKRTKISMFLNTLNRQPELVTEFDEELWYSTVDFVTVYEDKRMVFTFRDGNEIEIKENAWKAA

SEQ ID NO: 9756 - protein, 448 aa, synthetic construct
MERIITKVAPATLQQAPKAKRVAAYARVSSGREAPLHSLSAQISHYNALIQKTPGWEYAGVYADEALTGTKESRGEFQKLLRACHAGEVDLILTKSVSRFARNTVTTLKTIRELRLIGVDVFFEEQNIHTLGEEGELLLTLLAAYAEEEARSVSENQKWRIKSNYEQGLPWSITMYGYKQVDGRLEIVPEEAEILRLAADLYLEGCGRYKIEKAFANAGITGRQGSPLSGNSIINLLCNEKSVGDMLLQKTYVVDPISKELRKNKGERPQYFVEDSHEPILDRKTQQRIIEERARRAAIYKPRSGDYSRKVFPFTGKMVCGKCGKNFTRKTVAIGTKSEKAVWICRTFHQKGKAYCASKRIPEAILERVTAQVLGLPEFDAKIFEKKIKEIQVPDNGELIYVFHNGATVTATWENPSRRESWNEENRQRAREYALKGAAKRRAASCQK

SEQ ID NO: 9757 - protein, 455 aa, synthetic construct
MKTVACYCRVSTEEQVKYGFSIQAQKDALTNYCKENDYKYDVYIDEGISASSMKKREALQEMLEKSVAYDMILFTKLDRLSRNVLDANNINKILQDNHCTMKAIDEDDVDTSTADGMFMFNLKVSLAQREIGKTSERIRFVFKNKREKGEVTSGTPKYGYKIKDKKFVIDSEEAENIRNLYKYFISVNGDHKKTYSYFVKHFPGKGKDALFNYLRETAYIGKYKLYRKNVYLDNYIPPIMDKELFNEVQNLLPRVEKVLKKENIPSIFAGMLYCYYCKSRLVRKVDYRSKNKIINYFCDKQYKYKVGINEKQCQNSKVISDKSVEEYLINNLKYLCKPYISKSIIKTKPKPQKNNIKINSLKNKLSKLKDLYLDDLISKEDYKQDYIKINKEILKLEEEQKEKPQKDFTYLNELINKDIPDIYNTFNIDEKRKFWLKIIDKIYIKEGKIKEVTFL

SEQ ID NO: 9758 - protein, 406 aa, synthetic construct
MRIKVIKPTKAVQQQKKKVCAYVRVSTDSLQQEDSLENQTTYFKGFITANPEWEFVGIYSDQGISGYKENRPGFQKMIEDARAGNIDLIVVKSISRFARNTETVLKFTRELKSIGVGIFFELQNINTLSGAGELMLTILAAFAQAESEGASANAKMTYKRKFESGIPAHGLECTFGYKANAQGDIVIDEEKAAVVRQIFDLAEQGIWPSKIKQYLNKNGVPGCAGGDWDDTAVFRVLHNVSYKGDLILQKTYRDSRRKQRKNEGQVDQWYIAENHQPIVPPEQWDKVQEILQKRSEHLQKPARPKTDKPRSSKNTYPLSNMMYCPHCGAKLIHNWSNKGRQEYWVCRTNNKVSKDACKGIWLPAEVANSWGTITEPIVVVQYEDEYGMRRFTAYPKDEYDAFKRED

SEQ ID NO: 9759 - protein, 467 aa, synthetic construct
MAREIVHIPARRGMSNRATVTDRKIRVAAYCRVSTDHEEQINSFENQVTYYTEYINRNPNYELADIYADEGISGTNTRRRDDFNRMIADCEAGKIDLIITKSISRFARNTQDCLNYSRKLKDLGIGIQFEKEGINTMDSSGELLFTILSSLAQDESRSISENCQWGIRSLFKQGVLHLNTNRFLGYDKDEKGNLVINEEQAAIVRRIYTEFMNGINPDVISRRLRDEGVPGCMGEAKWQASTIFGILRNEKYMGDAILQKTFTSDYLTKKTVKNEGQLEQYHVKGNHEAIIDPEYWDAVQLELERRQNYMAAHSLRTMGRYTDEQPFSNRVLCGECGKVFWRRTWYRLNNTYKVWQCGNRYREKGVVTCHSENLKESDLHGAFVMAWNGILENRAEFTETWKAQAESGNALERFRAKQMLELTKMKPMKEIDLLLVGKVLDYVIVQHGGELEFHFLDGTQLAVEVTE

SEQ ID NO: 9760 - protein, 430 aa, synthetic construct
MSTDQDEQLSSYENQVNYYREYILKHEDYDLVDIYADEGISATNTKKREAFNRLIQDCREGKIDRILVKSISRFARNTLDCIKYVRELKELGIGVTFEKENIDSLDSKGEVLLTILSSLAQDESRSISENSTWGIRKKFERGVVQVNTTNFMGYDKDEKGNLIINHEQANVVRYIFDRFLEGYSPEFISKELREQEIPGCTGKAKWCPSAIWKMLQNEKYKGDALLQKTYTVDFLTKKRIDNDGQVNQYYIENNHEPILDREKWEIVQLEIARRKKFREQHKLQFYIMQKENNPFTTKVFCAECGSAFGRKNWTTSRGKRKVWQCNNRYRIKGKIGCLNNHIDEEMLEKAVVMAVEQLSKNVDLLHGKWNKVLEENRPLEKHYSLKLAEMINKPLWEFDSHEMCQVLDNIIIAEDGQITVRFLEGTEVDL

SEQ ID NO: 9761 - protein, 413 aa, synthetic construct
MNIRKIEAKNNKRKKRICAYVRVSTTNGSQLDSLENQKVYFEKLYAERDDVDFLGVFCDKGISGSKYDRPDFQTMLDACRKGQIDVIHTKSISRFARDLINVLEISRELKTLGIDIFFEEQNIHTLSNEGEVVLTVLASLAEEELQSMSGNQRWSFRRKFQKGELLINAKRFLGYDLNEKGELVINKAEAQIVRTIFYSYLEGMGTHRIAKKLNEGKVSTVTGKKWYDSTIRNILKNEKYKGSLLLQKYFHDGVNGPKKLNQGQVEQYYIEDNHEGIVSKEIWEKVQVKMKSRSRIQGTNKTYKFSRMLKCQYCGSTLKRQVSYKKKIVWCCSKYIKEGKNSCKGMRVPERDIEDWKLSSPVIVLERIEDGEKHYSYTGQKGTSNSHISNSEKNQSSRLLSSVYRPRRTAIKL

SEQ ID NO: 9762 - protein, 582 aa, synthetic construct
MASSEDTKGRLDLLSLLTEELSAGETVVDVSDKTKLRYALYLRKSTDREDKQQKSIADQKSECYERVIIPNGIKITDDDIYEDSKSAKISGNRPSFDRMIKKIKKGEYDGIIAWHYDRLARNMKEAGEIIDLIDEGKIVDLQLATAHFENNPNGKMILGINFVLSKHYSDHLSESVLRGNSNRTKNGTILNNFIHGYKITEERHLEKDGINWEIIRQAFRMRIDDRCSLQQIADYLNMSGYKVHSRKNGHRHYKFSNQDVSKLLRTPLYAGVHTYGREAVRLSDLADYKDFEPIITEEEYLELNGDKLLHDGFSHRLAARYGKNDVSNFLRSFVICKHCGKTMSTGIVGGGRNSFRFRCNTKGCPMRNKGPAGSLLRDYAVEFLKTHNFGTEENYKRYIEDRNKSIADRTEMLEHSKTSLEQRLAKQKQMYENLLPSLNVSKHVTEERLDSIKSTEEVIKEQLDSVKAEIKALKSAPIKLKEFLELYKNTGEILRLTTSMALADEIIKIFFSNITVEVTKESLNAKQKQWSVVDHTLREPFDKLDENGDNNTWLGMRDSNPRMSGPEPDALPLGESPRCEAR

SEQ ID NO: 9763 - protein, 521 aa, synthetic construct
MNRKITTIQANKKLSHQSKLPSINKKKVAGYARVSTDNEDQTSSYETQMKYYEEYISSRKDWEFVKMYSDEGISGTNTKKRLGFQEMVNDALAGKIDLILTKSVSRFARNTVDSLSTVRKLKDVGVEIYFEKENIWTFDSKGELLITIMSSLAQEESRSISENITWSKRKQAAEGKVTFPYNNVLGFKPKEDGGFEVDKEQAKIVRYIFGQFLSGKNPNQIAKHLTENKIPTPRGKTRWSYSSVRSILTNEKYKGDALLQKYYIADFLNKTQKRNNGELPQYYVENSHEAIIDKEVFDAVQVQLSENKKWYTEKNYFGKIRCGCCGSSYVRHLWHSTDKYKETIYRCKDKYKNEEKCDTPHIRDDEIQRWIVSALNKVIDNRKEIIGNIKLLIKMIKEDRGLDDEIIQLEEKLENIRTDVEKLIITNSKIAQDQEEYTRKYNKLIEEYKLLEKQLEQRNLDLLSKNKRVRELKIFIDSLEKQDELLTEYDTKLFNYLVEKLIIHKEKRIEIHFKNGEVISI

SEQ ID NO: 9764 - protein, 503 aa, synthetic construct
MKKAFAYARFSTDMQREESIDAQFRAIKEYCSRNKIFLVNTFSDEGISGTTDNRPEFQKMIKQAEEVDFIIVHKLDRFSRNKYDSAIYKRELNQKNVRVISVLENLDDSPESVILESVLEGMSEYFSKNLSREVKKGLYENAYKGKFNGGVPLFGYSIDQDKNYVINEYQAIAVRLIFDRFAKGSSYTEIINELDSLGYKTIKGNSFKSTTLYEMLSNERYIGTYIFSKEDYNLRNKKRNSHRYKNREDMIIIENGNPAIIDKKTWNLVKERQKLNSKTSNKSKWNYVLSPFLYCDECGERLNGTTRKNNQGRYYHYYRCVNKNCSQQSIRTDFLEEEFYAAFNEAIFSEENKKTLAKRMKAFLDNKKINIDKEKIENEIKEVEKQINNCVDFILTGSNSISVKNKIEELELKKFNLQNELLKSKVSENKIDINSIIEFINKYDKLEKFSIQEQQIILKFFIEKLKYKKGKLTIRLKLTEQCPASERGLVNGTEFPAPCYYGQ

SEQ ID NO: 9765 - protein, 539 aa, synthetic construct
MARKKKVSPGNRLVAYYRYSGGSQQTEQSIEGQRRDCEAYARQHGLTIVHEYIDRHISGRGVESRLAFQQMIADSSKHLFDLVICWKTDRFARNRYDSAVYKKKLRDNGVRILYAAESSVEGPEGIILEGLMESLAEYYSAELAQKMRRGMRESALKGRAINPSRPLGLTTDEHKRFIIDEKNAPTIRFIFEHYAAGESSASIVEQLNAAGLRTSKGNAFNKCSIPRIIQNEAYHGVYICKAYDVRIDGAIPAIIDDDLWKRAQKMLTLNKQHRAPHSFHADYLLSGKLFCGCCHSLMRGISGHNCRNDVYYYYACGNKADGGTCKKKNIPKDVAENLVVNAICENILRPDTLEDLADAIAAAQQADVNQPDPERAMLEQNLADVHQKINNIIESIENGTASSRLSARLADLEQQESTLNYQLESLKEIHPPVLDRERILFLLEQFLISPNERTEDYNRRIIDTFVNRIEITDTEMLIYFNLSEASASEKQKNSQSNSCSTGNHLVHLAHQQANYSLYAASGYFSLVEHQFSARLWRTA

SEQ ID NO: 9766 - protein, 521 aa, synthetic construct
MNRKVTTIQANKQLSHQSKLPSIKKKKVAGYARVSTDNEDQTSSYETQMKYYEEYISSRKDWEFVKMYSDEGISGTNTKKRLGFQEMVNDALAGKIDLILTKSVSRFARNTVDSLSTVRKLKDVGVEIYFEKENIWTFDSKGELLITIMSSLAQEESRSISENITWSKRKQAAEGKVTFPYNNVLGFKPKEDGGFEVDKEQAKIVRYIFGQFLSGKNPNQIAKHLTENKIPTPRGKEKWSYSSVRSILTNEKYKGDALLQKYYVADFLNKTQKRNNGELPQYYVENSHEAIIDKEVFDAVQVQLSENKKWYTEKNYFGKIRCGCCGSSYVRHLWHSTDKYKETIYRCKDKYKNEEKCDTPHIRDDEIQRWIVSALNKVIDNRKEIIGNIKLLIKMIKEDRGLDDEIIQLEEKLENIRTDVEKLIITNSKIAQDQEEYTRKYNKLIEEYKLLEKQLEQRNLDLLSKNKRVRELKIFIDSLEKQDELLTEYDTKLFNYLVEKLIIHKEKRIEIHFKNGEVISI

SEQ ID NO: 9767 - protein, 521 aa, synthetic construct
MNRKITTIQANKHLSHQSKLPSIKKKKVAGYARVSTDNEDQTSSYETQMKYYEEYISSRKDWEFVKMYSDEGISGTNTKKRLGFQEMVNDALAGKIDLILTKSVSRFARNTVDSLSTVRKLKDVGVEIYFEKENIWTFDSKGELLITIMSSLAQEESRSISENITWSKRKQAAEGKVTFPYNNVLGFKPKEDGGFEVDKEQAEIVRYIFGQFLSGKNPNQIAKHLTENKILTPRGKEKWSYSSVRSILTNEKYKGDALLQKYYIADFLNKTQKRNNGELPQYYVENSHEAIIDKEVFDAVQVQLSENKKWYTEKNYFGKIRCGCCGSSYVRHLWHSTDKYKETIYRCKDKYKNEEKCDTPHIRDDEIQRWIVSALNKVIDNRKEIIGNIKLLMKMIKEDRRLDDEIIQLEEKLENIRADVEKLIITNSKIAQNQEEYTRKYNKLIEEYKLLEKQLEQKNLDLLNKNKRVRELKIFIDSLEKQDELLTEYDTKLFNYLVEKLIIHKEKRIEIHFKNGEVISI

SEQ ID NO: 9768 - protein, 516 aa, synthetic construct
MPKTEEKQAVKAVIYARYSSDRQREESIEGQLRVCEDYARRSNITILHTYADRAMTGRSDQRPEFQMMIRDAATMAFNVILVYKLNRFARNRYDSAKYKHKLKRYGVKVVSAMENIADDPSGILLESVIEGMAEYYSAELSENVLRGMTQNALEGKWPGGVIPLGYKLDKCGRLIINEEKAPIVRMIYQMFLGGMPVARIERELNDKKYTTDAGKVFSRSRVYYILHNERYIGTFQWKDIKKEGIIPPIIPKEMFHAVQERINAMKSSSYRTNNNYLLAGKAFCASCGAKVSGTSGKSQNGNKYCYYGCSHHHRSARYEYCETKNIRADVLEKLVCDKTHEILSSKKAIKEIARQAVKLRPRDESELEIRAIKNHISSCQKKIDNCIKAIENGVMSNALVESLNENERTLDMLKEKLAKALLMQGSGLLTEEKIQFFFETIREKAKETEKYNDILLTSLVRAVYICNEYVEIQYNYAEQLPILTNPVRIESCSYKCTNGGTIWIRTKDLFDVNEAL

SEQ ID NO: 9769 - protein, 570 aa, synthetic construct
MKAAIYSRVSTDQQDYSKQTDELKDYAKRNGIEVVYVFEEKESGFNNDRPEFEKLRKLTKQDIDIILVWEISRLSRRSVYLQQQIEDFTNKGICIYALSNSLRTINADGTINEMARVVLAVTATIAEQEAATLKARTLSGKRHKVLKEGHSYTQIAPYGYDYDKETKLLSINEKEATVVRRIFQLSIDGYSLIRIATALNVEGIKNKKGNKWYFATIRDMLINPVYMGKARYALKKAPAKEGKKYRKPLEFVEVDSPAIVSEETYQLSLERMQGRKSISKSSYSVEYPLLRGLIVCPVCGRRYVYKRASKLYTCNNRDNDCKAKGASAHKLESIVWDIIKVYFKENMTNNKVEEQIEPLQAEIDSYKQKILLLDGQLSELTEEASRIYDAAIEAQKRFPNMPKLYEDKMKELDSIDKEASRYKKEKELTDKKIRSISKKINHIKEARDINLDDITDELEKYNIFHQFIDNLVICGTKHTSFIVLTLTTGQILYIGHYSKRCSNYYILFYPSSDIYFDIQTSKGYINHLKEKATINSDGSIYLGDLTGEVKEYSIIDFVNYLDIEENRRYY

SEQ ID NO: 9770 - protein, 573 aa, synthetic construct
MAYNAQNKTGARVAIYVRVSTLHQIDRDSLPMQKQDLLAYAKLMLNTDDCVIFEDAGYSGKNTDRPKFQEMMSQMRAGAFTHLLVWKIDRISRNLLDFATMYNELKALGVTFVSKNEQFDTSTAMGEAMLKIILVFAELERNMTSERVTATMISRANNGLWNGGRIPYGYDYDYETHEFSVNEEESKVVILMHDMYEQERSLVRVVRELNERGYRSRAGNLWSPVSLLIILRNVFYCGDYRYNMLKEGDRQKVKDESEWVTVENHHVAIIPKDQKERIMATLDSNSKLCKQRNIYKSSKHTHVFGGLIYCGSCGKPLGSTPGNLTRDGWHYSKYTCPTRRKSVTLCTGKSTSDPIIGEFVFNYILNMLNAQNDFDKINSPEELEKLLLIGDTFAYIDHIESNGLNDLFNVLSSGTVKGAVFGKGASLPTRKATVEPEVARLRNEKQKTERALDRLRSLYLYADEAMSEAEYMIQKNKLEETLEDINDQIGMMNTDSWQQSVSDEEFIQRASEFIIAQKLSGRKYVNYKRLAMSVDSEVLKNFVVSIIDSITIQDGLVSNIVFKNGLCHTFIFR

SEQ ID NO: 9771 - protein, 468 aa, synthetic construct
METTRTVTMIPARRRVGNTVREEERPKLRVAAYCRVSTDSDEQATSYETQVEHYTSYIKKNPEWEFAGIFSDDGISGTYTKKREGFNKMIDECMDGKIDMIITKSISRFARNTLDCLKFIRQLKEKNIPVFFEKENINTMDAKGEVLLTIMASLAQQESQSLSQNVKLGLQYRYQNGQMSINHNRFLGFTKDEDGHLIVEPTEAEVVKRIYREYLEGASLQQIGKGLEADGILTGAGKKKWRPETLHKILKNEKYIGDALLQKTYTVDFLNKKRVKNKGIVPQYYVENSHEAIIPREIFMRVQEEMVRRSNLHSGENRKKRVYSSKYALSSIVCCSKCGDIYRRIAWNNRGKHSTVWRCCTRVDFGPDKCDAPTISEAELQDAAVKAINKALGGREDMIKGLQENIEKILSESTDNAVREIDSRLLELQKELLKKANARQNYDDLADEIEALREQKHGVMVESCEPYK

SEQ ID NO: 9772 - protein, 548 aa, synthetic construct
MSTGAGLRAVFYARVSTEEEKQLNALEKQIQENKDVIRDHGWRLVGEYIDEGKTGTTTKRRSDYKRLLKDMTENKFDIVVCKDQDRLQRNTLDWYLFVDNLVTNNLKLFMYLDNKFFKPSEDALITGVKAIIAEEYSRNLSKKLNNSNKRRIERALNGEEVSAMGNGKSLAFKIVNGKWVKDEEEAKLGKKIFELYLEYDSIRKVRDWVNEHGYTNSVGKPFTSESISRILKNEKAKGVIVMGKYHHDFDKKKIVRRSEEELVRIPAPELAYVSEEVFDKVQERLRAKTGNGRGVNAYSDPLSGKIYCGSCGRKLWKHASNGYVNWMCASQVAKGDVECNGTRITTVAIRNIYKKITDNLEVNKEVVKQDIVKWLSELKATLSDTSVNEKIQKDLDKLEGKRTKLLEAYLEDLISKDDYKAKYETIEGQIEEKKKLVVPVEENEDIKAIESVLQNIDNEIDDYVKTLDMEESKVDFLIEHTKRITVLENRDIIIELDLVAGAIIAGKDFLLFVHDTMPQHHGRKRPHPPGPPAAPRQPVRDRLRCDQP

SEQ ID NO: 9773 - protein, 524 aa, synthetic construct
MAKSVITIPATKSKYTATPLSCKKKRKVAAYARVSTDHEEQQSSYEAQVDYYTTYIQGRDDWEFVSVYADEGITGCNTKKRDGFNSMVEDALAGKIDLIITKSVSRFARNTVDSLTTIRKLKEHGTECYFEKENIWTFDGKGELLLTIMSSLAQEESRSISENCTWGQRKRFQDGKVTVPFGRFLGYDRGEDGNLVLNEDEAQIIRKIYGLFLQGRSPYAIAKVLTSEGIPTPGKKKTWSASTVKSILTNEKYKGDALLQKVYTEDFLTKKKIKNDGQVPQYYVENNHPAIIEPGVFDRVQKLMAVRHPGQNRNSSISPFSSRIKCGECGSWYGSKVWHSNDKYRKVIWQCNHKFDGDCKCGTPHITEDEIRSLFIKAMNILITEKDALIEDFEAIKDTVFDTSALVQERTDLQVDMNTVAGLIEECIAENARIAQDQGEYQKRYDSLAKRFDRTKDRLEAVERSIAEKQAHREMVEQFLSELAKQDAVTEFTDELWYSMIDHVTIHSKDDIRFTFQNGTEIRM

SEQ ID NO: 9774 - protein, 517 aa, synthetic construct
MPKTEEKQAVKAVIYARYSSDRQREESIEGQLRVCEDYARRNNITIVHTYVDRAMTGRSDQRPEFQMMIRDAATMSFDIVLVYKLNRFARNRYDSARYKHKLKQYGVRVVSAMENIADDPSGILLESLIEGMAEYYSAELAENVTRGMTENALEGKWAGGIIPLGYKLDEKHHLIIDEPKAAIVRQIYHLALEGHNQKYIIDELNKHHYTNSAGRPFSYNTLRVILKNERYTGTFIWRDIRKENAIPVIIDKMTFEAVQKHMQFRKKNHIRSCSKDFHLTGKLFCGRCSNKMVGVSGTSKQGVLYYYYACTSHLKKKCPSKNIRQDALENLVCEVTTQILSKPEAIKAIAKQAMKMQKDKKESLEIQSLQNQIADINKKLKNCIQAVENGLISETMTNHIKNYENRLQGLKDEVSRQKLLEGSIQLTEQHIEFFFYSISRKLKTADKYKSILLSSLVRCVIVHENYIEIQFNYKNELPILQNPVKVESSYLNQMVTQGGFEPTTYRLEGGCSIQLSY

SEQ ID NO: 9775 - protein, 619 aa, synthetic construct
MTSAYDDLVDELLGDDELLAEGALPVVLSTVAEAVEPGSRAVIYLRVSSAGQVKNDYDPEGISIPAQRVKCQRKAEQLGLTIIGEYVEPGRTATEMSKRVEFQRMLTRVRNAGDVDYIIVYKLSRMARNRLDDAIVMADLRKRGVTLVSATESIDDSPVGQLMHGILATFNEYQSRESGADIAYKMKQKAKNGGTIGRAPLGYLNVRDRFDGREIRTIGVDPERAPFVQLAFELYVTGDYSLEDLSDELYDRGLRTRPTGRHPAKQVSINKLSMMLRDRYYLGYVEVDGEEVQGRHEPLIDDDLFDRVQDLLESRSTAGERRREHPHYLKGSLFCGRCKRAGITQRLIVQHTVNSRGSEYTYFFCRNKQNGSCEGPHINVALIEDAVENHYATIRFSAQFVATVRAEVARAIDEQEASERLLHKQLTTELKALDTREENLIELAADSTIGQEKIKTKLREIARQRRRLTERLTTTTENLSDSARLIEAALTLLENPQELYRRCDEQQRRMLNQAIFHSIYVDDDQIADHSLREPFAHLHAVQSDWQTTDVTLPEPRTDTRPRNAKRAASRKGGGPVATNGVQVLLRGVVSVPCSSKTPRVDLRGIEPLTPALQRRCSTN

SEQ ID NO: 9776 - protein, 479 aa, synthetic construct
MNKVAIYVRVSTKGQAEEGYSIDEQIALLTSYCSIHKWKIHDTYVDAGISGATIERPELSRLSRDAQKKKFNTMIVYDLKRLGRSQRNNISFIEDVLEKNGIGFISLTENFDTSTPLGKAMVGILSAFGQLDRDTIRERMMMGKIGRAKSGKPMMTSTIAFGYTYDKVTSSLNINPAEAIVVKTIYNEYLSGRSLTKLRDYLNENDLLRNGKPWNYQGVSRILRNPVYMGMVRFRGEVYQGNHDPIIDSETFEAVQKELKKRQLETYEFNKNTRPFRAKYMLSGIIKCGYCGSPMGVTLGTKRKDGTRNIRYQCVNRFPRNTKGITVYNNGQKCNSGFYEKDDIEIYVLGQVRLLQLNKAKLNKMFETPEIINVEEIENQINSLNNKMKRLNDLYLNDMISLDELKTQTYTFLKQKDLLENELNNNPAINQEENRKQFQKLLGTKDITQLSYEEQSFAIKNLIDKVFVKPGIIDINWRI

SEQ ID NO: 9777 - protein, 523 aa, synthetic construct
MAKSVTTIPATLSRFTAAPINSTKKRRVAAYARVSTDNEEQLTSYEAQIDYYTNYINGRDDWEFVGVYPDEGITGTNTKKREQFRQMVADALDGKIDLIITKSVSRFARNTVDSLTTIRKLKEHNVEVYFEKENIWTFDSKGELLLTIMSSLAQEESRSISENCTWGQRKRFADGKVTVPFKRFLGYDMGPDHNLVVNPEQAKLVKRIYGMFLQGQSPFQIARTLTEEGIPSPGGKDHWNPSNIKSILTNEKYKGDALLQKSFTVDFLTKKKKTNEGEIPQYYVKDNHEAIIDPETFEMVQTLMTTRTKGRNRKSSVSIFSSKVKCGDCGSWYGPKVWHSNDAYRKVIWQCNHKFDGQKCATPTLTEDEIKELFLRAANQVIDQKEQFIAIYDQVLSRSLNTTALESELSDLEAEINIAAELIEDCIKENAHVALDQDEYQKRYDALVARFDKAKARHTEVTDLIAERMARKHQIEAYLKNLRSREPLTEFRETDWLAMVDYITVHSKKDIRVTFKDGTEIKA

SEQ ID NO: 9778 - protein, 590 aa, synthetic construct
MKTVEKIERKLPVLKTRKRVAAYARVSMESERMQHSLSAQVSYYSALIQKNPEWEYAGVFADYGISGTGTKKRDEFNHMLAECEAGNIDIILTKSIQRFARNTVDLLNTVRHLKELGIEVRFEKEKINSLSGDGELMLSILASFAQEESRSISENVKWGTIKRFKQGIPNGKFSIFGYEWQDDKLVIVPEEAEIIRWMYAEYMKGASRIEIGRALMDRGIYTRQGKPWVDSNVKVILTNITYTGNMLFQKEYCEDPITKHRRKNYGEMPQYFVEDTHEAIIPMDEWQAVQAEFKRRRDLGPFGNKSLKLSAFSTKITCGCCRKHYRHSGKRNTAGEVYYIWICQTKSQKGVSACPSKNIPEKMLQNTAAEVLGLDKFDEDVFSQQIEEVIVIGDDTLTFRFYDGHEVTAKWQSTAKTDWWTDERRKLWGERHKRKDTNPNRNTFYEFTGFIKCGCCGANYRCQSGKRKDGTPTRSWYCTGPRSECRNPAIRDETMKRLVTEILGLDEFDEAAMDAQIESATILDHMVTFHFRDGHIESRDFLDKRHGTPWTEERREKAKKSMKAAWTDERREAMSERIKKIRSEKKWPNP

SEQ ID NO: 9779 - protein, 525 aa, synthetic construct
MARAVTVIPPTIQPITHLARNAVVRRRVAAYARVSTSSEEQLTSYEAQVDYYTRFIQSKPEWEFVRVYTDEGISAVNTKKREGFNQMVRDALDGKIDLIVTKSVSRFARNTVDSLVTVRKLKEKGVEVYFEKENIYTLDSKGELLITIMSSLAQEESRSISENVTWGQRKRFADGKVSLPYSHFLGYRKGDNGLPEIVPEEAETVRWIYSLFLSGKTTGSIANLLTREGIPTPAGKKKWAASTVESILKNEKYKGDALLQKAFTVDFLTKKQKKNEGEVPQYYVENSHPAIIDPAEWKLVQRELERRKAIGRSYSGNSIFSSRLVCGDCGGYFGSKVWHSTDKYRRTIWRCNSKFTGEEKCRTPHLAEEEIKARFLDAFNALVSDKKRLLDECRTMQAALTDTGPLDSEIAALLSEVEVVSELTKRCIEENSTTAQNQATYLERYNSLAERYEAAKTKLVKLQAAKAQREAKAEDIGGFMFELAEYGEPLTEFDDRLWLTVIDTVTVHRNGRLTFRFQTGHEITV

SEQ ID NO: 9780 - protein, 520 aa, synthetic construct
MKRITKIAENASLGKKKIRVAAYCRVSTASEEQLVSLAAQKAHYENYIKSNDNWEFAGLYYDEGISGTKKEKRDGLLAMVAACERGTIDFVITKSISRFARNTTDCLELVRKLLDLNIYIYFEKENINTGSMESELMLSILSGLAESESVSISENEKWGIRRRFQNGTFIISYPPYGYANVDGEMMIVPEQAEIVKQIFADTLAGKSTHEIAKRLNEQGVVTKKGGRWTPGTINGIIGNEKYTGDVLFQKTYTDNSFNRHQNRGEVDQYLMQNHHEAIISREEFERANAVLKQRGREKGNGHDTGRYQNRYGFSGRIYCGECGGKYKRRLHYKPSGQYAAWTCVTHLEDKKSCSQKYITDAALQLAFVTMMNKLVFGQQTVLRPLLQSLRGLNDQSRLLKIEELETAIEKNRDQKQVLTNLMASGYLEPALFNKESNELAAEEDTLRQEKDGLMRSVNGDMVKIEELQRLLRFVSKGTMLTEFDDKTFLSFAERITVLSRKEVVFELKCGLSLRERLVEP

SEQ ID NO: 9781 - protein, 507 aa, synthetic construct
MKRVISYIRFSSEKQSRGDSLRRQSKMVTDWLKAHPEYYLDQDLSFRDLGVSGFTGKHLKGGLGDFLTAIEKGLVKAGDTLLIESLDRLSRQAVDQASELLRNILRSGVDVVTLSDGEHYTRESLKDPLALIKSILIMQRSHEESLRKSERIQAAWNRKKELISEGIKISKRCPAWLKLNDDRKSFSVIPDKVETVKRCFQLRLEGKSIWEIVRTLNAEGHRSMNQYKPGKFGQTSVQDLLKNRSVIGYFTPKGCEEISGYYPAIIDETTFYKVQQLSHYRYGRKPVSDKPMAVNLFKGVIRCSECGHALIITGFSDTRSGIYRCPLRNENRCSAKGLSRKQTDGTLLTLLSRLDRFDSDTTNIIDTLKLHREHISSNIEKLVQLSLEIEDLSAITSKLKQLKNELSQVDADIEKETQRLKSIDVGCLSDCDLTTKAGRIEAQLIIKSAVKEVVLNTAKRRCKVTFHNGKAITLPITETPSEDVTEAIQSLSEVTERGLIDVDEVII

SEQ ID NO: 9782 - protein, 519 aa, synthetic construct
MPSQYCIYLRKSRQDLEAEARGEGDTLARHRRTLTELAEHRGLPVGAIYEEVVSGDTIAARPQMQRLLSEVEAGMWRGVIVMEIERLARGDSIDQGIVARTFKYSETLIVTPFKTFDPNNEYDEEYFEFGLFMSRREYKTIRRRLNAGVQAARREGKYTAGQPPFGYRKIKLKGEKGGSLEPDPETAHIIQDIFRWFVHDGVCISQIKKRLNQMYPPPPGERNKWTDRRISVVLHNPHYAGYTTSTRRPTRKEVVDGQLKVVRLVAKDVQLYEGRHEAIVPREDWHKAQEILASHPAPPVPAGKGQKNAFTGLIVCGLCGRKMQRSFTVDPDGTARAPIFFCPSRSQCDTISHRCDEVERMVLDTLRGWLASYSAGIDPFPQRDLTEQLRTSLKQFEKHLSDLDARVNRAFELVETGVYTPEIYVERKNALDAERVSMMKQITNIEAELKKLENEQAIRQEFLPKLQHVLETYEAAENAREQNQLLKTVIDKIVYTKTVRVTSNNPGNLHLQVYPLLPH

SEQ ID NO: 9783 - protein, 567 aa, synthetic construct
MKARKTDKGKITALYERLSRDDDLTGDSNSIINQKKLLEDYAREHGFTNCVHFTDDGWSGANFERPNWKRMIAGIESGEIGYVLVKDLSRVGRDYLQVGFYTEVMFKERGVRFIAIANGVDSDKRESSEFAPFLNIMNEWYVRDSSRKITSVLRARGMSGKHTNSHCIYGYKKDPNDKDHWIIDEEAAEVVRRIYRMALESKGPYEIARILALEKVERPSYYLAQRGVGKHQSNFNPAERYTWRGGTVADILSKPEYMGHTVNFRTYKESYKDKRSRTTPKEDLVIFENTQEAIIDKETWERVQSLRKTIRRTDTIGAANPLTGLMFCADCGAKMYNHRGGAGLARDWAGRPNGRKRPERDEYNCSRYDLGNQHYDRYCTTHLIRTAVVNELLLEAIKEVCDYALNNEAAFMEQVCSASSERQAKAAKAIRQRKQRSEKRADELSRLIRKLYEDNVNGRLSDKLFEQMLHDFEAELESLTESVTQDEQELDRISWETVNAEKFLALVKKYTDFSELTPAMINEFVEKILVHQAEGKGASRTQEVEIFFNFVGKVEIPHEEIVLTEEE

SEQ ID NO: 9784 - protein, 485 aa, synthetic construct
MKGVIYARYSSDNQREESIEGQLRECKEYAERNDITILGTYIDRALSAKTDNRPEFQHMIKDSAKGLFDVVLVWKLDRFARNRYDSARYKNLLKKNGVKVISARENISEGSEGIILEAMLEGYAEYYSAELSEKVIRGLTDNALKCKYNGGTVPMGYYIDEQQYYQIDPKTAPVVLEMFTKYSEGATMQELVNLLNSRGMRSIRGGKITLNIMNHLLKNRRYMGEYSYRDVVKEDGIPAIVPKELFERVQERLAKNKKAPARHKAEDDYLLTTKLYCGKCGSFMVGESGTSHTMKVHRYYRCVNTKKRKLCDKKAVKKDWIEDLVVNYTMKAIMNDEVMERLIDTLMELQKKESTDLPLLKKQLAETEKGINNMLNAIQAGIFTPSTKQRLDELEETKSQLEVSILQEEMHKPLLTREQIAFFIYRFRKFDVTKREQRQRLIDSFVNAVYLYEDKIILTFNYKDGSKTITLAEVEGSDLSVLGAP

SEQ ID NO: 9785 - protein, 529 aa, synthetic construct
MQAAKNITVIPATRMMHTGLPRNAAVRKRVAGYARVSTDSEEQQTSYEAQVDYYTNYIQSKPDWEFVTVYTDEGISALNTKHRDGFNEMIQDALDGKIDLIVTKSVSRFARNTVDSLTTVRKLKEKGVEVYFEKEQIFTLDSKGELLITIMSSLAQEESRSISENVTWGQRKRFADGKVSIPYGQFLGYRKGADGLPEIVPEEAETVRTIYRLFIQGKTTNAIAASLTRNGVPTPGGKEKWQATTIESILTNEKYKGSALLQKKFTTNFLTKKMKPNEGEVPQFYVENSHPAIICPEEWDRVQNEMLRRKATGRHQNSLSPFSAKLICGDCGGYYGSKVWHSNSKYRRTIWQCNGKFKGVEKCRTPHLYEDDIKAMFLKAVSELMIDREALIDDGRVLHTAFTDFNAIDKEVAEITSEIDVLSGLVQKLVDENASTTLDQTEYRSRYDGYIDRYDKAKKRLAALQEQRQLQELKGDILSGFLFELGELYDLPMVFKDETWNALVDHVTVHKGGRVVFTFKNGTEVTEML

SEQ ID NO: 9786 - protein, 432 aa, synthetic construct
MERSIKQTIFYKPPSEQLKRVAGYARVSSGKDAMLHSLSAQVSYYSEFIQKHRGWTYVGVYADEAKTGTKDERESFQRLLADCHAGKIDMVITKSISRFARNTVTLLETVRELKSLGIDVYFEEQNIHTMSADGELMLSILASYAQEESRSASENQKWRIRKNFHEGMPWNGTMLGYRYENGKYIIVPEEAEIVRKIYSYYTTGLGITAIMKTLNEKHISTRNGNLWCKSSVMKVLRNYAYTGNLLLQKTFRENYLTKRTLVNNGELPQYHAVNTHEAIIPLETFEAVQAEIACRAEKHTRTGSGQKVYPFTGLLTCAICGKHYRRKVTATGPVWICSTYNTLGKAACASKQIPEDTLMTVAAEALGTDTFDADAFYNKITAVRVEVGNTLVFCFKDGIETVKRWSDRSRAESWTPEMREAARKKTQRRGEH

SEQ ID NO: 9787 - protein, 581 aa, synthetic construct
MAYATKAPAASVDDRIVAIYVRVSTGYQVDKDSLPFQKKELKAYCKHILHVDMSRVEIFEDAGRSGKNTKRPAYERMMQKVRAGLVSHVLVYKIDRVSRNLVDFSLMYDDFKYNRVTFISLNEQFDTSSAIGEAVLKIILVFAELERKLTSERVKDIMVGRANDGKWNGARVPYGWDWDSSAGCPVHSEKEAPFARAMYEMYLEVKSTGKIRDYNNAHKIPTKRGGEWTSKTVCDFLRNPMNKGDYRYNYRESARGRKKPATEVVYLEGVFDPLVDPAIWEKVNKIMDINRDKRNTPGSHPIEKNCNVFASLIQCGSCGSGYLVGGKDRRRKNGFTPSLYYCGAKTRAIHCQNLNVSDVKIGPFVINYISAMVRVSNERRKINSLEALEEMLLSDKAVFADIIGLSSDSLNNTFELLTGKSVTGGALWRADLVNHEGATANPAEIESLKNQIQKYDRAKERLEDAYYFSDDGMSEKEYLEKKNRFDAMRVDAENKLKELTETRIASGVDDSAFMKSASAFLLAHKIRAGSHIVYSDLAGMVEEESIKEFFNLVLDHIVVKDRRVTEVVFANGLSHKFIYRD

SEQ ID NO: 9788 - protein, 520 aa, synthetic construct
MAGSSSERQLAYAKRWAEEHGLVLDDSLSLRDEGLSAYHQRHVKSGALGTFLAAVEGGKVPAGSVLVVEGLDRLSRAEPIQAQGQLAQIVNAGITVVTASDGKAYSREHLKANPMDLVYSLLVMIRAHEESDTKSKRVVASIRRQCAGWQAGTWRGIIRNGKDPAWVRLVDGEWHLVAERVEAVRAGLDLYQQGYSATRIVRALADRGLQLTDRGAQSLQIHRLVRQRALLGEKELTVDGETFVLAGYYPALLDQEEWQALQGLNDDRGRRRVKGTLPHVITGIGVTVCGYCGRAMAGQHMMNRVKPDGSLLDGHRRLLCTSHSQRLPCPVPGSISVARVERALMAYCSDMMNLQRLYTGDRSAEPRARLASARERAAAVAVQLERLTDAMLASEAGGVPLTFAKRARELEAQQAAIQVEITKAERDVSAAARTHLDGADAAWRNLAAGVEALDFDARIRARQLVADTFERIVVYHKGVRPDLTPKGFTDVVLLARGGQARLLRIDKQGRWEVAEDLDNA

SEQ ID NO: 9789 - protein, 582 aa, synthetic construct
MSSTRRKRPGKAVQKLSRPKKVAIYIRVSTTYQVDRDSLPMQRKDLAAYSELVLGISDYEIFEDAGYSGKNTDRPAFQEMMQRTRKGEFSHILVWKIDRISRNLLDFAEMYEELQELRVTFVSKNEQFDTSTAIGEAMLKIILVFAELERNMTSERVTAAMISRANNGQWNGGRVPFGYDYDPEKKEFSIREDEEKICQLLKKDYLESKSLTHTARFLNESGYKTRAEAEWSPTAVWIIASSPFYAGIYRYNRYKGVEHRVENPEEEWVLVPDHHPAIFTLEEHEAMLQLLKKNLRSFENPIGRPHGTDNIHLFSGIVYCGKCGSKMTSTPGRLHADGYRTSIYSCPKRRKTKDCDNPSVNDLIIGEFVMNYILNMLNAKSGFSKIRNPEALEKKLLFGSTFADVEHVEENGLNEFYNLLSRYGSDDSYTFAIRKPRKKRAVVDPEIEKLRREKEKHERALKRLQNLFLYSDSLISEKEFIIKKSEITKNLEDVNSMLGMVSRGADSVLTDEEFVKQASHLLISKELSDRQYIYFKKLAQSVSPEILKTYMETILDSIMVIDGRISSIVFRNGLTHKFIYKA

SEQ ID NO: 9790 - protein, 574 aa, synthetic construct
MEFAKLYGNRKLKAALYVRVSTLYQIDKDSLPFQKQELINYCKYALNIDDVEIFEDAGYSGKNTDRPAYQRMMAKIRRGEFTHVCVWKIDRISRNLLDFAGMYEELKKHRVTFVSKNEQFDTSSAMGEAMLKIILIFAELERKLTSERVTGIMLDRAAKGLWNGARMPLGYRWSEEAKYPVIDDAESVTIHFIYDKYEEVKSCLQICRMLNNNNIKTKRGGEWTSKTVCDIIRNPFYKGTYRYNYRESARGALKAESEWIVVPNNHPAIVSEEQWEKCNKIMDANKATKDTAKFRPRRYVHVFAGVLKCADCGGGFSSNKDKERSSGWRPSAYRCNRATGMRDCPALGVSDVVLGPFVFNYIANFVRLQRKGGPYTAESIEKALLSGKCFSEVAGIDSKGIQDTLKALGYANTAGPDFVPDLGAQDTTDGDSGGFDIEILQQEEEKLKNALQRLLDLYLFDSAAISQQIYITKKEELEKNLKGVQAAIEKSMDDSGIRPDALNTSFMKKASAFIVNQRILSKKEIDFEELACKCDADVMKDLISATIERIDIRAGRIEAITFKSGLVHRFNYKE

SEQ ID NO: 9791 - protein, 466 aa, synthetic construct
MKRAALYIRVSTLEQAQEGYSVGEQKERLIAYCKAKDWLIADIYVDGGYTGSNLKRPGIQKLMAETDKFEMVLVYKLDRLSRSQRDTLYLIEEVFRPNDVDFISMQESFDTSTPFGKAMIGLLAVFAQLEREQIKERTWMGRVARAKTGLYHGGGHIPIGYEYSDGKLVINPYEAEQVKKIYEWYLSGSSLKAITDRLQDEGYTNKYSSYNSWSSVRNILGNETYTGRLHFGDIVVENAHEAIISDEQYKAAQVLRGKKQELYGPAFQSKHMLTGLMFCGKCGGRYYLRNSGKYSYYACYSRTKQMKNMIKDPNCMNKIWKAPELDALVDSKIRELLQSPKMAAELAASRPKKTPAVSSNANIEKRIRDIDKQISKLMELYQMDDIPAELLGGKINKLYGERTALQETLLPDEEPSAIPFDLVKELIADAAQIWDYADELQKRRILQSLISKIVITEDDVEIEWAF

SEQ ID NO: 9792 - protein, 456 aa, synthetic construct
MRKKEAATSLVRVALYIRVSGEEQKMHGLSLEAQQERLEKFARERGWLISGIYIDAAKTARKHLHKRTEFQRMIEAVKRNEVDILLFCRLDRWFRSVADYYKIMEILQAHNCEWLTTDEEYDTTTANGRLYINVKLSIAQNEADIDGERIDVVFDSKIAHGTVVSGNCPFGFRVNEEKRLEILPDEADIVRDAFNRYEATVSQRGTIKYIRERYGVNWCDATFRRMLHEKLYTGVYDRGGRVNENFCPAIISHEQFDHVQKLTSKNARSSPSGKVYIFTSVLSCSECGHKLVGYYTRGYIYYRCNQHFQRGRCPHNHSVREDVIEAWLFSHLEEEIDRCQLEWEVQAAARKRAITSTDKAALKRKLSKLKELYVNELIDIEEYKKDYEIYTAALRQLPDPAQEAPPDFAAVRKYLTADFKAIYETLTREEKRTLWRSVIEEIKVDNAGNVTGIIFG

SEQ ID NO: 9793 - protein, 533 aa, synthetic construct
MQTIHPVPAKYCAYLRKSRADRDAELRGEEETLKRHRRLLEEFAAANHMTISKFYNEVVSGETIDSRPMVRQLLTDVEAGRWEGVLVVEVERLARGNTRDQGIVADAFKYSQTKIITPSKTYDPENEFDEEYFEFGLFMSRREFKTINRRLQRGRLASVEEGKFVGSTPPYGYRKVKLPHDKGYTLEIVPEQAQVVRRIFQWYCSGEPQPDGSLRLYGTDAIAARLDALGIQPVSSRSWSKATIRDMLQNETYTGIIVWGREKEIKVPENGKVARIRKRSTDYKRVQGLHPAIIDPALFACARKRLQEMRRRTAPASSGLQNPLSGILRCGKCGRLMTRLAPGTRNPYSTLKCPGRSCDNISSPLFLIENQVLAFLQEWLGSYSLERSFSPDTPLTGELQEKELTLKKVNTDITAHWNQREKACSLLEQGVYTVELFQQRLKTLEHRISLLETNRKELLSDIEQLRRLQKEQDNYLPRIRHLLETYHTNTPAVNNDILKELIDRILYEKSQPNRRGQLNRCNFSLDIYPRLPK

SEQ ID NO: 9794 - protein, 480 aa, synthetic construct
MKRAALYIRVSTLEQAQEGYSIGAQKERLLAFCKAHDWLVADFYIDGGYSGSNLDRPGIQKLIAETGSFDLVLVMKLDRLSRSQRDTLYLIEDVFLPAGVDFISMAESFDTSTPFGRAMIGILSVFAQLEREQIKERTFMGRVERAKEGLFHGGSYYPIGYDYGADGHLAVNEYEAAQVRKIYEWYLDGSSPEKIAERLREEGYTNRYGSWSETSGRISVLRILTSDVYLGTIRFGDVVVENAHQAIIDRESFEKVAEVRKKRQEIFGDSAYVSKYLLVGLLWCARCGARYAVKHNYGGYKYYVCYSRARTVKRMIKAEHCDNKNWRLDELDTYVEREVSRLLFDPGYYQALLKRKKKAAAETGPSDADVIRSKVADLDKQIGRLMDLYQDERMPVDVVSSRIDKLHRDKLALEEHLAAIVPPKPKRDYDEDAFSGLLADFATVWESAGLEERREIISALIKKITLDGDRVDIEWAFLED

SEQ ID NO: 9795 - protein, 525 aa, synthetic construct
MDLLAYCRYSSENQRDGYSIEAQVRAIKEWAAREGHTIRKFYIDEAKSGTTDDREEFQKMIAESAGSGCKGVVVHKLDRFARDRYASAVYRHKLKENGLRVISVLEPLDDSPESIMMEAVLEGMAEYYSRNLSREVRKGQKEAALKAQHVTGPVPYGYRVDEHHRYVIVPEEAAVIREIFRRLDGGESIADVTRWAVTHGIKTHKGTLFNELAITRLTQQPILVGRFSYGVNSKDGQPPIIIENAVEPILEPSVFWRQYEKTTARKKGPRSRLKEEEYLLTGYLYCEYCGSHLYGFKSKSTFPLKSGKMQTYEKYSYRCATKGSRGSASRRLDPEYVPAHCDLKNIEKFALEEFVFGAINYCLFSGDTSDWIVAEMLVRSKKKKPADQKKIDGYKSELEKIKKQRDRLLDLYLSDGLSKEAYSAKADELNARAEFLDREINRLSPDVPIGLTAEDVRKRLASFVESANADSPEYKKRLLATYVERITVSNERICIYFKFPIPGLGDKLEKDFGDYFVRKKSNTPL

SEQ ID NO: 9796 - protein, 503 aa, synthetic construct
MNEKGSKMEIRKIPIKTKDKPRVCAYVRVSTEKDKQMDSFEFQSKYWNERFSNDADVEFVGLFTDEGISGKAMRNRKGLNTMLDKARNGEIDRIYTKSISRFARNYTENIEVIHEMRDMGIPIIFEKENINTLDPKCGLMLTVYSSLAEQELISMSKNQIWSARKRFADGVVDISKLYGYDIKDGKLVVNPDEAELVKHIFNLYLNGNGIVKICMILEQEGYKTLNGSSKWCKSTINSILKNEKYIGDSLLQKCFYDTVKHKTLNKGELPQYYVEDTHEPIITKEDFERVRSIFAEKVKRYHPAHTKGKKYVLTGKLVCGICGDRYARKVCAKGTSYATIKWSCRTKDQRTKAACASNDIKDEVLKRLLIEAYNESLDAKIVTAETANNEEILRKLLAAEDELRKLHIKGYVSDDTYKQSLEELLKKINLQEDLIRVVKAQSIDTSKYTKSAAFIDDMADFLIKATVKDWTVTFEFANGYITTKTYTNGRAGNVNGKLCKHKT

SEQ ID NO: 9797 - protein, 541 aa, synthetic construct
MENSANTKPKIRVIPAKPRQEIMGRQSVNGEIPKLRVAAYGRVSTDHEEQESSYEAQVAYFTKYITEHNGWELAGIYADPGLSGKNIKRPQFVEMVKACERGDIDKIITKSVSRFARNTLDCVKTVRKLKEMGIGVYFEKENLDTLQESSEFVLTIMASLAEEESRSISNNIRWSMKRKFGRGEVMMCTAHFLGYTREKNGTVLKIVPEQAITVRRIYAEFLDGYSLTEIANGLMRDKILSPSGQETWHPSTIKSILQNEKYKGDCHLQKTYLPDFLSLRRVKNEGFAESYYVEDSHAPIISKETFDMVQQEFANRNGLRCSKQSGRGKYSGKYAFSGMIICGECGETYRRHQQYNQYKKYYIWVCKRHENTGKDNCSAKPIKEETIEKAFVRTLNGLIENREEMLDKLTNAVVSEISDDCESEMTDIDKMIEIAQNGIMEKLKEMQDGIITAEEYERTTQMLMREIDGLTLQRAELLTEQSKVQLAEYRVDAVRNVLNNGKILEEFDKAIFKSLVKRMKVIGNGEIEIEFECGVKITETL

SEQ ID NO: 9798 - protein, 438 aa, synthetic construct
MERKVKLVRPTLPKAAQIKRVCAYARVSSGKDEMLHSLSAQVSYYQRLIQSRAAWRFCGVYADEAETGTKDSREQFQEMLAECRKGNIDLIITKSITRFARNTVTLLQAVRELKDMGIEIYFEEQNIFTLSTEGEVMLTILASYAQEESRSASENQLWRVKRNFEEGKVWGMQIYGYKAVDCQLQIIPEEAEVVKRIFAEFLAGKGKDAILRGLNRDGIKPRRAERWQRTSIHNILLNYAYTGNLILQKTFREDFMTKKSIVNNGRKPKYHCQETHEPIISMETYLQVQAEIEKRNANLPKKAPNMMHLFTSLIRCPYCGVNYRRCKGYSSWLWRCNTFVVHGKQACSESKQIREDTMVSVTEDVLGITGLNYKNIHDAIDFIDAYECNRLVFHLKNGEVVERVWKDRSRAESWTPAMKLKAKIKEAERQEELKRRVK

SEQ ID NO: 9799 - protein, 524 aa, synthetic construct
MPKVTVIPATKDFYTGVDNNTFKKKKVAAYARVSTASEEQETSYDAQVDYYTKYIQGRPDWEFVKVYTDKAITGTNTKRRKGFKEMIDDALAGKIDLIVTKSISRFARNTVDTLVTVRKLKEKGIEVYFEKENIYTLDSKGELLITIMSSLAQDESRSISDNVTWGQRKRFADGKVNMPYKRFLGYKKGANDLPEIVPEQAEVVRLIYSLFLEGKTSYGIANYLTEQQIPTPTGKVIPWKSSTIESILQNEKYRGSALLQKKYTVDFLEKKMIVNDGKVPQYYVEDSHPAIITPAEFEIVQGEIQRRKANKGKYSCCAPFASKVVCGDCSEFYGQKVWHSNSKYRKIIYRCNGKYHGEKCATPTLTEEQLKEGFLKAINSLIGIKESLLEDCREMQAVLSDTAALDEELKTVTDEFMVVREMLRKMVEDNSRKVQDQDEFWAKYNPLDERAKKADARIQELMAQRTQRLQKAETIGAFMFELHERDEAVEAFDNKLWFMTVDKVVVKRDGKLVYHFRNGLTIEV

SEQ ID NO: 9800 - protein, 510 aa, synthetic construct
MDESKKRTVAYCRVSKNYGQEVSLESQVRYFNEVMDADPLMVNCGCYIDNGISGRFIGARKDFKRMMQDAELHKIDFILCKSIKRFGRCTLDTIRAVTRLTELNIPVYFEQENLHTINDRNNILLVTMAQIAQEEYEEKSEAIKWTFKKRFEQGQLIVNPNTPLGYKFNEDGQLVVVPDEAKIVKRIYESYAKGIGTAEIARRLNKDGYTTAHGRQFLASTILYIIKNEKYKGDAMLQKYVVADGKKIKNMGEAQQYYVENDHEPIVSRELWDTCQRMIERHKTSEYVRAENREFDPFKGKIVCGKCGHNFQRIKRSDKKTRYGCYLKSSRGMNACRSESVKLETLERVFVAIFNMIEGKRKTLMEMQVTDEVRELDNEITRMLNQEKTYLQLQARGLLHGEIEEEYRKLLNRIVKAEEQKKAMLETNGQNVKAQNDLKVYNSAVMRTGKLTEFDEKVFEQIVRRIVVVDREHLAFHLASGEVAYVSIIYWATSEDEIQSIDIKAVTEVC

SEQ ID NO: 9801 - protein, 535 aa, synthetic construct
MKDERKIRVIPATNSRRLFVDDDSPIIMQKKKVAAYARVSTGREEQQTSFKSQMEYYTRLILSNPNWEMVGVYADEGISGRSMKKRAKFREMIKDALDGKIDMILVKSVSRFARNVLDSLTIIEQLREKRIPVVFEKEKLNSLQDDKRTNFMLTMYASIAQEESDSLSDSVNWGIQRRNEQGFVRKAKTYGYDVLNHEYVINKEQAEVVRLIFELYLSGLSFRLISEELKRRNIKSPSGLDRWDESTIEGMLQNEKYIGDALLQKTIVRPWVQKKRAASADSQQYYVEDDHEPIISDEMFERVKREMEYRRSLRSCTKSGRGGYSSKYPLSSKVYCYQCGCIFRRHGYQCGDKYIKTWTCSNHKLNGNSVCTQLAVKESELYDSFVRVVNMLIEDKEGMVKKITESIQETLTERLADQANDELAKKIASKERQLVKAVKTAQTAEDLIGGEREREQLITEIEALKQEQKKRSLQVVDLEHTNDRFQALWDMVAEKGKLTEFDGDMFRKIVNRVTVDGKELTYDFGCGITITDSIE

SEQ ID NO: 9802 - protein, 507 aa, synthetic construct
MSEQRYRTAAYVRVSTEDQTVSLESQIRHFNEVMDTTPHMVNCGIYVDNGISGRYLNRREAFLQMLTDCELGLVDRILCKSIKRFGRNTLDIVRAIARLTELKVSVYFEQENIDTLKDRNNIILVTMAHVAQEEAEDVSESVRWGFQRRYEKGMMILNPNTPYGYKLEYGELVPDPVQAPIIKRIFEEYADTGHSTLICQKLNREGIRTSTGKTFKPSTILYYIKNEKYKGDCLMEKRVLLNGRAVKNTGQITQYYVENHHEPIVSRELWERANEVRQKQTKVDVFQPKGDNPLEGVPIRCGKCGHAYTRRFTNGQQYRFVCGGHDEERFRKCESPSVRLQTLQNIFIRIFNDLRGTKRRLVEMPLSGELVAFNAELDRLLAQERTYLQLQAKGLLEGPVEGEYNRLLNQIVRAEDRRKELLRTNAMNIEAENDLRRYNKVIMRPTELTEFDPEIFKAVVKKITIYGRENFEFLLTNGQVAKVKTYYYHNKEDEIDEVVYEKVWGKK

SEQ ID NO: 9803 - protein, 562 aa, synthetic construct
MKRQKAALYVRVSTRYQVDKDSLPFQRKKLKEYCKLLEIDKFEIFEDDGYSGKNTDRPRFQEMMEHIRAGGFSHLIVWKVDRISRNLLDFSTMYKELKDHHVTFISMNEQFDTSTAIGEAMLKIILIFAELERNMTSERVTGIMLDRAESGLWNGGLPPLGYKKDPEKKNLIPEPEEKDKVKMIFDLYEKYHSCHKVARFLQQNGIKPKYHTEWLPEYIRRTLRNEVYIGTYTYNRCEFHGPEKPKSEWIVKENNHQAIIEKDQFIRCNEIMDKNASSRDVSEIRQTRHIHVFGGKVSCNLCGGNMNAAKDKQRENGLRPSVYRCGRRARQMDCDNKRMISDLSLGPFIFNYAANLARIQKDCKNIDSLEKLESALLAGPEFDNVRLSPESLEITFSMLRDKNISKGAYVPDIGESGAQEGTSEDQLVILKRERDKQKNAISRLTELYIYDPDAITKEEYSERKRELTAKIRDIEKRISALNDGGGSGSADLSFIKKASAFLVAQHINSKNHIDYVQIAVDLDAGILKDFVDQIVNEIFIQDGRIVRIRFASGLEHKFLYDE

SEQ ID NO: 9804 - protein, 509 aa, synthetic construct
MAQKKAAPLIPAVIYARYSSSGQREESIEGQLRECHDFARRNGLTVVGEYVDKALTGRSDKRPDFQRMLRDCERGVFQAVICWKMDRFARNRYDSAMYKYKLKRNGVRIFYAKESIPEGPEGIILESVMEGYAEYYSENLSQNVKRGYYDSALELKTLGQTVLGLRKGPDGRFEIDPATAPIVRRIFEEYAAGERAKDIYTRLNDEGYRTSRGGLFNKNSLRRILQNEKYVGVYEFRDIRVEDGIPAIVDRELFDRCQGMVEKHHRAPAADRATSFLLTAKLFCGHCGEPMTGDGGTGRSGRVYNYYTCNGRRVHKCQKERASKEWIEQLVVDELVDLIHSDDFVNEVADKCMEFQQREKDQSALRALEARQKENEKAIQNMLAAIEAGIITPSTKSRLMELEAERGQIEKGIAQQLIAEPTLERDQVVYFLERFRDGDVSDEGYRAFLVDTFLNSVYLYDDDKLVLVLNYTGERCKVTLDLVESAVESGGLGGSCFAPSSALMYSPEL

SEQ ID NO: 9805 - protein, 527 aa, synthetic construct
MVVQKKVTTIPASLTRFTATPITELKKRRVAGYARVSTDHDDQFTSYAAQIDYYTNYIKSRDDWEFVEVYTDEGITGTSVKHREGFKRMVADALAGKIDLIVTKSVSRFARNTVDSLTTIRQLKEKGIEVYFEKENIWTFDGKGELLLTIMSSLAQEESRSISENCTWGQRKRFADGKVTVPFNRFLGYDRGPDGNLVVNPEQAVIVQQIYAMFLQGMSYHGIAKKLTADGIPTPGGKDKWSISTVRSILSNEKYKGDALLQKSYTVDFLTKKTKINEGEIPQYYVEDNHEAIISPEIFAMVQREMTKRGRGKKYHSSVHAFSSKIRCGHCGSWYGSKVWHSNSQYRKTIWQCNHKFDGEERCDTPHLCDEDIQRLFLSAANKLLVDKAEVVANCREMMDLLFNTTELEAEQATLLEETQLISDMVQQTIYENAHVAFDQTEYQKRYDNLTQRFETVKQRLETVIAELDRMQTQRADIEAFLESFEALPDTLTEFKLKNWHSLVDYATVYSADDIRFTFKHGQKVQA

SEQ ID NO: 9806 - protein, 598 aa, synthetic construct
MRKINKIEPLMPSLPTRKKVAAYARVSMETERLQHSLSAQVSYYSELIQSNPEWEYAGVYADDGITGTKSTRAEFQRLLQDCEDGKIDIILTKSISRFARNTVDLLETVRHLKELGIEVRFEKEHINSLSGDGEVMLTLLASFAQEEIVSLSNNVKWGTRKRMEQGIPNSHFRVFGYRWEGDQLVIVPEEAAIVRRIFQNFLDGKSRLETEREFAAEGITTRDGKRWVDSNIKVVLTNVTYTGNLLLQKEYIEDPLTKKRKKNRGELPQFYVEDTHEAIIDKETFDYVQAEIARRKELGAFANKSLNITCFTSKLKCCRCGCSYVRNQRSNRTKHTSTYDDTIVAWGCGTTKKKGGRCSNKDIPERVLREACATALGLEEFDEDVFLERVDHIQVLEGQVLEFHFYDGTTALQEWVSTAKKDCWTDEHKDRQREWMKNYMANASDGRFSEFTTRIRCEHCASTFRRNTQPSKSTNGGKMHYWRCPTSGDCVTTGIREDRLKDITASVMGLAEHDADAFKEQVEYISVSDDMKLTFHFFDGREPVVQYNTKRQGTPWTEERHKKFSDSMQGKYTEERREAMSQRMKQIRSEKHWSSKRK

SEQ ID NO: 9807 - protein, 580 aa, synthetic construct
MSRNRKTVKSKSGLSRAKKVAIYIRVSTMHQIDKDSLPMQRKDLIAYAELILGISEYEIFEDAGYSGKNTDRPAFQDMMYRIRNGEFSHVLVWKIDRISRNLLDFAEMYEELQELRVVFVSKNEQFDTSTAIGEAMLKIILVFAELERNMTSERVTAAMISRASNGQWNGGRIPFGYDYDPESGEFSIREDEAQVCQILKDDYLENKSLTHTSRLLNERGYKTRAGVEWSPTAVWIIASSPFYAGIYRYNRYKGTEHRTENPEDEWVMVPNHHPAIFTTEEYEVMASMLKDNSRSFSNYTDRQHTSSKVHLFSGIAYCGKCGNKMVSTPGKLSVDGYRPSNYSCPKRRKTKECDNQTVNDSVLGEFVINYILNMLNAKKEFSGINSPGELEKRLLFGSTFSGVEHIEENGLHEFYNLLARYGSDNSYSFSIRRPRKKKAAVSPEVEQLRKEKERQERAMQRLQELYLYSESAMSEKDFIIRKSEISKRLGDVSAKLGLVSRGTESSLSDEDFIKQASHLLISRQLAERKYIYFKEFAKSVSPEILKTYLDTILDSVTLTDGHVESIIFRNGLTHKFIYKA

SEQ ID NO: 9808 - protein, 526 aa, synthetic construct
MPYCIYLRKSRADAEAELAGEGETLARHEKSLLALAKRQKLPITKIYREIVSGETIAARPVMQELLQTIEARQWEGVLVMEVERLARGDTMDQGVILNAFKYSDTKIITPAKTYDPNNEFDEEYFEFGLFMSRREYKTILRRMQRGREASVSEGKFVGSIPPYGYTRVKLPKEKGYTLAVVPEEAAAVKLAFELYAYGEVQEDGTIREIGRPSIAKRFSDMGLKNRKGAAWATSSVTRMLQNPVYAGNVVWKYRQEKKTTENGKIKITRPVNPDFLCAKGLHEPIVSPELWEAVQEKMKKSATSPLPPKSAMKNPLSGLVRCSFCGNLMQRRPYQKSSQPATLICATHNCPQISAPLYMVERRILEALEEWAEQHNATWDTAAPQNFAAKTDLLKTSLQSAEKELDTLEMQFEKTFELLETGVYSSEVFTKRNETLSQKISEAKTTIAGIKKEIAALQKMQMEQTSFFPKIRALLETYDSLPPAAQNRRLKEILDHVEYHKTVNGRWHNSPDSFEIQLFPAISKDF

SEQ ID NO: 9809 - protein, 496 aa, synthetic construct
MTHKKRAVAYVRVSTKSDAQTHSYEYQNEYWQQVIKANPLYEFGGIYADKGISGRAIAKRPQLLKLLNDAKNGKVDVIFTKSVARFARNTEELLTMVHELRDNGVKVVFEKENIDTFNPNSEIFLTIAVAIAENDLQIYSDNQRWSVREKYKNGFYAIGSGILGYSMDNSTNTLKIVPKEAETVKRIFDLYHEGNGVNKIAQILMDEKRENKVGSIEWNKNSVMYILKNEKYKGCSLSQKTITNQGVTIKNKGDVPQYYMENVHEAIISPETFDKVQKMIREHPMKKLVGQIVPHYPFTGKIRCGQCMHGYTHIIQNSNFAWQTGVWVCQHQHSYGKKTCDCTRIKDSVLYEKFVECYNEFIKMKYENTNLKKAKQHLQWLLSQEQELTALKVNGMIGIEAYNKEILNIRAEIDNVKKSILELDLKDINKSDFKPISEFSEEKVEKFIDKVIIHKCVVTFIFINGVSISRPYTNGKSGNKIGWLDRKKEKENKEIE

SEQ ID NO: 9810 - protein, 531 aa, synthetic construct
MMETKKRVVQEIPVLYRTNMQTITKKEVVCGYARVSTDNEEQEDSFERQVEHFTNVINSRSDWVFGGVYADPGITGTRADKREQFQNMMNDCRAGKINRILVKSISRFARNTVDTLMYIRELKELGISVYFETQNIDTMTPGGEVLITILAAMAEQESRTISTNIKWAYQKRFKEGVVLLNFQNTLGYTKAGDEYVVVEEEAEIIRRIFREYIGGATYKQIADKLMADGIKTGMGKERWSDSSVQGILKNEKYTGNAILGKSFKPDVLSKTRQINKGQATSYYVQNSHPAIISQEIFDMATAERERRRSLRSSTKTGDGKYTSKYALSGLLICGNCGSKFRRFRRKLADGEKVITWVCINHQNNIKDCTMRPLREVDIIEAYKQAVEQLLGDVSNIIDIVNNNIKQELKSNVNEDLEQIEQQIIIEQNHILELFQRKRNNTIFQVEYDRDYKAHSEVIIELKAKESELKKENLVAEIAKKRMDDIVNILTSEGVDYTSPIIMKAMVECIRVIDKHHIELQFKCGINIHTEL

SEQ ID NO: 9811 - protein, 562 aa, synthetic construct
MAGEVEVIKAVEGNGIRRRNMVGNGLSIERKKVAAYVRVSTDGEEQLQSFQSQKTYYQEKISKEKEWVMVGIYADEAITGTKTVKRDGFLKMINDCMAGMIDVILTKSISRFSRNLVDTLQYVRMLKEKGIAVIFEKENINTLSMESEMALALLSTLAQNEVESLSANVKMGIKMKMKRGEMMGFNGCLGYDYHPEDKSITVNPGEAESVREIFDMYLRGYGAPTIAKELTRLGRKNKKGEVKWTESGIRTIINNEKYKGDLRLGKTFTVDPISKRRLENMGEEEQYYIKEHHEPIVSPEIWDAAQEIKKSRYRKNAMSIEGTRKKYSRKFAFSSMCECGFCGKYLTRRAHNQTTTQTKPVWKCRTATNFGIENCPHSKSIDEAIIENAFIEMFHLLADNFDDVLDLVIHSVEETLSNDESAIKLQKVNKTLDLLESKRKKLTDMLLDDKITKEAYDAKYNELTRKINQTKGERSLYSSNVEAQKHVSQRMKEIRACITEADMLDKFDRAVFESIVEKVIVGDMNEDGIVDPYKLTFVLKGMDDRVVPDAKRRYKNLNKKIG

SEQ ID NO: 9812 - protein, 523 aa, synthetic construct
MAKVTTIPATISRFTATPINEKKKRRTAAYARVSTDSEEQLTSYSAQVDYYTNYIKSRDDWEFVSVYTDEGITGTNTKHREGFKRMVADALAGKIDLIVTKSVSRFARNTVDSLTTVRQLKEKGVEIYFEKENIWTLDSKGELLITIMSSLAQEESRSISENCTWGQRKRFADGKVTVPFKRFLGYDRGPDGNLVLNKDEAVIIRRIYSMFLQGMTPHGIAARLTADGIKSPGGKDKWNAGAVRSILTNEKYKGDALLQKSYTVDFLTKKKKVNEGEIPQYYVEGNHEAIIQPEVFELVQQELERRKSSRGRHSGVHLFSGKIRCGQCGEWYGSKVWHSNSKYRRVIWQCNHKYDGEEKCSTPHLTEDEIKAMFVSAANKLIGKKASIISPLRASLDVAFDISALEAETAELQDEIMVVSDLIEKCIYENAHVALDQTEYQKRYDSLTARFDTAKARLEEIEAAIADKKSRRAAIEAFLDTLAQADLMEKFDPALWCGLVDFVTVYDRNDVRFTFKDGREVKA

SEQ ID NO: 9813 - protein, 588 aa, synthetic construct
MRIVNKIEAKTPQMPRRKRVAAYARVSMESERLQHSLSAQVSFYSSLIQSNPAWEYVGVYADNGITGTKAEAREEFNRMIADCEAGKIDIVLTKSISRFARNTVDLLNTVRRLKELSVSVQFEKERIDSLTEDGELMLTLLASFAQEEIRSLSDNVKWGTRKRFEKGIPNGRFQIYGYRWEDDHLVIHEEEAKIVRLIYDNYLNGLSAETTEKQLAEMGVKSYKGQHFGNSSIRQILGNITYTGNLLFQKEYVADPISKKSKINRGELPQYFVENTHEAIIPMEVYQAVQAEKARRRELGALANWSINTSCFTSKIKCGRCGKSYQRSNRKGRKDPDANYTIWICGTRRKTGNAQCQNKDIPEQMLKEACAEVMGLDKFDEIIFSEQVDRIEIPAPNEMVFYFKDGRIVPRHWESTMRKDCWTDERRAAKGRYVQEHQLGPNSSCFTSRIRCDSCGENYRRQRSRHKDGSFDSVWRCASSGKCQSPSIKEEVLKKLCAEAMGLESFDEMAFREQIACIHIMAPFQLSIRFFDGHVFEAGWENKRKMPGHTEQRKQHMREVMIQRWREKRGESNDDTGNDKPIHGNADQ

SEQ ID NO: 9814 - protein, 518 aa, synthetic construct
MFTVGIYPRKSVYRDNSDSVKVQVQLCKDYAGIIFKDREITFRIYDQDEGFSGKNTNRPGFQELMGDVKNDALDVVMVYKLDRISRNVQEFSAMYEIFEQHNVSFVSVKESFDTTTPMGRTVMYILAAFAQLERENTSERVTDNMRALGAAGKWTGGKLPTGMTSIRRQIGEKEHSYLMVDGDKIRLVKMLYDLILQGYTITKTERHCRDHGIRSQTGKYLNTSQIYNIITNPVYCQNSMEAYYYFQDLGCSLPDPALFDGRKGLIGYGKTKTGRASQKKQEKSDWSIAIGIHDPVMPAADWIAAQNRLGINKMVRTAKYECGILKGVIRCQCGARMDVRTYQKNGHIFSYYYCTDMFRQGKSKCNTEYIRIEQVEEAFLKQLRRIRFNPDGFKLRQDAGDSLQSTSSLKDEIKQTAAAIDNLTAALMNTSDSPAAAYIISKIEELDKQKKALETDLRKASLRDASARSLRETEHYIYQNICYLLDNFDSIEYTGKNELIRKIIRKCILKDGNLHIIF

SEQ ID NO: 9815 - protein, 503 aa, synthetic construct
MTHKKRAVAYVRVSTKSDAQTHSYEYQNEYWQQVIKANPLYEFGGIYADKGISGRAIAKRPQLLKLLNDAKNGKVDVIFTKSVARFARNTEELLTMVHELRDNGVKVVFEKENIDTFNPNSEIFLTIAVAIAENDLQIYSDNQRWSVREKYKNGFYAIGSGILGYSMDNSTNTLKIVPKEAETVKRIFDLYHEGNGVNKIAQILMDEKRENKVGSIEWNKNSVMYILKNEKYKGCSLSQKTITNQGVTIKNKGDVPQYYMENVHEAIISPETFDKVQKMIREHPMKKLVGQIVPHYPFTGKIRCGQCMHGYTHIIQNSNFAWQTGVWVCQHQHSYGKKTCDCTRIKDSVLYEKFVECYNEFIKMKYENTNLKKAKQHLQWLLSQEQELTALKVNGMIGIEAYNKEILNIRAEIDNVKKSILELDLKDINKSDFKPISEFSEEKVEKFIDKVIIHKCVVTFIFINGVSISRPYTNGKSGNKIGWLDRKKEKENKFYSQKQKTSI

SEQ ID NO: 9816 - protein, 537 aa, synthetic construct
MKQKKGPAADIRGKGESEESITRKARAALYLRYSSSSQTEQSIEGQNTVCTDYCDSLGIKIVATYIDRAKSASHDTAKRTEFLRMIEDAKNGAFDTVVVYKLDRFARNRYDSAIFRRKLEDAGVKLISATEAISSTPEGIILEAVLEGVNEFYSADLKQKVERGINESIKKKKNLGGTTPLGYQVVNGHLEPDPKTAHIVQELFEMVADGRPYSEIISVFNSRGYKTASGNKFTRCSFYKIMHNKKYLGYYCYKDIEEPGGQEPLVSPELFEKVQRRLNMKGKKKSIADPYLLTGKLFCGHCSAPMVGESGKSATGKVHKYYKCAERKAGSCSKKPVRKNTIEDLVISETQSLLTGERLEELVSMVMEELKTIETQSRIPAMMEELKEINAKLENAVNAVLAGNNSAVLAKMMASLEEDKRILEDAIEDQRIKERIQKLDAGQIEYYIRNLATIDPARLIDTFVERIYLYDDAESGEKNRRLKIIYRLSGEPETEVDCSENVSLSPPWKTNPNTDVTGLIINGNHLWFVIIRDLGEI

SEQ ID NO: 9817 - protein, 503 aa, synthetic construct
MAQKKAAPLIPAVIYARYSSSGQREESIEGQLRECHDFARRNGLTVVGEYVDKALTGRSDKRPDFQRMLRDCERGVFQAVICWKMDRFARNRYDSAMYKYKLKRNGVRIFYAKESIPEGPEGIILESVMEGYAEYYSENLSQNVKRGYYDSALELKTLGQTVLGLRKGPDGRFEIDPATAPIVRRIFEEYAAGERAKDIYTRLNDEGYRTSRGGLFNKNSLRRILQNEKYVGVYEFRDIRVEDGIPAIVDRELFDRCQGMVEKHHRAPAADRATSFLLTAKLFCGHCGEPMTGDGGTGRSGRVYNYYTCNGRRVHKCQKERASKEWIEQLVVDELVDLIHSDDFVNEVADKCMEFQQREKDQSALRALEARQKENEKAIQNMLAAIEAGIITPSTKSRLMELEAERGQIEKGIAQQLIAEPTLERDQVVYFLERFRDGDVSDEGYRAFLVDTFLNSVYLYDDDKLVLVLNYTGERCKVTLDLVESAVESGGLGGSCFAPSSAS

SEQ ID NO: 9818 - protein, 462 aa, synthetic construct
MEKLLRCAIYIRVSTWEQATHGKSLTAQKEYLESYAEGHGMTVVGVYADEGQTARKELKKRKAIHTLLADVKADKVDVILFWRMDRWFRNVSDFYKVQDILDAHGTRWVDVGEPNINMETRDGRLSLNLALAIGQNEVDTTSERIKFTVANTIKNGGMVWGEVNLPLGYTIAVIDGKKRMVKDEKTAPIVEEFFSYFMKHQKKRQTIIHIQDTFGIPFSYSMLRTMLTSEFYIGKYRENPNYCPAYLTTEQWERIQAIAKRNIKTTPSGRIYLFSGLMHCPLCGQKLAGTGCQSVINRKTGEKRTYCYYRCNRALIDHICTYTHRVSQNLLEDYLLQNIKAEYEKYQQSYMIKQKQKIKKGKNPERIREELERLNILFQKGRVSYDYYEKEYARLEKELSETSIIDFQPSKADPDTLRQILNGDFKQVYDALSLENRQAYWRGIIKEIVLTKEHQIDHVIFL

SEQ ID NO: 9819 - protein, 506 aa, synthetic construct
MKRIAIYSRKSVFIEGSISIETQINMCKEYMINKFPDATFEIFEDEGFSGGNTNRPAFQKMLKLAELKEIDIVVCYKIDRIARNTLDFLNILEIFKKNNVELVSITEGFDPNTQMGKVMLTLLASFAEMERTNIQQRVKDSMFSLAQKGAWTGGTPPLGFKVKEGGIEIDNKNLILDVFNMKFKKYKNTEIIEYIESKYNHRFVNTTLASMLRKPIYTKSSKEVSTYLKTKGYKILREENNSNSYYTYKNNNQDYAIVNNDIEGLIDPYVWISINKAMDDNSNGETNRFSEKFWLTKTLRCKYCGKTYCGQTKIVKSKYTNKDGDSKEYIGTYEYYMCRDMFRGRLKTCENTKRLKKKDLEKKIEELIYILKDRNIFEKKYYKSEVNNPAKELKELELNMKKLDKTINNLTDKIALLSNDAAMILIDKIETLVKEKKALKDKMIKIELKSLDNLEGKEEFIYENILKFNTNLSVDQKRNIAINIFKEIVYDYKTDKFEVFFNWFFV

SEQ ID NO: 9820 - protein, 602 aa, synthetic construct
MKKKFSSVPDPDIQDAVIYARYSSHSQRDCSIEQQVADCELFAQQNGLRVVKIYADRHLSGTTDNRPQFQQMLKDAAHGHWPFVICWKIDRFARNRYDSATYKYKLKKAGVRVLYAKESIPDGPEGILLESVLEGSAEYYSASLAQNIRRGMRFNAENCKVNSGSIPFGYCKGPDGRFAIHETNAEIVRDIFRKAAAGVPFVDIATELNNKGLKTSRGGRWNKNSFVLLKNESYIGVYHFSDIRIEGGMPAIIDLDTFLAANERMNANRRVRGRHHDGGDYLLTGKLKCAHCGSYMVGFSGTAKNGESHYYYGCQKRRRERACKKANVPREWIEKVVVKAALDYVLQPDVMEWITDAVMEYQEREAASSQLAALTAELEENQKATDNVMRAIEAGIITATTKQRLLDLETKAKDLKRAIELEKLSHVRLEREQILYWLEQFQGGSLQSQEFRRKVIDTFVSVVYLSDDHLRIAFNYSGQNRSEADFNLIMDAESASADYPMNSLSLPLCPPNKKNPNLFPSGKGSDFFVCRISYRVIFISSLSSAAFLLMPPAYPVRLPFVPTTRWQGMMIEITLCPTAPPTACADIRERPRSAASCLASAP

SEQ ID NO: 9821 - protein, 573 aa, synthetic construct
MAKVKLPDKPRVAIYTRVSTMHQIDKDSLPMQRQDLINYARLILNTEDYVVYEDAGYSGKNTDRPKFQEMMQQVRLGMFTHILVWKIDRISRNLLDFATMYSELKQLGVVFVSKNEQFDTSSAMGEAMLKIILIFAELERNMTSERVTAAMLSRAANGQWNGGRVPLGYDYDPETKTFTVNESEAAVVKIIHDKYEQERSLVSLARYLNGHGYRTRTGCTYSPSTLLIILRNVFYCGDYRYNVLKDGDRQKRKKESEWITVKDHHPAIISREQKDEIARILKENRRLECERRGIYSKKKNVHVFGGLVICGNCGHAMTSTIRPADQDGIRWSVYVCPTKRRSEYLCKGRATSEVVLGEFVFNYILNMLNVQKNFDSINSVEDMEKMLLSGSTFRDVDGIERAGLDDLYNMLASGLTEKAPFDSSVEVRKKPVVSDIELENLNTEKTRIERAAERLQNLYLYSDDSISQKDYIIQREKLMSQLAEVNEQIGMVMSNADEKDVSDEEFVHAASKFILTQKLEGRTYIYYKRLATTVSREVLRSFVMSIIENITIYDGRVQTIVFKNGLSHTFILK

SEQ ID NO: 9822 - protein, 495 aa, synthetic construct
MKQYCMYLRKSRADAEAEARGEGETLARHEHALQELAKRQHLPIVKVYREIVSGDSIAARPQMQQLLQDLEQNRYEGVLVMEVERLARGNTIDQGIVAQAFKDSETKIITPVKTYDPNNEFDEEYFEFSLFMSRREYKTIKRRMQAGRIASIKEGNYIGTNPPYGYRKIHPAPKVRTLEIVEEEANVIRMIFDDYLHHGKGAKAIATKLNLLQIPPQKADRWECVSVRKILKNPIYAGKILWHTKKDGDILAEGHHEGIISYESFCEVQKRMKKKAVPQTQVGTELKNYYHDVMFCGNCGHQMRRRPAKIRDGYMLCLRNECRGKVCCSPIEIVDEAVLAAVRARLNDLELSASNSHTQSQQTQHEEQQNKTVEEMQAALQKLKKQKDKLYTLLETDVYTTEVFVERLNIVEKQEKELKIELEHLRAEQEQIENHLDANASVAFLRQLLDEFSDAQPKRRNELLKQVIGKIVYYKTERMCRNRMQSDLRLDITFL

SEQ ID NO: 9823 - protein, 509 aa, synthetic construct
MYVIYLRKSRKDSDLEALGIDVLKRHEETLLELARARSLPIGAIYREVVSGDSIDARPEMVRLLSEVESGIWEGVLVMEVERLARGDTIDQGRVQRAFFYSNTLIVTPGKTYNPAIENDNEFFEFSLFMSRREYATIKRRMQAGRIRSVKDGYYVGNIAPYGWRRVKADDCKHFTLVPDEKENPVLKLMYDFMGNKKYGFQKTCSALTGMGIVSRSGKPFNPATVKTIISNPVNIGMLRWNYRKSQKAIVNGKIATSRPKADDYILVKGKHPGCISEDLYNRANSVNSSMTAPVKRSCRIQNPFAGIVRCSCCGRVMVRKKMSAKQPRDYLICQYAGCATVAIELEELENAVLEWIRNYIADYKVNNFESADDSEQESLRSILVNLEKEKETTLKQRGSLFDLLEQGIYTKEIFFERSTALEDKIKDFDKKIESVNADIVRLDLSKKNRSTFVPKCQELLNAWDTFDAADKNTALKNVIERIDFTKTEKNARGQRHSSFSIDVFPRISR

SEQ ID NO: 9824 - protein, 523 aa, synthetic construct
MKKVQVIPATLRSYTKKPMNSQKKRRVAGYARVSTDHDEQLTSYEAQVDYYTRYIQSRNDWEFVGIYTDEGISATNTKHREGFKRMIADAIAGKIDLIITKSVSRFARNTVDSLTTVRKLKDKGIEIYFEKENIWTLDAKGELLITIMSSLAQEESRSISENVTWGHRKRFADGKVSLAFTHFLGYDKGMDGNLVVNKKQAEIVKLIYRLYLNGYTFHSIAKELTERKIPTPAGCKIWRANTIRSILMNEKYKGDALLQKKITVDFLTKETKKNEGEVPQYYVEHNHEAIISPQVFDWVQEEIKRRRKRKKRYSGVSIFSSKIKCGQCGGWYGAKVWHSTDKYRRTIYRCNDKFKNHCQTPHLTENEIKGAFIRAVNQLIENKEDIMSNITMLKKRLTDTASLEKERDALELDLNMLTDQVQQLIAENAQVAQDQDEYGRKYNGLVSRYEETKKKYDQVCDAIQQCVDRYWKLDNFMKNLQKQNLVYEFDERLWCSLVDFIIVYSKVKIQIVFKNGTKIHVGM

SEQ ID NO: 9825 - protein, 530 aa, synthetic construct
MTYPKGGETLKRITKIEGNTVFLNAVRKTRVAAYCRVSTGSDEQLLSLETQKDHYERYIKAHPDWEYAGLYYDLGITGTKKDKRPALMQMVAGCEDGRIDRVITKSISRFCRNTTDCLELVRKLLGLGIPIYFEKEDLDTGSMESELMLSILSSLAESESVSIAENSKWSIRRRFENGTFKLAYPPYGYDYIGDGEWAINEEQAKWVRFIYSETLSGKGSDAIVAELIELGAPTKKGGKWTSTTVRGILSNEKYTGDCIFQKTYTDERFNRHTNYGEMDQFYMEGHHDAIVSHEDFEAVAALVEQRAKEKGITKGDAKYQARYPMSGKVFCGECGSPHKRRMNYSTHIQYPALTCSGHLKDKNSCSQKFIREDALQMAFVTMMNKLIFAHKEVLQPLLTSLRSISQKDAISRLSELDERLEKNAERQNTLATLMTRGYLAPALFTQESNDLLTEAQALTEEKEHLVFSVNGEMKKTEKLADLIRFCSWGEMLTEFDGDCFSQYVERVVIHERTTAAFELKCGLTLKERIR

SEQ ID NO: 9826 - protein, 523 aa, synthetic construct
MAEKTITMIPARKRVGSRKQVTEEKPKLRVAAYCRVSTDRDEQETSYEAQVEHYTEFIDRNPEWQLAGIYADDGISGTNTKKREEFNRMIEDCMASKIDMVITKSISRFARNTLDCLKYIRKLKEKNISVYFEKENINTMDAKGEVLLTIMASLAQQESQSLSQNVKLGLQFRYQAGKVQVNHNRFLGYTKDDEGNLVIVPEEAEIVLRIYREYLEGASLFQIGQGLEADGIKTAAGSDYWLQSTLKKILTNEKYIGDALLQKTYTVDFLNKKRVANNGIVPQYYVENSHPAIIPREKFMKVREEMYRRAHMECGPDQKRRIYSSRYALSSIVYCAHCNDIFRRINWNNRGCKSTVWRCLSRVEQNRPSCAARTVKEELLHEVVVRAVNEVITGSASLIPALQASFERCLGDSNSAAVEEIDARLLGLQQELLKMANAKQNYDTLADEIDELRAEKEELLLQEANKDGIRQRMADMVAFLQSEPEEVTEYSESLVRRMIEKITVYDDHFVVEFKSGIEITINK

SEQ ID NO: 9827 - protein, 520 aa, synthetic construct
MKNVTKINQVDFSIFKKTRVAAYCRVSTDSDEQELSLDIQKNHYESYIKANSEWEYAGIYYDDGVSGTKTAKRDGLLRLMEDCEKGLIDLVITKSISRFSRNTTDCLALVRKLLNYEVYVIFEKENINTGSMESELMLAVLASMAESESRSISENEKWSIKKKFQNGTYVISYPPYGYANVDGEMVIIPEQAEVVKEIFAGCLAGKSANIIAKELNEKGVPTKKGAKWTGGTINGILTNEKYIGDALFQKTITDASFKRKRNYGEEEQYYCENHHEPIIDKDTFEKAKESIRQRGLEKGNCSEDTSKYQNRYAMSGKIKCGECGRSFKRRYHYTSHGKSYNAWCCGGHLEDSKSCSMKFIRDDDLKRAFLTMMNKLVFGNDMVLKPLLISITTNYSKKNANSVEDIEKEMKSNEEQRKQLSTLMTNGYLERPVFAEAHNKLTMEYDHLVAKRDLLFRMDDAGYTMEQALKELVDFLNDAKPFTEWEESLFERFIEKVKVLSRDKVEFEFKCGLKLKERID

SEQ ID NO: 9828 - protein, 524 aa, synthetic construct
MAGAKNITVIPAKKRVGNTVTAEDKPKLKVAAYCRVSTDSEEQATSYDAQVEHYTEFIRKNPEWEFAGIYADDGISGTNTKKREEFNRMIEDTMAGKIDMIITKSISRFARNTLDCLKYIRQLKEKNVPVFFEKENINTMDSKGEVLLTIMASLAQQESESLSKNVKMGIQFRYQNGEVQVNHNWFLGYTKDENGHLIIDEDQAVVVRRIFREYLQGASLKTIADGLMADGIPTATGNMKWRGDGIRKILTNEKYMGDALLQKTYTVDVLTKKRVSNNGIVPQYYVENNHEAIIPRQLFMQVQEELQRRAHLRTENGKTKRVYSSKYALSSIIYCGKCGDLFRRVAWKARGASYNKWRCASRIEKGPKEGCDADAISETEIQNAVVRAINKTLGGREQFLVQLQHNIEDVLNCDSAATLEYIDRRMAELQEKLVLCVNKNAEYDVIANEIDALREKKAAVVTKDAEQEMLKKRIEEMRQFLQTQSSRVTEYDEQMVRRLIEKITVFDNKLIFEFKSGMTIELKR

SEQ ID NO: 9829 - protein, 523 aa, synthetic construct
MRFFSYGRKSVFSDKSDSIDNQFRMNREYCESKFSGQVDSWQQFSDEDFTGANTSRPDLQRMLSFIKGGFCDVLVVYQLDRLSRDVRDFANIYALLEEHGVMFISIKENIDTTTPIGRAMMYVTVVFAQMERETIAARVTDNMLGLAKKGYWTGGNPPVGYVRKHIIVNGKKHCSIEVDPDGARYVTQIFDTFLAYNCSLQGMETRFKNQGIRTQSGKFFSTTQLHKMLTMPYCVEATPEVYDFYAAKGCIMDPGSPREMWDGSVGVIIYGRSTEKNKKHQAQPPEKWTVCLGKHKPFMPAEKWLAVQSRFTQNKCIKDAKWPVPLLKGVLRCKCGNLMQVSRKKKVDGTCSSWYYCRKRMRQGVDACDMGQIKCDLLDEEVLELFRGITADPALIQKFVKAEAPADVPDLKAAQARVSACERKIGRLAASLALAEDSAASKYIIAEMERLDVELGALKREASLAEMESHRAAASAKDAKATAAEIAKLIHGLDGFDDKEKNAIARAVIQECTWDGERLFITL

SEQ ID NO: 9830 - protein, 527 aa, synthetic construct
MYELTQSMESLSVDEIIVYLRKSRSDSPEMSVEDVLKKHEEMIQDYANTHFGSPIPEKNIYREVVSGETIDSRPQVKIVLQKIESPQIKAVLIVEPQRLSRGDLEDCGRLINILRYTNTMVLTLTHSFNLQEEYERKFFEIEITRGNDYLEYTKRILRRGRESSAAKGHYIGSVDPYGYRKIVMKKDGVNCHTLEIVPEEANVVKLIHELYAYTPGGIGFTNIAHKLDSMNLKPKKAAHWTPAIISSILCNPLYLGLIRWDTRKVVKYINDGRLEKSRPRSSDAKYYKGLHEPIISQELYDACMARRGTNPRLRRNKELCNPFAGLLYCGTCDHAMSLKIYKNHNSVSQIMLCNHQSYCHTKSVLYSAFLERFISSMENTIHDFELALLADNGNAQAVNQSIVANLETRLKKLQEKDMRQKDAYEDGIYSKEEFLERNIKTQQEIASTITALTAAKETKENYVDYGEKIRRFRDCINALNDPELSATEKNLFLKSCISKIIYYNNMESKAGVGRYVENVFSLEIQYI

SEQ ID NO: 9831 - protein, 519 aa, synthetic construct
MKKVTKIAETASSKVKLKKIRVAAYCRVSTDSDAQLESLEAQKTHYENYITSRDDWEFAGLYYDEGITGTKKDKRPELLRLIDDCKAGKVDFVITKSISRFSRNTTDCLELVRKLLALHIPIYFEKENINTGSMESELFLAILSSMAEGESVSISENSKWSIQKRFESGTYKVSYPPYGYDWDGKQMVINPEQAAVVKEIFAALLSGKGTHAIADDLNRRGIPTKRNGRWTATTIRGMLSNEKYVGDCLFQKTYSDSRFVRHNNHGEQTQYMVKDHHEAIISREDFEAAHAFIHQRATEKGVVKGSDKYQNRYTFSGKIICGECGDTFKRRIHSCTGYKYTAWCCSTHIKDKDKCHMLFVKDDDLKQAFITMMNKLVYAHRIILKPYVDALKNTSSDDSLRRIQEIQTLLAQNTEKRETLTKLMTQGIIDPILFNKETNELLSQADSFRDEINALKNAVSGDVTKVTAATVLLHFTEKGGILQKFDDDLFKEYVNRIVVRSRNEVCFELKCGLTLRERM

SEQ ID NO: 9832 - protein, 434 aa, synthetic construct
MERVVERVDALIPAQPKALRVCAYARVSTGKDAMLHSLSAQVSYYSKMIQSHNGWMYCGVFSDEAVTGTKRERAGFQHMIEECRQGNIDLVITKSISRFARNTVTLLQTVRELKSLGVDVFFEEQHIHTQSSDGELMMTILASYAQEESLSASENQKWRVRKAFENGEIINLRFLFGYDITPDGIRVNEVDAAIVREIFARFNGGESMSSICRDLDARGHKGVLGGTWCAERMRNTLSNEKYLGNALLQKRYRNNHIEKKLLPNRGELPMYYAEGTHEPIIDQATFDKAQERLRILAQQTSNRKKPTHSVFSGLIRCGLCGNTYKRVTYRKKHYWNCTTFQTKGKSECAAKRIPEETLEVLTCEVLGEGSIDSDMVRSKITAIRAEKNNVVVYCMDDGSEIVKRWKDRSRAESWTPEMKEKARQRALQARRKKE

SEQ ID NO: 9833 - protein, 524 aa, synthetic construct
MYNNINNNMEMYIKYLRKSRKDLEAEEHGEGDTLAKHDLILTNLYRSMGIKDEQVITLKEIVSGDSIASRPVIQEVLQLVEQGSVTGVLVVEVERLARGNTLDQGIVSNAFQYSNTKIITPLKIYDPHNEFDQEYFEFGLFMSRREYKTINRRLQNGRTTSATQGKFPASRAPYGYKRKKIEHDKGWTLEIVPEQAETVKCIFNLYAYQNMKPSEICKYLDNLNVKPLKSNTWSSSSIRDILSNPVYVGKIRWKDRKVVKILKDGKIINTQPVNKGNDVVLVDALHQPIIDIKTFELVQKKKKENNTAPIPGIYNIQNPLCGLIRCSKCGRLMFRVSCETLACTNPKCHNVSSKINIVEKKLIESLNIWLEEHEKEIDNASLKNLSNSEIIKIKKNQLEKANLELMKCKDTLERIYGFLEQGIYNIDIFTQRKNKILAKEQEQLKKIEILDNEIKKIEQNEKSKIELIPKVKNVLDIYSKCNNIKEKNELLKTVIKKVDYLKTEKCYGKKNNPENFELMIYTKF

SEQ ID NO: 9834 - protein, 438 aa, synthetic construct
MARTIQQISFPAPMRPSLKRVAAYARVSSGKDAMLHSLSAQVSYYSALIQKHAGWLYCGVYADEAFTGTKDSRDGFQDLLAECRAGKLDMVITKSISRFARNTVTLLETVRELKALGVDVYFEEQNIHTMSADGELMMTILASYAQEESRSASENQKWRIRRGFERGELVNLRFLFGYKIEKGRVAVDPEKAAVVREVFRRALEGASLTSLAIDLNRRGFTGVLGGKWNAMRIREMLSNEKYLGNALLQKQYRNNHLEKKEIPNRGELPQYYAEGTHKAIIDQSTFDAAQRLLVKLRESTPVRSPWKKSAFTSMITCTVCGRKYKRCTCGKRHFWNCPTAVRTDLPSCGTSQIPEKLLYDLAAQVLGLTQFDEPVFREKIQSIDALPDKTLVFHFYDGSTVARHWEYTSRAKSWTPEMKEKARQRALAQRRGEKWQEP

SEQ ID NO: 9835 - protein, 525 aa, synthetic construct
MARAVTVIPPTIQPITHLARNAVVRRRVAAYARVSTSSEEQLTSYEAQVDYYTRFIQSKPEWEFVKVYTDEGISAVNTKKREGFNQMVRDALDGKIDLIVTKSVSRFARNTVDSLVTVRKLKEKGVEVYFEKENIYTLDSKGELLITIMSSLAQEESRSISENVTWGQRKRFADGKVSLPYGHFLGYRKGADGLPEIVPEEAETVRWIYSLFLSGKTTGSIASLLTREGIPTPAGKKKWAASTVESILKNEKYKGDALLQKAFTVDFLTKKQKKNEGEVPQYYVENSHPAIIDPAEWKLVQRELERRKAIGRSYSGNSIFSSRLVCGDCGGYFGSKVWHSTDKYRRTIWRCNSKFTSEEKCQTPHLTEEEIKARFLDAFNTLVADKEQLLDECRTMQAALTDTGPLDSGISAFLSEMEVVAELTKRCIEENSTTAQDQAAYLERYNGLAERYETAKAKLEKLQAEKAQREAKAEDIGGFMFELAEYGESLTEFDDRLWLTVIDTVTVHRDGRLTFKFQTEHEITA

SEQ ID NO: 9836 - protein, 576 aa, synthetic construct
MKKNFKMPGSGSETPIRVAIYVRVSTVYQIDKDSLPMMKQDLTSYCKYILNTDDFVIFEDAGYSGKNTDRPAYQKMMSQIRQGLFTHLLVWKIDRISRNLLDFANMYAELKDLGVTFVSKNEQFDTSTAIGEAMLKIILVFAELERNMTSERVTATMINRASNGVWNGGRIPFGYSYDKPTQVFSIDPEENKVYNFLVETYEDTQSIVHTSRRLNEAGYRSRNGNMWSPVAVWTILRNPWYKGVYRYNYYKIPGRKAIKDESEWVIVENHHPASIDPDRFDRIQATLDKNARYRNTPGRKTAQKNVHVFSGLVWCAECGSAFTASPGKLHVSGYRPSKYGCPNVRKTKTCHAKYTSDVVLGEFLLNYILNILNAQKQFAYIHSTDDLQKRLLHGSTFSNVDHVNPDGLASLLNMLEKCSGSDPVLLKRPRSKPKMDPELKRMMADQKKQQRALDRLNDLYLYSDDSISEREYLVRKQQITDRLQEINEAIGMMSQEPWMRTMNDEEFIRQASSFILTQKLADKQYIYYENLAESLDPEILKNFFVSILDSIILRNGRPETVVFRNGLSHTFTYKDS

SEQ ID NO: 9837 - protein, 519 aa, synthetic construct
MKKVTKIAETASSKVKLKKIRVAAYCRVSTDSDAQLESLEAQKTHYENYITSRDDWEFAGLYYDEGITGTKKYKRPELLRLIDDCKAGKVDFVITKSISRFSRNTTDCLELVRKLLALHIPIYFEKENINTGSMESELFLAILSSMAEGESVSISENSKWSIQKRFESGTYKVSYPPYGYDWDGEQMVINPEQAAVVKEIFAALLSGKGTHAIADDLNRRGIPTKRNGRWTATTIRGMLSNEKYVGDCLFQKTYSDSRFVRHNNHGEQTQYMVKDHHEAIISREDFEAAHAFIHQRATEKGVVKGSDKYQNRYTFSGKIICGECGDTFKRRIHSCTGYKYTAWCCSTHIKDKDKCHMLFVKDDDLKQAFVTMMNKLVYAHRIILKPYVDALKNTSSDDSLRRIQEIQTLLAQNTEKRETLTKLMTQGIIDPILFNKETNELLSQADSFRDEINALKNAVSGDVTKVTAATALLHFTEKGGILQEFDDDLFNEYVNRIIVRSRNEVRFELKCGLTLRERM

SEQ ID NO: 9838 - protein, 579 aa, synthetic construct
MNNTLSALNITPSPPRMCRVAIYIRVSTLQQVDKDSLPMQRKDLIAYSKLILNTDDYVIFEDAGYSGKNTIRPRYQDMMEQIRTGAFTHLLVWKIDRISRNLLDFAQMYQELKELNVTFVSKNEQFNTSTAMGEAMLKIILVFAELERNMTSERVTATMISRANTGKWNGGRVPYGYKYDPEEEDFLIVANESNTVKLIHDKYEELQSLVYLARYMNEHGYRTRSGNEWSPPSLAIILKSWWYCGCYEYNKRKAGNRQKLKDKSEWIMIEDHHIAIISYDQKERVLAILKGNKRYATDHNLYVKGIHVHVFGGLCWCRNCGKKMTSTSSNKNRSWQYSKYLCSTRRRSLTKCRGRSTSDPVLGEFIFNYILNMLNAQKGFDSIHSPADLQDALLTGDAFSDIKSIDQEELNDLYNILSSSVVGNIYGRSFNVNKAKKNDEVQSSLTILKAEKKKLDRALDRLTNLYLYDDMAISEKDYMTKKTEIETKIAEIDEKIGIVNKNSLDNSITDEEFVDKASTFIITQKLTNRNYISYKRLATSVDPKILYMFTHDVIDYIDIYNGKVQRIVFRNGLSQTFIR

SEQ ID NO: 9839 - protein, 687 aa, synthetic construct
MQSAFFFIPFFGSWRKGLFMAYVRNKKKILKFWSKKKAALYVRVSTRYQVDKDSLPFQRKKLKEYCKFLGIEGFVIFEDDGYSAKNTDRPHFQEMMSRVRDGEFSHLIVWKVDRVSRNLLDFAAMYQELKDHKVTFISMNEQFDTSTAIGEAMLKIILIFAELERNMTSERVTGIMLDRAEQGLWNGARMPVGYRWNPEIKFPEPDPEETKIVQFIFDEYERVRSTTKIARYLNHNQIASKRGGQWTSKLIRDIIRNPFYIGTYRYNLRESGRGPLKPESEWIVRENNHPAIIAKEQFDRCNAIMDENGTSRDTSDLRARKYVHTFSGRLVCGKCGANMIASKDRARANGWRPSMYRCAQRSRMMDCDNSKTVNESYIGPFIFNYVANLARIQKNFKNIKTLEQLEKELLKGPEFENMKVSKESLRRTFDALAFQEVGKGAYLPDIDLSDGDDDYTAAEQLSILKRELDKCKTAIDRLTDLYLYDPDSMTKEEFAKKKRDLVNKIAGYEKQIEASQATGDKDDLADLEFIRKASAFLVAQRIVSKKHVDYIQMALDLDNEILKDFVDQVIDRIEILEGRVQSIRFVNGLVHEFTYSTPADLPVCQKCGGRIGSTCGCRTRTFDFAGKPYRRIKVGDPGDKFHGVTGAVCPECSAQAGRWHHWKCGIERCPICGEQLIACEHGPNGKD

SEQ ID NO: 9840 - protein, 569 aa, synthetic construct
MAEQNEKIVALYVRVSTGYQVDKDSLPFQKKELKAYCEHVLHIDKNRIEIFEDAGKSGKNTKRPAFERMMGKVKSGQVSHVIVYKIDRISRNLVDFSLMYDDFKYNNVTFISLNEQFDTSSAIGEAILKIILVFAELERKLTSERVTDVMIGRAQNGQWNGARVPYGWDWDEEKQCPVHSKKEAQYAIAMYEMYLNGGSTVSIRDYNNAHNIPTKRGGEWTSKTVADFLRNPINKGAYRYNYRESARGRKKPNGEVVFIENAFPPLVEPRIWELVNKRMDENTLKLNTSSMHTIRKNCNVFAGLIVCGKCGVNYQVTAKDRRKGSGFRPSSYACTGKYQKNHCDNLNVSDVKIGPFMINYIAAMVDASKSRKFIKDTKSLEQVLLSHINFSNIAGIANDSLQDTLELISGYSASKSALWSAKTLSKEQQTDVDSKQSELNERLQKVNRAMERLKKVYLFSDDGMDEKEFLEMKSSLEADRVKIENEIKGLSAPIATNVDQVAFIKSASEFLLMHKINSGEFVDYKELATLDEESLKQFMNSVIDHIVVRDRKIVEIVFINGLSHTLLYK

SEQ ID NO: 9841 - protein, 528 aa, synthetic construct
MPKTTKKITTIPATLTRFTATPITEQKKRRVAGYARVSTDHDDQFTSYEAQIDYYTNYIKSRDDWEFVDVYTDAGITGTSTKHREGFKRMVADALAGKIDLIVTKSVSRFARNTVDSLTTIRQLKENGIECYFEKENIWTFDGKGELLLTIMSSLAQEESRSISENCTWGQRKRFADGKVTVPFNRFLGYDRGPDGNLVVNREQAAIVQRIYAMFLQGMTYNGIAQQLTDDGILSPGGKPKWNTSAVKSILSNEKYKGCALLQKTYTVDYLTKKKKVNEGEIPQYYVEDNHEAIIDPDTFEMVQREMEKRGKGRKYHSGVHTFSSKIRCGECGSWYGSKVWHSNSKYRKVIWQCNHKFDGDKHCSTPHLTDDIIQQAFLLAANKLLATKDTVIADGREMMALLFDTTDLEREQEELQQETQVVSDMVQQCIYENAHVALNQTEYQKRYDGLTERFEKAKAQLDAVTAKIHQMQTQRASIEDFLKVFAAMPDELSEFTLDSWHGLVDYGTVYADDDIRFTFKNGQGVKA

SEQ ID NO: 9842 - protein, 578 aa, synthetic construct
MRKVSKIEPISPSLPTRKKVSAYARVSMESERLNHSLSAQVSYYSKLIQSNPEWEYAGVYADNAVTGTKSSSREEFQRMLEDCESGKIDIILTKSISRFARNTVDLLETVRHLKELGIEVRFEKEHINSLSGDGEVMLTLLASFAQEEVRSLSENVKWGTRKRFEQGIPNGRFLIYGYRWEGDHLVVEPEEAKIVRLIYDNFLKGLSAEATEKQLEEMGVKSMKGMHFPNSSIRAILKNITYTGNLLFQKEYTLDPISKKTRKNHGELPQYFVENTHEAIIPMKTYQAVQAEIARRRELGALANWGINTSCFTSKIKCGLCGASFVRNTRKNRAKTSQLGERYTFYGCGTNKRKGEHCSSGTIREDVLKEECAKVLGLPEFDEETFSERVEKITIPATGTMLFEFTDGTSIEHHWSRNAKKESWTAERRKAVSEYRRDRDTGWKCYHTFTHFIKCGRCGANYRCQTHKRVDGTVVRSWYCSSPTAVGCSKVGIREDTLKALIADVMGLPEFDEELFNQQLAYATVPADNQIVFHFRDGHEASRTFVQKRQMPRQTEERKKHMSEVMKAKWRERHAEND

SEQ ID NO: 9843 - protein, 502 aa, synthetic construct
MEIQIREGSREQKRKLKVCAYCRVSTDADEQENSLENQVRHYETVIKANPDYEYAGVYSDFAISGFKEKRPGLQKMLADAEKGKIDLILTKSVSRFARNTSIVLEATRKLKELNVGVFFELQNINTLSGEGELMLTILAAFAQAESESGSAGAKMVYQRKYEAGIPVQYLERSFGYTKDERGVFVADEAEAVWVRKIYKMAAEGYTPASIKRYLNENGIKTVGGVQWVDSTVFRLLENEIYKGDYIMHKHFVNEERKLVRNRGEVDAWYIEDDHEAIVSPELWQKAQDALAAKRDYLAKGSVIEKFTEENYPYMNKIYCAKCGYPLYKRVYSKGNRLNWGCSGTKRYGKTFCDGINIPDGVLRSAWHFKENTYIAEKASDKGVKEFTYLKEQSWKRRHKKKQPPAIPENTEAEYPYREKIFCALCGSRLVRYVNPQSHKVTWVCSRRKRKGKDACDGTRVPDTIIKGWGEIKKDIYIQRKDDKNGKKRYSYTSKKPEGADRA

SEQ ID NO: 9844 - protein, 456 aa, synthetic construct
MRNKEIAPALVRVALYIRVSGEEQKIKGLSLEAQQERLEAYARERGWVIVGIYIDAAKTARKNIHKRTEFQRMMDSVKRDEVDILLFARLDRWFRSVADYYKVMEILQAHNCDWKTTDEEYDTTTANGRLYINVKLSIAQNEADIDGERIDVVFDSKIAHGTVVSGSAPFGFRVNEEKRLEVVPEDAAIVQDAFNYFENTVSQRATVRYIRETYGVNWCDATFRRMLKEKLYTGVYDRGGRYNDQFCPAIISRQQFDRVQALLTRNVRSAPSGKVYIFTSILTCAECGHKLVGYKSSDYFYYRCNQHFQRGRCSHNHSAREDVVEQWLFEHLGEELDRCQLEWDVEAAKKKASVARTDKAALKRKLTKLKELYVNDLIDIEDYKKDYQIYVSALNQIPEPAQEAPPNFAAVRRLLDNSFRTIYDTLTREEKRTLWRSVIKEIRIDNDQNITGVVFG

SEQ ID NO: 9845 - protein, 573 aa, synthetic construct
MAYNAQNKTGARVAIYVRVSTLHQIDRDSLPMQKQDLLAYAKLMLNTDDCVIFEDAGYSGKNTDRPKFQEMMSQMRAGAFTHLLVWKIDRISRNLLDFATMYNELKALGVTFVSKNEQFDTSTAMGEAMLKIILVFAELERNMTSERVTATMISRANNGLWNGGRIPFGYDYDYETHEFSVNEEESKVVILMHDMYEQERSLVRVVSELNERGYRSRAGNLWSPVSLLIILRNVFYCGDYRYNMLKEGDRQKVKDESEWVTVENHHVAIIPKDQKERIMATLDSNSKLCKQRNIYKSSKHTHVFGGLIYCGSCGKPLGSTPGNLTRDGWHYSKYTCPTRRKSVTLCTGKSTSDPIIGEFVFNYILNMLNAQNDFEKISSPEELEKLLLIGDTFAYIDHIEPNGLNDLFNVLSSGAVKGAVFGKGASLPTKKATVEPEVARLRNEKQKTERALDRLRSLYLYADEAMSEAEYMIQKNKLEETLEDINDQIGMMNTDSWQQSVSDEEFIQRASEFIIAQKLSGRKYVNYKRLAMSVDSEVLKNFVVSIIDSITIQDGLVSNIVFKNGLCHTFIFR

SEQ ID NO: 9846 - protein, 464 aa, synthetic construct
MNSTYFRPQPELFGLRVVKYIRCSHDGQVLHGDTLEAQDALLDEFIKVNRMVLVDTFIDEALTARKKFTRRKEFVRLLDGVRAHNFGMILFTKLDRWFRNIGDYHKIQEILEANGVQWKAITESYDTTTTNGRLHINIRLSVAQDECDRDSDRIKDVFAYKLKNKTYLSGSLPRGLKLDDEKHVIIDPEWKQFALDMFDHFEQTNSKRGTLLYLKEKYGIYLCYDTISRNLRNSLYKGMYRDDPDFCEPLIEPERFDRIQVLGKRNVRQRYSNRTYIFTGLLICSSCNHYLVGQTTHRTLSDGTEKHYPSYRCNQRYQSHSCDRNRSYREDYVEEYLLQHIRPALSEYVAEYEVTGTNPARKNPAAEAAKIRTKMQKLYELYMDDLIDRDTYKRDYSAFQEKLKELDSIVVAPSRDLADLKKLLEQDYEEIYRTFSPQEKNAFWKSFVQSITVHEDGEMDIVFL

SEQ ID NO: 9847 - protein, 501 aa, synthetic construct
MEIQIREGSREQKRKLKVCAYCRVSTDADEQENSLENQVRHYETVIKANPDYEYAGVYSDLAISGFKEKRPGLQKMLADAEKGKIDLILTKSVSRFARNTSIVLEATRKLKELNVGVFFELQNINTLSGEGELMLTILAAFAQAESESGSAGAKMVYQRKYEAGIPVQYLERSFGYTKDERGVFVADEAEAVWVRKIYKMAAEGYTPASIKRYLNENGIKTVGGVQWVDSTVFRLLENEIYKGDYIMHKHFVNEERKLVRNRGEVDAWYIEDDHEAIVSPELWQKAQDALAAKRDYLAEGSVIEEFTEENYPYMNKIYCAKCGYPLYKRIYSKGNRLNWGCSGTKRYGKSFCDGINIPDGVLRSAWHFEENTYIDEKASDKGVKEFTYLKEHSWKRRHKKKQPSAIPENTETEYPYREKIFCALCGSRLVRYVNPQNHKVTWVCNRRKRKGKEACDGTRVPDTVIKGWGEIKNDIYIQRKDDKNGKKRYSYTSKKPSGIRV

SEQ ID NO: 9848 - protein, 499 aa, synthetic construct
MNVVLYMRYSSDRQTEQSIEGQKRVCMDFCERQGYNVVGEYIDRATSAYKETAKRTNFCRMIRDSSNGLWQGVVVYKLDRFARNRYDSATYKVRLKKNGVKVISATENISDSPEGVILESVLEGMAEFYSKELSQKVSRGLNESAHKCNSTGGAIPLGYKTVDKKLTVDEPSAQIVKEAFDLYAGGATISEICEKFNSQGYRTKKGTEFNKNSFKSMFRNEKYIGTYTYKDIRIEGGIPAIIDKETFETVQKRLSANAQAPARGKARVNYLLSQKLFCGHCGANMIGDSGRSKTGETYYYYSCSTRKRFHSCKKRTIRKDLIERIVAENAMRLITPEMINTIADMAIKCNREDIESDAIIPALTADLKEINTSIKNLLKMVERGVESETLDSRLKELEKRKKDTELRLDAAKSEYLTLDKTVIVGWLSQFLSGDIEDEDFRRHMIDTLINSVTVWDEPDGGYKITTVYNLKGNTQTYRVNADGSSDMKRNSPPKKRQFS

SEQ ID NO: 9849 - protein, 497 aa, synthetic construct
MPKTEEKQPIKAVIYARYSSDRQREESIEGQLRVCEDYASRNNMTILHTYADRAMTGRSDQRPEFQMMIRDAATMTFDVVLVYKLNRFARNRYDSAKYKHKLKKYGIKVVSAMENIADDPSGILLESVIEGMAEYYSAELAENVMRGMTENALEGKWPGGVVPLGYKLDEQHHLVIDGPKAEVVRLIYQMALEGHNQKYIIDELNRRHYTNSAGGPFSYNTLRTILRNEKYIGVFTWGTVRRENACPAILDKATFEAVQEHLKFRTKHHIRSCNEDFLLTGKLFCGCCRSKMIGVSGTSKTGAIYYYYACSAHLKKKCKARNIRKDAIEDLVCEVTTRILSSKEAVEAIARQAIEMQKNKKDSLELQAIKNQIADISKKLQNCIRAVESGLISEAITNHINDYEKELTRLKDDAARVKLLDGDIELTQQHIEFFFWSIAQKIKAADKYKSILLSSIVRSVIVYNDYIEIQYNYKNELPILQNPVKVESSYLNQMVTQ

SEQ ID NO: 9850 - protein, 524 aa, synthetic construct
MGKRVTTIPATLNLYDSVSLKNPQKRKVAGYARVSKDIEEQATSYAAQVDYYTAYIKKNPEWEFAGIYTDEGITATTTKKRNGFKQMIADALAGKIDLIITKSVSRFARNTVDSLTTVRELKENGIEIYFEKENIWTFDSKGELLITIMSSLAQEESRSISENVKWGKRRAFANGKGSLSFNTFLGYDRGPNGEFVINEEQAATVRYIYEKFLEGFSAYRIAKDLTEMGIKTPGGKEKWANSSVLKILKNEKYKGDLLFQKTYIKDFLSHKSVRNNGEIPQYYIEDHHEGIITAEQFDQVQLELYRRKKIKKYSGISIFSSILKCGNCGGWYGSKVWNSNTKYKKTIYQCNKKYKNKCKTPNLSEYEIKQLFVQVVNQLISEKEEIIKNTEEMKKTICDMNSLTMELKDKTAEINTVVEQINNIVIQNSKVSLNQDEYNKEYFRLKRKYDTIASEIDRLSKQIKEKDLQGKLFDNFISTFKKQNETISEFDEFLWSGLVYEIVVYTKQDVRFFLKNGLEIDTGL

SEQ ID NO: 9851 - protein, 516 aa, synthetic construct
MARKKKVTPGNRLVAYYRYSGGSQQTEQSIEGQRRDCEAYARQHGLTIVHEYIDRHISGRGVESRLAFQQMIADSSKHLFDLVICWKTDRFARNRYDSAVYKKKLRDNGVRILYAAESSVEGPEGIILEGLMESLAEYYSAELAQKMRRGMRESALKGRAINPSRPLGLTTDEHKRFIIDEKNAPTIRFIFEHYAAGESSAFIVEQLNAAGLRTSKGNAFNKCSIPRIIQNEAYHGVYICKAYDVRIDGAIPAIIDDDLWKRAQKMLTLNKQHRAPHSSHADYLLSGKLFCGCCHSLMRGISGHNCRNDVYYYYACGNKADGGTCKKKNIPKDVAENLVVNAICENILRPDTLEDLADAIAAAQQADVNQPDPERAMLEQNLADVHRKINNIIESIENGTASSRLSARLADLEQQESTLNYQLESMKEIHPPVLDRERILFLLEQFLISPNERTEDYNRRIIDTFVNRIEITDTEMLIYFNLSEASASEKQKNSQPNSCSTGNHLVRVARIELTAS

SEQ ID NO: 9852 - protein, 515 aa, synthetic construct
MKTAIYLRKSRADLEAEARGEGETLAKHRTTLLKIAKEMNLDVLAVREEIVSGESLVKRPEMLALLEEIEDNKYDVVLCMDMDRLGRGGMKEQGIILETFKRSNTKIMTPRKTYNLNDEWDEEYSEFEAFMARKELKIITRRMQRGRVASVEAGNYLGTHAPYGYDIHRLNKRERTLAINSEEASVVRMIFEWYANEDMGANAIMRKLNELGYKSKLGNNWNPYSILDMLKNHIYIGKVTWQKRKEVKSPNAVKRSNTRQDKSEWIIADGKHEPIISESLFEKVQEKLNTRYHVPYNTNGLTNPLAGIIRCGKCGYSMVQRYPKNRKPTMDCKHRGCENKSSYTELIEKRLLEALKEWYINYKADFEENKNSGNAKETQVIQINQAALRKLEKELVDVQKQKNNLHDLLERGVYTVDMFLERSNVVSDRINEITSTMENLKKEIKTEIKKEKVKKDTIPQVEHVLDLYFKTDDPKKKNSLLKSVLEKAVYKKEKWQRLDDFELVLYPKLPQDGDK

SEQ ID NO: 9853 - protein, 515 aa, synthetic construct
MYRPEELDVFIYLRKSRKDLEEEKKAMEHGQHYDTLERHRTQLLELAHKEHHNIIDIFEEVVSGEYISERPMMQKLLREVETGIADAVLVMDLDRLGRGDMVDQGTIYRVFRYSETFIITPTEVINPNDENQELTFSIKSLIAREELKTIVKRMQRGRRASAKEGKSISRVPPYGYLRDNNLKLYPDPEKSWVVSKIFESMAGRLGRQAIAQELDRLSISPPEGEYWNPSTISSIIKNEVYLGHIIWGKIRYTKQNGKYIRKKVPKEGWQRHNHAHSPLVSEELFQKANMAHSKRWRPPTIKTKKLSNPLAGILLCELCGHSMLYQPRKDRPNPQVRCVQPSCKGVQKGASLSLVEQRILDGLKQIIESFEIQENMVQKEISSNNIHLQQKALEKKEQQINDLQKQKSNLHDFLEKGVYDVDTFLERQKSIAVRLKTTQEAIEELKHEIKKILKKEKHIHEFVPRIKNVLEAYYATNDIEKKNHLLKSVLEKVTYLRKKEWKRKDEFVVELYTKI

SEQ ID NO: 9854 - protein, 522 aa, synthetic construct
MKLSHILKPNMKAAFYGRHSTDKQDMDMQLNSVMEVIRKYDCIHTHSFLDKAVSARKNKITSRKELENMFEAAKRKEFDFVIVYKSDRLARDPLEHQTIRIIMKTLAIPIIISSNESVYNADNDLIVQLMEDGFTKYEVDTIIARTRSGLENKAKQGKWLGGKPPFGYTYDKNSGQFIEYPEELCYVKEIFNLYLNGHGFQHIANTLPNGSRRGKDWGKENVKAIVLNPFYCGLLSWRRQTDGKQNARDIWIEAPNHYVKPIISRTIWEACWRIYSEKRNGNMIPKHYKTSFLLQGLLSCEKCQELMKTKNQQTVSSTNKKYGGKIYFCNNCKLRIDADLLHDKVVNQTLTDVKISGFHNVYHAIEQKIQYEIQELNNNIQKHQHLFENYTIKLHNITEELKQRMKNNDDKRFLKSLAIYRSDVQRKLDGIIQQMNDFKQQIILKEKIEKSKETWSYTLNEVFQDDVKLQEISDMDKRRFLLPLIQSVSVKENKKRNEYDISLQLRTDFSKRDVKNQISLIL

SEQ ID NO: 9855 - protein, 591 aa, synthetic construct
MAKITRVEQAVPTIKTKKKVAAYARISMESERMNHSLSAQISYYSSLIQKNPDWQYAGVFADDGISGTGIAKRDEFKRMIEAADNGEIDIILTKSIQRFARNTVDLLETVRHLKDIGVEVRFEKEHINSMSGDGELMLTILASFAQEESRSLSENCKWGIRKRFEKGIPNGHFRVYGYRWEGDDLVIVPEEAEIVRRIFRNFLDGKSRLETEREFAAEGITTREGCRWVDSNIKVVLTNVTYTGNLLLQKEFISDPISKQRKKNKGQLPQYYVEDTHPAIIDKETFDYVQSEIARRKELGPRANKSLNLTCFSGKLKCPFCGISYAHNKRTDRGFMEYWACGSRKKKGGRCPVGGSINHENLKKACAEVLGLEEFDEDVFSEKVDFINVPERYVLEFHLKDGGIVTKDCPNTGHQDCWTAEYRAKTSEKRRKKPNCKGSSVMTGKIKCAGCGCNFRRASQPSATSESGKAFYWRCAERNGCGTVGLREDVLKPFIAETLGIPEFDDAEFEKRIDHIDVLSATEMVFHFKDGRTVSRTWEQPKRVGRPWTDEQRAKFKESIKGRYTPELRRQMSEHMKQLRKERGKAWRKEK

SEQ ID NO: 9856 - protein, 526 aa, synthetic construct
MAQRKVTAIPATISRYTATPINSMKKRRVAGYARVSTDHEDQTTSYEAQVDYYTNYIKSRDDWEFVAIYTDEGISATNTKKREGFKAMIADALAGKIDLIVTKSVSRFARNTVDSLTTVRQLKDAGIEIYFEKENIWTLDSKGELLITIMSSLAQEESRSISENVTWGQRKRMANGKVSFAYSRFLGLDKDKETGKIVVNPEQAETVRLIFHLFLEGMTPHSIAAELTRRGIKTPTGKDVWNQQTVRRMLSNEKYKGDALLQKEFTVDFLEKKMKKNEGEVPQYYVEGNHEAIISPAVFDMVQAEIAKRTKGGTRYSGVSIFSNKIRCADCGGWYGAKTWHSTDRYRKVIYRCNRKYNGEKCQTLHVTEDEVKTAFVSAYNKLVTEKKEIIANAEIIRRTLCGTDTLREEKSRLEDEMSVLVEMTQNIVAENARIAQDQDEYQKRYNGLVQRYDAVKARYDDVVATISAKEAQSERLENFIKVLKAQDGTIREFDCSLWGGMVEFLTVGRNKEITVTFRDGTEIQA

SEQ ID NO: 9857 - protein, 542 aa, synthetic construct
MEQTAQRQVRIIPATKNVNAPLKGAQKHQRVAAYCRVSTDSEEQITSYEAQKAYYTQKIEENPDWELAGIFADKGLSGTSMKKRENFNKMIAACKKGKIDTILTKSLSRFARNTVDCLETVRMLKANGIGVIFEKENINTLTESSEFLITLFSGFAQAESESLSKNIIWGKEESKKAGKVPFQYKKLLGYRKGPDGKPEIDPQEAETVRRIYRRYLDGCSLSQIQQELEADRVPTAQAIQRWSYQVIRNILTNERYIGDAMLGKTFTTDCISKRVKKNNGERGQSYVRNNHPAIIPREMFYRVQEEMARRSSKRKVMQKTGKTELGKYSAKYALSELLVCGECGTPYKRVTWARNGKKRIVWRCISRLEFGTKYCHNSPTLDEEKLHQAIQEAINEFVQAGTEVKEDMLTFTAMAWGGDTVGGVSLIDLRQKLKDITAQQALLLDQVLEHMDDEILNAQLKAMIEEKQALQEQIADAEQSETHNAAQESRMTELREWMAKLEVNQQYSDEQVRMAVERITVVDAETIRIRFRYPGAELEKKL

SEQ ID NO: 9858 - protein, 519 aa, synthetic construct
MAANVTYIPPKAANPEALRVAAYCRVSSDSSDQLHSYATQIKAYTEQIGAHADWELVDVYADEGLTGTRMDKREDFQRLLADCRKGKVDRVLCKSISRFARNTRDCLAALRELSALGVTVYFEKENIDTGTLTSELMVSVSGALAQQESISISQNLKIAWRRMMAAGDFVTTNPPFGYELVDGCGLRIKESEADIVRWIFASYLAGISTREIAKSLTERGILTTEGNAVWNPRSVQLILDNEKYKGDTFTLKRYTTNQFPFAVKRNHGEVDQYYIENSHPAIINTDTFERVQKLKERRTRKRQLDKQDSPLRGKMACGVCGTALMRRTTGKGLISWVCRKHDENAADCPVGRIPETEIYAAFVRMYNKIRANADIVLKPALTQLDDLERALQRENPAMLEINRAIAQVAEQSHNISKLQTAGLLDADACAAKLSSIQIKLTQLRRERRRLLEHDDIEDAISRLHQTADTIKSGPEQLDTFDESLFEELVERIIAESQTCIRFRLWGGVELTEEVRRAKR

SEQ ID NO: 9859 - protein, 545 aa, synthetic construct
MLGAIYARYSAGPNQTDQSIEGQVADCQAYAERNGIQIVEIYADRHISGKSIVGRNEFQRMLHDAEQHRFECVIVWKIDRFGRDRQDIALSKMKLKKAGVRLLYAEESVPEGPEGIILESVLEGLAEYYSADLRQKIVRGMRETAKKGQYCGAPLPIGYTVDDEKHIIVDEEKAAVVREAFRMHNAGAQTKELVELFRKHGVTGQRGKPITQAVIYRMLRNEKYLGRFEIQGVEILTDPIIDLATFEEVAKHFGTPRNNAAGRAKVDYLLSCKCFCSYCGAMLNGESGTSKTGKVYHYYKCGAKKRGEKCELKPIPRDHFEDRVIEATVEDMLTEDMIEKLTVRILEIQEQEDALDPAVAYRKQLDSNRKRQRNILDAIEEGTGARGLAGRLAELEAEEEELLVEIERAEMKKPRLTSEAVGAWLRSFRNGDTKDAAFRQRLVDTFIARIEVRNGQAMIFYNIQEKGPHSKVRVRSEWWTRRESNPCPKSDPREYLRVQSVYNISFAAGRQTGRGIGSFMGSWPPAKLRAAHVQCLNDALAPHGT

SEQ ID NO: 9860 - protein, 522 aa, synthetic construct
MYAIYLRKSRADQEAEARGEGETLARHEQELTKLSIKMKLPIGAVYKEIVSGETISARPWMQQLLLEVMQGKWEGVLVMEVERLARGDTKDQGTVAEAFKFSHTKIITPTKVFDPDNEYDEEYFEFNLFMSRREYKTINRRIQRGRVSAFDEGWYIAGTAPYGYEKVKKKENKGYVLEVVPDEAKIVQLIYELYTTSQEDGTSFGSYQICERLNLMQVPSRTGRKWSASSIMDILRNPVYAGYQRWGWRKPEKQLIDGKIIESRPKNDDCKKVRGKFKPIISEELYEQAQLIRKCKPIPKTGITMLQNPLSGLIYCAKCGTMMTRSGSNTKTNYPVLRCPNSRCDNVSAPLLLVEQKLLTSLSDWLRKYELDWPKEEREEYASVISFKEAAYKSVRSAYGQTEKQLSNTYDLLEQGIYDIETFQERRRVLEEKRCTLQVELDKLKRDYDNAIESDSAQRDYIPKVKNIISIYWTIDDVSVRNEMLKSVLIKADYLKIERNRKGQGSTANFTLNIYPKTPKEP

SEQ ID NO: 9861 - protein, 545 aa, synthetic construct
MRTIRKIEQKISGLKQRKKVAAYARVSMESERMHHSLSAQVSYYSKLIQKNPNWEYAGVYADYGISGTGIKKRQEFRRMLEDAEAGKIDIILTKSIQRFARNTVDLLQTVRHLKELGIEVWFEKENIHTMSGDGELMLTILASFAQEESRSISDNIKWRFRKKFEQGIPHAKFFVYGYCWEKDNLVIQPEEAAIVREIFDAYLQGRTRKDILRELKRREIRTMYGNYFKDASIRQILTNRIYTGVLEMQKTFVTDPITKRQAVNHGERNRYVVEWHHEAIISSDMFEWVQQELKNRKEMGMQRGGYARDFLNTSCFTGIIKCGICGKIYVHVVRKYKGRIREYWTCDSHKGKGTNCGAYGSIPQPALKKACAAVLGTDEFDEELFVQRVKKIVVPSYHTLVFHFKDGNVITQEWKSTALKDMWTDEQKKKQRQWMETYHQRDTSGRYTAFSECIVCPACQTKFIRCLEKRMNGKVAYWRCRGEHRCIHVRSIKEEWLQRMAAETMGKLEFDDTAFRAQVQRIEVQDNETLLFQFNDGHTKEVKLP

SEQ ID NO: 9862 - protein, 465 aa, synthetic construct
MKGNAGDTIVKKIDLSPELVRVALYIRVSGEEQKIKGLSLEAQQERLEAYARERGWVIVGIYIDAAKTARKNIHKRTDFQRMMDSVKRDEVDILLFCRLDRWFRSVADYYKIMEVLEAHNCDWKTTDEEYDTTTANGRLYINVKLSIAQNEADIDGERIDVVFDSKIAHGTVVSGSAPFGFRVNEGKRLEVVPEDAAIVQDAFNYFETSISQRATVRYIRETYGVNWCDATFRRMLKEKLYTGVYDRGGRFNDHFCPAIISKQQFDRVQALLERNARSVPSGKVYIFTSILTCAECGHKLVGYKSSDYYYYRCNQHFQRGRCSHNHSAREDVVEKWLFEHLAEELERCQLEWEVAAAKKKASVARTDKAALKRKLTKLKELYVNDLIDIEDYKRDYQIYTAALKQIPEPSIEPPPDFAAVRRLLDNDFKTIYENLTREEKRTLWRSVVKEIRIDNDQNITGVVFG

SEQ ID NO: 9863 - protein, 524 aa, synthetic construct
MAKTVTTIPATISRFTSSPINENKKRRTAGYARVSTDSEEQFTSYEAQVDYYTNYIKSRDDWEFVEVYTDEGITGTNTKHREGFKRMLADALAGRIDLIVTKSVSRFARNTVDSLTTVRQLKEKGIEIYFEKENIWTLDSKGELLITIMSSLAQEESRSISENVTWGQRKRFADGKVTVPFNRFLGYDRGEDGNLIINPEQAATVKRIYSLFLQGMTPFGIASTMTADGVLSPGGKERWNAGSVRSILTNEKYRGDALLQKSYTVDFLTKKKKVNEGEIPQYYVKNNHPAIITPDVFDLVQRELARRDQSRGRHSGVHLFSGRIKCGQCGNWYGSKVWHSTDKYRRTIWRCNHKFKNDEICTTPHLTDEEIQDFYLSALRRLLADKDEIIAAFEIAKDVAFDLSALTTERDELQNELLVVSELMHLCINENAHVALDQADYQKRYNGLTDRFDKAKTRLEAVTGEISGKQARQATIEAFLDELKRLDVVTEFQHALWYSLADFMTVYSKDNVWVTFKDGTEIKA

SEQ ID NO: 9864 - protein, 590 aa, synthetic construct
MKTIVKIEPAIPQMPVRKKVAAYARVSMETERLNHSLSAQISHYSELIQKHSDWQYVGVYADDGISGTGTSKRDEFRRMVEDCEAGKIDIIITKSISRFARNTVDLLNTVRHLKDLGISVRFEKEQIDSLSDDGELMLTLLASFAQEESRSISDNVKWGTIKRFQKGIPNGQMRVFGYEWIDDQLTIIPEEAEVVRFMYREYMKGASRIEIGRILNEKGLYTRQGKEWVDSNVKVVLTNITYTGNMLFQKEYVEDPITKRRKKNRGELPQFYVEDTHEAIIPMDEFQKVQTEFKRRRDLGPLGNKSLNLTAFSTKITCGICGKHYRRSGKRNTAGEVYYIWTCLTKSQKGASTCGSKNIPEKMLQNVAAEAMGLTEFDDVAFGEQVEEIYMVSADTLQFRFYDGREVTTTWESTARTDCWTPERRRLWGELHKRKETNPNKYIYNEFTGFIRCGQCGSNYRCQSKVMKDGTRARTWHCTGPAGVCDKVSIRDETMKALVTDVLVLDSFDEAVMDNQLEYAAVLGNNVTFHFRDGHEVTKSFKKKRQGTKWTEERREKQTQAIRASWTDERRAAASERMREIRSEKKWPKP

SEQ ID NO: 9865 - protein, 424 aa, synthetic construct
MVLTKSISRFARNTLDCLKYIRMLKEKGIAVYFQKENINTLDAKGEVMITIMASLAQQESESISKNVKLGIDFRNKQGKVQVNHNRFLGYTKDAEGHLIIDPEQAEVVKRIYRKYLEGASMDMICHGLEADGILTGAGNKKWYTSTVKKILTNEKYIGDALLQKTCTIDILNKIRVANNGIAPQYYVEDDHEAIIPKEIYMKVQEELVRRRNVQASPSGKKRMYSCTHCFSQMVVCGSCGEVFRRIHWNNHGCRSIVWRCASRLEQNGTVCNARTVNEKELEQVVLKALNEMLGSKSTYKEQLQKNLMQVLRNDTSAQKDRIAERLLVLQQELLNRANNREAYDDVAEEIFHLRELQQQTDSDETTKAIQMERIKELQDFIGQQSNELTKFDEKLVKRWLRQITVWDDHYTVELKSGLSIDVPA

SEQ ID NO: 9866 - protein, 668 aa, synthetic construct
MAYVRNKKKILKFWSKKKAALYVRVSTRYQVDKDSLPFQRKKLKEYCKFLGIEDFVIFEDDGYSAKNTDRPHFQEMMSRVRDGEFSHLIVWKVDRVSRNLLDFAAMYQELKDHKVTFISMNEQFDTSTAIGEAMLKIILIFAELERNMTSERVTGIMLDRAEQGLWNGARMPVGYRWNPEIKFPEPDPEEAKIVQFIFDEYERVRSTTKIARYLNHNQIASKRGGQWTSKLIRDIIRSPFYIGTYRYNLRESGRGPLKPESEWIVRENNHPAIIAKEQFDRCNAIMDENGTSRDTSDLRARKYVHTFSGRLVCGKCGANMIASKDRARANGWRPSMYRCAQRSRMMDCDNSKTVNESYIGPFIFNYVANLARIQKNFKNIKTLEQLEKELLKGPEFENMKVSKESLRRTFDALAFQEVGKGAYLPDIDLSDGDDDYTAAEQLSILKRELDKCKTAIDRLTDLYLYDPDSMTKEEFAKKKRDLVNKIAGYEKQIEASQVTGDKDDLADLEFIRKASAFLVAQRIVSKKHVDYIQMALDLDNEILKDFVDQVIDRIEILEGRVQSIRFVNGLVHEFTYSTPADLPVCQKCGGRIGSTCGCRTRTFDFAGKPYRRIKVGDPGDKFHGVTGAVCPECSAQAGRWHHWKCGIERCPICGEQLIACEHGPNGKD

SEQ ID NO: 9867 - protein, 523 aa, synthetic construct
MAMAQNITVIPARRTVGTQKKTEKVQKTRVAAYCRVSTEFEEQESSYEVQVEHYTSYIKSNPEWELVEVYADDGISATNTAKREAFNRMIQDARDGKIDLILTKSISRFSRNTVDCLKYTRELKGLNIAVFFEKENINTLDAKGEVLMTIMAALAQQESESLSANVRLGIQFRNQQGKVQVNHNRFLGYTKGDDGKLVIVPEEADIVRRIYAEYMDGASFLQIKRGLEADGILNGAHNEKWHESNIKQILTNEKYIGDALLQKTYTVNTLEKKRVANNGLAPKYYVEGSHEPIIDKDVFLRVQAEIARRANILTDGKKRVYSARYALSSLVICGYCGDIYRRIKWNNRGKKSTVWRCVSRVLKKSSGIDCPARTIREEDLQMAVVTAVNDAWARKDIVLPALKANVQAVVNGDTDERLAAVDKALAEKQAELLEAGKDQSGIDEIGDAIISLREERQDILTEAAMNTELIEKLEDLTTFLDEQTEALTEYSEAMVRRLIARITVYEEKMTVEFKSGLEIDVDA

SEQ ID NO: 9868 - protein, 513 aa, synthetic construct
MARITKIEATKDNSKRKLRVAAYARVSTDSNEQLVSLETQKNHYERYIKARPDWEYVGLYYDEGVSGTSMDKRDGLLHMLDDCDRGLIDYIIVKSISRFSRNTVDSIETVRRLCEKGIYIFFEKENIDTGKMEGELLLSILSSLAESESHSIAENNKWSIQKRFQNGTFKIGYTPYGYDNVDGQMVVNEEQAKTVRWIFEAILSGMSPGTIARKLNEKGIRTKRDGRWTGHTVNGMIRNEKYTGDVIMQKTYTDDRFNRHINRGERTQYLARDHHEPIISHEAFEAANAIINANGLEKGIHKDEDKYKNRYAMSGKIICGECGGTWKRVKLANHFGFSCNTHVRNKTACSMKTIAEEPVKAAFITLMNKLTYGRSLILIPYAEMLKSSQRSGNIDRLTELDEMLEKNTERRSQITQFFTKGLLDPAVYAEESDDLTEEADRLSEERDFLTTQMNGNRDQTEALDRLLKYTAKGTMITEFDPSLFTEHVDRIVVYERTEIGFAMKCGPMFRERI

SEQ ID NO: 9869 - protein, 520 aa, synthetic construct
MPRKKAPAAEAPRLVAYYRYSGGSRQTEQSIEGQRRDCEAYARAHGMTILREYVDRHISGKTDDRPAFQQLVADSAAHTFDAVICWKTDRLARNRYDSAVYKKKLRDNGVEILYAAESNISGAEGIIIEGLMEALAEYYSAELAEKARRGMRESALKGKALGSSRPLGLTVDADKHYIIEPTGAEAVRYIFEQYAAGLSSSSIVERLNAMGLRTSHGGPFNKSSINRIIQNEMYRGVYVSKKFDVRIEGAIPAIIDNDLWERAQKMFERNRQSRTPHASRADYILSGKLYCGECGCLMKGVCGRSSGNGQMYHYYACPGRSIGRACTRKNIPQDELEAMVVNAVADLLLEPALLEQIADAIVELQQAEAARPDPEKQALEKSLSDVRSKIQNILTAIENGTSSAALSARLADLEQQESTLSYQLSSLTAKKPLTFTRDQILFLLQQFRVSPSERTKAYCRRLVDTFVDHIELTNTELILYFNLSDETVDKNKKAPRSNPSEESSTEKRLVRVARIELTAS

SEQ ID NO: 9870 - protein, 453 aa, synthetic construct
MECVAYMRVSTEKQAEEGNGLDSQKRDIELFCRKNELVVSDWYVDDGYTGANMDRPELQRLINDCIKKRVKCVVAFKLDRLSRSMIDGLYIIERVFQPNQVLFKCVHDSVSYDSPMEQAYTQMMAVFAQLDKNTMMLRMRGGMLERIKQGYWIGGANTPYCYNYSKEKGILIPIPERKEQANRAIDMFIGGYSDLYIKESLGFHSEVLVRNVLTGVVNIGMIPYKGNVYQGLHEPIFDKERFELAQEIRKSRRKNKTACHTDANLLTGLCYCGVCGCKMRYQKWTHGKHKIYCCSRDKAMKYLPNFNPNCNNSLEWAADIEKQVESEILKISLNLSECKPIEKQSKLEIMQSQFEKEQVKLKRLYVLYSDGNDTVLEMIKNTEKSISDMKEKITEEEKNERNSQKKEVVYENIKKLADVWAHIDKKEKNNILKSIISRIVIVNGDVEIQLKNF

SEQ ID NO: 9871 - protein, 526 aa, synthetic construct
MQYCLYLRKSRADSEAEARGEGETLARHEKALLDLAKKLNLNITAIYREIVSGETIAARPVMQQLLQEVEQGIWDGVLVMEVERLARGDTIDQGIVAQTFKFSDTKIITPIKTYNPNNEFDEEYFEFGLFMSRREYKTINRRLQRGRMASVKDGKYVANKAPYGYNRIRIENDKGWTLEINKEEADVVRLIFELYTVGEKQSDSTFNRLGTGFIAKRLNAMKVPPKRGKVWVVASIRDILINPVYIGMIRWNWRPQQKKMIDGQLHISRPRATDYMLCKGLHPPIISKETFDIAQDLMRHNPARPIGEKNTVKNSLSGIVICGNCGRHMVRRPHTKYPDMLICSEPTCNNVGSQLRVVEERILQSLKEWLGEYKISWDITSPQIERISQVSIKKKALQKEQHELDTLNKQISKTHDLLEQGIYTTDVFLERSRALSLRMDEVKEHIAILDKELKTEITREDSAVNIIPKVEKLLEVYYDLPSPKAKNDMLKDVLEKVVYTKKERSKKGNLDNFDIAIYPKIPKYIT

SEQ ID NO: 9872 - protein, 438 aa, synthetic construct
MARTIQQISFPAPMRPSLKRVAAYARVSSGKDAMLHSLSAQVSYYSSLIQKHTGWLYCGVYADEAFTGTKDSRDGFQSLLAECRAGNIDMVITKSISRFARNTVTLLETVRELKTLGVDVYFEEQNIHTISADGELMMTILASYAQEESRSASENQKWRIRRGFERGELVNLRFLFGYKIEKGRVTVDPEKAAVVREVFRRALEGESLTSLAIDLNRRGFTGVLGGKWNSMRIREMLSNEKYLGNALLQKQYRNNHLEKKEIPNRGELPQYYAEGTHEAIIDQATFDAAQELLTEITENSPVKRPRQRSAFTSMITCTVCGRNYKRCTGGKRHFWNCPTAVQTDLPSCGTSQIPEKLLYDLAAQVLGLAQFDEGVFLERVKGIDALPDKTLVFHFKDGSTAELHWEHISRAKSWTPEMKEIARQRALAQRRGEKWQEP

SEQ ID NO: 9873 - protein, 525 aa, synthetic construct
MARAVTVIPPTIQPITHLARNAVVRRRVAAYARVSTSSEEQLTSYEAQVDYYTRFIQSKPEWEFVRVYTDEGISAVNTKKREGFNQMVRDALNGKIDLIVTKSVSRFARNTVDSLVTVRKLKEKGVEVYFEKENIYTLDSKGELLITIMSSLAQEESRSISENVTWGQRKRFADGKVSLPYSHFLGYRKGDNGLPEIVPEEAETVRWIYSLFLSGKTTGSIANLLTREGIPTPAGKKKWAASTVESILKNEKYKGDALLQKAFTVDFLTKKQKKNEGEVPQYYVENSHPAIIDPAEWKLVQRELERRKAIGRSYSGNSIFSSRLVCGDCGGYFGSKVWHSTDKYRRTIWRCNSKFTGEEKCRTPHLAEEEIKARFLDAFNALVSDKKRLLDECRTMQAALTDTGPLDSEIAALLSEVEVVSELTKRCIEENSTTAQNQATYLERYNSLAERYEAAKTKLVKLQAAKAQREAKAEDIGGFMFELAEYGEPLTEFDDRLWLTVIDTVTVHRDGRLTFKFQTGHEISI

SEQ ID NO: 9874 - protein, 522 aa, synthetic construct
MKDNVTLIPARRRLGNNVSKQESKPKLRVAAYCRVSTDSDEQAGSYEVQVEHYTDFINRNREWELAGIYTDDGISGTNTKKREGFNDMIEDCMAGKIDLVITKSISRFARNTIDCLKYVRQLREKNIPIIFEKENINTLEASGELLLTIMASLAQQESQSLSQNVKLGLQFRYQNGQVQVNHNHFLGYTKDEEGNLIIDEEEAKIVKRIYREFLEGASLGEIADGLERDKIKTGGKKYKWHLSTVKGILQNEKYIGDALLQKTITTDFIEKTRIKNDGSVPQYYVTGSQEAIIPRDLFTQVQEELLRRSNMYSNGDKRKRIYSSKYALSSICTCTRCGDIYRRIAWNNRGKRSNVWRCCTRVEYGPDACDAPTIGEEELQQATVKAINLLVRCSSSMKIVLLQNIEAAIADDNTGELETLNELLTAKQKELVKLAQAKKDYSALADEVDRLKEKKQKLLVAKADTEGFKKRISELEEYLIEANEELTEYDESMVRKYIQEIKIYEDRFKVCFKAGIELDIPR

SEQ ID NO: 9875 - protein, 522 aa, synthetic construct
MVAKIRKIEATPSFTAQKKIRVAAYARVSTGSDEQLLSLETQKEHYDSFIKSHSEWEYAGLYYDEGISGTKVEKRDGLVMLLKDCEEGRIDRVITKSISRFSRNTTNTLEMVRNLSKLGIYIFFEKENIDTEHMSSELMLSILSSIAESESRSISENNKWSIKHRYEEGTYIIGYPPYGYDNIDDKMVIVPEEAAVVREIFTWALSGKGSHIIANTLNERGISSKRGAKWHASTVQGILKNEKYTGDVIFQKTFTDECFNRHTNYGEKNMYLCREHHEAIVTHDIFDKVAEAMNRRGKEKGQGEDTGKYQNRYAFSGRIICGECGSTFKRRNHYKPSGNYIAWSCNGHLEDKTSCSMLYVNDNDIKLALVRMLNKLQVGQRQVIKVFIKGLRGQNDKERLRQINELEEKLEAYQEQQQVLVKLMSSGYIEPDIYHSEKSDLLQEAELLYTEKQKLSKSISGDLNHLQEAEKLMRFLSKKGILQEYTDELFLEFVDTITVQDRHTFTFNLKCGLKLTERLVVA

SEQ ID NO: 9876 - protein, 668 aa, synthetic construct
MAYVRNKKKILKFWSKKKAALYVRVSTRYQVDKDSLPFQRKKLKEYCKFLGIEDFVIFEDDGYSAKNTDRPHFQEMMSRVRDGEFSHLIVWKVDRVSRNLLDFAAMYQELKDHKVTFISMNEQFDTSTAIGEAMLKIILIFAELERNMTSERVTGIMLDRAEQGLWNGARMPVGYRWNPEIKFPEPDPEETKIVQFIFDEYERVRSTTKIARYLNHNQIASKRGGQWTSKLIRDIIRNPFYIGTYRYNLRESGRGPLKPESEWIVRENNHPAIIAKEQFDCCNAIMDENGTSRDTSDLRARKYVHTFSGRLVCGKCGANMIASKDRARANGWRPSMYRCAQRSRMMDCDNSKTVNESYIGPFIFNYVANLARIQKNFKNIKTLEQLEKELLKGPEFENMKVSKESLRRTFDALAFQEVGKGAYLPDIDLSGSDDDYTAAEQLSILKRELDKCKTAIDRLTDLYLYDPDSMTKEEFAKKKRDLVNKIAGYEKQIEASQATGDKDDLADLEFIRKASAFLVAQRIVSKKHVDYIQMALDLDNEILKDFVDQVIDRIEILEGRVQSIRFVNGLVHEFTYSTPADLPVCQKCGGRIGSTCGCRTRTFDFAGKPYRRIKVGDPGDKFHGVAGAVCPECSAQAGRWHHWKCGIERCPICGEQLIACEHGPNGKD

SEQ ID NO: 9877 - protein, 465 aa, synthetic construct
MARSITVIPASQPYRVGGRSQQKTRNLQVAAYCRVSTDQEEQLNSFENQVEYYTKYIQENPLYQMAGIYADEGISGTNTKKREEFKRMIRDCEEGKIDLVITKSISRFARNTQDCLEYSRRLKNLGIGIFFEKEHINTLDASGELLFTILSSLAQDESRNISENCKWGIRSKFKKGIPQVDCTKFLGYDKGEDGKLIVNQEQAKIVKRIYREFLDGYNPAAIAKMLMEDHIKTGTGREEWRSASVKAILKNEKYMGDALLQKTYTADFLTKKVKKNHGEVEQFYVKESHEAIIPKEQWEAVQLELERRDSYMQELGLTFYGYGSEVNPFSCRVVCGKCGAVCGKKSWKSRGVEFWQCNNRSKNHGVKGCASENLPHENLLKGFITAWNQIVAEREQYLPKWEKKKKEGNPLEKLRAEQMIELTLQPPLTKMLPELGQMVLERVIVQGKEIMVIRFLDGTEIKVRI

SEQ ID NO: 9878 - protein, 498 aa, synthetic construct
MQIEVRKADMGKEKKRLKVCAYARVSTEASEQENSLENQVSHYTEMIQSNPAYEFAGVYADFGISGFKESRPQFQKMMQDAKNGKIDLIITKSVSRFARNTAIVLKASRELKERNVGIFFELQNINTLTEAGELLLTILAAFAQAESESASESSKMAYLHRIENGEVVAYLERSYGYEKDENGEYRAKEPEASVIREIYDLVIQGVNCTNIARVLNARNIQTVQGAEWTASTVFRIVENEIYKGDVLMQKTFIDGKRHQVQNRGEKAMYYAKDNHPPIVSEKIWEKAQRKLEDMRAERAEHSVIQEFTEENYPYMNHIFCAKCGWPLKPRVYSHRHRLSWDCSGQKRGTKKFCTGIHVLDNDLRKMKIEGNRYFSETVDKYGEVHLKHVGERTWKNKHKKKKFNHKDLYPELNEENYPYYRRLYCARCGSRLGRYISHGTVRWICSSYKRKGQTKCPGVRIPDEIIKGWNLPDGKIYIMGKEDKNGEKHYSYTSESAL

SEQ ID NO: 9879 - protein, 435 aa, synthetic construct
MSKIVKRVPFAPKLERKKRVAAYARVSTAKDAMLHSLSSQVGYYSELIQKHSGWEYAGVYADEAATGTRDSRDAFQRLLADCRAGRVDMILTKSISRFARNTVTLLETVRALKALEVDIFFEEQNIHTMSAEGELMLTILASYAQEESLSASENQKWRIRKGFENGELVNLRFLFGYRISKDGIEIDDETAPIVREVFARVISGESFSAISRDLNARGSCCTLGGKWCAQRIRQTVANEKYTGNAMLQKRYRNNHLEKKLVRNTGELPMFYAERTHPAIIDQDTFDAAQEVLRKISEATRGRPHPQRSEFTGRIHCPFCGKAYKRNTSNGSVGWNCSTYLSQGKTVCHGKKIPEATLKAVCAEVFGMSDYNAEAFTTMVARIEVPEDNRLRFVFKDGRVAERTWPDRSRRESWTPEMRQAAAERTRRRRNTPCQE

SEQ ID NO: 9880 - protein, 526 aa, synthetic construct
MPRVTTIPATKNLFTALPTASVARRKVAGYARVSTDSDEQFTSYEAQIDYYTRYIMEREDWQFVKVYTDSGISATNTKHRDGFNEMVRDALAGKIDLIVTKSVSRFARNTVDSLTTVRKLKDAGVEVYFQKENIYTFDGKGELLITIMSSLAQEESRSISENVTWGQRKRFADGKVSMPYKQFLGYEKGADGSPVVNAEEAVVVRLIYRLFLQGKTPAGICRYLESQSTPTPSGKQKWSQTTVRSILTNEKYKGDALLQKKFTVDFLQKKMKTNEGEVPQYYVENSHEAIIAPIEWEMVQAEITRRKALGRAYSGSSVFASRLVCGDCGGFFGQKVWHSTDAYRKVIWRCNSKFKGGQRCATPHLDAETIQQKFLIAYDRLMTNRQSIIQDCEQMRSVLSDCSAIDTELDDLNEEICVVAGLVKACVEENASTAQSQEEYAKKYNGLLARYEKAAARVGELTTEKERKHDRERELRLFIASLKKQPLALESWDEKLWVTLVDRATVCRDGRIVFRFKGGSEIEVEP

SEQ ID NO: 9881 - protein, 516 aa, synthetic construct
MSYCIYLRKSRKDLEAEQHGEGETLARHERALLSLAKKNNLIISNIYREVVSGETIAARPVMQQLLHEVEQNLWDGVLVMEVERLARGDTIDQGVVQRAFQYSNTLIITPSKTYDPANEFDEEYFEFGLFMSRREYKTIKRRMQNGRYAAISEGKWPYNSAPYGFRRTKLEKEKGWTLAFDENEAPVVRLIFSMFTGPERVGIRSITRTLNSYGTKPRNSKLWSESTVRGILSNVVYDQCVKIGERKVVRTVENGVLTTTRPRTSDYTIVSGRHPRLIDHDVFAEAQSYLGCGSPKPAGSNIIKNPLAGIIVCSECKKKMIRRPPSGTASRVPYDLMLCSTYDCPTIGSPLDLVEREVYNALSDWVEGYRLSGQTPSKSLIPEKEVLLESAQQTLDQLLRQKGTMYDLLEQGVYSTEVFLERSASLQSRISEAQSNVAQLKLELDKERQREANIEQFLPACEDLLSCYWDLSIPERNRLLKLLIESIEYKKLTKNKRGHLNEPNFELTIKPRIPRK

SEQ ID NO: 9882 - protein, 523 aa, synthetic construct
MRFFSYGRKSVFSDKSDSIDNQFRMNREYCESKFSSQVDSWQQFSDEDFTGANTSRPDLQRMLSFIKNGFCDVLVVYQLDRLSRDVRDFANIYALLEEHGVMFISIRENIDTTTPIGRAMMYVTVVFAQMERETIAARVTDNMLGLAKKGYWTGGNPPVGYVRKHIVVNGKKHCSIEVDPDGARYVTQIFDTFLAYNCSLQGMETRFKNQGIRTRAGKFFSTTQLHKMLTMPYCVEATPEVYDFYAAKGCIMDPGSPREMWDGSVGVIIYGRSTEKNKKHQVQPPEKWTVCLGKHKPFMPAEKWLAVQSRFTQNKCIKDAKWPVPLLKGVLRCKCGNLMQISRKKKGDGTCSSWYYCRKRMRQGVDACDMSQIKCDLLDEKVLELFRGIAADPGLIQKFVKTKAPTDIPDLKAAQARLATCERKIGRLAASLALAEDSAASKYIIAEMERLDVELGALKREASLAEMESHRAAASAKDAKATAAEIAKLIHGLDGFDDKEKNAIARAVIQECTWDGERLFITL

SEQ ID NO: 9883 - protein, 526 aa, synthetic construct
MPKVTMIPATINPLTHLPKVTAQKRRVAGYARVSTDSDEQFTSYEAQVDYYTKFIQSKPEWDFVKVYTDEGISGCNTKKRDGFNSMISDALAGKIDLIVTKSVSRFARNTVDSLVTIRKLKENGVECYFEKEGIFTFDGKGELLITIMSSLAQEESRSISENITWGQRKSFADGKVHLAYKRFLGYEKGEDGRPTIVESEAKVVQLIYRLFLDGKSQAAICRCLEDLGIPSPGGKDKWSKTTVTSILQNEKYKGDALLQKSFTVDFLEKRMKPNEGEVPQYYVEGSHPAIVDPDEWDHVQTEFARRKALGRAYSGKSVLSAKLVCEDCGGFFGSKVWHSTDRYRRTIWQCNSKFKAEERCHTPTVNMETVQRLFAQAYNRMMENREQIIKDCETMRRALTDFAELDAEIERQLEETQVVAELVKAAVKENASTAQSQEAYLRKYEALTERYEKAAAELERLQNLRTTQSQQDKAMALYIRTLKKQPVVLREWSDTIWTVMVEKAIVHRNGAITFVFENGTEVKVGE

SEQ ID NO: 9884 - protein, 433 aa, synthetic construct
MSGRITTVSKPPKLERKKRVAAYARVSSGKDAMLHSLSAQVSHYSDLIQRNSDWLYAGVYADEAKTGTKDSRADFQRLIADCHAGKIDMVITKSISRFARNTVTLLQTVRDFKSWEVDIFFEEQNIHTMSADGELMLTILASYAQEESRSASENQKWRIKRNFEEGMPWNGAMLGYRLKDGRYEIVPKEAALVRRIYNEYLAGDGYQAVAKRLTEEGVPSRFGGKWNQSVVSKILSNYTYTGNLLLQKTFRENHITKKIAINHGELPKYHAEDAHDAIISIETFHAVQTEKARRAAQFNKKPAPRTTYPFTSLLVCDICGKNYRRKTTKTGIVWVCGTFNTLGKSVCASKQIPEATLQQVTAEVLGVKAFTREQLHSRVQSIRICNGNILVFCFKDGSEVTRTWKDRSRAESWTDEMKEAARRKTLERSKHNA

SEQ ID NO: 9885 - protein, 464 aa, synthetic construct
MARSVTVIPARSQKVRTGHKAVQEKKIRVAAYCRVSTDQEDQLHSFEAQVEYYTKYINEHENYEMAGIYADEGISGTNTKKREQFKKMIADCEGGKIDLVITKSISRFARNTQDCLAYSRKLKNLGIGIIFEKENINTLDSTGELLFTILSSLAQDESRNISENCKWGIRTKFKNGEMHLNTFKFLGYDKDENGKLVINKEQAKTVRRIYRDFLIGINPAQIAKELTEEKVPGCLGQTKWYPSTVIGILKQEKHMGDALLQKTYTADFLTKRQVKNNGEIAQVYVKDSHKGIIDKETWNAVQEEFERREKFMQKHGTDRYSYGSECYPFCEKIFCWECGSLFTRHSWKSRGIIQWQCKNHRKDGKVACTNAYVDNADLEKGFVKAFNRLVGEREKHIERWNSMKLDGTPLEKIRAGQMMEATESGQLQQYVPEAAQLVLEEITIFGAKKYEFAFLEGSRVKVSV

SEQ ID NO: 9886 - protein, 502 aa, synthetic construct
MEIQIREGSREQKRKLKVCAYCRVSTDADEQENSLENQVRHYETVIKANPNYEYAGVYSDFAISGFKEKRPGLQKMLADAEKGKIDLILTKSVSRFARNTSIVLEATRKLKELNVGVFFELQNINTLSGEGELMLTILAAFAQAESESGSAGAKMVYQRKYEAGIPVQYLERSFGYTKDERGVFVADEAEAVWVRKIYEMAADGYTPASIKRYLNENEVKTVGGVQWVDSTVFRLLENEIYKGDYIMHKHFVNEERKLVRNRGEVDAWYIEDDHEAIVSPELWQKAQDALAAKRDYLAEGSVIEEFTEENYPYMNKIYCAKCGYPLYKRIYSKGNRLNWGCSGTKRYGKTFCDGINIPDGVLRSAWHFKENTYIAEKASDKGVKEFTYLKEQSWKRRHKKKQPPAIPENTEAEYPYREKIFCALCGSRLVRYVNPQSHKVTWVCSRRKRKGKDACDGTRVPDTIIKGWGEIKKDIYIQRKDDKNGKKRYSYTSKKPEGADRA

SEQ ID NO: 9887 - protein, 531 aa, synthetic construct
MDTYCIYLRKSRADAEAEARGEGETLARHEHTLCDVAKRQKLHISKIYREIVSGETIAARPQMQQLLQDVESGIYAGVLVMEVERLARGDTIDQGIVAQAFKYSGTKIVTPTKTYDPDNEFDEEYFEFSLFMSRREYKTIKRRMQAGRAAAAKEGKYVGNKPPYGYDRKKLDHDSGFTLVPNPEEAKVVKLIFEWYVHGVVMDDGTKQRIGSTTIANRLHLMGCKTRYGGRWSLNTVRGILTNPVYAGIIRWGYLAEKKVLSDGVVTKSRPIAKDDYIMAKGLHEPLITLEEWETAQELGHQKRTIPKVNCSFKLQNPLAGILVCKKCGRSMTRRPYGKKNRQDTILCKTPDCPNVASDLCLVEQRLLDSLAEWLHQYEVQWQEHTLQAPATEPEDDQTAVLEDLRKEQAKVKAQLEKAYDLLEQDIYDTNTFVERSGTLKAKIADLQDSIDRIEKNVREMSSRDDDMQKIMPKVKHLLEVYDTLPDASAKNQLLKEVLEKAEYSKEHGTRWHGNPDDFEVVIYPKLPKMR

SEQ ID NO: 9888 - protein, 477 aa, synthetic construct
MKDSKSKTVIIYNRVSTIMQDKNESLTEQTDECIRYCKTNGYEIYKILKDVKSGTKDDRAGYLELKKHIKRKDFDILVVLETSRIARKMKELVLFFSLLNENNIEYISIREPNYNTTTPDGKFAMNIRLGLIQFERDNTAERVTDRLYFKASKGQWVNGKPPIGYKLVNKRLEIDEEKAEIVRNIYEDFLNGYSLNQINNKLQFSWGSKQVKRILTNPTYKGYIRYGTRSSRKKNNREAFIVKGWHEAIIPEDKWEKVQEMYKSLNRKASNTKPTLLGGLLKCKECGNNYIRKRGGSYDKNLYYGCNLNNLRYSDKFFYKDIPECSSATIKGDLLEKAVIDTLKKQINDLNFNDIEIDKKRQVNIKQIDSSINKFKNRLNKIYELYIEDEIPKDKYLKDKKDIEARIISLEKQKKSFGEIEVEKSNNEMIQEYFSKIDLSNIEEANRILKIIVNKIVVYKKKKTPKDDFEVEIYLNI

SEQ ID NO: 9889 - protein, 548 aa, synthetic construct
MATKKKRSAFKRRGNRVIIYIRVSDTTGREDRLISHKVQEDQCARLSQREGLDVIDVISDIDLSGRTSEKRAIRKIIDRIERGEADGVVVWKISRWGRNTIDSMLNIGELQDAGGFIASASENLDEIDTPAGKFQLTVLLAIAQMYSDEIGKTWANIHDYRVTNGKTHNGSPRLGYVYAKHIPEDAVDRYPMPEGADYAVDPETGPWVRKAFEWYAAGESYPEIVRRLEAAGIKSVRGNPIRVTSLRGTLESGFAAGLVVDRRGEDVEYRPGKHEALVSPETWEACLQRAKKKSDPRTKSAPFRLAGLLFCGTCGTRMVAQWRTNKRTQKKYRFFRCGRVQKTSRMVCPAPALVDETRAEKTMLEWLRENAEGESAKNTEMSRAMAVDRAEVDLTKIDKEISRLDRSMLRLYNEYEAGRVAQHVYKLKETEILEQRERLEAAKDSANIAVKVNAIPSLTVFGAVLAGWERLSPAVMNEALQAVVGEVLVYKADQRWARSRLRVVGQWEDMVSPGLRDRMREVQEEAKRQAAEEVNWKPLAAKADLTAV

SEQ ID NO: 9890 - protein, 527 aa, synthetic construct
MYELTQSMESLSVDEIIVYLRKSRSDSPEMSVEDVLKKHEEMIQDYANTHFGSPIPEKNIYREVVSGETIDSRPQVKIVLQKIESPQIKAVLIVEPQRLSRGDLEDCGRLINILRYTNTMVLTLTHSFNLQEEYERKFFEMEITRGNDYLEYTKRILRRGRESSAAKGHYIGSVDPYGYRKIVIKKDGVNCHTLEIVPAEANVVKLIHELYAYTPGGIGFTNIAHKLDSMNLKPKKAAHWTPAIISSILCNPLYLGLIRWDTRKVVKYISDGRLEKSRPRSSDAKYYKGLHEPIISQELYDACMARRGTNPRLRRNKELCNPFAGLLYCGTCDHAMSLKIYKNHNSVSQIMLCNHQSYCHTKSVLYSAFLERFISSMENTIHDFELALLADNGNAQAVNQSIVANLETRLKKLQEKDMRQKDAYEDGIYSKEEFLERNIKTQQEIASMITALTAAKETKENYVDYGEKIRRFRDCINALNDPELSATEKNQFLKSCVSKIIYYNNMESKAGVGRYVENVFSLEIQYI

SEQ ID NO: 9891 - protein, 503 aa, synthetic construct
MEITVEKVDTGVQKLGFQALSTLKTVRVAVYARVSTDQEIQLHSLEEQMKAFRAKIAQHPGWMLVDVYADEGISGTSVKKRKEFLRMMEDCEAGKVDYIMAKSISRFARNTVECLSYVRHLQSIGVQLYFEKEGLDTATSVSELILTVMAAFAQEESRSISENLKWGIRKRFESGESRWTKTYGYRKTKDGEIVIEPDEAAIVRMIFKMYQYGIPMTDILDELTFIQAPSARGKQTWNKTALKYLLENEKYIGDMRLQKWVSVDHISHRSVRNDSTVIPVYNVRNHHVPIIDRHTYQQVQRIMELKSPHGEYSRYPYFDTNIVCPLCGKKMIPRVMKVNSHKRILGCFDVDGCRGYAVKGYLVDAALLEAYNTLEIKEKKRTVAMQRMLEIKAESPKLDTVQYYWLDDLVGHIEFKQDTMRVLWKCGLESEVALNASKVEEPTHVAELYRNSLDRAQRSENKPVSVVRADKKSVNTREAQRNAAMQTAKNLRAKENGVAANDY

SEQ ID NO: 9892 - protein, 552 aa, synthetic construct
MPTSKNTARKYAAGGSSDNSCGVEPLRAVIYARYSSSGQREESIEGQLRDCYEFAKKHGIIVIGEYIDKAMTGRVDRRPDFQRMMKDSEKGRFNCVLLWKMDRFARNRYDSAMYKYKLKKNGIRIFYAKETIPDGPEGIILESVMEGYAEYYSENLAQNVKRGNYDSALELKTLGKTCLGLKTGPDGRYMIDQAEAAIVRRIFEEYAEGERAKDIYERLNSEGYRTSRGGKFNKNSLRRILSNKKYIGVYEYEDIYVENGIPAIITDRDLFERVQKMLKINHDAPARGKAQNFLLTTKLFCGLCGSPMIGDGGTSHTGKAYAYYSCTKRKRGRSCKKESVPKDWIEDLVVGELVKIVHNDELIEQIADRVMEYQKREKDQSGLHVLEIRQKENEKAISNMLAAIEAGIITPSTKTRLMELEADRADIEKGIAHELLAEPEFERDQIIYFLERFRSGDINDEAYRIMLVDTFLNSVYLYDDDHLVLVMNYSGENCKVDLKLVEGAVSGDGCKGSAFAPSSALKKDSVFTGSFFLFMIIECSRSAHSIICSWMR

SEQ ID NO: 9893 - protein, 517 aa, synthetic construct
MLYAIYLRKSRADLEAEAMGQGETLARHRAALLDYAAHHGLEIGAVYEEIISGESIDARPKMKQLLREVEQGRWAGVLCMDIDRLARGNSADQARVSNTFRISGTLIITPSKVYDQSRESDEEYVDFELFMARREYKAISRRIMRGRIASVKEGHFIGSTPPYGYDKVKVEKGRGFTLLPNSESDTVKQIYSMCISGMGCNAIARRLDMMGVTPRKGSSWSSASIQDILKNPVYCGKIRWQYRREEKSLTDGIVTTRRRENPDCIIAQGLHPALISEEEFDQAQQFLNSRRIPHKKESTELRNPLSGLVYCGMCGSMMTRLGTGSRNHSDTLRCPNRNCGNVSAKLELVESALVEGVARWLNDCRVNVSRKPAADTAKAERTAAEKVRAELAKLDSQREKIYSFLEQGVYSAGEFRERMESLEKRRTQLSENLRQAEQAVSEAEGNRQLYAQIIPSVERVMDIYAQSTPEEKNRLLKTIISRAEYIKTERNTRGNADRCNFTLNVIPLFPEIKTGAE

SEQ ID NO: 9894 - protein, 500 aa, synthetic construct
MNEKINAVIYARFSSHNQQEQSIEGQLRYCSDYANKNGMTVINSYIDRAISGTSDNRPSFQQMIKDSNNKKFDVVLVWKLDRFARNKYDSVVYKNKLKKNGVKVISVTEYLGEGTESVLLESLLEAMAETYSRQLSENVQRGMRESAMKGLSTGGNIPLGYKIVDKKYVVDEAEAEIIKYIFNNYADGKPKKQIIDEINSKGWRTKKGCKFKYNSFNTILKNRKYIGEYNYQDLVVKDVIPAIVDVDVFNQAQSQMTQNKRTAGTQSAKREYLLSTKLFCGQCGGAMTGETSTGRHGGKYGYYMCRNKKFHKNNCEKKRERQEELEEFVVQKTVAMYSDKQFMQLIAKKVVKLYNDEFGSNHIATLEENKHKLETRFDELSNALVKTTNARMLDKFNKEIEQIDIELQELEIEIARENSIAHAQMTVDDVIDFINEVMKGNIKDKKFQKQIINTFINAIYVFDDKLVIYYNGSSEAEKVSYSDMLKDMKKGATSATFAPP

SEQ ID NO: 9895 - protein, 515 aa, synthetic construct
MKIKKIEAQPHEVKKLRVAAYCRVSTDNDDQKESLEAQKAHYETWIKRHSNWDFAGIFYDFGITGTKADVRDGLQALMYECRIGRIDYVLTKSVSRFSRNTTDCLSLVRELLSYNIPVYFEKENLDTGSMESELILSIISGMAQDESESISKNVKWTVQKRIEAGKYKFGYPPYGYGRDENGMMVINPEETKHVRQIFDWALSGIGTFKIAHMLEEQGVPTRKGSAWAASTVKGILTNEKYYGAAMFQKTYTDSSFKRHRNHGEADSYFVSGHHEAIVSEEEFHKVQEIIEMHIKEKCIVRGTRKYNNRYLFSGIITCGECGDTFKRQTISSGISWCCKTHLKNKAKCSMMFIHEEAFKAAFVTTLNKLVFGGKQVLYPYYEMLRITNSDENIQRIQGMKQELQRYAERKDTIRQLRAKGIIDSAVYNQEIGSIDKQCEELRSKITALQQSDASAVLSETEALLRFSDSAGMQTEFSEQLFASFVERIIVYTRKSVGFKLKCGLTLKEELCTDTK

SEQ ID NO: 9896 - protein, 517 aa, synthetic construct
MAQVKIIAPQTREAEHLRVAAYCRVSSDSKDQLHSYAAQIRSYTEEIAQHDGWELVDVYADEGLTGTRMDRREDFNRMMADCRKGKIDRILVKSVSRFARNTRDCLSALRELSTMGVSVRFEKENIDTKTLTTELMVSVSGSLAQQESISISANQKMSYQRRMERGEFITCTAPYGYRIVNKKDLEIVPEEAATVRWIFDAYLKGRSSGWIAEQLTAKGIPSQSGAECWRETGVRYLLTNEKYIGDALSQKSYSCGFPFVQKRNHGERLQYYTENSHPAIIDRDTFERVQALLQKKAQKEKKRREKSPLALKIVCGNCGTVFQRRSSQNGYVTWVCRTHDRHAADCPVGRIPETEIHAAFLRMYHRLKSNADIILAPALRQLNTLGTILRQNHPQVLAINRAIAEATEESHKISTLRANGLLDADICAARMNAISARLAQLRGERRRLTENEAIDETMDALRKVEQTLLNGPERLDGFDEELFERLVEKIIAESQNRIRFRLYGGLELTEQWEVAAR

SEQ ID NO: 9897 - protein, 522 aa, synthetic construct
MIAIYTRQSIEKKDSLSIDAQVKACADYCKAQGWEYEIYTQDHGFSGKSLDRPGFQAMMSAVRSGQVNKIVCYKLDRISRSVSDFAQLLQELEQYKCDFISVTENFDTSSPIGRAMVYICMVFAQMERENIQERVKSNYYYRSGLGFWGGGPAPYGYQLKRQQIAGKVHTVLEPDPNEAPWVKKMYEWYLEPGGSAMKILRLLTENQVPTKRGYKWTSRVLMDVLSKPLYTQNSMDVYNYLTQSGAMISNPPEDFDGTLSVDLYGKKDSSQSKHKRCRKGSDMYCNISLHEAIIDSDTWLQVQYKILARPKIGGRTGTSKNSWFTGLMICGVCGRHVSFTHSARTSGYYICSSRKNCGWNSCSSKPASKKKFDPIIVKFIRDHYDSPETKAAIQQAKLAAKTPQVSIERNNLQMELATINNQIDNLLTSLASGNAVMSKYINDKITELDAKRTPLQAKLLKFDATSSVNDELKRLERIEWAMEQLPLVYTEDTFDLSVQVSQALVNNIVFNSDGEVTISFAI

SEQ ID NO: 9898 - protein, 567 aa, synthetic construct
MSATATKNRVAIYVRVSTLYQADKDSLPMQKQDLISYAKLMLNTDDFVIFEDAGYSGKNTDRPKFQEMMFQVRTGAFTHLLVWKIDRISRNLLDFSAMYKELKDLGVIFVSKNEQFDTSTAMGEAMLKIILVFAELERNMTAERVTATMINRASNGLWNGGRIPYGYCYNHETQKFTLNNSESKIVNLIHDKYEETRSLIQETRWLNENGYRTRAGNEWNPVSIAIILRNVFYCGDYQYNRLKEGNRQRQKNKSEWITVENHHIAIVTREQKQRILNILESNARLCKTRNMYISTKHVHIFSGLLYCGSCGNPMGSSPASAKKDWQYSKYSCSTRRKSTTSCSGKSVSDPIVGEFVFNYILNMLNAQKSFSTISSPSILQQRLLMGDTFQSIAFIESDGLNDLYNMLLSGSISGEIYGNDANFKVSDSGLSNLQSKKQKLERALDRLTSLYLYSDTAISEREYIVQKAKLTDSLDEINEQIGFIGSDSYRQAISDNLLIERASQFIIAQKLSDRNYISYKRLAMSVDAEVLQSFVRGIIDNIIIDCGHVKQITFRNGLSHIFVYKEH

SEQ ID NO: 9899 - protein, 527 aa, synthetic construct
MVQRKVTAIPATINKFTATPVNSRKKRRVAGYARVSTDHEDQVTSYAAQVDYYTNYIKGREDWEFAGIYTDEGISATNIKKRDGFKRMVADALAGKIDLIITKSVSRFARNTVDSLTTIRKLKEHNVECYFEKENIWTFDSKGELLLTIMSSLVQEESRSISENVTWGHRKRFADGKVSFAYSRVLGLEKGPDGNIVVNQEQAKIVKLIFRRFLEGMTPHSIAVELTEMGIKSPGGKDKWNGATVRRMLSNEKYKGDALLQKEFTVDYLQKKTKKNEGEVPQYYVEGNHEAIIEPSVYDLVQVELAKRSKKNEARYSGVSIFSNKIKCVECGSWYGSKVWHSNDKYRRVIYRCNHKFDGNRKCETPHVTEEEIIAAFIKAMNTLITEKDEIIENIHLIRQTVCDVTALEQEQDKLRNEMEIVVELTQSCVAENARTAQNQEDYQKRYDGLVERYEKVKSRYDAIVEAIEEKQAHYEKLGIFIDTLEKHGEPITEFDAGMWGSMVEYITVDKDKKMTVTFKDGSGVEV

SEQ ID NO: 9900 - protein, 594 aa, synthetic construct
MPKISKIEPTVPAIKQLKKVAAYARVSMQSERMMHSLSAQISYYSKIIQKNPDWEYAGVYADDFISGTNTVKRDEFKRMLADCEDGKIDIILTKSISRFARNTVDLLETVRHLKAKGIEVRFEKENINSMSGDGELMLSILASFAQEESRSISENIRWATKKRFEKGIPNGKFKIFGYRWEDDKLVPVPEEAEIVKRIYQNFLDGKSRLETEKEFAAEGITTANGCRWVDSNIKVVLTNITYTGNLLLQKEFIEDPITKRRKKNRGEMPQYFVENTHEPIIDMETFRYVQDEIARRKELGALANKSLNTCCFTGKIKCPHCGVSYMHNKRTDRGNCLEFWCCGSRKKKGGRCGVGGSINHKNMVKACTEVLGLEEFDEEIFLREVDHIDVPKRYVLEFHMTDGRVITKDCPNTGHKDCWTAEYRAKTSAKRRKNGTNCKGSSCFTGKIKCKNCECNFRRATQPSATAENGKVNYWRCSEHSNGCQTAGLREDALIPLIADTLGMAEFDDALFRKTVEYISVLTDKDLEIHKKDGMVTAVIYTPPAPKRLPRTEEQKAHMRSLMKEKWTPERKVEMSERMKQMRKERGENWCKEK

SEQ ID NO: 9901 - protein, 516 aa, synthetic construct
MSSVDKIAVVYARYSSHGQTEQSIEGQIAAAQKYAEQHGYTIIHVYADRAMTGRNDDREEFQRMLSDTATHQFGVILLWKIDRFGRNREEIAFNRYRCKKNGVRVERVAEDVPDGPEGVILDSVLEGMAEYYSLQLAQNVRRGQRESAKKSQTVGGCKIIGYNVDPDTKRYEVDPKTAPFVTEVFKRYANGETISEIVAWLNAQGVRTTRGGEFTVNSLHRLLKNEKYTGVYIFHDIRNEGGMPALIDRATFDKAQEMLKVNRRAPARVWSKTEYLLTDKLFCGHCGAMMVGESGHGRNGTKHNYYTCWNRKKKKLCDKKPVRQDVIEPLVLRSIGKLLENPATLENIADQVWAAYERSDTSGDTIKALDKQIADVDRALSNVMKAIEMGIINEMTKARMDELTDQKQALSAGRAEAGLAGGFKLTRDMILFFLQEIAALDMADRDSQKRLIKTFVNAIYLYDDHFDIAFNYTDKGKVVVRMQEINDAACGEVFGRCAQSPAKRGCCTSSKKERPK

SEQ ID NO: 9902 - protein, 543 aa, synthetic construct
MPQKKTKVIREIPENPFIQGQAKRKKLRVAAYCRVSTEQEEQESSFENQVAYYTDLIQSNPEWEFAGIFADRGISGTKDTIRPEFMKMIEHCQRHKIDLIFTKSLSRFSRNTLDSIKYIRLLKSLNVTIEFEKEGLNTSDVSSEIYLTWFSAFAQAESESISQNVTMGKRRQYKEGHFAFRYKNFLGYRPGENGEPEIDPEQATIVSRIFFAFLSGDTPEQIAKSLEADHIPSPTGKPTWSKTTIRNMLQNEKYAGDVLLQKTYTADFLEKKVKKNRGEVKQYYITDNHPAIIPRDIFQEVQLEIARRSSKRKVSCRRTKSGRGKYTSKYALSERTVCGECGAMYRRTMWIKRDRTKEDVWRCVNRLEFGTKYCKHSPSLKEPILHQAILNCIQSVFHNKEEIAEAVREAQKKIILFEDAKNNPEVIRQRMQDIDHGMANLLTLAAQSSQIELFEKKFKEMTEEKARLTEQLKQAEEDATTDAKRQKQLDDILKAIDIDIVELTEFDDTFIRRIVEQVTILSKDKIEVRFIGGFSKVGDIPTK

SEQ ID NO: 9903 - protein, 594 aa, synthetic construct
MALLPRKPAKHPAKPKRGKKLEIEEPGVLYGRYSSHNQKDISVEQQFEKGYELAAEYGIRIIDTYADRAVSGRTDKRRDFQRMMTDAAKGKFRYVIAWKSNRMGRNMLEALINEARLQDLGVRVLYVEEDFDDTAAGRFAARSMMNVNQFYSENMAEDIKRGLYDNAANCMVANGHLPYGYKADETLHYAIDEPKAAVIREIFTRVSCGEAFVDIMASLNVRGIKTSYGRPWGRSSFQKILSNERYRGIYIYGDVRKEGGIPRIISDELYFKVQEVITTKKNPQGRHRVNGDYLLTGKLFCGHCKSPMTGVSGTGRSGNLHYYYVCQKRRTEKTCDKKNVRRDEIELQVAQAIKDYALKDDVIEWIADSTVAYNERKEAESKVGILEDQLAGTEHGIKNIMSAIEQGIITETTKSRLVELESERATIKANIAAARADIVTVSRDDIISGLEMFRDGDVHDKKYQARLFDTFLVAVYAYDDDLRLVFSFSGNKNTIQIPIESAVNAVENNEAECSFKLCSAPPKIPIVLLDGRYFSLLGRWSRSLSPSGEIHLPPPKSTSFERDLSIFTFSLFTLPSLSALSFRNLPIQGISKSE

SEQ ID NO: 9904 - protein, 497 aa, synthetic construct
MQFLNVAAYARYSTENQDENSIETQFDNIAQYCQAHQYNIVAHYFDKAKSGTNIERADFQEMISAARAGKFSAIVIYDITRGSRDVADWFTFRKQMMQAGVQIISTHDNIGDLLNPNDFLTELIGVGIGQHHVLTSRLKSIDGTTMKAHEAIFLGGCPPLGYDVKDGKYIINESEANIVRKIFSMYASGESYSDIIDSLGGAIGKKGRPIGKNSLSSILRNDRYIGIYTWNRRKIKIMGKWAGGVPNERIVQIKDAIPRIIDQPTWDRVQIRLKSKTNSSSKAARSYLLTGKIVCTECGSRYCGRTSVNQRGYQNPYYVCGNKTRTRQCHSKNIKCEDLDNFCRNAVREYILNYDLSETAQRVVTTYNATVSQYTNEKKELAEISRKIKNGTDAILNGFSSEELFQQMGKLQMRQKELEKIIADDAADELDLDLVTKLLKNMLEDVSTNIDEVVKQFVTKIYAHPNGDCTVHLGVAHFTSSGREIRTLDTTGMNRML

SEQ ID NO: 9905 - protein, 513 aa, synthetic construct
MPQVKLISPITRQEIRKIRVAAYCRVSSNSADQQNSYANQIRVYTSLIQRKKEWELVEIFADEGLSGMNAQNRTEFQRMIKMCEQHQIDLIVTKSVSRFARNAKESLEYVRKLKLLGVGVQFEKEGIYTLALGDEMLLNTFSAIAQEESKAISQNQRLSIVKRMQSGEYVDSNAPYGFRLVDKALVIYEPEAAIVRMMFENYLSGQSTSEIARDLNSRGIKTKTGKSTWRSTKVAYILGNERYCGDCKYQKTYRDTTVPFKQFRNRGQEDMFYASMTHAPLIDRDTFDKVQLLLKKRQDVFGKSTTQNIYPLTSRIQCSECGSYFRRRQVSGTVKWGCSKHIQDRTQCGSNYYSEERIYDAFVAMVNKLRFSEYDIMGQTLLRLESAELKRKQKNTAARELSRNIADLNAKLVMVEQLHAKGYLKDEVHKAQVREINDQLRQLKRERQCEFSSGITHMIEELTRLKKLLEELEEPLDRFDEKLFTEIVQAISISRRDEMTVTLIGGLRFTEML

SEQ ID NO: 9906 - protein, 547 aa, synthetic construct
MNVTKIPKKTISVIEPKRSLIVNREQYHQRRVAAYCRVSTDSEEQLTSYTNQKKVYTEMIAAKSEWEFAGLYADEGISGTRADKRPQFQKMINDCLSGKIDYIITKSVSRFARNTVDCLDHVRMLRARGIGIYFEEQNIDTLQIDSELYLVIYAGFAQSESESISKNVTWTFRKRFQEGKPIFNYKCLLGYRKGADGEPEIVPEEASIVERIFNMYLSGETINRISTKLREENLQIPGKRFSFSASMIKGILRNERYCGDSILQKTVTIDCIGKVRRKNTGEAPMYYVQNSHVGIISRELFHKTQEELARRMSREPNSTKTATTATGKYSRYALSNVMICAECGSRYKRVTWTSRGKKRVVWRCISRLDYGKRYCKTSLTVDETALHAAIVRAINRFNEEDESTYMALMRATIGEAIGLTGGTDEIDLLRRKIDGLNRKMVSLINESVESGEGIESHEAEFKELSDTIELLQGRIQKLEEALASDQVNDSRILQLQQIIADRASKKMEYDDTIVHQMIECVKVYPDGRLDIIFGGGYLIEERLEKEN

SEQ ID NO: 9907 - protein, 453 aa, synthetic construct
MECVAYMRVSTEKQAEEGNGLDSQKRDIELFCRKNELVVADWYVDDGYTGANMDRPELQRLINDCIKKRVKCVVAFKLDRLSRSMIDGLYIIERVFQPNHVLFKCVHDSVSYDSPMEQAYTQMMAVFAQLDKNTMMLRMRGGMLERIKQGYWIGGANTPYCYNYSKEKGILIPIPERKEQANRALDMFIGGYSDLYIKESLGFHSEVLVRNVLTGVVNIGMIPYKGNVYQGLHEPIFDKERFELAQEIRKSRRKNKTACHTDANLLTGLCYCGVCGCKMRYQKWTHGKHKIYCCSRDKAMKYLPNFNPNCNNSLEWAADIEKQVESEILKISLNLSECKPIEKQSKLEIMQSQFEKEQVKLKRLYVLYSDGNDTVLEMIKNTEKSISEMKVKITEEEKNERNSQKKEVVYENIKKLADVWAHIDKKEKNNILKSIISRIVIVNGDVEIQLKNF

SEQ ID NO: 9908 - protein, 506 aa, synthetic construct
MTKIITAGIYVRVSTSEQAEQGYSIQTQIRACKDKAYELGAIDILEYADEGFSGAKLDRPAMTRLRDDIRKDKLDIIICYDPDRLARNLAHQLLITDEIEKYCREGLIFVSVSFENSPEGRLFYSMRGAFSAYEREKILERIIRGKKGKLLAGRLGNNHLYGYDFDKDTQMYVINENEAKIIRKIFEWYISGISSEQITDKLNANNIPKIWQGKRYKWSGSTVRTILKNEKYTGIFHGWQYLQVINKCGGYSIKKKDKSQWIDIEIPAIISNEIFEKAQKQIIKNRTYNTRKEKEVHLLTGLAYCGSCGNKIYNHHNIRRKYYVCSILYDKRITDKKICKPKFLHIPEVDELVWNALTKICSSPKLIKEYMTDINNHENTFLNYKEKLCMLDKKLTKLKNSQNDILEWFSDGLIDKETTQKKLENNKQKIEQLNSNKKELLINISNLKEKHTPEDIYNIFKKSTKISIDDKRNILRSILDKIYLTKLDKSKGCKSKLSLKIVFVFK

SEQ ID NO: 9909 - protein, 515 aa, synthetic construct
MSTNAVIYARFSSDKQREESIDGQIRECKAFAQANQLNVIAIYIDRAMSARTDHRPDFLWMIKDSRSGAFDYVLVYQLDRFSRSRYDSAIYKHELKKNGVKVLSAKENITDSPTGIMLEAMLEGYAEYYSAELSQKVRRGMTENLLEHKWNGSPVPLGYALDANHRLVIDPDMAPHVKALFEMFLAGKSYAELARYLDEKHIRTVTGRKYTGPTVHNLMSRQLYTGTYTWGGQVIEDFCPAIISKSDFSRAALRMANRKRTAKDGIPMSVRRSPEYALTGIIYCGECGRTMTGYSGRGQNGDRYYYYRCNSNNNRCRQTEKIKCKNHPVRRNRLEDLVLQTTVNILSDKEAVAAIAKQVSRIKLENPYASELSNIKSRLADLKKRHDNSVKAIEAGVMSQAIMDNVCKYEAEMDNLKARQEKIKLATPSLQIDPVAVEYFLKSLLLNKKQHDKYRLDLFEAFIHRVVVYHDKVEIQYNYLPGHKLENPITTPLPGCSNLNKVVGPLGFEPRTNRL

SEQ ID NO: 9910 - protein, 467 aa, synthetic construct
MIRMARSVTVIPARNRQRETGRRAVQEKKIRVAAYCRVSTDQEDQLHSFEAQVDYYTKYINDHENYEMAGIYADEGISGTNIKKREQFKRMIADCEGGKIDLVITKSISRFARNTQDCLAYSRKLKNLGIGIIFEKENINTLDSTGELLFTILSSLAQDESRNISENCKWGIRTKFKNGEMHLNTFKFLGYDKDENGKLVINKEQAKTVRRIYRDFLIGINPAQIAKELTEERVPGCNGQTKWYPSTIVGILKQEKHMGDALLQKTYTADFLTKRQVKNNGEIAQVYVKDSHKGIIDKQTWNAVQEEFERRERFMEAHGTDRYSYGADCMPFCEKVFCGECGSLFTRHSWRSRGIVQWQCKNHRKDGKVACTNAYVDNADLEKGFVKAFNRLVTDRDKHMERWDQMKTDGSPLEKIRAEQMMEATENEPLGRFVPEIAQLVLAEVTVLGAKKYEFFFQEGSRVKVSV

SEQ ID NO: 9911 - protein, 569 aa, synthetic construct
MKQSSNKKSREATAFLYERLSRDDNLEGESYSIGNQKKLLTKVAKEKGYTNLVHFLDDGISGVTMNRPGFVEMMQQLEQGKAAAVFVKDLSRLGRNYIEVGRLTEEFFPDHDIRLVAVSDNIDTAEGENELAPIRNLFNEWYARDISKKRRISNKIKGNSGEPMGLPPYGYIKDPNNPKHWVIDEEAAQVVRRIFDMTLEGFGTEQIATQFEKEGILTPQAYWIQKGIGRPGKTKTRPATKWNGSTITHLLYQQEYCGDVLNFKTYSKSYKNKKRIHNDPENWVVFQDVHEPIIERAVFEQVQQKRGKMRKRRTSNGEHNMFSGLLVCADCGCNLHFHFNQGNPEIKYFNCSNYKGNRGTCQSTHYIRVDFLEEVVLGEIRRLTKFASLYEDDFLKAVIGHSQQADEADRKLKEKELKALLARDEELDGLFERIYEDNVSGKISDERFSRMSRRYEDEQKELTEKIKQLRAKIEKQSSCTMTTDMFISLVRKYTRAKKLTPRMLNELVEKIEVFNAEKVNGVWEQRLRIHYNCVGIIEIPSALPLPTPDVSVNTRKGVVVNYAPCDVAI

SEQ ID NO: 9912 - protein, 516 aa, synthetic construct
MSYCIYLRKSRKDLEAEQHGEGETLARHERALLSLAKKNNLIISNIYREVVSGETIAARPVMQQLLHEVEQNLWDGVLVMEVERLARGDTIDQGVVQRAFQYSNTLIITPSKTYDPANEFDEEYFEFGLFMSRREYKTIKRRMQNGRYAAISEGKWPYNSAPYGFRRMKLEKEKGWTLAYDENEAPVVRLIFSMFTGPERVGIRSITRTLNSYGTKPRNSKLWSESTVRGILSNVVYDQCVKIGERKVVRTIENGVLTTTRPRTNDYTIVSGRHPRLIDHDVFAEAQSYLGCGSPKPAGSNIVKNPLAGIIICSECKKKMIRRPPSGTASRVPYDLMLCSTYDCPTIGSPLDLVEREVYNALSDWVEGYRLSGQTPSKSLIPEKEVLLESAQQTLDQLLRQKGTMYDLLEQGVYSTEVFLERSASLQSRISEAQSNVAQLKLELDKERQREANIEQFLPACEDLLSCYWDLSIPERNRLLKLLIESIEYKKLTKNKRGHLNEPNFELTIKPRIPRK

SEQ ID NO: 9913 - protein, 519 aa, synthetic construct
MADFEHVIIYLRKSRSDDPATTVEEVLSRHENILQEYAVREWGARIPEDRIYREVVSGETIKDRPVMQHVMKILETGLVSGVLVVEPQRLSRGDLQDCGHIINSLRYTNTAVITPPKTYDLSDEYDRKFFEMELTRGNDYLEYTKKILNRGRIASVKAGNFIGNSAPYGYRKICVGTGKEKYYTLEIVPEEAEAVRLMFDLYVNKDYGFRSIAHALDMAGYKPRRSAEWSPAAISCMIANETYIGRVVWNRRKTIKKWENDTIVRTRPRQSEYISVPGKHPAIISDELFYAAKAKRNRTPRIKRYVQLLNPLAGLLYCGTCGHAMSRKRTVDKKYGSVSVSFLCNNQSNCHTKSVMYDAVIDRVKETLRQSIEDFEVKVNNKDETDIAYHRAMIANLKSELRKLKEKDMRQKDAYEDGIYTKEEFVVRNAKLAEQISIAQLKLDEAESSTTQLVDYQERLVRFRECLEALDDDTISAADKNTLLKSCIDKIMYYNDSPSLPGIGRYVDNPFRLEIFLKL

SEQ ID NO: 9914 - protein, 603 aa, synthetic construct
MKNAALLLRVSTDIQDIDSQKEALLPVAKSMGYNVSEEWIFGQHITGKDDIRKGERVSIKKLKELCKTGIIDVIIIWEVSRLSRSGIAGRQFIQDFNEMKIPIYFKDRNIWTLNPDTLEEDVNSKMIIGLYLDIAESELKTLKDRTNRGKRKNVEHGLSTGGFQNYGYKVNPETNKIEIDEEEAKFVRDLFAKYASGKYSTAALTKYANTTSYLPRYNKTSRKGNFRTNSGRERDTSTIRWGRSVITKMLHNRRYIGERVYKDMITKVPAIVDEETFNKAQTFFKKNPNKIEKAKKYIHLLGKKVVCGQCGNSYYSHVGITGSVYLCTSYSSKSKDCDNIRINYEKSEAVIWDYLKNYSYYFKKIDETEKERITNEIDEKKQELLEQQLKINQLIDEENVKVRNLLNLVKNSGGAFKMEDIIQDKINIDREIANYNIDLNKIHSELALLDNRLKQIVDTNLTDIAIERIEADRNQMKKIIDSVIDVITVYKAGVDRILLQVELYGRVVNILMRRRVKVNCRYCFIDNSVAEFQNPMKYEKEMLLPSEIVTMVPVFDVTSNNNEVFDEDIFGGYSFDEMWDILIKYGCYRDYTPLPPVRRECRI

SEQ ID NO: 9915 - protein, 528 aa, synthetic construct
MPYCLYLRKSRTDLDAEANGETETLARHEKILLDLAKRMHLDVTEIYREVVSGETISSRPVVQRVLNEVENGLWDGVLVVEVERLARGDTIDQGVVSRAFKFSNTKIITPLKTYDPNNEYDEEYFEFGLFMSRREYKTIRRRLTQGRISSAKEGKHTASKPPYGYDRVHVESGKGYTLIPNEKEAPVVEMMFNWFVNGELQEDGSCKKLGTMAIANRLTSLQLPTPRGGNVWSQRTVHWILHNPVYTGRIRWGYKKDKKMIVDGVVKRKRVISSEKDQVLVDGLHPAIISEDLFEQTQSIFAEGGTPSVTASRELKNPLSGIVVCGICGAPLRYKIGYNRCSNMLHCRTRGCECKGSYFDLVEKRLLEALQEWVNHYKMSWDDMPEETHSLLALKKQAYDTSIKELNTLAKQLDKTHDLLEQGVYDTDTFLSRSKSLSEKIAAAERNIQKLSADIQNERLRENNRKNLIPMAENLIDVYWQLPTATAQNEMLKEVLERVEYTKLQAGDRSGKGKDDFELILYPKLPKS

SEQ ID NO: 9916 - protein, 456 aa, synthetic construct
MKKEQLNVLHTAIYIRVSTDQQAKKGDSVDEQLDTCREYVEKHDNLVLYDTYVDDGVSGQKIKRGDFSRLMNDVRSGQIDLIIFTKLDRWFRSLRHYLNTQATLEANHCAWLAVDQPYFDTSTPHGRAFVAQSMTFAELEAANDSTRIRDVFDYKYKRGEVLSGKAPLGYSIVDKHLVPNKDAEKVIKIFEHYAATSSLSDTVQFMEQELGIVMYSANLKNTILKQKKYIGVFRDNEHFCKPLISHELFDSVQRQLAMNIHSNRKYEYIFTGLIRCADCDHAINGFPQRGGKRKDGSYRIFPAYRCRIAYPYKRCPNRKLFYEAPLERYLVEHLHELLEIEISKYEQKNAKVIDYESKRAAIEKKIERLKDLYINEIITMDELKVSKAKYQEELSQLPAEAAAIEKRDLSALRNMLKMDLPSIYFTLDPQERRRLWRSCIREIRVDHDKNIDIVFL

SEQ ID NO: 9917 - protein, 498 aa, synthetic construct
MEIQIREGNREQKRKLRVCAYCRVSTDADEQENSLENQIRHYETVIKANPAYEYAGVYSDFAISGFKEKRPGLQKMLADAQKGKIDLILTKSVSRFARNTSIVLEATRKLKELNVGVFFELQNINTLSGEGELMLTILAAFAQAESESGSAGAKMVYQRKYEAGIPVQYLERSFGYTKDERGVYIADESEAVWVRKIYEMAADGYTPAAIKRYLNENGVKTVGGTKWIDSTVFRLIENEIYKGDYIMHKHFVNEERKLVRNRGEVDAWYIEDDHEAIVSPELWQKAQDAIEAKRDYLAEGSVIEEFTEDNYPYMNRIFCAKCGHPLYKRIYSNGNRLNWGCSGTKRYGKSFCEGINIPDGVLRKAWHFDGNMYIDEKPSVKGTKEFTYLKESSWKRRHKKKVPEAIPENTEEAYPYRKKIFCGLCGSRLVRHVNPKSHKVIWICNGTKRKGVAFCGGTRIPDSVIRGWGEIKKDIYIQRKDDKNGKKRYSYTSKKPTA

SEQ ID NO: 9918 - protein, 467 aa, synthetic construct
MIRMARSVTVIPARNRQRETGRRAVQEKKIRVAAYCRVSTDQEDQLHSFEAQVDYYTKYINDHENYEMAGIYADEGISGTNTKKREQFKRMIADCEGGKIDLVITKSISRFARNTQDCLAYSRKLKNLGIGIIFEKENINTLDSTGELLFTILSSLAQDESRNISENCKWGIRTKFKNGEMHLNTFKFLGYDKDKNGKLVINKEQAKTVRRIYRDFLIGINPAQIAKELTEEKVPGCNGQTKWYPSTIVGILKQEKHMGDALLQKTYTADFLTKRQVKNNGEIAQVYVKDSHKGIIDKETWNAVQEEFERRERFMKDHGTDRYSYGADCMPFCEKVFCGECKSLFTRHSWKSRGIVQWQCKNHRTDGRVTCSNAYVDNSNLEKGFVKAFNKLVADREKFMERWNQMKTDGSPLEKIRAEQMMEATENEPLGRFVPEIAQLVLAEVTVLGAKKYEFFFLEGSRIKVSV

SEQ ID NO: 9919 - protein, 525 aa, synthetic construct
MPKTEEKQTIKAVIYARYSSDRQREDCGKGQEGVCEDYARRNNITILHTYADRAMTGRSDQRPEFQMMIRDAATMAFDIVLVYKLNRFARNRYDSAKYKHKLKKYGVKVVSAMENIADDPSGILLESVIEGMAEYYSAELAENVMRGMTENALEGKWPGGVVPLGYKLDAQHHLVIDEPKAEVVRLIYQMTLEGHNQKYIIDELNRRHYTNSAGGPFSYNTLRTILRNEKYIGVFTWGTVRRENACPAILDKATFEAVQEHLKFRTKHHIRSCNEDFLLTGKLFCGCCRSKMIGVSGTSKTGAIYYYYACAAHLKKKCKTRNIRKDAIEDLVCEVTTRILSSKEAVEAIARQAIEMQKNKKDSLELQAIKNQIADIRKKLQNCIRAVESGLISETITNHINDYEKELTRLKDDAARVKLLDGDIELTQQHIEFFFWSIAQKIKAADKYKSILLSSIVRSVIVYKDYIEIQYNYKNELPILQNPVKVESSYLNQMVTGMGFEPILSALRTQRLNRLTNRPCACNYN

SEQ ID NO: 9920 - protein, 566 aa, synthetic construct
MAEKIMQGIKQISELIGQAVKKRVVCLYRVSTVGQVEKDDIPMQKQYCREFCRGQSGWEIVKEFSEKGVSGFKVSAKDRDAIQEIQKMALKGEFDILLVFMFDRLGRRDDETPFVVEWFVKQGIEVWSAMEGQQRFDTHVDKLLNYIRYWQASGESIKTSLRVKTRLEQLTQEGYYTGGRVPFGYQAVKRGRINKKNHEVRDLAIEPGEAEVMKIIFQKYVYEGYGALRLHRYLMDQGLRTKDGKTITMGIINRVIKNPICIGIIQKGESQSSVLPELKIIDEEVFARAQEIVRERVVPQSEVPLTTRGQSLLVGNVYCGHCGARLSLATAGRNYKKKDGTVVKKTYSCYKCYNKAMAAEKCDGQTTYGVSKLDNLVDQIIHIQLQRIQKAPPQALIEKQRDREAEQVKAKAKLLREQYQQKQRDYQDLKEETLKVVRGTSRLNVDLLNNLIEETTVQMAELEGQIRTAEAELREVLSGAEQVRQEYAQLMDWAGLYDNCSFEAKKMIAAQFVKAVRVKRGYEVDIEFNVSFEEFQTLYLEPESEEDRRSRSATYLSLVEKSGQAG

SEQ ID NO: 9921 - protein, 462 aa, synthetic construct
MKKRENFNKMIAACKKGKIDTILTKSLSRFARNTVDCLETVRMLKANGIGVIFEKENINTLTESSEFLITLFSGFAQAESESLSKNIIWGKEESKKAGKVPFQYKKLLGYRKGPDGKPEIDPQEAETVRRIYRRYLDGCSLSQIQQELEADRVPTAQAIQRWSYQVIRNILTNERYIGDAMLGKTFTTDCISKRVKKNNGERGQSYVRNNHPAIIPREMFYRVQEEMARRSSKRKVMQKTGKTELGKYSAKYALSELLVCGECGTPYKRVTWARNGKKRIVWRCISRLEFGTKYCHNSPTLDEEKLHQAIQEAINEFAQAGTEVKEDMLTFTAMAWGGDTVGGVSLIDLRQKLKDITAQQALLLDQVLEHMDDEVLNAQLKVMMDEKQALQEQIAAAEQSQTHNAAQKSRMAELREWMAKLEVNQQYSDEQVRMAVERITVVDAETIRIRFRYPGTELEKKL

SEQ ID NO: 9922 - protein, 479 aa, synthetic construct
MPKVAIYARVSTLNQAEEGYSIEGQLASLRKYCSALDWQIYQEYVDPGFSGGSLNRPAIQKLIVDAKSHRFDIVLIYKLDRLSRSVQDTLYLVKDIFDKNKISFVSLNEKIDTSSPMGNLFLTLLASIAEFEREQIKERMMMGKVGRAKSGKAMGWSKVPFGYTYDKQTGIYQINTLQAQIVKRIYRDYLDGVSITKLVDSLNAEGHITKDRPWTYRTVRQALDNVVYTGRQFYQGNVYPGQHEAIISIEDYDKTQAELKRRQLTNAQKFNPRPFRAKYMLSGLLRCSFCGSSMMVQTRYLKYADDYHYYRCVSSIRKRIRFSYRQDTELCQNRSDYLKDDLESAIIKTIRHLQLHPDQMPVNTVKFDDKPLKDELNCINDKLNKLVDLYLNSNGISIGIINQKRDELLQQKEALENKLQERKPKQPELDPKKALLLLSKKNILELPYKEQVKLVKSLISKIEVSPSKMKIHWRFNVEK

SEQ ID NO: 9923 - protein, 494 aa, synthetic construct
MVAIYARQSIDKKDSISIESQIAFAKREIFSEECKIYEDSGYSGKNTNRPAFTEMMHDIQTGQIEKVVVYRLDRISRSIVDFADFIDVLENNGISFVSATEKFDTSTPMGRAMLYIIVVFAQLERETIAERVRDNYYARVKKGAWGGGPAAYGFDLVRTTLDGKKATIYEPNADLEIVSQIFDTYAQPYTSLADVQKVLIRSGALSAGGVNFDNVKLSGILKNPAYVQADIAIYNYYKSKGAIMANEPEDFDGTHGCILVGKRDASERKYKDVSNHLLAIGHHSGIVDSNTFLYCQEKLSKNRQIKNTGKGKHSWLTGLVKCGHCGYAFSVRFASTKDGRIPYFVCSGKYLHKCCDAKQTHRVREIEAQVQARLIQEAEAYHLAREKRENNVIKQHQQKIADIDSKIENLISTLENVSQISAEYINRRIETLHREKQLLIHQYSEALTEFNAVEIIPFTAEDWENMSFEDRRDIAKSMIDRVVLSEDGVDVRFK

SEQ ID NO: 9924 - protein, 573 aa, synthetic construct
MAKVKLPDKPRVAIYTRVSTLHQIDKDSLPMQRQDLINYARLILNTEDYVVYEDAGYSGKNTDRPKFQEMMQQVRLGMFTHILVWKIDRISRNLLDFATMYSELKQLGVVFVSKNEQFDTSSAMGEAMLKIILIFAELERNMTSERVTAAMLSRAANGQWNGGRVPLGYDYDPETKTFTINESEAAVVKIIHDKYEQERSLVSLARYLNGHGYRTRTGCTYSPSTLLIILRNIFYCGDYRYNVLKDGDRQKRKKESEWITVKDHHPAIISREQKEEIARILKENRRLECERRGIYSKKKNVHVFGGLVICGNCGHAMTSTIRPADQDGIRWSVYVCPTKRRSEYLCKGRATSEVVLGEFVFNYILNMLNVQKNFDSINSVEDMEKMLLSGSTFRDVDGIERAGLDDLYNMLASGLTEKAPFDSSVEVRKKPVVSDIELENLNTEKARIERAAERLQNLYLYSDDSISQKDYIIQREKLMSQLAEVNEQIGMVMSNADEKDVSDEEFVHAASKFILTQKLEGRTYIYYKRLATTVSREVLRSFVMSIIENITIYDGRVQTIVFKNGLSHTFILK

SEQ ID NO: 9925 - protein, 581 aa, synthetic construct
MAYATKVPAASADDRIVAIYVRVSTGYQVDKDSLPFQKKELKAYCKHILHIDMSRVEIFEDAGRSGKNTKRPAYERMMQKVRAGLVSHVLVYKIDRISRNLVDFSLMYDDFKYNRVTFVSLNEQFDTSSAIGEAVLKIILVFAELERKLTSERVKDIMIGRANDGKWNGARVPYGWDWDSSAGCPVHSEKEAPFARAMYEMYLEVKSTGKIRDYNNAHKIPTKRGGEWTSKTVGDFLRNPMNKGDYRYNYRESARGRKKPADEIVYLEGVFDPLVDPEIWEKVNKIMDINRDQRNMGGLHPIEKNCNVFAGLIQCGSCGSGYLVGKKDKRRKNGFTPSLYYCGAKTRAIHCQNPNVSDVKIGPFVINYISAMVRVSNERQKIKSPEGLEEMLLSDKAVFADIMGLSSDSLNTTFELLTGKSATGGALWRADLVDQEGSAADPAEIENLKGQIRKYERAKERLEDAYYFSDDGMSEKEYLEKKNRFDSMRVSAENKLKELTETHIASGVDESSFMKSASAFLLTHKIRAGSHIVYSDLAGMVEEESIKEFFNLVLDHIVVKDRRVTEIIFANGLSHKFIYRD

SEQ ID NO: 9926 - protein, 405 aa, synthetic construct
MRAAFLIRCSTKKQDYERQVNDLTRLAKKFGYTSSDNMIFGEHITGKDDASKRDRQSIQRLKDAAINKEFDVVLVSEVSRMSRDPMSGRLYVRQLINMDIPVYFRDIDTWTIDPVTGKKVRDAETIIGAAFDAAWKYIKSMKTQIASGRRDELDNNQMSIGQPFFGYKRYGGRDKGKKNSWVINDDAAKVVVDVFEEYVKDGATLKSTALAITAKYGEQFNKKFSIGTIEHILTFEPYCTGIKVVSLTDPDTEDVDEFEVEIPTIITRAMFDKATTKRATNRTARTPYPKQATYILSKLLKCPICEHSLTPQKRGGDKGDKYRLMNGKVAIRWSCMSGINNATDCSSRITISNEKLEAIIWGLVKQELIGFANLNDEDRVARVVELTDKITNLEMNHSQLYISYI

SEQ ID NO: 9927 - protein, 581 aa, synthetic construct
MAYAMKVPAASADDRIVAIYVRVSTGYQVDKDSLPFQKKELKAYCKHILHVDMSRVEIFEDAGRSGKNTKRPAYERMMQKVRAGLVSHVLVYKIDRISRNLVDFSLMYDDFKYNRVTFVSLNEQFDTSSAIGEAVLKIILVFAELERKLTSERVKDIMIGRANEGKWNGARVPYGWDWDSSAMWPVHSEKEAPFGRAMYEMYLEVKSTGKIRDYNNAHGIPTKRGGEWTSKTVGDFLRNPMNKGDYRYNYRESARGRKKPIDEVVYLEGIFDPLIDPEIWEKVNKIMDINRDKRNMGGLHPVEKNCNVFAGLIQCGSCGSGYLVGKKDKRRKNGFTPSMYYCSAKTRAIHCQNLNVSDVKIGPFVINYISAMVRVSNERRKIKTPEDLEEMLLSDKAVFADIMGLSSDSLNNTFELLTGKSATGGALWRADLVDQEGAAADPAEIESLKDQIRKYERAKERLEDAYYFSDDGMSEKEYLEKKNRFDSGRVAAENKLKELTETHIASGVDESAFMKSASAFLLTHKIRAGSHIVYSDLAGMVEEESIKEFFNLVLDHIAVKDRRVTEIVFVNGLSHKFIYRD

SEQ ID NO: 9928 - protein, 668 aa, synthetic construct
MAYAKAKKHLKIWTKKKAALYVRVSTRYQVDKDSLPFQRKKLKEYCKFLGLEDHVIFEDDGYSAKNTERPHFQEMMSRVRSGEFSHLIVWKVDRVSRNLLDFAAMYQELKDHKVTFISMNEQFDTSTAIGEAMLKIILIFAELERNMTSERVTGIMLDRAEQGLWNGARMPVGYRWNGETKFPEPDPEEVKIVQLIFDKYEEWKSSIKIARYLNNNNFKSKRGGQWTSKLIHDIIRNPFYIGTYRYNLRESGRGPLKPESEWIVRENNHPAIIDKAQFDRCNKIMDQNGSSRDTSDLRARKYVHTFSGHLVCGKCGANMIASKDRARANGWRPSMYRCAQRSRMLDCDNSRTINESYIGPFIFNYIANLARVQKNFKNIATPEKLERELLKGETFGGVAGILPEGLNLTFQALSFRQVGNGTYIPDIDFLGDSDGASDRDQIELLKSEIEKSKNAVTRLTDVYLFDPDSMTKEEFATKKKELAKKIEGMERQLADLLDDSGNDDLADMSFIKKASAFLVAQRIVSKSFVDYVGMAQELDNEILKDFIDQIVDQIVVLDGRVQSITFINGLKHEFRYIVPAELPVCQKCGGRIGSTCGCRTRTFDFSSKRYQRIKVGDLRDMLHGKKNPVCPECFAQEGRWHHWNCKIEACPICGERLAECEHGPNGKN

SEQ ID NO: 9929 - protein, 526 aa, synthetic construct
MINMVSFDNIIIYLRKSRSDDPAQTVEEVLAKHERILQDYCIKEYGKVIPEKRIYREVVSGETIQDRPIMQKLLKGLETDNISGVLIVEPQRLSRGDLQDCGQIINSFRYTNTAVITPTKTYNLSDEYDRKFFEMELTRGNDYLEYTKKILNRGRVASVKQGNYICSVRPYGYKKVVIGTGKDKCHTLEIIPEEAEAIKLMYHLYLDENMGFTNIARTLDSLHIKPLKSNNWSAATIRDMIDNPIYIGKVVWNSRKVVKKWENEQITKIRPRNKGDDVICVDGKHEAIIDELTFEAARNKRCLTPKVKKFKELRNPLAGLLFCGTCGHGMSLKKYVDKRSHTGKVTAIMLCNQQAICHTKSAQYDDILSKIKLSLANAISNFEIRLKEQENNNIDMHELRIASLEDELNKLYNKDVKQKDAYEDGIYTKEEYIKRNSKLQERIFSVKEEIADEKNNIPVKIDYEDKIITFKDCLASLDDSDISAADKNVLLKSCIDKIIYYNDMPSKLGIGRYIENSFRLEIFLKL

SEQ ID NO: 9930 - protein, 479 aa, synthetic construct
MPKVAIYARVSTLNQAEEGYSIDGQLASLRKYCNALDYQIYQEYIDPGFSGGSLKRPAIQKLIVDAKSRRFDIVLIYKLDRLSRSVQDTLYLVKDIFAKNDISFVSLNEKIDTSSPMGNLFLTLLASIAEFEREQIKERMMMGKVGRAKSGKAMGWSKVPFGYTYDKQTGIYQINTLQAQIVKRIYRDYLDGVSITKLVDLLNAEGHITKDRPWTYRTVRQALDNVVYTGRQFYQGNVYPGQHEAIISIEDYDKTQAELKRRQLTNAQKFNPRPFRAKYMLSGLLHCSVCGSSMMVQTRYLKYADDYHYYRCVSSIRKRIRFSYRQDTELCQNRSNYLKDDLESAIIKTIRHLQLHPDQMPVDTVKFDDKPLKDELNRINDKLNKLVDLYLNSNGISIGIINQKREELLQQKEALENKLQERKPKQPELDPKKALLLLSKKNILELPYEEQVKLVKSLISKIEVSPSKMKIHWRFNVEK

SEQ ID NO: 9931 - protein, 512 aa, synthetic construct
MERAVIYARYSSDHQREESIDAQVRACREYCQRKGYLVTKIYADEAKSGKSIAKREQYKKMLSDSQKNLFDVVVFHKIDRNSRNELDYYLTKNQLISSGIKYEYAAQNIDTSPAGQMVEGILVAVAANYSRNLAEETKKGLKENALKALFNGGRPPLGFEINQENKYIINDYEAGAIRIIFDLYLKGKGYHYIISQLNSLGYKTREGRKFGKNSLYDILRNPKYCGTYTFNKVNKDPSGKRNSHKISENTIIVEDAIPAIISKEDFRKVQEKMSRNKHRTAAYRSKETYLLTGKAFCGICGAAMTGHRASARGKKYVYYTCAARDRLGTSACENKVVPRDELEQVVLDTLKEELLSNNFQKNLNHYILEEFHTLASEVSNEADSLAEQKAIAERKLNNLYSIIEQGTADEYDLQRLADVKRELTSIKEKLSKCAAAHSLSDINPRAIERTIKLCRNMLLKNASAETLTLIFDDMVEKIVIGAKKITLQLKLECSGTYGAEGRTRTGTWGNHA

SEQ ID NO: 9932 - protein, 519 aa, synthetic construct
MKKVTKIDKIQPAKNAEDKLRVAAYCRVSTATDAQLESLEAQKSHYENYINSRDDWCFAGVYYDGGITGTKASKRPELMRLLADCKAKKIDFVITKSISRFSRNTMDCLEIVRTLLNLNIPVYFEKENINTGSMESELFLSVLSTMAEGESASISSNNRWSIKKRFENGTYRLSSAPYGYKLESGGLQVVSEQADIVKRIFRELLSGKGMYSIAKELNAEQVPTQKGGRWTSTSVHNILTNEKYTGDCIFQKTYADNNFNRHINNGELNRYLIQNHHEAIISHEDFKAAAALIEQRAAEKGIESGSDKYQKRYAFSEKLICGECGNTFRRRIHKGKYNSYVAWVCNTHLSDTNRCSMLFVRDDALKLAFATMLNKLIFSYRLLLKPYLAVMQSNTADEALLRIQYLENQLDQNAEQRSTLYKLMAQGYIDQILYTQESNELLLQARDFRSEIEVLNNTVAGDTTKVYETERLINYCKRGEMLTDFNESLFELFVDHILIYSRQKIGFVLRCGLTFEEMI

SEQ ID NO: 9933 - protein, 521 aa, synthetic construct
MGNVMIIPAKRQVGNTSRRQEDKPKLRVAAYCRVSTDSDEQASSYETQVEHYTEYIKKNPEWEFAGIYADDGISGTNTKKREEFNRMIEACKAGEIDMIITKSISRFARNTLDCLKYIRMLKDKNIPVFFEKESINTMDAKGEVLLTIMASLAQQESQSLSQNVKMGLQFRYQNGQVQVNHNHFLGYTKDWEGNLVIDPEQAEVVKRIYREYLEGSSMDKIAKGLEKDGILTGAGKKKWWTSTINKILRNEKYIGDALLQKTYTTDFLNKTRVKNNGIVPQYYVENNHEAIIPKNIFLRVQEELVRRRVVKTSANGKKRSYSCNHCFAQLVICGECGEMFRRIHWNNRGVKSIVWRCISRLEPTGLECHARTINELDLQEIVLTALNELLGDKSKYQKQLQQNIASVIRASAAITTDGIDEQLMKLQKELLKKANNKEAYDEIANQIFDLREKRQQASMDTVQRDEHLKRITNLQDFIKDQTSDLTTFDEALVKRWLKQIIIWPTHCTVELKSGLKVDVER

SEQ ID NO: 9934 - protein, 522 aa, synthetic construct
MGNVMLIPARRQVGSNARKQEEEKPKLRVAAYCRVSTDSDEQATSYEAQVEHYTEYIQKSPDWEFAGIYADDGISGTNTKKREEFNRMIDDCKAGNIDMIITKSISRFARNTLDCLKYIRQLKDMNIPVLFEKESINTMDAKGEVLITIMASLAQQESQSLSQNVKMGLQYRYQQGKVQINHNRFLGYTKDADGNLVIDPEQAETVKRIYREYLEGLSMDKIAAGLERDGILTGAGGKKWHTSTINKILRNEKYIGDALLQKTYTTDFLNKTRVKNNGLVPQYYVEGDHEAIIPKDIYLQVQEELVRRRVVKTSANGKKRSYSCNHCFSQIVICGECGEMFRRLHWNNRGVKSIVWRCISRLESTGLECHARTINELLLQDVVVKAINQMLGDKSSYQAQLQLNIATVIRASQATAIDSIDEKLMALQQELIQKANSKEDYDEIADEIFRLRELRQKTTVDTAARDEQIKRINDLQDYISQQTTYLTEFDESLVRRWIKQITIWDDHITVELKSDVSIDVDA

SEQ ID NO: 9935 - protein, 504 aa, synthetic construct
MKAVIYARFSSEKQNEASIEGQLRECMQYAEYNGMQVIGNYIDRAFSAKTDHRPEFQHMIKDSYKNLFDIVLVWKLDRFSRDRYDSAHYKRILKKNGVRVISATEAISESPEGILLESLLEGCAEYYSAELAVKVRRGMTENALKGRANGVRAPFGYYIDGDDKYQIDETLAPIVKEIYSLYLEGKRVKEIAKLMNARGIKNRGYDMNYNSVFRMLTNRKYIGEYKFGDILLPDAIPAIIDKETFDDVQQRLKNNKKAPAMHRSEDDYLLTTRLFCGKCGAMMVGEIGTSHTQSKYRYYKCNQAKKHKCDKKAVKKDWIEDLVIEEILSLISDDDVIEELSDRIYEMQTEENAAVAVVKNQLSEVEKKLNNLAEAIAQGVFSSTTKKLLDDLEEQKSNLEVELFKTQINHPVLTKEQIQFALYSYRKLDLSSQEGKQQLIDGFVNSIFLYDDRLLITFNYKGQSKTVTFEQVNSSSLTSKGPPSANKSEHLCSGLFFVFTDCCV

SEQ ID NO: 9936 - protein, 433 aa, synthetic construct
MPGRITTVSKPPKLERKKRVAAYARVSSGKDAMLHSLSAQVSHYSDLIQRNSDWLYAGVYADEAKTGTKDSRADFQRLIADCHAGKIDMVITKSISRFARNTVMLLQTVRDFKAWEVDIFFEEQNIHTMSADGELMLTILASYAQEESRSASENQKWRIKRNFEEGMPWNGAMLGYRLKDERYEVVPKEAELVRRIYNEYLAGDGYLSIVKRLMEEDVPSRFGGKWNQSVVSKILSNYTYTGNLLLQKTFRENHITKKTVINHGELPKYHAENTHEAIIDMKTFHAVQTEKARRAAQFNKKPAPRTTYPFTSLLVCDNCGKNYRRKTTKTGIVWVCGTFNTLGKSACASKQIPETTLQQVTAEVLGAKAFTREQLHSRIQSIRVCNGNILIFCFKDGSEVTRTWKDRSRSESWTDEMKKAARQKALERSKHNA

SEQ ID NO: 9937 - protein, 676 aa, synthetic construct
MKKKVVLFVRVSTENQELESQIEALKQSAYIDGYSDDDLIVIAKKESGVKLKEAEREGLNELKRVIERNEIDGVYLFELSRLSRDPVTLYSLRDHIFKEKQIQLKCLKPSFSLLEEPDRTKFDTMGSLVFSIFGCFAEQEIIEKKERFHRGREQKAIEGKFAGGRVPYGYRVDEERGNLIVIDEDEASVIRTIFDLYEAGLSQPRIAVELQERGIKYRHYYGNQRNEYKNFTMHFIAHLLKNELLTGRKMKTDGCFERAYPPIISVAQFERCRDIAAKRNTSYGKVSNVYYAKSLIVCPECGSKMSAYTGSRYAYRCNNAYQPADGTYSKVVNNWKDCSSKTVISINALDSLLWYLAVEQESQYLWGSAMEDISQFEAKIATIQAKIDAIQPRLKDLESKRSRIVMAFLDGDINKEFKTKKTVELDAQKLEIMKQQIAYEKDIDYFKERIEDIRRLYAVSGDDATAVADGVETIMDVKEKIEKTENDEEKSRLVHKHIKQIQIVKRMIPYQRKAKWIKSTEVEAKYVTVSFFDGSIRYFYLLCNHGSCSKWILSDEQGSVLEDLNIPIVQRFVNTKKREARKAQDEKDDEFKGMYNPKDLQIRGFDAMAKFLCMSGSVGVRRRYAQGFFEDAITVDENGVHIMDAARALEIMKASKNAWIIKILSNFYKVRKKKGK

SEQ ID NO: 9938 - protein, 672 aa, synthetic construct
MKKAVLFVRVSTEKQTLESQIAALKRTASIDGYGDNDIIVIAKKESGVKLKEAEREGLNELKSVIEQNDVDCVYIFELSRLSRDPMTLYSVRDKIFKNNKVQLKCLKPSFSLLEEPDRIKFDTMGSLVFSIFGCFAEQEVVEKKERFHRGKKQKAIEGKYSGGIVPYGYDIDAQRDNLLVIKHDEAEIIHTIFDLYEAGLSLSRIAMELRERGLKYACLQNKHRSPEKHFDIWFIHQLLTAELLTGRKLKGATAAFARSYPAIISEEQFDRCRKIALERSTVCGKKENVYLAKSLIICPECGSIFQAYSSKVHYACKNALMSSVVRELNNFKGNHKCSNNICISISALDALLWHVTVLKECEYLLGSAIEDKTQFEEQIAGLDEKISAIQPRLDDLDNKRERIVEAYIEGDISKETKQNKFSELEDQKVAILKQKVDFERKRDYYQSRIDDILKMYAMESLDANDIANNIEHVMRIKEKIETTASDEEKFRLVHKHIKQLCIEKRTIIYAFNPKKVKEADAKYLTITFHDESKQYYYFLSTDGKGGHWINSDAAGNVLDDIALVIERKMVNNTKLRMRAKYRAQKKEAFEAQFPANRLYLHGYKEMSEYLCMPYNTVCRRCQDGFFDEALSMFDKKTKILDAERALEIMRTSDDVYIKKALKKFEEHHKKED

SEQ ID NO: 9939 - protein, 548 aa, synthetic construct
MSTGTELRAVFYARVSTEEEKQLNALEKQIHENKDVIRDHGWRLVGEYIDEGKTGTTTKRRNDYKRLLKDMTENKFDIVVCKDQDRLQRNTLDWYLFVDNLVTNNLKLFMYLDNKFFKPSEDALITGVKAIIAEEYSRNLSKKLNNSNKRRIERALNGEEVSAMGNGKSLAFKIVNGKWVKDEEEAKLGKKIFELYLEYDSIRKVRDWVNEHGYTNSVGKPFTSESISRILKNEKAKGVIVMGKYHHDFDKKKIVRRSEEELVRIPALELAYVSEEVFDKVQERLRAKTGNGRGVNAYSDPLSGKIYCGSCGRKLWKHASNGYVNWMCASQVAKGDVECNGTRITTVAIRNIYKKITDNLEVNKGVVKQDIVKWLNELKATLSDTSVNEKIQKDLDKLERKRTKLLEAYLEDFISKDDYKVKYETIEGQIEEKKKLLVPVEENEDIKAIESVLQNIDDEIDAYVKILDMEESKVDFLIEHTKRITVLENRDIIIELDLVAGAIIAGKDFLLYVHDTMPQHHGPKHLHPSGPRTAPRCCFRDRFSCDQP

SEQ ID NO: 9940 - protein, 594 aa, synthetic construct
MAYAAMRKAGLVPEAAPDLRTVALYVRVSTGYQVDKDSLPFQKKELKNYCEHVLHIDKNRIEVFEDAGKSGKNTNRPGFERMMKKVRAGQISHVIVYKIDRISRNLVDFSLMYDDFKYNRVTFISLNEQFDTSSAIGEAVLKIILVFAELERKLTSERVKDVMIGRALSGQWNGARVPFGWEWDEETKFPKHSETEAVFARLMYDLYEETRSTCKVRDYCNTHDVPTKRGGEWTSKTVADFIRNPMNRGDYRYNYRESARGRKKPEEEVVYIEGVFPPLVPVEQWDRCSAIMDHNAAVRCAPGVPHKKKHVHPFSGLLVCGACGAPYQVIKQDKPRENGFSPSLYRCGNRYRKRSCTAAGCSDVVLGPFVFNYVSSMVRAVNLRTKIKTPEELERLLLSGPEFQNVAGIASEGLNATFALLSGRPAASGPSYAPDLLTAPADSVNAGEVEEIKQQITRLERAAERLKKAYLFDENAMSEKEYLETKIALDTERVQAENRLKDLSEAAFSTDAGELSFIKSASSFLLAHRIQSGDHIVYSDFAPLVGNETMRDFLNLIIEKVVIRNGRPEEITFKNGLTHIFLYRDETAKNVAKS

SEQ ID NO: 9941 - protein, 519 aa, synthetic construct
MKKVTKIDKIQPSKVAKKKLRVAAYCRVSTDSDAQLESLETQKTHYENYINSRDDWEFAGLYFDEGITGTKADKRPKLMRLIEDCKAKKVDFVITKSISRFSRNTTDCLDIVRTLLNLNIPVYFEKENINTGSMESELFLSILSSMAEGESTSISENNKWGIKKRFENGTYKLGYVPYGYRWENGEIIVDPEQAVIVKRIFSELLAGKGTDAIAKSLNAENVPTKKGGRWTSTSIRGILANEKYTGDCIFQKTYTDSNFNRHKNDGQLDQYYVADHHEAIISHEDFDAAAALIEQRANEKGIKRGSNKYQQRYAFSGKIICIKCGDTFRRRIHTSTYVKYPAWVCNTHLTDTSKCSMLYLRDDDIKLAFATMINKLSYCHKLVLKPYLESLQANTSDKALLRIQQLETLLEQNAEQRETLHKLMAQGYIDQILFTQENNALLTQANDFRSDIEALNRSQTLDTTKVYETERLIHFCERGEMLQEYNEELFELFVDHIEVYSRQSIGFVLHCGLTFKERI

SEQ ID NO: 9942 - protein, 520 aa, synthetic construct
MKKITKIDELPQGQVPNTKLRVAAYARVSTDSDEQLESLKAQREHYERYIKSNPEWEFAGLYYDEGISGTKMEKRTELLRMIRDCKQGRIDFIITKSISRFARNTVDCLELVRKLIDIGVYIYFEKENLNTGDMESELMLSILSGFAAEESASISQNSTWSIQKRFQNGSYVGTPPYGYTNTDGEMVIVPEEAEIIKRIFAECLSGKGGGTIARGLNKDKIPARRGNHWSAGTVIDMLRNEKYMGDVLLQKTYTDSNYNRHPNTGEKDQYYYKDNHEPIISKEDFAKAQDLIDERAKMKCKGVKKNVYLNRYALSGKIVCGECGRNFRRKTNYSAGRSYIAWSCIGHIEDKESCSMLFLRDGEIKATFTTMMNKLAFSNKLILEPLFKSISQIDEESDRERMDAIDKRMEQLMEERNTLITLMAKGFLEPALFNQERNVLDSEMKNLSTEKTNLVSNSASGILRANEIKDLIDYVSADNFNGDYTEELFEEFVENIIVNSRDELTFNLKCGLSLKEKVVR

SEQ ID NO: 9943 - protein, 520 aa, synthetic construct
MTEKNIMVIPARKRVGSTAAKEKIKKLRVAAYCRVSTETEEQNSSYEVQVAHYTEFIKKNTEWEFAGIFADDGISGTNTKKRDEFNRMIAECMDGNIDMVITKSISRFARNTLDCLQYIRQLKDKNISVYFEKENINTMDAKGEVLLTIMASLAQQESQSLSQNVKLGLQYRYQQGKVQVNHKRFMGYTKDEDGNLIIVPEEAEIIKRIYREYLEGQSLVGIGRGLEKDGIFTAAGKPRWRPETIKKILLNEKYIGDALLQKTFTVDFLTKKRVKNEGHVPQYYVENSHEAIIPKELFLQTQEELHRRSNIYTGADKNKRIYSSKYALSTITFCGDCGDIYRRVYWNIHGRKEFVWRCVTRIEQGPEVCKNRTVKEAELYDAVMTAINRLLAGGDNMIRILEENIHAIIGDTTEYKISEINTMLEEKQKELISLANKGKDFESLADEIEELREKRQTLLVEDASLSGENERINELIEFIRTNKYRTLLYDDTLVRKIIQNVTVYDDHFVVCFKSGIEIGV

SEQ ID NO: 9944 - protein, 505 aa, synthetic construct
MPTSHDMLTDLNAAAYLRKSRMEEGMATDEVLAKHQKTLTDYAAAHGIHIIDTYPEVVSGESLYARPQMLRLLQDVEDGKYDAVLCMDLDRLSRGRMKDQGIILDAFRESGTLIVTPEKVYDLSDEIDEEYAEMKTFISRREYKIITKRLRRGLKQTIQEGCYVANAPYGYRKTVVDRKPTLEIYEPEAKFVRMIYDLYLQGYGMSTIANHVNALGARPHRSEQFSRNSIRHILHNPTFAGKVVWDQKSHIRKGARGNVKHITIYNPREKWTIVDGLHPPIIDQETYDKVQARLQARYTLPKHDGSVKSPLVGLVKCANCGQNMQRMVMKGTAYLLCTRAGCCASTQIHLVEEQILEYLADTLARLSVEQPDHIPGRDTGVLETALEAVRGEIAGTERQKSRLYELLELGEYDLPLFRERMEAVKAKRAALDKKAAELQRELREAQCADPAALAEKIRAVLDAYGSSDAAGKNELLKSVLATVWYRKDKKTGLSDFQLDYHLQAY

SEQ ID NO: 9945 - protein, 475 aa, synthetic construct
MNAVIYARFSSDKQSEDSIEAQVRACREYAAKHGFNVLSVYADEAISGKTANRAQYQKMLRDCNKGLFDTILIHKYDRIARNLGEHVNLEMKLKEKGITLIAVAQDFGRSKEAKIMRALMWSLSEYYLDNLSSETKKGHKETALKGLHNGGYAPFGYDVVNQTYIINELEAGYVKRIFDAALNREGFTSLIEEMDKAGIRGKRGKPIKYPQIYEMLRNEKYTGVYTYSQEEETNRSDRRNKPHAIRIENALPVIISKAQFMEVQKIMNKRKQTGRKGNYLCSGLVYCECGAKMHGMTSKRKGHEYRYYTCSKHCGAPVVRADDVEQAAYRYLYTLLSEENQTRIADALRQYQAGEGSRMDEFKQALAKRIQEKQNQYKALLANLSTGALPAEIVADIAAEMKDIKEEIALLERTEPPKDFTVDQIRAWLEALKATPDDKAVRLLISRIDIKQKTIINMESTLTMVLSEIGCGSWI

SEQ ID NO: 9946 - protein, 449 aa, synthetic construct
MSAPVVRAAGYIRVSTAEQALRGLSLEAQEAEIRRWAAEHHVRLENIYVDKGITARKQLHRRAAFMQMMQAVDAGQIDLILVMRLDRWFRNVYDYHKMMNEHLIPHGVNWCAVKEDYDTTTTNGRLMINLRLSIAEQECDTDADRIRDVQQNMVAKGRWPFGAAPLGYRIEEKRLVKDPHTQPQVEFFFQHMLANGSLRGALFAMNDRFGTSYEYRRAQDLSRKSVYYGVYGENQSFCPAYITLEEHQRIRSLAEKNVRVWSSPTAWPHLFSGLLICDDCHRRLNAQTIRRPSGVYTTYRCSHSTDNHGCANNRSISEKVIEEYLLNYVREDLAQYIVQMEVSQKKAAALPDNTAKIRAKQERVKTLFINNFIDLEEYKRRIQELEGQIIRRPPSEKTKDVSKLKQLLEDGALKMYPTLTREEKRAFWRGFLKELHIYRGTIQGPPIFL

SEQ ID NO: 9947 - protein, 571 aa, synthetic construct
MMQDRTAPASTNRVAIYIRVSTTHQIDKDSLPMQRQDLIAYAKLMLNTDDYVIFEDAGYSGKNTDRPKFQEMMSQIRQGAFSHLLVWKIDRISRNLLDFATMYKELKDLGVVFVSKNEQFDTSTAMGEAMLKIILVFAELERNMTSERVTATMISRASNGQWNGGRVPYGYNYDYETKGFSINPIEAEIVRLIHDKYEEMRSLVRESRYLNEKGLRTRAGNLWNPVSLHIILHNIFYCGDYRYNVLKEGDRQKVKDESEWITVEDHHEPIISREQKERVIAMLDANKRLDRKRNTYQSEKYVHVFAGLLYCGNCGKLMGATPAAAKKDWQYSKYTCPTRRKLASACNGKFTSDPIVGEFVFNYVLNMLNVQKNFADIHSPEELQAALLIGNTFSYIDHIDEDGLNDLFNMLSSGKIKGTVFGKSAKLKKKKVVSELSKLRNEKQKIERALDRLTKLYLYAEDAMPESEFIIQKSKLTEALDEVNEQIGFSNTDEWNQSVSDEEFVRRASEFIIAQKLTDRNYVSYKRLATSVDTAVIKTFVQGIIDSIIMDAGQVKQIIFKNGLSHTFIFK

SEQ ID NO: 9948 - protein, 490 aa, synthetic construct
MTDKNLLVITPHRKEPGKQRIAAYCRVSSRSDEQLNSLTNQINFYRSLFASDDTVVFVGIYAEEGLSGTQAESRPQFMKMIEDCRSGLIDCIRTKSVSRFGRNTVDTLIYTRELRSLGIDVFFEKENIHSTESSGELMLTLMAAFAESESETMSENIKWGKRRRYEQGITGSITLNGMYGFRQNKGIVTIVENEAELVRRIYKDFIDGYSYGEIADRLIAEGVPTRMPGASWAKTTVQHIIRNEKYCGDCLFQKAFIANPITHQQVRNNGELPKYLVEDCLPAIVDKETWKLAQAIAARHTPHKQASNERYPFTGKLFCGVCGKPYCYYHYTTTNKQPLAVYRCMSRKTQSAVEVSGQTYTPPHKATFNLNASPELIAYRERHCKPPKERPMLCTDIRISIDLPQKAFCRAWNLIVAKKLRYQATLRSTVDNAEDILVRYRAEEMCLLIDEIGKINEFSYPLMLKTLNRVVVNANGKLTFIFQSGIKITV

SEQ ID NO: 9949 - protein, 548 aa, synthetic construct
MTNKKVKKIEATKPTLSAQYSTFTWKRKVAAYARVSTAKEEQENSFDAQVSYYTQKIQANPEWVFVEVYSDEGITGTNTKKREGFNRMIEDALAGKIDLILTKSVSRFARNTVDSLVTIRQLKEKGVEVFFEKENIYTLDAKGELLLTIMSSLAQEEARSISENTSWGRRKSFADGKVSLGYSNFLGYDKGSDGELVINKEQAKIVRRIYAEFLAGKTPGGIAKGLTADGIETPGHKKVWQASTVLNILKNEKYYGAAILQKEITVSYLTKEKRPNTGELPMYYIEKDHEPIVSPETFQMVQEEMRRRKEAGSNMQCVSIFSSRVICGDCGGYYGRKIWHSNTKHASWHWHCNAKFQKRKYCETPTLKEESLEETFVEVFNGLIANRKEIEENYRLCIDTITDDSEYRRQLEDLNNGCGEVQTLIRSLLMTYSRQDTADDIHEKLKEYEDRLDTMARLKQKLDLKIAACAAKRVQITGFLNELMKHDAPLAKFDPLVWQAVINYATVNRDCTITFTFRDGTEKTVPIKNGVRPYTKRNKPQEVDGNDG

SEQ ID NO: 9950 - protein, 434 aa, synthetic construct
MKKTIVNIAPAVAETPRTKRVAAYARVSCGKDTMLHSLAAQIDYYRDYIMMNPEWRFAGVYADEAKTGTNDNRGQFQLLLTECRSGNIDMVITKSISRFARNTVTLLETVRELKSLGIDVFFEEQNIYTMSAEGEVMLTLIASFAQAESLSCSDNCKWRIRKGFEEGRASTCTMLGYRLVDGKITLIEEESKTAKRIFDLYLAGYGLQKIANTLNGEGLYSIFGNEWHPTTVRKVLTNEKYCGDLLLQKVYRENHLTKKMRPNTGELPQYFVEDDHPAVVSRETFAAVQKELERRAEEKAPTVGTTSVFTGKIRCSCCGKNYHRKTTPYNIVWCCSTYNSKGKKYCPDSKVIPEETLKRAVTDILKTDGFSDEAFQMQVCTIEAHPGNLLRFIFANGSTADYVWKDRSRSESWTDEMKAAAAKKAKERYASHDK

SEQ ID NO: 9951 - protein, 520 aa, synthetic construct
MNVAIYARKSKATKKGESISNQIELCKKYFLNTTNEDVNFLIYEDEGWSGGNINRPQFTKMINDAKLNRFSTLICYRLDRIARNVADFSSTYKILEENNIAFISITEQFDTSTIMGRAMINISATFAQIERETIAERIKDNMLELSRTGRWLGGISPLGFKSVQITENNKKLYKLEVVNDELEIVKLIFNLYPQYKSTVPVARYLVSNHIKGKNGGDFSKNTVLQILKNPVYCCSDTEAIKYFKDKDSTLNCIDNKEFGLMVYNKKKSGKKENPIDEWIVATGKHQGIIPGAEWVNCQKILEEISRKASPRKATGNKFLLSGMLKCARCGSSMCSWSRTSRGIYYRSYRCELKNRAATRCDSKMVNADDLESFVIELCKNINLEEIINIKKTKNNNSTLKRELTSLNKTLVENDKLLQGLVKKLALIDDIDILTIIQAEIKKIKSENENINKRINEINLSMFDSEDEYKNQQILLESHKLFKDTIDLVKDVEAKRNLIMSFIEYFTYDSQANEIGYKLRL

SEQ ID NO: 9952 - protein, 573 aa, synthetic construct
MAKVKLPDKPRVAIYTRVSTLHQIDKDSLPMQRQDLINYARLILNTEDYVVYEDAGYSGKNTDRPKFQEMMQQVRLGMFTHILVWKIDRISRNLLDFATMYSELKQLGVVFVSKNEQFDTSSAMGEAMLKIILIFAELERNMTSERVTAAMLSRAANGQWNGGRVPLGYDYDPETKTFAINESEAAVVKIIHDKYEQERSLVSLARYLNGHGYRTRTGCTYSPSTLLIILRNIFYCGDYRYNVLKDGDRQKRKKESEWITVKDHHPAIISREQKEEIARILKENRRLECERRGIYSKKKNVHVFGGLVICGNCGHAMTSTIRPADQDGIRWSVYVCPTKRRSEYLCKGRATSEVVLGEFVFNYILNMLNVQKNFDSINSVEDMEKMLLSGSTFRDVDGVERAGLDDLYNMLASGLTEKAPFDSSVEVRKKPVVSDIELENLNTEKTRIERAVERLQNLYLYSDDSISQKDYIIQREKLMSQLAEVNEQIGMVMSNADEKDVSDEEFVHAASKFILTQKLEGRTYIYYKRLATTVSREVLRSFVMSIIENITIYDGRVQTIVFKNGLSHIFILK

SEQ ID NO: 9953 - protein, 486 aa, synthetic construct
MRRVVIYVRVSTQEQATEGYSIGEQLERLRLYCQAHGWILVEEYIDPGYSGANLDRPAISKLISDIGSGTFDTVLVYKLDRLSRSQKDTMHLIEDVFMANNIDFISMSENFDTSTPLGRAMIGILSVFAQLERDQIKERMGMGKEARAKEGKWQGGSTVPVGYEYDVSTGELIINEYEAMQVREVFNLVLSGMPYKTIANKLTAKGYTYNAISGHVGIWDAKRIKYVLTNKLYIGYIRYKDTWFPGTHEPIIDTETFEKAQLLFKERSASNVVCIKKRQGQTSYLGGLLYCKKCGARYARNSGKKWKNNEPPLYYSCYSRSHKVPKMIKDPNCKNKTWRMTDLDNIVLDEIKKLSLEPEYINTIKERETSKQDTSNKADILKKEIRKIEEQVSRFLDLYGLGAFTIEQVTAKVQPLNQRKQDIEQELIELVTDETILSEDETREIVRNFDKVLERSDFNEIRMTIDSLVRYIELNDDTVYIHWKFT

SEQ ID NO: 9954 - protein, 517 aa, synthetic construct
MKKLTKIKIRDAVHQKKKLKVAAYCRVSTASDKQLVSLDVQKEHYENYIRSNEEWEFAGIYYDEGITGTKKDIRSGLLSMIADCEAGKIEFIVTKSISRFARNTMDCLEMVRKLTGLGVAIYFEKENINTGSMESELMLSILSSFAEKESVSISENNKWSIKKRFQKGTFIISYPPYGYYNNNGTMSIVPEEAEVVKEIFAACLAGKGTLAIAKELNDKGIKAKKNGKWYAGSIKNILTNEKYTGDVIFQKTYTDDSLNRHINYGERDRFLCKDHHEPIICHEVFDRVRAVLDQRAMDKGNGIETFRYKKRYCFSGKIKCGECGKTFKRRQHYKPSGNYVAWTCETHLENKEKCSMLYINNESVKLAFLTMMNKLIYSHKEILKPLYRKICHVYEKDRLLKINELETRINENADRKHILANLMAKGILDTAVFNKENVALDMEEQMLRSEKEKLVALDSIRVKEMRKLVDFAAKSKMLKLFREETFIDFVERITVESRLILVFHLKCGLNLKERLVE

SEQ ID NO: 9955 - protein, 523 aa, synthetic construct
MSMSKNITIIPARRRVGNTAKAVQTPKIRVAAYCRVSTDSDEQATSYEAQVEHYTTYIRMNPEWDFAGIFADDGISGTNTKKREQFNRMIERAMAGEIDMIVTKSISRFARNTLDCLKFIRRLKEKNIPVYFEKENINTMDAKGEVLLTIMASLAQQESQSLSQNVKLGIQYRYQQGYVKVNHNRFLGYTKDENGNLIIEKEGAEVVKRIYREYLEGASLQKICMGLEADGILTGAGKKIWRSDALRKILKNEKYIGDALLQKTYTVDFLEKKRVPNDGLMPQYYVENSHEAIIPRDVFMRVQEEMHRRANLHSGRQGKKRVYSSKYALSSIVYCSKCGDIYRRIQWRAHGGKYTVWRCCNRVENGPAACDADAILEEELHDLVVQAINRTLSKRENMKVVLASNIESVLTEVNGIPLGTIDSQLEELQNELIKVANAKGNYDSIVDEIYRLREAKQNAQVEGAEREGMKQRISEMQQFLAEQTQDITEYDEQLVRRLIEKITVYDEKVIVEFKSGTSVDIHR

SEQ ID NO: 9956 - protein, 499 aa, synthetic construct
MSKAVIYARYSSTNQREESIEGQIRECTDFAKRQDITIVGSYIDRALTGKTDARPQFQKMIADSGKQLFDIVIVYTLDRFARNRYDSAIYKAKLKKNGVKVISAKENITDDPSGIILESVLEGMAEYYSVELAQKVLRGMTENALECKWLSGIIPLGYKLDNDKHLIIDDTAAPIVRRIFEMYAAGDRIVDISKYANSTHLKTAKGNEFSRCSFTHMLKNETYVGTYKWRDIVKTKVIPQFIPDDLFYAVQKRIKSRKETNIRGKSENFLLSSKLKCGKCGQFMTGVSGTSKQKRRYYYYQCYASKSKNCDMPLFPREKLEDIILAETIKLLSEPQTIEFIANTVANLPIDENMQLSILETEIAEINNKLKNCIKAVEGGLISNTISKNISEYEKKLSVLEKDLSIEKVLNEPFKITPDHVKFFLYNILQIKNADERRDMIISTFVRDIVLTKDDIGYTVKITYNYNENPSTSLDNSVQKGSQKSSLVAPTRIELVISP

SEQ ID NO: 9957 - protein, 523 aa, synthetic construct
MPNTKSFTVNEVLVYLRKSRSDSPDMSVEEVLRKHEEMIQQYASTHFHSPIPEKNIFREVVSGETIDSRPQMKNLLKMIESEQFKAVLVVEPQRLSRGDLEDCGRLINILRYTNTTVLTLTHSFNLQEEYERKFFEMEITRGNDYLEYTKRILKRGREASVAKGNYIGSVDPYGYKKTVIKKDGVTCHTLEIIPEEADTVKLIHELYAYTPGGIGFTNIAHKLDAMHIKPKKAAHWTPAIISSILCNPLYLGMVRWNNRKVVKYINEGQLAKARPQNSEAKYYKGLHEPIITHELYDACMARRGTNPSLRRNKELCNPFAGLLYCGTCGHAMSLKIYKNHNSVSQMMLCNHQAYCHTKSVLYSAFLRRFISSMEDTLNDFELAQKSDDGRAQAISKTIVVNLENKLKKLNEKDARQKDAYEDGIYSKEEFLERNVRTQQDIASTIIALEDARAKKADIVDYEEKIRRFKDCLHALNDPELSAAEKNRFLKSCVDKILYYNNMESKAGIGRYIENVFSLEIQYK

SEQ ID NO: 9958 - protein, 545 aa, synthetic construct
MLQVAAYCRVSTDKEDQANSFEAQQRYFREYIQRQPDWELQGIYADEGFSGTSTNKRVEFNKMLHAAELGQIDLIVTKEVSRFTRNTVDALQITRELRRRGVGVLFLNDSLDTRTNDGELRLTIMSSFAQDESRRTSERSKWGQMRSMEKGVVFGGSLLGYDVIGGKMTVNPEGAEVVRLIFHKYLQERKGCSTIARELREAGILSSKGNCLWSSATVTKILKNEKYCGDLIQKKTYTPDYLTHEKKYNHGKEPLVELKDHHEPIIDRETWQAVQRELSRRNRATGCGGHGNRYPLSGKIRCGECGKSFSHRTKKRQDGSSYYRWCCFTATNEGLRRTDGAGNVIGCSVGRQIRDDIAMDLLRRSVNAVTLDKKAIISSLTRVVESVLTSGEDSGEQELRRLELELEKLQARNDTIHDRFFDESITKADYQRAKARCESEMNRVQEKIAAIKQRQTLNTDTQTLKPDIRAAITGIVSGRTADDDFYGHLLQQMTVYRDGRVEVALNLLPAKWVYVLDGLEKYRAKIGGHDASSVPMSVSRPLSSG

SEQ ID NO: 9959 - protein, 464 aa, synthetic construct
MARSVTVIPARNRQRETGRRAVQEKKIRVAAYCRVSTDQEDQLHSFEAQVDYYTKYINDHENYEMAGIYADEGISGTNTKKREQFKRMIADCEGGKIDLVITKSISRFARNTQDCLAYSRKLKNLGIGIIFEKENINTLDSTGELLFTILSSLAQDESRNISENCKWGIRTKFKNGEMHLNTFKFLGYDKDENGKLVINKEQAKTVRRIYRDFLIGINPAQIAKELTEEKIPGCNGQTKWYPSTIVGILKQEKHMGDALLQKTYTADFLTKRQVKNNGEIAQVYVKDSHKGIIDKETWNAVQEEFERRERFVKDHGTDRYSYGADCMPFCEKVFCGECKSLFTRHSWKSRGIVQWQCKNHRTDGRVTCSNAYVDNSDLEKGFVKAFNKLVADREKFMERWSQMKTDGSPLEKIRAEQMMEAMGNEPLGRFVPEIAQLVLAEVTVLGAKKYEFFFLEGSRIKVSV

SEQ ID NO: 9960 - protein, 498 aa, synthetic construct
MEIQIREGNREQKRKLRVCAYCRVSTDADEQENSLENQIRHYETVIKANPSYEYAGVYSDFAISGFKEKRPGLQKMLADAQKGKIDLILTKSVSRFARNTSIVLEATRKLKELNVGVFFELQNINTLSGEGELMLTILAAFAQAESESGSAGAKMVYQRKYEAGIPVQYLERSFGYTKDERGVYIADEEEAVWVRKIYDMAAQGYTLAAIKRYLNENNVKTVGGAEWLDSTVLRILENEIYKGDYIMHKYFVNEERKLVRNRGEVDAWYIEDDHEAIVSPELWQKAQDALEAKRDYLAEGSVIEEFTEENYPYMNRIYCARCGHPLYRRIYSNGNRLNWGCSGTKRYGKSFCEGINIPDGVLRKAWHFDGNMYIDEKPSVKGTKEFTYLRESSWKRRHKKKVPEAIPENTEEAYPYRKKIFCGLCGSRLVRHVNPKSHKVIWICNGAKRKGVAFCRGTRIPDSVISGWGEIKKDIYIQRKDDKNGKKRYSYTSKKPTA

SEQ ID NO: 9961 - protein, 497 aa, synthetic construct
MTAVIYARYSSDNQREESIEGQIRECTAYAEKNGITIVKHYIDRAISAKTDNRPEFQQMIKDSEKWLFDIVLVWKLDRFARNRYDSAHYEYQLERNHVKLVSATEPISDGPAGIMVKSMLTGMAEYYSAELSEKVVRGMTENVLKGKYNGGTIPIGFKVDEEKFFQIDPLKAPFVVEAFQRYNDGATMKELMNWLNDSGVTTNRNQKFTYNSIQTLLTNRRYIGENRFKDIVMPDSIPVIIEKELFDSVQDKIAKNRRAPARHKAEDDYLLTTKLFCGMCGAMMFGECGTSRNKNVHHYYKCANAKRTKTCKKKTVRKEWLEDLVVNETMKMIRDDDCIQSIVDAVMILQEQENTVLPLLEKQMKDIERGIENLLNAIQEGILTSSTKGRLEKLEVQQKELEIRIAEEKLAKPKVSADFVKFWLTNFRKLDPNVKSHRETLINTFVNAVYLYDEKVLITFNYKDGTKTITFDEIAAKDAPEGNGSDLGCFAPPRNST

SEQ ID NO: 9962 - protein, 404 aa, synthetic construct
MIIKKVMPKIPVAKKRVAAYCRVSTFRNEQDESFETQQKYYEELIQSHPDWELVKVYADRHSATRVKNRPGFQEMAAAAEAKKLDIIICKSISRFSRNMVDCQQYAKWFRTLGVTIIFEEQNIRTDDPTCDFVLSILAAVAQDESHSISENEKAAYASRFARGEYNLGNNRILGYDCVDGELVPNKDAWIVKEVFRRFIEGESYRQIAKGLEELGAQSLHSKKGFGVETLRYMVSNETYVGDKRLQKKAPLDYLTKKPNPNQKMESNYLWDDHEAIIDRETWDKAQEILEKRKELAKVGIHKTNREHHFLYGKVFCGECGAPFLRRTLKAAGGFKTQSTYKAWNCRNRQKGKGNERCGNRFIKEEELIDAILRELEWLNMDQERFEKEVSKVLVYPDHIEVEKN

SEQ ID NO: 9963 - protein, 541 aa, synthetic construct
MSESTLKKAVFYGRYSSHLQHETSIEAQRDIVTRYALNNGYEIIAEYIDRAKSGTTTARRDRFNQMILDSRNGEFQYVITSKIDRFARNVKDFYISENKLDENGVKYISATEHYDDSTMSGIIIKALGVAAADGYSKNLANELVKGKMVNAKRAKHNGGIAPLGYDVELSTGTLKINEEEAKAVRLIFDMYVSGNSYGDICYKLNELGYTTKKQRKFGKNSLYDILHNEKYMGVYVFNKRAGKKNSHARKPDNEIVRIENGVPAIISKEVFDKAAKLMEYNKRNSGANTAKHNYMLSGLVRCGHCGCMMSGCAKKNGKGIVTHVYRCGHKPGEKCENHEINSDKLDEFVITMVKKYLFRKENIPVLLNILRELSAKRITGISDDIGEYSRRLKDIKIKQENLLNALETGGQIESVIDRLKKLEQDKSTVESKISELKQKKSVSVTEEQLNKALNILPAFIMSGRTPECRLFIRNIVEQVIVSKDNAAVTLRVTAVSCMRNRNDRKHILSSGIDPKIYQEDKNHERKQECRTVCKIQLRYAA

SEQ ID NO: 9964 - protein, 515 aa, synthetic construct
MSENKNAVLYARFSSDMQHETSIEAQEEAIRRYARENGYTIIAEYIDRAKSATTTAKRDRFNQMIEDSKDGGFSVVIVHKYDRFARNRLDSTVAKAILDKNGVRVISVLEPTDDTPEGELMEGMFELLAQYYSSNLGREVMKGFKVRAKKCLHNGGIAPLGYDVDPDSKKLVINENEAIIVRKIFDMYTSGYGYNTIIAHLNECGYVTKYGNEFAKNSLYSILRNKKYAGYYVYNQWDGKHNRHRAKPEDEVICIPDGVPAIISEEIYDKAAEIMAKHKLSPGANTAKTTYLLSGMIRCGHCGAIMTGNRRMNGKGYTYCSYRCQHKQSTECANKEIRHDRIEEYVLQVLEQNIFNEDYIPDIIAEIKEQAVQHNTSVIKELADLTMKLERIKTRRKNILNAIADGIAEDDCKEILSQFKADEYSCIKRQKALSTTETDIDISTAELTERISELSIYIYERNIAECKKFIGQYVKSVVVYDTKVEVAVTIPSELLCGCEYSLTRSMGRKFLPMPQ

SEQ ID NO: 9965 - protein, 527 aa, synthetic construct
MNIQQNRTTALYCRLSRDDDFGGDSASIQTQKTMLSQYARDNGFTVTEFYVDDGYSGTNFDRPDFCRMISDIECGKVGTVIVKDLSRLGREYLKTGYYTEIFFPEHDVRFIAVNDNVDSDHGENEFAPFKNIINEWYAKDCSRKIKSALHLKARNGEFLGGYPAYGYRRSDGDRHSIVPDENAPIVKQIFELLLEGKSCYEVAKYLEQNLILTPRAFLAEKYGVYKNSASAKHPYAWEDRSVYSIATNPVYVGDLVNGRRKCKYFKSKKVCKTSEDEWIVVRDNHEPLVSREDFEAVGQRLAVKQHRKVENPDNIFRGLMVCGECGRKMVFSKSGKSGRYSCAIYKRYGKSECSRHSITLKQIKQIVLMSIQRNAALSSEGKDRFVEQMLSVSNSKKSAELSALKKEAEKLTARKLALAKIFQSLYEDKALGKLSEDVYAELSGSVERERTEIQERLIQISEQLGKSQQLTENAEKFTELIRRYTDITELSEELVHLLIEKIVVHERDCVTNTMRVEIYYRFIGKVD

SEQ ID NO: 9966 - protein, 492 aa, synthetic construct
MNAAIYIRKSREDKDKDSHRLTVQREQLPAYAIAQGWKPHIYDDGHASAARGKAEDLKQRARLEADINAGKINIILTIELSRLSRDDSLQDYTAWLHLCGQHQVKLATLSRTLDPAQTSDWMLLLLEGGFSSVEMKIMQIRMAEGRRQAKLAGKYLGGKPPMPYTYDKAEHAVKIDPQQLKTFERIITLAHNHSARSIAEQVGLPHIRVRRIIADDRLLFYQGKRLDEQTGNEITGQWPAVIDAKTAHAIAQNRKTGHHSPRREITGMLSACGLMICQYCGRSVRTWANGKPRKSDGLKLQYYGCRHLDKKGGCGSARMIPQSVIDQLVLTNVSNTLERLDQIKTYWIDHNSTNTTAQQIKAINTELDSLQKQKQRLIDAITEGIIDFADAKEKRQQIETSSNACKKRLAELTNQTTEPPNWEDITLTRAEIDQLTKKEQRELLIAILESITIGTTTITLNYKFPRHPDGRTTAQIKLPAPGKTNPKGHWKP

SEQ ID NO: 9967 - protein, 548 aa, synthetic construct
MSTGTELRAVFYARVSTEEEKQLNALEKQIHENKDVIRDHGWRLVGEYIDEGKTGTTTKRRNDYKRLLKDMTENKFDIVVCKDQDRLQRNTLDWYLFVDNLVTNNLKLFMYLDNKFFKPSEDALITGVKAIIAEEYSRNLSKKLNNSNKRRIERALNGEEVSAMGNGKSLAFKIVNGKWVKDEEEAKLGKKIFELYLEYDSIRKVRDWVNEHGYTNSVGKPFTSESISRILKNEKAKGVIVMGKYHHDFDKKKIVRRSEEELVRIPAPELAYVSEEVFDKVQERLRAKTGNGRGVNAYSDPLSGKIYCGSCGRKLWKHASNGYVNWMCASQVAKGDVECNGTRITTVAIRNIYKKITDNLEVNKEVVKQDIVKWLNELKATLSDTSVNEKIQKDLDKMERKRTKLLEAYLEDFISKDDYKAKYEAIEGQIEEKKKLLVPVEENEDIKVIESVLQNIDDEIDAYVKTLDMEESKVDFLIEHTKRITVLENRDIIIELDLVAGAIIAGKDFLLYVHDTMPQHHGPKHLHPSGPQTAPRCCFRDRFSCDQP

SEQ ID NO: 9968 - protein, 581 aa, synthetic construct
MARKRTNLIGNTPSVRETKVAIYIRVSTIHQVDKDSIPMQKKDLIAYCQLILGTDNYEIFEDAGYSGKNTDRPAFQNMMGRIRKGEFTHVLVWKIDRVSRNLLDFAEMYEELRSLRVTFVSKNEQFDTSTAIGEAMLKIILVFAELERNMTSERVTATMISRANSGQWNGGRIPFGYSYDPKEKVFSIREDEASICRELKDLYLLNRSLAYVSRALNEKGYKTRAGVSWSPHSVWIIASSPFYTGIYRYNRYKGVESRTINPEEEWVMIQNHHPAIFTLEEHQAMRSIMKSNKRNMDNLPGRVHLSTKTHIFQGIMYCDKCGSKMVSTPGRLHVDGYRTSNYGCPLRRNTKKCNNPTVNDIVIGEFVINYILNMLNAKKTFSTINTPDELNAALLSGSVFSEVSSVEENGLNSFFNLLSRYGSDRSYIFSVKSPRKKKAAVDPELSKLRKEKEKQERALQRLQDLYLYSETSMSEKDFIIRKSEISSHLDNINRQLGLMTQDQASFLSDEEFIKQASHLLIQKELKNKKYIYFKKLVSTVDPDILKAYMETILDSIYTADGKITAITFKNGLTHRFIYKDK

SEQ ID NO: 9969 - protein, 525 aa, synthetic construct
MPKNVRKIPASVNLYNAVPITNKKKRKVAAYARVSTDQEEQLTSYEAQVDYYTNYIKSRDDWEFVDVYTDEGISGTSTKHREGFNKMVEYAMAGNIDLIITKSVSRFARNTVDSLTTIRKLKDIGCECYFEKENIWTFDGKGELLLTIMSSLAQEESRSISENVKWGHRKRFADGKVTVPFGHFLGYKRGEDGNLVIDEEQAVIVKRIYREYLSGSTAVAIAKGLTNDGIETPGHKQKWHASTVRSILTNEKYKGEALLQKYYTPDFLTKKQKVNNGEIQQYYVENNHPAIIEPEIFEMVRIEKDRRLMLNGKYSGTDILTSRIKCGECGGSYGAKVWHSSSKYKKVIYQCNRKYAGKEKCKTPAIRADDVETRFVNAVNSIIENKDEIISNLEMVLDKICNKKELSEEKEKLEKSLAEQVEKIQELIDMNSRVAQNQEKYKKEYDAMIKTYDETKFKYEQLEIESSQQAAKHQMIKDYINTLKKQNKPLTKFDGLMWGSLLESATIKDKDTIVFKFKDGTEING

SEQ ID NO: 9970 - protein, 570 aa, synthetic construct
MAYRKITDIRDTIGMRAVFYARVSTAEEEQLNAIELQIEENRGCIKDHGWKLVGEYIDRSKSGTMVKGRDDYQRLYEDLYEDLFDIVVIKDQERLQRNTLDWYLFINRVVQTGKLLFMYMDGKFYSPDDALITGVRAIIAEEFSRNLSKKLHNYHDHRIEKARQGQEIALQGSGNVYGWDKKDGKYYINPEQAKVRRLMCEGIMARKGSTLIAKELNDAGYRNTVGKPWKPMDIPKFVYDCKNVGTMIINKERHDFESKQTIKLPKEEWVYVENALPPIVTQEEWDLICKIHEERVIATGSDRRGKKTSGYSFSGKLVCGICGAPYWRKQRVSKDEYWVCSTKQTKGRRTRKRDSTMGKAGEINPLGCDNENISYNSLMEIMGVVSERLQANTDTIKHDMINWLTKLRKQLLEANGGHTEADLQRELSRKSKLLDAYLDGILNKQEYQKKAEELDERIIQLKAETEKNKANSGDIAEIDKVLANIDEEVSRYVDGNEKLKVEYLLEHLEQVQIFPDKVIVIVPILSEGIVVEKAQYVSREKWSWKDYIFKISHWTCISYKRHTCFMGKVK

SEQ ID NO: 9971 - protein, 528 aa, synthetic construct
MSRTAARSVTVIPPTINPLTHLSKVAIQKRRVAGYARVSTDSDEQFTSYEAQVDYYTQYIKRNPEWEFVKVYTDEGISGTNTKHRIGFNEMIADAMSDKIDLIVTKSVSRFARNTVDSLVTIRKLKEKGVEVYFEKENIYTFDGKGELMLTIMSSLAQEESRSISENVTWGQRKRFADGKVNLPYKQFLGYRKGADGFPEVVPEEAIVVHRIYTRFMEGLTPGAIAKELTADGIPTPSRKQRWQTSTVESILQNEKYKGAALLQKCFTVDFLTKKRKVNDGEVPQYYVEHSHEPIITPEEFDKVQTELARRKQISRQYSGKSIFSSRIVCGDCGSYFGSKVWNSTSKYRRVIWQCNGKFKGEHKCETPHLDEETIKARFVTALNAIIESKDNILEDCRLMQATLTDCTGIDTEIESLLEEIDVVTELTKRCIAENSQMAQNQEEYAARYNGFVERYEKAKARLEQLRTTKAAREAQAEAIGAFMFEVQELNALTEFDEKLWLTIIDTITVHADGRMTFKFQGGTEIEA

SEQ ID NO: 9972 - protein, 434 aa, synthetic construct
MERVVERVDALIPAQPRALRVCAYTRVSTGKDAMLHSLSAQVSYYSKMIQSHNGWMYCGVYSDEAVTGTKRERAGFQHMIEECRQGNIDLVITKSISRFARNTVTLLQTVRELKSLGVDVFFEEQHIHTMSADGELMMTILASYAQEESLSASENQKWRVRKAFENGEIINLRFLFGYDITPDGIQVNEKDAAIVREIFARFNGGESMSSICRDLDARGHKGVLGGTWCAERMRNTLSNEKYLGNALLQKRYRNNHIEKKLLPNRGELPMYYAEGTHEPIIDQATFDKAQERLRMLAQQTANRKKPTRSVFSGLIHCGLCGNTYKRVTYRKKHYWNCTTFQTKGKSECAAKRIPEETLEVLTCEVLGAVSFDPDMVRSKITAIRAEKSNMVVFCMDDGSEIVKRWTDRSRAESWTPEMKEKARQRALQARRHKV

SEQ ID NO: 9973 - protein, 522 aa, synthetic construct
MELSNVCIYLRKSRADREAEARGEGETLARHERILLDLAKKRGYNVGAIYKEIVSGETISARPVMQQLLREVESGMWDGVLVVEVERLARGDTIDQGVVARSFQYSNTLIITPLKTYDPNNEYDEEYFEFGLFMSRREYKTIRRRLTAGRESSAKEGKYCGSKPPYGYSRVKLVGEKGWTLQPVPDQAEIVKLIFNLYVHGVAGERIGMAKICRKLNDSGIKTMDGGLWTVPRVQAILRNPVYAGMIRWNSRKAVKHIQDGQITISRPFAKDYILVEGRHPAIVSKELFQQAQDIVNQNPARPLNSLHVLRNPLAGIVRCGKCDHVMTRKSPNGRQGDLIRCPYSSCSNISSKLPLVEKALLDGIQELVDGYRLNNSVSDQEYSLSISEREKMIQGKLKEIDILKKRKQRQYDLLEQGIYSTEEFLERSRATAAELSACDAVILSLKQEIEHEQELQFQRSSFIPKCEDLLANYWTWDTSTKNRFLRELIEKAVYTKNAKNTWKNGDDISFTLDIYPKIQQK

SEQ ID NO: 9974 - protein, 465 aa, synthetic construct
MARSITVIPASQPYRVGGRTQQKTRNLRVAAYCRVSTDQEEQLNSFENQVEYYTKYIQDNPLYQMAGIYADEGISGTNTKKREEFKRMIRDCEEGKIDLVITKSISRFARNTQDCLEYSRRLKNLGIGIFFEKEHINTLDASGELLFTILSSLAQDESRNISENCKWGIRSKFKKGIPQVDCTKFLGYDKGDDGKLIVNKEQAKIVKRIYREFLNGYNPAAIAKMLMEDHIKTGTGREEWRSASVRAILKNEKYMGDALLQKTYTSDFLTKKVKKNHGEVEQFYVKESHEAIIPKEQWEAAQLELERRDSYMQELGLTFYGYGSEVNPFSCRVVCGKCGAVCGKKSWKSRGVEFWQCNNRSKNHGVKGCASENLPHENLLKGFITAWNQIVAKREQYLPKWEKNKKDGNPLERLRAEQMIGLTLQPPLTKMLPELGQMVLERVIVQGKEIMVIRFLDGTEIKVRI

SEQ ID NO: 9975 - protein, 519 aa, synthetic construct
MKKVTKIDKIQPSKAVKKKLRVAAYCRVSTDSDAQHESLETQKTHYENYIKSRKDWEFAGLYFDEGITGTKADKRPKLMQLLADCKSRKIDFIITKSISRFSRNTTDCLEIVRTLLNLNIPVYFEKENINTGSMESELFLSVLSSMAEGESTSISENNKWSIKKRFENGTYKLGYVPYGYSWEDGEIKVNPEQAEIVKRIFSELLSGKGTEVIAKELNTEQVPTKKGGRWTSTSIRDILANEKYTGDCLLQKTFTDSNFNRHRNNGNLDKYFIPDHHEAIISHGDFEAAAALIEQRAAEKGIERGSAKYQQRYAFSGKIICGECGNTFRRRNHKSTHGSYTAWVCNTHLTDTGKCSMLYLRDDDLKLAFATMLNKLIYCYKLVLKPYLDALQNNTTDEALLRIQHVETLLEQNAEQRETLHKLMAQGYIDQILFTQENNALLSQADSFRSDIDALNNSVTGDTTKVYEAERLIHFCERGEMLNEYSENLFELFVDRIYVYSRHEVGFIMKCGLTFKEMI

SEQ ID NO: 9976 - protein, 538 aa, synthetic construct
MAKKVTVIKAAKAQKHTQEERRLKVCGYARVSTGSQAQATSYTAQVEYYTEKIESNPLWEFAGVYADEGISGTNVKHRDEFQMMISDCEDGNIDLILTKSITRFARNTVECIQTIRKLKEIGVGIYFEKENINTLSEKSELFITILASVAQGESENISSNNRWAIQKRFQDGTYIISTPAYGYGKDEDGNLVIIESEAETVRWIYESYLNGMGVYVIAKALNQKGIPTIRGAEKWQDGVIQDILKNPIYEGDMLQQRTYTETRFPFVRRVNNGQRNQYLIKDSHPPIVTHEEAEAVRNLMAYRVDVLHMNKSDYTKRYLFSGRIICGECGRTFRRQKIYIGKPYEKIIWTCSGHVEDKERCCLKAIREDVLHRAFTDMWNKLYTNQGTILEPLLKELTELVAARQDSEEIRQLDKEIKDISGQSQILNQVMRKGYMDSALFMESSSKLGWQLTECRRKKTLLTRKLRRTKEIVRTEQLIQLIAEQDGLMEEFDEQLFKMTAEKIVVSKEHDITFCLYNGLKLTERGGGQDAVAHANRL

SEQ ID NO: 9977 - protein, 544 aa, synthetic construct
MAETAKKISMIPAKVQYDRNVKLSEKKMKVAAYCRVSTELEEQDSSYEAQVEYYTSKISENENWKNAGIYADDGKSGTNTKKRADFNAMIQDALAGKIDMILTKSVSRFARNTVDSLVTIRKLKEKNVAVVFEKEGINTLEGTGEILITILSSLAQEESRNISENIRWGVVRKFEKGKVIVNCTKFMGYTKNEDGDLVIVPEEAEIVKLIFRLYLEGYSTGKIAKHLEEQGIKTATGQDKWHSTVIDKMLRNEKYMGDALLQKTYTVDFMTKKKVKNTGIVPQYYVEDDHEAIIPKELFYRVQEEMMRRASLCKAAVTRKKNQKSRYSSTYALTGMLICGKCGQEYRRVTWARNGKKKVVWRCSNRLTNGVKKCGESETLEENALNRAVMEAIHRITSDDMEFMEHFRQNIIHVIGSYGTAKESGEYEEKIKEKQEEMVALIAENAKTGSYTPEFDERYRTIAEEINALKEAQKTARNEKRMADSYEQRIQDIDHYLSTSTCQIPEFDNDLVRRLISTIKVESSEKLLIQFQSGIVMEQEIRYE

SEQ ID NO: 9978 - protein, 520 aa, synthetic construct
MLEKNIIIYLRKSRSDDPGMSVEDVLAKHELQLQEYAVSEYGEQIPEDHIFREVVSGETIADRPVMKQVMRLLEAGNITAVLVIEPQRLSRGDLEDCGRIINIFRYTHTLVATPPKTYDLTNEYDRKFFEMELMRGNDYLEYTKKILNRGRIASVKKGNFIGSVAAYGYKKVKIGTGKDACHTLEIIPEQADAVKLMFKLYLEGNGFTNIAKTLDELKIKPLRSETWSPAAISDMLENPVYVGKIRWNYFKTVKKIEDGQIVKSRPINQDPSDWFLVQGKHPAIIDQATFDAAQERRGRTPKIKRFNELKNPFAGLLYCQCGKAMSLKIYNQKKGKCEPTKLMLCNKQSWCKTKSVKYDTFLERIVETLESTIANFEIKLKKDNGDAAQLHKNIVYNLETNLKKLKDKDIRQKDAYEDGIYTKEEYASRNAKLQEQISETTKALCQAKDSVPPTINYKEKIARFTDCLNALNDVSVPAAEKNMLLKACFEKIIYHNDMPSISGHGRWIENKFKLEIFLRL

SEQ ID NO: 9979 - protein, 535 aa, synthetic construct
MLTVFLSNGKGDSMIAIYTRQSIEKKDSLSIDAQVKACADYCKAQGWEYEIYTQDHGFSGKSLDRPGFQAMMSAVRSGQVDKIVCYKLDRISRSVSDFAQLLQDLEQYKCDFISVTENFDTSSPIGRAMVYICMVFAQMERENIQERVKSNYYYRSGLGFWGGGPAPYGYQLKRQQIAGKVHTVLEPDPNEAPWVKKMYEWYLEPGGSAMKILRLLTENQVPTKRGYKWTSRVLMDVLSKPLYTQNSMDVYNYLTQSGAVISNPPEDFDGTLSVDLYGKKDSSQSKHKRCRKGSDMYCNISLHEAIIDSDTWLQVQYKILARPKIGGRTGTSKNSWFTGLMICGVCGRHVSFTHSARTAGYYICSSRKNCGWNSCSSKPASKKKFDPIIVKFIRDHYDSPKTKAAIQQAKLAAKTPQVSIERNNLQMELATINNQIDNLLTSLASGNAVMSKYINDKITELDAKRTPLQARLLQFDATSSVNDELKRLERIEWAMEQLPLVYTEDTFDLSVQVSQALVNNIVFNSDGEVTISFAI

SEQ ID NO: 9980 - protein, 521 aa, synthetic construct
MKKITKIDGVQNNSTIKKELRVAAYCRVSTGSDAQLESLEAQKTHYERYINSRKDWKFAGLYFDEGITGTKAEKRPELLRLITDCEARKIDFVITKSISRFSRNTTDCLALVRKLQSLNIPIFFEKENINTGSMESELFLAILSSMAEGESASISENSKWSIKRRFQNGTFKLSYTPYGYDWDGENMIINPAQAAVVKIIFADILSGKSTNAIADELNAEKIPSKKNTNWTSSTIRGILANEKYTGDVIFQKTYTDENFNRHTNYGEVDQYMVPDHHEAIISHADFNAANALVSQRALEKGVKKGSDKYQKRYAFSGKIICGECGDTFKRRIHTCTTYKYVAWACNTHLKDKSTCHMKYVRDDDIKAAFVTMLNKLIYGHRLILAPYLKALENSSGDEAIQRIQHLELLLDQNSEQRETLTKLMAQGYIDQILYNQETNALLLQAETYRSDIEAITICMTGDSAKVTETNLLLHFVSHADMLTNYSEELFESYADHIEISGRNEIRFVMKCGLTFTERIGD

SEQ ID NO: 9981 - protein, 668 aa, synthetic construct
MAYAKAKKHLKIWTKKKAALYVRVSTRYQVDKDSLPFQRKKLKEYCKFLGLEDYVIFEDDGYSAKNTERPHFQEMMSRVRSGEFSHLIVWKVDRVSRNLLDFAAMYQELKDHKVTFISMNEQFDTSTAIGEAMLKIILIFAELERNMTSERVTGIMLDRAEQGLWNGARMPVGYRWNNETKFPEPDPEEVKIVQLIFDKYEEWKSSIKIARYLNNNNFKSKRGGQWTSKLIHDIIRNPFYIGTYRYNLRESGRGPLKPESEWIVRENNHPAIIDKAQFDRCNKIMDQNGSSRDTSDLRARKYVHTFSGHLVCGKCGANMIASKDRARANGWRPSMYRCAQRSRMLDCDNSRTINESYIGPFIFNYIANLARVQKNFKNIATPEKLERELLKGETFDGVAGILPEGLNLTFQALSFRQVGNGTYIPDIDFLGDSDGASDRDQIELLKSEIEKSKNAVTRLTDVYLFDPDSMTKEEFATKKKELAKKIEGMERQLADLLDDSGNDDLADMSFIKKASAFLVAQRIVSKSFVDYVGMAQELDNEILKDFIDQIVDQIVVLDGRVQSITFINGLKHEFRYTAPAELPVCKKCGGRIGSTCGCRTRTFDFSGKRYKRIKVGDPRDMLHGKKNPVCPECFAQEGRWHHWNCKIETCPICGERLAECEHGPNGKN

SEQ ID NO: 9982 - protein, 525 aa, synthetic construct
MRVVLYMRYSSDRQTEQSIEGQNRVCTAFCEQQGYEIVDRYIDRATSAFKDTDKRTEFQRMIRDSEKQLWEGIVVYKLDRFARNRYDSATYKARLKKNGVRVISATENISDNPEGVILEAVLEGMAEFYSKELSQKITRGMFESANKCHSIGGHIPLGYKIENKKLVIDEAGAAIVREAFDLYANGATVAEICETFNTKGYRTAKNAEFNKNSFRSMFKNERYIGIYKYKDLRIEGGVPAIVDKDIFTIVQKKLSKNAEAPSRGKAKIDYLLSQKLFCGHCGSLMTGESGTGKGGTTYFYYTCGKRKREHTCDKKPLKKDFIERAVVEDALTLLTPETINELADIAVKESVREMEENSIIPALKNQLHETERSINNLVKMVEKGVESDTIADRLKELEKEKRAIEKRLVVAQDDYVILEKDHIVWWLSEFCNGDIEDEEFRRHIIDLLVNSVTVWDEPDGWYKITSVYNLTSNKTKTFRCSDLSGQAPPKRKIRICGFFFLPITFPLFTFTRFHTFFVIHERISR

SEQ ID NO: 9983 - protein, 571 aa, synthetic construct
MMQNRTAPASTNRVAIYIRVSTTHQIDKDSLPMQRQDLIAYAKLMLNTDDYVIFEDAGYSGKNTDRPKFQEMMSQIRQGAFSHLLVWKIDRISRNLLDFATMYKELKDLGVVFVSKNEQFDTSTAMGEAMLKIILVFAELERNMTSERVTATMISRASNGQWNGGRVPYGYNYDYETKDFSTNPIEAEIVHLIHDKYEEMRSLVRESRYLNEKGLRTRAGNLWNPVSLHIILHNIFYCGDYRYNVLKEGDRQKVKDESEWITVEDHHDSIISREQKERVIAMLDANKRLDRKRNTYQSEKYVHVFAGLLYCGNCGKPMGATPAAAKKDWQYSKYTCPTRRKLASACNGKFTSDPIVGEFVFNYVLNMLNVQKNFAGIHSPEELQAALLIGNTFSYIDHIDEDGLNDLFNMLSSGKIKGTVFGKSAKLKKKKVVSELSKLRNEKQKIERALDRLTKLYLYAEDAMPESEFIIQKSKLTEALDEVNEQIGFSNTDEWNQSVSDEEFVRRASEFIIAQKLTDRNYVSYKRLATSVDTAVIKTFVQSIIDSIIMDAGQVKQIIFKNGLSHTFIFK

SEQ ID NO: 9984 - protein, 546 aa, synthetic construct
MNETIKVVGYARFSSSMQREESITAQKRYMMMYAKRNNMEVIDWYCDEAKSAKTVNRPEFQRMINDAKNNPEFKAVLVHKTDRFSRNLSDSIQYKKILEEYGVQVIFVNERFEDNPESHLLYHIMGSVNQFYNENLAREVMKGLKENAYQCKFTGGRPPLGYDVDKDLKLVINEKEAEAVRLIFEMSAEGYGYGETIDKLNILGYKTKKGLPFVKNSLYEILKNEKYKGTYIFNRSCSANSLNKRNNHRRKPEEEIIRIENGCPAIVSSGLWHRANAVKKATRSSYTNAKNTYLLTGLIHCGECGGKFHGNVRYNKNNTNLVYRCSSKKNKRKCESKEIRCEYLDSFVIDKFVEFFFNDDNIKVITKQLNEQYSKSCISDLEYNEAKSTLKILEKSRNNLVEAIAKTGINDIISDKIKEYEEQIKKTAEFIQKYEKQKIDRVITEDEIREQINHLKDYFYNPKNLIRTKYVLSQYIDRIDISNENVQVQFKVSMSPSDNTDGDCFCVHTEMIKRKYLFDYVCEKVDFEQWNIEKLNKSESEHRKGA

SEQ ID NO: 9985 - protein, 528 aa, synthetic construct
MNRTAARSVTVIPPTINPLTHLSGVAVQKRRVAGYARVSTDSDEQFTSYEAQVDYYTQYIKRNPEWEFVKVYTDEGISGTNTKHRIGFNEMIADAMSGKIDLIITKSVSRFARNTVDSLVTIRKLKEKGVEVYFEKENIYTFDGKGELLLTIMSSLAQEESRSISENVTWGQRKRFADGKVNLPYKQFLGYRKGADGFPEIVPEEAIIVHRIYTRFMEGLTPGAIAKELTVNGIPTPSGKQRWQTSTVESILQNEKYKGAALLQKCFTVDFLTKKKKLNEGEVPQYYVEHSHEPIITPEEFDKVQTELARRKRISRQYSGKSIFSSRIICGDCGSYFGSKVWNSTSKYRRVIWQCNGKFKGEHKCETPHLDEETIKVRFVAALNAIIDSKDRILEDCRLMQTTLTDCTGIDAEIERLLTEIDVVTELTQRCISENAQSAQNQQEYTARYNGLVERYEKAKAQLEQLRTTKAAREAQAEAIGAFMFEVQELDALTEFDEKLWLTVIDTVTVHADGRMTFKFQGGTEIEG

SEQ ID NO: 9986 - protein, 437 aa, synthetic construct
MNDIERVIERVDFQIPMQPKALRVCAYARVSSGKDAMLHSLSAQVSYYNNLIQSHAGWLYCGVYSDEAITGTKSQRDGFQRMLASCRAGEIDLIITKSISRFARNTVTLLETVRELKSLGVDVFFEEQNIHTMSVDGELMLTILASYAQEESLSASENQKWRIRKAFESGELVNLRFLFGYSITADGIQVNEKEAAVVREIFTRFNGGESLSSISRDLNDRGCERPLGGTWCADRIRNLLSNEKYTGNALLQKQYRKNHIDKKLVPNRGELPMYYVTGSHEPIIDQAAFDKAQVRLNKLARQAENRRKPTRSTFSGLIRCGLCGSAYKRVTCRSKHFWNCTTFQTKGKSECAAKRIPEETLEALTCEVLGTVSFDPDMVRSKITAIRAEKNNVVVFCMDDGSEIVKRWTDRSRTESWTPEMKEKARQRALRASREKE

SEQ ID NO: 9987 - protein, 578 aa, synthetic construct
MEVELIKANDSFDGSARRRIERLRVAAYCRVSTDDEDQIKSYNSMVTHYTELIQNNKEWIFSGIYADKAITGTKIDKRDEFQRLIQDCMDGKIDMVIAKSLPRFARNTLDTLKYVRMLKERNIAVYFEVEKINTLKDGEFLMTILSSVAQQEVENTSAYVKKGLKMKMKRGELVGFQGCLGYDYDVETKTISINEEGAVLVRYIFDRYVAGAGSTMIARELNEQGHLTIRGNSWTSSSVMGIINNEKYKGDILLGKTFTVDPISKRRLDNLGEEDRYYIHNHHEPIITEEQFERAQEMRNRRNGNRKHNVAPGKREKFSRQFAFSCMIECGFCGSNLSRRSWHSNSKYKKTMWQCVKSTKEGKRFCPDSKGIPEQVIEDAFIESYRMLCNDNKDVLEEFLKRTEKALGENSIEDQLHKLQKNMEKVSSKRKKLLDNYLKGIIEQDIYEETDVELKTELTNVRAKLEYLQQQSDEKNSLQRRISDFKKALSHNEVLEEFDRGIFESIVEKVIVGGLDEDGNKDPYKITFIYKTGFKNEIGNAKGRFGKSSGIGDKVKKMCSDISDEIKRVCSDISVNTC

SEQ ID NO: 9988 - protein, 579 aa, synthetic construct
MRNKSLAGRANNRAERPRKVAIYIRVSTTHQIDKDSLPMQRKDLIAYCELILGIEDYEIFEDAGYSGKNTDRPAFQEMMQKIRSGSFSHLLVWKIDRISRNLLDFAEMYEELQSLRVTFVSKNEQFDTSNAMGEAMLKIILVFAELERNMTSERVTATMISRANQGLWNGGRVPYGYAYDAETSVFSIIQDEADICQLMKTDYFEHKSIIHTAKLLNDKKAPTRSGALWSPTAVWKILSSPFYAGIYRYNHYKGTENRTINPEDEWVLVPDHHPAIFTLEEHEKICDIMDTNKRTSNLPGQKHRSKNVYVFSGILYCGKCGNKLVSTPGRLQADGFRTTTYSCPKKRKTHECDNPSINDLIVGEFVINYVLNMLNAKSSFSSISSPAELEKRLLCGGSFKDVQHISEDGLNEFYNLLSRYGSDSSYIFSVKRPRKKKAAVNPEVESLRKDKEKQERALKRLQDLYLYSERAMTEKDFIIQKNEISSRIQDINTRLGMVTHDANSTLSDEDFVRQASHLLITKKLIGREYIYYKSLAQTVSPDVLKIYMETILDSVYVVDGRVSSIIFKNGLSHTFVYQN

SEQ ID NO: 9989 - protein, 530 aa, synthetic construct
MEQYLIYLRKSRSDLEAEAHGEGETLSRHEHTLLELAKRQHLNVTDIYREVVSGDTIAARPMMQRVLSEVEQGVWSGVLVMEVERLARGDTIDQGIIAQTFKFSGTKIITPIKTYDPDNEFDEEYFEFGLFMSRREYKIINRRLQRGRLASAKEGKWPSGLAPFGYRRVKLKNEKGCSLEPIEEQAAIVRMIFDLYTVGLQDEDGSARPLSLGSIATRLNDMHIPSPSGSQWARITIRGIIKNPTYIGMVRWGSRETKKKVVDGKVVSVRGPADPEKECVFKGIHPPLIPKETFELANDKLTRSENTSTHKEKVVRNPLAGLLVCSECGRQMMRMINPVHPDMPVVRCPRRGCPNCSSYLPIVEERVIQGLSEWMKGYELEWSSAAASSSVSSVGVREKALASAEAELRKLQQQLERTHDFLEQGIYDTDTFLSRSRMLSDKISAAKDSVTRCSRELTEEKLRETSRRDIIPKVKNLLDVYPLLETAEEKNALLKEVLEKVVYQKLNEKRKKSPDGFTIEIYPRIPKSEK

SEQ ID NO: 9990 - protein, 558 aa, synthetic construct
MNKLRAAAYCRVSTDRAEQSGSLASQRSFFDDYIRNSDSMTLVGVFYDEGTSGTTTLNRYGFNKMISLAVSGGIDIILTKEVSRFARNTVDTLNITRMLRAKGVGIIFINDNIDTRDSDGELRLSIMATIAQEESRKISERVKWGQQRKMEQGVVFGRSCLGYDVKDGKITVNADSAEIVKRIFTEYTVLLKGAESIADGLNAEQIRTVNGGRWSGAFIRKVLRNVKYVGDLEQKKTCTPDFLTHKKRLNSSEHIYIRNHHEPIISRELWEQTQAEISRRKPTDTSRHSDRYVFSGKVYCGVCGSVMVSRVKKLKNGKIYHALRCSGRIGGKSCNNETLNVTALKACIKRIFTDIPIDKTAVINAVIKGLSRTDKPDIPALRRKIETLNAKKRRAVDLMLDGLITQQELIEQKSYYDSIIEKLSQEISSDRSIFETDKIRKNAEKFLDFTSDPIWLLVIRADYIHGTLTVYLKDIEKGFTTCFTATGRGDSYRVITGNTVRSQGIIPGTMQVQKNWFHHDVNDKSIKKSAPDTFQVHFVLICRLFCFLFVAGYLAPTL

SEQ ID NO: 9991 - protein, 531 aa, synthetic construct
MEQYCLYLRKSRSDIEAENHGEEETLARHEKILLELAKKREYNVTQIYREVVSGETIAARPVMQQLLSEVEHGIWSGVLVVEVERLARGDTIDQGIVAQTFKYSDTQIITPMKTYNPNNEYDEEYFEFGLFMSRREYKTINRRLQRGRLSSVKEGKCVCSIAPYGYDKVKLKGDKGFTLAPNPNEADVIKMIFELYTKGELQPDGTYKRIGVALIARKLNEMKIPARKSEYWVPASIKDMLRNPVYAGKIRWNWRSQNKRMQSGSISISRPRSEEDNCIIVNGLHPALITEETFDLVQEYLAKNPPRPTKRNAPTKNPLAGIVVCAFCGRKLVRRPYTSASCPPTLICSVPHCPNVSSFLHLVEERILKSLEEWLRNYKLQWNLSNNKPSELISESEILRQSLNDINSQIAKLNKQMIKAHELLEQDIYTTDVFLERSRTITERLNQLSYDKAEIEKRLGVETIREKSMKEIIPKVEKLLDVYHELPSAKEKNDMLKDVLEKVVYKKTQNTRWSGSPDDFEITIYPKLPKS

SEQ ID NO: 9992 - protein, 509 aa, synthetic construct
MNVVIYARFSSHSQTEQSIEGQLEVCYEYAEQNHYAVIGEYIDRAVSGKYDNRAEFQRMISDSDKHAFEGILVYQLDRFARNRYDSAIYKSKLKKNGVRVLSARENITDDASGILVEGVLESMAEYFSAELSQKIHRGMEINAQKCLSNGSNPGLGFKVDKDRHFYVDEEEAEIVREIFERYASGETKAEIVKDLKRRKIKTSLGNDFTYNSLSRMLSNKRYIGVYMYKGQETPGGMPRILDDDIFYKVQDILDKNKKASARTHGEGEYLLTTKLFCGHCKNMMVGYGGTSKAGKRYHYYICKEARKKRCDKTIVGKKKIEDRVIAECLKLLTDESIKFIAQKVAEECHKSPDNLTVKHLKKAIREADTAIENLWRGIEQGQSVPMLTERLNKRQAEKEVLEEQLAIEQNKRICLSEAQILAFLDFVCEMPLDDVNKRRAIINILVHSVYLYDDHFTLIINASKKPVSVDNIPLEEIEEAFNTDKTCTEQCSTMTSPAPPTRSRLHMQS

SEQ ID NO: 9993 - protein, 524 aa, synthetic construct
MNKLRAAAYCRVSTDRAEQSGSLASQRSFFDDYIRNSDSMTLVGVFYDEGTSGTTTLNRYGFNKMISLAVSGGIDIILTKEVSRFARNTVDTLNITRMLRAKGVGIIFINDNIDTRDSDGELRLSIMATIAQEESRKISERVKWGQQRKMEQGVVFGRSCLGYDVKDGKITVNADSAEIVKRIFTEYTVLLKGAESIADGLNAEQIRTVNGGRWSGAFIRKVLRNVKYVGDLEQKKTCTPDFLTHKKRLNSSEHIYIRNHHEPIISRELWEQTQAEISRRKPTDTSRHSDRYVFSGKVYCGVCGSVMVSRVKTLKNGKIYHALRCSGRIGGKSCNNETLNVTALKACVKRIFTEIPIDKTSVINAVIKGLPRTDKPDIPALRRKIETLNAKKRRAVDLMLDGLITQQELIEQKSYYDSIIEKLSQEISSDRSVFETDKIRKNAERFLDFTSDPIWLLVIRADYIHGTLTVYLKGIEKGFTTCFTATGRGDSYRVITGNTVRSQGIIPGTMQVQKNWFHRDVNDK

SEQ ID NO: 9994 - protein, 526 aa, synthetic construct
MPKVTIIPATVNPLTHLPKAAVQKRRVAGYARVSTDSDEQFTSYEAQVDYYTRYIQSKPEWEFVKVYTDEGISGTNTKRREGFKEMIADALAGKIDLIVTKSVSRFARNTVDSLVTIRKLKEKGVECYFEKEGIYTFDSKGELLITIMSSLAQEESRSISENITWGQRKSFADGKIHLAYKHFLGYKKGEDGRPAIIEEEAAVVRLIYRLFLDGKTQAGICRYLEDLSIPSPSGKEKWSKTTVTSILTNEKYKGDALLQKSFTVDFLQKKTKPNAGEVPQYYVEGSHPAIVEPYEWDHVQAEFARRKALGNAYSGKSIFSAKLVCEDCGGFFGSKVWHSTDRYRRTVWQCNNKFKGGERCLTPTVDTETVQQLFIKAYNQMMGNRKQIIEDCELMRKKLTDFKSLDTDIEHQFEETQIVAELVKAAVKDNAVTAQSQEAYLKKYEALTKRYETAAAELERLQNLRTLRSQKDKAMALYIRTLKKQPTVLSEWNDTLWTVMVEKAIVHRNSEITFAFYNGTKVKVRQ

SEQ ID NO: 9995 - protein, 700 aa, synthetic construct
MDSNAFLNDLMSKMKLPEAKGKKKAEQSESVAQILAAMQKVKTEKKKPPVTSYAPTKEMPVNELESMEEFSQLASDVMQECGPAIPAVKTSISEKTVRVAAYIRVSSTNPAQEDSYEMQERYFMSLLAGNAGWTSAGIYSDHGISATSREGRTGFNRLLRHCKQGKIDRVICKSISRFARNTQDFLVALRTLKENNVTILFEREAMDTADAYSEFILTTLAAIAQEESRSISANIAWSNQKRFPAGNVCNKDIYGYEFRKGEYTVNENGYRYRAVFIIQEEAEIVRMVFRLFTKEEMGFTQIAQKLDALHIPPPNSGCRQRQKRKPTVLPAGTLKEEDKRGWTATDVRYMIANVRYCGSVLCQKTYTDHRNGHKQKVNKGEKPKYLIRNHHPAIISEEMWQEAQEVWKAYTAKYRGIEKGRNERNYSKLLLCGECGRYFQGHSTTRTTIWRCATKLAQQGQKRCRMEPIYEEQIQMLLRKAFAEKFKLGEKMDAEVHEVMQMISKAPIDNARNQELKNLTEKLREIHDFDQMEQEGDFLKRQLSAVNYSIRDVHQHIRDIQAEKEALKVRCEVLGEPIDKEAVTELENRLLNEEEQLEKLEHEAQQQAEQVRYMEDYWKKLEQTHEIREKTLQWLDSLAGGTQMFLDEAVGTYVKAFVLSVTIFSPKHFRIHWFDDTCTDVECDSVFEGYQQPGMIRRKY

SEQ ID NO: 9996 - protein, 484 aa, synthetic construct
MNAVIYARYSCDRQTEQSIEGQLRECKAFAASEGIHIIGEYIDRAISGTTANRPEFQRMIADSRYKTFQAVIVYKLDRFARNRYDSAMYKSKLKANGVKVLSAKEHITDSPEGIILEGLLEAMNEYYSAELSQKIKRGMRENAIKGKTTGGNVALGYRIGADKQMEIDPAGASLVRRIFTGYDSGMTFTEICDDLNHAGYTTSRGKQFRIDTISRILANQRYTGTFQCAGEDAHCPPIIEPELFQSVQERLTEAKHKNRHTQSPHEYVLTGKAICGTCGRRLNGRAGTSKTDKRYYYYCCPNKCCGWLPAAELEHAVLDAIAQYTTPEACEQIANATYALYQQSTHENADLTAAQRRLQETEKKLENAVNAVLNGITSAALQATMQQLEQQKAALETEVRLLQTDAPELKLEHFQYFAHRLLEVQAEGTEKILQLLVNQVIVYKEQITVLVNLTDKTKTPPLEQVTAALRESSCSIACGGGDEN

SEQ ID NO: 9997 - protein, 622 aa, synthetic construct
MSKQKITALYERLSRDDELQGESNSISNQKKLLEEYAAQQGFTNCVHFTDDGISGTCFDRPGFLDMMRQVEAGNVDYLCIKDMSRLGRDYLKVGQIMEILRQRGVRLIAINDGVDSARGDDDFTPFRNIMNEYYARDTSRKIKSTFKTKGMTGKHLTGTVIYGYLWNETRDQWIVDEYAAEVVKRIFAMTIDGYGPYQIANRLKEDKILIPSAYLAQHNEGVNKNKTFKDVYGWGSSTIVNLLEKREYLGHTVNFKTRKHFKDKKSHYVPEDEWTIFENTHEAIIEQETFDLAQKIRSKVRRYPDGWGEAAPLTGLLYCADCGGKMYVHRTNNGKRISQYTCSQYTKVPCGTLCKTQHRINEDVVLSLVSDMLRAIAEYAKHDRAEFVRVVQEAQSSQQTSEVKKQRTRLATAKQRVSELEVLLCKIYEDNVLGKLPDARYAVLDAQYAKEQASLTAEIATLEKAVGDYEKHEKSADRFIALIDKYQNFDKLTNTMLNEFVDKILVHERARKGSRETTQEVEIFFNFVGRFVPPAFAEVELTPEELEEIRKREERKDKLHQNYLKRKASGAQKRYEDKIKAAKKAEMDEKKNAIRAEDIARGVFIPVSNLPKREPQKGAITA

SEQ ID NO: 9998 - protein, 573 aa, synthetic construct
MAYNAQNKTGARVAIYVRVSTLHQIDRDSLPMQKQDLLAYAKLMLNTDDCVIFEDAGYSGKNTDRPKFQEMMSQMRAGAFTHLLVWKIDRISRNLLDFATMYNELKALGVTFVSKNEQFDTSTAMGEAMLKIILVFAELERNMTSERVTATMISRANNGLWNGGRIPFGYNYDYETHEFSVNEEESKVVILMHDMYEQERSLVRVVRELNERGYRSRAGNLWSPVSLLIILRNVFYCGDYRYNMLKEGDRQKVKDESEWVTVENHHVAIIPKDQKERIMATLDSNSKLCKQRNIYKSSKHTHVFGGLIYCGSCGKPLGSTPGNLTRDGWHYSKYTCPTRRKSVTLCTGKSTSDPIIGEFVFNYILNMLNAQNDFEKISSPEELEKLLLIGDTFAYIDHIEPNGLNDLFNVLSSGAVKGAVFGKGASLPTKKATVEPEVARLRNEKQKTERALDRLRSLYLYDDEAMSEAEYMIQKNKLEETLEDINDQIGMMNTDSWQQSVSDEEFIQRASEFIIAQKLSGRKYVNYKRLAMSVDSEVLKNFVVSIIDSITIQDGLVSNIVFKNGLCHTFIFR

SEQ ID NO: 9999 - protein, 524 aa, synthetic construct
MVIAIYARKSVYRDTSDSISNQVDMCRDFIERSYGTGHTILIYDQDEGISGATTKRPCFQKLMNDIKADMIDMVVCYMIDRISRNIKDFCNIYFTFQEHDCRFVSVKENIDDTTPMGRAMLYICQVFANLERDNIRERIIDNMTHIEQLGYWSSGLPPLGYKIEKIVQNGKKHSILAIDEAKSPIYLRMVELFTPVSATLSSVEKAMMAEGYRTDKGSIFDTSRIWKILSNPDYMCADENAYHYFAKMGCKMPHDIDRFDGTYAIMVRGRFRREGSRMLITDKSEWKIYVGFHKPLISSDDWIKIQERFQGNRYYRPSHRAIYGICSGFLFCKCGYTMRSKRQSYSKKNPTYYASYLCTRKDNRGRGYCDSHMVKCELIDEKVIRKLKELSVDQQTLSEYINKDKVVTSIDLKMMQKQNLDLSKQIQALTLSLSEANGSAARKYIIAEIERLDEEKNAITGKVTAYKVEQMRQEQEAVNILHLLDKIHYLLSHLDSLTIVEKNALLKEIVKKITVSDDTIEITF

SEQ ID NO: 10000 - protein, 550 aa, synthetic construct
MREMAMNTAAANDLVRISPNGTKVRTIPATVQRFAPAMPLRARLRVAAYARVSTDEEEQLSSYEAQVDYYTRYIQSNPEWTFVEVYADEGLSGTNTRKRRNFNRMIDDALAGKIDRIVTKSVSRFARNTVDTLTTIRKLKEKGVGVTFEKENIDTLDSKGELLITIMSSLAQEESRSISENVTWGWRKRISDGKVSVAYSHFLGYEKGEDGFMQVVESEAKIVRQIYGMFLDGQTPSSIAAFLTKQRIPTPAGREKWQSSTVKSILTNEKYKGDALLQKTFTVDFLSKKAKINEGEVPQYYVEKSHPAIVSAEVFDLTQYEMRRRARKGRHTSAVSVFSDKLVCGECGAAYGSKVWHSTDAYRTMIWRCNEKYAVKGRPCPSPHLRNEEIQNAFVQVVNQVIERKDEVLSTLQEALTTLTDSDGLEHEIERLQAEQDVVAQQMSRMIRENAEVAQNQAEYNARLQPLEDRYEALKGAMLRAKEAISEQTGRRRRLEAFMRELRESSLLTVFDERVFLGTVERITVFKGASRGEKRLVFRFKDGRDVAVSL

SEQ ID NO: 10001 - protein, 440 aa, synthetic construct
MEQAMEQSKKMIIHKVKPAAAMPRLERVAAYCRVSSGKDAMLHSLSAQVSHYSEFIQRRPSWAYAGVYADEALTGTKDNRPEFQRLLADCRAGRIDRVLTKSVSRFARNTVTLLETVRELKELGVAVYFEEQNIDSLSGDGELMLTILASFAQEESKSVSDNCKWRIRKDFSEGKPMNLPLIYGYRRKKGRIVIDEREAEIVRFIFRSCLNGMGKGRITEALREQGVPCRLGGEWQTETVGGILRNEKYTGDALLQKTYIENHLTKRKCLNRGELPQYYAENTHPAIIDHETYERVQALIAERREKANVQKDVTARYPFTGLIVCGCCGAHYHRRTNLTRITWQCVTYLRRGKKYCAAKQIPEETLHCIACEVLGVHEITEENIQTLAEIRVPSPNHIVFAFKDGREIERVWQDRSRAESWTDEMKEKARAQMKRRYRHA

SEQ ID NO: 10002 - protein, 580 aa, synthetic construct
MVRRKTALRGVSASTRITKVAIYIRVSTIHQVDKDSIPMQKKDLIAYCQLILGTDNYEIFEDAGYSGKNTDRPAFQDMMGRIWKGEFTHVLVWKIDRISRNLLDFAEMYEELQSLRVTFVSKNEQFDTSTAIGEAMLKIVLVFAELERNMTSERVTATMISRANNGQWNGGRIPFGYSYDSGTSTFSIREDEAVVCRRLKDLYLDNKSLVYTARALNADGYKTRAGADWTPTAVWIIASSPFYAGIYRYNRYKGTENRTLNPEEEWVMIPDHHPAIFTLEEHEAMKSSLKTNARYVDNPVGKPHATANIHIFQGIAYCGKCGNKMVSTPGKKHADGYRPSNYSCPLHRRSKKCDNATVNDMIVGEFAINYILNMLNAKKTFSNIDTPEELQRHLLTGSTFSDISSIEEDGLNDFFNLLSRYGSDNSYVFAIKTPRRKKASVNPELAALRKEKEKQERALQRLQDLYLYSDKSMSEKDFILRKSEISDRLKNINAQLGLITQNPDSLLSDEEFIKQASHLLIQKELKGRKYIYYKNLATSVDPEILRTYMETILDSMYIIDGRISSIVFKNGLTHKFIYKN

SEQ ID NO: 10003 - protein, 516 aa, synthetic construct
MQKNNNIGNRCVIYARYSCSNQTEQSIEGQMHDCEQFAARNNLQIVNSYIDRATTATTDKRPQFLKMIADSKQCVFDVVLVWKLDRFSRNRYDSAMYKKKLKDNGVRVMSAMENITDSPEGVLMESVLEGFAEYFSKDLSQKVKRGMRETAAKHKITNRIPFGYCKSEEDTYIPDPHTANAVRKVFDMYITGFRKSDIADWLNSNGYKTSYGNQFTLTAITPLIKNTRYIGKYYYADNEYTDETQRIVTDDIFYKAQQKAIANQHGGSCKAIERYLLSNKLYCGYCHNKMIGECGKNQNGLAYHYYTCVGRKRKHICNRKNIKKKDIEQYVINAISRLLNDEYAINKIIETAINYQQNDVEHINEIKDIESTIKEIERKISNILSAIEAGIFTDSTKNRLQELENQKTRLTQELNYKNQSSTKIPRTTLKQILKNLDLSKDATNPEKQNIIDLLIHRIYLWQDKILIVFNQSNLCDNEISVDDTDVNTIIKTLSEPNASSSDSVEYGTPDQSRTGD

SEQ ID NO: 10004 - protein, 569 aa, synthetic construct
MKQSSNKKSREATAFLYERLSRDDNLEGESYSIVNQKKLLTKVAKEKGYTNLVHFLDDGISGVTMNRPGFVEMMQQLEQGKAAAVFVKDLSRLGRNYIEVGRLTEEFFPDHDIRLIAVSDNIDTAEGENELAPIRNLFNEWYARDISKKRRISNKIKGNSGEPMGLPPYGYIKDPNNPKHWVIDEEAAQVVRRIFDMTLEGFGTEQIATQFEKEAILTPQAYWIQKGIGRPGKSKTRPATKWNGSTITHLLYQQEYCGDVLNFKTYSKSYKNKKRIHNDPENWVVFQNVHEPIIERAVFEQVQQKRGKMRKRRTSNGVHNMFSGLLVCADCGCNLHFHFNQGNPEIKYFNCSNYKGNRGTCQSTHYIRVDFLEEVVLGEIRRLTKFASLYEDDFLKAVIGHSQQSDEADRKLKEKELKALLARDEELDGLFERIYEDNVSGKISDERFSRMSRRYEDEQKELTEKIKQLRAEIEKQSSRTMTTDMFISLVRKYTRAKKLTPRMLNELVEKIEVFNAEKVNGVWEQRLRIHYNCVGTIEIPSALPLPTPDVSVNTRKGVVVNYAPCDVAI

SEQ ID NO: 10005 - protein, 568 aa, synthetic construct
MQSKKKQDKAGITALYCRLSRDDGVEGDSNSVANQKKLLKRFAKENGLTNTRYYVDDGYTGTNFERPGFQKMIEDIDLGYISTVIVKDLSRLGRRYDMVGYYMDTYFPDRDVRFIAVNDNIDSDEGESEIAPFKNVLNEFYARDISKKCRSSYRIRGSTGEPLAPPPYGYIKSPDNPKKWVIDPEAAQVVRDIFKMALEGKSNETIARILQERKVLIPMAYWQEKGIRKGGKVTQPNKYKWCKTTVTKILTQQEYCGDIINFKTYSKSYKNKKRYDNPKENWVIFKNVHEPIISRDDFELVQMLVVKTKRRAPKQENGEKNMFCDFLYCADCGSKLWYHTNTTNKEIHYFSCSNYKKDTRGNCETRHYIRADAIEQIVMLELKRLAKYLESHEEEFAKLLAEKTNADMLAEQKTLETELNRATARNEMLTSLFAKTYEDNVSGKLSDEMYMELSNKYEVERLELKTKIFEYKERLAKISEMEQNKDDFLKAVRKFMEMESLTAPMLRELIDHIDVYEKEGGKKNYTQRIVIYYRFVGYLELPSSDDENYKANTRKGVDVEYIPTVKSA

SEQ ID NO: 10006 - protein, 427 aa, synthetic construct
MDRIIKRVDFPKIMQPQFLKVCAYTRVSSGKDSMLHSLSAQVSHYSEMIQSHTGWVYCGVYSDEALTGTKSDRDGFQQMLTDCRAGKIDMVITKSISRFARNTVTLLETVRELKSLGVDVFFEEQNIHTMSADGELMLTILASYAQEESRSVSENQKWRVKRNFEAGIPWNGRMLGYRMQDGKYYIIPEEAELVRRIYREFLDGMGRNRIAAKLNDEGIQPTRYGEEWHPQTIAKILRNYAYTGNLLLQRFFCESYITKKTVPNNGQKTMYHAERTHEAIIPLEEWKAVQTEIERRAEQHKSKPPAQPSFFYTGRIQCAKCGKNFRRKTTAARVVWICATLNTKGKKHCASKQIPEATLDELVRQVTDDPFSVKKIIADDGNTLHFHFSDGTAVTRTWTDRSRAESWTPEMKEKARQQSLARRRQKS

SEQ ID NO: 10007 - protein, 527 aa, synthetic construct
MNTAVRTVTVIPPSINPMTHLTDTPLYKLRVAAYARVSTDSDEQFTSYEAQIDYYTQYIQRNQEWTFVKVYTDEGISGTNTKHRAGFNEMIEDALAGKIDLIVTKSVSRFARNTVDSLVTIRKLKEKGVQVYFEKENIYTFDGKGELLLTIMSSLAQEESRSISENVTWGQRKRFADGKVNLPYKQFLGYRKGADGFPEVVPEEAVIVRRIYTRFMEGLTPGAIAKELTADGIPTPSGKQRWQTSTVESILQNEKYKGAALLQKCFTVDFLTKKRKVNEGEVPQYYVEHSHEPIITPEEFDKVQTELARRKRISRQYSGKSIFSSRIVCGDCGSYFGSKVWNSTSKYRRVIWQCNGKFKGEHKCETPHLDEETIKARFVAAINAIIDSKDNILEDCRLMQTTLTDCTGIDAEIESLLEEIDVVAELTKRCIAENSQTAQNQNEYAARYNGFVERYEKAKAQLEQLRATKVAREAQAEAIGAFMFEVQELDALTNFDDKLWLTVIDTVTVHADGRMTFKFQGGIEIEA

SEQ ID NO: 10008 - protein, 582 aa, synthetic construct
MAKHAITIPQNPKAALYIRVSTDMQADKDSLPLQESDLRKLADLNGIKDIEVFSDAGFSGKNLNRPAFRSMMDRIRAREFSHLYVWKLDRISRNLLDFLELYDELKDYGVAFASKNESFDTQSPGGEAMLKILLIFAELERKTIAERVTAVMLGRANENKWNGGRVPFGYMPGPVTTDANGKKCKSWPVPDPIEAPIVRAIFELYLREKALKKVATALNTAGYRSRKGTLWSDTTVRCILKNHFYKGEYVYNRQNPNAGRREDFYRSENDWVVVTGQHEAIVPEETWRRCNEMLSKNRSWLAPIGSLVSAQDKYIFGGLLQCAECGYTMNSKDRTRIHDHTHSSYYYCTGRWKAPVVCTGEHSGYASDRVLLPQILKLIARMIEACANAIKFASAEQLVSYLLNDNLIPGATGIEEAQRIYMIVRAHVKHIYGVDQANQYNPNALLVEQSQKEKEKQERALSRLKRAYLFDDGDMSEAEYFEQKAAIEGTIAKLEKQIKSLSGNDIGADEAYLAQLSKLIMIKKLQNTNSDFDYYKLAKAIGRKPIHDFLTEIISRIIIGEQNRIIKIIFKNGVSITLQYEK

SEQ ID NO: 10009 - protein, 498 aa, synthetic construct
MEIQIREGNREQKRKLRVCAYCRVSTDADEQENSLENQIRHYETVIKANPSYEYAGVYSDFAISGFKEKRPGLQMMLADAQNGKIDLILTKSVSRFARNTSIVLEATRKLKELNVGVFFELQNINTLSGEGELMLTILAAFAQAESESGSVGAKMVYQRKYEAGIPVQYLERSFGFKKDERGVYIADEEEAVWVRKIYDMAAQGYTLAAIKRYLNENNVKTVSGAKWLDSTVLRILENEIYKGDYIMHKYFVNEERKLVRNRGEVDAWYIEDDHEAIVSPELWQKAQDALEAKRDYLAEGSVIEEFTEENYPYMNKIFCARCGHPLYKRIYSNGNRLNWGCSGTKRYGKSFCEGINIPDGVLRGAWHFDENMYIGEKQTDKGTKEFTYLKESSWKRRHKKKEPEAIPENTEEAYPYRKKIFCGLCGSRLVRHVNPKSHKVIWICNGAKRKGVAFCRGTRIPDSVIRGWGEIKKDIYIQRKDDKNGKKRYSYTSKKPTA

SEQ ID NO: 10010 - protein, 576 aa, synthetic construct
MKKNFKMPGSGSETPIRVAIYVRVSTVYQIDKDSLPMMKQDLTSYCKYILNTDDFVIFEDAGYSGKNTNRPAYQKMMSQIRQGLFTHLLVWKIDRISRNLLDFANMYAELKDLGVTFVSKNEQFDTSTAIGEAMLKIILVFAELERNMTSERVTATMINRASNGVWNGGRIPFGYSYDKPNQVFSIDPEENKIYNFMVETYEDTQSIVHTSRRLNEAGYRSRNGNMWSPVAVWTILRNPWYKGVYRYNYYKIPGRKAIKDESEWVIVENHHPASIDPDRFDRIQATLDKNARYRNTPGRKTAQKNVHVFSGLVWCAECGSAFTASPGKLHVSGYRPSKYGCPNVRKTKTCHAKYTSDVVLGEFLLNYILNILNAQKQFAYIHSTDDLQKRLLHGSTFSNVDHVDPDGLASLLNMLEKCSGSDPVLLKRPRSKPKMDPELKRMMADQKKQQRALDRLNDLYLYSDDSISEREYLVRKQQITDRLQEINEAIGMMSQEPWMRTMNDEEFIRQASSFILTQKLADKQYIYYENLAESLDPEILKNFFVSILDSIILRDGRPETLVFRNGLSHTFTYKDS

SEQ ID NO: 10011 - protein, 580 aa, synthetic construct
MEFSKLTRVAIYIRVSTTMQAENGESLNVQRTQLTTYAQMMLNALPENIVIFEDAGYSGKNMDRPKFQDMMSQIRAGKFSHLLVWKIDRISRNLLDFSMMYKELKELGVTFVSKNEQFDTSTAMGEAMLKIILVFAELERNMTSERVTHTMIAMAQSGRWNGGRVPFGYAYRTEGEKKEKQIFEIDKGEAALVQEIFDLYEQERSIVREAKILNDRNAISRYGHEWSPVTVHLVLRNIFYVGDYRYNALREGDRSKPKPESEWIIVKDHHPAIISREQFARVQAILKANKRYRKDMAPASSRERIHIFGGLLFCGNCGKPLNNSVSNKKADGWQYSNYPCPTRRRSSNKCTGKSTSDPVVGEFVFNYILNMLNAQKGFKDIQTPAQLQDRLLFGDAFHNVISIDSDGLNSFFNLLSSGNISGAIYGKDVAVSKPKTAKVDPELVRLRKEKKRLERALDRLLNTYIMSDRPISENEYIRKRTDLETLLSDVNDKLGIAQSEEVQMALTDSEFLTKASQFIIGQKLSNRLYINYKNLAQSVDPSVLKTFVVSVIDNIVIYNGKVKSIVFRNGLAATFEYSSI

SEQ ID NO: 10012 - protein, 596 aa, synthetic construct
MAKIRKIEPVMPTLPTRKKVAAYARVSMETERLHHSLSAQVSYYSDLIQRNPEWEYAGVYADDGITGTKANSREEFQRMLEDCEAGKIDIILTKSISRFARNTVDLLETVRHLKELGVSVRFEKENIDSLSGDGEVMLTLLASFAQEEITSLSNNVKWGIRKRFEKGIPNFRNKILGYEWEDDHLVVVPEEAVIVKRIFQNFLDGKSRLETERELNGEGITTKAGCKWCDSNIKVVLSNITYTGNLLLQKEYIEDPITKKRRKNMGELPQYFVENTHEAIIDMETFQYVQDEMARRRKLGALANKSLNTCCFTGKIKCPYCGFSYMHHIRKRENGTENYWKCGTTKKKDGRCPVKGGIRDDKLRIACADALGLDEFDETAFLEQVDHIEVPKRYQIEIHMKDGRIIPKDCTPTGHQDCWTQEYRDKVSEQRRKNGTNPKGASCFTAKIKCAECGNNYRRQTRKRSTGEKYYLFACATTKDCSNNYIHEDVLKELAAEALGLSAFDDDTFTDLVDHVDIAPGGHITFVLKDGTSKAMTYSIKRRMPKWTEERRKKQGDAIRASFTEERRQRMSETMKKVRRERYWHSTGKSKRSQQP

SEQ ID NO: 10013 - protein, 527 aa, synthetic construct
MAQHRKVKTIPATLTRFTSAPITEQKKRRVAGYARVSTDHDDQFTSYEAQIDYYTKYIKSRDDWEFVQVYTDEGVTGTSTKRREGFRTMVADALDGKIDLIVTKSVSRFARNTVDSLTTIRQLKEKGIEVYFEKENIWTFDGKGELLLTIMSSLAQEESRSISENCTWGQRKRFADGKVSVAYKRFLGYDKGADGNLVINPEQAVTIRRIYQLFLQGMTYNSIAQELTKDGVLTPGGKTKWSISTVRSILSNEKYKGDALLQKSYTVDFLTKKTKINEGEIPQYYVEGNHEAIIDPDVFEMVQREIERRGKGKKYHSGVHAFSSKIKCGECGCWYGSKVWHSNSKYRKVIWRCNHKYDGDKTCRTPHLTDEEIQAAFLRAVNKLLETKDEVVANGYAMIPVLFDTTALEAEHDELLQETQVVSDMVQQCIYENAHVALDQAEYQKRYDALTQRFDKVKARLEEVTEEISQKQTQRANYEAFLKAFEKLPDQLPEFTLETWQGLVDYATVYAEDDIRFTFKNGQEVKA

SEQ ID NO: 10014 - protein, 526 aa, synthetic construct
MANVTVIPATRNFHTGIRKDAVVQKKTAGYARVSTDSEEQQTSYEAQVDYYTNYIKNNPEWEFVGVYTDEGISATGTKHRDGFNQMIQDALDGKIDLIVTKSVSRFARNTVDSLTTVRKLKEKGVEVYFQKENIYTLDSKGELLITIMSSLAQEESRSISENVTWGQRKRFADGKVSIAYSSFLGYQKGEDGQMEIVPEEAEIVRLIYRMFMQGKTPYAIAKYLMEKKIPTPTGKQRWQHRTIENILTNEKYKGDARLQKCYTVDFLSKKRKVNEGEVPQYYVEGSHDAIIAPAEWQMVQLEMERRRNMGRSHNCCGPFSAKLKCGDCGEFFGSKVWHSNSKYKRTIWQCNAKFKGESKCTTPHLYEQRIQELFLEALGRLLENRETVIDDCRAVMDVLGDCSSIEKELETVSGEMEVVTGLIQKLVVENATRKLDQNDYRRKYEGYVNKYAALESRMDSLKKDRESREIKFDIFSGFLFELSELEELPLEFDVKLFHSLVDYATVYHDGRIVFQFRNGMEIETII

SEQ ID NO: 10015 - protein, 503 aa, synthetic construct
MGRKVTRVAFGAPEIPKKKNVAAYCRVSSGKDAMLHSLAAQVSYYSELIQSHGEWEYAGVYADEAKTGTKDTRENFVRLLSDCRAGKIDMILTKSISRFARNTVTLLETVRELKLMGVDVYFEEQNIHSMSTDGEFMLTILASYAQEESRSASENQKWRIKKNFEEGKPWSSTLLGYRNVNGRFEIVPEEAETVRMIFDWYLEGLGATAIQKRLNSMGIKTRHGNPWSRSPILKLLRNYTYTGNLLQQRTYRENHITKKCIKNQGEKPMYLAEGTHEAIIDMDTFNQVQAEIKRRAEKYKSPDGKKSTETYPFTSMVKCSRCGKSYIRSGSAKYRTWTCQTRRKEGLAYCEAEIIPEEELIRLTAEVLGGEVTKDAVRDKITVIRAEKDRTLIFCLGNGKEIVKQWKEHEVVYVCTEEQKRQISLKNSGRKPSEEQRRRHSEWMKEYWKNREYPEEWRKKQSEKMKAYWNDPEASDAHRQTVSRLTKERRAREKEAGKGEDNG

SEQ ID NO: 10016 - protein, 464 aa, synthetic construct
MARSVTVIPARSQKVRTGHKAVQEKKIRVAAYCRVSTDQEDQLHSFEAQVEYYTKYINEHENYEMAGIYADEGISGTNTKKREQFKKMIADCEGGKIDLVITKSISRFARNTQDCLAYSRKLKNLGIGIIFEKENINTLDSTGELLFTILSSLAQDESRNISENCKWGIRTKFKNGEMHLNTFKFLGYDKDENGKLVINKEQAKTVRRIYRDFLIGINPAQIAKELTEEKVPGCLGQTKWYPSTVIGILKQEKHMGDALLQKTYTADFLTKRQVKNNGEIAQVYVKDSHKGIIDKETWNAVQEEFERREKFMQKHGTDRYSYGSECYPFCEKIFCGECGSLFTRHSWKSRGIIQWQCKNHRKDGKVACTNAYVDNADLEKGFVKAFNRLVGEREKHIERWNSMKLDGTPLEKIRAGQMMEAAESGQLQQYVPEAAQLVLEEITIFGAKKYEFAFLEGSRVKVSV

SEQ ID NO: 10017 - protein, 502 aa, synthetic construct
MEIQIREGSREQKRKLKVCAYCRVSTDADEQENSLENQVRHYETVIKANPNYEYAGVYSDFAISGFKEKRPGLQKMLADAEKGKIDLILTKSVSRFARNTSIVLEATRKLKELNVGVFFELQNINTLSGEGELMLTILAAFAQAESESGSAGAKMVYQRKYEAGIPVQYLERSFGYTKDERGVFVADEAEAVWVRKIYEMAADGYTPASIKRYLNENEVKTVGGVQWVDSTVFRLLENEIYKGDYIMHKHFVNEERKLVRNRGEVDAWYIEDDHEAIVSPELWQKAQNALAAKRDYLAEGSVIEEFTEENYPYMNKIYCAKCGYPLYKRIYSKGNRLNWGCSGTKRYGKTFCDGINIPDGVLRSAWHFKENTYIAEKASDKGVKEFTYLKEQSWKRRHKKKQPPAIPENTEAEYPYREKIFCALCGSRLVRYVNPQSHKVTWVCSRRKRKGKDACDGTRVPDTIIKGWGEIKKDIYIQRKDDKNGKKRYSYTSKKPEGADRA

SEQ ID NO: 10018 - protein, 521 aa, synthetic construct
MSNITIIPARPQRANSQQNETEKPKLRVAAYCRVSTDSDEQATSYETQVSHYTEQITRNPEWAFAGIYADDGISGTNTKKREEFNRMIADCMDGRINMIITKSISRFARNTLDCLKYIRQLKERNIPVFFEKENINTLDAKGEVLLTIMASLAQQESQSLSQNVKLGLQFRYQRGEVQVNHSRFLGYTKDENGRLVIDPEQAEVVRRIYREYLDGYSTDKIAAGLERDGILTGAGNPRWHTSTVAKILRNEKYMGDALLQKTYTVDYLSKKRIKNNGIMPQYYVENDHEAIIPKDIFMRVQDELVRRRLVKVSPNGRKHGFSSNHVFSQMIVCGECGELFRRVHWNNHGCRSIVWRCLSRLQSTGVICHARTVNEEVLKNVVLQAFNELLGSKSAYQKRLQDNLAVVLRGYEGEQALEIDKRLAELQQELINHASRKEDYNDIADEIFRLREMKQKNFTDTAVRDEQVKRINELNEFIEQQDSELTEFDESLARRWLKEIVVWDDRFSVELKSGVIIEIEI

SEQ ID NO: 10019 - protein, 521 aa, synthetic construct
MKKVTKIDGVQKNTAINSKLRVAAYCRVSTGSDAQLESLEAQKSHYEQYINSREDWQFAGLYFDEGITGTKAEKRPELLRLITDCEAKKIDFVITKSISRFSRNTTDCLALVRKLQNLDIPLYFEKENINTGSMKSELFLAILSSMAEGESASISENAKWSVKRRFQNGTYKLGYTPYGYDWYGKNMIINPEQAAVVKRIFADILSGKSTNAIADELNAEKVPSKKNNHWTASTIRGILANEKYTGDVIFQKTYTDENFNRHTNYGEVDQYMAPDHHEAIISHSDFDAANALVNQRAAEKGIEKGSDKYQQRYAFSGKIICGECGDTFKRRIHTCNTYKYVAWACNTHLKDKKSCHMKYVRDDEIKVAFMTMLNKLIYGYRLVLIPYLKVLENSSGDEAIQRIQHLELLISQNSEQREALTKLMAQGYIDQILYNQETNALLLQAETYRSDIEAITIGMTGDAAKVTETNLLLHFVSHTDMLTAYSEELFENYADHIEVISRNEIKFAMKCGLTFTERIGD

SEQ ID NO: 10020 - protein, 468 aa, synthetic construct
MARQVVHIPAQRNIANRAVARNTKLRVAAYCRVSTEQDEQLNSFENQVTYYTEFITRNPNYELAGIYADEGISGTSTKRREQFNRMIADCEAGKIDLIITKSISRFARNTQDCLNYSRKLKDLGIGITFEKENISTMDSTGELLFTILSSLAQDESRSISENCQWGIRSLFKQGVVHINTNRFYGYDKDEDGRLVINPEQAKVVRWIYESYMDGINPDIIARRLMEQGVPGCMGEPKWTVDTIMGILQNEKHMGDAILQKTFTADYLTKKQVKNEGQLAQYHVKDDHEAIVSKELWEVVQLEIQRRKDYMKRYGLRTMGRNTDEQPFTNRVFCGVCGQLFWRRTLYRLNGSIKAWMCASKCKGKEVKGCINDTLLEADLHKAFVMAWNAMLENREDFLEHWKTQLNDQNPLVAFRAKQFMKLTEKAKPMKELDVTIVSKTLDHCDIKPLGVIDFYFLDGSHIGLVTGE

SEQ ID NO: 10021 - protein, 412 aa, synthetic construct
MRIKVIKPTVAAENKRLKVCAYVRVSTDSLEQEESLDNQTSYFRDYIQSNPAWEFVGIYADQGISGFKENRPQFQQMIADARAGKIDLIVVKSVSRFARNTETVLKFSRELKSIGVGIFFELQNINTLSGPGELMLTIIAAFAQAESQGASDNANLTYKRKFEAGMPVHDLKYTFGFDTDEGGNTYIVEEQAKTVRLIFDLAQQGVWPSKIKQYLNKNGITGCSGGKWDDTGVHRVLHNPAYKGALVLQKTYLDINRVRHKNKGQKDQWYIADNHPAIVPPEQWDEVQEILLARSESLAPRPPQKPPQPRSSRTQYPLTNKLFCPLCGQKLHHKWSNQGKSEYWACSTNVKVGAKVCKGIWLPAEIANGWDDINEPTTVIGYKDEYGMQHFTAYPKAEYELSDDCPYTRKED

SEQ ID NO: 10022 - protein, 521 aa, synthetic construct
MPKITKIPASISRYTSAPIDAPVKRKVAAYARVSTDSEEQLTSYAAQISYYTEYIKGREDWEFVGVYTDEGISGCSTKRREGFQRMISDAMAGKIDLIITKSVSRFARNTVDSLTTIRLLKENNVECYFEKENIWTFDGKGELLLTIMSSISQEEARSISENVTWGHRKRFADGKVSVAYSRFLGYDKGSDGKMVVNPEQAEIVKLIYRLFLEGMTPHTIAIHLTEKGIKTPGGKDKWNATTIRRILTNEKYKGDALLQKEFTVDFLTKKTKKNCGEIPMYYIEDDHEAIIDPAVFDMVQQEMERRKTGTSRYSGVSIFSSKIKCGECGGWYGAKVWHSTDQYRKVIYRCNNKYNDERCTTPHIMEEEVKAVFLKSLNKLLANRDELIENVKLICDKLTDTSELEAEKEKYAEEMSLVADMVQAAMLENARIALDQEEYRQKNDVLSARFEAAKKKHDELAMRIEEIETRGQNLRHFQETLESLNGQVTEFDSDLWGSLVDYITVYENGEKTVTFRDGSVI

SEQ ID NO: 10023 - protein, 523 aa, synthetic construct
MAKSVTTIPATLSRFTAAPINSTKKRRVAAYARVSTDNEEQLTSYEAQIDYYTNYINGRDDWEFVGVYPDEGITGTNTKKREQFRQMVADALDGKIDLIITKSVSRFARNTVDSLTTIRKLKEHNVEVYFEKENIWTFDSKGELLLTIMSSLAQEESRSISENCTWGQRKRFADGKVTVPFKRFLGYDMGPDHNLVVNPEQAKLVKRIYGMFLQGQSPFQIARTLTEEGIPSPGGKDHWNPSNIKSILTNEKYKGDALLQKSFTVDFLTKKKKTNEGEIPQYYVKDNHEAIIDPETFEMVQTLMTTRTKGRNRKSSVSIFSSKVKCGDCGSWYGPKVWHSNDAYRKVIWQCNHKFDGQKCATPTLTEDEIKELFLRAANQVIDQKEEFIAIYDQVLSRSLNTTALESELSDLEAEINIAAELIEDCIKENAHVALDQDEYQKRYDALVARFDKAKARHTEVTDLIAERMARKHQIEAYLKNLRSREPLTEFRETDWLAMVDYITVHSKKDIWATFKDGNEIKA

SEQ ID NO: 10024 - protein, 590 aa, synthetic construct
MKTVEKIERKLPVLKARKRVAAYARVSMESERMQHSLSAQVSYYSALIQKNPEWEYAGVFADYGISGTGTKKRDEFNHMLAECEAGNIDIILTKSIQRFARNTVDLLNTVRHLKELGIEVRFEKEKINSLSGDGELMLSILASFAQEESRSISENVKWGTIKRFKQGIPNGKFSIFGYEWQDDKLVIVPEEAEIIRWMYAEYMKGASRIEIGRALMDRGIYTRQGKPWVDSNVKVILTNITYTGNMLFQKEYCEDPITKHRRKNYGEMPQYFVEDTHEAIIPMDEWQAVQAEFKRRRDLGPFGNKSLKLSAFSTKITCGCCRKHYRHSGKRNTAGEVYYIWICQTKSQKGVSACPSKNIPEKMLQNTAAEVLGLDKFDEDVFSQQIEEVIVIGDDTLTFRFYDGHEVTTKWQSTAKTDWWTDERRKLWGERHKRKDTNPNRNTFYEFTGFIKCGCCGANYRCQSGKRKDGTPTRSWYCTGPRSECRNPAIRDETMKRLVTEILGLDEFDEATMDAQIESATILDHMVTFHFRDGHIESRDFLDKRHGTPWTEERREKAKKSMKAAWTDERREAMSERIKKIRSEKKWPNP

SEQ ID NO: 10025 - protein, 436 aa, synthetic construct
MSKVRKIEPIAKLPETAIKPNITRVAVYARVSTDMEEQASSFEAQKDYYEKKVRENKDWKLVGIYADEGKTGTSYINRTEFLRMIEDCRLGKIDMILTKSVSRFARNTVDALNNIRELKARNIGVFFERENIWTLDAKGEFLITLLTSLAQEESRSISENTTWGKRKAFADGRYSVAYTRLLGYDRGAKKGEFVINEGQARIVRLIYRMYLQGYSSYRISEFLTRWEVRTPTGSGKWHSSSVISILQNEKYKGDALLQKCFTKDFLTHKRVQNNGELPQYYVHDGHEAIINREVFDYVQTLAGARNKDANGRYSGVHLYSSLFRCSKCGAFYGAKPEHSNDKYRRTILMCHNRFKAPYYCKNTRIDLRQIPSIFIKIANRIMRKYSQILSVSQEIAKELSIDADVTINDAYSMDMQDISMIVKSAIVYPENKNSTY

SEQ ID NO: 10026 - protein, 537 aa, synthetic construct
MPAVTAARVTVIPAKKDRLPINVLSSEARKLRVAAYARVSTNNEEQLTSYEAQVDYYTRYIQSKDEWQFVEVYTDEGISATNTKKRDGFNHMVADALAGKIDLIITKSISRFARNTVDTLTTVRKLKEKGIEVFFEKENIRTLDGKGELLITIMSSLAQEESRSISENVTWGQRKRFADGKVSLPYRRFLGYEKGPDGLPVIVESEAVIIRLIYRLFLYGKSPSAIATYLTDEGIPTPGGKKVWRAKVVESILTNEKYKGDALLQKKFTVDFLTKKQKVNEGEVPQYYVTNSHPAIIEPELFDLVQYELKTRKTDGRFTSCLHPFSGRIICGECGGIYGSKVWHSNTENRSLVWQCNEKYRGQYCSTPHLTESEIKAAFLAAFNIVLGNRDEIIEAYEEVIAALTDTADLDAEQETLENESEVVLGLIQKIISENAQTAMDQEEYNRRYDAYSERFEAARKRLAEIAELRQERNAKKTRIRLFMENMNSHQELVQSFDEELWYSTVDYVTVYEDKRLVFTFRDGRQVEITAELWRAA

SEQ ID NO: 10027 - protein, 448 aa, synthetic construct
MERIIQKVTPPARKKAPKLKRVAAYARVSSGREAPLHSLSAQISQYSGMIQKTPGWQYAGVYADEALTGTKDSRGEFQRLLADCRAGKIDMIITKSVSRFARNTVTTLRTIRELRLMGVDVFFEEQNIHTMGEDGELLLTLLAAYAEEEAHSVSENQKWRIKSNYEQGLPWSITMYGYRQVNGRLEVVPEEAEIIRLAADLYLEGYGRCKLEDAFAAVNIKGRHGANMGGNSIVDLICNEKIVGDMLLQKTFVVDPITKEVRKNNGEKPQYFVEGSHEGILDRKTYEKVLAERARRAAAYKPRSGSYERNRFPFSGKIHCGKCGKSFTRKVLNGNTPYEKRGWLCRTFNQKGKAHCDAKQIPEEILKRVSAEAMGLPEFDEAAFAAKVEEIQVPENGVLVFVFYDGHTVTKTWDNPSRRHSWNPENRQRARELALRQAAERRLAKCQQ

SEQ ID NO: 10028 - protein, 522 aa, synthetic construct
MAKRLHGALICARYSTDNQNPDSIEVQVAKCTEWCHTHNIPVLGVYADEATSGMKDTRPRYAAMMRDLRDGVGDMVVIYDQSRMFRKMTSWFSFRDQLTQMGVDVVSVTQPMIGKDLRDPTNFLTEGSMALFNQIWALQSRQKVMEKMRFMAKNGQHTGGKPALGYEVVDGRLAICEAEAKIVRRIFEEYGSGKSYREIVAGLNADGIKTKRGSAFGANSLHDLLKNEKYIGTLVYGQRPYREDGTRNTHAAAADSIRIENAIPAIIDKELFAKVQDKMAANKQQQGGRPPTKRDYPLKGKVFCAECKSAMTISTSQKIYDYYKCSGKKRRHDCDGVNISVDVLERTVANAVRQVLGSPKNVERLITILRDQSGEIQAQAVDALRQLIAREREISRKLDNATDAILGGLSSPTLLARVKDLEQEKTEIDRQMRELKATVDASAIPETRLREIIDEISGDNPAGNAALLAIVCRVEVAKDTITIWTMLDTHPDGTFDWSEEGVLITPGTTSGVPKGSSYRTPL

SEQ ID NO: 10029 - protein, 556 aa, synthetic construct
MARAAKQDSNSEIIDGVIYARYSEGPNQTEASIEGQVRECKEYAKRNGIRIINVYSDSKHTGTNDNRAEFQKMLRDSRRGGFSVVVVWKIDRFGRNRAEMAQNKALLKLQGVKVVSAKEYIPDSPEGIILESVLEGMAEYYSANLSQNIKRGMKENALHCKSNGSGKSLGYIVDKDGYFEIEPNEATIVKTIFQKYDEGMKIADIWREIVASGAKTKRGKDFTQYGISRVLSNRAYIGEYRYGDIVTPGGMPRIIDDDLFNRVQERRALSKKAPASRRSNSDVDFLLTGKVFCGHCKGTMRGMSGTSKTGRKFYYYACHDKIFKHNKCTKKNVKKEWLETEVTRITRDDILNKETIEFIADRVVEIQRQEQEDKSMLRYYEQQLRDTQSAINNIMKAIEAGIITSSTKSRLFELEEQKSIIEGEIEREKIITPVIEKEQVIFSLERFFSGDINNKEYQRNIIDMFVNKVILYDDKIIITYNISSQNEISVDVVEQAAFAALDECSSKLSLPPPAGACPCTQSALLYVERFFIAAHQFYLKPNHCFAVADISRQGFL

SEQ ID NO: 10030 - protein, 576 aa, synthetic construct
MKKNFKMPGSGSETPIRVAIYVRVSTVYQIDKDSLPMMKQDLTSYCKYILNTDDFVIFEDAGYSGKNTDRPAYQKMMSQIRQGLFTHLLVWKIDRISRNLLDFANMYAELKDLGVTFVSKNEQFDTSTAIGEAMLKIILVFAELERNMTSERVTATMINRASNGVWNGGRIPFGYSYDKPTQVFSINPEENKIYNFMVETYEDTQSIVHTSRRLNEAGYRSRNGNMWSPVAVWTILRNPWYKGVYRYNYYKIPGRKAIKDESEWVIVENHHPASIDPDRFDRIQATLDKNARYRNTPGRKTAQKNVHVFSGLVWCAECGSAFTASPGKLHVSGYRPSKYGCPNVRKTKTCHAKYTSDVVLGEFLLNYILNILNAQKQFACIHSTDDLQKRLLHGSTFSNVDHVDPDGLASLLNMLEKCSGSDPVLLKRPRSKPKMDPELKRMMADQKKQQRALDRLNDLYLYSDDSISEREYLVRKQQITDRLQEINEAIGMMSQEPWMRTMNDEEFIRQASSFILTQKLADKQYIYYENLAESLDPEILKNFFVSILDSIILRDGRPETVVFRNGLSHTFTYKDS

SEQ ID NO: 10031 - protein, 492 aa, synthetic construct
MNIQEIPTTRKEKPRVCAYVRVSTDSEAQEDSFAFQSNYWQKRFASDESVEYVGLFSDEGIGGAFMKKRDGLKRMFQKVRNGEIDRIYTKSVSRFARNKVELMEIVREFRDIGVEIIFESENIHTLDPKCGLILTVMASLAEEELISMSQNQKWAARKRFANGSVELARILGYDMVDGKLVINEKEAVIVRRIFELYLQGNSFRTICHILENEGYTPMHGGRWSKSTITGMLRNEKYCGDSIMQKSYSVMKVQKYNYGELPKYYVQDDHEPIVSREDYQKAQEIMMARGNKYRPRGSPTTLYPLSGKLICGECGTSFKRKTSAHGTPYMCIKWTCRKKDVYGVKECTSHDIKDEVVTRLLIEAYNESIDANNEVNGVTEQEEVLRKLIANEQELRQLRAKGYISESKFREETDKILIKIKEQETLIKNLQTRDMVKGKYKKSDELTEQMAEFLVKATVKDWTITFEFQNGYKATKEYTNGRAGNVNGKLCKH

SEQ ID NO: 10032 - protein, 544 aa, synthetic construct
MSMENCANTKPKITIIPAKTRVERLDPMSVAMGQKPKIRVAAYARVSTDHEEQESSYEAQVDHFTKLIASHDDWTMVDIYADPGLSGKNTKRVQFKRMIKDCEDGKIDLIITKSVSRFARNTLDCVQTARKLKADGIGIIFEKENLDTLQERSEFVLTIMASLAEEESRSISNNIRWSVKKKFQEGKVILNTKHFLGYTRDKKGTVLKIVPEEAITVRRIYAEFLDGKSLKEIAEGLERDGIASPSGRETWHPSTVKSILQNEKYKGDCHLQKTYLPDFLSPRRIKNEGFAQSWYVEDSHAAIISKETFDMVQQEFQNRQSLRSTGETGCGKFSGKYPFSGMIVCGECGETYRRHQQYNKYKKYYIWVCKRHENNGAEYCKSRPIKEEALEKAFVRALNELIGDKERILEKLQSATVSEITDSCATAINEVNAEIEKLQEQMMELLMKRNNGEITDKEYEQQSQQVGMKIDQLLMRKEEILSEQGKVQLASYRIEEVTKLLQTGKILEEFDRVMFKSLVRKITVLSNKEIEIEFECGITVRETL

SEQ ID NO: 10033 - protein, 484 aa, synthetic construct
MKKEKVIPIDSLDLVDLYIRVSTTEQALEGYSVAEQEHRLRQYCAAMGHRIHKVHIDAGFSGASLYRPGIKETIKDVQKHLVRRVIVWKLDRLSRSQKDTLIMLEDVFLENGCDFISMMESFDTSTSFGRAIVGILAAFAQLERENIKERTMMGRQARLAKGHYNGSRPPLGYSFIPGSNDLQVDPYQAAIVREIFKLFLSGISINAIARKMEEKYPTVRTWNNTMIRRTLKNPVYIGKVNDNGILRDGIHEPLISEIDFQMANAILVHNSKIKKQSCRSRSLLTGLLYCGDCGARMHPRRIARGYPLRRYVCYSVSRTSKSMIKSDHCTNRLHPYTQEELEQIIIDEIKKLAADEDYISEVIRNSSAEAPADDTELFQERIEELNRQTDKLLNLYQIGAIELDQIQERLAALKQERESLTAALKESQTKTDINMDHLKIMSYASAFQVALESGDPEYTNSIIRLLIDKIVVLNEDIEIHWTFC

SEQ ID NO: 10034 - protein, 527 aa, synthetic construct
MYELTQSMESLSVDEIIVYLRKSRSDSPEMSVEDVLKKHEEMIQDYANAHFGSPIPEKNIYREVVSGETIDSRPQVKIVLQKIESPQIKAVLIVEPQRLSRGDLEDCGRLINILRYTNTMVLTLTHSFNLTEEYERKFFEMEITRGNDYLEYTKRILRRGRESSAAKGHYIGSVDPYGYRKIVIKKDGVNCHTLEIVPEEANVVKLIHELYAYTPGGIGFTNIAHKLDSMNLKPKKAAHWTPAIISSILCNPLYLGLIRWDTRKVIKYINDGQLEKSRPRSSDAKYYKGLHEPIISQELYDACMARRGTNPSLRRNKKLCNPFAGLLYCGTCGHAMSLKIYKNHNSVSQIILCNHQSYCHTKSVLYSAFLERFISSMENTIHDFELALLADDGNAQSVNQSIVANLETRLKKLQEKDMRQKDAYEDGIYSKEEFLERNIKTQQEIASTINSLTAAKETKENYVDYGEKIRRFRDCINALNDPELSATEKNQFLKSCVAKIIYYNHMESKAGVGRYVENVFSLEIQYI

SEQ ID NO: 10035 - protein, 543 aa, synthetic construct
MEVKKIPKKTVTLIEPKRSVLVDKEKYHQKRVAAYCRVSTDSEEQLTSYVNQKKFYTDMIARNTEWEFAGLYADEGISGTRADKRPEFNNMIKACLAGKIDYIITKSVSRFARNTVDCLDYVRLLRARGIGIFFEEQNIDTLKSDSELYLVIYAGFAQSESESISKNITWSYRKNFEDGKPIFMFKKLLGYKKGEDGEPVIVPEEAEIVERIYTMYLSGMTVDVISRQLQSEHIVIPDKKFSFGKNMVMNILKNEKYCGDCILQKTVTVDCISKTRKKNEGEAPMYIVENSHPAIISREMFNRAQEELSKRKARSPQSQKTAITASGKYSKYALTDVLICAECGSRYKRVTWTSLGQKRIVWRCVNRLDNGKKYCQHSPTLSEPALQEAIVRALNKFNDEDTSTYLTLMKATIGEAIGANGGSDEIDLLERRIDALNSRMLKMVSDSVERGADMEENEDEFKTISEQIEQLNRRIEAIRKSEGSDEDRQERLSLIQATIDQREAHRDTYDDAIVRQMIECVKVHEGGKLTIIFGGGYEIEEQI

SEQ ID NO: 10036 - protein, 513 aa, synthetic construct
MAQAKLISPVSRQAYERTKVAAYCRVSSNSADQLNSYAAQIRAYTKLIKSNDAWELIEIFADEGLSGMKAENRVEFQRMIEMCEHKQIDLIITKSVSRFARNVKEALEYVRKLKLLGIGVQFEKEGIYTLALGDEMLLNTFSAIAQEESKAISQNQRLSIVKRMERGEYVDSNAPYGFRLQDKKLEAFDREADVVRYIFQQYLSGWSTSEIARDLTEKGIQTKLGKEQWRSTKISYILSNERYVGDCRYQKTYRDTTVPFKQSKNRGQEDMFYASETHDPIIDRESFEKVQALLQDRKERFSKSEQLNIYPLTSRIRCSECGSVFRRKVRNGAIKWVCARHSADTHACPSGYYSEERIYDGFITMVNKLRFGEERILDQVIAKLETAAALYKRNNISAGKMSQSIAELNAKLVMLEQLRSKGYLAIEVYQSQTRDIQKQISSLKSERRSAFESTIQTMLDEVLKMRSLLNEIEEPLEEFNDKLFHELVKGIEINKQDEMTVTFLGGLKFTELI

SEQ ID NO: 10037 - protein, 591 aa, synthetic construct
MRKISKIERKIPQMPSRKKVAAYARVSMETERLHHSLSAQISYYSDLIQQHPDWEYVGVYADDGISGTRAESRTEFNRLLADCDTGKIDIVLTKSISRFARNTVDLLETVRHLKELGISVRFEKERIDSLTEDGELMLTLLASFAQEESRSISENVKWGTRKRFEQGIPNGHFQIYGYRWEDDHLVIEPKEAAIVRLIFDNFLAGLSAETTEKQLAEMGVKSYKGQHFGNTSIRQILGNITYTGNLLFQKEYVVDPISGKSKKNYGELPQYFVENTHEAIIPMEVYQAVQDEKKRRKELGVFANWSIKTSCFTSKIKCGYCGASFVRNTRKNRAKHKAPHDPDMYTTYGCGTQKKKGGSCPAKDIREDILRAKCTEVLGLTEFDDEVFSTQVEKIVVPEQGVLVFHMTDGRVIRTKWKSTAKKDAWTPERRAAKGRLVQERQLAAHSSCFTSRIHCDLCGENYRRQRTKRVDGSYSTFWRCASASKCHSTSISEDSLLPILAQALGTDGFDETAFRERVAGIHITGLGKLAVHFKDGHIYEAEWENKRKMSKQTEERKAHMSMKMKENWRKRRGESNDHSGNDQPVHSNAN

SEQ ID NO: 10038 - protein, 513 aa, synthetic construct
MAKAKQKAATNDISKLAVIYARYSSHNQTEQSIEGQLAAGHRYADLKGYTVVHEYIDRAMTGRNDNRDDFQKMLSDTSKKQFGAIIVWKVDRFGRNREEITFNKYRCKKNGVRVEYVAENLPDSPEGVILESVLEGMAEYYSLQLSQNVQRGLLESAKKHQVIGGNVPLGLMMDAHKKYVPDPKTAPTVKLIFDMYAEGSTTSEIINHLNSIGMRTKAGKPFTKSSLTTVLKNEKYIGVYKYKDIIRDEGVIPPIVDKEIFYKVQELLKVNRRMPSHKWSYSDYILTDKLFCGKCGTAMVGESGFGKMGVKYSYYICAKRRKDKTCDKKPVRQEWIEEIVLQRVQGILQNEELLEFIAENTWQYYLAQDESMEKLKGLQTELDKVEKSAANLMKAIEAGIFNDMTKARMDELDDQRAVIKKAMAEIEIEKGFKLTKDHILYFLEQFKKLDYKDRDCQRRLIDVFVNSIFVYDDKLRIAFNFGGPDSTITLNEVDKADRGEGFVCCASCPVIKP

SEQ ID NO: 10039 - protein, 594 aa, synthetic construct
MPKISKIEPTMPVLKQRKKVAAYARVSMQSERMMHSLSAQISYYSKIIQKNPDWEYAGVYADDFISGTNTVKRDEFKRMLADCEKGKIDIILTKSISRFARNTVDLLETVRDLKSKGIEVRFEKENINSMSGDGELMLSILASFAQEESRSISENIRWATKKRFEKGIPNGRFKIFGYRWVDDKLVPVPEEAEIVKRIYQNFLDGKSRLETEKEFAAEGITTRDGCRWVDSNIKSVLTNITYTGNLLLQKEYIEDPITKRRKKNRGELPQYFVENTHEALIDMETYQYVQDEIARRKELGPLANKSLNTCCFTGKIKCPYCGQSYMHNKRTDRGSCLEFWCCGSRKKKGGRCEVGGSINHEKLKKACAEVLGLEEFDDEIFLREVDHIDVPKRYVLEFHMADGRVITKDCPNTGHKDCWTAEYRAKTSEKRKKNGTNPKGATCFTGKIKCKNCGCNFRRATQPSATSESGKVNYWRCSEHSNGCQTAGLREDALIPLLADALGMAEFDETLFRKVVDYISVLTDTDLEIHKKDGTVVALVYTPPSRKYHPRTEEQKAHMRSLMKAKWTPERKAEMSERMKQLRKERGENWRTEK

SEQ ID NO: 10040 - protein, 529 aa, synthetic construct
MANRKVTTIPPTINKFTAAPVNSRKKRKVAGYARVSTDHEDQVTSYEAQVDYYTNYIKGREDWEFAGLYTDEGISATNTKHRDGFNRMVADALAGGIDLIITKSVSRFARNTVDSLTTIRKLKEHNVECYFEKENIWTFDSKGELLLTIMSSLAQEESRSISENVTWGHRKRFADGKVSFAYSRVLGLEKCPDGNIVVNHEEAKIVKLIFKLFLEGMTPHSIAVELTDSGIKSPGGKDKWNSATVRRMLSNEKYKGDALLQKEFTVDYLQKKTKKNEGEVPQYYVEGNHEAIIEPKLFDLVQVELAKRSKKGTARYSGISIFSNKIKCAECGSWYGSKVWHSNDKYRRVIYRCNHKFDGDRKCETPHVTEEEVKAAFVKAMNMVITERDEIIANIKLIRQSVCGTASLEEERDKLQSEMEIVVELTQSCVEQNARMAQNQEEYQKKYDGLVERYEKVKSKYDSTVAAIEEKQAHFEKLGMFIETLEQQAEPITEFDAGMWGSMVEYIAVDKYKNMIVTFKDGTEVQAEE

SEQ ID NO: 10041 - protein, 491 aa, synthetic construct
MYLRKSRQDNPEETVEEVLFRHEIQLQEYAMKNFHYRIKEEDIYREVVSGETIEDRPEMKKVLKLIESSTVKGVLVIEPQRLSRGDMLDCGTIVHVFRYTNTLVVTPPKTYDLTEKYDRKFFEMELSRGSDYLEYTKEILNRGRVLSRKQGNYIGSVAPYGYTKIKNGKEHSLVINEEEAQYVRMAYDLFINGHGSHYIGEQLEAMGAKPRKAKHFTPANIRKMLRNPVYIGQIVLNRSQSVKVYEDGCLKTKRVYNPDYETVPGKHEPIISEEIFELANSEACRKARVPSSKEIRFIFAGLAKCSVCGGSLGLKIHTGREHPYRVGCLKKKYCTNTSILYEDFIDLVVNALKEQIQDFEVQIETNVYKEAFETQSLLESLTKRLEKTDEKMGQLCQYLEEGMYTPDMFVKRRDTLIQEKDELQKAVREARKKMSGMKDIKEKTSSLHEALNLLRDDSISPRLKNTFLKKIIKVIYFSRINDEIVLKVVLR

SEQ ID NO: 10042 - protein, 644 aa, synthetic construct
MAGIKEEKKIYLVGIYCRLSKDDGTDNESASIATQKSILTDYVKKQGWHIAKTYVDDGYSGTNFQRPSFQNMIKDIESGLINCVITKDLSRLGRNYLDCGLYLEVFFPEHNVRYIAVNDGVDTLNKSAMDITPFRNILNEMYAADISVKIKSAYRARFQQGKFMGTTAPYGYIKDPADHNHLLIDDKVAHVVKEIFDLALKGNGVAKICRHLNKQHILRPAAYAAERGETGFERHFEGNEDKRYIWSGNSVRSILRSPIYAGNLVGYKRIAANMKSKKRPSKLPEEWEVIPNTHEGIVTQEEFDIVQQLITSRRLPQNKGGFVNIFAGVIKCVDCGCALRAMNVHRRKRPEIIDCVQYSCNNYARNGRSECSAHNIEARDLFNAVLADINCFADMAVNDEKAVRAIEKRLTETDQSRAKALEKERKKLNKRLAELDRLFSSLYEDKVMERITERNFEMMSGKYQKEQLEIEARLKEVTETLNESYEKSRGIRDFLALIRNYQGLKELDATVINALIDKILVSEREKMADGTVKQEIKIYYKFIGFVDELHIIPTKRWAAMPAKNCTVCGVEYVPGSGASRYCPACAKKIRREKSNESKRRSREQKRMSLCYSFQAVRLLHPMRLLFQVNYHSLRMELFIVMTVM

SEQ ID NO: 10043 - protein, 498 aa, synthetic construct
MEIQIREGNSRQKQKLKVCAYCRVSTDADEQENSLENQIRHYKEVIISNPDYEYAGVYSDFAISGFKEKRPGLQKMLADARKGKIDLILTKSVSRFARNTSIVLEATRKLKELNVGVFFELQNINTLSGEGELMLTILAAFAQAESESGSVGAKMVYQRKYEAGIPVQYLERSFGFKKDERGVYIADEEEAVWVRKIYEMAADGYTPAAIKRYLNENGVKTVGGAEWIDSTVFRLIENEIYKGDYIMHKHFVNEERKLVRNRGEVDAWYIEDDHEAIVSPELWQRAQDALEAKRDYLAEGSVIEEFTEENYPYMNRIYCARCGHPLYKRIYSNGNRLNWGCSGTKRYGKSFCEGINIPDGVLRGAWHFDENMYIGEKQTDKGKKEFTYLKEASWKRRHKKKVPEAIPKNTEEAYPYRKNIFCGLCGSRLVRHVNPKSHKVIWICNGAKRKGVAFCRGTRIPDSVIRGWGEIKKDIYIQRKDDKNGKKRYSYTSKKPTA

SEQ ID NO: 10044 - protein, 464 aa, synthetic construct
MARSVTVIPARNRQRETGRRAVQEKKIRVAAYCRVSTDQEDQLHSFEAQVDYYTKYINDHENYEMAGIYADEGISGTNTKKREQFKRMIADCEGGKIDLVITKSISRFARNTQDCLEYSRKLKNLGIGIIFEKENINTLDSTGELLFTILSSLAQDESRNISENCKWGIRTKFKNGEMHLNTFKFLGYDKDENGKLVINKEQAKTVRRIYRDFLIGINPAQIAKELTEEKVPGCLGQTKWYPSTVTGILKQEKHMGDALLQKTYTADFLTKRQVRNNGEIAQVYVKDSHKGIIDKQTWNAVQEEFDRREKFMESHGTDRYSYGADCMPFCEKVFCGECKSLFTRHSWRSRGIVQWQCKNHRKDGKVACTNAYVDNADLEKGFVKAFNRLVTDRDKHMERWQQMKSDGTPLEKIRAGQMMEAVGNEPLTRFVPEIAQLVLCEVTVLGAKKYEFFFLEGSRIKVSV

SEQ ID NO: 10045 - protein, 501 aa, synthetic construct
MEIQIREGSREQKRKLKVCAYCRVSTDADEQENSLENQVRHYETVIKANLNYEYAGVYSDFAISGFKEKRPGLQKMLADAEKGKIDLILTKSVSRFARNTSIVLEATRKLKELNVGVFFELQNINTLSGEGELMLTILAAFAQAESESGSAGAKMVYQRKYEAGIPVQYLERSFGYTKDERGVFVADEAEAVWVRKIYKMAAEGYTPASIKRYLNENGVKTVGGVQWVDSTVFRLLENEIYKGDYIMHKHFVNEERKLVRNRGEVDAWYIEDDHEAIVSPELWQKAQDALVAKRDYLAEGSVIEEFTEENYPYMNKIYCAKCGYPLYKRIYSKGNRLNWGCSGTKRYGKSFCDGINIPDGVLRSAWHFEENTYIDEKASDKGVKEFTYLKERSWKRRHKKKQPSAIPENTETEYPYREKIFCALCGSRLVRYVNPQNYKVTWVCNRRKRKGKEACDGTRVPDTVIKGWGEIKKDIYIQRKDDKNGKKRYSYTSKKPSGIRV

SEQ ID NO: 10046 - protein, 525 aa, synthetic construct
MARAVTVIPPTIQPITHLARNAVVRRRVAAYARVSTSSEEQLTSYEAQVDYYTRFIQSKPEWEFVRVYTDEGISAVNTKKREGFNQMVRDALDGKIDLIVTKSVSRFARNTVDSLVTVRKLKEKGVEVYFEKENIYTLDSKGELLITIMSSLAQEESRSISENVTWGQRKRFADGKVSLPYSHFLGYRKGDNGLPEIVPEEAETVRWIYSLFLSGKTTGSIASLLTREGIPPPAGKKKWAASTVESILKNEKYKGDALLQKAFTVDFLTKKQKKNEGEVPQYYVENSHPAIIDPAEWKLVQRELERRKAIGRSYSGNSIFSSRLVCGDCGGYFGSKVWHSTDKYRRTIWRCNSKFTGEEKCQTPHLTEEEIKARFLDAFNALVADKERLLDECRTMQAALTDTGSLDSEIAALLSEMEVVAELTKRCIEENSTTAQDQAAYLERYNGLAERYETAKAKLEKLQATKAQREAKSEDIGGFMFELAEYGDSITEFDDRLWLTVIDTVTVHRDGRLTFKFQTGHEITV

SEQ ID NO: 10047 - protein, 497 aa, synthetic construct
MRKINKIEPTLPVLPTRKKVAAYARVSVETERLHHSLSAQVSYYSELIQANPEWEYVGVYADDGITGTKASKREEFQRMLDDCEDGKIDIILTKSISRFARNTVDLLETVRHLKELGIEVRFEKENINSLSGDGEVMMTLLASFAQEEITSLSNNVKWGVRKRMEQGIPNGHFRVYGYRWEGDQLVIEPEEAAIVRRIFQNFLDGKSRLETEREFAAEGITTANGCRWVDSNIKVILTNITYTGNLLLQKEFIEDPITKRRKKNRGELPQYYVEGTHEAIIDMETFQYVQEEMARRKELGAFANKSLNITCFTSKLKCSTCGSSYVRNQRSNRTKYTSTYGDTIVVWVCGTTKKKGGRCNRKDIPERVLREACAEALGLEEFDEDVFLERVDYILVGPDQKLEFHFYDGTVKVQKWESTAKKDCWTEEHKDRQRAWMKQHMATSDRFSPFTTRVKCGWKLLQAADPAQQAERDRQDCLLALFRWSQNKLRYQRNPRA

SEQ ID NO: 10048 - protein, 527 aa, synthetic construct
MGVQKKVKTIPATLTRFTASPIVEQKKRKVAGYARVSTDHDDQFSSYEAQIDYYTNYIKSRDDWEFVEVYTDEGITGTNTKRREGFKRMVADALAGKIDLIVTKSVSRFARNTVDSLTTIRQLKEAGVEVYFEKENIWTFDGKGELLLTIMSSLAQEESRSISENCTWGQRKRFADGKVSVPFQRFLGYDRGPDGNLVVNREQAVIVKRIYSLFLQGMTYHGIADTLTKDGIPTPGGKKKWSISTVKSILSNEKYKGDALLQKSYTVDFLTKKTKVNEGEIPQYYVEDNHEAIIDPEVFEMVQREMAKRGKGKKYHSGVHAFSTKIKCGECGSWYGSKVWHSNSKYRKTIWQCNHKFDGDCRCQTPHLTDEEIQLHFLSAANKLLATKAAVIANGREMQALLFDTTELEAEQAQLLEETQVVSDMVQQAIQENARTAQNQTEYQKRYDGLVQRFDRAKTRLEEVTAEIQEKQTASANMGAFLSTFEQMPDALTEFTLESWHSMVDFATVYSIDDIRFTFKNGQEIQA

SEQ ID NO: 10049 - protein, 530 aa, synthetic construct
MEQYLIYLRKSRSDLEAEAHGEGETLSRHEHTLLELAKRQHLNVTDIYREVVSGDTIAARPMMQRVLSEVEQGVWSGVLVMEVERLARGDTIDQGIIAQTFKFSGTKIITPIKTYDPDNEFDEEYFEFGLFMSRREYKIINRRLQRGRLASAKEGKWPSGLAPFGYRRVKLKNEKGCSLEPIEEQAAIVRMIFDLYTVGLQDEDGSARPLSLGSIATRLNDMHIPSPSGSQWARITIRGIIKNPTYIGMVRWGSRETKKKVVDGKVVSVRGPADPEKECVFKGIHPPLVPKETFELANDKLARSENTSTHKEKVVRNPLAGLLVCSECGRQMMRMINPVHPDMPVVRCPRRGCPNCSSYLPIVEERVIQGLSEWMKGYELEWSSAAASSSVSSVGVREKALASAEAELRKLQQQLERTHDFLEQGIYDTDTFLSRSRMLSDKIAAAKDSVTRCSRELTEEKLRETSRRDIIPKVKNLLDVYPLLETAEEKNALLKEVLEKVVYQKLNEKRKKSPDGFTIEIYPRIPKSEK

SEQ ID NO: 10050 - protein, 482 aa, synthetic construct
MDIAVYTRVSTEKESQVSSYENQLSYFKNKIEKEGNVLYQFYGDPGLSGVNLKREQFIKMLYDAGIDTLNINTQQVFVLSKRNPKFDIIYTKSTSRLARTTDILNVIKLLKQKGITIYFEDINKSTNDIDAELLINLMILLDAQFSKDLSNKTRFGKRESNKKNLYKMRLLGYDKIDDKVVIIQEEAELVKKIFDMYVNQNLGTHIIAKKINEQGYRSIKGRKFNGTSIYGILHNEKYIGTYVANKRYTDSVNNIHRKNEEKDWIIRENAFEAIINKDLFNKAQEKLSSTAIGNPPTANNRYGTHLKCGICGGNTQIRARKNRSNRYVCSTKRKKGPSVCNGPYVLEETIDKFVNSVLRRIDYWYNGEIFWGIRALEKKKGNLKEDKDIEERRNKLVDLYLDNLIDKKLYEKRIKELDELNKTNEIIDKINNKIQQLKELRDIQLPTTPQELLSISTLYINEDKSLSIKFNIRKEIEEIVNS

SEQ ID NO: 10051 - protein, 552 aa, synthetic construct
MNKKSAIYVRVSTSHQIDKDSLPLQRKDLINYSKLILGIDNYVVFEDAGYSGKNTDRPAFKDMFNRIKEGEFSHLLVWKIDRISRNLLDFCSMYDELKKYNCTFISKNEQFDTSSAMGEAMLKIILVFAELERKLTGERVAATMLDRATKGLWNGAPIPLGYKWDKIIKFPIIDDEERLTVELIYNKYLETESTSAVMKYLNQENIKTKRNGSWTTKTVGDILRNPFYKGTYRYNFRESARGKKKKENEWIVLDNNHDPIIALDLWTKCNNILDENAKKNSARFRAKSKTHIFAGLLECGECHKSFYSKSDKTSLDGYTPSIYTCSSRYNHLGCNQKTISDTIIGNFTLNFISNMIKLSKTYKKLSPEDIEKNLLSGYSFNDVKGIIEIDDIFNSFYNTSSKTFAPTKQKISKPSDIDLNKLDADLKKQHRALERLENLYLYDEKEMSEKDYILKKNIINTKIKEIDAKIKSSATISTSTYNINFFLNTATLELSKEIIEGNINMKSLIQRVGRDIIKEFVNSLITKITVRDRKVISIQFTNGLISTFIYEV

SEQ ID NO: 10052 - protein, 502 aa, synthetic construct
MIAIYARQSVDKKDSISIESQIDFCKKEVGEEDYKVYKDKGYSGKNIDRPAFKEMMRDIKKNAITKVVAYKLDRISRSILDFNNLLEEFKKHNIEFVSVTEKFDTSTPMGKAMVNIVVTFAQLEREQIAQRVKDNYYERGKTGRFLGGKVPLGYTNTKVEIQGKKVPTLVINKEEALLIEKMFNMYAYEDISLSKISDYLNEQGLKSAKGTAWDSGKISRIIKNALYVKADVNVYNYYKNLGVEINNPIEDFIGTNGCFVYGKRDRNENRYTNLKDHKLSIGLHEGIIDADTFLKCQYKLSQNQQITRSGSGKHTWLTGLTKCGYCGYSMSAVVNSSGKYFNCRGKTNMKICNGHSRTIKVEEIENIVETEILNRLEELSKVKVKMENSNSKKIKSIETEIKIIDENIEKLLDKILESNDITIKYINKKVEELDNKKTELRNELNRITLEGSNNSSLEEVLKDANKIKNLSFDKKKSIAKSLIDKVLIRDNEIDIQWKVFNQ

SEQ ID NO: 10053 - protein, 518 aa, synthetic construct
MSDRKTAVGYIRVSTDEQAREGYSLENQKAEIERKCKYESWDLLKVFDDKGISGALLDQRDGLKAMLRFIKEHRVDYLVIYKLSRLSRKVADVVNIAEFLKGNETHLLAIGDGIDTSNPMGKYFLYLASIIADMERENIIVQVKGGMSQKAKEGLWNGGKPPLGYDLLDKKLVVNNEEAETVKLIFSEYLKGNGYKTIAALLNERTIKTKTGSTFNGVGVKDILKNPTYIGKIRWGVRKDWGKLHEDNKRKRKYNDDPIISDGIHEPIIDEVVFNKVQELIEGNPRRNMKRFNGNHLLSGLLRCPVCNYGMSYQPAARKGKTYGYYICNQYMNHKTCKPNGVRKDHIEEEFLTIFEKIINEPEFKETMKSALNNSSEQVKELDKSIERKGNEIKKFKLDQDKYVQELIRGSEAFKEVMRTNIEKTIYEISRLETDITNLESEKRGLQDQQLDLDEVFELLEKAGKIFPLLEKEAQQSLVRKLISKIEIKDKHISEVHFSFQQSFRIGGGKGNRIISRA

SEQ ID NO: 10054 - protein, 521 aa, synthetic construct
MMNSKVIVIPAKKKKGNSIKESEKKKLRVAAYARVSTDSDEQATSYDTQVDHYTNYIKKNPEWEFAGVFSDEGISGTYTKKRAGFNKMIEEAMEGNIDYIITKSISRFARNTLDCLKYIRKLKENNIPVYFEKENINTMDAKGEVLLTIMASLAQQESQSLSQNVKLGFQYRFQQGQVQVNHNRFLGYTKDEDGKLVIVPEEAKIVKRIYREYLEGASLRDIKVGLEKDKIVNGAGNKKWHVSNLNQILTNEKYMGDALLQKTYTVDFLNKKRVKNDGIAPQYYVENSHEAIIPKEIFMRVGEEMYRRVNMVSGKGKRRIYSSKYALSSIVYCSKCGDIYRRIAWNNRGKKYTVWRCCTRVTHGPEACEARTIKEEDLQEAVVEAINQLISESSKLKEIIKENIEKVITGNVSSRIEEIDKEMLKVQEELLKVANAKKDYTDLADKVEELRNEKEKILLNIAEEKNEQNRLKELEEFLDNQELEIESYDEDLVRKLVDKVVVYDEELKIVLKSGVEVNVCV

SEQ ID NO: 10055 - protein, 415 aa, synthetic construct
MGEMRVISARPARPQRLRVAAYARVSTEHERQLSSIAAQVSYYSHLIQSTPGWDYVGVFIDEGITGTSTKHRDGFKHLMDTAKAGGIDVILTKSISRLARNTVDLLATVRELKDLGVAVRFEREQIDTLSADGELLLTLLASFAQEESRSLSHNVKWAIRNRYKNGGTNSFVVYGYHWANGEFTIIDEEAKIVRLLFANYLDGISPEKTAGMLNDQGVRSRGGGRFYGSVFRRMLENERYKGCQMLQKMYRPTIQAPTCVLNDGELPRYWVEQALPPIIDEVMFDAVQAEIAHRREVGPAATPSKNTGVFTGRICCGACGKNYQRKTRTYKSGTSYKFWRCWSACTGNGNPCGGHNLRETLLEQACADMLGTQGFDPVHVAEQVVMIEAFEHQLTFHLADGTMAPVGLTSEGRMA

SEQ ID NO: 10056 - protein, 537 aa, synthetic construct
MLRQTTQNLITALYPRLSHEDELQGESNSISNQKRILETYAKQNGFTNLCWYTDDGYSGANFQRPGFQAMLADIEAGKVGTVIVKDMSRLGRNYLQVGMYTEMLFPQKGVRFIAINDGVDSAMGDNDFTPLRNLFNEWMVRDTSKKIKAVKKAKGLSGKPVTSKPVYGYLMDDDENFIIDEEAAPVVKQIYQLCLAGNGPTKIARMLTEQQIPTPGTLEYQRTGSTRRYHPGYECKWATNTVVHLLENREYTGCLVNFKTEKPSYKMKHSIDNPIEKQAIFENHHEPIIDLQTWERVQELRKQRKRPNRYDDVGLFSGLLFCADCGHVMYQQRYQTDKRKQDCYICGSYKKRTADCTAHFIRTDLLTAGVLDNLRKVTAYAQKHEARFVKLLIQQNEMGGKRKLAAAAKQLEQVQSRIAELSRYIKRLYEDNVNGKISDERFMEMSADYEAEQRELKDRAAALQGELDKAQEATVNAEKFMSVVRKYLSIEELTHTLLREMVEKIVVYECEYDENEVRRQRIDIYYSFVGKIDLPEE

SEQ ID NO: 10057 - protein, 511 aa, synthetic construct
MVDNDIFAIYLRKSRKDLENKDYDVLKRHRKILLDFAKSKNIVIHEEDIYEEVVSGETIQDRPVVQILLRKIETGYYKAVLVMEIERLARGNTIDQGIIAQAFQLTNTLIITPNKTYDTRNEYDNEFLEFGLFMSRREYKSISRRIQTGRIQSVKEGNYIGSVTPYGYDKEKLKGEKGFKLVSNDEATNVKLIFDLCLDGVGTSNIAFKLNDLNIKSRTGKPWTPNMVRNILINKVYIGILTWGKRATVKQLDNNLINKTRPVSDNYIESKGKHESIIDEITFYKAQEILKANSSKKVHKDKSLKNPLAGIVVCQKCGTNMIRRPLKNIPDTLLCKNHYCDNVSSYLYLIEDRLLNSLKVVLKEYYYYIENYEKENVKNKKNYDIQIKRIDKDIEKLKNQHNKTCELLETGVYSLQLFKERSLSINQQLEGLNKQKEELTRLNKEDKTEKIIQAIPKLENCLKTYHTLNIEDRNKLLKSIIKKAYYLKTEAGSRWNKDAQDKFTLELELLL

SEQ ID NO: 10058 - protein, 516 aa, synthetic construct
MIKTDKPSVKAVIYARYSSDRQREESIEGQLRVCEDYARRNNITIVHTYADRAMTGRSDQRPEFQMMIRDAATMSFDIVLVYKLNRFARNRYDSARYKHKLKQYGVRVVSAMENIADDPSGILLESLIEGMAEYYSAELAENVTRGMTENALEGKWAGGIVPLGYKLDEKHHLVIDEPKAAIVRQIYHLALEGHNQKYIIDELNKHHYTNSAGRPFSYNTLRVILKNERYTGTFIWRDIRKENAIPVIIDKMTFEAVQKHMQFRKKNHIRSCSEDFHLTGKLFCGRCSSKMVGVSGTSKQGVLYYYYACTSHLKKKCPSKNIRQDALENLVCEVTTQILSKPEAIKAIAKQAMKMQKDKKESLEIQSLQNQIADINKKLKNCIQAVENGLISETMTNHIKNYENRLQGLKDEVSRQKLLEGSIQLTEQHIEFFFYSISRKLKTADKYKSILLSSLVRCVIVHENYIEIQFNYKNELPILQNPVKVESSYLNQMVTQERFELTTYRLEGGCSIQLSY

SEQ ID NO: 10059 - protein, 484 aa, synthetic construct
MKKEKVIPIDSLDLVDLYIRVSTTEQALEGYSVAEQEHRLRQYCAAMGHRIHKVHIDAGFSGASLDRPGIKETIKDVQKHLVRRVIVWKLDRLSRSQKDTLIMLEDVFLENGCDFISMMESFDTSTSFGRAIVGILAAFAQLERENIKERTMMGRQARLAKGHYNGSRPPLGYSFIPGSNDLQVDPYQAAIVREIFKLFLSGISINAIARKMEEKYPTVRTWNNTMIRRTLKNPVYIGKVNDNGILRNGIHEPLISEIDFQMANAILVHNSKIKKQSCRSRSLLTGLLYCGDCGARMHPRRIARGYPLRRYVCYSVSRTSKSMIKSDHCTNRLHPYTQEELEQIIIDEIKKLAADEDYISEVIRNSSAEVPADDTELFQERIEELNRQTDKLLNLYQIGAIELDQIQERLAALKQERKSLTAALKESQTKTDINMDHLKIMSYASAFQVALESGDPEYTNSIIRLLIDKIVVLNEDIEIHWTFC

SEQ ID NO: 10060 - protein, 481 aa, synthetic construct
MMTTNKVAIYVRVSTTSQVEEGYSIDEQKAKLSSYCDIKDWNVYKIYTDGGFSGANTDRPALEGLIQDAKKRKFDTVLVYKLDRLSRSQKDTLYLIEDIFIKNNIAFLSLQENFDTSTPFGKAMIGLLSVFAQLEREQIKERMQLGKIGRAKAGKSMMWAKTSYGYDYHRDTGTITINPAQALAVKFIFESYLRGRSITKLRDDLNEKYPKHVPWSYRAVRTILDNPVYCGFNQYKGEIYPGNHEPIISKEEYDKTQSELKIRQRTAAENVNPRPFQAKYILSGIAQCGYCGAPLKIMLGVKRKDGSRLKKYECHQRHPRTLRGVTTYNDNKKCDSGFYYKDKLEAYVLEEISKLQDDADFLDKIFSGDNAETIDRESYKKQIEELSKKLSRLNDLYIDDRITLEELQSKSAEFISMRATLETELENDPALRKNKRKADMRKLLNAEKIFSMDYEGQKVLVRGLINKVQVTAEDIVIKWKI

SEQ ID NO: 10061 - protein, 418 aa, synthetic construct
MKKIIFIPPKSLEYKKLRVAAYCRVSTLNKIQRNSLQWQIGYYTNMIQDNPDWIFAGIFYDVGKSGLRRKGRIGLDKMLKKATKGKIDYILVKSISRLSRDTVEVLKIIRYLRERGINMHFENENLDSIRVDKEFEITLRSMIAQDESKNTSENIKWGFQRKFERGEIFTKYKNFMGYTCVEGELVIVPEQAEVVRKIFELYLKGLSFGQIKGYLESMDIKTVTGNKHWDTTTIQKMLRNEKYKGDTMLQKTYTEDFMTGKKVRNTGQIDSYYISNSHPAIVSDEVFDKVQEEMDKRSRVVYKEDGTIESKGKRYNSKYLLGNILECGYCGAAYRRRTERGRVVWRCATRMEEGRESCADSPTLNEEWIKGILGEVVCGNGNYDEGMFREWVDRILVFGRYMDICCKNGDEIRIRFDI

SEQ ID NO: 10062 - protein, 518 aa, synthetic construct
MPKAISYIRFSTKIQSVGDSTKRQSKYINDWLKRNPDYYLDESLRFQDLGISGFSGANAKSGAFGEFLAAVESGYIEAGSVLLVESLDRVSRQDIDTAGEQLRKILRSGVEVVTLVDNEWYTKESLKDSLSMIKAMLVMERAHEESAMKSTRLRSMWAAKRERAANGEIMSKRCAAWLKVSDDRSHFEFIPENVKAVQRVFQLRLEGLSHVKIAKQMNDEGFSTLNQFKSVTGGWSQSSVTELLSNRSVIGFKVPSKSMAVKGVSEIPNYYPSIITDEQFYAVQQLKQGSGRKPSSDLPLLTNLFKGVLRCSECGFIVVVAGVSAKRSGIYKCSMKSEGRCNSVGFSRLQTDRALVQGLLYNTNRLSLNRDNGSAIGTLQSELEQLQKQRERLIKLAMLADDTESMAKDLKALNSQIKDAEKAVSEVHQREQSSQLETISHLDLTLKKDRIEAQIIIKRIVKEIRLNTAQKKCDVFLHNGLKVLNFPLDRVVDGEIFLEVLPLLEADEFDLDTYRVIE

SEQ ID NO: 10063 - protein, 516 aa, synthetic construct
MSYCIYLRKSRKDLEAEQHGEGETLARHERALLSLAKKNNLIISNIYREVVSGETIAARPVMQQLLHEVEQNLWHGVLVMEVERLARGDTIDQGVVQRAFQYSNTLIITPSKTYDPANEFDEEYFEFGLFMSRREYKTIKRRMQNGRYAAISEGKWPYNSAPYGFRRTKLEKEKGWTLAFDENEAPVVRLIFSMFTGPERVGIRSITRTLNSYGTKPRNSKLWSESTVRGILSNVVYDQCVKIGERKVVRTVENGVITTARPRTSDYTIVSGRHPRLIDHDVFAEAQSYLGCGSPKPAGSNIIKNPLAGIIVCSECKKKMIRRPPSGTASRVPYDLMLCSTYDCPTIGSPLDLIEREVYNALSDWVEGYRLSGQTPSKSLIPEKEVLLESAQQTLDQLLRQKGAMYDLLEQGVYSTEVFLERSDSLQNRISEAESNVAQLKLELDKERQREANIEQFLPACEDLLSCYWDLSIPERNRLLKLLIESIEYKKLTKNKRGHLNEPNFELTIKPRIPRK

SEQ ID NO: 10064 - protein, 456 aa, synthetic construct
MKRAVAYGRYSTDMQREESIDAQFRAIGDYCQRNEIELVSTYADEGISGTTDNRPEFQRMIKDAELGAFDYVIVHKLDRFSRSKYDSAIYKRKLKLLNVQLLSVLENLDGSPESLILESVLEGMSEYYSRNLSREVKKGMRENALKCKFNGGTPPLGYDVDENKNYVINAHEAEAIKLIFDMFTKNYSYSQMMRKLNDLGYKTKRGREFTRNSFYEILNNERYVGTYFYSKEDYDGFKGKRNYHKKRNKNNMIRIENGVPAIIDKETWAKAQEKLKNNRNLNRTNKNGRFYLLKGLLFCGECGSPMSGNMQSNNQGNRYYYYKCNRKSRTHKCHAPVVRAEKIEKEVLDCFEDVIFTKTNKDAVIDSMLKFLDKETDTTDHKKSLEKELAVVEKQIDNILDAIMSGISSPSVNDKLKELETKKETLKASISRCNIIGSIINSVGEKSSALFLYGNV

SEQ ID NO: 10065 - protein, 523 aa, synthetic construct
MRVVLYMRYSSDRQTEQSIEGQNRVCTAFCEQQGYEIVDRYIDRATSAFKDTDKRTEFQRMIRDSEKQLWEGIVVYKLDRFARNRYDSATYKARLKKNGVRVISATENISDNPEGVILEAVLEGMAEFYSKELSQKITRGMFESANKCHSIGGHIPLGYKIENKKLVIDEAGAAIVREAFDLYANGATVAEICETFNTKGYRTAKNAEFNKNSFRSMFKNERYIGIYKYKDLRIEGGVPAIVDKDTFAIVQKKLSKNAEAPSRGKAKIDYLLSQKLFCGHCGSLMTGESGTGKGGTTYFYYTCGKRKREHTCDKKPLKKDFIERAVVEDALTLLTPETIDELADIAVNESIREMEENSIIPALKDQLHDTERSINNLVKMVEKGVESDTIADRLKELEKEKRAIEKRLVVAQDDYVLLEKDHIVWWLSEFCNGDIEDEEFRRHIIDLLVNSVTVWDEPDGWYKITSVYNLTSNKTKTFRCSDLSGQAPPYQKPAEMLVFPLFMRVFSIFNLCKSCCFLRSFCI

SEQ ID NO: 10066 - protein, 628 aa, synthetic construct
MKAAFLIRCSTKNQDLNRQTRDLTRLAKSMGYEYDLENLVYGEKITGKDDVTKKNRDSIDRLLRAAKEQRFDVVLVSEVSRMSRDPASGRIYVRLLINMNIPVYFKDIDLWTINPETGKKVRDAELVIGAAFDAAWKYLKSMKTQIASARRNELDNNRISIGQPYFGYKRYEGIDKSKKNQIVVNEEESEVVQAVYNEYLKEGATLKSTALAITDKYGEKLNRKFSLGTIEHILTYESYATGIKKVNLKDPDTDEVEVFDVSTPIIIDKELYEAAANKRKNNRVKDEPYPNQQVYLLSKLIKCPDCGYTLTPRRKAGEFGQTYRLVNGKPAVSWLCMSGINNITDCTNRTSIANEKLEPIIWELVKKELIGYANMNDEKRGEQIRECEEKIEYQNYSIQNFTKEIEKLKKRLSTAYQFSINAAEMAGDDEDMRTMAMEEFNRTAKGVRQEMKNFEKSIEQAKGELEKLRDLKTFYSQPTLPKDYLEQIEGNFTEKRNLVKQLITKIVPYRIITFKKKERESGVKTCNKMITVKNGAVLLEVYTIGGVYNVFYNANSKFQVKTAYYVHGEYATFQNGIRKYPAYDEGEYFVISNANMVMETDDIDEVVTVNEFVDIAIANNWVIEYQYI

SEQ ID NO: 10067 - protein, 544 aa, synthetic construct
MAYRKITDIRDTIGMRAVFYARVSTAEEEQLNAIELQIEENRGCIKDHGWKLVGEYIDRSKSGTMVKGRDDYQRLYEDLYEDLFDIVVIKDQERLQRNTLDWYLFINRVVQTGKLLFMYMDGKFYSPDDALITGVRAIIAEEFSRNLSKKLHNYHDHRIEKARQGQEIALQGSGNVYGWDKKDGKYYINPEQAKVRRLMCEGIMARKGSTLIAKELNDAGYRNTVGKPWKPMDIPKFVYDCKNVGTMIINKERHDFESKQTIKLPKEEWVYVENALPPIVTQEEWDLICKIHEERVIATGSDRRGKKTSGYSFSGKLVCGICGAPYWRKQRVSKDEYWVCSTKQTKGRKTRKRDSTMGKAGEINPLGCDNENISYNSLMEIMGVVSERLQANTDTIKQDMINWLTKLRKQLLEANGGHTEADLQRELSRKSKLLDAYLDGILNKQEYQKKAEELDERIIQLKTETEKNKANSGDIAEIDKVLANIDEEVARYVDGNEKLKVEYLLEHLEQVQIFPDKVIVIVPILSEGIVVEKTQYVSREKRSR

SEQ ID NO: 10068 - protein, 502 aa, synthetic construct
MEIQIREGNSRQKQKLKVCAYCRVSTDADEQENSLENQIRHYKEVITSNPDYEYAGVYSDFAISGFKEKRPGLQKMLADARKGKIDLILTKSVSRFARNTSIVLEATRKLKELNVGVFFELQNINTLSGEGELMLTILAAFAQAESESGSVGAKMVYQRKYEAGIPVQYLERSFGFKKDERGVYIADEEEAAWVRKIYEMAADGYTPAVIKRYLNENGVKTVGGAEWIDSTVFRLIENEIYKGDYIMHKHFVNEERKLVRNRGEVDAWYIEDDHEAIVSPELWQRAQDALETKRDYLAEGSVIEEFTEENYPYMNRIYCARCGHPLYRRIYSNGNRLNWGCSGTKRYGRSFCEGINIPDGVLRGAWHFDENMYIGEKQTDKGKKEFTYLKEASWKRRHKKKEPEPIPENTETEYPYREKIFCGSCGSRLVRHVNTKNHKVIWVCNGRKRKGKDFCDGTRVPDTIIKGWGEIKKDIYIQRKDDKNGKKRYSYTSKKPKGADRA

SEQ ID NO: 10069 - protein, 464 aa, synthetic construct
MARSVTVIPARSQKVRTGHKAVQEKKIRVAAYCRVSTDQEDQLHSFEAQVEYYTKYINEHENYEMAGIYADEGISGTNTKKREQFKKMIADCEDGKIDLVITKSISRFARNTQDCLAYSRKLKNLGIGIIFEKENINTLDSTGELLFTILSSLAQDESRNISENCKWGIRTKFKNGEMHLNTFKFLGYDKDENGKLVINKEQAKTVRRIYRDFLIGINPAQIAKELTEEKVPGCLGQTKWYPSTVTGILKQEKHMGDALLQKTYTADFLTKRQVRNNGEIAQVYVKDSHKGIIDKQTWNAVQEEFDRREKFMESHGTDRYSYGADCMPFCEKVFCGECKSLFTRHSWRSRGIVQWQCKNHRKDGKVACTNTYVDNADLENGFVKAFNRLVTDRDKHMERWQQMKSDGTPLEKIRAGQMMEAVGNEPLTRFVPEIAQLVLCEVTVLGAKKYEFFFLEGSRVKVSV

SEQ ID NO: 10070 - protein, 453 aa, synthetic construct
MKCVAYMRVSTEKQAEEGNGLESQKRDIENYCRKNELIIADWYVDEGYTGSNMNRPELQRLITDCSRKKVNCVVAFKLDRISRSMVDGIYIIEKVFQSNNVAFKCVHDSISYDSPMEQAYTQMMAVFAQLDKNTMMLRMRGGMLERIKQGYWWGGGNTPYCYRYDKEQGILIPIQERAEQARKALELFISGYSDAKIKEICGFKSELVTRKVLTGVVNIGMIPYKGNIYQGKHKPIFDKDRFELAQELRKSRCSAKISCFTEPNLLTGLCYCGVCGCKMRYQKWSNGNHKIYCCSRNKGLKYLPNYNPNCNNSLEWADDIEKQVTDEILKISLNLSSYKPKAKETKLEIMQSQLEREQTKLKRLYSLYADGNDTVLEMIKDLESQISKTKEDISVESKNAINTQKKEFTYQNIKKLADVWDNIDKKQKNFILKTIIDKVIIVNGNVEIQLKNF

SEQ ID NO: 10071 - protein, 492 aa, synthetic construct
MNVAMYLRKSRADENNPLETLERHKEILLSYAKDNNLTVIDIFEEVISGGMLYNRTEMLKLLDAIPSHIYDAVLCIDLDRLGRGSAADSEKIFDVLKENDVKIITLKKIYDLNNEYDEDYSEFEMFMARKELKFITRRMNRGRIKSINDGCFVSGAPFGYRNAVINKKHTLEVYEPEAKYVRMIFDMYVNQSMGITSISRQLANLGVLSKKNTPLHPTTIARMLRNHTYIGKIVWNKSKSVKGKNTQEKTSKDDWLYVPGLHEPIIDEDTFNKAQDIINLKYKPPMRTGTLQNPFAGLLKCANCGRAIVINTSNETVEKYRLCCRTLGCNKASALSIVEDKVFEVLTKEFKDIELSLKNIRQSHNKDKLSCLDTIATLETELKKLDKQQLRLYDLLEQEVYTKELFLERNNAISDRRKKINATIAQEREKFKLVDTSSVEERLPLLRELLTNYHSLSAAEKNSILKNFVKKIEYKREKSAPKGDIFLKIYYK

SEQ ID NO: 10072 - protein, 511 aa, synthetic construct
MNAVIYARYSSDNQREESIEGQLRECQAFAESNDMIIVDTYIDRALSAKTDNRPDFQRMIKDSASGTFDIVIVWKLDRFARNRYDSAHYKSVLQKNGVKVVSATEKISQTSEGILLESLLEGMAEYYSAELAEKVTRGLTENALKCKYNGGTLPIGYTTDENQFYIIDSLTAPAVLEAFKHYAEGSTMQEITDELNLKGIRTKKNTPITLNTVTRMLHNRKYIGEYRYSSFVTPNGIPAIVPEDLFERVQDMMKANKKAPAKHKAEDEYILTTKLFCGKCKCLMAGESGTSHTGIVHRYYKCVSVKYHRGCDKKTVRKEWIEELVISHIMKIIFDDDLMDRLADVLLEHLNKENTSLPILQKQFAEVQKNIDNMLNAIQQGIFTPSTKERLESLEREKSELSVQIIKEEISKPKLTKEQILFWIYKFRKLNPKRLDHRRRLVNSFVNSIYLYDDKIIIDCNYKEGTETITFEEIENSALGSDLTSLGAPRQSKRYIAYSVFFCKRAQNGEQ

SEQ ID NO: 10073 - protein, 537 aa, synthetic construct
MNKKQQFNKITALYCRLSRDDDLGGDSMSIQNQKAMLEHFANENGHINCRFFIDDGVSGTTFERKGFQEMIAEIEKGNVATVIVKDLSRLGREYLQTGYYTEIMFPKYDVRFIAVNDNVDSASGDNEFAPFKNIINEWYARDISRKIRSSYKTKALKGEFTGVFAPFGYRKSPEDKHKLIPDENAEIVKRMFQMALDGKSCCAIATALKKEHIPTPGAYVRDKDGVMRENKKVKYPYSWFQTTVRDVLSNEVYIGNMVSLKFTSKSFKDKKLIARPESEHIRVENTHEPIVDKETFYTVQKRIAVKKPQNKLNPDNVFRGLVFCGECSSSLVYKKENSVTNTAKYQCNLYVHRGKSVCTNHSVTAENLKNVVLDDINRHIRLSKEDKAAYVKRLIQSTDDMQSGERALSKKEIQRITQRLDEISKVLQTMYEDKVFGRISSERYASISASLEKEENELKNRYDEIQTRLSRTKQKTESAKDFADLIERYSPVIELTADLLNRLIEKIVIHEKTDENGEKVMPIEIYYRFIGKTENEN

SEQ ID NO: 10074 - protein, 523 aa, synthetic construct
MRFFSYGRKSVFSDKSDSIDNQFRMNREYCESKFSGQVDSWQQFSDEDFTGANTSRPDLQRMLSFIKNGFCDVLVVYQLDRLSRDVRDFANIYALLEEHGVMFISIKENIDTTTPIGRAMMYVTVVFAQMERETIAARVTDNMLGLAKKGYWTGGNPPVGYVRKHIVVNGKKHCSIEVDPDGARYVTQIFDTFLAYNCSLQGMETRFKNQGIRTQSGKFFSTTQLHKILTMPYCVEATPEVYDFYAAKGCIMDPGSPREMWDGSVGVIIYGRSTEKNKKHQAQPPEKWTVCLGKHKPFMPAEKWLAVQSRFTQNKCIKDAKWPVPLLKGVLRCKCGNLMQVSRKKKVDGTCSSWYYCRKRMRQGVDACDMGQIKCDLLDEEVLELFRGITADPALIQKFVKAEAPADVPDLKAAQARVSACERKIGRLAASLALAEDSAASKYIIAEMERLDVELGALKREASLAEMESHRAAASAKDAKATAAEIAKLIHGLDGFDDKEKNAIARAVIQECTWDGERLFITL

SEQ ID NO: 10075 - protein, 521 aa, synthetic construct
MKKVTKIDGVQKNTAINSKLRVAAYCRVSTGSDAQLESLEAQKSHYEQYINSREDWQFAGLYFDEGITGTKAEKRPELLRLITDCEAKKIDFVITKSISRFSRNTTDCLALVRKLQNLDIPLYFEKENINTGSMESELFLAILSSMAEGESASISENAKWSVKRRFQNGTYKLGYTPYGYDWDGKNMIINPEQAAVVKRIFADILSGKSTNAIADELNAEKVPSKKNNHWTASTIRGILANEKYTGDVIFQKTYTDENFNRHTNYGEVDQYMAPDHHEAIISHSDFDVANALVNQRAAEKGIEKGSDKYQQRYAFSGKIICGECGDTFKRRIHTCNTYKYVAWACNTHLKDKKSCHMKYVRDDEIKVAFMTMLNKLIYDYRLVLIPYLKVLENSSGDEAIQRIQHLELLISQNSEQREALTKLMAQGYIDQILYNQETNALLLQAETYRSDIEAITIGMTGDAAKVTETNLLLHFVSHTDMLTAYSEELFENYADHIEVISRNEIKFAMKCGLTFTERIGD

SEQ ID NO: 10076 - protein, 524 aa, synthetic construct
MSLENVCIYLRKSRADREAEARGEGETLARHERILLDLARSRNYNVGAIYREIVSGETISARPVMQQLLREVEAGSWDGVLVVEVERLARGDTIDQGVVSRAFQFSDTKIITPTKTYDPDNEFDEEYFEFGLFMSRREYKTIKRRLNAGRISSVKEGKYCGSRPPYGYERVKLRGEKGFTLQPVPEQAEVIKMIYSLYSGASGDRIGVSKIVRKLNDMGIKSPSGKSWVPISVQDVLANPVYAGMIRWNGRKTVRAIQDGVVTQSRPRSKDDDILLFPGRHPAIVSKEMYDSVQQIRKKNPPRPISIKNTIKNPLAGIVYCSKCGRAMVRRPYQKRGQDDTLMCSYTSCPTVSSKLSLVERAVLNGIQDLVDEYRLNDAVPGPDINNAVKSKEKLIAEKEHELEKLNVQKMKQYDLLEQGIYTTEVFLERSNSIASSIDSCQDSIECLKEEIRHDKELIDQQSSFIPRCENLLEIYWSLDTAAKNKMLKELIERVNYTKDVKNAFRMGNEATFVLDIFPRIQSN

SEQ ID NO: 10077 - protein, 524 aa, synthetic construct
MTAVIYARYSSDNQREESIEGQIRECTAYAEKNGITIVKHYIDRAISAKTDNRPEFQQMIKDSDKKLFDIVLVWKLDRFARNRYDSARYKTQLKKNGVKLMSATEIISEGPEGIILESVLEGYAEYYSADLAEKVVRGQTENILKGRCNGGRGTFGYTLDSERKFHIDPLTSPFVLESFKKYNEGSTMKEIRDWLNENGIKNPVGGAFTYNSVEHMLKNRRYIGELKFRDVVVPNAIPPIIPLELFEDVQEKIAKNKKAPARRKAEDDYLLTTKLFCGYCGALMFGESGTSRTGEVHRYYKCATAKKHKGCKKKTVRKQWLEDLVVNQTMQLVKDDAAMESIIAKVMDLQNKENTNIPLYEKQLRDAESGIQNMLNAIQAGILTSSTKERLEQLEETKRELEARIAEEKLAKPKVTEEFIRFWLLRFRKLDMSLKNQRQALVDTFINSIYLYDDKVLIAFNYKEGTQTVTFGEAVEVASEGNGSDLDCFTAPKDTREVTLKIRSFAGFSFFAAVRYCQILPNTA

SEQ ID NO: 10078 - protein, 506 aa, synthetic construct
MPKKETTAPVKAVLYVRYSSDRQREESIEGQIRVCEDYARRNNIVIVHTYADRAMTGRSDQRPEFQMMIQAAATQAFDVVLVYKLNRFARNRYDSAKYKHKLKKYGVHVVSAMENIADDPSGILLESVIEGMAEYYSAELAENVMRGMTENALECKWSGGLVPLGYKLDADHHLVIDEAGAQIVRRIYQMVLDGRTPTGIINELNAANCRTSTGRPFGKSSLTTILRNEKYIGTYTWNHIRKENAIPAIIDRKTFEAVQKTLQYRKNNHVKVCSENFLLTGKLFCGQCGSNMVGTSGTSKYKNTYYYYACTKHLKKDGCTARNIRADKLEELVCSVTTRILSSKEAVHAIARQAVEAQKRQKESLTVQSLKNQAAEINKKLKNCVQAVESGLISVTITNHIKEYEKRLTELNEAISREELLSGKSKLTEKHIEFFFYSIAQKIKTADKYKSILLSSLVRCVIVYDDYIEIQYNYKNELPLLQNPVRVKSSNLNGMVTQERFELPTP

SEQ ID NO: 10079 - protein, 518 aa, synthetic construct
MLIPARRQVGSNARKQEEEKPKLRVAAYCRVSTDSDEQATSYEAQVEHYTEYIQKNPDWEFAGIYADDGISGTNTKKREEFNRMIDDCKAGNIDMIITKSISRFARNTLDCLKYIRQLKDMNIPVLFEKESINTMDAKGEVLITIMASLAQQESQSLSQNVKMGLQYRYQQGKVQINHNRFLGYTKDADGNLVIDPEQAETVKRIYREYLEGLSMDKIAAGLERDGILTGAGGKKWHTSTINKILRNEKYIGDALLQKTYTTDFLNKTRVKNNGLVPQYYVEGDHEAIIPKDIYLQVQEELVRRRVGKTSANGKKRNYSCNHCFSQIVICGECGEMFRRLHWNNRGVKSIVWRCISRLESTGLECHARTINELVLQDAVVKAINQMLGDKSNYQAQLQLNIAAVIRASQATAIDSIDEKLMALQQELIQKANSKEDYDEIADEIFRLRELRQKTTVDTAARDEQIKRINDLQDYISQQTSYLTEFDEALVRRWIKQITIWDDRITVELKSGVSIDVDA

SEQ ID NO: 10080 - protein, 700 aa, synthetic construct
MDSNAFLNDLMSKMKLPEAKGKKKAEQSESVAQILAVMQKVKTEKKKPPVTSYAPVKEMPMNEPESMEEFSQLASDVMQECRPAMPTVSAASQEKAVRVAAYIRVSSTNPAQEDSYEMQERYFMSLLAGNAGWTSAGIYSDHGISATSREGRTGFNRLLRHCKQGKIDRVICKSISRFARNTQDFLVALRTLKENNVTILFEREAMDTADAYSEFILTTLAAIAQEESRSISANIAWSNQKRFPAGNVCNKDIYGYEFRKGEYTVNENGYRYRAVFIIPEEAEIVRMVFRLFTKEELGFTQIAQKLDAMHIQPPNSGCRQRQKRKPTVLPAGTLKEEDKRGWTATDVRYMIANVRYCGSVLCQQTYTDHRNGHKQKVNKGEKPKYLIRNHHPAIISEELWQEAQEVWKAYTAKYRGIEKGRNERNYSKLLLCGECGRYFQGHSTTRTTIWRCATKLAQQGQKRCRMEPIYEEQIQTLLCKAFAEKFKLGEKMDAEVHEVMQMISKAPIDNARNQALKNLTEKLREIHDFDQMEQEGDFLKRQLSAVNYSIRDVHQHIRDIQAEKEALKVRCEVLGEPRDKEAVTELENRLLNEEEQLEKLEHEAQQQAEQVRYMEDYWKKLEQTHEIREKTLQWLDSLAGGTQMFLDEAVGTYVKAFVLSVTIFSPKHFRIHWFDDTCTEVECDSVFEGYQQPGMIRRKY

SEQ ID NO: 10081 - protein, 512 aa, synthetic construct
MLAEYLEKIKSRNNVTILKAALYARYSSDMQRGESVDAQIRLIKEFAEKNNIVIVKQYVDEAKSAKWDSRESFQQMIKDSKTSEWQVVIVHKLDRFARNRDDSTMYRIQLRRYRKYLISAVEQLGDSPEDQLLEAMIEAMAEFYSKNLARETIKGLTENALKGKHCGGIPPLGYELDEFNFYKVNEFEAQGVKLIYSLFLEGKSYTEIIAEINLLGYRTKRNRLFTRNSLYEILRNEKYTGTFIYNKMESRDEFSGVRSRHKYKPENEIIKVENMIPEIISKEDWKSVQTILNRRKKAYTNHAKEEYLLSGKIKCGECGGNYVGKRTFNSRGVKYVSYICNRKRNPNYKCSNSCIKRDWIEEKVIKVVKDFIRKFNEAYFDEIQHKYIEEMQDKKQKEVKVLQNELNRINADIERIVEAIAKAPLESLIEKLQVLENQKNGLKENINKIQRVPDFEVTIQEMKSLIKKAEKMLEENSVPFKELIDLVVKEIVVNRDNIQIYMCFDKKFIQER

SEQ ID NO: 10082 - protein, 541 aa, synthetic construct
MRIAIYSRKSKFTGKGESIGNQVEMCRDYIATNYNGEEHSIQVFEDEGFSGKNLDRPQFKKMIEIENVIPFDLIVVYRLDRISRNVGDFASLIEKLNKKNTSFVCVKEHFDTGNSMGRAMMNIAAVFAQLERETIAERIKDNMYLLAKEGHWLGGTTPLGYKSIEVTNGKRTHFELIIDESQIDLVNIIFSKYKQLGSINGVETYLFVNGYKTQKNNYWHKSNVKRILTNPIYCIADIDSLNYFTELGCNVCFTLDDCNGKKGIYPYNRFSGQKREMQSYDRWIITISEHQGILAGKEWVAIQQQLKANSKDGFGGKANERRSTSNTSLLSGVLFCSCGAYMRPKKYPSGNTFYICENKMDKKITECNNSNINADELDKIVLNELFSFDIKDGVVDSQIQNLKEQIINIDNDLQKQIGRLKKQIEANKNTVNKFMNIVALSIENDTPEQVVEVYNQKINELLNQNKITQKRIDELQDTNIVQAKMNDRLNSLTDAMAYLKENFDKLTIVEKRGFVKKIVDRIVWDGNNINIFIKGISELSE

SEQ ID NO: 10083 - protein, 481 aa, synthetic construct
MNTINKVAIYVRVSTNVQAEEGYSIDEQIDKLKSYCQIKDWTVYDVYKDGGFSGGNINRPALEKMIVDAKKKRFDTVLVYKLDRLSRSQKDTLFLIEDVFSKNDISFLSLQENFDTSTPFGKAMVGLLSVFAQLEREQIKERMQLGMIGRAKSGKPMMFTNVSFGYTYSPKTQQLTINQAEAVIVKQIFNEFLGGMSPLCLMAYLNENNILRNGKEWNYQGIQRILRNPVYIGKIKYNNVIYPGLHEPIIDEESYYKAQKLLDARQDEMRIKGKNRQFKAKYMLSGTAKCGYCGAPLRIKIGNKRLDGTRLRVYQCCNRYPRKYAVVTYNDNKKCNSGNYQKENLEQYVIAEIRKLQLKPEKIDKLFNKVSKIDTVQINKQIASIDNKINRLNDLYLNDMIDIDKLKADAEKFKEQKRVLEKELDKDLKIQEQEKNKEDFKNTIGFKDVTKLDYEEQSFIVKSLIDKILVKKGFIKILWKI

SEQ ID NO: 10084 - protein, 572 aa, synthetic construct
MRKRIVGYARVSTEKQDLERQKILIREYCSNNNYDLVKIISEKVSGAKKDRESINELLAVTKDTADMVIVSELSRISREKECLTVLNTINDILENGLDVLFLDDTSKVYSAYTELNVIDIITLTVKAHSAAEERDKITARMRTGKITKLNINPYMYTGSLVPYGFKVIDNPDYKGQKCNIPARKLMVIDESKTKDVQFIYQLVLNGTTLRDAAEEVNKLGLRTQLNKPFCETSISKMIKNPIYNGRRRFKGLNLPLMDKIISDNDWNRAQICVSQNQLFKGKTTKNFNPLKGLVFCPCGYALMLHKMIRRDGSGYFVMTCCKKNDKEYRKKCRNSGIVSHVLLPTVWKCVKDTLLLSEYTTKTTSEVHRINGIIEGLEDRISGLIDEIDSHKKEMARLSKAITLVTVKGLITQYENEYVTEEAKVTEIEAKINNIRDEISNYKANITKINSITYNSQLINLTDQEKASVYQKVLSKVVYYSIDYFRGFIVISYKNGLENIIAINKTTTGYISPLPSSFSFNAETRKIRVTIAKKQTSIKEFSLSDIENIEYSFKELEANFNPQQWDIQSQIL

SEQ ID NO: 10085 - protein, 613 aa, synthetic construct
MYDIYNQKPTSRKVVIYARVSTEHEAQLSALENQKDWYKPILQQHPEWDIVKMYVDEGITGTSAKKRPQFMQMIQDASSGNFDLILTREVSRFARNTVDTLQYTRELKSKGVEVFFLNDNIKTFDGDGELRLTIMATLAQDESRKTSVRVKSGQQTSMENGVFYGNGNILGYDRVGKDMVINPEQAKTVRMIFDWYLDGWGMRKIQFELEKAGRLTAMGKSNWHVSNISKILRNSFYCGIITYHKEFTPDFLEQKKIRNFGDMEFTQVRGNHKPIITEEEYDQAQKRINSRRKTLSVDTSGQRMYGEKPPSDVWVKLLECECGHKFNRKMWHNTTEGKQYGYQCYSSIRTGTVRTRLNKGLPIDGICQTPMIAGWKLQMMAKYIFKNYLSDTDQVLSLAESMLEKHIDDEEEVCDNTDIINQKKEELQKLLKRLDNLIEMRADGELARDIFILKKESTENSISQLKKELAELEPSEIESEIDEVTSKEKITILKYALDQYTNFDSDADIPESVIEAFVEKIIARKDGFDWYLRFNPEESPMGCLVDGKRKRGAKVSAFCSPQHRQLLTKVGNNSFTKMYEYVINLADAKSYLYTYSTKHRIFRWEDINVSIFM

SEQ ID NO: 10086 - protein, 559 aa, synthetic construct
MLKTDDRVLRVAAYCRVSTDKTDQANSLESQQRYFNEYIKRNPLWELYDIYVDDGITGTSTKKRVAFNQMIEDAKGGKFDLIITKEISRFARNILDSIGYTRELKNLGVGVIFLNDNINTLDNDAEMRLAFFSTMAQEESRKTSERVKWGLRRQMEKGVVLGRDMLGYDVRNGQLIINEEGAETVRMIYHKFLDEGKGAHRIARELREEGVKTSTRMKDWSYTVILRILRNEKYCGDLVQQKTYTPDYLSHKKKRNYGEIETVEIHNHHEPIISRERFDAVQRELERRRPAESTVKAFANRYALSGKIVCGECGAGFVRRQKKRKDGSFNVKWVCAESQKNGSKHEEKDGTYTGCTTNSINDRDIKEILQSVVADTMEGRAEVTSYMLQTVEAVIEAVGKSNIIDHFEKEIERSKEKKKRLLDMCLNGYIEAKEYREACDEITMQIIDLEEKLNRGKSNQKIIEDKEKIINDIREFVENVSCGAEWNDTFYRNIVDKIVVYRDRKIDIHLKLIPGKWQAKILAGSGEINAYESEKSSCVCSTPMSVSNPLSSGYGIEYR

SEQ ID NO: 10087 - protein, 445 aa, synthetic construct
MKKEQKQQPMQIRQVKPDAPTPRRKRVAAYCRVSTGKDAMLHSLSRQISHYSAYIQRQPGWEYAGVYADEAYTGTKGDRPRFRQMLSDCRAGKIDLILTKSISRFARNTVTMLETVRELKALGIDVYFEEQNIHSMSGDGELMLTILASFAQEESKSVSDNCKWRIRKDFSEGKPMNLMLLYGYRSVDGQIVIDEDEAAVVRDVFRAYLDGAGSSRIAARLRETNTPRRLGGTWTGNHVVEMLTNEKYTGDALLQKTFVEDHLTKKQRRNTGQLDQYYAENTHSAIIDRETFERAQAILAQRREMINIRKPTTVRYPLSGKVVCGNCGAHYNRRTRSTGRNSIPRYTWQCVTYSSKGKRYCPASQIPEETLIALTCEVLDVEKLTEEAVDALDEIRVTGKGCLRFALRDGRVEERQWAWESRAKAWTPEMRRKASEQMKRRWRHD

SEQ ID NO: 10088 - protein, 527 aa, synthetic construct
MRMIPATVRRCAVARPLTERLRVAAYARVSTDDEEQQTSYEAQVDYYTKKIRENPEWIFVEVYADEGITGTSTKRRKNFNRMIDDAMAGMIDRIITKSVSRFARNTVDTLTTVRKLKEKGVGVTFEKENIDTLDSKGELFITIMSSLAQEESRSISENVTWGWRKRIADGKVSVAYSHFLGYEKGPDGNMQIVEEEAKVVREIYAMFLDGKTPSGIAAALTKRSVPTPAGKATWQASTVKSILSNEKYRGDALLQKTFTVDFLTKKAKVNEGEAPQYYVENSHPAIVSAEVFELVQAELAKRRQRGGRTSAVTPFSGRLVCGECGAYFGSKVWHSTDAYRSVIYRCNRKYEKKGAPCPSPHVREEELRTAFEKALGMLLERRSEIFSAYETIIANLTDTAQLDRELERAQARLDEAHQEMERMARRNAEIAQDQEEYNRAFDALSAKCSALKEKIGALKAQLAAKAGRRRKLEAFMAQLREKEALAPFDERTFAAMVDHIVVYPGEAKGAKKLIFRFRDGTEIPVDL

SEQ ID NO: 10089 - protein, 468 aa, synthetic construct
MLYGKPQNYAWYRARVILYIRVSTDEQARHGYSLGAQREALREFCDTFQCQIVAEYSDDGVSARKEIQRRPGLLRVLEAVKAGGVDYVLFIKLDRWFRSVREYYRVQDVLDAAGTNWKAILEDYDTSTTNGRLNLNIRLSVAQDESDRTADRIKFIFSERVKNGGAIFGSKSLPYGLEVRDHRVQIVEDQAVIVRAFFDHYEAAHSTRSTQAWLRDQYGVDLPRATIGRMLRNGLYCGQYRDNKNYCPAIISPDQFQRVQEILARQASGHTRQSKYSYVFTGLLRCPVCGCTLKAFPQFDYKWNRLYLRYRCTQHWIERRCSWKTTPWEPRLEGWLLDHIQPQLDAYVAQFDVQEAQRRQAVVDVGAIQRKLSRLQDLYVDGVIDRAAYDEKYRALIQQQDAAEAARAAQSAGRDLEPLRQLLAGDFRSIYATLSPQERHTLWASVIDHIVVKDGRYGHYDLDVIFLS

SEQ ID NO: 10090 - protein, 499 aa, synthetic construct
MIAIYARQSLDKKDSISIETQIELCKKEIGDEPYKEYVDRGYSGKNTNRPQFKAMMQDVENGVISKIIVYKLDRLSRSTLDFGELMDALSKHNVEFSSTREKFDTSTPIGKAMLNIIMVFAQLERETIQVRVQDNFRMRSARGAYDAKAPYGYAKTKVMVHGKAVSTLKPDKAYSLMVKKIFEQYAYTSTSLGYLARTLNQQGIKSANGAAWDSCKLSKLLCNPIYVKADAEVYKYYRAKGMEITNDIDDFRGQYGCVTYGQWDRAKNKFAQLSGLTLSIGLHEGIIDAKTFLACQYKLADNTQINNTGRGKHSWLTGLLKCGCCGKAMKVMTYKDTATFRCSGAMNTGLCSDSPSIGMHEIEEAVEREIFAHVARHQELVVQKRKEEDNKAHNYKIAIAKLDDQIANLITALADGTELTMKYINGRISELQKQRDILTAELQQHKNATKQQGDIKQFHDIINLWPGMTIPQKHEIAMMLIRRVEIQEDTTGIYWKYDL

SEQ ID NO: 10091 - protein, 527 aa, synthetic construct
MAKRKVTTIPATINKFTAKPVDSKKKRRVAGYARVSTDHEDQQTSYEAQVDYYTNYIKGRDDWEFAGLYSDEGISATNTKHRDGFNQMIADALAGKIDLIITKSVSRFARNTVDSLSTIRKLKEHNIECYFEKENIWTFDSKGELLLTIMSSLAQEESRSISENVTWGHRKRFADGKVSFAYSRFLGYEKGPDGTIVVVPEQAKTVKLIYKLFLDGMTMHTIAGELTKRGIKTPGGKDKWNQSTVRSILTNEKYKGDALLQKSYTVDFLTKKTKTNEGEVPQYYVENNHEAIIDPQIFELVQAEIAKRNKGKERYSGVSIFSTKVQCAECGGWYGPKVWHSNDKYRRIIYQCNNKFRNKTGCSAPHLTEYEIKEYFIKAMNRLITEKDEIIANTEMIRKMLCDNSELETKRDALQGEIAVTVELTQNAVVENARVAQDQDDYNKRYNALVERYDRLKAQYDEVSTAITDNEARYEQMGRFITVLKDQTGIITEFDDAIWGSLVEKIVVKSKEDVTVVFKDGTEMKVE

SEQ ID NO: 10092 - protein, 592 aa, synthetic construct
MRKISKIEPTMPAVAAKKKVAGYARISMESERMHHSLSAQISYYNALIQKKPEWEFAGVYADDGISGTGTAKRSEFLRMIADCEAGKIDIILTKSIQRFARNTVDLLETVRHLKDIGVEVRFEKENINSMSSDGELMLSILASFAQEESRSISENVKWGTRKRFEQGIPNGHFQIYGYRWEGDRLVVEPEEAKIVKMIFDDFLNGLSAESTEKKLEQMGVKSYKGQHFGNTSIRQILSNVTYTGNLLFQKEYVSDPITGKSKINRGEMPQYWVENTHEAIIPLETYKAVQAERQRRRELGVFANWSINTSCFTSKIKCPICGKNYRRSGKRQRKDPNEVYYIWICRTKSDKGAKFCSAKSIPEKKLKAVCTEALGLEVFDEMVFTEKIQQIIVLGEDTLEFHFKDGTLQQRKWASTAKTDWWTEERRKEWGERHKNKAQNPNRAFYNEFTGFIKCGNCGENYRSQGTTYADGTKERYWRCCKSCGNTGIKHSTMQELVCDVLGIEEFSEEQMDAVMEKAIVKEGTVTFYFQDGHTENRNYEEKKKGFPHTEEYKEYMRQVTKSRWTPEARQEMSKRVKQLRKERGDKWRKEK

SEQ ID NO: 10093 - protein, 519 aa, synthetic construct
MKTVTKIGGQLVFPTPKHKLRVAAYCRVSTDSEEQLVSLATQRKHYESYITANPDWEFAGIYYDEGITGTKKEKRPALLRLIDDCEHKKIDFIVTKSISRFARNTTDCLELVRKLLEHTVYIYFEKENLNTGSMESELMLSILSGLAENESVSIAENSTWSIQRRFQNGTFKLAYAPYGYDVIEGKLVLQPEQATIVKAMFDQTLAGIGTDAIAKELNAKKIPAKRGTHWTATTIRGILKNENYTGDAIFQKTYTDSHFNRHHNHGEKDKYRVEHHHEAIITKDIFEAAQQVIRQRGKEKGALPQNKKYQNRYPFSGVIRCHQCGATFKRRIQGGRNSYIAWCCATHVADATKCSLKYIKETALEYAFVTMMNKLIFGHAFVLKPLLASLRTLHSNDSITVIQDLDTKLAENAEHQKTLAYLLTKKYLEPAMYQKGNNELLQEAEQWQHQKDSLVDFLNDDNKTVHETRELLQYTCKAKMLTGFDEAVFQQFVEQILVYSRTNIGFKLKCGITLRERLV

SEQ ID NO: 10094 - protein, 521 aa, synthetic construct
MELQTRNVTIIPARTYLHRNHTEEKPKCRVAAYCRVSTDNDEQATSYETQIEHYTTYIHNHPDWKLAGIYADDGISGTNTKKRDEFNRMIEDCMAGTIDMIITKSISRFARNTLDCLKYIRQLKDKHIPVFFEKENINTMDSKGEVLLTIMASLAQQESQSLSQNVKLGLQYRYQRGEVQINCNHFLGYAKDENKHMVIVPEEAEIVKRIYREYLEGASMLKIARNLTADGLKNGAGHTKWRDSNIRQILQNEKYMGDALLQKTYTVDFLTKKRVKNTGIMPQYYVKDNHEAIIPRDIFLQVQEEMVRRSSIHLKNGRKLTYSSNHCFSQRIRCGKCGEIFRRIHWNNRGKKSIVWRCVNRVDHTCKCDARTISEPALAQVFLTAINQVLCEKKDFLTMLQHNIETVLNHNNDETLAAIDTRLEELQTQLVKLASSKAGYDDVAEEIYHLREQKQQALAKSANQDEIRSRIEDMAAFLKTQSTAITQFDDHLVRQLIETITVFEDSCTVEFKSGVTVDVEK

SEQ ID NO: 10095 - protein, 558 aa, synthetic construct
MKRVIGYIRVSTDNQDLERQRVLIRKYCENKGYSLLRIEEDYAISGTVSNRNGLNSILNITNSVADMVVVSELSRLSRQDDIFETLTQIHTIIRNVDLVILDEPDKVYEAGKTIILSDFLMLAIKAYGAADERKKIVSRMTTGKDSKVQAFPLMLTDSNIPTGFKAVPNPNYIKGATPKMLLVEDEERMQLVRDIFNYVANGLSLGKTAEKLNMLGYRTARNKPFYEQSIRTIINDSIYNGVRYWKGIKLELPVKFISDEIWNLAHKKVQENKNYSGEAQKHYNPLKGIIKCPCGQTSMYGRTSSCITYRCLDRIKMGIKSPCTNVGIKAETLIYAVWKDVRLRTLDETYQAKSNEKIAEIEAENIKLTQSIKEKDSEIAKLQSDLKTVIDNVMASTNITIVKALNGKADSIDSQIKSIEAEKTAIDEEIASNNRRIADEIKSQSRKELDSLSLEGKGEMFRELLSKVVYYSVSLNSGFIVITYKNDLETIIAYHNRNKPFLWALPITFRFNKVKRTVIVPTLLEQPKMTSFVLERIKEKEYTFKQLQESFNLEEYKI

SEQ ID NO: 10096 - protein, 527 aa, synthetic construct
MQENISINQIIMYLRKSRSDDPCMTVEEVLARHERQLQDYAVASFGSPVPEHHIFREVVSGETIADRPVMRQLMHLLESGSVRGVLVIEPQRLSRGDLEDCGRIINAFRYTNTLVLTPPKTYDLSDEYDRKFFEMELTRGNDYLEYTKKILNRGRLASVKQGNYIGSVAPYGYRKVKIGSGKDTAHTLEIVPEQADAVRMMFQLYLAGNGFTRIAAELDALGIKPLKSDHWSPAAISDILSNPVYIGMIRWNHFKTIKTMQNGQIVKSRPTNHGTDYILVPGKHPAILDQETFYAIAERRGKSPKVKRDHELRNPFAGLVYCGTVGCGRSMALKQFTNYRSKVPRRSESMICPNQRICHTKSVQYSAFVERVKEILSKTVDDFEIKLQNDDGNIVRIHENIIRNLEQDLVKLKDKDLRQKDAYEDGIYTKEEYASRNAKLQEQICEVQLSIQRAKDTMPPEVDYQERVSRFSDCLSKFEDTDISASEMNILLKSCIEKIIYHNSSESKPGIGRFVANPFELDIYLRL

SEQ ID NO: 10097 - protein, 464 aa, synthetic construct
MARSVTVIPARSQKVRTGHKAVQEKKIRVAAYCRVSTDQEDQLHSFEAQVEYYTKYINEHENYEMAGIYADEGISGTNTKKREQFKKMIADCEDGKIDLVITKSISRFARNTQDCLAYSRKLKNLGIGIIFEKENINTLDSTGELLFTILSSLAQDESRNISENCKWGIRTKFKNGEMHLNTFKFLGYDKDENGKLVINKEQAKTVRRIYRDFLIGINPAQIAKELTEEKVPGCLGQTKWYPSTVTGILKQEKHMGDALLQKTYTADFLTKRQVRNNGEIAQVYVKDSHKGIIDKQTWNAVQEEFDRREKFMESHGTDRYSYGVDCMPFCEKVFCGECKSLFTRHSWSSRGIVQWQCKNHRKDGKVACTNAYVDNADLENGFVKAFNRLVTDRDKHMERWQQMKSHGTPLEKIRAGQMMEAVGNEPLTRFVPEIAQLVLCEVTVLGAKKYEFFFLEGSRVKVSV

SEQ ID NO: 10098 - protein, 502 aa, synthetic construct
MEIQIREGNSRQKQKLKVCAYCRVSTDADEQENSLENQIRHYKEVITSNPDYEYAGVYSDFAISGFKEKRPGLQKMLADARKGKIDLILTKSVSRFARNTSIVLEATRKLKELNVGVFFELQNINTLSGEGELMLTILAAFAQAESESGSVGAKMVYRRKYEAGIPVQYLERSFGFKKDERGVYIADEEEAVWVRKIYDMAAQGYTLAAIKRYLNENNVKTVGGAKWLDSTVLRILENEIYKGDYIMHKYFVNEERKLVRNRGEVDAWYIEDDHEAIVSPELWQRAQDALEAKRDYLAEGSVIEEFTEENYPYMNKIFCARCGHPLYKRIYSNGNRLNWGCSGTKRYGKSFCEGINIPDGVLRGAWHFDENMYIGEKQTDKGKKEFTYLKEASWKRRHKKKEPEPIPENTETKYPYREKIFCGLCGSRLVRHVNTKNHKVIWVCNGRKRKGKDFCDGTRVPDTIIKGWGEIKKDIYIQRKDDKNGKKRYSYTSKKPKGADRA

SEQ ID NO: 10099 - protein, 573 aa, synthetic construct
MTEQNEKIVALYVRVSTGYQVDKDSLPFQKKELKAYCEHVLHIDKNRIEIFEDAGKSGKNTKRPAFERMMGKVKSGQVSHVIVYKIDRISRNLVDFSLMYDDFKYNNVTFISLNEQFDTSSAIGEAILKIILVFAELERKLTSERVTDVMIGRAQNGQWNGARVPYGWDWDEEKQCPVHSKKEAQYAIAMYEMYLKVKSTGKIRDYNNSHNIPTKRGGEWTSKTVTDFLRNPINKGAYRYNYRESARGRKKPNEEVVFIENAFPPLVEPETWEKVNKILDINRDKRNMGGLHPIEKNCNVFAGLIQCGICGTSYIVDKKDRRRKNGFTPSMYHCGAKTKAIHCQNPNVSDVKIGPFIINYIAAMVRVSKSKRKIKTPEALEEMLLADKVVFGDIAGLSTDSLNYTFEMITGKYTTDNAVWRTNPVNQSNKESNPEEIEKLKNEIKKYSRAKERLEDAYYFSDDGMSEKEYLEKKNKFDSMRVSAENKIKELTEASISSGIDEDSFIKSATSFLLAHKIYNESHIVYSDLAGVIEEETLKEFFNLILDYIVVVDRRIVEIVFSNGLSHQFIYRK

SEQ ID NO: 10100 - protein, 498 aa, synthetic construct
MQIEVRKADMGKEKKRLKVCAYARVSTEAFEQENSLENQVSHYTEMIQSNPAYEFAGVYADFGISGFKESRPQFQKMMQDAKNGKIDLIITKSVSRFARNTAIVLKASRELKERNVGIFFELQNINTLTEAGELLLTILAAFAQAESESASESSKMAYLHRIENGEVVAYLERSYGYEKDENGEYRAKEPEASVIREIYDLVIQGVNCTNIARVLNARNIQTVQGAEWTASTVFRIVENEIYKGDVLMQKTFIDGKRHQVQNRGEKAMYYAKDNHPPIVSEKTWEKAQRKLEDMRAERAEHSVIQEFTEENYPYMNHIFCAKCGWPLKPRVYSHGHRLSWDCSGQKRGTKKFCTGIHVLDNDLRKMEIEGNRYFSETVDKYGEVHLKHVGERTWKNKHKKKKFNHKELYPELNEENYPYYKRLYCARCGSRLGRYISHGTVRWICLNYKRKGQAKCPGVRIPDEIIKEWNLPDGKIYIMGKEDKNGEKHYSYTSESAL

SEQ ID NO: 10101 - protein, 465 aa, synthetic construct
MARSITVIPASQPYRVGGRTQQKTRNLRVAAYCRVSTDQEEQLNSFENQVEYYTKYIQDNPLYQMAGIYADEGISGTNTKKREEFKRMIRDCEEGKIDLVITKSISRFARNTQDCLEYSRRLKNLGIGIFFEKEHINTLDASGELLFTILSSLAQDESRNISENCKWGIRSKFKKGIPQVDCTKFLGYDKGDDGKLIVNQEQAKIVKRIYREFLNGYNPAAIAKMLMEDHIKTGTGREEWRSASVRAILKNEKYMGDALLQKTYTADFLTKKVKKNHGEVEQFYVKESHEAIIPKEQWEAAQLELERRDSYMQELGLTFYGYGSEVNPFSCRVVCGKCGAVCGKKSWKSRGVEFWQCNNRSKNHGVKGCASENLPHENLLKGFVTAWNQIVAEREQYLPKWEKKKKEGNPLEKLRAEQMIELTLQPPLTKMLPELGQMVLERVIVQGKEILFIRFLDGTEIKVRI

SEQ ID NO: 10102 - protein, 468 aa, synthetic construct
MQRNINNNMNDFTKKVEEVALYIRVSTEEQAINGDSLRTQREALTKFALANHYHIYGIYEDDGFSATNLNRPALQRLLEDVRKNKINRILLTKLDRLSRGVRNYYKVLDVLDAHCVFWQTIFEKYDSSTASGRLHINIMLSVAENESAQTSERIRSVFNNKIHQKEIISGKIPIGYKKEEKKLVVDEDKKALVIDAFNFYLKSGSVYKTFEYLALFDPSMNYPRTARLLANPLYIGTKVCKYGSIENYCEPIISKETFDEVQNLLKKNQRKRDNSDHEFLFSGLLRCNECGYKMSGKYCKNFPTNCTFYYLCSNARLKKKCNMLKQLNETKIEKKLLEQIVPEINKYIDNNNILEQEKVQIRDISKERDKVNKQLEKLRDLYVNDLIQIDHYEKQYKELTSKLDSLKEEEKPVEEKKTVNYDEFKSFLSRDFVTLYNSLSRTEKRLIWASAIDTIYIDDNYNLRIVFI

SEQ ID NO: 10103 - protein, 453 aa, synthetic construct
MECVAYMRVSTEKQAVEGNGLDSQKRDIENYCRKNELVITDWYIDDGYTGTNMDRPELQRLVNDCSRKRVSCVVAFKLDRLSRNMIDGIYLIEKVFQKYNVVFKCVHDSVSYNSPMEQAYTQMMAVFAQLDKNTMMLRMRGGMLERIKQGYWMGGGNLPYCYSYSKEQGILIPIPERAEQARRGLELFISGYSDAKIKEICGFKSELVTRSILTGVVNIGMIPYKGKIYQGKHEPIFDKDRFNLGLELRKSRCSAKTYCITEPNLLTGLCYCGICGCKMRYQKWGSEKHKIYCCSRNKSLSYLPNYNASCNNSLEWADEIEKQVEEEILKISLDLSSYKPKEKATKLEIMQSQLEKEQIKLKRLYNLYADGNDTVLEMIKELEAQIKEMKANIAVESKNAINTQKKEFVYENIKKLADIWDKVDKKQKNLILKTIIDKIVIVNGNIEIQLKNF

SEQ ID NO: 10104 - protein, 523 aa, synthetic construct
MPNTESFTVNEVLVYLRKSRSDSPDMSVEEVLRKHEEMIQQYASTHFCSPIPEKNIFREVVSGETIDSRPQIKNLLKMIESEQFKAVLVVEPQRLSRGDLEDCGRLINILRYTNTMVLTLTHSFNLQEEYERKFFEMEITRGNDYLEYTKRILKRGREASVAKGNYIGSVDPYGYKKTVIKKDGITCHTLEIIPEEADTVKLIHELYAYTPEGIGFTNIAHKLDAMHIKPKKAAHWTPAIISSILCNPLYLGMVRWNNRKVVKYINEGQLAKARPQNTEAKYYKGLHEPIITQELYDACMARRGTNPSLRRNKELCNPFAGLLYCGTCGHAMSLKIYKNHNSVSQMMLCNHQAYCHTKSVLYSAFLRRFISSMEDTLNDFELAQKSDDGRTQTISKTIVINLENKLKKLNEKDARQKDAYEDGIYSKEEFLKRNVRTQQDIASTIIALEDARAKKADIIDYEEKIRRFKDCLHALNDPELSAAEKNRFLKSCVDKILYYNNMESKAGIGRYIENVFSLEIQYK

SEQ ID NO: 10105 - protein, 499 aa, synthetic construct
MNVVLYMRYSSDRQTEQSIEGQKRVCMDFCERQGYNVVGEYIDRATSAYKETAKRTNFCRMIRDSSNGLWQGVVVYKLDRFARNRYDSATYKVRLKKNGVKVISATENISDSPEGVILESVLEGMAEFYSKELSQKVSRGLNESAHKCNSTGGAIPLGYKTVDKKLTVDEPNAQIVKEAFDLYAGGATISEICEKFNSQGYRTKKGTEFNKNSFKSMFRNEKYIGTYTYKDIRIEGGIPAIIDKETFETVQKKLSANAQAPARGKARVNYLLSQKLFCGHCGANMIGDSGRSKTGETYYYYSCSTRKRFHSCKKRTIRKDLIERIVAENAMRLITPEMINTIADMAIKCNREDIESDAIIPALTADLKEINTSIKNLLKMVERGVESETLDLRLKELEKRKKDTESRLDAAKSEYLTLDKTVIVGWLSQFLSGDIEDEDFRRHLIDTLINSVTVWDEPDGGYKITTVYNLKGNTQTYRVNADGSSDMKRNSPPKKRQFS

SEQ ID NO: 10106 - protein, 593 aa, synthetic construct
MKKFPIDLSCLTEEEISQFQEDPYTLYNGDQDVALYLRYSSTGQSDQSIEGQLRDCRAFCKANHYRIVAIYVDRATTARKDVEKRVHLMEMVADSAKQNWEYVIVWKLDRFARNRNDSAIMKMRLRKNGVKVLSATEYLTDSPESIILESVLEGMAEFFSAELSQKVTRGMRESALKCHSVGGHIPLGYKVENHKLVVNPDTAHIVQEAFSLYANGESVADICRKFNSAGYKTAKNTEFNRSSFKAMFRNTRYIGTYTYKDIVIENGIPAIIDKELFETVQRRLSKTATAPARGKAKVDYLLSGKLFCGHCGASMNGESGAGRHGKVYHYYSCYTKKRKLGCDKRPLKKDYIEGIVARDALNLLTDQLIDEIADMAIRQSEQNLINDTHIPQLTAQLSEVEKSIMNITAAIEKGIASETLMNRLVQLEHEKKTLNKEIKAEEKFVYRIDRDQIVFWLSQFKYGNIEDENFRRRLIDLLVNSVTVWDEPDGYKITTAYNLTSCKTKTFRVDKNPAAEEATGFDFGESECTKSPRNRLISRTFAFHKLSFLDTAFFLTQTLTPTGAGSGKHQTARDRILPMVWAAFSWASVVTWA

SEQ ID NO: 10107 - protein, 575 aa, synthetic construct
MNKIIDTLNTQKAAIYIRVSTHHQIDKDSLPLQREDLINYAKYALNIDNYEIFEDAGYSAKNTERPSYQYMMSKLRTGEFSHLLVWKIDRISRNLLDFATMYEELKTLGVTFVSKNEQFDTSSAIGEAMLKIILVFAELERNMTSERVSAVMLSRATNGQWNGGRVPYGYNYDKSTKQFSIHPIEGNHIKKLYDLYLETQSMLAVAKYFNEHGIKTKTGNNWSPTTIGKILASRFYLGEYQYNLHKDGIGGAGVASLKPEDEWITVKDHHPAIIEIEQWDKCAEIRAYNHRRSNAPKRYKRKNTHIFAGLIICGKCVSTYQATIDRARTGGYRPSIYLCSRRKQYSDCQNKYMSDITLGPFILNYISNIIKANANMGKTTTPDMFKKKLLRGDVFKDVKDIAPSGLNEMYNMIVSKKFNSDPFTSTVHRDESQPDFASERELLISEKRKYLRALDRLKTLYLYNDNAMAEKDYIIENKNILDNLKRVDERLEEIEKNSSQNFTITDSEFIEKASYFIISQELSNQRYINFNSLIQHIDTNVLKNFIQSVIKKIVVLDGRITSIQFKNGIEHDFLY

SEQ ID NO: 10108 - protein, 501 aa, synthetic construct
MEIQIREGNGRQKKKLKVCAYCRVSTDADEQENSLENQIRHYKEVITSNPDYEYAGVYSDFAISGFKEKRPGLQKMLADARKGKIDLILTKSVSRFARNTAIVLEATRKLKELNVGVFFELQNINTLSGEGELMLTILAAFAQAESESGSVGAKMVYQRKYEAGIPVQYLERSFGFKKDERGGYIADEEEAVWVRKIYDMAAQRYTLAAIKRYLNENNVKTVGGAEWLDSTVLRILENEIYKGDYIMHKHFVNEERKLVRNRGEVDAWYIEDDHEAIVSPELWQRAQDALEAKRDYLAEGSVIEEFTEENYPYMNKIYCSKCGYPLYKRIYSKGNRLNWGCSGMKRYGKSFCDGINIPDGVLRSAWHFEENTYIDEKASDKGVKEFSYLKERSWKRRHKKKQPPSIPENTEAEYPYREKIYCALCGSRLVRHVDTKSHKVTWVCNGRKRKGKDFCDGTRIPDTILKGWGEIKKDIYIQRKDDKNGKKRYSYTSKKPSGIGA

SEQ ID NO: 10109 - protein, 521 aa, synthetic construct
MKKITKIDELPKSQPSKSKLRVAAYARVSTDSDDQLVSLKAQREHYENYIKSNPEWEFAGLYYDEGISGTKKEKRPELLRMIRDCESNRIDFIITKSISRFARNTTDCLELVRHLMDIGVYIYFEKENLNTGDMESELMLSILSGFAAEESASISQNTTWSISKKFQNGSYIIGTPPYGYANINGEMVIVPEEAEIIKRIFAECLSGKGGSVIAKGLNRDKIPARRGNHWSSGTVIDMLRNEKYKGDVLFQKTYTDSNFNRHINNGEKDQFYCKDHHEPIISREVFSKAQKLIIQRAKSMSKTANKKAYQNRYVLSGRILCGECGSKFKRRTNYSVGRSYIAWSCKGHIEDKDSCSMLFLRDGEIKATFSTIMNKLAFSKKLILEPLYDSINKIDEECDLARIDAIDKRMEQLTEERNTLIGLMTKGFLEPALFNKERNVLDKEIKNLTAEKANLVMSFTSGSSQADEVKALLDYVSADKFDGNYTDEAFEKFVENIIVNSRDELTFKMKCGLSLIEKVVR

SEQ ID NO: 10110 - protein, 520 aa, synthetic construct
MAGKNITVIPARKRVGSTAAKEKIKKLRVAAYCRVSTETEEQNLSYEVQVAHYTEYINKNTEWEFAGIFADDGISGTNTKKREEFNRMIGECMEGNIDLVITKSISRFARNTLDCLKYIRQLKEKNIAVYFEKENINTMDAKGEVLLTIMASLAQQESQSLSQNVKLGLQYRYQQGKVQVNHNRFMGYTKDEEGNLIIVPKEAKIIKRIYREYLEGKSLAGIGRDLEKDGILTAAGKPRWRPETIKKILMNEKYIGDALLQKTFTVDFLTKKRVKNEGHVPQYYVENSHEAIIPKELFLQAQEELHRRNNIYTGADKNKRLYSSKYALSTITFCGDCGDIYRRVYWNIRGRKEFVWRCVTRIEQGPETCKNRTVKEGDLYDAVMTAINKLLAGGDNMIRTLEENIHAVIGDTTEYKISEINTVLEEKQKELISLANKGKDFESLADEIEELREKRQTLLVEDASLSGENERINELIEFIRTNKYRTLLYDDTLVRKIIQNVTVYDDHFVICFKSGIEIKV

SEQ ID NO: 10111 - protein, 509 aa, synthetic construct
MYVIYLRKSRKDSDLEALGIDVLKRHEETLLELARARSLPIGAIYREVVSGDSIDARPEMVRLLSEVESGIWEGVLVMEVERLARGDTIDQGRVQRAFFYSNTLIVTPGKTYNPAIENDNEYFEFSLFMSRREYATIKRRMQAGRIRSVKDGYYVGNIAPYGWRRVKADDCKHFTLVPDEKENPVLKLMYDFMGNKKYGFQKTCSALTGMGIVSRSGKPFNPATVKTIISNPVNIGMLRWNYRKSQKAIVNGKIATSRPKADDYILVKGKHPGCISEDLYYRANSVSSSMTAPVKRSCRIQNPFAGIVRCSCCGRVMVRKKMSAKQPRDYLICQYAGCTTVAIELEELENAVLEWIRNYIADYKVNNFESADDSEQESLRSILANLEKEKETTLKQRGSLFDLLEQGIYTKEIFFERSTALEDKIKDFDKKIESVNADIVRLDLSKKNRSTFVPKCQELLNAWDTFDAADKNTALKNVIERIDFTKTEKNARGQRHSSFSIDVFPRISR

SEQ ID NO: 10112 - protein, 520 aa, synthetic construct
MKKITKIEGNLANSFIKAKMRVVAYCRVSTDSNEQLVSLQAQKAHYETYIKANPEWEYAGLYYDGGISGTKKENRSDLLRMLSDCETGRIDLIITKSISRFARNTTDCLEMVRKLIDLGVHIYFEKENINTGLMESELMLSILSGLAESESISISENTKWAIQRRFQNGTFKISYPPYGYQNIDGQMIVNLKQAEVVKYIFAEVLSGKGTQKVANDLNQKGIPSKRGGRWTATTIRGILTNEKYTGDVILQKTYTDSHFNRHTNYGEKNMYLVENHHEAIISHEDFEAVDAVLNQRAKEKGIEKRNSKYLNRYAFSSKIICSECGSTFKRRVHSSRRKYIAWCCSKHISNITECSMQFIRDEDIKTAFATMMNKLIFGHKFILRPLLDELRSKNNAKSFRRIEELETKIVNNMEQSQVLTGLMAKGYLEPALFNKEKNALEAERERFLAEKDQLTRSVNGNIAKVDEVDRLLKFATKSKMLTAYEDELFENYVEKIIVFSREKVGFELKCGITLKERLVN

SEQ ID NO: 10113 - protein, 594 aa, synthetic construct
MPKISRIEPTVPAIKQLKKVAAYARVSMQSERMMHSLSAQISYYSKLIQKNPDWEYAGVYADDFISGTNTVKRDEFKRMLADCEEGKIDIILTKSISRFARNTVDLLETVRDLKAKGIEVRFEKENISSMSGDGELMLSILASFAQEESRSISENIRWATKKRFEQGIPNGKFRIFGYRWDEDQLVIEPSEAAIVKRIFQNFLDGKSRLETEKEFAAEGITTANGCRWVDSNIKVVLTNITYTGNLLLQKEFIEDPITKRRKKNRGEMPQYFVENTHEPIIDMETFQYVQDEIARRKELGALANKSLNTTCFTGKIKCPHCGVSYMHNKRTDRGNCLEFWCCGSRKKKGGHCGVGGSINHKNMVKACTEVLGLEEFDEEIFLREVDHIDVPKRYVLEFHMTDGRVITKDCPNTGHKDCWTAEYRAKTSAKRRKTGTNCKGSSCFTGKIKCKNCGCNFHRATQPSATAESGKVNYWRCSEHSNGCQTAGLREDVLMPLLADALGMAEFDDGLFRKIVDYISVLTDKDLEIHKKDGTVTAVIYAPPAPKRLPRTEEQKEHMRSLMKEKWTPERKAEMSERMKQMRKERGENWRKEK

SEQ ID NO: 10114 - protein, 527 aa, synthetic construct
MAQRKVTAIPATINKFTATPVNSRKKRRVAGYARVSTDHEDQVTSYAAQVDYYTNYIKGREDWEFAGIYTDEGISATNTKKRDGFKRMVADALAGKIDLIITKSVSRFARNTVDSLTTIRKLKEHNVECYFEKENIWTFDSKGELLLTIMSSLAQEESRSISENVTWGHRKRFADGKVSFAYSRVLGLEKGPDGNIVVNQEQAKIVKLIFRRFLEGMTPHSIAAELTEMGIKSPGGKDKWNGATVRRMLSNEKYKGDALLQKEFTVDYLQKKTKKNEGEVPQYYVEGNHEAIIEPSVYDLVQVELAKRSKKSETRYSGVSIFSNKIKCAECGSWYGSKVWHSNDKYRRVIYRCNHKFDGNRKCETPHVTEEEIIAAFIKAMNILITEKDEIIENIQLIRQTVCDVTALEQEQDKLRSEMEIVVELTQSCVAENARTAQNQEDYQKRYDGLVERYEKVKSRYDAIVEAIEKKQAHYEKLGIFIDTLEKHGEPIMDFDAEMWGSMVEYITVDKNKNMTVTFKDGSEVQA

SEQ ID NO: 10115 - protein, 520 aa, synthetic construct
MVKCMKSVAERAVPAVIYARYSSSHQREESIEGQVRECREYAEREGYSVLQVYADRAITGRTDERPEFQRMLADASKGVFQAILIYKYDRFSRNRYSFAVWETKLKKHGVKVISARENVAEGAAGIVLKSVLQGMAEWYSVDLSEKVTRGMKENALKAKWTSGTVPFGYTRDAEQRLIIDPERGEYVRQIFEKVLAGEKYVDIASWLNMLGVRTARGAAWNKSSFTWMLKNVVYTGLFRWKDIEIKNAVPPIVSKELFEAVQRKLKTYGRRGINVQKSDKYLLTPNIICGECGGPMHGMSGKSRSGELYYYYACANKRAKRTSCSISPLNRDELEQAVYNCAREVLLHEKNIKLIAEQAEAVAEAQVDNELAEMKAERSRVKKSIANYAAAIANGATSGTIIELINAAEAKAAALDEAIAERELVAAPPKVSKEAIEYFLRNIAAAPDDKMKEKVISTMVNSVVVERVPDEGTKKDSDEKYSITVRFNFTDTPQLSALQSFDVREKSKMVTSAGLEPATF

SEQ ID NO: 10116 - protein, 463 aa, synthetic construct
MARSVTVIPARNRQASGHRAVPQKKIRVAAYCRVSTDQEDQLHSFEAQVDYYTKYINDHENYEMAGIYADEGISGTNTKKREQFKRMIADCEKGKIELVITKSISRFARNTQDCLMYSRKLKNLGIGIIFEKENINTLDSTGELLFTILSSLAQDESRNISENCKWGIRTKFKNGEMHLNTFKFLGYDKDENGKLIINREQAKTVRRIYRDFLWGLNPAQIAKELEEEQVPGCLGQTKWYASTVIGILKQEKHMGDALLQKTYTADFLTKRQVKNNGEVAQVYVKDSHKGIIDKETWNAVQEEFDRRKKFMQRHGTDRYSYGSECYPFCEKIFCGECGRLFTRHSWKSRGIVQWQCKNHRKDGKVACTNAYVDNANLENGFVKAFNRLVSEREKHMERWNAMKADGTPLEKIRAVQMMEATENGQLQKYVPEAAQLVLEEITIFGAKKYEFAFLEGSRVKVSV

SEQ ID NO: 10117 - protein, 518 aa, synthetic construct
MQYEEYLIYLRKSRSDASLEAMGVDVLERHEQILLDLAKRMNLSIGGIYREVVSGESISARPEMQRLLSEVEAGRWKGVVVMEVERLARGDTIDQGIVQRAFQYSGTQIVTPAKTYNPNNEFDEEYFEFGLFMSRREYKTIRRRMRAGVTAAVKEGKWPFNKAPYGWQRVKLEHARGWVLAPDPEEAPVVKLIFQLYTGPDRIGVTNICRYLDNRGVKPRNGDTWTECSIMGILRNIVNDQRVGIGRRKIVKQVQNGSVSKVRPHSDYDFTAPGLQPRLIDHDVFLEAQTHLGKNSHKLPESYGIKNPLAGIVVCSCCGKKMMRRPASKTPGGAPYDVLKCNTRNCPTIGSALDLVEREVIQALSDWVAGYQLDPTLEVENKVPEKEQLLSSAISNHDVLLKQNGNLYDLLEQGVYTTEIFLERSHELQKRIKESEAHIEVLKKDLEYEKEKIANVENFIPSCKELLSCYWELSAQDRNKALKMLLESVEYTKTKRNQKGDKDNPTFTLNLKPRIPRI

SEQ ID NO: 10118 - protein, 463 aa, synthetic construct
MPSKIERCAIYIRVSTAEQMMHGKSLEAQKQYLTNYAKEHNMTIVGVYADEGKTARKELKKRKAIHSLLEDVKAGKIDVIIFWRIDRWFRNLSDFYKVQEVLDDNNVHWISTSEPGINMETRDGRLQLNVVLSIGQNEVDTTSERIKFVNEASIRQGKLIFGDVNMGYGYKSGIIDGVKRMVKDPDREDTVNAFYRFFFKHHAKGLSMRYIQENYDPDFTWANMRTLLSSEFYKGTYRGIPYCPAYLTESEWNNLQEIQNANVKRAPSGRIYLFSGMINCPICGRRLSARGGSSIINRKTGAKKVYCYYRCNKAFIDHKCSYRHMVSQNLIERYLIDHLEYEYNKFKIKCEKIEKDQEKKKKVQTPEKLQKELERLNLLFQKGRIEWDYYSKEYDRIENELNELLNAAPELEPDYAYLEELLNTDFRTMYYNLTQENRRAFWHSIIREIHLNTDHTVDSVDFL

SEQ ID NO: 10119 - protein, 483 aa, synthetic construct
MRMAAYCRVSTEKEEQLSSLENQREFFEQYADKEGDTLVKIYADEGISGKSMNKREAFAQLLEDSKTGAFDYVAVKDISRFARNTSDFLYGIRTLRSNGVDVRFLSNNQTVIGESEFVLTVFAALAQEESSNLSKRVIFGKRQNAKKGRVPNVVYGYNKIDTYTLEINEQESYIVQLMFKWYIEGEGTRRIAIKLNEMAIPTKKQAKWIPKTIRRILQNPIYIGKIINNKSVTKDFLSGTREAIPPEEWYIHERPELRIISDDDFELVQHKIKERQEQYKNNNPGNRFSNRHLFSNLIKCGECGKSFTAKVYQWKNRYVRYRCCVHNNNGNAHCTNSVTVDEQELLNEVKAYLLTAIEDKKAFADKLMKQYQAQTTNVDVSKLTDTRQSLEKRRSKFKEMFAADIITMDELKKEMSAIDEGMRSVDAELKIYDEIQKKATHIDDIHKDIEQILMQNEYTNDDMRRIIEKIVVYPDKSVEIFMK

SEQ ID NO: 10120 - protein, 444 aa, synthetic construct
MAAYCRVSTDQEEQLLSYENQVNYYTKFIKDNPLYTFAGVYADEGISATNTKKREEFNRMIADCRDGKIDMIITKSISRFARNTLDCLNYVRELKELGIGILFEKENINTLDAKGEVLLTILSSLAQDESRSISENSTWGIRRRFETGKHKMSTKRFLGYDSDEKGKLIVNSRQAKIVVRLFQEFLDGKTTDYIKRIFEREGMVNWDGSTKWHATTMNSMLQNEKYKGDALLQKSYTVDFLTKKRAKNSGEVQMYYVEDDHEAIIDPRIWECVQLEFKRRKRYLQEHGTNSYSHNPETNPFASRIICGTCNKVFSRKGWRSSAGYDRKVWQCSERYRVKGVQGCDNRHVEEETLVKAYLMAWNALVENRESFLEQWKQQMQGEDLLAGYRAEKFVEYTKDAEPLKEMDTDFMLKTLDHIKVFEDGTLLAVFLDGSEIECRSEEV

SEQ ID NO: 10121 - protein, 425 aa, synthetic construct
MRIRIITAVPTAEKKKRVCAYARVSTDSRRQEESLENQTATYERLIRSNPEYVFAGVYADQGISGYCENRPQFQKMLERARAGEIDLIITKSISRFARNTVTVLKVARELKELGVGIFFEEQNINTLSGDGEMMLAVLASFAQEESRSMSENNKWSIKKKFERGEVMITASRFCGYDKNEYGDLVVNGKEAEIVRLSFELYLMAVGSTRIASLLDYLGVPTVTGGTWEGGTIGGMIANEKYKGDFLLQKYYTPPDKRNFTRKNRGEVQSYYISENHEPIVTPEVWQQAQEMRDYRKKIRNIGQDGTRKFQNRYPLSGMLICPYCGKTLRRRQVYKKKIQWLCSTYIEHGKQACKGIRIDDAELAGLHITEQTVVEEVLKDGKKHYRYTSKAEFDFTGESQPESPEDTDGSVLPGVNRPRRTVIKL

SEQ ID NO: 10122 - protein, 543 aa, synthetic construct
MAKKRYDLRPVRTVCIYARYSPGSRQTDQSIEGQLRVCQEYAEQHDYRIIQTYADKHKTGTNDDREAFRQMIKDSEKGLFDAVLVWKSDRFGRNMEDMVLNEMRIKRNGVSLISCTEPVADGPLGGMQKAMLMGMAEFYSATNAENVRRGLLESARKCQITSGAIPFGYKAGEDKRFYTDPINAAAVLEIFQRYDGGELLTHIMDDLNKKGIRSHKGKPLTRSSMYSILRNERYTGVYIYADIRVEGGMPQIVPKDLYERVQIKLGKNKHAPARAKAAEPFILTTKCFCGQCGGPMAGESGTSKTGAKHYYYGCVHHKNSRDKSKACQKKPVRKDFLERLVIDTTLDVALHKENIQSIAADLCAWQQRQKDTAILDGLKSRRRECEKAIGNLVAALEAGAASPTIAARVRDREEELENIKFAIAEQELVQEKFDEKKIMYFLSKVPEGNRTDINYMQRIVDTFINSVFVYDDRVVICYNFDGDGSKITVNDVDKAMQEAEDRENRQITQEAPGQGGSCVESDDSKCSPYGGLVHHQGLEPGAR

SEQ ID NO: 10123 - protein, 510 aa, synthetic construct
MSYFIYARKSRKDADLEALGIDVLERHITTLLELAKTLSLPIGAIYREVVSGDSIDSRPVMSQVMAEVESCMWDGCLVMDVDRLARGDTIDQGRVQRAFFYSNTKIVTPNKTYDPANEYDNEYFEFSLFMSRREYATIKRRMQRGRERSSSDGYYVGNIPPYGWRRVIAPDGKHFSLAPDPTESPVLDLMYDLCGNKQYGYQKACTHMAEMGILSRSGRPFTPSTLKGIISNPANIGKVRWGHRKTVRTVKDGKISRSRPHSSDYILADAVWPPRISADLFQRANQPKGSCSAPVRDDRPIQNIFAGLVRCSQCGRLMVRKKAHTKTPYDILICQYTECPTVGIRIDELELALLEWLRNYVDKYELTDALPEDAENVAAKEAIVKNFEKEHETLLKQRESLFDFLEQGIYTKEIFIERSNALEQRVKECMEHIISAQNDLHATLALQANRKNFVPRCKNLLGEWGKLTIPEKNSALKVLIEKIMFTKTKRNKKGQDRSDFEIDVFPKVPK

SEQ ID NO: 10124 - protein, 415 aa, synthetic construct
MGEMRVIPARPARPQRLRVAAYARVSTEHERQLSSIAAQVSYYSHLIQSTPGWDYVGVFIDEGITGTSTKHRDGFKHLMDTAKAGGIDVILTKSISRLARNTVDLLATVRELKDLGVAVRFEREQIDTLSADGELLLTLLASFAQEESRSLSQNVKWAIRNRYKNGGTNSFVVYGYSWANGEFTIIDEEAKIVRLLFANYLDGISPEKTATMLNAEGKRSRGGGRFYGSVFRRMLENERYKGCQMLQKMYRPTIQAPTRSFNDGELPRYWVEQALPAIIDQAMFDAVQAEIAHRREAGPAATPSKNTGVFTGRICCGACGKNYQRKTRTYKSGTSYKFWRCWSACTGNGNPCGGHNLRESLLEQACADMLGTQGFDPVHVAEQVVMIEAVEHQLTFHLADGTMTPVGLTSEGRLA

SEQ ID NO: 10125 - protein, 517 aa, synthetic construct
MSRTVTAIPATKKLGNLTASSGVLARKRVAAYARVSTEMEEQTSSYEAQIDYYTTYIHSRNDWQFAGMYCDEGISGTSMKRREGFQTMIDDALAGKIDLILTKSVSRFARNTVDSLTTVRKLKDAGVEVYFEKENIWTFDSKGELLITIMSSLAQEESRSISENVTWGHRKRFADGKIMVPYASLLGYKKGEEGNLAIDETQAPIVRRIYARFLEGTTPQTIAKELTADQIPTPRGKQIWSPSTVRSILTNEKYKGDALLQKSFTTDFLTKTMKVNEGEVPQYYVTGNHEPIITPATWDVVQAELARRAGKGTSNTHPFANKITCSECGGSFGRKVWHSTSKYRRYIWRCNNKYKKIHRCATPHVTEEKIKNAFVAALAERVTNTDVLDDTMCLLDETVYDTRELETQQATLGERIEETITLMNQLITTAAATAHDPDDYDRRYHQLETRHRQLETEHQHITDKIDDLRHRRAQAIKVHFYLATLPPLAYSDQAWNTLVDHAIINANGAISVIFKDE

SEQ ID NO: 10126 - protein, 489 aa, synthetic construct
MLKTIIYARYSSDKQNEQSIEGQIHECEQFAKTHDMVIIKHYIDRALSGKTDDRPSFLQMIKDSSSGLFDAVLVYKTDRFARNRYDSAVYKAKLKKNGIKIFYAKENIPDGPEGIILESMLEGFAEYYSAELSQKVKRGIKENIRKGLSFGGACPFGYKIVNKKYVIDDEQAPYVKKIFEDYAKGRRAIDIFNELNTLPNYAGKGRKWNRSSLNRMLTNKKYIGIYELEDVCVKDAIPPIIDEALFNKVQSRILFNRRHTTRAKVNYLLSGKLFCGLCEHSMTGKTGTSKTKVKYHYYVCSHRHCKQKKYRKELLEDIVIQYTVKDILNPKHFKMIAKKCLEIQQADNKTNDMLLMLKKQLTAIKTKINNLMNAIEAGIITTSTKDRLEQLEQEKYKLELEISTQQLNSNRLLSEKQIIYMLNVFYNKRVDVSFYNQIIDCFIYKIYIYSDKICIVYNLNNSDKDVTYSDINELYKSSHLNSCGSPYDL

SEQ ID NO: 10127 - protein, 543 aa, synthetic construct
MPAALAYCMASVNLVFAWADLRIYYTIISLVLERTDYIMTKNAVIYARFSSDKQREESIDGQIRECRAFAEANEINIINTYIDRAMSARTDQRPSFLQMVKDSAKHLFDYVIVYQLDRFSRSRYDSAIYKHRLKKNGVKVLSAKENIKDDPSGILLESVIEGMAEYYSAELSQKVKRGMTENLIEGKWIGGIVPFGYELTSENKLAISPATGHLVSEIYDKYLSGVKTTDILSKLNSLGIKTQRGCNFTRNSLNRILKNQIYTGTFTWAGTSYPDYAPALITQEQYTAMHNLFESRKRKSNTARRVSPQYALTGKIYCGTCGLPMTGYCGKSHTGTTYYYYQCSSKNNKSEKAARSQIACDAKNISRDKLEKLVLDTTISILKNKDAVKCIADQCMAIQKAELEHKPAEQLRLESQIKEIEKRLKNSVKAVENGLISQTITNNIETYEKQLTELNAQLDGVKLDTHIIPITEEAVIYYLNQLTERANKKDGYSLDTFDDFIRRVVVTGKRVDIYYNYTAVPNILENPAVKMLRGSSEDCLVTR

SEQ ID NO: 10128 - protein, 521 aa, synthetic construct
MKKVQVIPATLQNYTEKPIHSQKKRRVAGYARVSTDRDEQLTSYEAQVDYYTNYIKGRSDWEFAGMYTDEGISATNTLHREGLKSMIRDAMDGRIDLIITKSVSRFARNTVDSLTIVRKLRDKGVEIYFEKENIWTLDAKGELLITIMSSLAQEESRSISENVTWGHRKRFADGKVSLAFSHFLGYDRGADGNLVVNKEQAETVKLIYRLYLSGYTFHSIAKKLTEQKIPTPARCKIWRPNTVRSILMNEKYKGDALLQKKFTVDFLTKKSKRNEGEVPQYYVQNNHEAIISPQVFDLVQEEMRKRKNSKIRHSGISIFSSKIKCGQCGSWYGAKVWHSTDKYRQTVYRCNDKFKRHCKTPHLTENEIENIFVRAVNQLIKNKDEILSNIILLKIRLVDTTDLEKKRNALEFNMNLLAERVQQLISENACLTQDQVQYNQEYSELVNRYEKIKIKYDQICDTMKQRTSRGQQLERFIENLQKQEFISIFDKRLWCSLVDFITVNEKDDIWVTFKDGTEIKA

SEQ ID NO: 10129 - protein, 547 aa, synthetic construct
MEKKMWKIEQKVTEISKRKRVAAYARVSVESERMQHSLSAQISYYSSLIQKNPAWEYAGVYADYGITGTKIIKRKEFQRMLADAEARKIDIILTKSIQRFARNTVDLLKTVRHLKEIGVEVWFEKENIRSLSGDGELMLTILASFAQEESRSISDNIKWRFQKKYEKGIPHAKFFIYGYRWKDGELVIQNEEAAIVRRVFKGYLAGKTRRDIQRELANIGAHTMYGNLFQDSTIKQMLQNPVYKGNLVIQKTFVIDPITKHQVINHGEKDKYVVENHHEAIIDAATFNQVQEEMAWRKEARKQRGGYARNFLNTFCFTGIIKCGICGKSYIHNIRKYKGKPSEYWSCLSNKGKAEKRCGAYGAIPQTALERACMSALEMAIFDKTEFLQRVEKIVVPAYHSLLFYLKDGKVIKQPWKSTALKDMWTEKRKEQVRQRMVQYRKSGLSSRYSAFSERIFCPTCDVKFVRCLKTRKNRRVAYWRSRNKHKCVHTSGIQEDWLKKTAAALLGESTFDEQKFREQVEWIEVQKNRTLLFRFYSGENKEVQLP

SEQ ID NO: 10130 - protein, 527 aa, synthetic construct
MNTAARTVTVIPPSITPMTHLTNTQLYKLRVAAYARVSTDSDEQFTSYEAQIDYYTQYIQRNPEWTFVKVYTDEGISGTNTKRRAGFNEMIEDALAGKIDLIVTKSVSRFARNTVDSLVTIRKLKEKGVQVYFEKENIYTFDGKGELLLTIMSSLAQEESRSISENVTWGQRKRFADGKVNLPYKNFLGYRKGADGFPEVVPEEAVIVRRIYSRFMEGLTSGAIAKELIADGIPTPSGKLRWQSSTVESILKNEKYKGAALLQKCFTVDFLTKKKKINEGEVPQYYVEHSHEPIITPEEFDKVQTELARRKQISRQYSGKGIFSSRIVCGGCGSYFGSKVWNSTSKYRRVIWQCNGKFKGEHKCETPHLDEETIKARFVTALNAIIESKDNILEDCRLMQATLTDCTGIDIEIESLLEEIDVVTELTMRCIAENSQTAQNQEEYAARYNGFVERYEKAKARLEQLRTTKAAREAQSEAIGAFMFEVQELDALTEFDEKLWLTIIDTVTVHTDGRMAFKFQGGTEIEA

SEQ ID NO: 10131 - protein, 527 aa, synthetic construct
MEERAKAVIYARFSSDKQREESIDGQIRECTAYAESQNLEVIGAYIDRALSARSDNRPDFLRMIADSARKTFQYVIVYQLDRFSRSRYDSAIYKNKLKKNGVRVLSAKEHIGDDPSSIILESMLEGYAEYYSAELSQKVKRGMTENILEGKWVGCRVPLGYKLTADKKLQIVPRDADAVRLIYKMYNSNERIIDIVRYLNAHRYKTAAGRTFNRSSLTKILGNKIYIGTYTWDGHVIEHFAPPILADGVWEAAQKRTKQHKQHPRPKRRSADYALTGLIYCGECGNPMTGQSGHSKNGSAYHYYRCSTKNNYHSRGKKQHINCKSRNISREKVEDLVLDATVRILSNPKSIKLIAKQAADVQRIDPTAQEQVRIAQERKTIQAKLENSIAAVEKGLCSKTIAENIERYESQISELDQKIDELKFAYAPIRIDAIAVEFFLKSLLDKKKDHDKYRLDMFRTFIRQVIIYSDKVEIRYNYTNCPPILKNPVSIALTGSPECSDKAFMVRLEGFEPSHPVPETGALSPEL

SEQ ID NO: 10132 - protein, 499 aa, synthetic construct
MKTAVIYARYSSDKQTEQSIEGQLYDCYNYAKQHGITVVQEYIDRAMTGKNDDRPAFQQMLHESAMHKWDSVIVWKLDRFARNTIDSAVNRQILAKNGVKLLSVMESFGDDASGQMMTHIIEAINEYYSADLREKTIRGMRQSAMKAQTTGHIPLGYKVVDKKLVIDDETRIIPETVFRMYAEGERLTDIADHLNAQGYRNRRGRPFTTNSFYNMLSNEKYIGIYKYDDIVIEGGIPQMIPNDVFEAVREKLITNRKRAAKNTAKADYYLSGKLYCGHCGEPMSGLSGTGRNGVKHYYYRCNGVQKKSGCHKKLENKYLIEDEVCRAARSAFERMDKAETAETIYQMYLQTVRNEYAPDELKKELTECTKQAENVVNAIAQTGGNQLLFDKVRELEERKEQLSSALRLSQAMTDNVPSVEQITVFIDDILATDINTIEGKKAIADIMISKVYVYDDKLTVIFKDKDGKSVDIPLSAVSDSSSADCAPSALGSQVNFKAN

SEQ ID NO: 10133 - protein, 516 aa, synthetic construct
MQKNNNIGNRCVIYARYSCSNQTEQSIEGQMHDCEQFAARNNLQIVNSYIDRATTATTDKRPQFLKMIADSKQCVFDVVLVWKLDRFSRNRYDSAMYKKKLKDNGVRVMSAMENITDSPEGVLMESVLEGFAEYFSKDLSQKVKRGMRETAAKHKITNRIPFGYCKSEEDTYIPDPHTANAVRKVFDMYITGFRKSDIADWLNSNGYKTSYGNQFTLTAITPLIKNTRYIGKYYYADNEYTDETQRIVTDDIFYKAQQKAIANQHGGSCKAIERYLLSNKLYCGYCHNKMIGECGKNQNGLAYHYYTCAGRKRKHICNRKNIKKKDIEQYVINAISCLLNDEYAINKIIETAINYQQNDVEHINEIKDIESTIKEIERKISNILSAIEAGIFTDSTKNRLQELENQKTRLTQELNYKNQSSTKIPRTTLKQILKNLDLSKDATNPEKQNIIDLLIHRIYLWQDKILIVFNQSNLCDNEISVDDTDVNTIIKTLSEPNASSSDSVEYGTPDQSRTGD

SEQ ID NO: 10134 - protein, 478 aa, synthetic construct
MKKVAIYVRVSSQEQANEGYSIQEQTERLTKYCEAHGWILVKTYTDPGFTGANRNRPALQMLCADVTKSLFDTVLVYKLDRLSRSQKDTLYIIEDIFLKNGISFVSMNENFDTGTPFGRAMIGILSVFAQLERDQIRERVQMGLDARAKEGYFHGGGYAPIGYDYNNGILTVNEYEASLVRKAYSLFLDGLPIHSIYFILEKEYPAGTRFGAVTYSSVKSMLTTILYAGYIRWKGALYPGKHEAIIPYEQFQEVQRLIKRRQIDEPQRLTAFQHTTILGGIMFCGYCGARYYCKNNTASRVSRITQRYYTCYSRGKTSKRMIRDPNCKNKSWNVHKLDAIVLDEIAKLEFSRDFASYDTAPDQSGRIQSIKAALTAANKKLEKLIDLYTDDTIPVHILSERISRLNAEKETLESELSELQEAPEPDLSFDQANKILDSFKDIIATGDNDLIRNMVCSLIDSIIIRGEDIEIHWKFTSF

SEQ ID NO: 10135 - protein, 548 aa, synthetic construct
MAYRKITDIRDTIGMRAVFYARVSTAEEEQLNAIELQIEENRGCIKDHGWKLVGEYIDRSKSGTMVKGRDDYQRLYEDLYEDLFDIVVIKDQERLQRNTLDWYLFINRVVQTGKLLFMYMDGKFYSPDDALITGVRAIIAEEFSRNLSKKLHNYHDHRIEKARQGQEIALQGSGNVYGWDKKDGKYYINPEQAKVRRLMCEGIMARKGSTLIAKELNDAGYRNTVGKPWKPMDIPKFVYDCKNVGTMIINKERHDFESKQTIKLPKEEWVYVENALPPIVTQEEWDLICKIHEERVIATGSDRRGKKTSGYSFSGKLVCGICGAPYWRKQRVSKDEYWVCSTKQTKGRRTRKRDSTMGKAGEINPLGCDNENISYNSLMEIMGVVSERLQANTDTIKQDMINWLTKLRKQLLEANGGHTEADLQREISRKSKLLDAYLDGILNKQEYQKKAEELDERIIQLKAETEKNKANSGDIAEIDKVLANIDEEVARYVDGNEKLKVEYLLEHLEQVQIFPDKVIVIVPILSEGIVVEKTQYVSREKYCSKTRK

SEQ ID NO: 10136 - protein, 523 aa, synthetic construct
MAKVTTIPATISRFTATPINEKKKRRTAAYARVSTDSEEQLTSYSAQVDYYTNYIKSRDDWEFVSVYTDEGITGTNTKHREGFKRMVADALAGKIDLIVTKSVSRFARNTVDSLTTVRQLKEKGVEIYFEKENIWTLDSKGELLITIMSSLAQEESRSISENCTWGQRKRFADGKVTVPFKRFLGYDRGPDGNLVLNKDEAVIIRRIYSMFLQGMTPHGIAARLTADGIKSPGGKDKWNAGAVRSILTNEKYKGDALLQKSYTVDFLTKKKKVNEGEIPQYYVEGNHEAIISPEVFEMVQQEMERRSKRGRRSGVHLFSGKIRCGECGSWYGSKTWHSNDKYKKIIWQCNHKFDGDHKCTTPHLTNEDIHRYFISAVNQLLAQKDTIIASLTGGLALAFDLTSLQAQETALIEEVQMLADAVEKCIYENAHVALDQTEYQKRYDGLVHRYDEAKAKLDAITEQIADKKARRGTIEEFLKVLREQDGLVTDFQTNLWCGLVDFMTVYSADDVRITFKNGAEIKA

SEQ ID NO: 10137 - protein, 588 aa, synthetic construct
MRIVNKIEAKTPQMPRRKRVAAYARVSMESERLQHSLSAQVSFYSSLIQSNPAWEYVGVYADNGITGTKAEAREEFNRMIADCEAGKIDIVLTKSISRFARNTVDLLNTVRRLKELGVSVQFEKERIDSLTEDGELMLTLLASFAQEEIRSLSDNVKWGTRKRFEKGIPNGRFQIYGYRWDGDHLVIHEEEAKIVRLIYDNYMNGLSAETTEKQLAEMGVKSYKGQHFGNTSIRQILGNITYTGNLLFQKEYVVDPISKKSRINRGELPQYFVENTHEAIIPMEVYQAVQAEKARRRELGALANWSINTSCFTSKIKCGRCGKSYQRSNRKGRKDPNANYTIWVCGTRRKTGNAHCQNKDIPEQMLKDACAEVMGLDTFDEIIFSEQIDHIEIPAPNEMIFYFKDGRIVPHHWESTMRKDCWTDERRAAKGRYVQEHQLGPNTSCFTSRIRCDSCGENYRRQRSRHKDGSFDSVWRCASGGKCQSPSIKEDALKNLCADAMGLEEFSETVFREQIVCIHITAPYQLSIRFFDGHTFETAWENKRKMPRHTEERKQHMREVMIQRWREKRGESNDNTGDDKPIHGNADQ

SEQ ID NO: 10138 - protein, 497 aa, synthetic construct
MEITVEKVNNAGQNQKRALNTLNGVRVAVYARVSTDQEIQLHSLDEQMKGFKMKIAQNPGWVLVDVYADEGITGTSVRKRKAFLRMMDDCEAGKIDYIMTKSISRFARNTVECLSCVRHLQSIGVQLYFEKEGIDTATAVSELILTVMAAFAQEESRSISENLKWGIRKRFEEGKTRWTPTYGYRKTKTGEIVIDPDEASIVRFIFEMYQHGMSIPDILEELSHMEVPTARGNKKWTKTTVKYLLQNEKYIGDARLQKWVSIDHISHKSVLNESTTMPSIYVKDHHIPIIDRHAYQQVQRIMDLKTPHGEYSRYPYYDTNFVCPLCGKKMIPKALKSNGYTRIIGCFDDDGCRGYALKVELVDAALLDAFNSLVIKGKYSVAMKRMMEIKEESPKMESVQYYWLNDLVERVEFAGDTMKVFWKCGLYSEKELHAVNAAEPTHVAEIYRNYVIRKQQKKNKPIVKKGRKSTEKKVSRKTAAMQAAQNLRTRKRKGATA

SEQ ID NO: 10139 - protein, 501 aa, synthetic construct
MEIQIREGSREQKRKLKVCAYCRVSTDADEQENSLENQVRHYEMVIKANPDYEYAGVYSDFAISGFKEKRPGLQKMLADAEKGKIDLILTKSVSRFARNTSIVLEATRKLKELNVGVFFELQNINTLSGEGELMLTILAAFAQAESESGSAGAKMVYQRKYEAGIPVQYLERSFGYTKDERGVFVADEAEAVWVRKIYKMAAEGYTPASIKRYLNENGIKTVGGVQWVDSTVFRLLENEIYKGDYIMHKHFVNEEKKLVRNRGEVDAWYIEDDHEAIVSPELWQKAQDALAAKRDYLAEGSVIEEFTEENYPYMNKIYCAKCGYPLYKRIYSKGNRLNWGCSGMKRYGKSFCDGINIPDGVLRSAWHFEENTYIDEKASDKGVKEFTYLKERSWKRRHKKKQPSAIPENTETEYPYREKIFCALCGSRLVRYVNPQNHKVTWVCNRRKRKGKEACDGTRVPDTVIKGWEEIKKDIYIQRKDDKNGKKRYSYTSKKPSGIRV

SEQ ID NO: 10140 - protein, 449 aa, synthetic construct
MSKLQVAYLRVSTETQTEKYGLDMQKQKIMDYCEKHGITVDKWYIDGGYSGSKLDRPKIQELLDHAKSGIIDTVYIYKLDRMSRDVIDTLTLFYKTLPSYGVKVISMTEELRTENPMDRMMLTMNAAMNQYEREVIRMRMSSGMVERVKNGLWPGGGNIPVGYHYDRNDGILHIDADKAALVRDAFGLYLKGYSCNRIANILGFSCEKAVDNALKRKTYIGLIEYKGNVYKGKHEPIIDEEIFYMAQDMRKKRSTNAHVSNGYLLSGLCYCGICGARMRYHKWDGIKPRIICYSQYSGKSYMIRDKNCINIKAYAEIIEADVEDCFKKFAINVKANTSQKDDPVAKLKVAIRKENEHVKRLYVLYAENPSKNLMDVIKETEKKIEKLNKQLLTENDRKEPDNTQKIQKIKHVSDVWDTLSVKEKNRVLKECIERIVINGNDIEIRFVTF

SEQ ID NO: 10141 - protein, 562 aa, synthetic construct
MKNKIAVYIRVSTTHQIDKESLPFQCRELENYAKYVLNIDDMEFFEDAGYSGKNIMRPAFQSMMSRIRLGEFSHILVWKIDRISRNIIDFANMFEELKKLNVTFVSKNEQFDTSSAIGEAILKIILVFAELERNLTAERVSDVMISRASTGQWNGGRVPLGYNYDKENHTFTVNQQESEIVKFIFDYYIDNGSMVSLVNALKDKEIKTKTNGAFSLSAVATVLNNIFYTGKYRYNYRKQGDRQQVKPKSEWIVIDNHHPAIISEEVFKKAEEIKQTNLRLKNEKGKIVKKNNIHLFANLLECDVCHNNFSSSLDRPRVNQGGYRHSMYNCYGRRIGACKSKYVSDVYLGKFVFNYIANLYKAYCSFGKSTTFETFKKKMLRGNIFSDIKEVTNLEGIYNIFCSKYNDKATANIINYKNTQQDLGNELRIALSEKGKYERALARLKDAYLFSDDAMTQNEYISQKHSIEVKLSATNKKLDKLQSKDDTPFDDVEFLNVLSYFILNQNLQDKREIDFVDFITSVDKKIISDFVHKMFVKFIISKGKIKSMTFRNGITNTFVYDD

SEQ ID NO: 10142 - protein, 468 aa, synthetic construct
MLYGKPQNYAWYRARVILYIRVSTDEQARHGYSLGAQREALREFCDTFQCQIVAEYSDDGVSARKEIQRRPGLLRVLEAVKAGGVDYVLFIKLDRWFRSVREYYRVQDVLDAAGTNWKAILEDYDTSTTNGRLNLNIRLSVAQDESDRTADRIKFVFSERVKNGGAIFGSKSLPYGLEVRDHRVQIVEDQAVIVRAFFDHYEAAQSARSTQVWLRDQCGVDLPRNTIGRMLRNGLYCGQYRDNKNYCPAIISPDQFQRVQEILARQASGHTRQSKYSYVFTGLLRCPVCGCTLKAFPQFDYKWNRLYLRYRCTQHWIENRCSWKTTPWEPRLEGWLLDHIQPQLDAYIAQFDVQEAQRRRAVVDVGAIQRKLSRLQDLYVDGMIDRAAYDEKYQALIRQQEAAQAAQQSQSAGRDLEPLRQLLAGDFRSIYATLSPQERHTLWASVIDHIVVKDGRYGHFDLDVIFLP

SEQ ID NO: 10143 - protein, 509 aa, synthetic construct
MSNAVIYARYSSGHQREESIEGQIRECTNFAKRNGLTIVEHYIDRAISAKTDDRPSFQQMVADSSKKTFDTIIVYTLDRFARNRYDSAVYKAKLKRNGVRVLSAKENITSDPSGIILESVLEGMAEYYSVELAQKVKRGMTENALACRWASGRIPFGYTIDADKHLHPDPALVPIVQEAFEMYAAGAKIVDIARKINSYHVVTGMGNKFGRSSFDRMIRSETYIGVFKWNDIRKENAIPPIITPELFYKCQARYNARNRKNVARPSAIYLLSGKLRCGCCGGSMCGMSGKSRNGTMHYYYSCYSTRRRTSHCDIGNIRRDEIEHIIAAHAASILKKPINLDIIANQALKTNNSVKNYRLESLIQQEKDLTQKLENCMKAIDQGLVSITLMDRIKQYEADLQSVKNDISLEKIKSNPIQVTKEHIIFFLEKFALLEGEKFKDRIISTMVRDIVIKKEKDGNYLVTVQYNYANSKELPNEESYSVPESIGSQDVELVEMRGVEPLSENIAI

SEQ ID NO: 10144 - protein, 581 aa, synthetic construct
MARKRTNLIGNTPSVRETKVAIYIRVSTIHQVDKDSIPMQKKDLIAYCQLILGTDNYEIFEDAGYSGKNTDRPAFQNMMGRIRKGEFTHVLVWKIDRVSRNLLDFAEMYEELRSLRVTFVSKNEQFDTSTAIGEAMLKIILVFAELERNMTSERVTATMISRANSGQWNGGRIPFGYSYDPKEKVFSIREDEASICRELKDLYLLNRSLVYVSRALNEKGYKTRAGANWSPHSVWIIASSPFYAGIYRYNRYKGVENRTINPEKEWVMIQNHHPAIFTLEEHHTMQSLLKSNQRNMDNLPGRIHTSEKTHIFQGLMYCDKCGSKMVSTPGRLHVDGYRASNYSCPLRRNTKKCNNPTINDIIVGEFVINYILNMLNAKKTFSTINTPDELNTALLSGSVFSEVSSIEENGLNSFFNLLSRYGSDRSYVFSVKSPRRKKAAVDPELSRLRKEKEKQERALQRLQDLYLYSETSMPEKDFIIRQSEISSHLNNINRQLGLMTQDQASFLSDEEFIKQASHLLIQKELKNKKYIYFKKLVSTVDPDILKAYMETILDSIYTADGKITAITFKNGLTHRFIYKDK

SEQ ID NO: 10145 - protein, 462 aa, synthetic construct
MQSKNKNQIGITALYCRLSRDDGTESESNSIGNQKKLLSQKAKEMGLTDTKYYVDDGYTGTNFNRPGFQQLIDDIEIGLVSAVMVKDLSRLGRDYVSVGNYTDSYFPEHNIRFIAVNDAIDSDEGESEIAPFKNILNEMYARDISKKIRSSHRLRGSMGEPLSQPPYGYMKSPENKKKWIIDPEAATVVKSIFKMCLDGKGNETIARELQENKVLIPMAYWRSKGLNRGGKKTQTNPYKWCKTTVQKILSQQEYCGDIINFKTYSKSFKNKRRIENSKENWAVFKDVNEPIIDRETFEAVQKFISKTKRRAPKKENGERSIFNGLIYCGDCHSKMRYHTSTSNKEIHYFTCSDNKVDYRGKCPGRHCVRADALEEVVKLELRRLVEMLEIDESYFAQLLLRKMTKKEKKTKSFWSWNCKKRLHAAVRYRNFMKNCMRIMLSEKSAMSGLLSCLINTKKSVWT

SEQ ID NO: 10146 - protein, 464 aa, synthetic construct
MARSVTVIPARNRQRETGRRAVQEKKIRVAAYCRVSTDQEDQLHSFEAQVDYYTKYINDHENYEMAGIYADEGISGTNTKKREQFKRMIADCESSKIDLVITKSISRFARNTQDCLAYSRKLKNLGIGIIFEKENINTLDSTGELLFTILSSLAQDESRNISENCKWGIRTKFKNGEMHLNTFKFLGYDKDENGKLVINKEQAKTVRRIYRDFLIGINPAQIAKELTEEKVPGCNGQTKWYPSTIVGILKQEKHMGDALLQKTYTADFLTKRQVKNNGEIAQVYVKDSHKGIIDKQTWNAVQEEFERRERFMEAHGTDRYSYGADCMPFCEKVFCGECGSLFTRHSWRSRGIVQWQCKNHRKDGKVACTNAYVDNADLEKGFVKAFNRLVADRDKHMERWQQMKSDGTPLEKIRAGQMMEAVGNEPLTRFVPEIAQLVLAEVTVLGAKKYEFFFQEGSKVKVSV

SEQ ID NO: 10147 - protein, 498 aa, synthetic construct
MEIQIREGNREQKRKLRVCAYCRVSTDADEQENSLENQIRHYETVIKANPSYEYAGVYSDFAISGFKEKRPGLQKMLADAQKGKIDLILTKSVSRFARNTAIVLEATRKLKELNVGVFFELQNINTLSGEGELMLTILAAFAQAESESGSAGAKMVYQRKYEAGIPVQYLERSFGYMKDERGVYIADESEAVWVRKIYEMAADGYTPAAIKRSLNENGVKTVGGTKWIDSTVFRLIENEIYKGDYIMHKHFVNEERKLVRNRGEVDAWYIEDDHEAIVSPELWQKAQDAIEAKRDYLAEGSVIEDFTEENYPYMNRIFCAKCGHPLYRRIYSNGNRLNWGCSGTKRHGKSFCEGINIPDGVLRKAWHFDGNMYIDEKPSVKGTKEFTYLKESSWKRRHKKKVPESIPENTEEAYPYRKKIFCGLCGSRLVRHVNPKSHKVIWICNGAKRKGVAFCRGTRIPDSVIRGWGEIKKDIYIQRKDDKNGKKRYSYTSKKPTA

SEQ ID NO: 10148 - protein, 528 aa, synthetic construct
MQETNISINEIIMYLRKSRSDDPYMTMEEVLARHERQLQEYALSSFGSIIPEERIFREVVSGETIADRPVMQSVMKYLESGQIKGVLVIEPQRLSRGDLEDCGRIINAFRYTNTLVLTPPKTYDLSDEYDRKFFEMELTRGNDYLEYTKKILNRGRLASVKQGNYIGSIAPYGYRKIKTGSGKDTAHTLEIVPEQADAVRMMAQLYLAGNGFTRIATHLDSLGIKPLKSDHWSPAAISDILSNPVYIGMIRWNHFKTIKTMQNGQIVKSRPTNHGTDYILVPGKHLAILDQETFYAIAERRGKSPKVKRDHELRNPFAGLVYCGTAGCGRSMTFKQFTNYRSKVPRRSESMICSNQRICHTKSVQYSAFVERVKEILSKTVDDFEIKLQNDDGNIVRIHENIIRNLEQDLVKLKDKDLRQKDAYEDGIYTKEEYASRNAKLQEQICEVQLSIQRAKDTMPPEVDYQERVSRFSDCLSKFEDTDISASEMNLLLKSCIEKIIYHNSSESKPGIGRFVSNPFELDIYLRL

SEQ ID NO: 10149 - protein, 489 aa, synthetic construct
MLKTVIYARYSSDKQNEQSIEGQIHECEQFAKTHDMVIIKHYIDRALSGKTDDRPSFLQMIKDSSSGLFDAVLVYKTDRFARNRYDSAVYKAKLKKNGIKIFYAKENIPDGPEGIILESMLEGFAEYYSAELSQKVKRGIKENIRKGLSFGGACPFGYKIVNKKYVIDDEQAPYVKKIFEDYAKGRRAIDIFNELNTLPNYAGKGRKWNRSSLNRMLTNKKYIGIYELEDVCVKDAIPPIIDEALFNKVQSRILFNRRHTTRAKVNYLLSGKLFCGLCEHSMTGKTGTSKTKVKYHYYVCSNRHCKQKKYRKELLEDIIIQYTVKDILNPKHFKMIAKKCLEIQQADNKINDILLMLKKQLTATKTKINNLMNAIEAGIITTSTKDRLEQLEQEKYKLELEISTQQLNSNRLLSEEQIIYMLNEFYKKRADVSFYNQIIDCFIYKIYIYSDKICIVYNLNNSDKDVTYSDINELYKSSHLNSCGSPYDL

SEQ ID NO: 10150 - protein, 484 aa, synthetic construct
MNAVIYARYSCDRQTEQSIEGQLRECKAFAASEGIHIIGEYIDRAISGTTANRPEFQRMIADSRYKTFQAVIVYKLDRFARNRYDSAMYKSKLKANGVRVLSAKEHITDSPEGIILEGLLEAMNEYYSAELSQKIKRGMRENAIKGKTTGGNVALGYRIGADKQMEIDPAGASLVRRIFTGYDSGMTFTEICDDLNHAGYTTSRGKQFRIDTISRILANQRYTGTFQCAGEDAHCPPIIEPELFRSVQERLTESRHKHRHTQSPHEYVLTGKAICGTCGRRLNGRAGTSKTDKRYYYYCCPNKCCGWLPAAELEHAVLDAIAQYTTPEACEQIANATYALYQQSTHENADLTAAQQRLQETEKKLENAVNAVLNGITSAALQATMQQLEQQKAALETEVRLLQTDAPELKLEHFQYFAHRLLEVQAEGTEKILQLLVNQVIVYKEQITVLVNLTDKTKTPPLEQVTAALRESSCSVACGGGDEN

SEQ ID NO: 10151 - protein, 590 aa, synthetic construct
MRASEGKIAIYSRKSKFTGKGESIGNQIELCREYIRANHGQADADAAAVYEDEGFSGGNLERPAFKRMLRAARERKFKAVVVYRLDRISRNISDFSGLIEELSRLDIAFVSIKEQFDTGTPMGRAMMYIASVFSQLERETIAERIRDNMHELAKTGRWLGGTTPTGYCSKSVRTVTVDGKAKKACMLELIPEEGETVKLVYTLFAETHSLTATETELLRRGVTTKNGKTFTRFSIKGILQNPVYLISDQAAYRYFIQRQADVFSNEREFDGIHGVLAYNRTDQSKGKNTVYLPVSEWIVSVGKHRGLISSEVWLEAQAALEHNRSKAYRRPRSNEALLTGLLFCRCGGRMYPKLSKRSLADGTRSYTYVCREKERSRRSLCDGKNADGNMLDSAVLQAIGALAEDKAGFAGRLAQSKGGSMGGPGLAGEKLSALRKELGGNAKKIDALVDSLAQAGAGAAREHILKRIGTLHELDRELRKRIGELERLAAQNMLGARELEAQRRRLAAFPESMETMRLAQKRAAVQALVQRVVWDGESAHVVLAGTAEVPADFLCAEEGRTEREERSEAHGDGNTQFVNTPAPHWREDSK

SEQ ID NO: 10152 - protein, 580 aa, synthetic construct
MARRKTALRGVSASTRITKVAIYIRVSTIHQVDKDSIPMQKKDLIAYCQLILGTDNYEIFEDAGYSGKNTDRPAFQDMMGRIRKGEFTHVLVWKIDRISRNLLDFAEMYEELQSLRVTFVSKNEQFDTSTAIGEAMLKIVLVFAELERNMTSERVTATMISRANNGQWNGGRIPFGYSYDSGTSTFSIREDEAVVCRRLKDLYLDNKSLVYTARALNADGYKTRAGADWTPTAVWIIASSPFYAGIYRYNRYKGTENRTLNPEEEWVMIPDHHPAIFTLEEHEAMKSSLKTNARYVDNPVGKPHATANIHIFQGIAYCGKCGNKMVSTPGKKHADGYRPSNYSCPLHRRSKKCDNATVNDMIVGEFAINYILNMLNAKKTFSNIDTPEELQRHLLTGSTFSDISSIEEDGLNDFFNLLSRYGSDNSYVFAIKTPRRKKASVNPELAALRKEKEKQERALQRLQDLYLYSDKSMSEKDFILRKSEISDRLKNINAQLGLITQNPDSLLSDEEFIKQASHLLIQKELKGRKYIYYKNLATSVDPEILRTYMETILDSMYIIDGRISSIVFKNGLTHKFIYKN

SEQ ID NO: 10153 - protein, 595 aa, synthetic construct
MAKKVKRIEAQNPVLVQRKRVGAYARVSMESERLEHSLSAQISYYNELIQRHPEWEFAGVYADNGISGTSTAGRDEFNRMLADCEAGKINIILTKSISRFARNTLDTLVTVRRLKDLGIAVHFEKENIDTMTEEGELLLTLLASFAQEESRSISDNVKWGTRKRFEQGIPNGRFQIYGYRWEGDHLVIHPEEAKIVRLIYDNFLNGLSAETTEKQLATMGVKSYKGKHFGNGSIRQILNNITYTVNLLFQKEYVSDPITGKSKKNRGKLPQYWVENTHEAIIPMEIFQAVQAERQRRRELGVFANWSINTSFMTGKMKCPYCHKSYAHNKRTKEGHTQEYWVCGSRKEKKIGDGCPVGGTINHRNLIKACTEILELDELDEQVFLDKVDHIEVPARYTLTFFMKDGTTLTKGCPNTGHQDCWTPELRAAVGKARKGKNNQERFHNPFTGRIVCSKCGAFFRHQTTKYKDGALRIFWHCPNSATCGIKATPLEKDIMDLAVEAMGVESFDETTYHERVAKTEITGRTEVTFTLADGRIFVKTWTIKPRKSYPHTDEYKRKMSEITKERWKNEAQRQHMSEAMIRIRREKKWPKSAE

SEQ ID NO: 10154 - protein, 527 aa, synthetic construct
MAEVRRVTKIPATLAQYTASPIAAPKKRRVGAYARVSTDHEEQLTSYEAQVDYYTKLIKARDDWEFVNVYTDEGITGTSIKHREGFKQMVQDAMDGRIDLILTKSVSRFARNTVDSLTTIRKLKEKGVECFFEKENIWTFDGKGELLITIMSSLAQEESRSISQNCTWGQRKRMADGKVSVPFEHFLGYDRGEHGELVVNKEQAETVKLIYDLFLQGLTPHAIAKHLTEHGILTPRKKAKWNPSTVHSILTNEKYKGDALMQKCYTADFLTKKQVINNGVLPQYYVEGDHEAIIPPETFELVQQELLRRKRGAHRYSGVDIFSSRIICGDCGSYYGAKVWHSNSKYRRVIYRCNRKYHGAEQCSTPHITEEEIKQGFMVALNKLLKCRDEVIANLEMMDKTISDTSDVKMNLEEQQASMAVAAERIHRAIAENARVLQDQVEYKARFDALTEKYEAIKQECDRLEQQIAETASRHTARQQFIHTLQKQSALITDFDPSVWGILLDHITVNSDGEKIYTFKDGTEIRI

SEQ ID NO: 10155 - protein, 526 aa, synthetic construct
MPKVTKIPATLARYTAMPISAPRKRRVAAYARVSTDHEEQLTSYEAQVDYYTNFIKGHADWEFCGVYTDEGITGTSIKHREGFKQMVQDALDGKIDLIVTKSVSRFARNTVDSLTTIRNLKEKGVECFFEKENIWTFDGKGELLITIMSSLAQEESRSISENCTWGQRKRMADGKVSVPFDHFLGYDRGEHGEMVINEEQAKTVRLIYDLFLQGLTPHAIAKRLTGMGILTPRKKEVWNQGTVRSILTNEKYKGDALMQKCYTVDFLTKKQVVNRGVLPQYYVEDDHEAIIAPETFDLVQQEMIRRRKTGSRYSGVDIFASRLVCGECGSYYGAKVWHSNSKYRRVIYQCNHKYHEGNSCNTPHLTEDEIKQGFVVALNRLLEGKTTVISNLESLSSVLFDTSEMETTVVKLKAEMELVQEMIQKAIAENARVALDQKEYKARFDELSQRFDTLEKQRNELERQIADRVSRRAAMHQFIGVLKKQKDLITEFDPSLWGALLDHATIYGKGDIRFTFKDGTEINAIG

SEQ ID NO: 10156 - protein, 612 aa, synthetic construct
MRAAFLIRCSTKKQDYERQVNDLTRLAKKFGYTSSDNMIFGEHITGKDDASKRDRQSIQRLKDAAINKEFDVVLVSEVSRMSRDPMSGRLYVRQLINMDIPVYFRDIDTWTIDPVTGKKVRDAETIIGAAFDAAWKYIKSMKTQIASGRRDELDNNQMSIGQPFFGYKRYGGRDKGKKNSWVINDDAAKVVVDVFEEYVKDGATLKSTALAITAKYGEQFNKKFSIGTIEHILTFEPYCTGIKVVSLTDPDTEDVDEFEVEIPTIITRAMFDKATTKRATNRTARTPYPKQATYILSKLLKCPICEHSLTPQKRGGDKGDKYRLMNGKVAIRWSCMSGINNATDCSSRITISNEKLEAIIWGLVKQELIGFANLNDEDRVARVVELTDKITNLEMNIANFTSHISNMDRLIERAYSAYMDAPDSVMDIAKDKYYKTLTKCENERAECKDKIEALNVEKLRLENMRTFFNQPTLPKDAIEKAESDPIKMRNLVMELIDKIYPYRITTYVSPATNRIMRNGIVLLEVYTINGIYNVLYDGNQRNNKVAYYISGVYATFQNGRNKFDAYDTGEYFVISHATLVTETEDVDMLVTFNELIKICMQNGWEIDYTYKM

SEQ ID NO: 10157 - protein, 617 aa, synthetic construct
MEKKVIAIIRTSTTQQEIDSQRKEVLSMAIADGYSIDEIEVVGRAGASAIKVDEAYQENMNRVYELIDTIPTIEAVYAWAIDRIGRNEEILMKLKNTLINKKIQLVIKNPSLRLLEANGDVNAGVELAFSLFATMAKQEMEQKKARFNRARKRNDEKGKYNGGYVAYGYMVKDGYIVINEEEAKIVRLIFTELASGKYSCDGLARELQDRGIKFKGKKMLFSNVRGILKNKIYCGEQLNTAGSVRNVPQIVSKELYDKATAAISANNPSKTNAYTNRNLLGLRLIKCPYCGCHFSVAAKLYQCHNHNRNYYDSRQGFEKCPNGISIGVANLDRLLWYAAATVHFEYLKQLTGQRDEEIDSKVEVLNQKIQHLQSEIDSLADKRKRINLVFMDGDLSEKERDERLSKLLKDNEKYAVQIREFEEEIGKLIALKEGDVGDEIVFENFRSLMMLDDKELQCKIARKHIKDIQLEKAEYAPYKRVLRITIQFYNHSDMQYLYLAKSIGEFFPIINGAVEKDINGNLKAIPNLEKQRKLIGKEVLSYYRMIPELIAVKESGDKEAIAILKEKYGVSRRDLAFLLSAATRFAIPTADEALCRMAERLQNSGLIISMDSAAIPV

SEQ ID NO: 10158 - protein, 518 aa, synthetic construct
MPTRKKSIHDISAADRAAASGVAVIYARYSSHNQRDTSIEQQIDECTEFAKRNNLFVLETYADKAVSGKTDRRKEFQRMMRDAEKGYFQVVIAYKSNRIGRNMLQALQNEEKLSKFSVRVLYAKEEFGDNAAGRFALRTMMNVNQFYSENMAEDIMRGLLDNAERCMVTGSLPFGYVSDQNRRYAIDDGQAAIVREIFDRFMSGWSFADMASDLNQRGIPTKQGGQWNKGSFHRILTNERYTGVYLYRNIRTEGGIPVIIDRDTWLAVQQRLKTKKNPIGTQRHSGDYLLTGKLFCGLCGTPMVGISGTGKSGSKHYYYACQKRRLEHDCKKKNVSRDLIEDAVCRGVVEYVLQDRVIEWMADCVMDYQQRHKDDRTIGALASRKKQVDASIKNILSAIEQGIFTASTKSRLEELEHEQAKLSRSIETEKALRPTHTRARIVYWLEQFRGGDIDDPAYREKLVHIFVNAIYLYDDHIKIALNFAGNNNTVDLSFIENSDAASDPQCSYTVENGPPTDP

SEQ ID NO: 10159 - protein, 502 aa, synthetic construct
MNVVIYARYSSDRQTEQSIEGQLKECYEYAQRNGYTVVGEYIDRAISGTTDHRPEFLRMIADGDKKLFQAVLVYQLDRFARNRYDSATYKAKLKKNGIRVLSARENISDDASGVLMEAVLEGMAEYYSVELSQKIRRGMDINAEKCLSTGGNLALGFRVDSEKHIQIDPDTAPVVQKIFEMYASGQSMADIIRYLNANQIKTSYGNEFNKNSINRILRNKRYIGVYTYRDKEIPDGLPRIVDEDLFWEAQRIMEKNKKAPARAKAKVDYLLTTKLFCGHCKAAMTGISGTSKTERKYHYYQCVTNRRDKSCDKKTVGKEYIEDLVVNRLRDFLTPDNISTIAREVVDLCERESNNGNTRRLKKLLAENEQATENLLKALESGQAVDIIADRIAQKKKEHEKLSLQLLVETSQHPTPSVKEIRFFLNQFRKGDINDPKYRQGLVDMLVNKIYLYDDKMTVLCNTQDGHFDVDLKEVSSLKGQLVDHFRPYTNTADRLRRQSFL

SEQ ID NO: 10160 - protein, 438 aa, synthetic construct
MARTIQQISFPAPMRPSLKRVAAYARVSSGKDAMRHSLSAQVSYYSALIQKHTGWLYCGVYADEAFTGTKDSRDGFQSLLAECRTGNIDMVITKSISRFARNTVTLLETVRELKALGVDVYFEEQNIHTMSADGELMMTILASYAQEESRSASENQKWRIRRGFERGELINLRFLFGYKIEKGCVAVDPEKAAVVREVFRRALEGESLTSLAIDLNRRGFTGVLGGKWNSMRIREILSNEKYLGNALLQKQYRNNHLEKKEIPNRGELPQYYAEGTHEAIIDQATFDAAQELLAGITENSPVKRPRRRSAFTSMIACAVCGRNYKRCTGGKRHFWNCPTVVQTDLPSCGTSQIPEKLLYDLAAQVLGLAQFDEGVFLERIKGIDALPDKTLVFHFKDGSTAERHWEHISRAKSWTPEMKEIARQRALAQRRGEKWQEP

SEQ ID NO: 10161 - protein, 525 aa, synthetic construct
MARAVTVIPPTIQPITHLARNAVVRRRVAAYARVSTSSEEQLTSYEAQVDYYTRFIQSKPEWEFVRVYTDEGISAVNTKKREGFNQMVRDALDGKIDLIVTKSVSRFARNTVDSLVTVRKLKEKGVEVYFEKENIYALDSKGELLITIMSSLAQEESRSISENVTWGQRKRFADGKVSLPYSHFLGYRKGADGLPEIVPEEAETVCWIYSLFLTGKTTGSIASLLTREGIPTPAGKAKWQASTVESILKNEKYKGDALLQKAFTVDFLTKKQKKNEGEVPQYYVENSHPAIIDPAEWKLVQRELERRKSIGRSYSGNSIFSSRLVCGDCGGFFGSKVWHSTDKYRRTIWRCNSKFTGEEKCQTPHLTEEEIKARFLDAFNALVSDKERLLDECRTMQAALTDTGSLDSEIAALLSEMEVVAELTKRCIEENSTTAQDQAAYLERYNGLAERYETAKAKLEKLQAAKAQREAKAEDIGGFMFELAEYGEPIIEFDDRLWLTAIDTVTVHRDGRLIFRFQTGHEITV

SEQ ID NO: 10162 - protein, 489 aa, synthetic construct
MLKTVIYARYSSDKQNEQSIEGQIHECEQFAKTHDMVIIKHYIDRALSGKTDDRPSFLQMIKDSSSGLFDAVLVYKTDRFARNRYDSAVYKAKLKKNGIKIFYAKENIPDGPEGIILESMLEGFAEYYSAELSQKVKRGIKENIRKGLSFGGACPFGYKIINKKYVIDDEQAPYVKKIFEDYAKGRRAIDIFNELNTLPNYAGKGRKWNRSSLNRMLTNKKYIGIYELEDVCVKDAIPPIIDEALFNKVQSRILFNRRHTTRAKVNYLLSGKLFCGLCEHSMTGKTGTSKTKVKYHYYVCSNRHCKQKKYRKELLEDIIIQYTVKDILNPKHFKMIAKKCLEIQQADNKINDILSMLKKQLTATKTKINNLMNAIEAGIITTSTKDRLEQLELEKYKLELEISTQQLNSNRLLSEEQILYMLNEFYKKRADVFFYNQIIDCFIYKIYIYSDKICIVYNLNNSDKDVTYSDINELYKSSHLNSCGSPYVN

SEQ ID NO: 10163 - protein, 474 aa, synthetic construct
MKVGIYSRVSTQEQAREGYSIGEQVERLKNYCAAKGWILYKTYTDAGFSGANTDRPGMQQLISDVADGKIDMVLVYKLDRLSRSQKDTLFLIEDVFIKNNVNFASITENFDTSTPFGRAMIGILSVFAQLEREQFRERSIMGKDARAKEGLHHGGGAPTGYDYIDGQLIINKEEAELIKEAYRLFLEDDMTMMGIAAKLSVFSEKFKYDHRIRKMLTNPLYAGWTHCRDELYKGQHEAIISQEVFDNVQTKLKIRAENNPHYRNAFNRTSLLAGILWCKKCGARYFKRVRRYEKGSKVYYYNKYQCYSRSSYKNMVRDKSCKNKIWTMDVLDKAVIDEIKALVANPAEVDNIIKLNQSNNNITEKKEFYKKRIKEIEKQMNKLTDLYSIDGIDIDFVAKKITALNTDKKRIESEMNAINEHKTLISAEDAKKRLSGISNILDNGEFTEKVKVITSLINRIEVDDDDIYIYWNFV

SEQ ID NO: 10164 - protein, 536 aa, synthetic construct
MPRKKKLQEVGGLRLVAYYRYSNGGQQTEQSIEGQRRDCEAYAKAHGYKIVHEYIDRHISGKSDSRPAFQQMISDSDSHLFDAVICWKTDRLARSRYDSIIYKTRLRRNGVKILYAAETVVDGPEGIIIEGLMESLAEYYSAELAQKLRRGQRESALKCIALGGNRSFGYDIGPDKHYCINEKQAPAVRYIFEQYAAGATAADIVRELTARGYRTSRGNPFNKNSICRIITNEMYLGVYKYADIRIEGGVPAMIDRELFNRCQTQLAFNRAHGGGKGAPRADYVLVGKLDCGLCGHAMKGASATGHTGSKHYYYTCTQHVEKKCPKTSIEKNYLEQVIVDGVAKYVLTPEKISQIVDCMMELQAKEQEPKGNPEKDALEAELAECRRKQNNILEAIEEGGSARLAARLRALEEQEAQLTFALGEINNAPAPPQFSREALTFMFEQFRREEDEVDEEYRRRILDTFVSSILLYEDRAEVKFNITDQKTGDFERVILPISANKKPPEDDDITSNSEGSTALRLVEAMGVEPMSEKSSV

SEQ ID NO: 10165 - protein, 585 aa, synthetic construct
MKRAALLLRCSTDAQDYERQKLDLLDTIKGMGYTTSDDLVFGQYITGKDDVRKKDRESVAECKQAVREGKVDAIFINEVSRLSRDSIAGRLFIREFNDEYKIPVYFRDLGMWTINPTTRIVDRSFETMLGFYFDMAQNELKSMKTRFASGKRKNAREGKTIGGAVPFGFYKDEDGKLQVDEEQAQVVRLVYNKYLEDGGSIPSVCRYLLSCGYDKKFNKKFGTGSVRNLLRERRYIGEQRYNLVNPDEAKKQEVYIYKVDAIIDTTIYNKVQIKLDKNRTTETKKVNKDKKIHLLAKLITCPICGDSYTSKTASANKSGERYRIWNYCCVSKYNFSECTSDITLNADNIESIIWQLTKREILALQELSLEERQSKIDEAEQKLASYKDELDVIAKSIDKLNVKKKKLVALFLDIEDDDTAIFNEQREAINKEIDSYNNRIQFLNTEITICEGNIARFKEADFTDEVLDKIEQDLLKKKELIKEYIKVIRPYRLTKARLILEVESKQTNYCILFEPRNSKRRCWYIQSSLAQWQNGLLKTSTAPLGNFFYIPMASLLLDEPDDLDAIASFEDMKEICSINNYVIEY

SEQ ID NO: 10166 - protein, 525 aa, synthetic construct
MARAVTVIPPTIQPITHLARNAVVRRRVAAYARVSTSSEEQLTSYEAQVDYYTRFIQSKPEWEFVRVYTDEGISAVNTKKREGFNQMVRDALDGKIDLIVTKSVSRFARNTVDSLVTVRKLKEKGVEVYFEKENIYTLDSKGELLITIMSSLAQEESRSISENVTWGQRKRFADGKVSLPYSHFLGYRKGDNGLPEIVPEEAETVRWIYSLFLSGKTTGSIAGLLTREGIPTPAGKKKWAASTVESILKNEKYKGDALLQKAFTVDFLTKKQKKNEGEVPQYYVENSHPAIIDPAEWKLVQRELERRKSIGRSYSGNSIFSSRLVCGDCGGFFGSKVWHSTDKYRRTIWRCNSKFTGEETCQTPHLTEEEIKARFLDAFNALVSDKERLLDECRTMQAALTDTGSLDSEIAALLSEMEVVAELTKRCIEENSTTAQDQTAYLERYNGLAERYETAKAKLEKLQAEKAQREAKAEDIGGFMFELAEYGESLTEFDDRLWLTVIDTVTVHRDGQLTFKFQTGHEMLE

SEQ ID NO: 10167 - protein, 438 aa, synthetic construct
MARTIQQISFPAPMRPSLKRVAAYARVSSGKDAMLHSLSAQVSYYSALIQKHADWLYCGVYADEAFTGTKDSREGFQDLLAECRAGNIDMVITKSISRFARNTVTLLETVRELKALGVDVYFEEQNIHTMSADGELMMTILASYAQEESRSASENQKWRIRHGFERGELVNLRFLFGYKIEKGQVEVDPEKAEVVREVFRRALEGESLSSLAADLNRRGVTGVLGGKWNAMRIREMLSNEKYLGNALLQKQYRNNHLEKKEIPNRGELPQYYAEGTHEAIIDQATFDAAQELLAGITENSPVKRPRQRSAFTSMITCTVCGRNYKRCTGGKRHFWNCPTAVQTDLPSCGTSQIPEKLLYDLAAQVLGLAQFDEGVFLERVKGIDALPDKTLVFHFKDGSTAERHWEHISRAKSWTPEMKEIARQRALAQRRGEKWQEP

SEQ ID NO: 10168 - protein, 530 aa, synthetic construct
MEQYLIYLRKSRSDLEAEAHGEGETLSRHEHTLLELAKRQHLNVTDIYREVVSGDTIAARPMMQRVLSEVEQGVWSGVLVMEVERLARGDTIDQGIIAQTFKFSGTKIITPIKTYDPDNEFDEEYFEFGLFMSRREYKIINRRLQRGRLASAKEGKWPSGLAPFGYRRVKLKNEKGCSLEPIEEQAAIVRMIFDLYTVGLQDEDGSARPLSLGSIATRLNDMHIPSPSGSQWARITIRGIIKNPTYIGMVRWGSRETKKKVVDGKVVSVRGPADPEKECIFKGIHPPLIPKETFELANDKLARSENTSTHKEKVVRNPLAGLLVCSECGRQMMRMINPVHPDMPVVRCPRRGCPNCSSYLPIVEERVIQGLSEWMKGYELEWSSAAASSSVSSVCVREKALASAEAELRKLQQQLERTHDFLEQGIYDTDTFLSRSRMLSDKIAAAKDSVARCSRELTEEKLRETSRRDIIPKVKNLLNVYPLLETAEEKNALLKEVLEKVVYQKLNEKRKKSPDGFTIEIYPRIPKSEK

SEQ ID NO: 10169 - protein, 578 aa, synthetic construct
MNTLSALNITPSPPRMCRVAIYIRVSTLQQVDKDSLPMQRKDLIAYSKLILNTDDYVIFEDAGYSGKNTIRPRYQDMMEQIRTGAFTHLLVWKIDRISRNLLDFAQMYQELKELNVTFVSKNEQFNTSTAMGEAMLKIILVFAELERNMTSERVTATMISRANTGKWNGGRVPYGYKYDPEEEDFLIVANESNTVKLIHDKYEELQSLVYLARYMNEHGYRTRSGNEWSPPSLAIILKSWWYCGCYEYNKRKAGNRQKLKDKSEWIMIEDHHIAIISYDQKERVLAILKGNKRYATDHNLYVKGIHVHVFGGLCWCRNCGKKMTSTSSNKNRSWQYSKYLCSTRRRSLTKCRGRSTSDPVLGEFIFNYILNMLNAQKGFDSIHSPADLQAALLTGDAFSDIKSIDQEELNDLYNILSSSVVGNIYGRSFNVNKAKKNDEVQSSLTILKAEKKKLDRALDRLTNLYLYDDMAISEKDYMTKKTEIETKIAEIDEKIGIVNKNSVDNSITDEEFVDKASTFIITQKLTNRNYISYKRLATSVDPKILYMFTHDVIDYIDIYNGKVQRIVFRNGLSQTFIR

SEQ ID NO: 10170 - protein, 528 aa, synthetic construct
MAYCIYLRKSRADRELELQGFGETLKRHRDTLIELAKKKNLPIGEIYEEVVSGDSIAARPQMQRLLNDVSDGKWEGVLVMEIERLARGDTSDQGIVTKTFTYSNTLIITPMKTFNPTDEFDQEYFEFGLYMSRREYKTIKRRLHAGMEASCKEGNYIHHTPPFGYSIVKNKKSKGYRLEPKPGEAEIVKLIFQWYTKGILKEDGSYELLGTARIADKLNSEYSIKPLGGVWTIPTISTMLRNEHYLGYIVFGKKKRKKVVENGIIVDKWTRNESYGLYKGKHPALVSQDTFNLAQERLSRNPRRPSKTITNPLAGVIKCGMCGRSMYRRPYQKRGQSASLICSEKTCHNVSSAFYLVEDALLTAIKEWIDGYEIKEEANKYDTSVLESKTKLLEEQQKQLITYKNQLTKVFEAYENGIYDSDTFLNRQKTVSESISSTEEAIVKLNKEIANEREIISHQEEIIPKARKILEIYKTSDDVQLKNDLMKSILDKVVYTKTANGHFKDQRQDDFKLELFPKLPKNKGNSSE

SEQ ID NO: 10171 - protein, 503 aa, synthetic construct
MANIRRIEPVLPRLKARKRVAAYARVSMETEQLHHSLSAQVSHYSALIQSSPEWEYAGVYADEGITGTATKHRDDFKRLIADCEAGKIDLVLVKSVSRFARDTVDTLNATRHLKDLGIDVYFERENIHSISKEGELLLTLLAAFAQAESQSISENIKWSIRKKFKVGIPNGIKAPYGYEWNGASFSIIPEQGEVVREIYVRYLSGEPAYSIAKGLAKKGVKGQSGVPMDDATIKNILSSLSYTGTMLLQKNFLTEGHKRRKNKGELPMYAVEEMFEPLVSETDFDKAQQIMEDRAASMPNRNPKLTVFSGIVRCANCGCSISRRTSKYGKKWICNTKERKGKAVCDFRDIYESELEDAATKVLKLDGFNAYAVKSRIALITIDNAYITFRMKNGITRQIIRKYQKGYSGFSMRLFCGSCGGMLESDTWKMGPAGKKTKCKVWVCRNCSAPREFDSMFRKAAQELFHEEQCDGLFTQNIEKAINYDDRIEFYYKKGQVVTWQKE

SEQ ID NO: 10172 - protein, 562 aa, synthetic construct
MAKRVTTIPATLNRFDSRPLQSVRKRRVAGYARVSTDSEEQATSYDAQVDYYTRYIKSNPNWEFVGIYTDDGITATNTNHRDGFNQMVVDALAGKIDLIITKSISRFARNTVDSLITVRLLKEKGIEIYFEKENIWTLDAKGELLITIMSSLAQEESRSISENTTWGKRKSFADGKASVAFSRFLGYDRGPNGEFVINEEQAIVVRYIYKRFLEGYSTYQIAKELTEMGVKTAAGKDKWYTSSVLSILKNEKYKGDALLQKSFTKDFLTHKRVDNNGEVPQYYVEGHHEGIVTADQFEQVQAELYRRKNMDRYSGVGCFSSILKCGECGSWYGAKVWHSNDKYRRVIYRCNKKYDKGCKCKTPHITEDEIKGLFIKAANELFSEKDEIIENTKIMMDMVCNTDDFDKELGDKVEELNIIADQMQTAIAENSRMALDQNEYERRYADLTERYNVLKSEYDKISEQIDSKKAQRELFKGFIRALEKHGTLVDEFDEGLWSSLVQEVVVKAKDDIRFVFKNGFEIKEEMKVAIRGKSDTIGRGGIHYEKDYNFNCACSIDVDRLQ

SEQ ID NO: 10173 - protein, 541 aa, synthetic construct
MQRKDLIAYCELILGIEDYEIFEDAGYSGKNTDRPAFQEMMQKIRSGSFSHLLVWKIDRISRNLLDFAEMYEELQSLRVTFVSKNEQFDTSNAMGEAMLKIILVFAELERNMTSERVTATMISRANQGLWNGGRVPYGYSYDAETSVFSIIQDEADVCQLMKTDYFEHKSIIHTAKLLNDRKVPTRSGALWSPTAVWKILSSPFYAGIYRYNHYKGTENRTINPEEEWVLVPDHHPAIFTLEEHEKICDIMDTNKRMSNLPGQKHRAKNVYAFSGILYCGKCGSKLVSTPGRLQADGFRTTTYSCPKKRKTHECDNPSINDLIVGEFVINYILNMLNAKSSFSSISSPAELEEHLLYGGSFKDVQHISEDGLNEFYNLLSRYGSDSSYVFAVKRPRKKKAAVNPEVEALRKDKEKQERALKRLQDLYLYSERAMTEKDFIIQKNEISSRIQDINTRLGMVTHDANSTLSDEDFVRQASHLLITKKLIGREYIYYKSLAQTVSPGVLKIYMETILDSVYVIDGRVSSIIFKNGLTHTFIYKK

SEQ ID NO: 10174 - protein, 541 aa, synthetic construct
MGTTKNAVIYARYSSHSQREESIEGQLRICHEYAKAEGLAIVGEYIDRAISGTTDARPDFQRMIDDAKKKQFSYVIVYRLDRFARNRYDSVLYKHELKQCGVKVVSATEGIGTGDESILLEALIEASAEYYSMELSRKIKRGRQDSAMKGNFLGGAVPLGYKVVDSKFIIDDETAPIVRYIFERYAAGIGKKQIIDELTAKGYMRRTGKPFTYRAFDSVLRNRKYTGEFTQTGITVEGGCPAIVDTEMFEKVQARLEINRRAPAKAKAKTEYLLSGKMFCGYCGEPMIGISGTGRHEKTFYYYSCVGRRGKSGCKKQHEKKDFIEWYVCEQTVQYMQDPERLSHVAKRIIEINDAEFDGGKVKELERAVENCDNDIRKLVDALTTIPDAGRAALYDKIERIGAAKADMEIDLAKVRVLSEVRYKQEDVEAWIRSMCRGDLMDFEFRRQLIDVFINSVYLFDDRVVIVYNIKNGKQVSAIDVLNAVEELDGVELFPDSAEDSSAGGSGSFLVTDAPPYMKNPNLFPIGNGFGFLIFIKDIID

SEQ ID NO: 10175 - protein, 490 aa, synthetic construct
MDKKDSISIETQIELCKKEIEDEPYKEYVDRGYSGKNTNRPQFKAMMQDVENGVISKIIVYKLDRLSRSTLDFGELMDALSKHSVEFSSTREKFDTSTPIGKAMLNIIMVFAQLERETIQVRVQDNFRMRSARGAYDAKAPYGYAKTKVMVQGKAVSTLKPDKAYSLMVKKIFEQYAYTSTSLGYLARTLNQQGIKSANGAAWDSCKLSKLLCNPIYVKADAEVYKYYRAKGMEITNDIDDFRGQYGCVTYGQWDRAKNKFAQLSGLTLSIGLHEGIIDAKTFLACQYKLADNTQINNTGRGKHSWLTGLLKCGCCGKAMKVMTYKETATFRCSGAMNTGLCSDSPSVGVREIEEAVEREIFAHVARHQELVVQKRKEEDTKAHNYKIAIAKLDDQIANLITALADGTELTMKYINGRISELQKQRDILAAELQQHKNATKQQDDIKQFHDIINLWPGMTIPQKHEIAMMLIKRVEIQEDTTRIYWKYDL

SEQ ID NO: 10176 - protein, 501 aa, synthetic construct
MPEALNAVIYARYSSDRQTEQSIEGQLRECYAFAKANDIAVIDTYIDRAISGKTDNRPAFQKMIEDSAKRQFQAVIVYRLDRFTRNRYDSAIYKARLKKNGVKVLSAMENLNGSPESIIMESLLEGMAEYYSVELSQKITRGMRENALKGKALGGQRVLGYKVNSDCYFEIDETTAPVVVDIFKLYSSGKTVKEICDILNARGVKTARGGAFNKNSLHTILTNKKYIGIYKTKYGEIVGGIPAIIDKELFEMVALRMEQNKKAPARAKAEINYLLSTKLFCGKCRSAMVGESGTSKTGKKYYYYACVKKKREKACDKSNVKKDWIEDLVIQRTVTDILKDDVIEKIADRLVELQKAEAAESGTMLYLQNSLAEIQVSIKNIMTAIEKGIITESTKTRLTELEDEKRNVEIEIAKESIARRIISREQIIYWISSFKDGNITSEKYRQQLIDTFVHAVFVYDDKIVITYNYSGENNTATISDLDLSSPPNKKVHAQSWAFLFV

SEQ ID NO: 10177 - protein, 548 aa, synthetic construct
MAYRKITDIRDTIGMRAVFYARVSTAEEEQLNAIELQIEENRGCIKDHGWKLVGEYIDRSKSGTMVKGRDDYQRLYEDLYEDLFDIVVIKDQERLQRNTLDWYLFINRVVQTGKLLFMYMDGKFYSPDDALITGVRAIIAEEFSRNLSKKLHNYHDHRIEKARQGQEIALQGSGNVYGWDKKDGKYYINPEQAKVRRLMCEGIMARKGSTLIAKELNDAGYRNTVGKPWKPMDIPKFVYDCKNVGTMIINKERHDFESKQTIKLPKEEWVYVENALPPIVTQEEWDLICKIHEERVIATGSDRRGKKTSGYSFSGKLVCGICGAPYWRKQRVSKDEYWVCSTKQTKGRRTRKRDSTMGKAGEINPLGCDNENISYNSLMEIMGVVSERLQANTDTIKQDMINWLTKLRKQLLEANGGHTEADLQRELSRKSKLLDAYLDGILNKQEYQKKAEELDERIIQLKAETEKNKANSGDIAEIDKVLANIDEEVSRYVDGNEKLKVEYLLEHLEQVQIFPDKVIVIVPILSEGIVVEKTQYVSREKYCSKTRK

SEQ ID NO: 10178 - protein, 523 aa, synthetic construct
MRFFSYGRKSVFSDKSDSIDNQFRMNREYCESKFSGQVDSWQQFSDEDFTGANTSRPDLQRMLSFIKGGFCDVLVVYQLDRLSRDVRDFANIYALLEEHGVMFISIKENIDTTTPIGRAMMYVTVVFAQMERETIAARVTDNMLGLAKKGYWTGGNPPVGYVRKHIVVNGKKHCSIEVDPDGARYVTQIFDTFLAYNCSLQGMETRFKNQGIRTQNGKFFSTAQLHKMLTMPYCVEATPEVYDFYAAKGCIMDPGSPREMWDGSAGVIIYGRSTEKNKKHQLQPPEKWTVCLGKHKPFMPAEKWLAVQSRFTQNKCIKDAKWPVPLLKGVLRCKCGNLMQVSRKKKVDGTCSSWYYCRKRMRQGVDACDMGQIKCDLLDEEVLELFRGITADPALIQKFVKAEAPADVTDLKAAQARVSACERKIGRLAASLALAEDSAASKYIIAEMERLDVELGALKREASLAEMESHRAAASAKDAKATAAEIAKLIHGLDGFDDKEKNAIARAVIQECTWDGERLFIKL

SEQ ID NO: 10179 - protein, 548 aa, synthetic construct
MSTGTELRAVFYARVSTEEEKQLNALEKQIQENKDVIRDHGWRLVGEYIDEGKTGTTTKRRNDYKRLLKDMTENKFDIVVCKDQDRLQRNTLDWYLFVDNLVTNNLKLFMYLDNKFFKPSEDALITGVKAIIAEEYSRNLSKKLNNSNKRRIERALNGEEVSAMGNGKSLAFKIVNGKWVKDEEEAKLGKKIFELYLEYDSIRKVRDWVNEHGYTNSVGKPFTSESISRILKNEKAKGVIVMGKYHHDFDKKKIVRRSEEELVRIPAPELAYVSEEVFDKVQERLRAKTGNGRGVNAYSDPLSGKIYCGSCGRKLWKHASNGYVNWMCASQVAKGDVECNGTRITTVAIRNIYKKITDNLEVNKGVVKQYIVKWLNELKATLSDTSVNEKIQKDLDKLERKRTKLLEAYLEDFISKDDYKAKYEAIEGQIEEKKKLLVPVEENEDIKVIESVLQNIDDEIDAYVKTLDMEESKVDFLIEHTKRITVLENRDIIIELDLVAGAIIAGKDFLLYVHDTMPQHHGPKHLHPSGPQTAPRCCFRDRFSCDQP

SEQ ID NO: 10180 - protein, 463 aa, synthetic construct
MRRKTTAPVEKILLRVAIYIRVSTDKQVKDGDSMRDQLATGQKYIDSHENMILVDTYIDDGISGQKLKRDDFQRLIDDVRAGRIDLIIFTRLDRWFRNLRHYLNTQDILDKHGVSWTAIEQPYFDTSTPHGRAFVNNSMIWAELEAQNDSDRILGVFDDKVDNGEVLSGSTPLGYAIVNKHLVPDDDAPTAVAIFQYYRKTGNLSMTLRYMESEFGLVRSAASLKNMLTNTKYIGEFRDNKNYCPAIIDRDLFFDVQRLLKINIKSGKKHDYIFSGLVVCDDCDHIMSGCQQRAGGRVRADGTRIVYKYSVYRCRQGVNLHRCPNRKLVFETTLEKMLLERIRPELENYIAEYEVANLPALRTDAKRRSVEGKMQKLKDLYLNDLITMDEFKLDREKLLMQLEKINAEDSRPVKDLSYLKNFLKMDFESVYDSLSIPERRELWRSIVKEIRVDHDKNIHIIFL

SEQ ID NO: 10181 - protein, 503 aa, synthetic construct
MQRAVIYARYSPGPNQTEQSIEGQVRECTKYAELHDLRIVGTYIDRKISGKTDNRREFQRMIDDSEKHIFDVIILYHTDRFARNRYDSAIYKHKLKENGVELRYATTDIPKGPEGIILESIMEGWAEYYSAELSRKIKRGMRESALKCHSTGAGRCLGYRTAEDKSLVIEPEGAKAAQTVFDMYIKGKSHADICRYLNDCGFRTAQGKLFNKNSVTHIIRNKRYIGVYTYDDITIEDGIPAIISKDTFHLAQLEAARRKTAKRPKEPKAEYLLSGKAFCGHCQKPLVGVSGTGKSGNKWYYYYCQESRAKRGCTKRPVKRDWLEREVVERTVAEILQPEVIQRIAKKCYDLQMEYRQDNSDVLFYELKLKDVRKAIKNTMHAIESGVKTKTLPARLQELENEEEALEAELAIAKASDFVITTDQIEFLLTQFAEPWECESEEEYHRRIIKCFVHKVFLFDDKLLIYYNVSRDGKTREQSEAELLEEALGEGFDKRSSGSTKTI

SEQ ID NO: 10182 - protein, 579 aa, synthetic construct
MRNKSLAGRANNRAERPRKVAIYIRVSTTHQIDKDSLPMQRKDLIAYCELILGIEDYEIFEDAGYSGKNTDRPAFQEMMQKIRAGSFSHLLVWKIDRISRNLLDFAEMYEELQSLRVTFVSKNEQFDTSNAMGEAMLKIILVFAELERNMTSERVTATMISRANQGLWNGGRIPYGYSYDAETSAFSIIQDEADVCQLMKTDYFEHKSIIHTARLLNDKKIPTRSGALWSPTAVWKILSSPFYAGVYRYNHYKGTENRTLNPEEEWVLVPDHHPAIFTLEEHEKLCDILDANKRTANLPGQKHRAKNVYVFSGILYCGKCGNKLVSTPGRLQADNFRTTTYSCPKKRKTHECDNPSVNDLIVGEFVINYILNMLNAKSSFSSINSPAELEERLLYGGSFKDVQHISEDGLNEFYNLLSRYGSDSSYVFAMKRPRKKKAAVNPEVEALRKDKEKQERALKRLQDLYLYSERAMTEKDFIIQKNEISSRIQDINTRLGMVTHDANSTLSDEDFVRQASHLLITKKLIGRDYIYYKALAQTVSPDVLKIYMETILDSVYVIDGRVSSIVFRNGLTHTFIYQK

SEQ ID NO: 10183 - protein, 523 aa, synthetic construct
MAKSVTTIPATLSRFTAAPINSTKKRRVAAYARVSTDNEEQLTSYEAQVDYYTNYIQGRDDWEFAGVYTDEGITGTNTQKREGFKSMVADALAGKIDLIITKSVSRFARNTVDSLTTIRSLKEHNVECYFEKENIWTFDGKGELLLTIMSSLAQEESRSISENCTWGQRKRFADGKVTVPYNRFLGYDMGPDHNLVVNPEQAKLVKRIYGMFLQGQSPFQIARTLTEEGIPSPGGKDHWNPSNIKSILTNEKYKGDALLQKTFTVDFLTKKKKANEGEIPQYYVKDNHEAIIDPETFEMVQTLMATRKKGRNRKSSVSIFSSKVKCGDCGSWYGPKVWHSNDAYRKVIWQCNHKFDGQKCATPTLTEDEIKELFLWAANQVIDQKEQFIAIYKQVLSRSLDTTALESELSDLEAEINIAAELIDECIKENAHVAIDQAEYQKRYDGLVARFDKAKARHTEVTDLIAECTARRHQIETYLRELRNREPLTEFRETDWLAMVDYITVHSKNDIRVTFKDGTEIKA

SEQ ID NO: 10184 - protein, 590 aa, synthetic construct
MKTVEKIERKLPVLKTRKRVAAYARVSMESERMQHSLSAQVSYYSALIQKNPEWEYAGVFADYGISGTGTKKRDEFNHMLAECEAGNIDIILTKSIQRFARNTVDLLNTVRHLKELGIEVRFEKEKINSLSGDGELMLSILASFAQEESRSISENVKWGTIKRFKQGIPNGKFSIFGYEWQDDKLVIIPEEAEIIRWMYAEYMKGASRIEIGRALMDRGIYTRQGKPWVDSNVKVILTNITYTGNMLFQKEYCEDPITKHRRKNYGEMPQYFVEDTHEAIIPMDEWQAVQAEFKRRRDLGPFGNKSLKLSAFSTKITCGCCRKHYRHSGKRNTAGEVYYIWICQTKSQKGVSACPSKNIPEKMLQNTAAEVLGLDEFDEDVFSQQIEEVIVIGDDTLTFRFYDGHEVTTKWQSTAKTDWWTDERRKLWGERHKRKDTNPNRNTFYEFTGFIKCGCCGANYRCQSGKRKDGTPTRSWYCTGPRSECRNPAIRDDTMKRLVADVLGLDEFDEAAMDARIENATILDHTVTFHFRDGHTESRAFLDKRHGTPWTEERREKARESMKAAWTDERREAMSERIKKIRSEKKWPNP

SEQ ID NO: 10185 - protein, 529 aa, synthetic construct
MNRTAARSVTVIPPTINPLTHLSRVAVQKRRVAGYARVSTDSDEQFTSYEAQVDYYTQYIKRNPEWEFVKVYTDEGISGTNTKHRIGFNEMIADAMSGKIDLIVTKSVSRFARNTVDSLVTIRKLKEKGVEVYFEKENIYTFDGKGELLLTIMSSLAQEESRSISENVTWGQRKRFADGKVNLPYKQFLGYRKGADGFPEVVPDEAIVVRRIYTRFMEGLTPGAIAKELTADGIPTPSRKQRWQTSTVESILQNEKYKGAALLQKCFTVDFLTKKRKVNEGEVPQYYVEHSHEPIITPEEFDKVQTELARRKQISRQYSGKSIFSSRIVCGDCGSYFGSKVWNSTSKYRRVIWQCNGKFKGEHKCETPHLDEETIKARFVTALNAIIESKDNILEDCRLMQATLTDCTGIDTEIESLLEEIDVVTELTKRCIAENSQTAQNQEEYAARYNGFVERYEKAKAQLEQLRATKAAREAQAEAIGAFMFEVQELDALTEFDEKLWLTVIDTVTVHADGRMTFKFQGGKTLTSY

SEQ ID NO: 10186 - protein, 434 aa, synthetic construct
MKRVVERVDALIPAQPRALRVCAYARVSTGKDAMLHSLSAQVSYYSKMIQSHNGWMYCGVYSDEAVTGTKRERAGFQHMIEECRQGNIDLVITKSISRFARNTVTLLQTVRELKSLGVDVFFEEQHIHTMSADGELMMTILASYAQEESLSASENQKWRVRKAFENGEIINLRFLFGYDITPDGIRVNETDAAIVREIFARFNGGESMSSICRDLDARGHKGVLGGTWCAERMRNTLSNEKYLGNALLQKQYRNNHIEKKLLPNRGELPMYYAEGTHEPIIDQATFDKAQERLRILAQQTSNRKKPTHSAFSGLIHCGLCGNTYKRVTYRKKHYWNCTTFQTKGKSECAAKRIPEETLEVLTCEVLGEGSIDSDMVRSKITAIRAEKNNVVVYCMDDGSEIVKRWKDRSRAESWTPEMKEKARQRALQARRKKE

SEQ ID NO: 10187 - protein, 576 aa, synthetic construct
MKKNFKMPGSGSETPIRVAIYVRVSTVYQIDKDSLPMMKQDLTSYCKYILNTDDFVIFEDAGYSGKNTDRPAYQKMMSQIRQGLFTHLLVWKIDRISRNLLDFANMYAELKDLGVTFVSKNEQFDTSTAIGEAMLKIILVFAELERNMTSERVTATMINRASNGVWNGGRIPFGYSYYKPTQVFSIDPEENKIYNFMVETYEDTQSIVHTSRRLNEAGYRSRNGNMWSPVAVWTILRNPWYKGVYRYNYYKIPGRKAIKDESEWVIVENHHPASIDPDRFDRIQATLDKNARYRNTPGRKTAQKNVHVFSGLVWCAECGSAFTASPGKLHVSGYRPSKYGCPNVRKTKTCHAKYTSDVVLGEFLLNYILNILNAQKQFAYIHSTDDLQKRLLHGNTFSNVDHVDPDGLASLLNMLEKCSGSDPVLLKRPRSKPKMDPELKRMMADQKKQQRALDRLNDLYLYSDDSISEREYLVRKQQITDRLQEINEAIGMMSQEPWMRTINDEEFIRQASSFILTQKLADKQYIYYENLAESLDPEILKNFFVSILDSIILRDGRPETVVFRNGLSHTFTYKDS

SEQ ID NO: 10188 - protein, 518 aa, synthetic construct
MLGYAMYLRKSRADVEAEMHGEGETLLRHEHILMELAQKMGLSVTAVYREIVSGESIECRPEIKKLLAEVEQGIYAGVLVVDIDRLARGDTVDQGIIARTFKFANTKIITPKKIYDPSSEYDEEYFEFELFMARREYKLIARRIQRGRLASVSDGKYIGSTAPYGYDRYKLKGKGWSLKQNDESDIVKQIYQMYLSGIGMATIANSLNDMHIPTRTGNPWRKYTIADILANPVYTGKIRWAYRPYVKQNSSGTSEKRIVNANCMIVQGLHEALISEEDFEKAQELRKKNYRPPLKSSLALQNPLTGLIYCKLCGNRMTRLGKNSRNKYDTIKCTTRGCPCVSAPIYLVENLTIDFLKNWLLQYKMRLSKETPSNGNEQKLCQKAINSLSDDMRKIDTQIAKTYDLLEQCVYSVEVFTERNKTLSAKKSELENKQAALRQSLSDMQNADKLKYDIIPQIEHVLDTYDLCPTAEQKNNLLKSVISRIGYEKRAPNHRGNVDNINFSLDISVIIDGDMKKV

SEQ ID NO: 10189 - protein, 531 aa, synthetic construct
MSVDIKWNVPQKGKEGDLAAVYARYSSHSQGEQSIEGQLAEAQKYAAAHGYTIVHEYVDRAKSGRTDNREEFQRMLKDTAKKQFNVIILWKVDRFGRNREEIAINKMKCRKNGVRVEYVAETIPNTPEGVILESVLEGFAEYYSLQLSQNIRRGIAESAEKCQVTGGNRPLGYKTGPDKKFEIDEDTAPTVRLIFKMYADGATVTEIVAKLNELGLRTLRGGKFTHNSLHTILKNEKYIGIYNNHGKHIEGGVPRLIDDELFYKVQEMLKVNKRAPAKTWARADYLLADKAFCGKCGAPMFGESGTSKTGARHNYYICSHKKRFKTCDKKAVRQADVEDLVIKATCDLLADTELLDFIIENTWQYYLAQDNSQEELRNLTRQLEQTDLAIKNLIRAIEAGILTDETKSRMDELTTQKAELKAAIADRELARGFHLQREHIAFYLYDLRNADRTDREVQKRLIQTFVNSVFVFDDCVKLTFNFSGNKSVVTLKMLQAAEAGEVFGRCASCSTKAAQIRTAGVFHQRNVRVGV

SEQ ID NO: 10190 - protein, 591 aa, synthetic construct
MAKITRVEQAVPTIKTKKKVAAYARISMESERMNHSLSAQISYYSSLIQKNPDWQYAGVFADDGISGTGIAKRDEFKRMIEAADNGEIDIILTKSIQRFARNTVDLLETVRHLKDIGVEVRFEKEHINSMSGDGELMLTILASFAQEESRSLSENCKWGIRKRFEKGIPNGHFRVYGYRWEDDELVIVPEEAEVVRRIFQNFLDGKSRLETEREFAAEGITTREGCRWVDSNIKVVLTNVTYTGNLLLQKEFISDPISKQRKKNKGQLPQYYVEDTHPAIIDKATFDYVQSEIARRKELGPRANKSLNLTCFSGKLKCPFCGISYAHNKRTDRGFMEYWACGSRKKKGGRCPVGGSINHENLKKACAEVLGLDEFDEDAFSDMVDYINVPEREMLEFHLKSGEVITKDCPNTGHKDCWTAEYRAKTSEKRRKKPNCKGSSVMTGKIKCVGCGCNFRRATQPTSTAESGKAYYWRCAERDGCGTVGLREDVLKPFIAETLGIDEFDDAEFEKQIDHIDVLSATEMVFHFKDGRTVSRAWEQPKRVGRPWTDEQRAKIKESVKGRYTPEVRQRMSEHMKQLRKERGKAWRKEK

SEQ ID NO: 10191 - protein, 526 aa, synthetic construct
MAQRKVTAIPATISRYTATPINSTKKRRVAGYARVSTDHEDQTTSYEAQVDYYTNYIKSRDDWEFVAIYTDEGISATNTKKREGFKTMIADALAGKIDLIVTKSVSRFARNTVDSLTTVRKLKDEGIEIYFEKENIWTLDSKGELLITIMSSLAQEESRSISENVTWGQRKRMADGKVSFAYSRFLGLDKDKETGKIVVNPEQAETVRLIFHLFLEGMTPHSIAAELTSRGIKTPAGKDVWNQQTVRRMLSNEKYKGDALLQKEFTVDFLQKKMKKNEGEVPQYYVEGNHEAIISPAVFDMVQAELAKRTKGGTRYSGVSIFSNKIKCADCGGWYGSKVWHSTDRYRKVIYRCNKKYNGEKCQTPHVTEDEVRAAFVSAYNSLVTERKEIIANAEIIRKTLCVTDALQDEKGKLEEEMAVLVEMTQNIVAENARVAQDQEEYQKRYDSLVERYDTAKARYDEVVAAISAKEAQSERLANFIKVLKAQDGTISEFDGSLWGSMVEFVTVGRDKEITVTFRDGTEIQA

SEQ ID NO: 10192 - protein, 421 aa, synthetic construct
MKLRKIEPLKPKQKKLRVCAYARVSTDSLKQGESFENQVSTYERVIKSNPEYEFVSVYADQGMTGRSENRPEFQRMIADCKTGKIYLIITKSISRFARNTTTVLKYTRELKEIGVGVLFEENNINTLSSEGELMMTVLASFAQEESRSISENNKWTLKKKFERGEGMVNTARFMGYDKDETGDLVINKEEAKVVRQIFKMYLSGMGCHRIAKALNEEGVPTIAGSSWHASTIKGMLTNEKYKGDFHIQKTYIPEGTHQSVKNNGQVQSYYVTEDHPAIISAEEWQQVQELMEYHRKQRNIGKGEKYQKRYPMSGMLVCPYCGKSLRRRYVYNRKVEWLCATYIHKGKEACKGIRIRDTELAGLSFSEPMVVEEVMIDGEKHYGYTSKRAYDAGERAADRIEKESRSVLPRINRPRRTVIKL

SEQ ID NO: 10193 - protein, 463 aa, synthetic construct
MSFFTPNPQLFGLRVVKYIRCSHDDQVLHGDTLEAQDLILEDFIKVNRMILVDTFIDEALTARKKFNKRKEFVRLLDGVKAHAFDLIIFTKLDRWFRNIGDYHKIQEILEANGVQWKAVTENYDTTTTNGRLHINIRLSVAQDECDRDSDRIKDVFAYKLKNKTYVSGSLPRGLKLDAEKHVIIDPEWNCFALDMFDRFEATCSKRDTQLFLQEKYNIRVCYDTVARYLKNPLFKGQYRDDPDFCPATISPERFERIQKLAIRNVRIRHTQQFYIFSGLLICSSCNHYMCGTVTYRRMADGSEKMYKNYRCNFKAQSKLCDRGKTYREADLEEYMLAHIRPALSDYIAKYEVTAASTVQKNPVTEIAKIERKMKKLYDLFMDDLIDKEAYRSEYDKFKAQIEELQKCSTAAPMRSLDSVKKLLSEDWEAVYHTFSDQEKNTFWKSFVESVLVYEDGSMDIRFL

SEQ ID NO: 10194 - protein, 578 aa, synthetic construct
MGYVTKKAAQRFEEKKAAIYVRVSTQYQVDRASLPVQREELINYAKYALGISDYVIFEDAGYSAKNTDRPDYQQMMARMRTGEFSHLLVWKIDRISRNLLDFSVMYAELKELGVVFVSKNEQFDTSSAMGEAMLKIILIFAELERKTTSERVSAVFVSRANDGIWNGGKVPYGYSYDKESKTFSIAEDEAKIVRLIYSLYESEKSIVRVARIMNERGLKSRAGSDWSPTTVHTILSSPFYSGTYRYNYRDESNAKRFREKGKDEWVLVENHHPAIVSPERQAAVGVILESKRYNKNATYQRKNVHVFAGLLTCGCCGSTMAATTDKVRADGWRPSMYICSRRRKSEDCTNKYVSDVSLGPFVLNFFANLIKASNSFGRTTSIETLEKKLLRGEALSRVDHIERPGLEELYDHLRSGFDEKRFESPTIAATESSADLSERDLLLSEKRRLERALNRLKTIYLYGDDEMASKDFNIERERITKALSEVDSRINELDIANAFDLSLSDEAFMQKASQFILTQQLLDKRYVNYERFIRKIDPKIVKDFLNETVSNFCIKDGLTTSILLKNGIELRFSYKTAE

SEQ ID NO: 10195 - protein, 522 aa, synthetic construct
MTTRNVTVIPARKRIGNSAKAEELPKLRVAAYCRVSTDSEEQATSYEAQIEHYTNYIKSNPEWELAGIFADEGITGTNTKKREEFNRMIEECMQGKIDMIITKSISRFARNTLDCLKYIRQLKEKNIPVYFEKENINTLDTKGEILLTIMASLAQQESQSLSQNVKLGIQYRYQQGKIHINHNRFLGYTKDKDGNLVIVPEEAEIVKRIYREYLEGSSMLQIARGLEADGILTGAGNPRWHTSTINKILRNEKYIGDALLQKTYTVDFLSKKRVPNNGIVPQYYVENSHEPIIPREIFMQVQEQLVKRRCVHISKNGKKRNYSNKHPLSQMVFCGNCHEIFRRVHWNNRGKKSIVWRCVSRLENTGLFCTASTILEDTLKEKIVEAINVAVSGKNSFLAILKKNIETVLSVDLDETTADIDKRLEELQTELIQKANSKEAYDNIVNEIYRLRDLRQETLSRNALRQDKRDRIAEMTDFLNTQTGDITEFDDKLVKKLVEKATVYDDRLVVEFKSGLEIEVNL

SEQ ID NO: 10196 - protein, 522 aa, synthetic construct
MRKVTRIDGNNALQAFKPKVRVAAYCRVSTDSDEQIASLEAQKDHYESYIKTNPDWEFAGIYYDEGISGTKKENRTGLLRLLADCENKKIDFIITKSVSRFARNTTDCIEMVRKLTDLGVFIYFEKENINTQRMEGELVLTILSSLAENESLSIAENSKWSIRRRFQNGTYKISYPPYGYDYVDGKLFINKEQAEIVKRIFSEALDGKGTQKIADGLNSDKIPTKRGSHWTATTIRGILSNEKYTGDVLLQKTYTDENFKRHYNHGEKDQYMIKDHHEAIISHEVFEAAQEILKQRGKEKGVIKGSSKYQNRYLFSGKIKCAECGSNFKRRIHGSGNRKYIAWCCTKHIKDASSCSMKFVREDAIHQAFVVMINKLIFGHKFILRPLLQSLKKTNYSDNITKIQEMETKIKENTERVQVIMGLMAKGYLDPALFNTQKNELLKEAAILKEQKEAIKRAIDGSMTALVEVEKLLKFATKAEKQIDAFDSEIFEDFIEEIIVFSQEEIGFKMKCGLNLRERLVK

SEQ ID NO: 10197 - protein, 519 aa, synthetic construct
MKKVQVIPATLQNYTEKSFHNQKKRKVAGYARVSTDRDEQLTSYEAQVEYYTHYIKGRSDWKFAGIYTDEGISGTNTKHREGFKRMIADALAGKIDLIITKSVSRFARNTVDSLTTVRKLKDKGIEIYFEKENIWTLDAKGELLITIMSSLAQEESRSISENVTWGHRKRFADGKVSLAFSHFLGYDKGLNGNLVVNKEQAKIVKLIYRLYLSGYTFHSIAKELTERKIPTPAGCKIWRANTIRSILMNEKYKGDALLQKKFTVNFLTKESKKNEGEVPQYYVEHNHEAIISPQVFDWVQEEIKRRRKGKKRYSGVSIFSSKIKCGQCGGWYGAKVWHSTDKYRRTIYRCNDKFKRHCQTPHLTENEIKGAFIRAVNQLIENKEDILSNITMLKKRLTDTASLEKERDALELDLNMLTDQVQQLIVENAQVAQDQDEYGRKYNGLVSRYEETKKKYDQVCDAIQYRKARSRQMDSFIKELRNQELIKEFDARLWSSLVDFITVYSKDDIRVTFKNGIEY

SEQ ID NO: 10198 - protein, 546 aa, synthetic construct
MRTIRKIEQKISGLKQRKKVAAYARVSMESERMHHSLSAQVSYYSKLIQKNPDWEYAGVYADYGVSGTWIIKRNEFLRMLEDAEAGKIDIILTKSIQRFARNTVDLLRTVRHLKEKGVEVWFEKENIHTMSGDGELMMTILASFAQEESRSISENIKWRFHKKFEQGIPHAKFFIYGYRWQGDELVIQKKEAEIVRKVFQDYLDGKTRRSIQRELVKAGVRTMYGNFFLDSNIKQMLQNPVYTGTLVIQKTFVADPITHHQVVNRGEKNKYVVEDHHEAIIDPDIFRRVQEELARRKKEGQQRGGYARNFLNTSCFTGMIKCGICGKSYTHVTRRYKGAPREYWSCLSNKGKAEKRCGAYGAIPQPVLERVCVSALGMDVFNEKEFVRRVEKIVVSSYHTLVFYFKDGNVTTQEWKSTALKDMWTDEQKKKQRQWMEMYHQNNTSGRYTAFSERIVCPACQTKFIRCLEKRKNRQVAYWRCRGENRCIHVRSIKEEWLQRMAAETMGKLEFDDTAFRTQVQRIKVQDNETLLFLFSDGHTKEVKLP

SEQ ID NO: 10199 - protein, 510 aa, synthetic construct
MQKTDNKMRAVIYARYSSDRQREESIEGQLRVCEDFAQKNDLMVVDTYIDRALTARTDRRPAFQKMIADCKKRQFEYILVYKLNRFSRNRYDSAVYKHKIAQYGVKVLSAMERITDDPSGILLESLIEGIAEYYSVELAENVLRGMKENALEGKANGRLPLGYQKGPDGKVIIDPSTAPAVKLIFKGTAAGKRMKVIAEELNAAGYKNASGRPYNPNSFAALIRNKKYIGMYQWADTELEGVIPALIDKATWEKANGVLNSRKHKSNRIRSDQYLLTGRLVCGSCGSAYVGKSGTSHRGTTYQYYCCSNRIKRKGCKGKNFRQDQLESWLAAETIRTLNHPDIIRQLSNQILAVQKSLETEKDPLIDGLSAELKEYQKRLANSIKAIESGIISDTISANIQQYEEKIKILEKQLARAKLKQQPFTLTASHVEFFLSALLDGDPKDQEYRTKLLDILVSRVVLYPNKAEVFYRYQKELPSLPNPVIIREERGSNGNQLVGPLGFEPRTNRL

SEQ ID NO: 10200 - protein, 502 aa, synthetic construct
MSEKITIVSKPPKLERKKRVAAYARVSSGKDAMLHSLSAQVSYYNDLIQNHSDWLYAGVYSDEAKTGTKDSRAGFQNLVADCRAGKIDMVITKSISRFARNTVTFEKEGIYTFDGKGELLITIMSSLAQEESRSISENITWGQRKSFADGKIHLAYKHFLGYKKGEKGRPAIVEEEAAVVRLIYRLFLDGKTQAGICRYLENLEIPSPSGKEKWSKTTVTSILTNEKYKGDALLQKSFTVDFLQKKTKLNEGEVPQYYVEGSHPAIIEPDEWDHVQAEFARRKELGNAYSGKSVLSAKLVCEDCGGFFGSKVWHSTDCYRRTVWQCNNKFKGGERCLTPTVDTETVQRLFIKAYNQMMENRKQIIEDCELMRKKLTDFKSLDADIERHLEETQIVAELVKAAVKDNAVTAQSQEAYLEKYEALTQRYETAVAELDRLQNLRSIRSQKDKAMALYIRTLKKQPTVLGEWNDTLWTVMAEKAIVHRNGEITFVFYNGTKVRVEE

SEQ ID NO: 10201 - protein, 540 aa, synthetic construct
MENNILIGTRVDCLYRVSTDKQVDYDDKSQADIPMQRRECHRFCEKMGWTIVHEEQEDGVSGHKVRAENRDKLQIIKERAKQGKFDILLVFMFDRIGRIADETPFVVEWFVKNGIRVWSTQEGEQRFDTHTDKLTNYIRFWQADGESEKTSIRTKTALGQLVEDGGFKGGLAPYGYDLVKSGRFNKRKHEVYELVVNEAEAAVVRIIFDKYVHEGYGAQRIATYLNKLGYRARSGKMWHHASIRGIICNLTYTGVLRSGDSRSQVLLHLQIIPPELFEAAQHIRTSRANSAEQERRVPLNTRGQSLLAGNVFCGHCGSRLSLTTNGKAYPCKDDPNRIVKRVRYICYGKTRKQTECDGQTGYTAHTLDGIIDKVVRQIFERMKAVPKSEIVNIRYKEKMEERKALLRSIRAEHTKVSAELNMLKAEVIKSLRGESAFSQDLLGSLISDCETKCLEVQQQLEAAQLAYDEGQAVLEHLNAQYDDIISWADMYDTASMEAKKMIVNCLIKRVEVYRDYKLHIDFNIDFEQFSMGMDIVAIAA

SEQ ID NO: 10202 - protein, 527 aa, synthetic construct
MNTAVRTVTVIPPSINPMTHLTDTPLYKLRVAAYARVSTDSDEQFTSYEAQIDYYTQYIQRNQEWTFVKVYTDEGISGTNTKHRAGFNEMIEDALAGKIDLIVTKSVSRFARNTVDSLVTIRKLKEKGVQVYFEKENIYTFDGKGELLLTIMSSLAQEESRSISENVTWGQRKRFADGKVNLPYKQFLGYRKGADGFPEVVPEEAVIVRRIYTRFMEGLTPGAIAKELTADGIPTPSGKQRWQTSTVESILQNEKYKGAALLQKCFTVDFLTKKRKVNEGEVPQYYVEHSHEPIITPEEFDKVQTELARRKQISRQYSGKSIFSSRIVCGDCGSYFGSKVWNSTSKYRRVIWQCNGKFKGEHKCETPHLDEETIKARFVTALNAIIENKDNILEDCRLMQATLTDCTGIDTEIESLLEEIDVVTELTKRCIAENSQMAQNQEEYAARYNGFVERYEKAKARLEQLRTTKAAREAQAEAIGAFMFEVQELDALTEFDEKLWLTIIDTITVHADGRMTFKFQGGTEIEA

SEQ ID NO: 10203 - protein, 500 aa, synthetic construct
MPQDNNGIAYSYVRFSSKKQASGDSLRRQTEMAEEYASRHMLRLSSKNFQDLGISAFREGKRPSLADMLTAIDEGQITAGSTIIIEALDRLSRRGIDATQETVKEILRKDVQIVSLSDGLVLTKNSLNDLQSVIRIAVAADIAHSESERKALRLRQTKGQQRQNALKGIPINKILPFWLKRTETGYAFSDKMETARQIVTLKQEGKGSNMIAKFLNKQCIAGIRTAQWNHASITKMLKNPALYGAYQTGETNKEREMIQLEIVEGYYPALISKDEWLLLQSDQSKSTRGRRSTDNPYSGLLRCGCGGALIKRKSTVRGKLYVYHGCLNAKDGRCSQNLSIKGLDNALATMLGRLEFKKAVTSDKSAYLEKKQLEKRIANLNITLQEVDEVPSSVIKTISTMEARVKEITEQQAKVEREQRGIDAVNNAKLSSITDSLELNLMLKRVLKSITVTRSGSSWAVRIFHLSGHTQSFMLDNGKLKFVSDSIALKNLLNEYLKDD

SEQ ID NO: 10204 - protein, 525 aa, synthetic construct
MYLEISNPKDYHAALYIRLSKEDENEGPSGSVTNQQSLLHAFVREHRLDVYDTYIDDGWSGTSFDRPGFQRMLRDIEAGRVNMVITKDLSRLGRDYIMTGHYMERYFPEKRVRYISLLDGVDTGIESSANDITPFRAIMNDMYAKDISKKIKSVKHDKQRKGEFIGGKPMYGYRMHPSEKNRIVIDEDAAPVVRRIFAMALAGTSCRQIAVRLNEEGVLSPAAYAGLTLSCHGPYSGQWSSERITAMLKNETYIGNMVQGRTARISYKTKKCLRRQPEQWVVVEHTHEPLIDPETFRKVQLMVNSRRNTRSRTYDFLLKGLIFCHECGYPLAVMNRRNAAGEDRLFFVCRTYQRFTKAGVCSCHSIKEQTVTEAVIERTREVCEAYLNPERLRPIAAAAVAASGRVDGREEELSALHARIDSMTAHLDRMYMDRLNGLLADVDFERLYRRIKAERTALEEKLRELEAQKKNPVPIEDRARELVQQFLHCAFTSRELLVSLIERIELTESKEIIIRFRFREPEAIF

SEQ ID NO: 10205 - protein, 505 aa, synthetic construct
MNGVIYARYSSENQREESIDGQLRECTAFAQHNDIQIVGEYIDRAFSAKTDNRPSFQKMIKDSAKGEFDVIIVWKLDRFARNRYDSAHYKNILKKNGVKVVSATEAISSGAEGIILESVLEGMAEYYSAELAEKVSRGMKENALKCKYNGGSVPLGYYIDESKHFQIDSSVAPFVVECFEHYADGMTMKQLRDELNMKGVKNSRGGKLSIDVISRMLTNRKYLGEYTFQDITIKDGIPAIVSTSLFEKVQDRLTKTKKAPSSHKADDDYILTTKLFCGKCKSFMVGESGTNAQGKKYRYYKCVNHKKHQGCDMKSIRKDLIENMTIKYIREFLNDEDLINTLIDLAYDAQHKENEQLPLLRKQLAQTEKGIKNIVDAIEQGISTKSTRERLLDLEQRKNDIEMSISKESIENPMLTKKQFKFWFDQLKKLDISKSEQRQKLVDLFVNSIIIYDDHIKFFFNYKEHTETITFDELNNCSDLPDSPRPKKEIPDERYLFLFISMYKT

SEQ ID NO: 10206 - protein, 558 aa, synthetic construct
MNKLRAAAYCRVSTDRAEQSGSLASQRSFFDDYIRNSDSMTLVGVFYDEGTSGTTTLNRYGFNKMISLAVSGGIDIILTKEVSRFARNTVDTLNITRMLRAKGVGIIFINDNIDTRDSDGELRLSIMATIAQEESRKISERVKWGQQRKMEQGVVFGRSCLGYDVKDGKITVNADSAEIVKRIFTEYTVLLKGAESIADGLNSEQIRTVNGGRWSGAFIRKVLRNVKYVGDLEQKKTCTPDFLTHKKRLNRSEHIYIRNHHEPIISRELWEQTQAEISRRKPTDTSRHSDRYVFSGKVYCGVCGSVMVSRVKMLKNGKIYHALRCSGRIGGKSCNNETLNVTALKACVKRIFTDIPIDKTSVINAVIKGLSRTDKPDIPALRRKIETLNAKKRRAVDLMLDGLITQQELIEQKSYYDSIIEKLSQEISSDRSVLETDKIRTNAERFLDFTSDPIWLLVIRADYIHGTLTVYLKGIENGFTTCFTATGRGDSYRVITGNTVRSQGIIPGTMQVQKNWFHHDVNDKSIKKSAPDTFQVHFVLICRLFCFLFVAGYLAPTL

SEQ ID NO: 10207 - protein, 495 aa, synthetic construct
MPEALNAVIYARYSSDRQTEQSIEGQLRECYAFAKANDIAVIDTYIDRAISGKTDNRPAFQKMIEDSAKRQFQAVIVYRLDRFTRNRYDSAIYKARLKKNGVKVLSAMENLNGSPESIIMESLLEGMAEYYSVELSQKITRGMRENALKGKALGGQRVLGYKVNSDCYFEIDETTAPVVVDIFKLYSSGKTVKEICDILNARGVKTARGGAFNKNSLHTILTNKKYIGIYKTKYGEIVGGIPAIIDKELFEMVALRMEQNKKAPARAKAEINYLLSTKLFCGKCRSAMVGESGTSKTGKKYYYYACVKKKREKACDKSNVKKDWIEDLVIQRTVTDILKDDVIEKIADRLVELQKAEAAESGTMLYLQNSLAEIQVSIKNIMTAIEKGIITESTKTRLTELEDEKRNVEIEIAKESIARRIISREQIIYWISSFKDGDITSEKYRQQLIDTFVHAVFVYDDKIVITYNYSGENNTATISDLDLSSPPVLLESKPS

SEQ ID NO: 10208 - protein, 558 aa, synthetic construct
MNKLRAAAYCRVSTDRAEQSGSLASQRSFFDDYIRNSDSMTLVGVFYDEGTSGTTTLNRYGFNKMISLAVSGGIDIILTKEVSRFARNTVDTLNITRMLRAKGVGIIFINDNIDTRDSDGELRLSIMATIAQEESRKISERVKWGQQRKMEQGVVFGRSCLGYDVKDGKITVNADSAEIVKRIFTEYTVLLKGAESIADGLNAEQIRTVNGGRWSGAFIRKVLRNVKYVGDLEQKKTCTPDFLTHKKRLNRSEHIYIRNHHEPIISRELWEQTQAEISRRKPTDTSRHSDRYVFSGKVYCGVCGSVMVSRVKTLKNGKIYHALRCSGRIGGKSCNNETLNVTALKACVKRIFTDMPIDKTAVINAVIKGLSRTDKPDIPALRRKIETLNAKKRRAVDLMLDGLITQQELIEQKSYYDSIIEKLSQEISSDRSVLETDKIRKNAERFLDFTSDPLWLLVIRADYIHGTLTVYLKGIENGFTTCFTATGRGDSYRVITGNTVRSQGIIPGTMQVQKNWFHHDVNDKLIKKSAPDIFQVHFVLICRLFCSLCVAGHSAPTL

SEQ ID NO: 10209 - protein, 464 aa, synthetic construct
MARSVTVIPARNRQRETGCRAVQEKKIRVAAYCRVSTDQEDQLHSFEAQVDYYTKYINDHENYEMAGIYADEGISGTNTKKREQFKRMIADCEAGKIDLVITKSISRFARNTQDCLAYSRKLKNLGIGIIFEKENINTLDSTGELLFTILSSLAQDESRNISENCKWGIRTKFKNGEMHLNTFKFLGYDKDENGKLVINKEQAKTVRRIYRDFLIGINPAQIAKELTEEKVPGCNGQTKWYPSTIVGILKQEKHMGDALLQKTYTADFLTKRQVKNNGEIAQVYVKDSHKGIIDKETWNAVQEEFERRERFMKDHGTDRYSYGADCIPFCEKVFCGECKSLFTRHSWKSRGIVQWQCKNHRTDGRVTCSNAYVDNSDLEKGFVKAFNKLVADREKFMERWNQMKTDGSSLEKIRAEQMMEATGNDPLGRFVPEIAQLVLAEVTVLGAKKYEFFFLEGSRIKVSV

SEQ ID NO: 10210 - protein, 498 aa, synthetic construct
MEIQIREGNSIQKRKLKVCAYCRVSTDADEQENSLENQIRHYKEVITSNPDYEYAGVYSDFAISGFKEKRPGLQKMLADAQKGKIDLILTKSVSRFARNTSIVLEATRKLKELNVGVFFELQNINTLSGEGELMLTILAAFAQAESESGSVGAKMVYQRKYEAGIPVQYLERSFGFKKDERGVYIADEEEAVWVRKIYEMAADGYTPASIKRYLNENGVKTVGGAEWIDSTVFRLIENEIYKGDYIMHKHFVNEERKLVRNRGEVDAWYIEDDHEAIVSPELWQKAQDAIEAKRDYLAEGSVIEEFTEDNYPYMNRIFCAKCGHPLYRRIYSNGNRLNWGCSGTKRHGKSFCEGINIPDGVLRKAWHFDGNMYIDEKPSVKGTKEFTYLKESSWKRRHKKKVPEAIPENTEEAYPYRKKIFCGLCGSRLVRHVNPKSHKVIWICNGAKRKGVAFCRGTRIPDSVIRGWGEIKKDIYIQRKDDKNGKKRYSYTSKKPTA

SEQ ID NO: 10211 - protein, 522 aa, synthetic construct
MALLPRKPAKHPAKPKRGKKLEIEEPGVLYGRYSSHNQKDISVEQQFEKGYELAAEYGIRIIDTYADRAVSGRTDKRRDFQRMMTDAAKGKFRYVIAWKSNRMGRNMLEALINEARLQDLGVRVLYVEEDFDDTAAGRFAARSMMNVNQFYSENMAEDIKRGLYDNAANCMVANGHLPYGYKADETLHYAIDEPKAAVIREIFTRVSCGEAFVDIMASLNVRGIKTSYGRPWGRSSFQKILSNERYRGIYIYGDVRKEGGIPRIISDELYFKVQEVITTKKNPQGRHRVNGDYLLTGKLFCGHCKSPMTGVSGTGRSGNLHYYYVCQKRRTEKTCDKKNVRRDEIELQVAQAIKDYALKDDVIEWIADSTVAYNERKEAESKVGILEDQLAGTEHGIKNIMSAIEQGIITETTKSRLVELESERATIKANIAAARADIVTVSRDDIISGLEMFRDGDVHDKKYQERLFDTFLVAVYAYDDDLRLVFSFSGNKNTIQIPIESAVNAVENNEAECSFKLCSAPP

SEQ ID NO: 10212 - protein, 544 aa, synthetic construct
MRVSVNLNAQKPDTTTNAVIYARYSSHGQTEQSIEGQLAKGHEYAAAQGYTVVHEYIDRAMTGRNDNREAFQKMLSDTGKHQFQVVIVWKVDRFGRNREEIAFNKHTCKKNGVRVEYVAESLPNSPEAVILESVLEGMAEYYSIQLSQNIRRGQLESAKKCQCVGGSVPLGYTLDSDKHFVIDPQTAPVVKKIFDLYAEGATISEITGQLNEQGIRTARKQLFTKNSLTKLLKNEKYIGVYTYKDIVRVEGGVPAIVDESTFDRVQELLKINRRAPSHTWTKVEYLLTDKLFCGHCGSPMVGESGFSHTGAKYSYYGCIKRRREKACDKKPVRQDWIEALVLDETVKLLHDDELMEYIIDRTWEYYQVTDKVQEEKAVLEAQLAEVDKAINNLVRAIEAGIFNAATKSRMDELDAQKAALTASLADLELTSGIRITRDHIEYFLLRLRDLDVKDRECQKRLVQTFVNAVFIYDDGRVKITYNYSGQSSTITLNQIASAEKGKGFVCCLPCSTSSPRFPRGVAALFLFWGKNGCESTTNFSCIVL

SEQ ID NO: 10213 - protein, 439 aa, synthetic construct
MIADALAGKVDLIITKSVSRFARNTVDSLSTIRKLKEHNIECYFEKENIWTFDSKGELLLTIMSSLAQEESRSISENATWGHRKRFADGKVSFAYSRFLGYEKGPDGTIVVVPEQAKTVRLIYKLFLDGMTIHTIAGELTKRGIKTPGGKDKWNQSTVRSILTNEKYKGDALLQKSYTVDFLTKKTKTNEGEVPQYYVENNHEAIIDSQIFELVQAEIAKRNKGKEHYSGVSIFSTKVQCAECGGWYGSKVWHSNDKYRRVVWRCNRKYDGDQPCGTPHFDEETLKQLFLSALNKLVGKRNEIRDSFDAIRSTVFDTDALEAELAQVEAEMSIAAEQVARSIRENAMVALDQSAYRARHDALCDRYESLKARCEELKETISDKQTRLAAIDDFLRTLMKQEALPTTFDPMTYHILVERMTVYSKARVMVRFKNGMEIQA

SEQ ID NO: 10214 - protein, 549 aa, synthetic construct
MSNQKKTALYCRLSQDDGLDGDSNSIQNQKSILQKFAEDHHFPNPCFYVDDGFSGGNFQRPAFQQMIADMENGEVGIIVTKDLSRLGRNQLHTGLYIEERFPMFGVRYIAINDNVDTENAESNDLMPFKNLFNEWFIRDTSRKIRAVQKAKAERGERLGTRAPYGYVKDLETKKLNIDEEAAAVVKRIFALCAAGNGPSRIATILTKEKVLCPSYYTYQKYGLTHSALDITKPYHWSDSAVANLLENEIYLGNTVNYRFSTRSYKDKRKMEHPREECLVFENTHPAIIPKEIWDIVQRVRKNKRRPTKMDEQNKYSGLVVCADCGKTMVLHRAHTMSADYNHFTCRTYKKDGEACTAHYIRECILDEIVLEDLRRVTAEAREHPQEFAEYLNSKQSAELQKEIRMLEKEKAAMQKRKAELDAIFKKLYEDSVLGRITAEQFQMLSTSYTDEQAKLTESLPQQEAEIQRLKETVSNTAAFLDKVKRYTDIQALTPELLRLFIQKIVVHEKEVKWSKHAPQTVEIHYADIGCMENNHAAEAELDAKIPLVS

SEQ ID NO: 10215 - protein, 668 aa, synthetic construct
MAYAKKKKILNFWTKKKAALYVRVSTRYQVDKDSLPFQRKKLKEYCKFLGLEDYVIFEDDGYSAKNTERPHFQEMMSRVRSGEFSYLIVWKVDRVSRNLLDFAAMYQELKDHKVTFISMNEQFDTSTAIGEAMLKIILIFAELERNMTSERVTGIMLDRAEQGLWNGARMPVGYRWNNETKFPEPDPEEVKIVQLIFDKYEEWKSSIKIARYLNNNNFKSKRGGQWTSKLIHDIIRNPFYIGTYRYNLRESGRGPLKPESEWIVRENNHPAIIDKAQFDRCNKIMDQNGSSRDTSDLRARKYVHTFSGHLVCGKCGANMIASKDRARANGWRPSMYRCAQRSRMLDCDNSRTINESYIGPFIFNYIANLARVQKNFKNITTVEKLERELLKGETFDGVAGILPEGLNLTFQALSFRQVGNGTYIPDVDFLGDSGGASDRDQIELLKSEIEKSKNAVTRLTDVYLFDPDSMTKEEFATKKKELAKKIEGMERQLADLLDDSGNDDLADMSFIKKASAFLVAQRIVSKSFVDYVGMAQELDNEILKDFIDQIVDQIVVLDGRVQSITFINGLKHEFRYAAPAELPVCKKCGGRIGSTCGCRTRTFDFSGKRYQRIKVGDPRDMLHGKKNPVCPECFAQEGRWHHWNCKIETCPICGERLAECEHGPNGKN

SEQ ID NO: 10216 - protein, 440 aa, synthetic construct
MIADALAGKVDLIITKSVSRFARNTVDSLSTIRKLKEHNIECYFEKENIWTFDSKGELLLTIMSSLAQEESRSISENATWGHRKRFADGKVSFAYSRFLGYEKGPDGTIVVVPEQAKTVRLIYKLFLDGMTIHTIAGELTKRGIKTPGGKDKWNQSTVRSILTNEKYKGDALLQKSYTVDFLTKKTKTNEGEVPQYYVENNHEAIIDSQIFELVQAEIAKRNKGKEHYSGVSIFSTKVQCAECGGWYGSKVWHSNDKYRRIIYQCNNKFRNKTGCSTPHLTEYEIKEYFIKALNRLITEKDEIIANTEMIQKMLCDNSELEAKRDVLQEEIAVTVELTQNAVAENARVAQDQDNYNKRYNALVERYDRLKAQYDEVSTAISDNDARYEQMGRFITVLKDQEGVITEFDDALWSSLVEKIVVKSKEDVTVVFKDGTEMKAE

SEQ ID NO: 10217 - protein, 487 aa, synthetic construct
MPEALNAVIYARYSSDRQTEQSIEGQLWECYAFAKANDIAVIDTYIDRAISGKTDNRPAFQKMIEDSAKRQFQAVIVYRLDRFTRNRYDSAIYKARLKKNGVKVLSAMENLNGSPESIIMESLLEGMAEYYSVELSQKITRGMRENALKGKALGGQRVLGYKVNSDCYFEIDETTAPVVVDIFKLYSSGKTVKEICDILNARGVKTARGGAFNKNSLHTILTNKKYIGIYKTKYGEIVGGIPAIIDKELFEMVALRMEQNKKAPARAKAEINYLLSTKLFCGKCRSAMVGESGTSKTGKKYYYYACVKKKREKACDKSNVKKDWIEDLVIQRTVTDILKDDVIEKIADRLVELQKAEAAESGTMLYLQNSLAEIQVSIKNIMTAIEKGIITESTKTRLTELEDEKRNVEIEIAKESIARRIISREQIIYWISSFKDGNITSEKYRQQLIDTFVHAVFVYDDKIVITYNYSGENNTATISDLDLSSPP

SEQ ID NO: 10218 - protein, 434 aa, synthetic construct
MKKTIVNIAPAVAETPRTKRVAAYARVSCGKDTMLHSLAAQIDYYRDYIMMNPEWRFAGVYADESKTGTKDNREQFQLLLTECRSGNIDMVITKSISRFARNTVTLLETVRELKNLGIDVFFEEQNIYTMSAEGEVMLTLLASFAQAESLSCSDNCKWRIRKGFEEGRASTCTMLGYRLVNGEITLIEEEAETAKRIFDLYLAGYGLQKIANTLNEEGLFSIFGNEWHPTTVRKVLTNEKYCGDLLLQKVYRENHLTKRKCYNTGELPQYFVEDDHPAVVTRQIFMAVQDELKRRAKEKTQPVGSKSSFTGKIRCSCCGKNYRRKTTPYNIVWCCSTYNSKGKKYCPDSKVIPEETLKRAAAEILKTDGFSDGAFETQICTIEAHPGNLLRFIFTDDSTTDYVWKDRSRSESWTDEMKAAAGRKTKERDANHGK

SEQ ID NO: 10219 - protein, 456 aa, synthetic construct
MRNKEIAPALVRVALYIRVSGEEQKIKGLSLEAQQERLEAYARERGWVIVGIYIDAAKTARKNIHKRTEFQRMMDSVKRDEVDILLFARLDRWFRSVADYYKVMEILQAHNCDWKTTDEEYDTTTANGRLYINVKLSIAQNEADIDGERIDVVFDSKIAHGTVVSGSAPFGFRVNEEKRLEVVPEDAAIVQNAFNYFENTVSQRATVRYVRETYGVNWCGATFRRMLKEKLYTGVYDRGGRYNDQFCPAIINRQQFDRVQALLTRNVRSAPSGKVYIFTSILTCAECGHKLVGYKSSDYFYYRCNQHFQRGRCSHNHSAREDVVEQWLFEHLGEELDRCQLEWDVEAAKKKASVARTDKAALKRKLTKLKELYVNDLIDIEDYKKDYQIYVSALNQIPEPAQEAPPDFAAVRRLLDNSFRTIYDTLTREEKRTLWRSVIKEIRIDNDQNITGVVFG

SEQ ID NO: 10220 - protein, 526 aa, synthetic construct
MAEKHLTDGTTALAAQPRVIKIEAAEKPQNAQLRVAAYTRVSSDSDDQLNSFAAQNRYYAELISGKAEWRMVDIYADEGITGTSTAKREDFQRMMADCRRGLIDQILVKSISRFARNTKDCLEAVRELKELGVNVRFEREGIDTANVSSELITAIYAVFAQKESESISGNMRWSCQRRMEAGTFLPSSMAYGYKLVGRKIEIDADSALVVCRIFQWYLNGVNRTAIAKKLNEEGISSGQRKKWHSASVRYILTNEKYTGDSLWQKTYTSDTLPATRHKNTGEHEQYYAVGTHPPIITREIFDQVQTLMQKRSVGQAVTHERLCIQMRCSCGSRIRAKQVNGRWYWCCCRHDEKGDCAIKPVPEAQTEEAFCRLYYKLKHQSLPILEQMLETLQTIRDRRLLWSEDIVSLNKKISELSSQNQTLAFLKQNGLVDPDIFIAKSNELTRQLRQAKLDKEKLMAAEGDATAHRTRELIALLEDGPDFLDRPDTELCGALVAEIIVESNDTLRFRLHNGLELRESIERTVR

SEQ ID NO: 10221 - protein, 549 aa, synthetic construct
MNETAPRVIKIPAKPESVRQAELQRQLRVAAYCRVSTKEEDQANSYEVQKEYYTDKIMSNSAWTMAGIFADKGITGTSVKKREDFQRMIRHCRQKKIDVVLTKSVSRFARNTVDCLYYTRALKELGIAVIFEKENINSLEEDSELRITLSGAFAQSESESISANVTWGKRRAMESGKATIQYKYLYGYRRGADDKPEIIPEEAEVVRWIYERYLAGASTRMLRDELHEQGVTYSEKSPQWTLPHIKSILRNEKYCGDVLMQKTFQQDVINRKVIKNTGQLPMYLIENHHEGIVSREKYNAVQAEMARRKAAKSPSKRASTGLAAYTSRYALSDRLVCGECGTLYRRCTWTRPDGKRVVWRCVSRLDYGKKYCHSSPTLDEVPLQQAIIAALNTVLPDLDGRIRQITEALEAEVIPFPGSGMSLGDIDRRLAELETQFQRLLEKAADDPIAYGNRFKEILDEQTALKELRATILTENKEHAEADRRIRDAMGMLENAVPHIAEWDESAIRQLVAQVKVLSKNEISVTLKSGIEIRQSISNLGLSKTPICS

SEQ ID NO: 10222 - protein, 464 aa, synthetic construct
MARSVTVIPARSQKVRTGHKAVQEKKIRMAAYCRVSTDQEDQLHSFEAQVEYYTKYINDHENYEMAGIYADEGISGTNTKKREQFKRMIADCEGGKIDLVITKSISRFARNTQDCLAYSRKLKNLGIGIIFEKENINTLDSTGELLFTILSSLAQDESRNISENCKWGIRTKFKNGEMHLNTFKFLGYDKDENGKLVINKEQAKTVRRIYRDFLIGINPAQIAKELTEEKVPGCLGQIKWYPSTVIGILKQEKHMGDALLQKTYTADFLTKRQVRNNGEIAQVYVKDSHKGIIDKQTWNAVQEEFDRREKFMESHGTDRYSYGADCMPFCEKVFCGECKSLFTRHSWRSRGIVQWQCKNHRKDGKVACTNAYVDNADLEKGFVKAFNTLVMDRDKHMERWQQMKSDGTPLEKIRAGQMMEAVENEPLTRFVPEIAQLVLCEVTVLGAKKYEFFFLEGSRVKVSV

SEQ ID NO: 10223 - protein, 519 aa, synthetic construct
MAFRVIYRLPKRKEVRLVEIQIREGSREQKRKLKVCAYCRVSTDADEQENSLENQVRHYETVIKANPDYEYAGVYSDFAISGFKEKRPGLQKMLADAEKGKVDLILTKSVSRFARNTSIVLEATRKLKELNVGVFFELQNINTLSGEGELMLTILAAFAQAESESGSVGAKMVYQRKYEAGIPVQYLERSFGYTKDERGVFIADEAEAVWVRKIYEMAADGYTPAAIKRYLNENGVKTVGGAEWIDSTVYRLIENEIYKGDYIMHKHFVNEERKLVRNRGEVDAWYIEDDHEAIVSPELWQRAQDALEAKRDYLAEGSVIEEFTEENYPYMNRIYCARCGHPLYKRIYSNGNRLNWGCSGTKRYGKSFCEGINIPDGVLRGAWHFDENMYIGEKQTDKGKKEFTYLKEASWKRRHKKKEQEPIPENTETEYPYREKIFCGLCGSRLVRHVNTKNHKVIWVCNGRKRKGKDFCDGTRVPDTIIKGWGEIKKDIYIQRKDDKNGKKRYSYTSKKPKGADRA

SEQ ID NO: 10224 - protein, 581 aa, synthetic construct
MSRTTNKRPGKAKSGLSRKQKVAIYIRVSTLYQVDRDSLPMQRKDLIAYASLILGIEEYEIFEDAGYSGKNTDRPAFQEMMQRIRKGEFTHVLVWKIDRISRNLLDFAEMYEELQDLRVTFVSKNEQFDTSTAIGEAMLKIILVFAELERNMTSERVTATMISRANSGLWNGGRIPFGYDYDPDKTAFSIREDEEKVCQMIKNDYMEHKSLVHTSRMLNASGYKTRAGAEWSPTAVWIIISSPFYAGIYRYNRYKGTERRVENPEDEWIMIQNHHPAIFSLEEHEKMLAILDENSRNHRSVGQKHQTERVHIFGGIAYCGKCGSKMVSTPGRLHANGYRPTNYSCPKHRKTKECDNPTVSDTQVGEFVINYILNMLRAKKRFSTIENPEDLERCLLYGNTFSEVEHIDGNGLNEYFNLLSRYGSDDSYTFSVKKSRKKKAEVDPEVETLRKEKEKQERAMKRLQDLYLYSDTSMSEKDFIIRKTEISKRLEEINAMLGMVAKNSEPSLSDEEFVRQASHLLISRELQNRQYIYFKNLAQNVSPEILKAYMETVLDSVLLVDGRVSSIVFRNGLTHKFKYKS

SEQ ID NO: 10225 - protein, 535 aa, synthetic construct
MNSYDISFRPEEVIQYLRKSRSDDPNMTIEEVLEKHEHMLRDFAVNHFGAPVPDNNVYREVASSETIDGRPEMLRLLRAIESPDIRAVLVVDVQRLSRGDLEDAGRLMKLLRYTNTQVITPMKTYDLRDEWDRDIFERELKRGNEYLEYFKKIQARGRLQSVQEGNYLGSKPPYGYDRAVIRIGKKNCPTLAVNKEQADVVRLIYELYVNKDWGAQRIANHLDSLGIHPLHNAHWNPAVIKDILRNYHYIGKVVWNRRKTITVVDNQEVYKTRPWNENMLIFDGRHEAIISEELFHAALARQGRSHRCRPDNRVSNVFASILHCSCGYSMSLRHDGRGSLRLSCDDQRHCKSGSIGYEELIDYICKVLTAYIDDFKIKVKHDNANEVDIHRALVTDLEARLAALEAKEVKQWEVYSMEGMPRAIFDKLNKQVKEDKAEVERALKQARKDSPDPVDYRERIAKFGDALNALQNPAASAEIKNQYLKAIINDMIYTRPGAVRLTADNCSDYGINYKDMAKRGGWYSPPFRLEIKFRF

SEQ ID NO: 10226 - protein, 540 aa, synthetic construct
MRVVLYMRYSSDRQTEQSIEGQNRVCTAFCEQQGYEIVDRYIDRATSAFKDTDKRTEFQRMIRDSEKQLWEGIVVYKLDRFARNRYDSATYKARLKKNGVRVISATENISDNPEGVILEAVLEGMAEFYSKELSQKITRGMFESANKCHSIGGHIPLGYKIENKKLVIDEAGAAIVREAFDLYANGATVAEICETFNTKGYRTAKNAEFNKNSFRSMFKNERYIGIYKYKDLRIEGGVPAIVDKDTFAIVQKKLSKNAEAPSRGKAKIDYLLSQKLFCGHCGSLMTGESGTGKGGTTYFYYTCGKRKREHTCDKKPLKKDFIERAVVEDALTLLTPETIDELADIAVNESIREMEENSIIPALKDQLHDTERSINNLVKMVEKGVESDTIADRLKELEKEKRAIEKRLVVAQDDYVLLEKDHIVWWLSEFCNGDIEDEEFRRHIIDLLVNSVTVWDEPDGWYKITSVYNLTSNKTKTFRCSDLSGQAPPSSCTKKDAAAKSLEVSTVSPHRYTMCHGGTAGTGKSKTQAHAFEFASCFFT

SEQ ID NO: 10227 - protein, 519 aa, synthetic construct
MKKVQVIPATLQNYTEKSFHNQKKRKVAGYARVSTDRDEQLTSYEAQVEYYTHYIKGRSDWKFAGIYTDEGISGTNTKHREGFKRMIADALAGKIDLIITKSVSRFARNTVDSLTTVRKLKDKGIEIYFEKENIWTLDAKGELLITIMSSLAQEESRSISENVTWGHRKRFADGKVSLAFSHFLGYDKGLNGNLVVNKEQAKIVKLIYRLYLSGYTFHSIAKELTERKIPTPAGCKIWRANTIRSILMNEKYKGDALLQKKFTVNFLTKESKKNEGEVPQYYVEHNHEAIISPQVFDWVQEEIKRRRKGKKRYSGVSIFSSKIKCGQCGGWYGAKVWHSTDKYRRTIYRCNDKFKRHCQTPHLTENEIKGAFIRAVNQLIENKEDILSNITMLKKRLTDTASLEKERDALELDLNMLTDQVQQLIAENAQVAQDQDEYGRKYNGLVSRYEETKKKYDQVCDAIQYRKARSRQMDSFIKELRNQELIKEFDARLWSSLVDFITVYSKDDIRVTFKNGIEY

SEQ ID NO: 10228 - protein, 532 aa, synthetic construct
MRVSVNLNAQKPDTTTNAVIYARYSSHGQTEQSIEGQLAKGHEYAAAQGYTVVHEYIDRAMTGRNDNREAFQKMLSDTGKHQFQVVIVWKVDRFGRNREEIAFNKHTCKKNGVRVEYVAESLPNSPEAVILESVLEGMAEYYSIQLSQNIRRGQLESAKKCQCVGGSVPLGYTLDSDKHFVIDPQTAPVVKKIFDLYAEGATISEITGQLNEQGIRTARKQLFTKNSLTKLLKNEKYIGVYTYKDIVRVEGGVPAIVDKSTFDRVQELLKINRRAPSHTWTKVEYLLTDKLFCGHCGSPMVGESGFSHTGAKYSYYGCIKRRREKACDKKPVRQDWIEALVLDETVKLLHDDELMEYIIDRTWEYYQVTDKVQEEKAVLEAQLAEVDKAINNLVRAIEAGIFNAATKSRMDELDAQKAALTASLADLELTSGIRITRDHIEYFLLRLRDLDVKDRECQKRLVQTFVNAVFIYDDGRVKITYNYSGQSSTITLNQIASAEKGKGFVCCLPCSTSSPRFPRGVAAFFCFGENRV

SEQ ID NO: 10229 - protein, 581 aa, synthetic construct
MSRTTNKRPGKAKSGLSRKQKVAIYIRVSTLYQVDRDSLPMQRKDLIAYASLILGIEEYEIFEDAGYSGKNTDRPAFQEMMQRIRKGEFTHVLVWKIDRISRNLLDFAEMYEELQELRVTFVSKNEQFDTSTAIGEAMLKIILVFAELERNMTSERVTATMISRANSGLWNGGRIPFGYDYDPDKTAFSIREDEEKVCQMIKNDYMEHKSLVHTSRMLNASGYKTRAGAEWSPTAVWIIISSPFYAGIYRYNRYKGTERRVENPEDEWIMIQNHHPAIFSLEEHEKMLAILDENSRNHRSVGQKHQTERVHIFGGIAYCGKCGSKMVSTPGRLHANGYRPTNYSCPKHRKTKECDNPTVSDTQVGEFVINYILNMLRAKKRFSTIENPEDLERCLLYGNTFSEVEHIDGNGLNEYFNLLSRYGSDDSYTFSVKKSRKKKAEVDPEVETLRKEKEKQERAMKRLQDLYLYSDTSMSEKDFIIRKTEISKRLEGINAMLGMVAKNSEPSLSDEEFVRQASHLLISRELQNRQYIYFKNLAQNVSPEILKAYMETVLDSVLLVDGRVSSIVFRNGLTHKFKYKS

SEQ ID NO: 10230 - protein, 540 aa, synthetic construct
MATATRRVVRTMPQMFIDVADNQSERLQVAAYARVSTEKEEQEDSFERQVEHYKQLIYSKPEWQFVDVYADPGISGTRAEKRPDFLRMIEDCRAGKIQKVLVKSISRFARNTVDALQYIRELKDLGISVYFESENIDTLTPGGEVLLTILAAMAEQESRTISSNIKWAWQRKFQKGDVILNTGLMLGYRKIGKDDEGHDVYEINEEEAEIVRRIYREFIAGYSITQIAKRLQADGVKTKLGKENWRHNVIESILTNEKYTGNALLGKTFKPDVLTKYRQKNDGKKAPIYYVEGSHPAIIEKGLFDLAQQEMHRRRDANDNKVGGGRYSSRYPFSGMLVCGICGSKLRRQVRTMGSGKRTASWGCCNRINNGRAACDSHHVNEDVLEATYLTAMRRLVDSAEEVVEVVRDGTELALEPENKAAMERIDEETIQLQEAALALHKAKQRMEIGAVEYASRVKEYSERMKELEAERNELQGTAAKYAEVRMWLDTFIEQTMQSDTLTTVDGTTMKMLVDRIHVRNDGIVVEFKCGVAIEQEYVK

SEQ ID NO: 10231 - protein, 488 aa, synthetic construct
MKKTRAVAYIRVSTERDAQLHSYEFQEHYWQSAFEDDPNTDLIGIYADKGISGHSVQKRPKFLVMMQDAREHKFDKIYTKSVSRFARNTTQLLEAVRELRDLGIEVVFENENIHTFQPTSEIFLTIAATIAENDLEVDSARQRWSIQHRCENGWISVGSGLFGLKLTADNELEIVPEEAAVIRYIYESYVDGGIGSKKIADTLNAAGVQSRNGYPWDAKHIIGLLRNEKYKGDVIMGKSVRHFGEYHKNPNAEYAPRYYMEGTHEAIVDRDTWEAAQRILEERSRNHCRTRIAHSFTGMIECGCCGKNYLHKVNNSQCKWQTDIWACRTYLRDGKKACGNSRIKDTVLKEKFISAYNEFIERRPQGDSMVALQEVLEDLRQQEQELAELMMQRLIPKAAYEEERKSVKMQITDISEKISERRAKRVPESEYVPITEFSEEKAKRFLSKVVVTMFTVTFVFYNGAKITRSYDNGQPGNKVGWNKKKEES

SEQ ID NO: 10232 - protein, 490 aa, synthetic construct
MRVVLYMRYSSDRQTEQSIEGQNRVCTAFCEQQGYEIVDRYIDRATSAFKDTDKRTEFQRMIRDSEKQLWEGIVIYKLDRFARNRYDSATYKARLKKNGVRVISATENISDNPEGVILEAVLEGMAEFYSKELSQKITRGMFESANKCHSIGGHIPLGYKIENKKLVIDEAGAAIVREAFDLYANGATVAEICDTFNTKGYRTAKNAEFNKNSFRSMFKNERYIGIYKYKDLRIEGGVPAIVDKDIFAIVQKKLSKNAEAPSRGKAKIDYLLSQKLFCGHCGSLMTGESGTGKGGTTYFYYTCGKRKREHTCDKKPLKKDFIERAVVEDALTLLTPETIDELADIAVNESIREMEENSIIPALKDQLHDTERSINNLVKMVEKGVESDTIADRLKELEKEKRAIEKRLVVAQDDYVLLEKDHIVWWLSEFCNGDIEDEEFRRHIIDLLVNSVTVWDEPDGWYKITSVYNLTSNKTKTFRCSDLSGQAPPI

SEQ ID NO: 10233 - protein, 587 aa, synthetic construct
MTARKAISKRTAEILDALNTLKIAIYIRVSTHWQIDKESLPLQRSDLINYCKLILGTDNYVVFEDAGYSAKNFERPDFQRMMSRVRAGEFSHILVWKIDRISRNLLDFATMYKELKELGVTFVSKNEQFDTSTAIGEAMLKIILVFAELERNMTSERVTAAMLSRASDGKWNGGRVPYGYTYDKEAKEFVIAEAEARVVKLMYDLYDEKRSLLAVSKELNTRGYRSRKGVAWSPVTVGNIMRSPFYIGTFRYNYRQENGQSWSFKPESDWIMTEGHHPQLVTHEQWNRVVATMKSQRRGQPGHGKTFNRGNVHIFAGLMTCGYCGGTMTATKDRERKNGWRPSIYSCSSKRRNNDCPNKYISDMIIGPFVLNYIANMIRARKSFGASTSVETLQKKLLRGETFSDVLYIGRPGLEELYQHFKGVQDQEQNFMASPGSTAASEEQERDILLAEKRRKERALSRLKALYLYSEEEQAISEAEYIVERKKLIDSLETIDTRLAEIDEALAQRINLSDDEFIAKASYFIMAQQLTDKRYIDYERFVKTVDPQIVKDFVNSVCANFCIKSGRVASIRFKNGIEHQFFYRDKE

SEQ ID NO: 10234 - protein, 504 aa, synthetic construct
MEDFIYARQSVDKEDSISIESQIELCLREVGNNPHRVFRDKGYSGKNTERPDFQDMMAAVRAGGARRIIVYRLDRISRSVLDFANVISELQKYGVEFVSITERFDTSTPIGKAMLMIVMVFAQLERETIQQRVMDAYRSRSRKGFYMGGRVPYGFELENTVMEGIKTCMYKPIPEQIQVVQLIFSLYAMPQVSFADVVRYLSQNGIKNPNGKNFSRMRIRDIITNPVYAKADASIYEFFHGQGTEIINDISQFIGTNGAYLYTGNKAAKRKNISLDGHVLVLAPHAGCIDADTWIRCRRKCLNVRQIAKPVKAKNTWLAGKIKCIDCGHALSLKSYSRKRSADARYYICNSKYVSASCDGVGAIQASGIEDIVFDEMSRKLKEFNKLSYKEKHGDPIELTKLKIRAEEIEKEIATLIDKIVSASTATMEYINERIDALDEEKKTVKEKIAQMSAEMYDRQNIGVISDYMSKWNDISIDDKLTVVDTLIESIHVGHGKVKIAWKI

SEQ ID NO: 10235 - protein, 590 aa, synthetic construct
MKTVEKIERKLPVLKTRKRVAAYARVSMESERMQHSLSAQVSYYSALIQKNPEWEYAGVFADYGISGTGTKKREEFNRMLAECEAGNIDIILTKSIQRFARNTVDLLNTVRHLKDLGIEVRFEKENINSLSGDGELMLSILASFAQEESRSISENVKWGMIKRFKQGIPNGKFSIFGYEWQDDKLVIIPEEAEIVRWMYAEYMKGASRIEIGRALMQRGIYTRQGKPWVDSNVKVILTNITYTGNMLFQKEYCEDPITKHRRKNYGELPQYFVEDTHEAIIPMDEWQAVQAEFKRRRDLGPFGNKSLNLSAFSTKITCGCCGKHYRHSGKRNTAGEVYYIWTCQTKSQKGASACPSKNIPEKMLQNTTAEVLGLAEFHEDAFSQQIEEVIVIGDDTLTFRFYDGHEVTTKWQSTAKTDWWTDERRKLWAERHKRKDTNPNRHLFYEFTGFIKCDCCGANYRCQSGKRKDGTPTRSWYCTGPKDQCQNPGIRDETMKRLVADVLGLDEFDEAAMDALIENATILGHTVTFHFRDGHTESRDFLDKRHGTPWTEERREKARKSMKAAWTDKRRKAMSERIKKIRSEKKWPNP

SEQ ID NO: 10236 - protein, 523 aa, synthetic construct
MAKSVTTIPATLSRFTAAPINSTKKRRVAAYARVSTDHEEQLTSYEAQVDYYTNYIQGRDDWEFAGVYTDEGITGTNTKKREGFKSMVADALAGKIDLIITKSVSRFARNTVDSLTTIRSLKERNVECYFEKENIWTFDGKGELLLTIMSSLAQEESRSISENCTWGQRKRFADGKVTVPFKRFLGYDMGPDHNLVVNPEQAKLVKRIYGMFLQGQSPFQIARTLTEEGIPSPGGKDHWNPSNIKSILTNEKYKGDALLQKSFTVDFLTKKKKTNEGEIPQYYVKDNHEAIIDPETFEMVQTLMTTRTKGRNRKSSVSIFSSKFKCGDCGSWYGPKVWHSNDAYRKVIWQCNHKFDGQKCATPTLTEDEIKELFLRAANQVIDQKEQFIAIYEQVLSRSLDTTALESELSDLEAEINIAAELIEECIKENAHVALDQDEYQKRYDALVARFDKAKARHTEVTDLIAERMARKHQIEAYLKNLRSREPLTEFRETDWLAMVDYITVHSKKDIRVTFKDGTEIKA

SEQ ID NO: 10237 - protein, 546 aa, synthetic construct
MPQTAIKKKVSMIPAKPQYDRSIKLSEKKLRVAAYCRVSTELEEQESSYEAQVEYYTRKIQETDNWKMAGIYADDGKSATNTKKRDDFNAMIKDALDGKIDMILTKSVSRFARNTVDSLLTIRKLKEKNVAVVFEKEGVNTLDGTGEILITILSSLAQEESRNISENTRWGVVRRFENGKMIVNHNKFMGYTKNENGDLVIVQEEAEIVRLIFRLYLEGYSAKKISQYLEENGIKTATGQDKWYDSVIFKMLRNEKYMGDALLQKTYTVDFMTKKKVINKGIVPQYYVEDDHEPIIPKELFYRVQEELARRASMNKSAVTRTKNQKSKFSSEYALTGLLLCGDCGQEYRRVTWSRNGKKKIVWRCSNRLTNGTKNCKKSETLEEGALNRAVMEAINRITRGDGDFVGAFRQNVIRVIGSYGGEQEPDEYDEKIKEKEEEMVTLIAENARVGSYTDEFDEGYRRIAEEITILKEEQIEARRKKKLAASYEQRLKDMDSFLEKQTCQIPEFDNDLVRRLIASIKVVSAEKLIIQFQSGIVMEQEIRYE

SEQ ID NO: 10238 - protein, 538 aa, synthetic construct
MAKKVTVINAISDSKHTQPQQRLKVCAYARVSTGSRAQAESYATQVEYYTEKIENNPLWEFAGVYADEGITGTKVKGRDDFKAMVAACEEGDIDLILTKSITRFARNTVECIQTIRKLKAIGVGIYFEKEGINTLTEASELMLTILASVAQGESEDFSGNNRWAIINRFENGTFIVGTLAYGYRKDEDGNLIIEETEAEVVRWIFEAYLNGMGAYVIAKMLNDHKIPTIRGSEKWQDSVVKNILMNPVYEGDALHQRTYTEKQFPFTRKVNYGQMNMYLTKDAHSPIITHEEAEAVRSIMEYRSRTLNMNGKRCQNRYIFSSKIICGDCGSHFRRQKIYIGKPYEKIIWTCHKHVEDKESCHMKAIRDDVLQQAFVDMWNKLYTNQGTVLEPLLKALTELAASKPDTEEIEQLDNEIHSLSEQSLILNQVMKKGYMDSALFMEKNNLLAHRLTECRRRKTLLARKHKRTKEIVRTEQLIGLLKQEGYQREFKEELFDMAVKKIRISLDHEINFCLKNGLVLTEKEGGSEDAVAYTNRV

SEQ ID NO: 10239 - protein, 590 aa, synthetic construct
MGLFLLYGKNIMRNKSLAGRANNRAERPRKVAIYIRVSTTHQIDKDSLPMQRKDLIAYCELILGIEDYEIFEDAGYSGKNTDRPAFQEMMQKIRSGSFSHLLVWKIDRISRNLLDFAEMYEELQSLRVTFVSKNEQFDTSNAMGEAMLKIILVFAELERNMTSERVTATMISRANQGLWNGGRVPYGYSYDAETSVFSIIQDEADVCQLMKTDYFEHKSIIHTAKLLNDRKVPTRSGALWSPTAVWKILSSPFYAGIYRYNHYKGTENRTINPEEEWVLVPDHHPAIFTLEEHEKICDIMDTNKRMSNLPGQKHRAKNVYAFSGILYCGKCGSKLVSTPGRLQADGFRTTTYSCPKKRKTHECDNPSINDLIVGEFVINYILNMLNAKSSFSSISSPAELEEHLLYGGSFKDVQHISEDGLNEFYNLLSRYGSDSSYVFAMKRPRKKKAAVNPEVEALRKDKEKQERALKRLQDLYLYSERAMTEKDFIIQKNEISSRIQDINTRLGMVTHDANSTLSDEDFVRQASHLLITKKLIGREYIYYKSLAQTVSPDVLKIYMETILDSVYVVDGRVSSIIFKNGLTHTFVYQN

SEQ ID NO: 10240 - protein, 681 aa, synthetic construct
MNSETSTNKILRAVLYERLSKEDGDKLTKEEKSESIKNQDLMLRSYAIEHGYEIVGVYNDEDWSGADSSRPQFNEMIKACEAGEIDVVIAKTQSRFARDMELIERYLHNKFLEWNVQFKSVVDHIDNTRRETKKTSQILGLTDEWYLEDTSINIKETLRAKRASGEFTGSFAPYGYDRDPENKNHLIIDPVASETVKQIFENYINGMGLKTIARYLNDNFVASPYEYKMSKGSNLKLAYLDNYLVYDYIEKAGLYKIDISYINESREILHNLISYNIFSKDKKNFDNKCKLYLKNYSEKKMKIYYTTDNDIDYNNFDVKKWTLLRKDDLIPFDTTCIATVVEVLDRKHTINYQFDILLENNIEHEKYYFDVIQITNDEKKIIDYEKNIRKKCKWCDQMIKKILTDEVYIGNLVQSKTTNVSYKNKKKVKKDKENWIRVENTHERIISLEQWLKVQERLKQRVRANKNGYYNPFIHKLYCKCCGKIYCRTGDSSHVYFRCKDQQEKYKSCDNRSSISKDELNNFALVKINELLNRFYNEEQLKEFKEKDTDSDLFKSRINSLNKELIDVNKELQNKKTYFQHLYEDKISGLLDTDEYLILKSKYKDDSEKLENRAAKIKEELKLINDKKAILKTKETIYGKYKHIDCIDIDIVSDFIDRIYIGKYNKETNTRDMKIVWNFES

SEQ ID NO: 10241 - protein, 530 aa, synthetic construct
MAAYLRRLEISNPMDYHVALYIRLSKEDESEGPSQSVTNQKSLLDEFVQKHRLQVYDTYIDDGWSGTNFDRPDFQRMIGDIEAKKVNMVITKDLSRLGRDYIMTGHYMERYFPEHRVRYISLLDGIDTGVESSANDITPFRAIMNDMYAKDISKKIKSVKRDKQRKGQFIGGKPVYGYKMHPTEKNKIIIDEEVAPIVRRIFAMALDGVSCRQIAATLNEEGVLTPATYCGWNMGRKGPYAGLWSSERISNMLQNETYIGNMVQGRQVKISYKSKKCLHQDRNNWVVVEDTHEPLIDAESFRKVRMLVNSRKRTRSRTYDFLLKGLIFCHECGHPLGVLNRPNAKGEETLYFVCRTYQRFTKNSACTTHYIKEKTVTDAVIAKVREVCEDYLTAEALLPAAEKAVKEASQENKTAAEISALQNKSANLTEHLDRMYTDRLSGLLPEEDFQRIFTRIKDERAQLEERIKELQQQQKNPISQTERAKDLVQRYLDTAYANRELLVSLIERIELTADREIIVKFRFAELQQAG

SEQ ID NO: 10242 - protein, 531 aa, synthetic construct
MEQYCLYLRKSRSDVEAENHGEEETLARHEKILLELAKRREYNVTQIYREVVSGETIAARPVMQQLLSEVEHGIWSGVLVVEVERLARGDTIDQGIVAQTFKYSDTQIITPMKTYNPNNEYDEEYFEFGLFMSRREYKTINRRLQRGRLSSVKEGKCVCSIAPYGYDKVKLKGDKGFTLAPNPNEADVIKMIFELYTKGELQPDGTYKRIGVALIARKLNEMKIPARKSEYWVPASIKDMLRNPVYAGKIRWNWRSQNKRMQSGSISISRPRSEEDNCIIVNGLHPALITEETFDLAQEYLAKNPPRPTKRNAPTKNPLAGIVVCAFCGRKLVRRPYTSASCPPTLICSVPHCPNVSSFLHLVEERILKSLEEWLRNYKLQWNLSNNKPSELISESEILRQSLNDINSQITKLNKQMIKAHELLEQDIYTTDVFLERSRTITERLNQLSYDKAEIEKRLGVETIREKSMKEIIPKVEKLLDVYHELPSAKEKNDMLKNVLEKVVYKKTQNTRWSGSPDDFEITIYPKLPKS

SEQ ID NO: 10243 - protein, 525 aa, synthetic construct
MNTVIYARYSAGPRQTDQSIDGQLRVCTEFCKQRGLTVIDTYCDRHISGRTDERPEFQRLIADAKAHKFEAVVVYKTDRFARNKYDSAIYKRELRRNGIQIFYAAEAIPEGPEGIILESLMEGLAEYYSAELAQKIKRGLNESALKCQSLGSGRPLGYTVDEQKHFQIDPESSQAVKTIFEMYIKGESNAAICDYLNARGLRTSQGNLFNKNSINRVIKNRKYIGEYRYNDIVVEGGMPAIISKETFCLAQAEMERRRTHRAPVSPKAEYLLAGKLFCGHCKGPMQGVSGTGKSGNKWYYYYCANTRGKERTCDKKQVSRDRLEKAVVDFTVRYILQEDVLEELSKKVYAAQERQNNTASEIAFYEKKLAENKKAIANILRAIESGAMTQALPARLQELENEQTVIQGELSYLKGARLAFTEDQILFALLQHLDPRPGESEQDYHRRIITDFVSEVYLYDDRMLIYFNISSADGKLKHADLSAIESGVFDAGLISSTKKSPTPYFGVGLFASNRQRGDSTSPLKG

SEQ ID NO: 10244 - protein, 464 aa, synthetic construct
MARSVTVIPARSQKVQTGHKAVQEKKIRVAAYCRVSTDQEDQLHSFEAQVEYYTKYINEHENYEMAGIYADEGISGTNTKKREQFKKMIADCEGGKIDLVITKSISRFARNTQDCLAYSRKLKNLGIGIIFEKENINTLDSTGELLFTILSSLAQDESRNISENCKWGIRTKFKNGEMHLNTFKFLGYDKDENGKLVINKEQAKTVRRIYRDFLIGINPAQIAKELTEEKVPGCLGQTKWYPSTVTGILKQEKHMGDALLQKTYTADFLTKRQVRNNGEIAQVYVKDSHKGIIDKQTWNAVQEEFDRRERFMESHGTDRYSYGADCMPFCEKVFCGDCKSLFTRHSWRSRGIVQWQCKNHRKDGKVACTNAYVDNADLEKGFVKAFNRLVTDRDKHMERWQQMKSDGTPHEKIRAGQMMEAVENEPLTRFVPEIAQLVLCEVTVLGAKKYEFFFLEGSRVKVSV

SEQ ID NO: 10245 - protein, 465 aa, synthetic construct
MKGNAGDTIVKKIDLSPELVRVALYIRVSGEEQKIKGLSLEAQQERLEAYARERGWVIVGIYIDAAKTARKNIHKRTDFQRMMDSVKRDEVDILLFCRLDRWFRSVADYYKIMEVLEAHNCDWKTTDEEYDTTTANGRLYINVKLSIAQNEADIDGERIDVVFDSKIAHGTVVSGSAPFGFRVNEEKRLEVVPEDAAIVQDAFNYFETSISQRATVRYIRETYGVNWCDATFRRMLKEKLYTGVYDRGGRFNDHFCPAIISKQQFDRVQALLERNARSVPSGKVYIFTSILTCAECGHKLVGYKSSDYYYYRCNQHFQRGRCSHNHSAREDVVEKWLFEHLVEELERCQLEWEVAAAKKKASVARTDKAALKRKLTKLKELYVNDLIDIEDYKRDYQIYTAALKQIPEPSIEPPPDFAAVRRLLDNDFKTIYENLTREEKRTLWRSVIKEIRIDNDQNITGVVFG

SEQ ID NO: 10246 - protein, 529 aa, synthetic construct
MNRTAARSVTVIPPTINPLTHLSRVAVQKRRVAGYARVSTDSDEQFTSYEAQVDYYTQYIKRNPEWEFVKVYTDEGISGTNTKHRIGFNEMIADAMSGKIDLIVTKSVSRFARNTVDSLVTIRKLKEKGVEVYFEKENIYTFDGKGELLLTIMSSLAQEESRSISENVTWGQRKRFADGKVNLPYKQFLGYRKGADGFPEVVPEEAIVVHRIYTRFMEGLTPGAIAKELTADGIPTPSRKQCWQTSTVESILQNEKYKGAALLQKCFTVDFLTKKRKVNEGEVPQYYVEHSHEPIITPEEFDKVQTELARRKHISRQYSGKSIFSSRIVCGDCGSYFGSKVWNSTSKYRRVIWQCNGKFKGEHKCETPHLDEETIKVQFVSAFNAIIESKDNILEDCRLMQTTLTDCTGIDAEIESLLEEIEVVTELTKRCIAENSQTAQNQEEYAARYNGLVERYEKAKARLEQLRTTKAAREAQTEAIGAFMFEVQELDALTEFDEKLWLTVIDTVTVHADGRMTFKFQGGKTLTSY

SEQ ID NO: 10247 - protein, 434 aa, synthetic construct
MERVVERVDSLIPAQPKALRVCAYARVSTGKDAMLHSLSAQVSYYSKMIQSHNGWMYCGVYSDEAVTGTKRERAGFQHMIEECRQGNIDLVITKSISRFARNTVTLLQTVRELKILGVDVFFEEQHIHTQSSDGELMMTILASYAQEESLSASENQKWRVRKAFENGEIINLRFLFGYDITPDGIQVNEKDAAIVREIFERFNNGESMSSICRDLDTRGHKGVLGGTWCAERMRNTLSNEKYLGNALLQKQYRNNHIEKKLLPNRGELPMYYAEGTHEPIIDQATFDKAQERLRMLAQQAANRKKPTRSVFSGLIHCGLCGNTYKRVTYRKKHYWNCTTFQTKGKSECAAKRIPEETLEVLTCEVLGAVSFDPDMVRSKITAIRAEKNNVVVYCMDDGSEIVKRWKDRSRAESWTPEMKEKARQRALQARRKKK

SEQ ID NO: 10248 - protein, 558 aa, synthetic construct
MNKLRAAAYCRVSTDRAEQSGSLASQRSFFDDYIRNSDSMTLVGVFYDEGTSGTTTLNRYGFNKMISLAVSGGIDIILTKEVSRFARNTVDTLNITRMLRAKGVGIIFINDNIDTRDSDGELRLSIMATIAQEESRKISERVKWGQQRKMEQGVVFGRNCLGYDVKDGKITVNADSAEIVKRIFTEYTVLLKGAESIADRLNAEQIRTVNGGRWSGAFIRKVLRNVKYVGDLEQKKTCTPDFLTHKKRLNSSEHIYIRNHHEPIISRELWEQTQAEISRRKPTDTSRHSDRYVFSGKVYCGVCGSVMVSRVKKLKNGKIYHALRCSGRIGGKSCNNETLNVTALKACIKRIFTDMPIDKTAVINAVIKGLSRTDKPDIPALRRKIETLNAKKRRAVDLMLDGLITQQELIEQKSYYDSIIEKLSQEISSDRSVFETDKIRKNAERFLDFTSDPLWLLVIRADYIHGTLTVYLKGIEKGFTACFTATGRGDSYRVITGNTVRSQGIIPGTMQVQKNWFHHDVNDKLIKKSAPDIFQVHFVLICRLFCSLCVAGHSAPTL

SEQ ID NO: 10249 - protein, 531 aa, synthetic construct
MEQYCLYLRKSRSDVEAENHGEEETLARHEKILLELAKRREYNVTQIYREVVSGETIAARPVMQQLLSEVEHGIWSGVLVVEVERLARGDTIDQGIVAQTFKYSDTQIITPMKTYNPNNEYDEEYFEFGLFMSRREYKTINRRLQRGRLSSVKEGKCVCSIAPYGYGKVKLKGDKGFTLAPNPNEADVIKMIFELYTKGELQPDGTYKRIGVALIARKLNEMKIPARKSEYWVPASIKDMLRNPVYAGKIRWNWRSQNKRMQSGSISISRPRSEEDNCIIVNGLHPALITEETFDLAQEYLAKNPPRPTKRNAPTKNPLAGIVVCAFCGRKLVRRPYTSASCPPTLICSVPHCPNVSSFLHLVEERILKSLEEWLRNYKLQWNLSNNKPSELISESEILRQSLNDINSQITKLNKQMIKAHELLEQDIYTTDVFLERSRTITERLNQLSYDKAEIEKRLGVETIREKSMKEIIPKVEKLLDVYHELPSAKEKNDMLKNVLEKVVYKKTQNTRWSGSPDDFEITIYPKLPKS

SEQ ID NO: 10250 - protein, 482 aa, synthetic construct
MMNTINKVAIYVRVSTNVQAEEGYSIDEQIDKLKSYCQIKDWTVYDIYKDGGFSGGNINRPALEKMIIDAKKKRFDTVLVYKLDRLSRSQKDTLFLIEDVFSKNDISFLSLQENFDTSTPFGKAMVGLLSVFAQLEREQIKERMQLGMIGRAKSGKPMMFTNVSFGYTYSPKTQQLTINQAEAVIVKQIFNEFLGGMSPLRLMAYLNENNILRNGKEWNYQGIQRILRNPVYIGKIKYNNVIYPGLHEPIIDEESYYKAQKLLDARQDEMRIKGKNRQFKAKYMLSGTAKCGYCGAPLRIKIGNKRLDGTRLKVYQCCNRYPRKYAVVTYNDNKKCNSGNYQKEDLESYVIAEIRKLQLKPEKIDKLFNKVAKIDTVQINKQIASIDNKINRLNDLYLNDMIDIDKLKADAEKFKEQKRVLEKELDKDLKIQEQEKNKEDFKKTIGFKDVTKLDYKEQSFIVKSLIDKILVKKGFIKILWKI

SEQ ID NO: 10251 - protein, 579 aa, synthetic construct
MRNKSLARRANNRAERPRKVAIYIRVSTTHQIDKDSLPMQRKDLVAYCELILGIEDYEIFEDAGYSGKNTDRPAFQEMMQKIRAGSFSHLLVWKIDRISRNLLDFAEMYEELQSLRVTFVSKNEQFDTSNAMGEAMLKIILVFAELERNMTSERVTATMISRANQGLWNGGRVPYGYSYDAETSVFSIIQDEADVCQLMKTDYFEHKSIIHTAKLLNDRKVPTRSGALWSPTAVWKILSSPFYAGIYRYNHYKGTENRTINPEEEWVLVPDHHPAIFTLEEHEKICDIMDTNKRMSNLPGQKHRAKNVYAFSGILYCGKCGSKLVSTPGRLQADGFRTTTYSCPKKRKTHECDNPSINDLIVGEFVINYILNMLNAKSSFSSISSPAELEEHLLYGGSFKDVQHISEDGLNEFYNLLSRYGSDSSYVFAVKRPRKKKAAVNPEVEALRKDKEKQERALKRLQDLYLYSERAMTEKDFIIQKNEISSRIQDINTRLGMVTHDANSTLSDEDFVRQASHLLITKKLIGREYIYYKSLAQTVSPGVLKIYMETILDSVYVIDGRVSSIIFKNGLTHTFIYKK

SEQ ID NO: 10252 - protein, 506 aa, synthetic construct
MDESIDAQIRAIEEYASKNNIQIVKVFADRAKSATSANRPEFQNMIKYCEADDTGISMVMVHKLDRFSRDKYDSAMYKQKLKVKGIRVVSVLENLDNSPESVILESVIEGMAQYYSANLAREVAKGQKENALKALHNGGDAPLGYDVAFDKTYVINEEEAQAVKIIFDMYINGYSYSNIIDKLNDLGYKTKRGNKFGKNSLHGILSNEKYTGVYVFNKTQRKGVNGKRNGHKQKSDDEIIKVEGGMPQIIDKVVFLQAQEMMQKRKKSPGAHKATTLYLLTGLIRCGECGHAMQGNKRKDKYGNDYISYRCGCRKQKRDCNNKEIKRDYLEEFILQEIEKNILNDEAIPVLSKALNEKINDKTESNEELLKSLEQRLDKVNKEISNILNAIMNGIVNNILKDKLDELEQVKLNLDLKMNELKIENKVADGICITEEQIKSIFSRFKEFVLKRNIPECKKLIGDYIKEVIVYKDHVEVIFNVVFCFTKDEINHNLHIIIDREKIKYE

SEQ ID NO: 10253 - protein, 523 aa, synthetic construct
MELSRNITVIPARKRVGNTAAVGQRPKLKVAAYCRVSTDSEEQASSYEVQVAHYTQFIQKNPEWELAGIYADDGITGTNTKKREEFNRMIQDCMDGNIDMIITKSISRFARNTLDCLKYIRELKEKNIPVFFEKENINTMDSKGEIMLTIMASLAQQESQSLSQNVKLGIQYRFQQGEIQVNHNRFLGYTKDENKRLVIVPEEAEVVKRIYREYLEGASLLQIARGLEADGILTAAKKPKWRPETLKKILQNEKYIGDALLQKTYTVDFLSKKRVVNNGIVPQYYVENSHEPIIPRGIFMQVQEELVRRANLYTGKNGKKRVYSSKYALSSIVYCSECGEIYRRVHWNNRGCRSIVWRCVSRLEEKGSDCTSPTVNEEVLQAAVVKAINELLASKDTFLSTLQANIETVLNEEHDKITNDIDVKLEELQNELLRLANSKTDYEEVAEEIYRLREQKQNALVENAEREGKRQRIAEMTDFLNEQSCELEEYDEQLVRRLIEKVTIYEDKLTVEFKSGIEIDEEI

SEQ ID NO: 10254 - protein, 520 aa, synthetic construct
MKRITKIEENMLLEKRKLRVAAYCRVSTARDEQLVSLAAQKAHYENYIKSNDEWEFAGLYYDEGISGTKKEKRDGLLAMVAACERGTIDFVITKSISRFARNTTDCLELVRKLLDLKIYIYFEKENLNTGSMESELMLSILSSLAESESVSISENEKWGIKRRFQNGTFIISYPPYGYDNVDGEMVIVPEQAEIVKQIFADTLAGKSTHEIAEELNERGVATKKGGHWTPGTVNAIIGNEKYTGDVLFQKTYTDSSFNRHQNRGELDQYLMQDHHEAIISKEEFELANAVLKQRGREKGNGYDTGRYQNRYGFSGRICCGECGGKYKRRMHYKPSGQYVAWVCANHLKDKESCSQKYITDDALKLAFVTMMNKLVFGHQMVLRPLLQSLRGLNDQSRLLKIEELETAIEKNREQKQVLTNLMASGYLEPALFNKESNELAAEAEALRQEKDGLMRSVNGDMVKIEELQRLLRFTSKGTMMTEFDDETFLSFVEQMTVLSRKEVVFELKCGLSLKERLVEP

SEQ ID NO: 10255 - protein, 578 aa, synthetic construct
MGYVTKKAAQRFEEKKAAIYVRVSTQYQVDRASLPVQREELINYAKYALGISDYVIFEDAGYSAKNTDRPDYQQMMARMRTGEFSHLLVWKIDRISRNLLDFSVMYAELKELGVVFVSKNEQFDTSSAMGEAMLKIILIFAELERKTTSERVSAVFVSRANDGIWNGGKVPYGYSYDKESKTFSIAEDEAKIVRLIYSLYESEKSIVRVARIMNERGLKSRAGNDWSPTTVHTVLSSPFYSGTYRYNYRDESNTKRFREKGKDEWVLVENHHPAIVSPERQAAVGLILESKRYNKNATYQRKNVHVFAGLLTCGCCGATMAATTDKVRADGWRPSMYICSRRRKSEDCTNKYVSDVTLGPFVLNFFANLIKASNSFGRTTSIETLEKKLLRGEALSRVDHIERPGLEELYNHLRSGFDEKCFESPTIAATESSADLSERDLLLSEKRRLERALNRLKTIYLYGDDEMASKDFNIERERITKALSEVDSRINELDIANAFDLSLSDEAFMQKASQFILTQQLLDKRYVNYERFIRKIDPKIVKDFLNETVSNFCIKDGLTTSILLKNGIELRFSYKTAE

SEQ ID NO: 10256 - protein, 514 aa, synthetic construct
MAKPMLISPISRQGIKLLRVAAYCRVSSSSADQLNSYATQIDYYTRLAKKKKNEWIMVEIFADEGISGMKAKNRPEFQRMIRMCELHQLDLIITKSVSRFARNVKEALEYVRKLKLLGVGIIFEKEGINTQSLGDEMLLNTFTAIAQEESKAISQNQRLSIVKRMELGIYVDSNAPYGFRLENKQLVEYPPEADIVRWIFHSYLNGMSTTEIAKVLTERGIPTKNGKEKWKSTKISYMLSNERYIGDCHYQKTYRDTTVPFKQSKNRGEEDMYYATGTHASIIEKGTFDKAQVLLQKRKEQFTKSITFNTYPLTSRIRCSECGSFYRRKVRSGGVKWVCAKHEENTKSCNSNYYSEERIYDGFLSMVNKLRFGQENILSQVIAKLESATQKYKRNNKTAMQISQKIAEINATILKLNELRSKGYLAPEIHQSQVREMQKQLCTLKEDRQDQFESRILTMLQDVRKLKSLIDEIEEPLDEFDEKLFEEIIVGMALNNADELTVTLLGGLKFTELI

SEQ ID NO: 10257 - protein, 545 aa, synthetic construct
MAVTKIPKKTITLIEPKKSFIVDKAQHRQKRVAAYCRVSTDREEQLTSYTNQMKVYTEMIASNKEWEFAGLYADEGISGTRADKRPQFQKMIDDCHKGKIDMIITKSVSRFARNTVDCLDYVRSLKEIGVGIYFEEQNIDTLKSDSELYLVIYAGFAQSESESISKNITWTHRKNFEEGRPIFMYNRMLGYKKGEDGNPEIVPSEAAIVQRVFDMYLSGKSTDEISEILQGENIEIPGKKLNFSKSMIIRMLKNEKYCGDAILQKTVTLDPISKKRKANEGEAPMWLVENSHPAIVSREIFNKAQEESARRKAKTPQSEKMALTASGKYSKYALTEVMMCGECGSRYKRVTWNIRGKHRIVWRCMSRLDYGKKYCADSITVDEQALQRAVVRALNRFNIEDESTYLMLMKSTIGEAIGINGGSDEIDLLERRIDALNKRMLDLVTLSVQEDSDAEDYEDEFKNISMQIEQLSGRITAIRESESEDGELQARIKEIQDTIDKRKENKDTYDDSIVRQMVECIKVYHDGRLQIILGGGYELEEYLEK

SEQ ID NO: 10258 - protein, 522 aa, synthetic construct
MGNVMVIPARRQVGNTVKQSDQKKLRVAAYCRVSTDSEEQETSYEAQVTHYTEYIQKNPEWELAGIFADDGISGTNTKKRDEFNRMIDECMAGNIDMVITKSISRFARNTLDCLQYIRQLKDKNISVYFEKEAINTLDAKGEVLITIMASLAQQESQSMSQNIKLGLQYRYQQGKVQVNHNRFLGYTKDDNGHLIIDPEQAEIVKRIYREYLEGSSMDKIADGLMADGILTGAGKTKWHTSTINKILRNEKYMGDALLQKTYTTDFLTKKRIKNNGTVPQYYVEGDHEAIIAKELFMQVQAELIRRRVVHVSPTGKKRSFSCNHCFAQMVFCGDCGELYRRVHWNNHGCKSIVWRCISRLEPTSAEMDCTNRTVNELLLQEVTVKAFHQILTERDFFLKTLQQNIAKAVVNADTLSPDGIQARLEELQKELIKKANNKQDYDAIADEIFRLRDQKEQSELDSHHREEAMNRIKELQDFISGQETDITEFDEALVKKLIEKITVFNDHFTVEFKSGITIDIES

SEQ ID NO: 10259 - protein, 574 aa, synthetic construct
MRKKKIDAPKEKPQRAAIYLRVSTAYQVDRDSLPMQRKDLVGYCEYALNISDYTIFEDAGYSGKNTDRPAFQKMMMQIRNGMYSHLLVWKIDRISRNLLDFAQMYEELKTLGVTFISRNEQFDTSTAMGEAMLKMVLIFAELERKTTAERVTATMISRANDGTWNGGRVPFGYDYNKETQTFSVNGDESFIVLEMYDLYEKTDSLVHTARELNDRGYVSRQHNPFSPVSVWTILRNPWYIGTYRYNYYKIPGRKAIKDESEWVVIPDHHTPLVSKERFDRVQKMLDSNARYRNTPGRSATQKNVNIFSGLIWCACCGAAFTASPGKLHASGYRSAKYGCPNVRKTKTCNAKYTSDTVLGEFLLNFILNVINAQKRFDQIKSPADLEAQLLRGDTFKNVAGIDSASVAALYEMLAEYSPADSVLLKKPTVKKNLDPELRKLRADKRKTERALARLDHIYLYSNKQMSDKEYLIKKNDLMNDLKEQDKSIGLLTSESWAQSLSDDDFLEQASSFIMSQRLQEREYIYFQGLAECTEPSVLRSFFLSIVDSVRMRNGHVETLTFKNGISHKFTYLAI

SEQ ID NO: 10260 - protein, 506 aa, synthetic construct
MDHKNPQNLSDLDAAVYLRKSRMEEGLATDEVLAKHQKTLYDYAASHGIHILEEYPEVVSGESLYARPQMLRLLQDVEDGKYDAVLCMDLDRLSRGRMKDQGIVLDAFRESGTLIITPEKIYNLADEIDEEYAELKTFISRREYKIITKRLRRGLQMSIQDGCYVANAPYGYHKTVVDRKPTLEIYEPEARFVRMMFELYAKGYGCVAVARHVNALGARPHRSAEFSRNSVAKILRNPTYIGKIVWNQKKHIRKGTQGNPKHVTIYQPRDQWTITDGLHPPIIDRELWETVQAISDGRYRPARNDGTVRSPLAGLVKCANCGQNMQRMVMKGSAYLLCTRPGCCASTKIDLVEGQILNYLSDTLAKLTMDQPQHIPGRDTDVLETALAQVRDSLAGTDRQKNRLYELLELGEYDLELFRVRMAAVKEKRAALEKKEAELERSLREIQCSNPALLAEKIRAVLDAYGTADAAGKNALLKSVLEAVWYDKKKKTKPADFQLTFQLRAI

SEQ ID NO: 10261 - protein, 462 aa, synthetic construct
MGKSITVIPAKKVQTSVPHQVRKKINVAAYCRVSTDQEEQLSSYENQVNYYRDYISKHEDYELVDIYADEGISATNTKKRDAFNRLIQDCRAGKVDRILVKSISRFARNTLDCIKYVRELKELGVGVTFEKENIDSLDSKGEVLLTILSSLAQDESRSISENATWGIRKKFERGEVRVNTTKFMGYDKDENGRLIINPQQAETVKFIYEKFLDGYSPESIAKYLNDNEIPGWTGKANWYPSAIQKMLQNEKYKGDALLQKTFTVDFLTKKRIANDGQVNQYYVEDNHEGIIEEETWETVQLEMARRKTYREEHQLKSYIMQSEDNPFTTKVFCKACGSGFGRKNWTTSRGKRKVWQCNNRYRIKGVEGCNSRHLDEATLEQIFIKALELLSENIDLLDGKWEKILAENRLLDKHYSMALSDLLRQEQIDFNSSDMCRVLDHISIGLDGEISVRFLEGTEVDL

SEQ ID NO: 10262 - protein, 521 aa, synthetic construct
MKKVITIEPAKQVSHKVDLPSFTKRRVAGYARVSTDHEDQTTSYEAQMKYYTDYINSRSDWEFVKMYSDEGISGTNTKARIGFQRMVEDALDGKIDLILTKSVSRFARNTVDSLSTVRKLKEAGVEIYFEKENIWTFDSKGELLITIMSSLAQEESRSISENVTWGRRRQLAEGQVTFSYSQVLGFKKSDTGGFEIDHEEAKIVRYIFHQVLLGNNPNKIARELTAQGIPTPQGKRQWSYGTVKRMLRNEKYKGDALLQKSFTTDFLTKSTKPNEGELPQYYVENNHEAIIKREVFDLVQVELDKLEKKRQTSNIFTGRLFCCSCGSAFGSKVWHSTSKYKRTIYQCNAKYKGEHKCQTPHVTEEELKAWFLSAMNQLLNNREEIIANTELLIEMAKDTTPLENKIDDLEHHLETIRQDIEDLVDRNAREAQNQELYQEQYDILVTVYQEKQKELQETRSSLEEQKSKRISLDGFIQQLKEQDDLITDFNQELWQTSVERLDIKVGKKISLTFKNGVRIDL

SEQ ID NO: 10263 - protein, 402 aa, synthetic construct
MKRIKTIQAQKLTAIKKLKVAAYTRVSHTSLLQSLSNQVSHYSQLIQANPEWIYVGVYSDSAISGRSQVYRRDFQNLLEDCRKGKIDLILTKSISRFGRNTIELLETVRELKRLGISVRFEKENIDTLTAEGELLLTLLASMAQEESQSISQNIRWRVKKCFEEGKPYIPQDIFGYRWSGEEYVIEPHEAFIIRQVFEWYMEGLSVPKIAKKLDARGERTRLGNRFTKRVIYNMFDQEAYCGRLILQKTFRDNFGSRSIPNDGQMAKYIVENAHEAIVTPEFFQQVNQEKKRRAKRRPSKHDALAKLQGKVYCEHCGLDMLLTVETKSNQEKRVRYYCRTRDAKGVEACLGRTITEEQLFQAFGETLEAEDIHHISFNSVTNEAKATYRNGEEKHIIIQKGR

SEQ ID NO: 10264 - protein, 628 aa, synthetic construct
MTNTIFKNNTKIGNPYDFLDRNRHRKMVFYGRVSTEHEAQMAALENQIEWYDDQAKYHPNWEVLNKYIDEGITGTQAKKRPAFLQMIEDAKKGKFDLIVTREVCRFARNTVDTLVTTRELKNIGVEVYFVEDNIWTMDGDGELRLTIMATLAQEESRKTSERVKAGQHISRQQGMVYGRGNILGYNRKAKSTYTINPEQAETVRMIFDMYLQGEMGASKIANELTRLGRKNASGLVKWSPCVITRIVNNPTYMGYQAYGKSYSNNYLEQKRILNNDFSTYMLVKSDYEPIITEEEWYRCQEIKQRRVTKTIGVSTDGKKKQPNHGKNETKDLWATKLKCRCGASFRRNRWHKNNNAPWSYGYLCYNRLNNGSAQKRRDAGLDDTGYCDQTEIPDWKLEMMGKMIMEQVWRTRAEDIKLACEILQECYKPDSKAPQQNKSVMLANIEKLKSKKDILLDMRSDGEITKEEFLKKKEDIDKKISQLTAEYEKDDCPTESDEAGLELGKIEAALNELIDFSQLVLPREIYQKFVSKVTPYSKTHYRWYLNLDGTGTQMADVKVNGRKSNATVAFCDEGEIPPVHFKEIIFFNILKQEIKNKKSFFVATLHRLLLLRCNSVIFVLMGKTIYQP

SEQ ID NO: 10265 - protein, 521 aa, synthetic construct
MKKVTKIDGVQKNTAINSKLRVAAYCRVSTGSDAQLESLEAQKSHYEQYINSHEDWQFAGLYFDEGITGTKAEKRPELLRLITDCEARRIDFVITKSISRFSRNTTDCLALVRKLQSLDIPIYFEKENINTGSMESELFLAILSSMAEGESASISENAKWSVKRRFQNGTYKLGYTPYGYDWDGKNMIINPDQAAVVKRIFADILSGKSTNAIADELNAEKVPSKKNTNWTSSTIRGILANEKYTGDVIFQKTYTDENFNRHTNYGEVDQYMAPDHHEAIISHSDFDAANALVNQRAAEKGIEKGSDKYQQRYAFSGKIICGECRDTFKRRIHSCTTYKYVAWACNTHLKNKESCHMKYVRDDEIKAAFITMLNKLIYGYRLILTPYLKVLENSSGDEAIHRIQHLEQLIAQNSEQREALTKLMAQGYIDQILYNQETNALLLQAETYRSDIEAITIGMTGDAAKVTETNLLLHFVSHTDMLTAYSEELFENYADHIEVMSRNEIRFVMKCGLTFTERIGD

SEQ ID NO: 10266 - protein, 513 aa, synthetic construct
MIQQALNAVIYARYSSHNQTEQSIEGQLRDCYAFAEREGLQVIGEYIDRAITGRTDERPDFQRMIADARKQEFQRVIVWKFDRFSRDRYDSAIYKHKLKQCGVRVLSAMENVGEGDVSIILEALLEASAEQYSLDLSKKVLRGQRESRLKGTFLGGLTPIGYKLENRKLVADERTAPIVRYIFEQYAKGTSKQDIINELATRCILNRHGKPLSHSTLQTILKNKKYIGVYTHGGQDVAGGCEALIDEKTFLKVQEQLSKRKHAPAASKAVIEYLLQGKLYCGYCGFNMFGDSGRGRNGSTYRYYACRRRKKERDCKKKNEKKDFIEWYVVEQTVEYVLTPERIEYIASELVAQYKKDCGIDRIKTYEKQLDRIKAEISRLVDTLAVCPAAARQPIFDKMEQLDAEKQEVELDLSKLRISAKIQISKEHIADWLKQFCNGDALDVDFQKRIIDTFINSVYLYDDKVIIYYNIEGGKQVSYIDMIDSTEEPPFSDDAPGSSGGSDLKRPALRLCC

SEQ ID NO: 10267 - protein, 463 aa, synthetic construct
MARSVTVIPARNRQASGHRAAPQKKIRAAAYCRVSTDQEDQLHSFEAQVDYYTKYINDHENYEMAGIYADEGISGTNTKKREQFKRMIADCEKGKIDLVITKSISRFARNTQDCLMYSRKLKNLGIGIIFEKENINTLDSTGELLFTILSSLAQDESRNISENCKWGIRTKFKNGEMHLNTFKFLGYDKDENGKLIINREQAKTVRRIYRDFLWGLNPAQIAKELEEEQVPGCLGQTKWYASTVVGILKQEKHMGDALLQKTYTADFLTKRQVRNNGEVAQVYVKDSHKGIIDKETWNAVQEEFDRREKFMQRHGTDRYSYGSECYPFCEKIFCGECGSLFTRHSWKSRGIIQWQCKNHRKDGKVTCTNAYVDNADLEKGFVKAFNRLVSEREKHMERWNAMKADGTPLEKIRAVQMMEATENGQLQKYVPEAAQLVLEEITIFEAKKYEFAFLEGSRVKVSV

SEQ ID NO: 10268 - protein, 501 aa, synthetic construct
MEIQIMEGSREQKRKLKVCAYCRVSTDADEQENSLENQVRHYETVIKANPDYEYAGVYSDFAISGFKEKRPGLQKMLADAEKGKIDLILTKSVSRFARNTSIVLEATRKLKELNVGVFFELQNINTLSGEGELMLTILAAFAQAESESGSTGAKMVYQRKYEAGIPVQYLERSFGYTKDERGIFVADEEEAVWVRKIYEMAADGYTPAAIKRYLNENGVKTVGGAEWIDSTVFRLIENEIYKGDYIMHKHFVNEERKLVRNRGEVDAWYIEDDHEAIVSPELWQRAQDALEAKRDYLAEGSVIEEFTEENYPYMNKIYCAKCGYPLYKRIYSKGNRLNWGCSGMKRYGKSFCDGINIPDGVLRNAWHFEENTYIDEKASDKGVKEFSYLKERSWKRRHKKKQPPSIPENTEAEYPYREKIYCALCGSRLVRHVDTKSHKVTWVCNGRKRKGKDFCDGTRVPDTILKGWGEIKKDIYIQRKDDKNGKKRYSYTSKKPSGIGA

SEQ ID NO: 10269 - protein, 605 aa, synthetic construct
MSVDIKWNVPQKGKEGDLAAVYARYSSHSQGEQSIEGQLAEAQKYAAAHGYTIVHEYVDRAKSGRTDNREEFQRMLKDTAKKQFNVIILWKVDRFGRNREEIAINKMKCRKNGVRVEYVAETIPNTPEGVILESVLEGFAEYYSLQLSQNIRRGIAESAEKCQVTGGNRPLGYKTGPDKKFEIDEDTAPTVRLIFKMYADGATVTEIVAKLNELGLRTLRGGKFTHNSLHTILKNEKYIGIYNNHGKHIEGGVPRLIDDELFYKVQEMLKVNKRAPAKTWARADYLLADKAFCGKCGAPMFGESGTSKTGARHNYYICSHKKRFKTCDKKAVRQADVEDLVIKATCDLLADTELLDFIIENTWQYYLAQDNSQEELRNLTRQLEQTDLAIKNLIRAIEAGILTDETKSRMDELTTQKAELKAAIADRELARGFHLQREHIAFYLYDLRNADRTDREVQKRLIQTFVNSVFVFDDCVKLTFNFSGNKSVVTLKMLQAAEAGEVFGRCASCSTKAAQIRTAGVFHQRNVRVGVWEIKFTAVASSNSRFSLACSKPNSFFSNRMPSVTAFTRCVPIAAAHFSISLISCFDSRKPIFSVGGFRCWSSLG

SEQ ID NO: 10270 - protein, 514 aa, synthetic construct
MRKRKVNGGNRLVAYYRYSGGSGQTEQSIEGQRRDCENYAKLHGLTILHEYIDRHISGKTDDRAAFQQMMNDGDKGAFDMVICWKTDRFARNRYDSAVYKKRLRDNGIEILYAAESNVEGAEGIIIEGLMEALAEYYSAELAEKMRRGMRESALKGQAINRCRSLGLTTDENKKYVIDERTAPTVRFIFEHYAAGESSTSIVDQLNAKGLRTSQGNPFNKCSIPRIIQNEMYRGVYTSKAYNVRIEGAIPAIIDDDLWKRAQAMMKTNRQLKAKYEPKAEYLLSGKLFCAKCGCTMKGVSGHSGGNGEVYRYYACSNPQCRKRNIPKDDLEGKVIRSICDHLLQPETMELLAETMVEVQKADMEKPNAERDVLEQELRDVRRRSRNIMDAIETGSANPQLVARLDDLTQQENTLTYQLSTMEAEKPLLFTKEQYLFLLQQFYAQPTEQDDAYKRRLINTFVTNIEVSDSELLIYFNISEETENKNKNAPQLNFDKSSSTEKRLVRVARIELTAS

SEQ ID NO: 10271 - protein, 545 aa, synthetic construct
MNIAIYPRKSKFSPTSESIANQVAMCREYCDRCFDDPHYLVYDEDEGFSGKSTNRPAYTQMIEDMRAGKFQVLCCYRLDRISRNVRDFAELLDDLQRHNIAFVSVRNNFDTSTPFGRAMVYISSALAQMERETLAERVKDNLYEMARSGRWLGGVTPLGFVAKAQEVHRDDKKRKLLMLSPVEEELAQVRDLFDHFLRLGSVTKLLQYCLEHRIVSRNGNDYSRTTLRLLLTNPVYCTADAEAWAYFSSGDYQLCAQREDFDGVRGIQPFARTRKDDGGTVSRPTSDWIIAPGLHRGVLPGAIWVRAQQILQDNRDLGSAYKAPRTENALLSGVIRCAGCGAYMRPKAYGKPLPDGKRRFSYVCLTKIDSCGARCAMPNAPGRDVDALVIRELTSLTSDGGAISTLRSEARLAQGEARRTHAEAVATHEKAIASMQKKVDKLVDALAAGAPEGARQRILCEIDRYEQEIEQHRDALSELNASVLLDADPSALLDAAFSALESFRTSFASLTHDEQRRAIRALVDRVTWDGKNVSIEVFGEKTLPK

SEQ ID NO: 10272 - protein, 579 aa, synthetic construct
MRNKSLAGRANNRAERPRKVAIYIRVSTTHQIDKDSLPMQRKDLIAYCELILGIEDYEIFEDAGYSGKNTDRPAFQEMMQKIRSGSFSHLLVWKIDRISRNLLDFAEMYEELQSLRVTFVSKNEQFDTSNAMGEAMLKIILVFAELERNMTSERVTATMISRANQGLWNGGRVPYGYSYDAETSVFSIIQDEADVCQLMKTDYFEHKSIIHTAKLLNDRKVPTRSGALWSPTAVWKILSSPFYAGIYRYNHYKGTENRTINPEEEWVLVPDHHPAIFTLEEHEKICDIMDTNKRMSNLPGQKHRAKNVYAFSGILYCGKCGSKLVCTPGRLQADGFRTTTYSCPKKRKTHECDNPSINDLIVGEFVINYILNMLNAKSSFSSISSPAELEEHLLYGGSFKDVQHISEDGLNEFYNLLSRYGSDSSYVFAVKRPRKKKAAVNPEVEALRKDKEKQERALKRLQDLYLYSERAMTEKDFIIQKNEISSRIQDINTRLGMVTHDANSTLSDEDFVRQASHLLITKKLIGREYIYYKSLAQTVSPDVLKIYMETILDSVYVIDGRVSSIIFKNGLTHTFIYKK

SEQ ID NO: 10273 - protein, 536 aa, synthetic construct
MPRKKKLQEVGGLRLVAYYRYSNGGQQTEQSIEGQRRDCEAYAKAHGYKIVHEYIDRHISGKSDSRPAFQQMISDSDSHLFDAVICWKTDRLARSRYDSIIYKTRLRKNGVKILYAAETVVDGPEGIIIEGLMESLAEYYSAELAQKLRRGQRESALKCIALGGNRSFGYDIGPDKHYCINEKQAPAVRYIFEQYAAGATAADIVRELTARGYRTSRGNPFNKNSICRIITNEMYLGVYKYADIRIEGGVPAMIDRELFNRCQTQLAFNRAHGGGKGAPRADYVLVGKLDCGLCGHAMKGASATGHTGSKHYYYTCNQHVEKKCPKTSIEKNYLEQIIVDGVAKYVLTPEKISQIVDCMMELQAKEQEPKGNPEKDALEAELAECRRKQNNILEAIEEGGSARLAARLRALEEQEAQLTFALGEINNAPTPPQFSREALTFMFEQFRREENEVDEEYRRRILDTFVSSILLYEDRAEVKFNITDQKTGDFERVILPISANKKPPEDDGTTSNSEGSTALRLVEAMGVEPMSEKSSA

SEQ ID NO: 10274 - protein, 513 aa, synthetic construct
MTNEQREKITALRHQGFGYTAIANSVGLSKDSVKAYCRSHGLAGEKAESHSLAEVPTQLCLNCGKTLIQFPGRKQKKFCCPECRTAWWNAHPEAVKQKAVYTFSLTTIRKLKEHNVEVYFEKENIWTFDSKGELLLTIMSSLAQEESRSISENCTWGQRKRFADGKVTVPFKRFLGYDMGPDHNLVVNPEQAKLVKRIYGMFLQGQSPFQIARTLTEEGIPSPGGKDHWNPSNIKSILTNEKYKGDALLQKSFTVDFLTKKKKTNEGEIPQYYVKDNHEAIIDPETFEMVQTLMTTRTKGRNRKSSVSIFSSKVKCGDCGSWYGPKVWHSNDAYRKVIWQCNHKFDGQKCATPTLTEDEIKELFLRATNQVIDQKEQFIAIYEQVLSRNLDTTALESELSDLEAEINIAAELIEECIKENAHVALDQDEYQKRYDALVARFDKAKARHTEVTDLIAERMARKHQIEAYLKNLRSREPLTEFRETDWLAMVDYIIVHNKKDIRVTFKDGTEIET

SEQ ID NO: 10275 - protein, 558 aa, synthetic construct
MTNAVIYARYSPGPNQTDQSIEGQIHECTRFCEDNDLRIVGTYIDRKQTGRNDNRADFQKMLRDSSRHGFSTVVVWKIDRFGRNREEIAKNKAVLRMNGVRVLSAKEHIPDGPEGIILESVLEGLAEYYSANLSQNIKRGMRESALKCQFNGSGLSTGYTVDADHKYRIDPDGAAVVRTIFEMYDGGKKIADILRYLQQSNIKTMRGKEYTHYGISRILRNRVYIGEYHWHDIVVPGGVPQIIDNDLFDRVQKRLEANKHAPAARRGDVDFLLTSKLICGNCKSTMIGDCGTGKNGARWYYYTCRAKKTKSSKCRKKSVPKEALEREVTALTAAYVLRDDVIDYIANKVVEIQKSEHDDKSMLRYFESQLKDTNKAIANIMRAIEAGIITETTRSRLEELEDTKRDLETEIIKEKVARPTIEREQVIFFLEKFRGGNVDDKEYQRKIIDTFVHKVILYDDKITITYNYSTDSTKNAENTVESIESAASAAECKCSNKFSSSPPVTRILLLQCSCYFFRRGSNRMVLRSRIPSVRWTVGKSACVSAHGSAPSDPLRLHQ

SEQ ID NO: 10276 - protein, 528 aa, synthetic construct
MNRTAARSVTVIPPTINPLTHLSRVAVQKRRVAGYARVSTDSDEQFTSYEAQVDYYTQYIKRNPEWEFVKVYTDEGISGTNTKHRIGFNEMIADAMSGKIDLIVTKSVSRFARNTVDSLVTIRKLKEKGVEVYFEKENIYTFDGKGELLLTIMSSLAQEESRSISENVTWGQRKRFADGKVNLPYKQFLGYRKGADGFPEVVPEEAIVVHRIYTRFMEGLTPGAIAKELTADGIPTPSRKQRWQTSTVESILQNEKYKGAALLQKCFTVDFLTKKRKVNEGEVPQYYVEHSHEPIITPEEFDKVQTELARRKQISRQYSGKSIFSSRIVCGDCGSYFGSKVWNSTSKYRRVIWQCNGKFKGEHKCETPHLDEETIKARFVTALNAIIESKDNILEDCRLMQATLTDCTGIDTEIESLLEEIDVVTELTKRCIAENSQTAQNQEEYAARYNGFVERYEKAKARLEQLRTTKAAREAQAEAIGAFMFEMQELDTLTEFDEKLWLTTIDTVTVHADGRMTFKFQGGTEIEG

SEQ ID NO: 10277 - protein, 434 aa, synthetic construct
MERVVERVDALIPAQPKALRVCAYARVSTGKDAMLHSLSAQVSYYSKMIQSHNGWMYCGVFSDEAVTGTKRERAGFQHMIEECRQGNIDLVITKSISRFARNTVTLLQTVRELKSLGVDVFFEEQHIHTMSADGELMMTILASYAQEESLSASENQKWRVRKAFENGEIINLRFLFGYDITPDGIRANEVDAAIVREIFARFNGGESMSSICRDLDARGHKGVLGGTWCAERMRNTLSNEKYLGNALLQKRYRNNHIEKKLLPNRGELPMYYAEGTHEPIIDQATFDKAQERLRILAQQTSNRKKPTHSAFSGLIRCGLCGNTYKRVTYRKKHYWNCTTFQTKGKSECAAKRIPEETLEVLTCEVLEEGSIDSDMVRSKITAIRAEKNNVVVYCMDDGSEIVKRWKDRSRAESWTPEMKEKARQRALQARRKKE

SEQ ID NO: 10278 - protein, 508 aa, synthetic construct
MKKVTKIDKIQPAKNAENKLRVAAYCRVSTATDAQLESLEAQKNHYENYINSRDDWCFAGVYYDEGITGTKASKRPELMRLLADCKAKKIDFVIMDCLEIVRTLLNLNIPVYFEKENINTGSMESELFLSVLSTMAEGESASISSNNRWSIKKRFENGTYRLSSAPYGYKLESGGLQVVSEQADIVKRIFRELLSGKGMYSIAKELNAEQVPTQKGGRWTSTSVHNILTNEKYTGDCIFQKTYADSNFNRHTNNGELNRYLIQNHHEAIISHEDFNATAVLIEQRAAEKGIESGSDKYQQRYAFSEKLICGECGNTFRRRIHKGKYNSYVAWVCNTHLSDTNRCSMLFVRDDALKLAFATMLNKLIFSYRLLLKPYLAAMQSNTADEALLRIQYLENQLDQNAEQRSTLHKLMAQGYIDQILYTQESNELLLQARDFRSEIEALNNTVAGDTTKVYETERLINYCKRGEMLTDFNESLFELFVDHILIYSRQKIGFVLRCGLTFEEMI

SEQ ID NO: 10279 - protein, 521 aa, synthetic construct
MGNVMIIPAKLQVGNTSRRQEDKPKLRVAAYCRVSTDSDEQASSYETQVEHYTEYIKKNPEWEFAGIYADDGISGTNTKKREEFNRMIEACKAGEIDMIITKSISRFARNTLDCLKYIRMLKDKNIPVFFEKESINTMDAKGEVLLTIMASLAQQESQSLSQNVKMGLQFRYQNGQVQVNHNHFLGYTKDREGNLVIDPEQAEVVKRIYREYLEGSSMDKIAKGLEKDGILTGAGKKKWWTSTINKILRNEKYIGDALLQKTYTTDFLNKTRVKNNGIVPQYYVENNHEAIIPKDIFLRVQEELVRRRVVKTSANGKKRSYSCNHCFAQLVICGECGEMFRRIHWNNRGCKSIVWRCLSRLEATGLECHARTVNEKVLENVVVQAINTLLGDKSTYQAQLQQNIAQVIRDANKSTTEKIDEQLMALQKELLQKANNKEAYDEIAEQIFTLREQRQQNTVDTAARDAQIQRINELQDFIKQQSATLEVFDETLVKRWLKQITVYNDHFTVELKSGLKIDIEG

SEQ ID NO: 10280 - protein, 573 aa, synthetic construct
MAKVKLPDKPRVAIYTRVSTLHQIDKDSLPMQRQDLINYARLILNTEDYVVYEDAGYSGKNTDRPKFQEMMQQVRLGMFTHILVWKIDRISRNLLDFATMYSELKQLGVVFVSKNEQFDTSSAMGEAMLKIILIFAELERNMTSERVTAAMLSRAANGQWNGGRVPLGYDYDPETKTFTINESEAAVVKIIHDKYEQERSLVSLARYLNGHGYRTRTGCTYSPSTLLIILRNVFYCGDYRYNVLKDGDRQKRKKESEWITVKDHHPAIISREQKDEIARILKENRRLECERRGIYSKKKNVHVFGGLVICGNCGHAMTSTIRPADQDGIRWSVYVCPTKRRSEYLCKGRATSEVVLGEFVFNYILNMLNVQKNFDSINSVEDMEKMLLSGSTFRDVDGIERAGLDDLYNMLASGLTEKAPFDSSVEVRKKPVVSDIELENLNTEKTRIERAAERLQNLYLYSDDSISQKDYIIQREKLMSQLAEVNEQIGMVMSNADEKDVSDEEFVHAASKFILTQKLEGRTYIYYKRLATTVSREVLRSFVMSIIENITIYDGRVQTIVFKNGLSHTFILK

SEQ ID NO: 10281 - protein, 573 aa, synthetic construct
MAKVKLPDKPRVAIYTRVSTLHQIDKDSLPMQRQDLINYARLILNTEDYVVYEDAGYSGKNTDRPKFQEMMQQVRLGMFTHILVWKIDRISRNLLDFATMYSELKQLGVIFVSKNEQFDTSSAMGEAMLKIILIFAELERNMTSERVTAAMLSRAANGQWNGGRVPLGYDYDPETKTFTVNESEAAVVKIIHDKYEQERSLVSLARYLNGHGYRTRTGCTYSPSTLLIILRNIFYCGDYRYNVLKDGDRQKRKKESEWITVKDHHPAIISREQKEEIARILKENRRLECERRGIYSKKKNVHVFGGLVICGNCGHAMTSTIRPADQDGIRWSVYVCPTKRRSEYLCKGRATSEVVLGEFVFNYILNMLNVQKNFDSINSVEDMEKMLLSGSTFRDVDGIERAGLDDLYNMLASGLTEKAPFDSSVEVRKKPVVSDIELENLNTEKTRIERAAERLQNLYLYSDDSISQKDYIIQREKLMSQLAEVNEQIGMVMSNADEKDVSDEEFVHAASKFILTQKLEGRTYIYYKRLATTVSREVLRSFVMSIIENITIYDGRVQTIVFKNGLSHTFILK

SEQ ID NO: 10282 - protein, 525 aa, synthetic construct
MNTVICARYSAGPRQTDQSIDGQLRVCTEFCKQRGLTVIDTYCDRHISGRTDERPEFQRLIADAKAHKFEAVVVYKTDRFARNKYDSAIYKRELRRNGIQIFYAAEAIPEGPEGIILESLMEGLAEYYSAELAQKIKRGLNESALKCQSLGSGRPLGYTVDEQKHFQIDPESSQAVKTIFEMYIKGESNAAICDYLNARGLRTSQGNLFNKNSINRIIKNRKYIGEYRYNDIVVEGGMPAIISKETFCLAQAEMERRRTHRAPVSPKAEYLLAGKLFCGHCKGPMQGVSGTGKSGNKWYYYYCANTRGKERTCDKKQVSRDRLEKAVVDFTVRYILQEDVLEELSKKVYAAQERQNNTASEIAFYEKKLAENKKAIANILRAIESGAMTQALPARLQELENEQTVIQGELSYLKGARLAFTEDQILFALLQHLDPRPGESEQDYHRRIITDFVSEVYLYDDRMLIYFNISSADGKLKHADLSAIESGVFDAGLISSTKKSPTPYFGVGLFASNRQRGDSTSPLKG

SEQ ID NO: 10283 - protein, 546 aa, synthetic construct
MITTTITPSDMRIVVIPAKPREEIRQTSKLLKVAAYCRVSTDDKEQKTSYEAQIQYYTNKINKNPDWQMAGIFADEGITGTQAKKRPEFLKMIRLCRQRKIDIILTKSLSRFARNTVDSLKYIRELKELGIAVISEKENINTLTAESEMLITIMSCFAQAESESISKNVSWGVRQSFKNGNVPIKYKTLLGYKKGADGLPEIVPEEAEIVRLIYRSYLDGMSLKQIADTLNSRGLRTKHKNASWQIEIVKSILVNEKYSGDALLQKTYVTDCITKKTRKNNGELPMYLVKNHHEPIISHEDFNRVQEEMARRSAKRVIADKLTKTEQGKYSAKYALSELLICGECGEHYRRVTWTAKGFKEIKWRCVSRIQYGKKKCHSSPTIDEQALHRAILSAVNEFCTVKDDVAKALRESITEVLDPTQNGSVQAAQQRIDELAHNMDELIKLATVPETAQSAMSDIAKFSDEMKAFREFIETEKAKQAAAQHGSDELNKVLERLEQEDFTLTEYNDIVTRQLIERITVESKDTITITFKGGFEIRKELDIGN

SEQ ID NO: 10284 - protein, 507 aa, synthetic construct
MAEITIIPAKNHADEIVRTAAYARVSSDSEDQLNSFAAQIRYYTELLQNSTNTVFVDMYADEGISGTSTEKRTEFQRLMSDCRKGKIDRILTKSISRFARNTKDSLEAVRELKTLGISVYFEKENIDTGEISSEMMLAIYSQFAQEESMSISRNCRLGIKKRMADGTYKNPSAPFGYDYVNGELRVNSEKAEIVKQIFNWYVSGIGINEIAMRLNAQGVRDEVWRHGTIRCILTNERYIGDKLLQKRFTTDTLPFRTAINHGEKEQYYICGTHEPIIEKSVFETAQKIFSSREKPSGYEVGSRPFRRKIYCGNCGNAFRLKSRKDCVRWVCRNHDRSAANCNIRQIREDEFRSAFVRLWNKLQAHYKAILTPMLRQLEALSEREKSGSAQLAVLRKEISEIKQQIHMMTMLNSQGTLDGAYFKGRTQELDRKLITAQKQLHASLDDEESEWLDDLRKLIGIFEKAEPIIEFDEIKFGQIVEKITVLSETKIRFDLIGGIGFIEQIER

SEQ ID NO: 10285 - protein, 550 aa, synthetic construct
MIFPFSLKEREIEMKKRVYTLYRVSTKGQVEKDDIPMQKEACRNFAESQGWEIVKEFSEKGVSGFKKSAKERDELQKIQQAAMEGKFDILLVFMFDRLGRRDDETPFIVEWFTKQGIEVWSVNEGQQRFDTHVDKLMNYIRYWQASGESLKTSVRTRTRLEQLTGEGHYTGGTVAFGYKRVRLGRVNKKNQEVCDLVIDEAEAEIVRLIFHKYVYEGYGAQKLSHYLYEQGVVGRNNKNIPNTSIVRMIKNKGYTGYLINGAVETECPQLRIIEPELFEQAQELRQARTCERGGTSLGTSSKALLTGLVYCAHCGNRLSLTSSGRTHTYADGHTVKEVRPRYSCFYKIRHPGDCDGQSGYGVSKLDSIVEEVVRQIFAQFREVSRKKLLESVKTNDAARIQKKVKKIQKDLESKQKELDDLKAETILVIRGVSALDKELLGTLVAEAREALETLEKQLVQAQEEYEEATKTAKRSNYICNELFTWADVYDTANHDERRAILQQFITEIRVRKDYEISITLNASFNQVEQLKAVSTYDGAEIFEEISEKGA

SEQ ID NO: 10286 - protein, 529 aa, synthetic construct
MSRTAARSVTVIPPTINPLTHLSKVAVQKRRVAGYARVSTDSDEQFTSYEAQVDYYTQYIKRNPEWEFVKVYTDEGISGTNTKHRIGFNEMIADAMSGKIDLIVTKSVSRFARNTVDSLVTIRKLKEKGVEVYFEKENIYTFDGKGELLLTIMSSLAQEESRSISENVTWGQRKRFADGKVNLPYKQFLGYRKGADGFPEVVQEEAVIVRRIYTRFMEGLTPGAIAKELTADGIPTPSRKQCWQTSTVESILQNEKYKGAALLQKCFTVDFLTKKRKVNEGEVPQYYVEHSHEPIITPEEFDKVQTELARRKQISRQYSGKSIFSSRIVCGDCGSYFGSKVWNSTSKYRRVIWQCNGKFKGEHKCETPHLDEETIKARFVTALNAIIESKDNILEDCRLMQATLTDCTGIDAEIESLLEEIEVVTELTKRCIAENSQTAQNQEEYAARYNGLVERYEKAKARLEQLRTTKAAREAQTEAIGAFMFEVQELDALTEFDEKLWLTVIDTVTVHADGRMTFKFQGGKTFTSY

SEQ ID NO: 10287 - protein, 434 aa, synthetic construct
MERVVERVDALIPAQPKALRVCAYSRVSTGKDAMLHSLSAQVSYYSKMIQSRNGWMYCGVYSDEAVTGTKRERAGFQHMIEECRQGNIDLVITKSISRFARNTVTLLQTVRELKSLGVDVFFEEQHIHTMSADGELMMTILASYAQEESLSASENQKWRVRKAFENGEIINLRFLFGYDITPDGIRVNEVDAAIVREIFARFNGGESMSSICRDLDARGHKGVLGGTWCAERMRNTLSNEKYLGNALLQKRYRNNHIEKKLLPNRGELPMYYAEGTHEPIIDQATFDKAQERLRMLAQQAANRKKPTRSVFSGLIHCGLCGNTYKRVTYRKKHYWNCTTFQTKGKSECSAKRIPEETLEVLTCELLGAVSFDPDMVRSKITAIRAEKSNMVVFCMDDGSEIVKRWTDRSRAESWTPEMKEKARQRALQARRKKK

SEQ ID NO: 10288 - protein, 579 aa, synthetic construct
MRNKSLAGRANNRAERPRKVAIYIRVSTTHQIDKDSLPMQRKDLIAYCELILGIEDYEIFEDAGYSGKNTDRPAFQEMMQKIRSGSFSHLLVWKIDRISRNLLDFAEMYEELQSLRVTFVSKNEQFDTSNAMGEAMLKIILVFAELERNMTSERVTATMISRANQGLWNGGRVPYGYSYDAETSVFSIIQDEADVCQLMKTDYFEHKSIIHTAKLLNDRKVPTRSGALWSPTAVWKILSSPFYAGIYRYNHYKGTENRTINPEEEWVLVPDHHPAIFTLEEHEKICDIMDTNKRMSNLPGQKHRAKNVYAFSGILYCGKCGSKLVSTPGRLQADGFRTTTYSCPKKRKTHECDNPSINDLIVGEFVINYILNMLNAKSSFSSISSPAELEEHLLYGGSFKDVQHISEDGLNEFYNLLSRYGSDSSYVFAMKRPRKKKAAVNPEVEALRKDKEKQERALKRLQDLYLYSERAMTEKDFIIQKNEISSRIQDINTRLGMVTHDANSTLSDEDFVRQASHLLITKKLIGREYIYYKSLAQTVSPDVLKIYMETILDSVYVVDGRVSSIIFKNGLTHTFVYQN

SEQ ID NO: 10289 - protein, 540 aa, synthetic construct
MKQPNNTMIYNTALYLRLSRDDELQGESGSIQTQRMMLRQYAEEHGLTVVGEYIDDGWSGTNFDRPGFQRMIDDIEEGKINCVVTKDLSRLGRNYILTGQYTEIYFPSKGVRYIAVNDNVDTLNGESELAPFLNILNEMHARQTSKKVKAAMRTRFANGAHYGAYAPLGYIKDPDKSGHLLVDPETKWIIEKIFDLAVHGHGAASITHILVDEKVPTPGWLNFQRYGTFANIYAGASEEKSYAWTVAQVKSILKEETYIGHSVHNKQSNISFKNKKKVRKPQEEWYRVENTHEAIISADVFRQVQEQIAHRRRKQKDGTTQIFSGLVKCADCGWSMAYGMNKQNKKPYGYYHCSKNGQGLHQCSMHYIRYDVLYTYILARVQYWSQQAQQDGDKLLQRLLNASDKERNTAKKKQTAELKKATKRKAEVDNLFAKMYEDWSVGRITEYNFNMLSEKYQAEQHELDEKIQELQAELDAAVQTAVDAEKWIELMKKYVNPTQLTAELLNALIEKILIHEAVKHEDGTREQEVEIFYRFIGKVE

SEQ ID NO: 10290 - protein, 581 aa, synthetic construct
MSRTTNKRPGKAKSGLSRKQKVAIYIRVSTLYQVDRDSLPMQRKDLIAYASLILGIEEYEIFEDAGYSGKNTDRPAFQEMMQRIRKGEFTHVLVWKIDRISRNLLDFAEMYEELQDLRVTFVSKNEQFDTSTAIGEAMLKIILVFAELERNMTSERVTATMISRANSGLWNGGRIPFGYDYDPDKTAFSIREDEEKVCQMIKNDYMEHKSLVHTSRMLNASGYKTRSGVEWSPTAVWIIVSSPFYAGIYRYNRYKGTERRVENPEDEWIMIQNHHPAIFSLEEHEKMLAILDENSRNRRSVGQRHQTERVHIFGGIAYCGKCGSKMVSTPGRLHVNGYRPTNYSCPKHRKTKECDNPTVSDTQVGEFVINYILNMLGAKKKFSTIENPEDLERCLLYGNTFSEVEHIDSNGLNEYFNLLSRYSSDDSYTFSVKKSRKKKAEVDPEVAALRKEKEKQERAMKRLQDLYLYSDTSMSEKDFIIRKTEISKRLEEINAMLGMVAKNSEPSLSDEEFVRQASHLLISRELQNRQYIYFKNLAQSVSPEILKVYMETVLDSVLLVDGRVSSIVFRNGLTHKFKYKS

SEQ ID NO: 10291 - protein, 640 aa, synthetic construct
MNTVIYARYSAGPRQTDQSIEGQLRVCTDFCKQRGLTVIDTYCDRHISGRTDERPEFQRLIADAKRKKFEAVVVYKTDRFARNKYDSAVYKRELKRNGIQIFYAAEAIPDGPEGIILESLMEGLAEYYSAELAQKIKRGMHESALKCQSTGSGRPLGYRVDEQKRFQIDPESAQTVQTIFEQYIKGESNAAICELLNSRGLRTAQGKPFNKNSINRIIKNRKYIGEYRYHDIVVEGGMPAIIPKDTFNLAQAEMERRRTRKAPKSPKAEYLLAGRLFCGHCKGPMQGVSGTGKSGNKWYYYYCGNTRGKNKTCDKKQVSRDRLERAVVDFTVRYILQEEVLEELARKVHAAQERQNDTASEIAFYEKKLADNKKSIANVLRAIESGAATQTLPARLQELENEQAVILGELSFLKGKHLAFTEDQILFALMKHLEPYPGESEQDYRRRIISDFVSEVYLYDDRLLIYFNISSEDGKLKSADLSNIEGSEFDEGLVSSTKNKEAHESVPLYFWWGYFIRPSPAMRAVISSMRSSGNGGSHRGLMAMDMSFMGLSSAATRLELSAPQRLQRWMIAHSPPLRTQTATGSMMPPQSAARSPGSMSTCRLERQLGQWLRWSLPASCGVQSRPQTLQVKVSLQGWVL

SEQ ID NO: 10292 - protein, 541 aa, synthetic construct
MRIAIYSRKSKFTGKGESIGNQVEMCRDYIATNYNGEEHSIQVFEDEGFSGKNLDRPQFKKMIEIENVIPFDLIVVYRLDRISRNVGDFASLIEKLNKKNTSFVCVKEHFDTGNSMGRAMMNIAAVFAQLERETIAERIKDNMYLLAKEGHWLGGTTPLGYKSIEVTNGKRTHFELIIDESQIDLVNIIFSKYKQLGSINGVETYLFVNGYKTQKNNYWHKSNVKRILTNPIYCIADIDSLNYFTELGCNVCFTLDDCNGKKGIYPYNRFSGQKRETQSYDRWIITISEHQGILAGKEWVAIQQQLKANSKDGFGGKANERRSTSNTSLLSGVLFCSCGAYMRPKKYPSGNTFYICENKMDKKITECNNSNINADELDKIILNELFSFDIKDGVVDSQIQNLKEQVANIDNDLQKQIGRLKKQIETNKNTVNKFMNIVALSIENDTPKQVVEVYNQKINELLNQNKITQKRIDELQDTNIVQAKMNDRLNSLTDAMTYLKENFDKLTIVEKRGFVKEIVDRIVWDGKNINIFIKGISELSE

SEQ ID NO: 10293 - protein, 562 aa, synthetic construct
MAYRRAQDTKGLRAVFYARVSTAEEEQLNAIELQIEENRNTITKHGWKKVDEYIDRSKSGTMVKGRDEYQRLYEDLLGDAFDVVVIKDQERLMRNTLDWYLFINRLVQTGKILYMYLEDKFYSPDDALITGIKAIIAEEFSRNLSKKLHNYHDGRIEKARKGLEIDLQGSGNVFGWDKVDGKYVINPEQAKVRRLMCEGIMARKGSTQIAKELNDAGYRNTVGKPWKPMDIPKFVYDCKNVGTMIINRERHDFESKQTVKLPESEWVYVKGALPPIVTEEEWALIEKIHEERVVATGCNRRGKKTSGYSFSGKLVCGVCGAPYWRKTKTSNEEYWVCSTKQQKGRKTRARDAVGGKAGEINPEGCDNENISYNALMEIMAIVSERLQADTGFIREFMLGRLDTYEKRITEANRGATEADLQREISRKDKLLDAYLDNLLTKEEYQRKALALDEHILELRREVEANKANLADLAEIQRVRENIDAEVAQYLDENEQLKVEFVLEHLSQVIIYPDKVLVIFDVFGEGVMVEKSQYVSREKRGRKIYPYQYYRKPDFCRSGRSPD

SEQ ID NO: 10294 - protein, 546 aa, synthetic construct
MAYRRAQDTKGLRAVFYARVSTAEEEQLNAIELQIEENRNTITKHGWKKVDEYIDRSKSGTMVKGRDEYQRLYEDLLGDAFDVVVIKDQERLMRNTLDWYLFINRLVQTGKILYMYLEDKFYSPDDALITGIKAIIAEEFSRNLSKKLHNYHDGRIEKARKGLEIDLQGSGNVFGWDKVDGKYVINPEQAKVRRLMCEGIMARKGSTQIAKELNDAGYRNTVGKPWKPMDIPKFVYDCKNVGTMIINRERHDFESKQTVKLPESEWVYVKGALPPIVTEEEWALIEKIHEERVVATGCNRRGKKTSGYSFSGKLVCGVCGAPYWRKTKTSNEEYWVCSTKQQKGRKTRARDAVGGKAGEINPEGCDNENISYNALMEIMAIVSERLQADTGFIREFMLGRLDTYEKRITEANRGATEADLQREISRKDKLLDAYLDNLLTKEEYQRKALALDEHILELRREVEANKANLADLAEIQRVRENIDAEVAQYLDENEQLKVEFVLEHLSQVIIYPDKVLVIFDVFGEGVMVEKSQYVSREKRRWKNNAV

SEQ ID NO: 10295 - protein, 516 aa, synthetic construct
MARKKIKKGDGQRLVAYYRYSGGSGQTEQSIEGQRRDCEAYARLHGMTIQHEYIDRHISGKTDDRGAFQQMIADSDKGAFDYVICWKTDRFARNRYDSAVYKKRLRDNGVEILYAAESNISGSEGIIIEGLMEALAEYYSAELSEKMRRGMRESALKGRAISRCRALGLTTDSDKRFVIDPKTAPIVRFIFERYAAGDSSMSIVEQLNAKGLRTSQGNQFNKCSIPRIIQNEAYRGVYVSKAYNVRIEGAIPAIIDDELWERAQTMLKLNQQKRTKNAAKADYFLSGKLFCKECGSPMKGVSGHSSTNGEVYRYYACSNPECHKHNIPKDDLEGKVVQSICDHLLQPESMDALADAMIEVQKQDAVKPNAERLAVEENLADVRRRSKNILDAIENGTANPQLYARLDELTERENTLSYQLATLQNEKAIVFTKEQFLFLLEQFCIEPSERSEEYGRRLINTFVTNMEVSNSELFIYFNVSEETVNKTKNAPQKNFQKESSSEMRLVRVARIELTAS

SEQ ID NO: 10296 - protein, 520 aa, synthetic construct
MVKCMKSVAEHAVPAVIYARYSSSHQREESIEGQVRECREYAEREGYSVLQVYADRAITGRTDERPEFQRMLADASKGVFQAILIYKYDRFSRNRYSFAVWETKLKKHGVKVISARENVAEGAAGIVLKSVLQGMAEWYSVDLSEKVTRGMKENALKAKWTSGTVPFGYTRDAEQRLIIDPERGEYVRQIFEKVLAGEKYVDIASWLNMLGVRTARGAAWNKSSFTWMLKNVVYTGLFRWKDIEIKNAVPPIISKELFEAVQRKLKTYRRRGINVQKSDKYLLTPNIICGECGGPMHGMSGKSRSGELYYYYACANKREKRTSCSISPLNRDELEQAVYNCAREVLLHEENIKLIAEQAEAVAEAQVDNELAEMKAERSRVKKSIANYAAAIANGATSGTIIELINAAEAKAAALDEAIAERELVAAPPKVSKEAIEYFLRNIAAAPDDKMKEKVISTMVNSVVVERVPDEGTKKDSDEKYSITVRFNFTDTPQLSALQSFDVREKSKMVTSAGLEPATF

SEQ ID NO: 10297 - protein, 490 aa, synthetic construct
MKAVIYARYSSDSQREESIEGQLRECTEYAERNGITILRSYIDRALSARTADRPEFQNMIKDSEQKLFDVVLIWKLDRFSRDRYDSAHYKRILKKNGVKVVSVKENISDGPEGIILESMLEGYAEYYSAELSEKIQRGQKENALKCKNNGGNTPLGYVVGTDGVLAVDPLTAPLVTEIFTRYDSGESISEITASLNGRGLKTKKGKAFKIGGVSLILKNRKYIGEYQYGSVIIPKGIPAIIDDDLFDRVQRRMAFNKKAPAKAKATEEYLLTTKLFCGTCERLMAGESGTSSTKGVKHYYYKCGGAKRKLGCKRKAVRKHWIERAAVLVTVQRVLQDDEISRIAEAIVALQEKEDTSLPAMRQQLTECEKAIDNMLNAIQMGVLTASTKERLEKLEMQREELKLSILQAQMARPRYTKEQVVSWISRFKYGNIDDPQYQKQIIDTFINSIYVFDDKLVFTYNFKDGTETITLAEIQAAFGSDLTQVAPPK

SEQ ID NO: 10298 - protein, 565 aa, synthetic construct
MLRTPGDLFFLAEAVNSTNKFYSVSDKSARVYFLYSFLGGETMRFFSYGRKSVFSDKSDSIDNQFRMNREYCESKFSGQVDSWQQFSDEDFTGANTSRPDLQRMLSFIKGGFCDVLVVYQLDRLSRDVRDFANIYALLEEHGVMFISIKENIDTTTPIGRAMMYVTVVFAQMERETIAARVTDNMLGLAKKGYWTGGNPPVGYVRKHIVVNGKKHCSIEVDPDGARYVTQIFDTFLAYNCSLQGMETRFKNQGIRTQSGKFFSTTQLHKMLTMPYCVEATPEVYDFYAAKGCIMDPGSPREMWDGSVGVIIYGRSTEKNKKHQAQPPEKWTVCLGKHKPFMPAEKWLAVQSRFTQNKCIKDAKWPVPLLKGVLRCKCGNLMQVSRKKKVDGTCSSWYYCRKRMRQGVDACDMGQIKCDLLDEKVLELFRGITADPALIQKFVKAEAPTDVPDLKAAQARVSSCERKIGRLAASLALAEDSAASKYIIAEMERLDVELGALKREASLAEMESHRAAASAKDAKATAAEIAKLIHGLDGFDDKEKNAIARAVIQECTWDGERLFITL

SEQ ID NO: 10299 - protein, 588 aa, synthetic construct
MRIVNKIEAKTPQMPRRKRVAAYARVSMESKRLQHSLSAQVSFYSSLIQSNPAWEYVGVYADNGITGTKAEAREEFNRMIADCEAGKIDIVLTKSISRFARNTVDLLNTVRRLKELGVSVQFEKERIDSLTEDGELMLTLLASFAQEEIRSLSDNVKWGTRKRFEKGIPNGRFQIYGYRWEGDHLVVHEEEAKIVRLIYDNYMNGLSAETTEKQLAEMGVKSYKGQHFGNTSIRQILGNITYTGNLLFQKEYVQDPISKKSKINRGELPQYFVENTHEAIIPMEVYQAVQTEKARRRELGALANWSINTSCFTSKIKCGRCGKSYQRSNRKGRKDPNANYTIWICGTRRKTGNAHCRNKDIPEPMLKEACAAVLGLDTFDEIIFSEQIDRIEIPAPNEMIFYFKDGHIVPHHWESTMRKDCWTDERRAAKGRYVQEHQLGPNSSCFTSRIRCDSCGENYRRQRSRHKDGSFDSVWRCASGGKCNSPSIKEEVLKNLCADAMGLESFDETAFREQIACIHIVAPFQLSIRFFDGHTFEAAWENKRKMPKHTEQRKQHMREVMIQKWREKCGESNDYTGNDKPVHGNADQ

SEQ ID NO: 10300 - protein, 523 aa, synthetic construct
MAKVTTIPATISRFTATPINERKKRRTAAYARVSTDSEEQLTSYSAQVDYYTNYIKSRDDWEFVSVYTDEGITGTNTKHREGFKRMVADALAGKIDLIVTKSVSRFARNTVDSLTTVRQLKEKGVEIYFEKENIWTLDSKGELLITIMSSLAQEESRSISENCTWGQRKRFADGKVTVPFKRFLGYDRGPDGNLVLNKDEAVIIRRIYSMFLQGMTPHGIAARLTADGIKSPGGKDKWNAGAVRSILTNEKYKGDALLQKSYTVDFLTKKKKVNEGEIPQYYVEGNHEAIISPEVFEMVQQELERRKQGRGRHSGVHLFSGKIRCGQCGEWYGSKVWHSNSKYRRVIWQCNHKYDGEEKCSTPHLTEDEIKAMFVSAANKLIGKKAAIISPLRNSLDVAFDTSALETEVAELQDEIMVVSDLIEKCIYENAHVALDQTEYQKRYDGLTTRFDTAKARLEEIEAALADKKSRRAAIDAFLDTLAQADPMEKFDPVLWCGLIDYVTVYARDDVRFAFKDGQEIKA

SEQ ID NO: 10301 - protein, 558 aa, synthetic construct
MNRYGKRCVLYPRVSTEMQVDGYSLEGQKNMLTRFADREEMIVVDTYEDAGKSGKSIEGRPAFQKMLRDIEDGLDIDYILVYKLSRFGRNAADILNSLELVQSYGVNLICIEEGIDSSQTSGKLLISVLSAVAEIERENIIEQTMNGRREKARQGGWNGGFAPYGYTLEDNKLMIEETEAVAIRKIFELYTSSEIGLGGIANQLNLQGIRKIPRQNGTLEDWTGHFIKLILDNPVYCGKIAYGRRTKEKVKGTKNDYQMKRNDDYILTEGQHKGIVSEEVWEKAHAKRLRTGVKQPSKIGRDRVHLLSGLLKCPVCGSPMYTNKHAWTNKDGTYKEIYYYVCSRNRMVRGKHCEYKAMLKKTDIEPMVIEAIREIVRNEEYAQAIKKRIGVQIDTKAVDKELEGYQAKLKEVDLNKTRLEREIDSLPADAKYRERKLHDMTLRLDSLYDVIVELEEKIEDARLRRDAIKQQAITLENIYKIMVNFDCVYNIINDEEKRNVVTALIKEIEIYRNDESEYPLKRIGLNFPVFKDGGEVTELLWDKGNTVETVVLMSRKDK

SEQ ID NO: 10302 - protein, 455 aa, synthetic construct
MANEIKQVALYIRVSTDQQAKHGDSLDEQEHTLNEYVKQQGNMKVFKTYIDDGISGQKLYRDEFQKLLDDVKKGRIDTILFTKLDRWFRNLRHYLNIQEILDKNNVTWLAVTQPFFNTETAMGRSFVNQSMGFAELEAQMTSERIRAVFDNKIRKGEVVSGKVPLGYDIKDKHLVPNEKAEIVKEIFQYYLETGSMRATVRHLENHFSMTRDYQSVRQMLTNRKYIGELRDNKNFCEPIVDRDVFERVQLQLSKNIRMNKKRDYMFTGLLVCSECGCNYSATAVISRYVRKDGTTNPNERHLYRCTKNRNNVKKCSNKKGIYETTLENFLLENIEKQAEELSVRMQKEPEVKKTKNTNDKIKKKIDRLKKAYLNEVITLEEYKKDREELEALLIPEQDNKIAKIDLNSLHNYSTAEFRDGYKQLTISEKSSLWRQVIKNIVVYPDGNLKINFLGY

SEQ ID NO: 10303 - protein, 581 aa, synthetic construct
MARKRTNLIGNTPSVRETKVAIYIRVSTIHQVDKDSIPMQKKDLIAYCQLILGTDNYEIFEDAGYSGKNTDRPAFQNMMGRIRKGEFTHVLVWKIDRVSRNLLDFAEMYEELRSLRVTFVSKNEQFDTSTAIGEAMLKIILVFAELERNMTSERVTATMISRANGGQWNGGRIPFGYSYDPKEKVFSIREDEASICRELKDLYLLNRSLAYVSRALNEKGYKTRAGVSWSPHSVWIIASSPFYAGIYRYNRYKGVESRTINPEEEWVMIQSHHPAIFTLEEHQAMRSIMKSNKRNMDNLPGRVHLSTKTHIFQGIMYCDKCGSKMVSTPGRLHVDGYRTSNYGCPLRRNTKKCNNPTVNDIVIGEFVINYILNMLNAKKTFSTINTPDELNAALLSGSVFSEVSSVEENGLNSFFNLLSRYGSDRSYIFSVKSPRKKKAAVDPELSKLRKEKEKQERALQRLQDLYLYSETSMSEKDFIIRKSEISSHLDNINRQLGLMTQDQASFLSDEEFIKQASHLLIQKELKNKKYIYFKKLVSTVDPDILKAYMETILDSIYTADGKITAITFKNGLTHRFIYKDK

SEQ ID NO: 10304 - protein, 504 aa, synthetic construct
MRVVLYMRYSSDRQTEQSIEGQNRVCTAFCEQQGYEIVDRYIDRATSAFKDTDKRTEFQRMIRDSEKQLWEGIVVYKLDRFARNRYDSATYKARLKKNGVRVISATENISDNPEGVILEAVLEGMAEFYSKELSQKITRGMFESANKCHSIGGHIPLGYKIENKKLVIDEAGAAIVREAFDLYANGATVAEICETFNTKGYRTAKNAEFNKNSFRSMFKNERYIGIYKYKDLRIEGGVPAIVDKDTFAIVQKKLSKNAEAPSRGKAKIDYLLSQKLFCGHCGSLMTGESGTGKGGTTYFYYTCGKRKREHTCDKKPLKKDFIERAVVEDALTLLTPETIDELADIAVNESIREMEENSIIPALKDQLHDTERSINNLVKMVEKGVESDTIADRLKELEKEKRAIEKRLVVAQDDYVLLEKDHIVWWLSEFCNGDIEDEEFRRHIIDLLVNSVTVWDEPDGWYKITSVYNLTSNKTKTFRCSDLSGQAPPKVHRNFDRITADFLY

SEQ ID NO: 10305 - protein, 528 aa, synthetic construct
MSRTAARSVTVIPPTINPLTHLSRVAVQKRRVAGYARVSTDSDEQFTSYEAQLDYYTQYIKRNPEWEFVKVYTDEGISGTNTKHRIGFNEMIADAMSGKIDLIVTKSVSRFARNTVDSLVTIRKLKEKGVEVYFEKENIYTFDGKGELLLTIMSSLAQEESRSISENVTWGQRKRFADGKVNLPYKQFLGYRKGADGFPEVVPDEAIVVRRIYTRFMEGLTPGAIAKELTADGIPTPSRKQRWQTSTVESILQNEKYKGAALLQKCFTVDFLTKKRKVNEGEVPQYYVEHSHEPIITPEEFDKVQTELARRKRISRQYSGKSIFSSRIVCGDCGSYFGSKVWNSTSKYRRVIWQCNGKFKGEHKCETPHLDEETIKARFVTALNAIIESKDNILEDCRLMQATLTDCTGIDTEIESLLEEIDVVTELTKRCIAENSQTAQNQEEYAARYNGFVERYEKAKSRLEQLRTTKAAREAQAEAIGAFMFEMQELDTINEFDEKLWLTIIDTITVHADGRMTFKFQGGTEIEA

SEQ ID NO: 10306 - protein, 434 aa, synthetic construct
MKRVVERVDDLIPAQPKALRVCAYARVSTGKDAMLHSLSAQVSYYSKMIQSHNGWMYCGVYSDEAVTGTKRERAGFQHMIEECRQGNIDLVITKSISRFARNTVTLLQTVRELKSLGVDVFFEEQHIHTMSTDGELMMTILASYAQEESLSASENQKWRVRKAFENGEIINLRFLFGYDITPGGIQVNEKDATIVREIFARFNGGESMSSICRDLDARGHKGVLGGTWCAERMRNTLSNEKYLGNALLQKQYRNNHIEKKLLPNRGELPMYYAEGTHEPIIDQATFDKAQERLRMLAQQAANRKKPTRSVFSGLIHCGLCGNTYKRVTYRKKHYWNCTTFQTKGKSECAAKRIPEETLEVLTCEVLGAVSFDPDMVRSKITAIRAEKSNMVVFCMDDGSEIVKRWTDRSRAESWTPEMKEKARQRALQARRKKK

SEQ ID NO: 10307 - protein, 541 aa, synthetic construct
MEKDKKVTALYCRLSKDDGSNSESLSIRTQKAMLMEYATRNGFGNCQYYVDDGYSGTNSDRPAFQELLDDIREGKVATVITKDQSRLGRNHIETGTYMEIFFPEHGVRYIAINDGYDSNEQSQMDIAPFRNIINEMYAKDTSRKIKSALRTRKKSGKYISSNAPFGYQKDPADHNHLVIDPNTAPVVEYIYSMAEEGLGLHRIAKRLHDEKVLKPCYYKKEMFGRFIDDEKMYDWDSAYISQVLHSPVYAGHIIYEAKPTVSMKSKKRRYIPFEERAIVPNTHEAIIPQDRWENVQRILYSRSSSFMCDKTDYDNIFKGIVRCADCGRTMLVKVEHRRKRNSVLDQTFYCCSTYRKYGAKACDSHNLEARVLHEAVFADIQAHAKAAVSNREALVKKIANQMHLRVSSDRAQHKRDLKQCKARIAEIEDLYAKLYEDVSKGLLPEKRFQMLADRYDKEQAELTEKIEQYEREGRAEHDQLDKIQDFIDEVSKYAGITELNYKILHQLIDKILVSKAEKVDGEYVQKIQIFYRFIGPLDAIE

SEQ ID NO: 10308 - protein, 430 aa, synthetic construct
MERKVHRVQQRPPKPKLLKVAAYARVSSGKDAMLHSLAAQVDYFQNLIRQHPGWEFCGVFADEAKTGTKDERPEYQKMLEKCRNREVDLVITKSISRFARNTVTLLETVRELKSLGIDVYFEKENLHSTSGDGELMLSILASFAQEESKSVSDNMKWRIRNDFQQGKIGSITIFGYRRNADGVLEIEESEAKIVQMIFADYCSGMGQCAIAKKINAMGISTRQGNRWTGQRVKEILVNEKYVGNMLLQKYYRQDPIGKRKMKNQGELPKYFVEQSHEAIISADLFEKVQELVKERTEQFSHSGATNRYPLSGMVQCAACGKSYQRKIYKQGAVWMCATYLRQGKSHCPTAKQISERILYEKICFALQIKEFDVEIVKSRVDNILISPNQLTFLFKDNTEKTVSWENHSRSESWTTEMRQAAAERSRKCQK

SEQ ID NO: 10309 - protein, 536 aa, synthetic construct
MPRKKKLQEVGGLRLVAYYRYSNGGQQTEQSIEGQRRDCEAYAKAHGYKIVHEYIDRHISGKSDSRPAFQQMISDSDSHLFDAVICWKTDRLARSRYDSIIYKTRLRKNGVKILYAAETVVDGPEGIIIEGLMESLAEYYSAELAQKLRRGQRESALKCIALGGNRSFGYDIGPDKHYCINEKQAPAVRYIFEQYAAGATAADIVRELTARGYRTSRGNPFNKNSICRIITNEMYLGVYKYADIRIEGGVPAMIDRELFNRCQTQLAFNRAHGGGKGAPRADYVLVGKLDCGLCGHAMKGASATGHTGSKHYYYTCTQHVEKKCPKTSIEKNYLEQVIVDGVAKYVLTPEKISQIVDCMMELQAKEQEPKGNPERDALEAELAECRRKQNNILDAIEEGGSARLAARLRALEEQEAQLTFALGEINNAPAPPQFSREALTFMFEQFRREEDEVDEEYRRRILDTFVSSILLYEDRAEVKFNITDQKTGDFERVILPISANKKPPEDDDTTSNSEGSTALRLVEAMGVEPMSEKSSA

SEQ ID NO: 10310 - protein, 516 aa, synthetic construct
MRTVSRIDPIPRQKKKLRVAAYCRVSTDMDAQLESLEAQKSYYENYIDSRADWLLVGIYYDEGVTGTKKDKRPDLLRMMEDCEAGKIDFILTKSVSRFSRNTADCLELVRRLMELHIPIYFEKENLNTSEMEGEFLLSTLSSLAESESVSISENSKWSIQNRFQDGTYKLCSAPYGYRWDGKNLVVDPVQAKVVKRIFTEVLAGKGAGTIAADLNDDGIPAQRCDHWTSTSILGMLANERYVGDALLQKTFTDEQFNRHRNTGEMDMYCVQEHHEAIISREAFDAVAVLLEQRAAEKNIQKGVNKYQKRYTFSGLIRCAECGGTFKRRVNSGKGGKYAAWCCGTHIADKTKCSIQSVRDEDIKLVFTTMLNKLIYGNRLILKPYLKALKNTSQDESQLRIQYLQGLVAQNTEQRETLTRLMAQGYIDQVLYSRENNGLLAQCEEFRSEIETLKKSQTTDAVQTAETEKLLKFVEKAEIQEEWNSDLLRQFVDSITVDSRNEIGFVLKCGLTLRERI

SEQ ID NO: 10311 - protein, 519 aa, synthetic construct
MKNITVIPARKTAKGAPLVSQQKLKVAAYCRVSTDSDEQATSYDAQIKYYTELIENNPEWTLAGIFADEGISGTNTKKRDEFNRMIEECKVGNIDMVLTKSISRFARNTLDCLKYIRLLKEKGIAVYFQKENINTLDAKGEVMITIMASLAQQESESISKNVKLGIDFRNKQGKVQVNHNRFLGYTKDAEGHLIIDPEQAEVVKRIYREYLEGASMDMICHGLEVDGILTGAGNRKWYTSTVKKILTNEKYIGDALLQKTCTIDILNKTRVANNGIAPQYYVEDDYEAIIPKELYMKVQEELVRRRNVRASPSGKKRMYSCTHCFSQMVVCGNCGEVFKRIHWNNHGCRSIVWRCASRLEQDGAVCNARTVNEKELEQVVLRALNEMLGAKTTYKEQLQKNLMQVLRNDTSAQKGRIVERLLVLQQELLNCANNREAYDDVAEEIFHLRELQQQTDSDETTKAIQMERIKELQDFIGQQGSELTEFDEKLVKRWLRQITVWDDHYTVELKSGLSIDVPA

SEQ ID NO: 10312 - protein, 449 aa, synthetic construct
MLKRAALYIRVSTDQQAKHGDSLDAQIATLKDYVSTQDNLTIIDTYIDDGISGQKLYRDEFQRLLEDIKKNRIDIILFTKLDRWFRNLRHYLNIQEILDNSGVTWLAVSQPFFNTDTAYGRSFVNQSMSFAELEAQMASERIKAVFENKIRKGEVVTGSVPFGYKICDKKLIPNENAAIAKDIFKHYSIHNSIRLTVEYLFNEYDITRSSRTIKHMLRNRKYIGEVSGNKNYCPPIVDKETFEKVQNLLDKNISSIAKRTYIFSGLVVCSCCGKKMTGRYRKRKYIKKDGTVMYYTKKVYRCNGNTYKRNKCPNKINIPEEILEEYLLNNIKADAENFEAKQKKIAVSAPEKNNNSKILKKIERLKKAYLNEVISLDEYKKDRKELEQMIVQVKPKETIVFKSNWFNKNIESTYRDFDEEEKRFVWRSVLKNLLVDPHGKITINFLTKN

SEQ ID NO: 10313 - protein, 523 aa, synthetic construct
MRFFSYGRKSVFSDKSDSIDNQFRMNREYCESKFSGQVDSWQQFSDEDFTGANTSRPDLQRMLSFIKGGFCDVLVVYQLDRLSRDVRDFANIYALLEEHGVMFISIKENIDTTTPIGRAMMYVTVVFAQMERETIAARVTDNMLGLAKKGYWTGGNPPVGYVRKHIVVNGKKHCSIEVDPDGARYVTQIFDTFLAYNCSLQGMETRFKNQGIRTQSGKFFSTTQLHKMLTMPYCVEATPEVYDFYAAKGCIMDPGSPREMWDGSVGVIIYGRSTEKNKKHQAQPPEKWTVCLGKHKPFMPAEKWLAVQSRFTQNKCIKDAKWPVPLLKGVLRCKCGNLMQVSRKKKVDGTCSSWYYCRKRMRQGVDACDMGQIKCDLLDEKVLELFRGITADPALIQKFVKAEAPTDVPDLKAAQARVSSCERKIGRLAASLALAEDSAASKYIIAEMERLDVELGALKREASLAEMESHRAAASAKDAKATAAEIAKLIHGLDGFDDKEKNAIARAVIQECTWDGERLFITL

SEQ ID NO: 10314 - protein, 497 aa, synthetic construct
MRGVIYARYSPGPHQTEQSIEGQVADCQQYAEEHGIDIIEIYADRHVSGKSVVGRDEFQRMLRDAEKGRFDCVLVWKIDRFGRDRQDIAMGKMALKRAGVKLMYARESVPEGPEGIILESVLEGLAEYYSADLRQKVIRGMKETAKKGQYCGQSLPIGYKVDAERHIVVDEREAAVVREAFKLHIAGGQIRDIVQLFADRGIMGRRGKPVSNAVVYRMLRNEKYLGEFYIQDVKLNVEPIIDQATFLEAARHFKTSRNNAAGRAKVNYLLSCKMFCGYCGSMISAEAGTGKLGKVYRYYKCGDKKRGKKCELKPFPKDHLEDAIILATVNDMLTDEMIEKLTVRILEVQEQENADDPVVGLRRRLDSNKKRQRNLLDAIEEGGARGLVSRLAALEEEEEQLALEIQRAEIKRPRLTHEVVEAWLRSFRVGDVTDDDFRARLVDTFIARVELRNDEALIFYNIREKGPHSRVRVRPEWWRWRESNPRPKTGYRGFLRV

SEQ ID NO: 10315 - protein, 559 aa, synthetic construct
MRTIRKIERRIPNLKQRKKVAAYARVSMESERMHHSLSAQVSYYSSLIQKNPDWEYAGVYADYGISGTGMKKRQEFLRMLEDAEAGKIDIILTKSIQRFARNTVDLLRTVRHLKELGVEVWFEKENIHTMSGDGELMMTILASFAQEESRSISENIRWRIKKQFEQGNPNGRFRVYGYRWEGDNLVVVPKEAAVVRRIFQNFLDGKSRLETEREFAAEGITTRNGCRWMDSNIRVVLTNVTYTGNMLFQKEYVTDPILKKRKKNRGELPRYYVENTHEPIIDKETFDYVQQEMARRKELGALANKSLNTTCFTGKIKCGICGRSYMHNRRTDRGFEEFWDCGSHKLKGRNCGAKGSIPHAVLVKESTEVLGLDDFDEQAFLDQVEKIVVPEYHVMVFCMKNGQKLIRHWVSTAKKDCWTDEYKDRQRAWMKNYMANGKGTRFSAFTTRVRCALCGSSFRRCKTKHDRPVYWRCSKGGKCESVSIREDELKRVVAEAMGLETFDEDRFREKVESIEAGKPNCLTVHFKSGRTEEISYTPTPSKRRPKARRKESREKWQRQ

SEQ ID NO: 10316 - protein, 522 aa, synthetic construct
MAKTVRAIPATISRYTAAPINSRKKRRVAGYARVSTDHDDQVTSYAAQVDYYTNYIKERNDWEFVGIYTDEGISATNTRHRDGFKRMVRDAMDGKIDLIVTKSVSRFARNTVDSLTTVRKLKDKGIEIYFEKENIWTLDAKGELLITIMSSLAQEESRSISENVTWGHRKRFADGKVCVPFGHFLGYDRGPDGNLVVNREQAKTVKLIYRLFLDGYTFHSIARELTSRGLETPARKKRWYPGTVESILTNEKYKGDALLQKRFTVNFLTKETKANEGEVPQYYVENNHEAIISPQVFDWVQEEIKRRREGRGRYSGVSIFSSKIKCGQCGGWYGAKVWHSTDKYRRTIYRCNDKFKSHCKTPHLTEDDIKEAFVRAVNQLIENKADVLDSITLLKERLTDTEDLEEERDRISTDLNLLADKIQQLIAENARVAQNQDDYDRNYNELVSRYEAAKTQYDKTCEAIQYRKARSRQMDSFIKELRNQDLIKEFDARLWGSLVDFITVYSKDDIRVTFKDGTEIRA

SEQ ID NO: 10317 - protein, 464 aa, synthetic construct
MDKKAAIYIRVSTQEQATEGYSIQAQTDRLTKYVEAKDFILYKKYIDAGYSASKLERPAMQELIQDVQSKKVDVVIVYKLDRLSRSQKDTMYLIEDIFRPNDVELISMQESFDTSTAFGSATVGMLSVFAQLERKSISERMITGRVERAKKGFYHTGGQDRPPAGYQFNSDNQLIINEYEAAAIKDLFRLYNDGLGKSSISEYLKKNYPGKNKWLPSSIDRMLKNSLYIGKVKFSGAEYDGIHEPIIDEVTFYKTQKEIARRKQTNTKRYNYVALLGGLCECGICGAKMANRRAVGRKGKVYRYYRCYSKKGSPKHMMKTDGCSSKAQQQFIIDEAVINNLKNIDVEAELKRRSAPQTNTSLISSQIESIDKQINKLIDLFQVDSMPLDVISEKIDKLNKEKQSMEKLLERKNKLDKTELQHRFDVLKSFDWDNSSIESKRVVIEMLVQKVIIHDNSIEIILVE

SEQ ID NO: 10318 - protein, 535 aa, synthetic construct
MKKKQPNTRHGRAAIYARYSSHNQREASIEQQVKACRELAVRLGLDVVETYEDKAISGKSDRRPSFQRLLRDAEKGYFDCVLAWKSNRMGRNMLQAMTNEARLKDWGVRTFYAEEDFDDTAAGRFALRNMMNVNQFYSENMAEDITRGMMDNASKCLSNGALPLGYKAGENGRIVLDKAQAAVVQEIYTRVACREPFVDIAADLNRRGIKTKRGGPWTKSSFYTICRNERYRGIYIYDDVRVEGGVPRIVSDGLFYRVQEVLKVKKTPQSARHHTGAEDYLLTGKLFCGKCGRPMTGVSGTSRSGEMHYYYTCQKRRRERACDKKNVIREQIEKSVAQAIKQYMLTDEMIQHMADATMAYNARQEKDLHLQDLQGQLAAVKTSAANLLKAIEMGVITETTKTRMVELEQEQGRLNAQIENARAELVPITRDNFVSLLHIYRDGDINDSKYLASLFETFLVRVDLYDDHFLIWFNPLGQKTPADIPITSIENGNADELFDECRSKNVFDWGGKWSTKIKAPAVPRRVFLFWCSVSC

SEQ ID NO: 10319 - protein, 464 aa, synthetic construct
MKRAALYIRVSTMEQAKEGYSIPAQTDKLKAFAKAKDMAVTKVYTDPGFSGAKMERPALQEMISDIQNKKIDVVLVYKLDRLSRSQKNTLYLIEDVFLKNNVDFISMQESFDTSTPFGRATIGMLSVFAQLERDTITERMHMGRTERAKQGYYHGSGIVPLGYDYVDGELIINDYEAQIIQEIYDLYVNQGKGQQYITKRMVAKYPDKVKTLTIVKYALTNPLYIGKISWDGKVYDGHHTPIIDKSMYDKAQEIIARKAQKGGEQHGNQLGLLLGITYCGKCGAKVFRYVSGGKKYRYNYYMCRSVKKMLPSLVKDWNCKQPSLRQEVVEKKVIDSLKSLDFKKIERELKQVENKTKSKISTINNQISKKHNEKQKILDLYQYGTFDVTMLNERMKKIDNEINALTANISNLEGTKSESLINKLETLKTFNWETETTENKILIIKEFVERIELYDDEVIIKYKF

SEQ ID NO: 10320 - protein, 502 aa, synthetic construct
MEIQIREGNSRQKRKLKVCAYCRVSTDADEQENSLENQIRHYEEAITSNPDYEYAGVYSDFAISGFKEKRPGLQKMLADARKGKIDLILTKSVSRFARNTSIVLEATRKLKELNVGVFFELQNINTLSGEGELMLTILAAFAQAESESGSVGAKMVYQRKYEAGIPVQYLERSFGFKKDERGVYIADEEEAVWVRKIYEMAADGYTPASIKRHLNENGVKTVGGAEWIDSTVFRLIENEIYKGDYIMHKHFVNEERKLVRNRGEVDAWYIEDDHEAIVSPELWQKAQDALEAKRDYLAESSVIEEFTEENYPYMNKIFCARCGHPLYKRIYSNGNRLNWGCSGTKRYGKSFCEGINIPDGVLRGAWNFDENMYIGEKPIDKGKKEFTYLKEASWKRRHKKKEPEQIPENTETEYPYREKIFCGLCGSRLVRHVNTKSHKVIWVCNGRKRKGKDFCDGTRVPDTIIKGWGEIKKDIYIQRKDDKNGKKRYSYTSKKPKGADRA

SEQ ID NO: 10321 - protein, 574 aa, synthetic construct
MRKKKIDAPKEKPQRAAIYLRVSTAYQVDRDSLPMQRKDLVGYCEYALNISDYTIFEDAGYSGKNTDRPAFQKMMMQIRNGMYSHLLVWKIDRISRNLLDFAQMYEELKTLGVTFISRNEQFDTSTAMGEAMLKMVLIFAELERKTTAERVTATMISRANDGTWNGGRVPFGYDYNKETQTFSVNGDESFIVLEMYDLYEKTDSLVHTARELNDRGYVSRQHNPFSPVSVWTILRNPWYIGTYRYNYYKIPGRKAIKDESEWVVIPDHHTPLVSKERFDRVQKMLDSNARYRNIPGRSATQKNVNIFSGLIWCACCGAAFTASPGKLHASGYRSAKYGCPNVRKTKTCNAKYTSDTVLGEFLLNFILNVINAQKRFDQIKSPADLEAQLLRGDTFKNVAGIDSASVDALYEMLAEYSPADSVLLKKPTVKKNLDPELRKLRADKRKTERALARLDHIYLYSNKQMSDKEYLIKKNDLMNDLKEQDKSIGLLTSESWAQSLSDDDFLEQASSFIMSQRLQEREYIYFQGLAECTEPSVLRSFFLSIVDSVRMRNGHVETLTFKNGISHKFTYLAI

SEQ ID NO: 10322 - protein, 521 aa, synthetic construct
MKKVTKIDGVQKNTAINSKLRVAAYCRVSTGSDAQLESLEAQKSHYEQYINSHEDWQFAGLYFDEGITGTKAEKRPELLRLITDCEARRIDFVITKSISRFSRNTTDCLALVRKLQSLDIPIYFEKENINTGSMESELFLAILSSMAEGESASISENAKWSVKRRFQNGTYKLGYTPYGYDWDGKNMIINPDQAAVVKRIFADILSGKSTNAIADELNAEKVPSKKNTNWTSSTIRGILANEKYTGDVIFQKTYTDENFNRHTNYGEVDQYMAPDHHEAIISHSDFDAANALVNQRAAEKSIEKGSDKYQQRYAFSGKIICGECRDTFKRRIHSCTTYKYVAWACNTHLKNKESCHMKYVRDDEIKAAFITMLNKLIYGYRLILTPYLKVLENSSGDEAIHRIQHLEQLIAQNSEQREALTKLMAQGYIDQILYNQETNALLLQAETYRSDIEAITIGMTGDAAKVTETNLLLHFVSHTDMLTAYSEELFENYADHIEVMSRNEIRFVMKCGLTFTERIGD

SEQ ID NO: 10323 - protein, 573 aa, synthetic construct
MAYNAQNKTGARVAIYVRVSTLHQIDRDSLPMQKQDLLAYAKLMLNTDDCVIFEDAGYSGKNTDRPKFQEMMSQMRAGAFTHLLVWKIDRISRNLLDFATMYNELKALGVTFVSKNEQFDTSTAMGEAMLKIILVFAELERNMTSERVTATMISRANNGLWNGGRIPYGYDYDYETHEFSVNEEESKVVILMHDMYEQERSLVRVVRELNERGYRSRAGNLWSPVSLLIILRNVFYCGDYRYNMLKEGDRQKVKDESEWVTVENHHVAIIPKDQKERIMATLDSNSKLCKQRNIYKSSKHTHVFGGLIYCGSCGKPLGSTPGNLTRDGWYYSKYTCPTRRKSVTLCTGKSTSDPIIGEFVFNYILNMLNAQNDFDKISSPEELEKLLLIGDTFAYIDHIESNGLNDLFNVLSSGTVKGAVFGKGASLPTKKATVEPEVARLRNEKQKTERALDRLRSLYLYADEAMSEAEYMIQKNKLEETLEDINDQIGMMNTDSWQQSVSDEEFIQRASEFIIAQKLSGRKYVNYKRLAMSVDSEVLKNFVVSIIDSITIQDGLVSNIVFKNGLCHTFIFR

SEQ ID NO: 10324 - protein, 529 aa, synthetic construct
MGINEGKKVKTIPATLTRFTASPITEQKKRRVAGYARVSTDHDDQFTSYEAQIDYYTNYIKSRDDWEFVDVYTDEGITGTSTKRREGFKRMVADALAGRIDLIVTKSVSRFARNTVDSLTTIRKLKEKGVECYFEKENIWTFDGKGELLITIMSSLAQEESRSISENCTWGQRKRFADGKVTIPFNRFLGYDRGANGELVVNPEQAKVVRSIYDMFLQGTTYHGIAQKLTDDGIKTPGGKDKWSISTVKSILSNEKYKGDALLQKCFTVDYLTKKQKKNEGEIPQYYVEGNHEAIIPPEKFDMIQREMAKRGRGKKYHSGVHPFSSKIRCGQCGSWYGSKVWHSTDKYRRTIWQCNHKYDGGKHCCTPHLTDEQIQDAFLSAANQLLATKDAVIANGREMMALLFDTSEQEAERDKLLEEAQVVSDAVQQNIYENAHVALDQKAYQKKYDDLTARYETLKTSIEDLNEQISQTQSQKGSVEDFLAAFEKLPETLTAFSLDAFNALTDYLTVNSEGDISVTFRNGQTIKA

SEQ ID NO: 10325 - protein, 596 aa, synthetic construct
MAKITKIEPQIPALPTRKKVAAYARVSMETERLHHSLSTQVSYYSELIQKNPEWEYVGVYADEAISGTIAKKRDEFQRLIADCEAGKIDIVLCKSISRFARNTVDLLKTVRHLKELGISVRFEKENIDSLSGDGEVMLTLLASFAQSESESISNNVKWGVRKRMEQGIPNGHFRVYGYRWEGDQLVIVPEEAAIVKRIYQNFLDGKSRLETEREFAAEGITTREGCRWVDSNIKVVLSNITYTGNMLLQKEYIADPISKKRKKNHGELQQYFVENTHEAIIPMETFQYVQDEMARRKELGAFANKSLNITCFTSKIKCEKCGKSYVRNTRKNRAKVSQLGDQLVGWVCGSSKTKNGKCKAMEIPEYILRQKCAEALGLEEFDEDAFAEQVEVITVPEQGILNFHMTDGTEKTLTWVSTAKKDAWTPEARKKASSYRRNHAMKRDDVTCFTSKIKCAVCGNNYRRQTRKKATGEKYHLFVCATTNTCSNNCIHEDTLRELTAQALGQQELDEAVFLKEIDHITIAPGGHITFCFYDGHEVSMEYSTKRRMTAWTEERKKKQGEAIKASFTEERRRKMSETMKKIRSEKYWASTKAKR

SEQ ID NO: 10326 - protein, 512 aa, synthetic construct
MNAVIYARYSSHNQTEQSIEGQLRDCYEYAKRNDLTIIGEYIDRAISGKTDERPDFQRMIKDASKRQFERILVWKLDRFARNRYDSATYKHKLKQYGVKVISAMENVGEGDESVLLEALLEASAEYYSLDLKKKIARGMRESALRGKFVGGTLPWWCRVDDEQKLTVIDERAAIVREAFIRYDSGEGSKSIVSDFAKRGLRSNRGVPVTLSWLLSILKNRKTIGEYTYNGIEIPGGLPAVVDKPLFDRVQDRIARNRRTGGGEARAKTEYLLQGKLFCGLCGSPVTAECGQNHKGVVYNYYACSLKKKKHQCKKANERKDFLEWYVVEQTLDYVLTPARTEYIASAIVAEYEREFDKSGIRVLEQKIALTEGEIQKTMDLCIQATTDAMRDRFMKRCEELDAKKADMEIDLSKLRVAASIVYTKDEVCAWLRQFCTGDCFDPAFRRRIIDVFINTVYLYDEKLIIYYNLRDSRQVSYIEAIGASSEIENLLPVPDNKKSAAECSTADGDGGA

SEQ ID NO: 10327 - protein, 522 aa, synthetic construct
MAKTVRAIPATISRYTAAPINSRKKRRVAGYARVSTDHDDQISSYEAQVDYYTNYIRERDDWEFVGIYTDEGISATNTRHRNGFKRMVRDAMDGKIDLIVTKSVSRFARNTVDSLTTVRKLKDKGIEIYFEKENIWTLDAKGELLITIMSSLAQEESRSISENVTWGHRKRFADGKVSVPYRHFLGYDKGPDGNLVVNREQAKTVKLIYRLFLDGYTFHSIARELTSRGLETPARKKRWYPGTVESILTNEKYKGDALLQKRFTVNFLTKETKANEGEVPQYYVENNHEAIISPQVFDWVQEEIKRRREGRGRYSGVSIFSSKIKCGQCGGWYGAKVWHSTDKYRRTIYRCNDKFKSHCKTPHLTEDDIKEAFVRAVNQLIENKADVLDSITLLKERLTDTEDLEEERDRISTDLNLLADKIQQLIAENARVAQNQDDYDRNYNELVSRYEAAKTQYDKTCEAIQYRKARSRQMDSFIKELRNQDLIKEFDARLWGSRVDFITVYSKDDIRVTFKDGTEIRA

SEQ ID NO: 10328 - protein, 507 aa, synthetic construct
MKRAISYIRFSSEKQSRGDSLRRQSKMVTDWLKAHPEYHLDQDLSFRDLGVSGFTGKHLQGGLGDFLTAIEKGLVKAGDTLLIESLDRLSRQDVDQASELLRNILRSGVDVVTLSDGEHYTKESLKDPLALIKSILIMQRSHEESLRKSERIQAAWNRKKELISEGIKISKRCPAWLKLNDDRKSFSVIPEKVETVKRCFQLRLEGKSIWEIVRTLNDEGHQTLNQYKAGKFGQTSVQDLLKNRSVIGYFTPKGCEEIAGYFPSIIPETDFYKVQQLSYSRYGRKPASDKPLSVNLFKGVIRCSECGHALIITGFSDTRSGIYRCPSRNENRCNAKGLSRKQTDGTLLALLSRLDRFDSDMTNTLDTLKLHREHISNNIEKLVQLSLEIEDLSAITSKLKQLKGELSQVDADIEKETQRLKSIDVGCLSDCDLTTKAGRIEAQLIIRSAVKEVVLNTAKRRCKVTFHNGKVIDLPITENPSEDVTEAIQSLSEVTERGLIDVDEVIV

SEQ ID NO: 10329 - protein, 527 aa, synthetic construct
MSKKKSKEKVVEFSKLTNKVAAVWTRVSTERQADTNGSLESQRRICTEYAESHAIRIKKYYGGTNESAKVEGKLYREMIAEVARDKEINIILVYSFDRFSRAGYEAMMTKAYLKAKGIYVVSATQATDPDSAAGGFMEDVIFLFNQFENNLRKDKCITGMVECLRNGNWYSKPPLGYDKLKVGREHVLTVNEKGKILRNAFVWKATEGIGDIEIVQRLKGLGLVIDRKHLNKILHNPFYCGFIQHSLLGDEVIKGNQEILIDEATFNKVNSISNAGYEHKEITEPFPLKRHIICSDCGGYLTGYTVKARGRDYYKCNKKGCKSNHSTEKLHQKYINLLNGYNIPDEFIPILTDVLRKVFEEYNQSKGEIKKVLLKRKTECENRINAVKVRFGLGEINSEIYTATMSELNSRLTEIRRDLEDAGKNLSNMMNYINQTIEISCKLGSLWRDSDFSNRQKIQNLVYPGGIYFDKKNDDYRTENENEVFRIFRRFTAVCKGGKEKATNNFHCLSPSVGMRRLERPTPTSRT

SEQ ID NO: 10330 - protein, 504 aa, synthetic construct
MTKDLQTGVIYARYSSDKQRDESIEGQIRECTEYAQREGILITKIYTDRALSARTDNRPEFLQMIRDSANQSFNYVIVYQLDRFSRSREDSAKYKGILRRNGVRVLSAKEHITAEPAGIILESMLEGMAEYYSVELSQKVKRGMTENALKGKMNGSAVPLGYDLTESHHLAVNAHEAKAVRLIYDLYLKQHSIAKISDILHSKGYLTKRGRKISPSVIKTILSNEKYIGVYSWGDIRIEDSIPPIISRKVFDEVQTIMPTRIKNKGRRSEMYNLCGKLICGECGGHYMGSTATSRNKEKHYYYVCTNRRKYHTCTAPNIRRDELEDLVINRTLEILNQPSNIARIVDLVMSGYNNTTQEAKVAIQGINNKIKAIDTELNNCMTAIKQGFITERLKSEIENLESERNNLIEQKANHESALIPIKFTADHIEYFLERMAKENPTTKAGRSRILDTFIKSVTIYSDRVEIVFNYKNELPAFNTQCATGSHFKVLVGPPGIEPGTDRL

SEQ ID NO: 10331 - protein, 630 aa, synthetic construct
MNKEKLLQKLDKKFENENYSKITLTFNTLALTKGKRVVFYIRVSTKHLAQIAALEMQKKWMDNFKRQHPEWEVVDYYIDYSTGTNSKRPEFKRMLADAKKNKFDYIITREVSRFGRNVRDALNITDSLREEYGIGVYFALDRLDTNIPADRSTLVSKVNEAEENARRTSEKIKETIAILRETGVIWGNDSIYGFMFDKGKPGCYIQNKEQADGIRFMKKCIMEGLSGKQIKDELELRGYKTALGKVRWNVGQIYRTLSNPLNAGYQYQNKTVILDEDFLDKKKTKIDKSDWVLVDLRDKIEAIFTLDEYIEIMNIIEKRRPSFLSAGKTCRKDKKVDLWHNLLLCECGCSYRRDKKAVSRKKKENKGNDIEDKWSATYRCYNQVNKGSLQQAEKKGLSTDGLCGISCISEWKLYLILERIYDTLLLEADTDKLMKILEQCWTTDKSDSSTEKKQLQNRLDKLKQEKAQLLRLKIATDGDFDLEDFEQALEQVKQEIDDIKRRLNNMSEEKSVSYEDGIKKTEKMLSSLIEENLFDDNFIYQFTNLVIHRKNNLYAWFLNFSEEVDEEEIPEKYKLKFSKRVRNEIITITKDSRSKIKRIRITKKMAQDFKHKYGLGYVGQWDDILVDIYL

SEQ ID NO: 10332 - protein, 532 aa, synthetic construct
MIKIRAAIYVRKSRLSEKGESINNQIELCKKYFSNLHLDDNIEFIIYQDEGFSGGNINRPKFQKLIKDVKKKRFNYLVCYKLDRISRNVADFTSTLKILEENNVNFISITEQFDTTSVMGRAMINISATFAQMERETIAERIKDNMLELSKTGRWLGGTCPLGFKSIPITYESNGHKKKMYSLEIIEEEMEIVRLIYDMYIEKHSCSPIARYLCSNSIKGKNGGDFSRNTVLQILTNPVYCTADKKAFEYFKSKGSIVEGNINSNKGLMAYNKRKNGRKDNPIDEWIISTGEHLGAIPSAKWIQCQQILDDVRKKSNNKSGTGNKFLLSGLLKCEHCGSSMCSWSRNNPKSNKYERYYRCELKNRASKRCTCKMLNADKAETFVIDLLKNFNIKYLDNIKSKSSSINAANIEREKNMLNKTLTENNKIISGLIKKLALLDDIDVLKAIQSEIKTLKNDNENIEKNINDLSIKSFIVEDETENKKAFIESLNLFKNTIDFIDDVEIKRNMIKNLVEYFTYNSDTKQIKFKIRL

SEQ ID NO: 10333 - protein, 557 aa, synthetic construct
MKNKKAYVYTRVSTSMQIDGYSLDAQEERIKQYAKAYGIEIIETYKDAGKSGTSISGRNEFIAMLNDIEAEKDKVDYVMVFKLSRFGRNAADVLQSLQVMENHNVNLICVDDSLDSSKDSGKLVITILSAVAEMERENILSQTMEGRKQKAREGKWNGGFAPIGYSLDNGELVVNEDEAKAVRMIFDLYANSDMGANGVSKYLVSLGINKPIRQNGKNPYFSASLIRQILDNPVYNGKIAYGRRKTIKDKTTGKIKLEKSDHYIIAQGNHEALIDDELWNTVQEKRKSQAKKYEKINRGKDERVHILSNLIKCPYCGAGLYGNKSRKRNKNKEGEHYKDYYYYGCKHRQMMNGHKCTFNKQIRAELIEKEVETIITQVVSNPTFAKKIEEKINIQIDTKEIDEVINKHLAKIRQLTGTKASLINQIDSLNFEDKHYDRKYTDLNLRLDAIYDQLEYAEMQLNDSRKRKEAILEEKITSDNIYKILVNFNSLYTVLSDIDKKRLLNEMIEEIQIYDEKTEKDTWIKSVVFKLPLIDNEIDFGLDNKDNVETVVLMSRK

SEQ ID NO: 10334 - protein, 548 aa, synthetic construct
MKVAIYSRKSVFTGKGESIENQIEMCKEYFSRLNRNDVEYSIYEDEGFSGGNINRPRFQQLLKDIKKNSFDALICYRLDRISRNVADFSTTLELLQEHNVDFISIREQFDTSTPMGRAMVYIASVFAQLERETIAERIRDNMLQLSKTGRWLGGVCPLGFTSEKITYVDSEYNERSMFKLSPLEEEMNVVRFIFSKYLATSSIHMALKELLASNIKGKHGGDFASMSLADILKNPVYVQSDSSIKEYYESLGVNFFGEPNGCGIMLYNKKNSKGKLRDMSEWIAAVGKHKGIISSSDWLKVQYSLDRNSKKNNPRQGTSAKALLSGVLKCSICGAPMRVCYGRLRKDGKRNHYYMCTMKAHSCKSRCENPNAKGLELEQEVINRLINYNEETLLRKLTSYADELKSSTPNDMIKNIDKSIDEKKSEMDTLMSQLGKTNNPATQNFILKKADSLSNEIMDLENKLNGIHKKKEQNSIEMRNIEIIMSSFSEFTKLCSTIKDVSNIEDENIKIALRNLINRLVSKISYNGFTKEVVINIMGSQENCSPSG

SEQ ID NO: 10335 - protein, 510 aa, synthetic construct
MDTDIFAIYLRKSRKDLENKDYDVLKRHRKILLDFAKSKNIVIHEEDIYEEVVSGETIQDRPVIQNLLKKIEVGYYKAVLVMEIERLARGNTIDQGIIAQAFQLTNTLIITPQKTYDTRNEFDNEFLEFGLFMSRREYKAISRRIQTGRIQSCKEGNYIGSVTPYGYDKEKLKGEKGYKLTPNDESENVKLIFDLFLDGLGTSTLAFKLNDLNIKSRTGKPWTPAMVRNILTNKIYIGILTWGKRASVKKLDNNLISKTRPVNHNCIESKGKHDPIIDELTFYKAQTLLKSNSSKKVPKDKALKNPLAGIIVCKKCGTNMIRRPLKNIPDTILCKNHYCDNISSYLYLIEKRLLDSLHTTLLEYYYYLDNYEKEDLKSKKNYDIQIKKIDKDINTLKKQHVRTCELLELGVYSLELFKERSTSINEQVDALIKQKDELIRLNKDNKTEKIIQAIPKIENCLNTYHTLSIEDKNKLLKSIIKKAYYLKNATGGRWNKEAQDNFSIELELNL

SEQ ID NO: 10336 - protein, 668 aa, synthetic construct
MAYVRNKKKILKFWSKKKAALYVRVSTRYQVDKDSLPFQRKKLKEYCKFLGIEDFVIFEDDGYSAKNTDRPHFQEMMSRVRDGEFSHLIVWKVDRVSRNLLDFAAMYQELKDHKVTFVSMNEQFDTSTAIGEAMLKIILIFAELERNMTSERVTGIMLDRAEQGLWNGARMPVGYRWNPEIKFPEPDPEETKIVQFIFDEYERVRSTTKIARYLNHNQIASKRGGQWTSKLIRDIIRNPFYIGTYRYNLRESGRGPLKPESEWIVRENNHPAIIAKEQFDRCNAIMDENGTSRDTSDLRARKYVHTFSGRLVCGKCGANMIASKDRARANGWRPSMYRCAQRSRMMDCDNSKTVNESYIGPFIFNYVANLARIQKNFKNIKTLEQLEKELLKGPEFENMKVSKESLRRTFDALAFQEVGKGAYLPDIDLSDGDDDYTAAEQLSILKRELDKCKTAIDRLTDLYLYDPDSMTKEEFAKKKRDLVNKIAGYEKQIEASQATGDKDDLADLEFIRKASAFLVAQRIVSKKHVDYIQMALELDNEILKDFVDQVIDQIEILEGRVRSIRFVNGLVHEFTYSTPADLPVCQKCGGRIGSTCGCRTRTFDFAGKPYRRIKVGDPGDKFHGVAGAVCPECSAQAGRWHHWKCGIERCPICGEQLIACEHGPNGKD

SEQ ID NO: 10337 - protein, 585 aa, synthetic construct
MAYAKLLKSGLLPDPSSNVQIIALYVRVSTGYQVERDSLPFQKKELLNYCKHILHANMDFIEIFEDAGRSGKNTKRPAFERMMKKVREGLVSHVIVYKIDRITRNLVDFSLMYNDFKYTRVAFISLCEQFDTSSAIGEAVLKIILVFAELERKMTSERVKDIMLNRAHEGKWNGARVPYGWDSDTENQFPKHHEVEAVFGRLMYDMYKDTHSTCKVRDYNNTHDVPTKRGGEWTSKTVADFIRNPMNRGDLRYNYRESARGRKKPENEVVYVEGAFPPLVDPALWDECNKIMDENNRRKSSNSFFTVRSNCNIFAGLLICGECGANFQVTKKDRRRKNGFQPSLYACGAKHQKRSCTAAGCSDVTIGPFVLNYIAAMVQATNERSKIRSPEELESLLLSRPEFAQIAGIATEGLNNTFVMLSGRPAAAGGSYSPSLFSSSAPSASAADIEELKQKLARITRAQERLKNVYLFDDNAMSEKEYLETKTTLDLSRIETENMIQDLLSGTCASSDDDTEFLKSASSFLLTHEIQNGQHIKYSDFAACVEEEVLKDFINLVIDHIVIVGGRPIEIVFKNGLSHKFLYRD

SEQ ID NO: 10338 - protein, 441 aa, synthetic construct
MYQTRLGKTCVIYIRVSSERQVKGYSLDGQKRYLIDCAERQGMKVLAVYVEEGKSGKSIEGRTAFQSMLDGIKKGTLQTDYVLVYKLSRFGRNAKDVLNSLEFIMQYGVDLMCVEDGLDSSTSMGKMMITILGAVAELERENIIAQSLLGREEKAKSGGWNGGFAPYGYELKNGKLEPKEGEHEIVTMIFDMFLNKGMGYSTVARYLNQNGYTREPAKNAVNPKFNDWKAEQIKRILDNPLYTGRIAWGRRRTEKVQGTSNEQRLVPQEEFIMSENKSHEALVSEEDFKKVQEIRKIMRDKAIGNHNISQDKAHLLSGIARCPQCGSAMNVDCNQWTNKDGTFRETFTYVCSHYKRAKGTSQCRRNGISMERLEKEVLEYTKKLLRNPKFARDIKAKIGVAVDVTEIQKEISAYEKELKRLARSRTNLEHDIDSLPDDKYA

SEQ ID NO: 10339 - protein, 552 aa, synthetic construct
MKIAIYSRKSKATDKGESIENQINACKDYILKWSNLNTSDAQFIIYQDEGFTGSNTERPQFQKLLNDAKKDKFNMLICYRLDRVSRNIADFSNTYELLQEHGIEFVSVKEQFDTSTPIGRAMLNIAMVFAQLERETIAERIKDNMLGLARTGRWLGGTTPTGFNSEPIEYLDHNMNTKKMYKLSIDENEIEKVKLIFTKFMELKSLRSTESYLLIHDIYSKNNCKYTAATIKDILTNPVYAAADSNMYDYLSSLGCQICNEEKDFDGAYGIMSYNKTDQVGKSISTKDYSEWIISIGKHTPIVEGMDWVSIQGILNSNTQNSFYTKETMQYGLLTNMIKCAHCGANMKIKKGKINAKSELAYSYVCTTKEMSRRTKCNVKNVIGQEVDADVFNYLVDLAENNEFMSSIFKSNKAFVTQSIEEINHKVQDLTAQIEDNDLSMKNLMSQLAKLPAEHPLVDLYMKQLSELDTSTKALKSQIQQLHENGEQQQVINLNLDSLRKAFTHLKDLKDSTDIHMQRSIIRSIVDYITWDGENLQINLFGQDILKKNSVS

SEQ ID NO: 10340 - protein, 500 aa, synthetic construct
MKSVLYARVSTEDLEQNNSYIQQQLYQDDRFEIVKIFSDKASGSSVEGRENFLEMLKYVGISKEGNNYFVEHRTEIECIIVANVSRFSRSVVDARLIIDILHKNNVKVFFVDLNKFSDDADIFLQLNMYLMIEEQYLRDVSKKVKAGMQRKQSTGYILGSNKIWGYNYVTKDDGKGYLVPHETESLMVKNIFKEYITGAGTRTLAKKYKLSSSTILGILKNTKYCGYMGYNLKSDNPTYVKSPFIEPLISTEAFEEVQRIIKGRCNSESGRGRRIKVRNLTGKIKCECGANYHYKQRETEWCCGREGVEGRTKGCGSPQFNTKLIIPYLEKNIDNIEKNLEFNLNREIKDINVGSFDRLNQRKEELIRQQDKLLDLYLDEDKLKNISKEMLERRSKLIKEEIEEVEEKLVILNDMNSHLNNLRRIKVEYKNEIKNIRRLIEEKNLDEIEKLISKIQLETIVNIINFRKELKIKEIQFSCFNELYNTNFIFAPEPKKVWDK

SEQ ID NO: 10341 - protein, 516 aa, synthetic construct
MSQETKEKVYLYARVSTTSEEQLTSFNTQSNYKSSDYEIIEVFADYGKTATKVFNRPNFIEMLKRCNVLVEKHKGNIIFVSGDSKPQVNKIIVSHSSRFMRNQILMKQCLLALQQNNVEVIFLDMGRSSFDNDIDFILNVFFLLDEQESRNTQYKVKKGLEKAREQRNYLPPCQKMLGFDYINGENKLIQNQYAPKAKYIFEAYSEGKSMREIAKEMDMKPNRIMEIIRNERYCGYVGYQKYYYDEKSETNKKAREYDIVPNDRIEAIISKELWDKCQEIRKSRTLRGKGVKNGVYAMSGKIRCSVCGKNFFHKGTNKKGDLWECSSKKNNGDCNSACFNEDTLKKFLLSPRGINEFKLTIEQIIDEILSKYKVKDKSSLETKLERNIGILDRTKELYMDGEISKENYNTRSTKLKAEIKDIEEEIKNIDNFNSYYDETHRLKDDYIDILNSLKIKLENGESEDVFKNHIEYIVVGRAYDEEKEKIIPTVEEVKFKDFTSLYKILEKAVFTTTGVF

SEQ ID NO: 10342 - protein, 502 aa, synthetic construct
MIAIYARQSVDKKDSISIESQIDFCKKEVGEEDYKVYKDKGYSGKNIDRPAFKEMMRDIKKNAITKVVAYKLDRISRSILDFNNLLEEFKKHNIEFVSVTEKFDTSTPMGKAMVNIVVTFAQLEREQIAQRVKDNYYERGKTGRFLGGKVPLGYTNTKVEIQGKKVPTLVINKEEALLIEKMFNMYAYEDISLSKISDYLNEQGLKSAKGTAWDSGKISRIIKNALYVKADVNVYNYYKNLGVEINNPIEDFIGTNGCFVYGKRDRNENRYTNLKDHKLSIGLHEGIIDADTFLKCQYKLSQNQQITRSGSGKHTWLTGLTKCGYCGYSMSAVVNSSGKYFNCRGKTNMKICNGHSRTIKVEEIENIVETEILNRLEELSKVKVKMENSNSKKIKSIEAEIKIIDENIEKLLDKILESNDITIKYINKKVEELDNKKTELQNELNRITLEGSNNSSLEEVLKDANKIKNLSFDKKKSIAKSLIDKILIRDDEIDIQWKVFNQ

SEQ ID NO: 10343 - protein, 510 aa, synthetic construct
MDTDIFAIYLRKSRKDLENKDYDVLKRHRKILLDFAKSKNIVIHEEDIYEEVVSGETIQDRPVIQNLLKKIEVGYYKAVLVMEIERLARGNTIDQGIIAQAFQLTNTLIITPQKTYDTRNEFDNEFLEFGLFMSRREYKAISRRIQTGRIQSCKEGNYIGSVTPYGYDKEKLKGEKGYKLTPNDEAKNVKLIFDLFLDGLGTSTLAFKLNDLNIKSRTGKPWTPAMVRNILTNKIYIGILTWGKRANVKKLDNNLISKTRPVNHNCIESKGKHDPIIDELTFYKAQTLLKSNSSKKVPKDKALKNPLAGIIVCKKCGTNMIRRPLKNIPDTILCKNHYCDNISSYLYLIEKRLLDSLHTTLLEYYYYLDNYEKEDLKSKKNYDIQIRKIDKDINTLKKQHVRTCELLELGVYSLELFKERSTSINEQVDALIKQKDELIRLNKDNKTEKIIQAIPKIENCLKTYHTLSIEDKNKLLKSIIKKAYYLKTATGGRWNKEAQDNFSIELELNL

SEQ ID NO: 10344 - protein, 556 aa, synthetic construct
MNTIAIYTRKSKFTGKGESIENQIEKCKKFIEFKFNIDSENVNIFIDEGFSGKNENRPQYQLMMEKIKKKEIDSIVIYQLNRLGRNARDIHNTMQLCDDLGVIIYSATEGFDSSTSFGRAVIGILASLAQLEREQLAERVKDNMYTLAKMGRWLGGQSPLGFDGSREYYIDETGKERSITKLKKNEEELKLVKLLYDKYLEEKSLSQVGKWALINHLTGKNGGNLNKNAINVILQNPVYVKSSKEVFEYLSNEGYEVCGEPNGNGLLRYGKDDEPIVATAKHKGVIPSDQWIEVQKILKDNAYKAPRMGKTNTALLTGLLRCKCGSTMRISYGQKRKDGTKPFYYICNMKINSGGARCNLKNLNGNLFEKNFIQFLKNYSKETLFTELQKLLNNSKDLESTISSNKIDVEIEKSNKAIKQILNKLKLTDDDELSKILLQEIKVENNKLKALSKQKEELLNDQSEVVITQSEVLAILDDLDNFQKTFDDLNLEDKQKALKSLIESITLTDDKFIVDFNIKKKLDNAIKKLSSLFAKYKSSQLRHPCRSYMYRHPSWP

SEQ ID NO: 10345 - protein, 502 aa, synthetic construct
MKKVAIYSRKSVLVEGSVSIETQINMCKDYINNKFPNAKFKVFEDEGFSGGNTNRPAFQKMLRMAQLNEINIVVCYKVDRIARNTLDFLKILELFKENNVELISISEGFDPNTQMGKVMLTLLASFAEMERTNIQQRVKDNLLSIAKKGKWTGGSPPTGFKNGLNGGLEWDKKDMILDVFNMKCEKEKNSNIIKYIKEKYNHNFLGGTLATTLRKPIYVKSSPSVSLYLKTKGYIVQGDEDNIHSYLTYTDKETKYAIVSDIVGLIEPSIWISINKDMDKNISREGNRFSEKFWLTKTVRCKYCGQTFCGQTKTTKTKYYNKYGEEKIYISTYSYYSCRDAVRGKLKTCKNTKRVKQEILESKVSELIHLLKDKKTFNSSYFSNKIDNSSKIDTIKKQIKNIDKTINNLTDKIALLSNEASLIFISKLEELVKEKSILKDNLLQLELQELNSNNKKDSLLVYNNILAFNDNLSVDDKRKIAMSLFKEIIYDPETDLLDVTFM

SEQ ID NO: 10346 - protein, 500 aa, synthetic construct
MKSVLYARVSTEDLEQNNSYIQQQLYQDDRFEIVKIFSDKASGSSVDGRERFLEMLKYVGISKEGNNYFVEHRTEIECIIVANVSRFSRSVVDARLIIDALHKNNVKVFFVDLNKFSDDADIFLQLNMYLMIEEQYLRDVSKKVKAGMQRKQSTGYILGSNKIWGYNYVTKDDGKGYLVPHETESLMVKNIFKEYIFGAGTRTLAKKYKLASSTILGILKNTKYCGYMGYNLKTDNPTYIKSPFIEPLISTEAFEEVQRIIKGRCNSESGRGRRIKVRNLTGKIKCECGANYHYKQRETEWCCGREGVEGRTKGCGSPQFNTKMIIPYLEKNIDNIEKNLEFNLNREIKDINIGSFDRLNQRKEELVRQQDKLLDLYLDEDKLKNISKEMLERRSKLIKEEIEEVEEKLVILNDMNSHLNSLRRIKVEYKNNIENIRKLIKDKNLDEIEKLISKIQLETIVNIINFRKELRIKEIQFSCFNELYNTNFIFAPEPKKVCDK

SEQ ID NO: 10347 - protein, 540 aa, synthetic construct
MTNAAPQRVVREIPAAKPDAVDRLRSGAEQLRVVAYCRVSTQQEEQLNSYETQVRHYTEAINAEPNWRFAGIYADKGISGTSVKKRDEFNRMIRACKRGAVDLILTKSISRFARNTVDCLKYVRLLRDLNVDVYFEEQGIHSNQPGAEFYITIYGCIAQSESENISANVRFGKNRSAKDGNVSFAYASFLGYRKGADGKPEIVESEAEIIRRIYAQYLQGDSLKGIAKQLTEDGVLTPRGKPHWEPGTVRSILSNERYKGDAILGKTYIEDCISKKIRVNAGERPKYYIQNSHPAIIDAETFGRVQEELARRSSKMEGKKVGDKTLQRKYSGKYAMSDLLICGECGSAYRRCTWTAKGEKRIVWRCMNRLEHGKQNCKHSPTLDEDSLQAAVMDAITEQVRDDPKLLQTLQAEIEKGLSVNTPTQSDIQDITNRITEIDRKFADLLHTVSIGNDSAHDAELEALMTEKNDLRQRLQAMEQGSTQHEKRKENLTAILPALRNRPLPYDDTLVRQTVKGIIADSKTQIRVVFPDGETVSVSV

SEQ ID NO: 10348 - protein, 526 aa, synthetic construct
MQTTVTVTELKAPETAGAPKPKIRLASYCRVSSPSEDQLHSFAAQIRHYTEYVGTHPEYELVDIYADEGLSGTSMQKRDELNRLLRDCAKGKVDRIITKSVSRLSRNAKEFLETVRLLKSLGVSIYFEEQGIDTDKLNAEMILTFPGLHAQQESENISRNTRWSIQKRMARGEYFGTHAPLGYRFRDGRLTVEETEAETVRRIFDLYLRGYGCQSIAELLNREGNVSERTNGKILDRWYPGTVRYIIGNERYVGDALLQKRYNAEALPYRTHRNYGERKQYYAEQTHPPIIERALYDEVQKLLKTRYQAVGETRGKHQLNRKLICPECGSAFRKVEKNGKRSWVCSSKALGRTACRVERIREETVYRIFRLLLLKLHDYGDALLGTLTDQLETLQAVTADNPERFQSLNREISNLAAQNLVLTRLYNKKLLPTEDYYAQSGDIDRQIRNLQSKRKRLLQEQDESETVDTLRHLREILQETDPNGNPERLMDEIVERMTVRSATEVTFRLIGGVELTESLHGKGEEP

SEQ ID NO: 10349 - protein, 520 aa, synthetic construct
MKRITKIEENKVLSTKKKIRVAAYCRVSTASDEQLISLEAQKAHYEDYIKSNDEWEYAGLYYDEGITGTKKECRDGLLSLVDACEKGMVDLVITKSISRFSRNTTDCLELVRKLLDLKVTVIFEKENINTGAMESELMLSILSSLAESESVSISENSKWSVQKRFQNGTFIISYPPYGYKNENGEMVVVPEQAEVVKQIFADTLAGKSTHAIAKELNERGVASKKGGNWTPGTINAIIRNEKFTGDAIFQKTYTDGSFTRHLNKGECDQYLCEGHHEAIVSHEVFEKANEVLNQRGKEKGNGVNTQRYQNRYGFSGRIRCGECGGVFKRRMHYKPSGDYVAWCCTRHIEDKNSCSMKYITDEGIKAAFLTMMNKLAFAHQIVLKPLLHNLQGLDDKDRLLQIQEYEDKLEKNTEQRQVLTSLMASGLLEPALFNSENNRLVQEEHRLQNEKSNVMNSVSGDRTKVDALKKLIKAVSGGRTFTEYDDDVFLAHVESITVVSRNEIIFVMKCGLKLKERLVG

SEQ ID NO: 10350 - protein, 521 aa, synthetic construct
MSKNITVIPARRRVGNTVNREEKPKLKVAAYCRVSTDSDEQATSYDAQVEHYTNLIKKNDDWEFAGIFADDGISGTNTKKREEFNRMIEECMEGNIDMVITKSISRFARNTLDCLKYIRQLKEKNIPVFFEKENINTMDSKGEVLITIMASLAQQESESLSKNVKLGLQFRYQNGEVQVNHNRFMGYTKDENGHLIIEPDEAEIIKRIYREYLQGASLKQIGEGLEADGILTAAGKTKWRPETIKKILKNEKYIGDALLQKTYTVDVLTKKRVVNNGIVPQYYVENSHEPIIPRDIYMQVQEEMLRRANLHSGENRKKRVYSSKYALSSIVYCSKCGDIYRRIAWNNRGKHSIVWRCVNRVEHGPGCCDAPTIQETDLQNAVVKAINMVLGGKDEMLEALETNIATVFALEDDGSLESINARLEELQKELLKRANAKQDYNDLADEIDHLRELKQNAMVENAEREGLKQRIAEMQQFLAEQTKQIEEYDETLVRRMIEKITVYEDRFTVEFKSGTSVDVKR

SEQ ID NO: 10351 - protein, 504 aa, synthetic construct
MEDFIYARQSVDKEDSISIESQIELCLREVGNNPHRVFRDKGYSGKNTERPDFQDMMAAVRAGGARRIIVYRLDRISRSVLDFANVISELQKYGVEFVSITERFDTSTPIGKAMLMIVMVFAQLERETIQQRVMDAYRSRSRKGFYMGGRVPYGFELENTVMEGIKTCMYKPIPEQIQVVQLIFSLYAMPQVSFADVVRYLSQNGIKNPNGKNFSRMRIRDIITNPVYAKADASIFEFFHGQGTEIINDISQFIGTNGAYLYTGNKAAKRKSISLDGHVLVLAPHAGCIDADTWIRCRRKCLNVRQIAKPVKAKNTWLAGKIKCIDCGHALSLKSYPRKRSADARYYICNSKYISASCDGVGAIQAAGIEDIVFDEMSRKLKEFNKLSYKEKHGDPIELTKLKIRAEEIEKEIATLIDKIVSASTATMEYINERIDALDEEKKTVKEKIAQMSAEMYDRQNIGVISDYMSKWNDISIDDKLTVVDTLIESIHVGHGKVKIAWKI

SEQ ID NO: 10352 - protein, 610 aa, synthetic construct
MTAVIYARYSSDNQREESIEGQIRECTAYAEKNGITIVKHYIDRAISAKTDNRPEFQRMIKDSDKKLFDIVLVWKLDRFARNRYDSARYKTQLKKNGVKLMSATEIISEGPEGIILESVLEGYAEYYSADLSEKVIRGMTENALKGKFTGGAIPFGYIINADHRFEIDPLTAPFVAETFQRYNDGQTMREIRDWLNEKGVKNQRGGLMTFNTIQHMLNNRRYIGELKYRDVLIPDAIPSIVSAELFNDVQEKIAKNKKAPARRKAEDDYLLTTKLFCGYCGALMFGESGTSRTGEVHRYYKCATAKKHKGCKKKTVRKQWLEDLVVNQTMQLVKDDAAMESIIAKVMELQNKENTNIPLYEKQLRDAESGIQNMLNAIQAGILTSSTKERLEQLEETKRELEARIAEEKLAKPKVTEEFIRFWLLRFRKLDMSLKDQRQALVDTFINAIYLYDDKVLITFNYKEGTQTVTFGEATEVASEGNGSDLDCFTAPKNAVRSKDFMAFLFFATQLHGFCTVGARFVFSVLNYVGRGIALQSVPFFAFRSTVQGEAVPSFQGLHLSGAPKARPWRALCSPGQAEFGRWLLVWRRKNFQTFCPAPCGKTAGYGRKC

SEQ ID NO: 10353 - protein, 550 aa, synthetic construct
MENFDLKGFAKGKKQQKEQIGGNAIIYTRVSSSEQVDGQSLEVQIDKCREYAKVRSYTIVGEFGGTYESAKSDKERKEFNRMLAFIKQSNKKGSSQPVKTVIVFSTSRFSRTGSTTIIEEVEARGAYVVSATSNYDPRTPVGKYMQLMELANARFQNDEKRATTIENSVKALLKGRWIGKAPRGYDQKTTKKEQIITINEEGKLIRKAFLWKANNKLSNEEIRHRLEAEGLHICKQKLSELFKNPFYCGYMAHKFLQGDIVQGNHPPLISKEIFLKVNGELSKNHSGYEQKIDKEYAPLLGSIKCPCCGKNLSASISTKMRKKFGRTDIGYYVCSRKGCKYNSSIKKVHEAFEEEVNRYSLSDKVSELLKMQLTITFEYMNQENRERAKSIKANIKAKEKELEQVETNYALCTDAKKQSICEKVMTKLEKEVRDLKTEFSKVNTEILNLDKFIDFAFKMRSNLFGLWELQGLEGRRRLQKLVFPDGFIYDKNNEHIEPKRVNQFFLIKYSYPTGNGDKKKGTNREKHDSSLRVLEAGLEPAQPQWPKDFK

SEQ ID NO: 10354 - protein, 594 aa, synthetic construct
MARKKNIAAGLDAVIYARYSSHNQREVSIEQQIAECTKHAAALGLRIVGTYEDRAISGKTDNRPRFQQMMRDAEKGKFQAVVAWKSNRIGRNMLQAMVNEAKLDDYGVKVFYAEEDFDDTAAGRFALRNMMNVNQFYSENMAEDIIRGLYDNANKCMANGRQPLGYKRGADGKVMLDEPAAAVVREIFTRVAAGDLFVDIARDLNAKGIKTSKGAAWNKGSFQSICQNERYKGIYIYGNVRIVDGIPRIVSDELWYRVQEAMRMKKNPVGTRHRVGAEDYLLTGKLRCGHCGSYMTGVSGTSRNGELHYYYTCQKRRTEHACNKKNVRRDVIEPAIAQAIKMYCLTDDVIEWMADQTVQYWEKHDNDLQIEALEQQLAENKKATSNMLLAIEMGIITEATRSRMVELETENSKLTAQLSAAKRDVVKINREDLIDELHILRSKDIQDREVQAELFKDFLVAAYIYDDNRLKMVFSFMGKDNSVEIPLETGEDPPDGEDSPDAKMFVLTPDCSTKKALYFVESMVLFFLRKPVFGGCIASPAPVSGFLQAVPIQPPTFDFTPFSKKNVCRPFFQQAAASSPSMYGVRSKLKVMLS

SEQ ID NO: 10355 - protein, 537 aa, synthetic construct
MNEMNNRVCCLYRVSTDKQVDFNSNHEADLPMQRKACHKFAEAKGWVIVHEEQEEGVSGHKVRAEARDKLQIIKDYARKGKFDILLVFMFDRIGRIADETPFVVEWFVRNGIRVWSTQEGEQRFDNHTDKLLNYIRFWQADGESEKTSVRTRTSLRQLVEEGHFKGGSAPYGYDLVKSGRINKRKHELYELHINEREAAVVRIIFDKYVHEGYGPQHIATYLNDNGYRARSGKCWHPASIRGMVRNLTYTGVLRCGDAHSELLQELQIIPAQQFEAAQRIRENRSNRAAQESEYRVPLNIHGQSLLSGNAYCGHCGAKLTLTSSRKWRKLSDGTLDDTLRVRYTCYGKLRKQTGCTGQTGYTVHILDEIIDKSVRQIFSKMRGIPKEQIITRRYEREVVERKNHLQTIQVERDKAQKDLISLKDEILACIKGESVFPKETLAEMITAQEEKLRELDALYESSYAETEKTAELMDNVSKLYEELISFSDLYDSASFEAKKMIVNQLIRRVDVYRGYQLNITFNFDLTPYIEGDDAAAC

SEQ ID NO: 10356 - protein, 600 aa, synthetic construct
MSTGTELRAVFYARVSTQEEQQLKALPKQIQENRDRIREKGWVLVDGYVDEGKSGTVIKRRDEYQRLLEDMELNKFDVVVVKDQERLQRNTRDWYNFIDRLVQNKLKLYFYLDNTFYSPDNALITGIKAIMAEEYSRNLSKKMNNSNKRRIEKAKAGEEVSAMGNGQTYGYQIVNGKWVVDESQREVVRRMYELYTELHSVRKVRDALNKQGYRNQRGNLFTDENISRIVKNVMHKGWVILNRHHRDFDTKEIIEKSEEEWVIVKNDHEAIVSEELWDAVNDEIQSHRNKGNSGTRGKRGGTDSLSGKMVCSCCGRVLWKHASQGSYKSKEGRKYTYKRYTQWYCSGKVGRGELACTDPATISGVKLQKYLVEMADMFLDYSTVEYSKNLLKRRTISWLEDLKDKLTTPNDNGKIEQDLKALEGKRGKLIDLYTDELISKEEFKSRSVDLDAEIEKKRSLLVPVEENPDIKAIEDTIANIDAEIEALFEDKAMVEEKKVQFIQEHIKKIYVSKNSDVFIVLDNVAGAFLFIDKEDTRIEVVPVAEYNPEELSEEGITENDFVPFDRESMPQHHGRKRPHPPGPPAAPRQPVRDRLRCDQP

SEQ ID NO: 10357 - protein, 498 aa, synthetic construct
MQIEVRKAEMGKEKKRLKVCAYARVSTEASEQENSLENQVSHYTEMIQANPAYEFAGVYADFGISGFKESRPQFLKMMQDAKNGKIDLIITKSVSRFARNTAIVLKASRELKERNVGIFFELQNINTFTEAGELLLTILAAFAQAESESASESSKMAYLHRIENGEVVAYLERSYGYEKDENGEYRAKEPEASVIREIYDLVIQGVNCTNIAKVLNARNIQTVQGAEWTASTVFRIVENEIYKGDVLMQKTFIDGKRHQVQNRGEKAMYYAKDNHPPIVSEKIWEKAQRKLEDMRAERAEHSVIQEFTEENYPYMNHIFCAKCGWPLKPRVYSHGHRLSWDCSGQKRGTKKFCTGIHILDNDLRKMKIEGNRYFSETVDKYGEVHLKHVGERTWKNKHKKKKFNHKDLYPELNEENYPYYKRLYCARCGSRLGRYISHGTVRWICSSYKRKGQAKCPGVRIPDEIIKGWNLPDGKIYIMGKEDKNGEKHYSYTSESAL

SEQ ID NO: 10358 - protein, 522 aa, synthetic construct
MGNVMVIPAKRQVGNTVKQSEQKKLRVAAYCRVSTDSDEQETSYEAQVTHYTEYIQKNPDWELAGIFADDGISGTNTKKRDEFNRMIDECMSGNIDMIITKSISRFARNTLDCLQYIRQLKGKNIPVYFEKESINTLDAKGEVLLTIMASLAQQESQSMSENIKLGLQYRYQQGKVQVNHNRFLGYTKDENGNLVIDPEQAEIVKRIYREYLEGSSMDKIASGLMADGILTGAGKEKWHTSTINKILRNEKYMGDALLQKTYTTDFLTKKRIKNNGTVPQYYVEGDHEAIIPKDLFMQVQAELVRRRAVHISPTGKKRGFSCNHCFAQMIFCGDCGELYRRVHWNNHGCKSIVWRCISRLEPSSAEMNCTNRTVNELLLQEVTVKAINQILTESDTFLKQLQANIAKAVVSADTLSPDGIQARLEELQKELIKKANNKQDYDAIADEIFRLREQKEQSEVDSHHREETMNRIKELQSFIAKQKTDITEFDEALVKKLIEKITVFADHFTVKFKSGIIIDIEA

SEQ ID NO: 10359 - protein, 519 aa, synthetic construct
MKKVTKIAEAANTKVKLKKIRVAAYCRVSTDSDAQLESLEAQKTHYENYITSRDDWEFAGLYYDEGITGTKKDKRPELMRLIGDCKAGRIDFIVTKSISRFSRNTTDCLELVRKLLDLNIPIFFEKENINTGSMESELFLAILSGMAESESVSISENSKWSIQKRFENGTFKCSYPPYGYDWDGEQMVINPEQAAVVKEIFAALLSGKGTHAIADDLNRRGVSSKRGGRWTATTIRGMLSNEKYVGDCLFQKTYSDSQFVRHNNHGEQTQYMVTDHHEPIISREDFEAARIFISQRASEKGVTKGTDKYQNRYAFSGKIICGECGDTFKRRIHSCTDHKYIAWCCNTHIKDKDRCHMLFVRDDALKQSFTTMLNKLIFSHRQILKPYLESLKTSSSDDSLHRIQQIQTLLAQNTEKRETLTMLMTQGIIDPVLYSQETNELLSQADSFRDEIEALKNEVSGDVNKVTETTALIHFAEKSAMLQEFDKDLFDRYVKRIIVHSRNDIRFELKCGLTLRERK

SEQ ID NO: 10360 - protein, 464 aa, synthetic construct
MARSVTVIPARSQKVRTGHKTVQEKKIRVAAYCRVSTDQEDQLHSFEAQVEYYTKYINEHENYEMAGIYADEGISGTNTKKREQFKKMIADCEGGKIDLVITKSISRFARNTQDCLAYSRKLKNLGIGIIFEKENINTLDSTGELLFTILSSLAQDESRNISENCKWGIRTKFKNGEMHLNTFKFLGYDKDENGKLVINKEQAKTVRRIYRDFLIGINPAQIAKELTEEKVPGCLGQTKWYPSTVIGILKQEKHMGDALLQKTYTADFLTKRQVRNNGEIAQVYVKDSHKGIIDKQTWNAVQEEFDRREKFMESHGTDRYSYGADCMPFCEKVFCGECRSLFTRHSWRSRGIVQWQCKNHRKDGKVACTNAYVDNADLEKGFVKAFNRLVTDRDKHMERWQQMKLDGTPLEKIRAGQMMEAVGNEPLTRFVPEIAQLVLCEVTVLGAKKYEFFFLEGSRVKVSV

SEQ ID NO: 10361 - protein, 502 aa, synthetic construct
MEIQIREGNSRQKQKLKVCAYCRVSTDADEQENSLENQIRHYKEVITSNPDYEYAGVYSDFAISGFKEKRPGLQKMLADARKGKIDLILTKSVSRFARNTSIVLEATRKLKELNVGVFFELQNINTLSGEGELMLTILAAFAQAESESGSVGAKMVYQRKYEAGIPVQYLERSFGFKKDERGVYIADEEEAVWVRKIYDMAAQGYTLAAIKRYLNENNVKTVGGAEWLDSTVLRILENEIYKGDYIMHKHFVNEERKLVRNRGEVDAWYIEDDHEAIVSPELWQKAQDALEAKRDYLAEGSVIEEFTEENYPYMNRIYCARCGHPLYRRIYSNGNRLNWGCSGTKRYGRSFCEGINIPDGVLRGAWHFDENMYIGEKQTDKGKKEFTYLKEASWKRRHKKKEPEPIPENTKTEYPYREKIFCGLCGSRLVRHVNTKNHKVIWVCNGRKRKGKDFCDGTRVPDTIIKGWGEIKKDIYIQRKDDKNGKKRYSYTSKKPKGADRA

SEQ ID NO: 10362 - protein, 588 aa, synthetic construct
MAEIIKIEAKKSPLPNRKKVAAYARVSMETQRLHHSLAAQISFYSDLIQKNPEWDYAGVYADEGISGTSVEKRPEFMRLMKDCKAGKIDLILTKSISRFARNTVDLLKVVRQLKDLNIEVRFEKEKINSLSDDGELMLTLLASFAQEETISISNNVKWTIRKRMSEGNPNMRNNVYGYRWKDDTLIVVPEEAKIVRRIFQNFLDGKSRLETEREFAEEGITTRKGNRWTDSNIKVVLTNVTYTGNLLCQKEFVEDPITKKRKKNRGELPQYFIANTHEAIIDKETFDYVQEEMARRRALGPRANKSLNIYCFTGKIKCELCGKSYMRNVRNNRAKHSNLGNKVISWVCGSSKKKYSTCSAKAIPDRILKTCCAKVLGLEDFDDAVFNEQIDKITVPKQGVLIFHFKDGHSVTETWENNAKKESWDDAARKRASEYRRTHAMKRSDVTCFSTKIRCEHCGCNFRAQTQNCSTSPSGKRRYWRCAEHNGCNTRGLRDDLLRSLTAEVLGLDAFDDASFLSKIDHISVLSREDLIFHFYDGKEIARKLIQPTHEGHKWTEEQHAKFKASIKECYASERHKPIRKEKLWPNK

SEQ ID NO: 10363 - protein, 539 aa, synthetic construct
MMQQALNAVIYARYSSHNQTEQSIEGQLRDCYAFAEREGLQVVGEYIDRAITGRTDERPDFQRMIADARKQEFQRVIVWKFDRFSRDRYDSAIYKHKLKQCGVRVLSAMENVGEGDVSIILEALLEASAEQYSLDLSKKVLRGQRESRLKGTFLGGLTPIGYKLENRKLVADERTAPIVRYIFEQYAKGTSKQDIINELATRGILNRHGKPLSHSTLQTILKNKKYIGVYTHGGQDVAGGCEALIDEKTFLKVQEQLSKRKHAPAASKAVIEYLLQGKLYCGYCGFNMFGDSGRGRNGSTYRYYACRRRKKERDCKKKNEKKDFIEWYVVEQTVEYVLTPERIEYIASELVAQYKKDCGIDRIKTYEKQLDRIKAEISRLVDTLAVCPAAARQPIFDKMEQLDAEKQEAELDLSKLRISAKIQISKEHIADWLKQFCNGDALDVDFQKRIIDTFINSVYLYDDKVIIYYNIEGGKQVSYIDMIDSTEEPPFSDDAPGSSGGSDLKRPALTVAKRNIFQNQLPGFLFIFRVLISRLIRHI

SEQ ID NO: 10364 - protein, 547 aa, synthetic construct
MEKKMWKIEQKVTEISKRKRVAAYARVSVESERMQHSLSAQISYYSSLIQKNPAWEYAGVYADYGITGTKIIKRKEFQRMLADAEARKIDIILTKSIQRFARNTVDLLKTVRHLKEIGVEVWFEKENIRSLSGDGELMLTILASFAQEESRSISDNIKWRFQKKYEKGIPHAKFFIYGYRWKDGELVIQNEEAAIVRRVFKGYLAGKTRRDIQRELANIGAHTMYGNLFQDSTIKQMLQNPVYKGNLVIQKTFVIDPITKHQVINHGEKDKYVVENHHEAIIDAATFNQVQEEMAWRKEAGKQRGGYARNFLNTFCFTGIIKCGICGKSYIHNIRKYKGKPSEYWSCLSNKGKAEKRCGAYGAIPQTALERACMSALEMAIFDKTEFLQRVEKIVVPAYHSLLFYLKDGKVIKQPWKSTALKDMWTEKRKEQVRQRMVQYRKSGLSSRYSAFSERIFCPTCDVKFVRCLKTRKNRRVAYWRSRNKHKCVHTSGIQEDWLKKTAAALLGESTFDEQKFREQVEWIEVQKNRTLLFRFYSGENKEVQLP

SEQ ID NO: 10365 - protein, 462 aa, synthetic construct
MKRQTAKLNDKLLLRVAIYIRVSTDQQAQDGDSVRDQLATGQKYIENHENMILADTYVDDGISGQKVKRDDFQRLMNDVRAGSIDLIIFTRLDRWFRNLRHYLNTQDVLDKNGVSWTATEQPYFDTSTPHGRAFVNNSMIWAELEAQNDSDRILSVFDDKVDNSEVLSGSTPLGYRIENKHLVPDNDAPTAAAIFEYYRSNGNLAMTLRYMETEFGLIRSSASLKNMLTNTKYIGEFRTNKNYCPAIIDRDLFDDVQRLLKINIKSGKTHDYIFSGLVVCEECEHTMSGCQQRNSRILADGTRVVYKYNSYRCRQGITLHRCPNHKVMLESTLEKILLARIRPELENYIAEYEVANRPAMRTDSKRRNLEHKMQKLKELYLNDLITMDEFKVDREKLMQQLDKIKSDDSQPMKDLSYLKNFLKTDFENIYVSLSIPEKRELWRSIIREIRVDHERNVRIIFL

SEQ ID NO: 10366 - protein, 561 aa, synthetic construct
MNRYGKRCVLYPRVSTEMQVDGYSLEGQKNMLTRFADREEMIIVDTYEDAGKSGKSIEGRPAFQKMLRDIEDGLDIDYILVYKLSRFGRNAADILNSLELVQSYGVNLICIEEGIDSSQTSGKLLISVLSAVAEIERENIIEQTMNGRREKARQGGWNGGFAPYGYTLEDNKLMIEETEAVAIRKIFELYTSSEIGLGGIANQLNLQGIRKIPRQNGTLEDWTGHFIKLILDNPVYCGKIAYGRRTKEKVKGTKNDYQMKRNDDYILTEGQHKGIVSEEVWEKAHAKRLRTGVKQPSKIGRDRVHLLSGLLKCPVCGSPMYTNKHAWTNKDGTYKEIYYYVCSRNRMVRGKHCEYKAMLKKTDIEPMVIEAIREIVRNEEYAQAIKKRIGVQIDTKAVDKELEGYQAKLKEVDLNKTRLEREIDSLPADAKYRERKLHDMTLRLDSLYDVIVELEEKIEDARLRRDAIKQQAITLENIYKIMVNFDCVYNIINDEEKRNVVTALIKEIEIYRNDESEYPLKRIGLNFPVFKDGGEVTELLWDKGNTVETVILMTYCGSDKK

SEQ ID NO: 10367 - protein, 526 aa, synthetic construct
MQYCLYLRKSRADSEAEALGEGETLARHEKALLDLAKKLNLNITAIYREIVSGETIAARPVMQQLLQEVEQGIWDGVLVMEVERLARGDTIDQGIVAQTFKFSDTKIITPIKTYNPNNEFDEEYFEFGLFMSRREYKTINRRLQRGRMASVKDGKYVANKAPYGYNRIRIENDKGWTLEINKEEADVVRLIFELYTVGEKQSDNTFNRLGTGFIAKRLNTMKVSPKRGKVWVVASIRDILINPVYIGMIRWNWRPQQKKMIDGQLHISRPRATDYMLCKGLHPPIISKETFDIAQDLMQHNPARPIGEKNTVKNSLSGIVVCGDCGRHMVRRPHTKYPDMLICSEPTCNNVGSQLRVVEERILQSLKEWLGEYKISWDITSPPVERISQVSIKKKALQKEQHELDTLNKQISKTHDLLEQGIYTTDVFLERSRALSLRMDEVKEHIAILDKELKTEITREDSAVNIIPKVEKLLEVYHDLPSPKAKNDMLKDVLEKVVYTKKERSKKGNLDNFNITIYPKIPKYIT

SEQ ID NO: 10368 - protein, 519 aa, synthetic construct
MEQYCLYLRKSRSDQEAEARGEGETLARHEQALLKLAKHQHLNVLTIYREVVSGETIAARPMMQQLLHEVEQGVWSGVLVMEVERLARGDTIDQGIVAQAFKFSDTKIITPMKTYDPNNEFDEEYFEFGLFMSRREYKTINRRLQRGRTASINEGKYVGNIPPYGYQRIKLENDKGFTLQPDPQEAEVVKMIFQWYAGNSGEQLGPSLIAQRLDQLGIKPRKNDTWSEATIRGILINPVYIGMVKWQTRAQVKKSINGTVKKTRPRNHHPLLIKGLHPAIIDEQLYDQVSNRLACYAPAPINRSQTIQNPLASIIVCAKCGHKMIRRPYVNKPSMLICRQPNCDNIGASLELVEKMLLAALKEWVKDMKVSTDTLDLQPVNTLSLKNNQLTIISNDLKVAYTQMDRTYDLLEQGVYSTEKFLERSNALSEKIQSLQTQQKQLEVEIKKEEEEVAQRSTYLPKIEKLVDIYWAIDEPGARNDLLKEVLDHVTYSKEARMKKNHSDAGFTLKIYPLIMPKK

SEQ ID NO: 10369 - protein, 501 aa, synthetic construct
MAIVKKIMPMVLSLDTRKRVAAYARVSMDTEQLQHSLSAQISAYSTIIQANPEWVYAGVFYDEGISGRSMKNRNGFIAMLEACEEGKIDMILVKSISRFARDTVDCLNTIRHLKELGIAVVFERERINTMTGEGELLLTLLASFAQEESRSISENVKWSIRKRFEQGIPNGHKPPYGYRWDGEMFRVIPEEGAVVKEIYRRYLAGESAYAIARSLAARGVKGRSGNPIEQTTIKDMFMNTCYMGTMMLQKYFFTEGRKRRKNCGELPRFYVDGLFEPLVTEEDHARAVELRRQNAEKCANINVELMPFSGKMKCGVCGCGLSRRSPKGYKKWTCNTKEKKGMAVCNSRPINEDELFRLATKALGLRKFDKDKFNEKIELITVRGDVLEFKFKSGAVKEVRREYDGSRGKNPFTNKCYCGTCVGKCERDTYPKGYKVWRCSKPKEKCQMKYLRETELFEASKEILGQNYQGEVVENIAKIVINDDTIDFVFKDGREQIWQRQ

SEQ ID NO: 10370 - protein, 534 aa, synthetic construct
MATAVRTIPATLNKFNSKPVSAIQKRRVAGYARVSTDFAEQATSYEAQMQYYKAYIQSKPDWIFVDMYSDEGISATTTKHRDGFKRMIDDAMNGKIDLIITKSVSRFARNTVDSLSNVRMLKEKGVEVYFEKENIWTLDAKGELLITIMSSLAQEESRSISENTTWGARKRFADGKASVAYTHFLGYDKDFKINEKEAEVVRYIYKRFISGISCYAIGNELESKGILSPYGLPKWWTSTIISILKNEKYKGDALLQKSYSVDFLQKVRKANNGEVPQYYVENHHEAIISPEIFELAQLELKRRSRKKRYCVKTVFTGKILCGICGNEYGSRVHHSNDECRREVFTCGKPWVRGVHKCPTKNLTVKMAKQLFTDALNKLVDVKKEVIDNLRLLLNETFDTTKLKEEHEKLESELNALAFKYNTLMNENARHIIPDQHNFISNQENLAEQYNSKQARYLELEKQIADKEERGLVLKNFIKELSGAEPGIEFREDLWCALLDHIVVLDKLKAKVVFKDGTEELLDIPNDRKPRVKSE

SEQ ID NO: 10371 - protein, 494 aa, synthetic construct
MRVVGYARVSTREQADHGYSIGEQNSRLRAYCQAKDWTLLLVIEDPGFSGAKMQRPGLQQVLEMVRRRECDAVLVWKLDRLSRSQKDTLYLLEDVFLANGCGFVSMLENFDTSTAFGRAMVGILSVFAQLEREQFKERSAIGRVGRAKAGLFHGGGYAPIGYDYYTKEDGGQGLVVNEYEAMQVREVYRLYLAGWAVHKIQVYMHERYTTKNGCWASDTTVRSVLSSPIYLGRITWAGKTYEGQHEALISQNDFDQVAARRESLKWQPAEPRAACDLIKNSPFRSTHILGGITWCARCGARYFASGNYSGRGENRKYWPYYTCYSVAKSSKKMIKDPNCKNKRWAVGKLDAIILAEISRLEFDPAALAKAAGPVDVSGVEEKRRVLEARVAEVRPQMERLLDLCQTGGLPVASVSGRLAALQKELDALNGELSGLAVPETVDRLAVAQEMLAGASAVIENGTPEQKRALVHSLIGRIDIDGEDITIHWLFAPEN

SEQ ID NO: 10372 - protein, 559 aa, synthetic construct
MKALIYARQSSGKDDFSESVEAQIANCKKLAAKEKLEVIGIYKDLNTSGETYPVGAEEIARLDKAYMKWVLNQSSKKDFRLGLCQVLQKLSEVDFVLVNELTRLYRPINGSFLEGHINQLLKENEVKVLQVQGGAIDLSKFDQQLITLIKNQILYEDLQKKRQNSINAFRIKKDSGRLCSDAKMHGIRYLGNGKIEVIPEWVEIIRFIYDNICAYRPYRAIIRDCNERWGKEIFFYESSIYAIAKQPIYCGYQYNSQGELIKNVQITGQEFISFEQWQEVQKIISHKRADYHVKAKKHWLPLSGKLYCGECGSKLICLLEHGKIYYTCNKRTLDRNHANCRNSRIRFESGLRGEPALYDAIYPLLSIALIERHRKAVELLNDKNELAKYDVELKNLAIKEEQLHEMFLDGLATEEQLRNLLTRNKARRCELLKKVTLLKSSNLNDETLQDLEKNVLADQFNDLANKNLPQGIYERLLNDAQITATSYADRVEFNTLYGNVTLPRIRSTNRLWMPKWEMSLLNKGTKKCVIDKNTQITVTYFTGTQAELADFGNLRIVSQ

SEQ ID NO: 10373 - protein, 542 aa, synthetic construct
MKITAPARSAGAVSLEAFVDNLNLANVVIYARYSSAGQNDQSIDGQLAKCREYAQQRGYRVVGEYCDRALSGRYAETRPEFQRLIADSAKRAFDFVLVWKLDRFSRDRYDSAIYKKKLRANGVRVLSVTEGVGDSSESVLLEAILEAMAEEYSRQLAQNVRRGMRQNAEKGLSLGGLAPLGYRVVNKQYEINEDEARIVRFIHEQYADGAGQKQIVADCARLGYRNQRGNPLTLASVKRILANERYVGRYDYLGEIVIEDAFPAIVSKELKKRVRDRLKANSKAPGHAKAKVEYLLHGKLFCGECGAPMIGECGRGRHGATYYYYTCAARKKQHTCKKRNERKDELEASIVDYIGSCVLTDSWIDGAAERVVAEYQKSYDASGIKPLEKQIRDADKEIDQLVDALISATAEAARRRINERIETAEARKQALEADLASLRIASRVQIRKEDIVVWLNQFRTGDRSDLEYRKKVIDLFVNAIYLYDDSFKLFLNVADSSQVTYADALALAPPSVSDFGASGVPDMHLSEHIIFVNGVIGMIVQR

SEQ ID NO: 10374 - protein, 505 aa, synthetic construct
MNNSILSAMYLRKSRADDPGEDVMDTLHRHESMLRAVAKRGKYLVHEDCIYREVVSGENIFSRPQMIRLLEDVTKGKYQSVLVVDIDRLGRGDMRDQGLILETFKAADTLIVTPEKVYDLNNEMDEELTEFKGFMARREYKMITKRLKRGREQTVRAGGFVADPPYGWKRAKINNLPSLEPHETEGPIMQMIVEMYGNQEPISTIQERLAAMGVYNRKGQPFCRSSIRHIATNPVNAGLIRWNRYKNIRKGQNGSPTGYEIENPPEDVILVKGVHQPQVSVEAYQKCVNVCKSRAAPSVKKGLHGVVRNPLSGIVICSNCGSRMQMQHSSTKDTRTLLCTHPGCMPGVDIVRAEAAMLDILRDKLEEIRTGQGKKQQDKALAALQKSVRAAEKNIQTLKKQQDKLYTLLEQEVYSLEVFKERNQVISQKLTDAQEQLKIMQDQVDDLSSRKEERLAQNIEDVLANYEYSSIKEKNRLLKTVVEKAIYFRKTRTSPFALDVTFINM

SEQ ID NO: 10375 - protein, 520 aa, synthetic construct
MVKCMKSVAERAVPAVIYARYSSSHQREESIEGQVRECREYAEREGYSVLQVYADRAITGRTDERPEFQRMLADASKGVFQAILIYKYDRFSRNRYSFAVWETKLKKHGVKVISARENVAEGAAGIVLKSVLQGMAEWYSVDLSEKVTRGMKENALKAKWTSGTVPFGYTRDAEQRLIIDPERGEYVRQIFEKVLAGEKYVDIASWLNMLGVRTARGAAWNKSSFTWMLKNVVYTGLFRWKDIEIKNAVPPIISKELFEAVQRKLKTYGRRGINVQKSDKYLLTPNIICGECGGPMHGMSGKSRSGELYYYYACANKRAKRTSCSISPLNRDELEQAVYNCAREVLLHEENIKLIAEQAEAVAEAQVDNELAEMKAERSRVKKSIANYAAAIANGATSGTIIELINAAEAKAAALDEAIAERELVAAPPKVSKEAIEYFLRNIAAAPDDKMKEKVISTMVNSVVVERVPDEGTKKDSDEKYSITVRFNFTDTPQLSALQSFDVREKSKMVTSAGLEPATF

SEQ ID NO: 10376 - protein, 606 aa, synthetic construct
MAYRKITDIRDTIGMRAVFYARVSTAEEEQLNAIELQIEENRGCIKDHGWKLVGEYIDRSKSGTMVKGRDDYQRLYEDLYEDLFDIVVIKDQERLQRNTLDWYLFINRVVQTGKLLFMYMDGKFYSPDDALITGVRAIIAEEFSRNLSKKLHNYHDHRIEKARQGQEIALQGSGNVYGWDKKDGKYYINPEQAKVRRLMCEGIMARKGSTLIAKELNDAGYRNTVGKPWKPMDIPKFVYDCKNVGTMIINKERHDFESKQTIKLPKEEWVYVENALPPIVTQEEWDLICKIHEERVIATGSDRRGKKTSGYSFSGKLVCGICGAPYWRKQRVSKDEYWVCSTKQTKGRRTRKRDSTMGKAGEINPLGCDNENISYNSLMEIMGVVSERLQANTDTIKHDMINWLTKLRKQLLEANGGHTEADLQRELSRKSKLLDAYLDGILNKQEYQKKAEELDERIIQLKAETEKNKANSGDIAEIDKVLANIDEEVSRYVDGNEKLKVEYLLEHLEQVQIFPDKVIVIVPILSEGIVVEKTQYVSREKRCGKDNSHKNDCNPAGSYSGRNFMGWDSCCKTRGKIPGSAGISAAAVWILQKQHTRAVSGLSGST

SEQ ID NO: 10377 - protein, 524 aa, synthetic construct
MNVVIYARFSSHNQTEQSIEGQIKVCREYANRNGLEIVGIYKDEAKSGTRDDRTDFQRMIKDSEKKHFQGVLVYQLDRFARNKYDSAIYKRKLKLNGVRVLSARENISTDASGILMESVLEGMAEYFSVELGQKVQRGMEINASKFYYNGGTVPLGLKLKSIPVPLGVNGKTIYKKQFDIDEETAPIVKKIFEMYIADNTMADIIRYLNERNIKTSFGKEFNKNSIRTIILNKKYIGVYSYKGQETPNVIPRIIDDDTFYKAQEKLLKNKEAPARTKAKTNYLLTTKLYCGTCKSMMVGISGTSHTGKLHCYYSCKGTWQHKCDRKNVQKDYIEDLVVQQARNMLTTKAINRIAKIVAKIAQKEKDNTRLKQLENALKENDKQKANLFDSLKICYDNEVRKSIFEEISRMDKEKIELQKLITLEKSTYIEVTEPQIKFFLKNLKSGKINDQKYRQMLINVLIYRIYLYDDNLTIVYNTQDRTFITRVPTIEQIENSFFENKSVFSEINNLNIGSNLGKDVLPYF

SEQ ID NO: 10378 - protein, 507 aa, synthetic construct
MPEALNAVIYARYSSDRQTEQSIEGQLRECYAFAKANDIAVIDTYIDRAISGKTDNRPAFQKMIEDSAKRQFQAVIVYRLDRFTRNRYDSAIYKARLKKNGVKVLSAMENLNGSPESIIMESLLEGMAEYYSVELSQKITRGMRENALKGKALGGQRVLGYKVNSDCYFEIDETTAPVVVDIFKLYSSGKTVKEICDILNARGVKTARGGAFNKNSLHTILTNKKYIGIYKTKYGEIVGGIPAIIDKELFEMVALRMEQNKKAPARAKAEINYLLSTKLFCGKCRSAMVGESGTSKTGKKYYYYACVKKKREKACDKSNVKKDWIEDLVIQRTVTDILKDDVIEKIADRLVELQKAEAAESGTMLYLENSLAEIQVSIKNIMTAIEKGIITESTKTRLTELEDEKRNVEIEIAKESIARRIISREQIIYWISSFKDGDITSEKYRQQLIDTFVHAVFVYDDKIVITYNYSGENNTATISDLDLSGPPNRYWTNTYFFSGGFAVKCSL

SEQ ID NO: 10379 - protein, 503 aa, synthetic construct
MDLIYARQSVDKEDSISIESQIELCLRENTSGEHKIFKDKGYSGKNTERPAFQEMMSWIRRGGVERVIVYRLDRISRSVLDFAGLINEFQRYGVEFVSITERFDTSTPIGKAMLMIVMIFAQLERETIQQRVIDAYKSRSRKGFYMGGRVPYAFKLKGIVMDGIKTSMYEAIPEEIEVVKLIYSLYSEPQTSFSDVMKYLKDNNIKNSSGKAFSRNRIRDIVINPIYVKADDRIFEFFQEQGAEIVNDISQFIGTNGAYFYTGDKTLKRKAISILGHVLVLAPSEGCVDSDTWLKCRTKCLNVRQMAKPVKAKNTWLAGKIKCMNCGYSLSLRENKRKRKESSRYYVCSRKYVAMDCDGIGAVSAEKVEDIVFFEMREKLKEFGELQLHEKPESTLQLTKLKVRADQIEKEIDTLVEKIPTASKATMGYINKKIDELDEEHSRLKKEIADMSADIYGKKDVGVIKNYLNNWESISISDKITVVDALIESVRVNQDTVDIVWKI

SEQ ID NO: 10380 - protein, 533 aa, synthetic construct
MAKPEVSELAVVYARYSSHSQGEQSIEGQLSNARDYAAAHGYTIVHEYVDRAKSGRTDNRAEFQQMLKDTAKRQFSVIILWKVDRFGRNREEIAINKMKCRKNGVRVEYVAETIPDSPEGVILESVLEGFAEYYSLQLSQNIRRGRAESAEKCQSLGGNRPLGYKTGPDKKFVIDENTAPTVKMIFTMYADGKTVTEIVDKLNEMGLRTLRGGPFTKNSLHSILKNKKYIGVYEYQGREIKDGVPRIIEDDVFNKVQEMLKINKRAPAKTWSRADYILTDKLFCGKCGALMFGESGTSKTGVKHNYYICSNKKRFRSCDKKAVRQADIEDTVLNATHELLQDDELLDYIVDRTWEYYLAQDNSQEELRNLQRQLAQTDTAISNLIRAIEAGILTEETKKRMDELTQQKADLKASIADREIARGFHLQKSHIAFYLRSLRDADWSDKEAQKRLIQTFVNAVFVYDDHITLTYNFSGDKSTITLRDMQRFEDGEEFGCRASRSTKQVLDEHLFLQRRFCREVFALIHNRKAPSWE

SEQ ID NO: 10381 - protein, 565 aa, synthetic construct
MPRAQKAAIYCRVSTLHQVDKDSLPMQRQDMINYAKYVLSIEDYEVFEDAGYSGKNTDRPAFQEMMERIERGEFSHVLVWKIDRISRNLLDFATMYAKCKKLGVTFVSKNEQFDTSTAMGEAMLKIILVFAELERNMTGERVSATMNARAAEGKWNGGRVPFAYHYDRETDSFSIRDDEAKIALELKDIYLRTRSLTYTARTLNEAGRRTRRGYAWTPATVAIILRSPFYRGTYRYNYRDESDTTFSFKGRNEWIMCAKHHPPLFSEADCRQIDFWLTKNRRQHGKATHVQRKLVHVFAGLIRCGFCGSNYIASIDRVRASGYQPSMYNCGGRRQKGMCKNRYVTDIRIGGFVFNYISNVIRLRDAFRPQWSKARIQRFLLHGDDFCCGATLSDDTLHRVRAALLGSCLSTAEYQPADEQHDDSATQTRKANLQAELEKNRRALSRLMHLFLYAEDEMPQADFLREKKHLQDTIARLQAELEKARQSSVFASSLTDEEFLDKAARLLFQSAMVRGGIDFPELAMHVGNLELKNFVNTIIKQIVVLDGHVTQITFANDEIHTFLYH

SEQ ID NO: 10382 - protein, 500 aa, synthetic construct
MRMCGYARVSTDEERQLDSLEHQMEFFSDFAKQNGHHLVNVYTDEGITGRQLKKRDAFNKMLSDSKLGLFDLLVVKDVSRFARNTVDLLTSIRQLKSRGIDVIFVNNSQKVLGESEFIITLLGAVAQEESSNLSKRVKFGKNITSKKGRVPPRIFGYDRIDNFTMEINEREAEVVREIYHLYIDEGLGCRLIAITLGEKQMKTKFGNDWNQRNIRRILENPIYSGHYINHRYTVVDFLEGTTKALPKEQHYHHDRPEWAIITPERFQQAQEILEQRRKQYATEYTHFTGRYSNRHLFSTLIRCKECGRAFSRRVTHYPNSDYIYWRCPTNNQYTAKRCSNNTIVREDDLIETLSTYLREVVSNKESIAQEIARKFKEANAVEGSKPDAQALEAKKVKLKAKLEKYMEMYANDIITMEALKSKTAEINESINVIDDQLILLEGQRTQERTIESITNEAMAEIERFLSLQSATNMDLRRIIDSIIVDDKKKVKINLKITGNL

SEQ ID NO: 10383 - protein, 548 aa, synthetic construct
MPTSKNTARKYAAGGSSDNSCGVEPLRAVIYARYSSSGQREESIEGQLRDCYEFAKKHGIIVIGEYIDKAMTGRVDRRPDFQRMMKDSEKGRFNCVLLWKMDRFARNRYDSAMYKYKLKKNGIRIFYAKETIPDGPEGIILESVMEGYAEYYSENLAQNVKRGNYDSALELKTLGKTCLGLKTGPDGRYMIDQAEAAIVRRIFEEYAEGERAKDIYERLNSEGYRTSRGGKFNKNSLRRILSNKKYIGVYEYEDIYVENGIPAIITDRDLFERVQKMLKINHDAPARGKAQNFLLTTKLFCGLCGSPMIGDGGTSHTGKAYAYYSCTKRKRGRSCKKESVPKDWIEDLVVGELVKIVHNDELIEQIADRVMEYQKREKDQSGLHALETRQKENEKAISNMLAAIEAGIITPSTKTRLMELEADRADIEKGIAHELLAEPEFERDQIIYFLERFRSGDINDEAYRIMLVDTFLNSVYLYDDDHLVLVMNYSGENCKVDLKLVEGAVSGDGCKGSAFAPSSALRMKEVLEIRLLFFVLSPYKNIDFFING

SEQ ID NO: 10384 - protein, 523 aa, synthetic construct
MAKSVTTIPATLSRFTAAPINSTKKRRVAAYARVSTDNEEQLTSYEAQIDYYTNYINGRDDWEFVGVYPDEGITGTNTKKREQFRQMVADALDGKIDLIITKSVSRFARNTVDSLTTIRKLKEHNVEVYFEKENIWTFDSKGELLLTIMSSLAQEESRSISENCTWGQRKRFADGKVTVPFKRFLGYDMGPDHNLVVNPEQAKLVKRIYGMFLQGQSPFQIARTLTEEGIPSPGGKDHWNPSNIKSILTNEKYKGDALLQKSFTVDFLTKKKKTNEGEIPQYYVKDNHEAIIDPETFEMVQTLMTTRTKGRNRKSSVSIFSSKVKCGDCGSWYGPKVWHSNDAYRKVIWQCNHKFDGQKCATPTLTEDEIKELFLRAANQVIDQKEQFIAIYDQVLSRSLDTTALESELSDLEAEINIAAELIEECIKENAHVALDQDEYQKRYDALVARFDKAKARHTEVTDLIAERMARKHQIEAYLKNLRSRESLTEFRETDWLAMVNYITVHSKKDIWVTFKDGNEIKA

SEQ ID NO: 10385 - protein, 590 aa, synthetic construct
MKTVEKIERKLPVLKTRKRVAAYARVSMESERMQHSLSAQVSYYSALIQKNPEWEYAGVFADYGISGTGTKKREEFNRMLAECEAGNIDIILTKSIQRFARNTVDLLNTVRRLKDLGIEVRFEKENINSLSGDGELMLSILASFAQEESRSISENVKWGTIKRFKQGIPNGKFSIFGYEWQDDKLVIVPEEAEIIRWMYAEYMKGASRIEIGRALMDRGIYTRQGKPWVDSNVKVILTNITYTGNMLFQKEYCEDPITKRRRKNYGEMPQYFVEDTHEAIIPMDEWQAVQAEFKRRRDLGPFGNKSLKLSAFSTKITCGCCRKHYRHSGKRNTAGEVYYIWICQTKSQKGVSACPSKNIPEKMLQNTAAEVLGLDKFDEDVFSQQIEEVIVIGDDTLTFRFYDGHEVTTKWQSTAKTDWWTDERRKLWGERHKRKDTNPNRNTFYEFTGFMKCGCCGANYRCQSGKRKDGTPTRSWYCTGPRSECRNPAIRDETMKRLVTEILGLDEFDEAAMDAQIESATILDHMVTFHFRDGHIESRDFLDKRHGTPWTEERREKAKKSMKAAWTDERREAMSERITKIRSEKKWPNP

SEQ ID NO: 10386 - protein, 520 aa, synthetic construct
MPTSKNTARKYAAGDGSDNSCGVEPLRAVIYARYSSSGQREESIEGQLRDCYEFAKKHGIIVIGEYIDKAMTGRVDRRPDFQRMMKDSEKGRFNCVLLWKMDRFARNRYDSAMYKYKLKKNGIRIFYAKETIPDGPEGIILESVMEGYAEYYSENLAQNVKRGNYDSALELKTLGKTCLGLKTGPDGRYMIDQAEATIVRRIFEEYAEGERAKDIYERLNSEGYRTSRGGKFNKNSLRRILSNKKYIGVYEYEDIYVENGIPAIITDRDLFERVQKMLKINHDAPARGKAQNFLLTTKLFCGLCGSPMIGDGGTSHTGKAYAYYSCTKRKRGRSCKKESVPKDWIEDLVVGELVKIVHNDELIEQIADRVMEYQKREKDQSGLHALEIRQKENEKAISNMLAAIEAGIITPSTKTRLMELEADRADIEKGIAHELLAEPEFERDQIIYFLERFRSGDINDEAYRIMLVDTFLNSVYLYDDDHLVLVMNYSGENCKVDLKLVEGAVSGDGCKGSAFAPSSA

SEQ ID NO: 10387 - protein, 464 aa, synthetic construct
MARSVTVISARSQKVRTGHKAVQEKKIRVAAYCRVSTDQEDQLHSFEAQVEYYTKYINEHENYEMAGIYADEGISGTNTKKREQFKKMIADCEGGKIDLVITKSISRFARNTQDCLAYSRKLKNLGIGIIFEKENINTLDSTGELLFTILSSLAQDESRNISENCKWGIRTKFKNGEMHLNTFKFLGYDKDENGKLVINKEQAKTVRRIYRDFLIGINPAQIAKELTEEKVPGCLGQTKWYPSTVIGILKQEKHMGDALLQKTYTADFLTKRQVKNNGEIAQVYVKDSHKGIIDKETWNAVQEEFERREKFMQKHGTDRYSYGSECYPFCEKIFCGECGSLFTRHSWKSRGIIQWQCKNHRKDGKVACTNAYVDNADLEKGFVKAFNRLVGEREKHIERWNSMKLDGTPLEKIRAGQMMEATESGQLQKYVPEAAQLVLEEITIFGAKKYEFAFLEGSRVKVSV

SEQ ID NO: 10388 - protein, 502 aa, synthetic construct
MEIQIREGSREQKRKLKVCAYCRVSTDADEQENSLENQVRHYEMVIKANPDYEYAGVYSDFAISGFKEKRPGLQKMLADAEKGKIDLILTKSVSRFARNTSIVLEATRKLKELNVGVFFELQNINTLSGEGELMLTILAAFAQAESESGSAGAKMVYQRKYEAGIPVQYLERSFGYTKDERGVFVADEAEAVWVRKIYKMAAEGYTPASIKRYLNENGIKTVGGVQWVDSTVFRLLENEIYKGDYIMHKHFVNEERKLVRNRGEVDAWYIEDDHEAIVSPELWQKAQDALAAKRDYLAEGSVIEEFTEENYPYMNKIYCAKCGYPLYKRIYSKGNRLNWGCSGTKRYGKTFCDGINIPDGVLRSEWHFKENTYIAEKASDKGVKEFTYLKEQSWKRRHKKKQPPAIPENTEAEYPYREKIFCALCGSRLVRYVNPQSHKVTWVCSRRKRKGKDACDGTRVPDTIIKGWGEIKKDIYIQRKDDKNGKKRYSYISKKPEGADRA

SEQ ID NO: 10389 - protein, 581 aa, synthetic construct
MSRTTNKRPGKAKSGLSRKQKVAIYIRVSTLYQVDRDSLPMQRKDLIAYASLILGIEEYEIFEDAGYSGKNTDRPAFQEMMQRIRKGEFTHVLVWKIDRISRNLLDFAEMYEELQDLRVTFVSKNEQFDTSTAIGEAMLKIILVFAELERNMTSERVTATMISRANSGLWNGGRIPFGYDYDPDKTAFSIREDEEKVCQMIKNDYMEHKSLVHTSRMLNASGYKTRAGAEWSPTAVWIIISSPFYAGIYRYNRYKGTERRVENPEDEWIMIQNHHPAIFSLEEHEKMLAILDENSRNHRSVGQKHQTERVHIFGGIAYCGKCGSKMVSTPGRLHANGYRPTNYSCPKHRKTKECDNPTVSDTQVGEFVINYILNMLGAKKKFSTIENPEDLERCLLYGNTFSEVEHIDSNGLNEYFNLLSRYSSDDSYTFSVKKSRKKKAEVDPEVEALRKEKEKQERAMKRLQNLYLYSDTSMSEKDFIIRKTEISKRLEEINAMLGMVAKNSEPSLSDEEFVRQASHLLISRELQNRQYIYFKNLAQNVSPEILKAYMETVLDSVLLVDGRVSSIVFRNGLTHKFKYKS

SEQ ID NO: 10390 - protein, 522 aa, synthetic construct
MKRFYGYIRVSTQKQGERGVSLQEQKSAIETYARREALDVVEWFEERVTAAKRGRPAFSKMLSKLNNGDAHGFIIHKIDRSTRNLKDWADIGELIEAGRDVRIATDNLDLHTRGGRLTADIQAVVAADFIRNLRDETRKGIMGRLRQGLYPFAAPIGYLDQGPGRLKTFDPERAHLIRAAFELYASGRFSLSQLKAELGQRGLRTRSGRAVSKSQLGRILNNPFYAGQIRVASMSETFAGAHKPLISMTTFNQVKLVLTGRAHSQKQIHDFLFRRLLKCGGCGRTLIGERQKGHVYYRCQDRSCPVTTIREEMADAAFNETFGRIEFSKGEIAEIRSFLPRNDAEWAIQDEVLAKSLKLRMEKCQSRLDRLTNVMLDGVISPDLYAQHQASLTRALINARQKLNGIEAHRGEIQETVEKYLELLESLKVSYESGNRVRKRELITATTSNRLLEGKNLSIELFEPFCGLQKTPDLQKCCLSRDEPRTLARRIYWTVKQEQDEQTAANDNHPEAGSDTQADEAA

SEQ ID NO: 10391 - protein, 538 aa, synthetic construct
MSRNNNRGRGEARESASRTNGTIRCAIYTRKSTDEGLEQEFNSLDAQRESAEAYIASQRHEGWVCIPDRFDDGGFTGGNMERPALKRLFAVIESGDIDCVVVYKVDRLSRSLLDFARMMEIFDKHSVSFVSVTQQFNTTSSMGRLTLNILLSFAQFEREIISERTRDKMSAARRKGKWVGGMPVLGYDVDPKGGKLIVNENEAAQVRAMYQIYLEHKAMIPVVQEIDRRGWQTKRWTTKKGQERGGKPFTKNGLFRLLTNVIYTGKVDYQGNIYNGEHSGIVDIDLWQQVQDVLRRNGSTGGKEVRNKYGALLKGLLYCAPCGTGMVHTYTAKDNGKRYRYYVCLNAQQRGWASCPTKSLNAHEIETAVVEHIRSIGRNEEIIAATAAKVREESGKRMAELETEQRGHERELKRLHTRVQKLVSESFTAVSNGGAAMDQLADLQDQIRTIEQRMTAIREEVITIQRETVDEGDLARALAVFDPVWESLSPREQSRIVRLLVERVGYDGRDGRVTVTFRSPGVKALCSEADIRSREVSA

SEQ ID NO: 10392 - protein, 546 aa, synthetic construct
MSTGTELRAVFYARVSTEEEKQLNALEKQIQENKDVIRDHGWRLVGEYIDEGKTGTTTKRRNDYKRLLKDMTENKFDIVVCKDQDRLQRNTLDWYLFVDNLVTNNLKLFMYLDNKFFKPSEDALITGVKAIIAEEYSRNLSKKLNNSNKRRIERALNGEEVSAMGNGKSLAFKIVNGKWVKDEEEAKLGKKIFELYLEYDSIRKVRDWVNEHGYTNSVGKPFTSESISRILKNEKAKGVIVMGKYHHDFDKKKIVRRSEEELVRIPAPELAYVSEEVFDKVQERLRAKTGNGRGVNAYSDPLSGKIYCGSCGRKLWKHASNGYVNWMCASQVAKGDVECNGTRITTVAIRNIYKKITDNLEVNKGVVKQDIVKWLNELKATLSDTSVNEKIQKDLDKLERKRTKLLEAYLEDFISKDDYKAKYEAIEGQIEEKKKLLVPVEENEDIKVIESVLQNIDDEIDAYVKTLDMEESKVDFLIEHTKRITVLENRDIIIELDLVAGAIIAGKDFLLYVHDTMPQHHGPKHLHPSGPQTAPRCCFRDRFSCD

SEQ ID NO: 10393 - protein, 426 aa, synthetic construct
MDKSQIKRCAIYTRKSTDENLQDSFNSLDAQREAAEAYIQSQKMNGWRLLPDRYDDGGYSGGNMNRPGLKKLLEDVKAGKIDIVIVYKLDRLSRSICDFAELSKIFDKHGTSFVSVTQEINTTTSSGRMMLNILVTFAQYEREVIAERIRDKMSASRKKGKWVGGSVPFGYKVVDKHLQIHEEEADIVKRIFARFLKIGSPRQIAFELEESGAARRDGRPWNVSHIYRILQNHTYIGKVNYKGEIYEGEHEAIIDQKSWDEAQEHLKENDPMKYLRNKKQETVAILKGVIRCGHCGCAMGPTYARRRGRKYLYYLCIDESKRGKHICPVKRAAAPAIEEIVLKQIQKIMQTETVQKHLVQDDLPIEKVKEYADNFAEIWDEIFPIERQRILGLFLEQVVVYEDHVDIEIKTGGLAAFIEEMTNGND

SEQ ID NO: 10394 - protein, 441 aa, synthetic construct
MEMKITKISTLPQLDRKKRVAAYARVSTGKDAMLHSLSAQVSYYNNLIQNNNELEFAGIYADEAMSGTKDNREEFNRMVDDCKAGKIDLIITKAISRFARNTATLLSTIRELSSVGVDVFFEEQNLHSISGDGEMILTLLASCAQEEARSASENVKWRVKKDFKQGILNGGNDCYGYKLIDKKFVLVPEEAEIVKMIFAWYICGEGVVAISKKLDDMGIKPVRAKYWLPNTIMRMLKDRCYVGDLILQKTYVTDYVSKKKKRNHGEFDKYFVENDHEPIIDIETFKKANALMVERAKRFKAQDRTALRYPLSGKIVCGECGSRFGHKVYMHSSPGWICSAFDRKGKKACQSRKVPEYAMDEAVDAVIGGYDNIKVLDFIEVFNNNRLLFHLKNKEIKEFIWEERSRSQSWTDEMREEAKKRTIINNKNKKRGANGKWQKSE

SEQ ID NO: 10395 - protein, 529 aa, synthetic construct
MAKVRVIPSTLNPLTQSPISETKKKKVAAYARVSTDSDEQYTSYEMQVKYYKKFIQEHDGWIYVNVYADEGITGTNTKKRDSFNQMINDALDRKIDLIITKSISRFARNTLDTISTTRKLKASGVEVFFEKEGLWTFDSKSELILTIMASIAQEESRSISANVTMGKRWGMQEGKVSFAYKNFLGYKKENGKIVIDEEQAIIVRRIYSMFLKEGKTCSGIAVQLKKEGILTPSGNSSNWQKNTVLSILTNEKYKGDALLQKTFTANFLEHNVKRNNGQLPQYYVENSHPAIINRYEWEQVQTELARRQEIGRNYSGAGAFASKLVCEDCGGFYGMKVWHSNSKFKKMILQCNNKFKKEKSRCQTPHLTEDEVKEMFIRAYNETMKDKTKVIEDTEAVIAMLTNTDEIDKRIASLTSEIEIVSELVKKLIRENSSAAQSQEDYQTKYNELSSRYDKTKKALEKAMQDKTHKQGQGIKLQSFLESLKQKECIIDQWDEELWMIMVEKAIVHRDKSITFKFYNGIEIIIAAA

SEQ ID NO: 10396 - protein, 505 aa, synthetic construct
MLNAVSYVRVSSEDQKKHGYSIGQQITNNMNFALQNGYTIVKTFKDEGISAKDLNRPALQELIEYCADKNNNVEAVIVWKLDRISRSVADYTATLSPFFAQNNIQLLTVTDINGEGLGVEMSRQMAMVFAEYERKMTAMRTKEGIRGKVALGQFPYHAPIGYENIEIKGSKYKKMVIDEENAFFVRQAYSMCLQGDSLNTITSKLYKMGFRNKHGNRHPKSTVEYILHNIAYTGKFYYDDVLVEDTDYPALIKESTYHAVQDKLNNPSKTRQNHTEFPYNECMTCAKCGCQLTGELKKKKSKNGTKEYIYYHCTGNRGGDCKKGSYIRQEIIDEAFTNILKYITIPESVHELVIKGLKEVHEQHNQDFEQQKKSIRKRIDKIDKTLKSVFEHGFDNHDEGMRKNIEEWKTERRTLMLEEHELLKATETFFLQSNSLLEFCKDAHRAFLEGNAQQKRKIVKIVCSNFSYDGETLDIVPNPVFKVIIRNNLSNKKLPRLDSNQQPTG

SEQ ID NO: 10397 - protein, 503 aa, synthetic construct
MFYEELLKQYADETFLGYGRVSTDEQIKGYSLDYQEKVIKNYCKKLGGKLHKMFIESHSAKKPGRPKFNEMLAYARKHKIKNIVFAVSHRASRNPLDSGMLSYMAEYEGFNIHLIENNRILNKDSKPQDYLIFEIENGFNNMYSRNLRVEVTTKMREKADQGYYPTRPMVGYMTQKEKKAGRGKRALLVPDPEKAPFIRRIFELYSTGQYSYASLAAQMRIEGFYISPAVKCGKSNIEDILNNPIYMGDFIWAGKRYYNGKHEPLISRELYYLCQRIIKQKTSTKCNRKNFLFSHIIKCSVCGCTHVGEIKKGKYIYYHCTGNKGGNCKSKYLKESYIEELFLNTLDKLTLSDELMPVVINQIKTQVKYERLYNENSTNEVNKKIQNLKNRLNKMFDLYIDGELDKEMYKSKRLEFERDIEELEARLKILNENPGRVLDFSIKLLELFRNARGLYSAASFEKKKELINLVCSNFYYDGEKLTIAIKKAFQPIVKIASFRNGGG

SEQ ID NO: 10398 - protein, 505 aa, synthetic construct
MPKTEEKQTIKAVIYARYSSDRQREESIEGQLRVCEDYASRNNMTILHTYADRAMTGRSDQRPEFQMMIRDAATMTFDVVLVYKLNRFARNRYDSAKYKHKLKKYGVKVVSAMENIADDPSGILLESVIEGMAEYYSAELAENVTRGMTENALEGKWPGGIVPLGYKLDEQHHLVIDEPKAEVVRLIYQLALEGHNQKYIIDELNRRHYTNSAGGPFSYNTLRTILRNEKYIGVFTWGTVRRENACPAILDKVTFEAVQKQLNFRAKNHIRSCNESFLLTGKLFCGCCHSKMVGVSGTSKTQAIYYYYACSAHLKKKCKARNIRKEAIEDLVCEVTTRILSNPEAVEAIARQAIEMQKNKKDSLELQAIKNQIADINKKLQNCIRAVENGLISETITNHINGYEKELTRLKDDAARVKLLDGDVELTQQHIEFFFWSIAQKIKTADKYKSILLSSIVRSVIVYKDYIEIQYNYKNELPILQNPVKVESSYLNQMVIHPGFEPGTP

SEQ ID NO: 10399 - protein, 463 aa, synthetic construct
MTTKVERCAIYIRVSTTEQMMHGKSLEAQKEYLTNYAREHNMAVVGIYADEGKTARKELKKRKAIHSLLQDVEAGKIDVIIFWRIDRWFRNLSDFYKVQDILDSHNVRWISTSEPGINMETRDGRLQLNVVLSIGQNEVDTTSERIKFVNEASIRSGKLIFGDVNMGYGYKSGIVDGQKRMIKDPDREHVVDAFYKYFFKHQNKCATLRYIQETYDPDFSFGIMRTLLSSEFYKGTYRGFPYCPAYLTEDEWNKLQKIQKRNVKATPSGRIYLFAGMIRCPVCGQLLCGTGCSSIINRKTGAKRTYCYYRCNRAMIDHICSYRHRLSQNLVENYLLDNLENEYKNYKVKCEKIEKEKEKQKKKQSPEKLRKELDRLNFLFQKGRIDWDYYNEEYGRIESELNDLQSTLPEPVTNYSYLEELLDTDFRTMYDQLSQENRRAFWRSIIQEIHINEDSTITSVDFL

SEQ ID NO: 10400 - protein, 616 aa, synthetic construct
MSTGTELRAVFYARVSTEEEKQLNALEKQIQENKDVIRDHGWRLVGEYIDEGKTGTTTKRRNDYKRLLKDMTENKFDIVVCKDQDRLQRNTLDWYLFVDNLVTNNLKLFMYLDNKFFKPSEDALITGVKAIIAEEYSRNLSKKLNNSNKRRIERALNGEEVSAMGNGKSLAFKIVNGKWVKDEEEAKLGKKIFELYLEYDSIRKVRDWVNEHGYTNSVGKPFTSESISRILKNEKAKGVIVMGKYHHDFDKKKIVRRSEEELVRIPAPELAYVSEEVFDKVQERLRAKTGNGRGVNAYSDPLSGKIYCGSCGRKLWKHASNGYVNWMCASQVAKGDVECNGTRITTVAIRNIYKKITDNLEVNKGVVKQDIVKWLNELKATLSDTSVNEKIQKDLDKLERKRTKLLEAYLEDFISKDDYKAKYEAIEGQIEEKKKLLVPVEENEDIKVIESVLQNIDDEIDAYVKTLDMEESKVDFLIEHTKRITVLENRDIIIELDLVAGAIIAGKDFLLYVHDTMPFHHGAVRFPAPCQRTAPHRSVPHRLPCHKHGGDRQPATPRYCPQAARGRHSGAAAPRYADHLAGLSGGRLYYRHGRMEYEKSPSHAEGRPGRQGVQAA

SEQ ID NO: 10401 - protein, 526 aa, synthetic construct
MINMVSFDNIIIYLRKSRSDDPAQTVEEVLAKHERILQDYCIKEYGKVIPEKRIYREVVSGETIQDRSVMQKLLKELETNNIYGVLIVEPQRLSRGDLQDCGQIINSFRYTNTAVITPGKTYNLQDEYDRKFFEMELTRGNDYLEYTKKILNRGRVASVKQGNYICSVRPYGYKKVVIGTGKDKCHTLEIIPEEAEAIKLMYHLYLDENMGFTNIARTLDSMHIKPLKSSNWSAATIRDMIDNPIYIGKIVWNNRKVVKKWENEQIIKVRPRNKGDDVICVDGKHEAIIDEETFNAARQKRGLTPKVRKFKELRNPLAGILFCSTCGHSMSMKKYVDKRSHTGKVTTIMLCNKQAVCHTKSAQYEQIVAKIKESLADAIANFEIKMKEQENNNIDIHKQRITSLKDELNRLYNKDVRQKDAFEDGIYTKEEYIERNSKLQSQILNIKAEIENEKNNTPVIIDYQNKITTFTECLTSLDDDSISAADKNSLLKNCIDKIIYHNDMPSLPGIGRYIENSFRLEIFLKM

SEQ ID NO: 10402 - protein, 572 aa, synthetic construct
MAYRKITDIRDTIGMRAVFYARVSTAEEEQLNAIELQIEENRGCIKDHGWKLVGEYIDRSKSGTMVKGRDDYQRLYEDLYEDLFDIVVIKDQERLQRNTLDWYLFINRVVQTGKLLFMYMDGKFYSPDDALITGVRAIIAEEFSRNLSKKLHNYHDHRIEKARQGQEIALQGSGNVYGWDKKDGKYYINPEQAKVRRLMCEGIMARKGSTLIAKELNDAGYRNTVGKPWKPMDIPKFVYDCKNVGTMIINKERHDFESKQTIKLPKEEWVYVENALPPIVTQEEWDLICKIHEERVIATGSDRRGKKTSGYSFSGKLVCGICGAPYWRKQRVSKDEYWVCSTKQTKGRRTRKRDSTMGKAGEINPLGCDNENISYNSLMEIMGVVSERLQANTDTIKQDMINWLTKLRKQLIEANGGHTEADLQRELSRKSKLLDAYLDGILNKQEYQTKAEELDERIIQLKAETEKNKANSGDIAEIDKVLANIDEEVSRYVDGNEKLKVEYLLEHLEQVQIFPDKVIVIVPILSEGIVVEKTQYVSREKCSKIHTESMIHYLEDYMYCTRKLGLYVQLVA

SEQ ID NO: 10403 - protein, 575 aa, synthetic construct
MNKIIDTLNTQKAAIYIRVSTHHQIDKDSLPLQREDLINYAKYALNIDNYEIFEDAGYSAKNTERPSYQYMMSKLRTGEFSHLLVWKIDRISRNLLDFATMYEELKTLGVTFVSKNEQFDTSSAIGEAMLKIILVFAELERNMTSERVSAVMLSRATNGQWNGGRVPYGYNYDKSTKQFSIHPIEGNHIKKLYDLYLETQSMLAVAKYFNEHGIKTKTGNNWSPTTIGKILASRFYLGEYQYNLHKDGIGGAGVASLKPEDEWITVKDHHPAIIEIEQWDKCAEIRAYNHRRSNAPKRYKRKNTHIFAGLIICGKCGSTYQATIDRARTGGYRPSIYLCSRRKQYSDCQNKYMSDITLGPFILNYISNIIKANANMGKTTTPDMFKKKLLRGDVFKDVKDIAPSGLNEMYNMIVSKKFNSDPFTSTVHRDESQPDFASERELLISEKRKYLRALDRLKILYLYNDNAMAEKDYIIENKNILDNLKRVDERLEEIEKNSSQNFTITDSEFIEKASYFIISQELSNQRYINFNSLIQHIDTNVLKNFIQSVIKKIVVLDGRITSIQFKNGIEHDFLY

SEQ ID NO: 10404 - protein, 514 aa, synthetic construct
MRRKKVEGGNRLVAYYRYSGGSGQTEQSIEGQRRDCENYAKLHGLTILHEYIDRHISGKTDDRAAFQQMMNDGDKGAFDMVICWKTDRFARNRYDSAVYKKRLRDNGIEILYAAESNVEGAEGIIIEGLMEALAEYYSAELAEKMRRGMRESALKGQAINRCRSLGLTTDENKKYVIDEKTAPTVRFIFEHYAAGESSTSIVEQLNAKGLRTSQGNPFNKCSIPRIIQNEMYRGVYTSKAYNVRIEGAIPAIIDDDLWKRAQAMMKANRQLKAKYEPKAEYLLSGKLFCAKCGCAMKGVSGHSGGNGEVYRYYACSNPQCRKRNIPKDDLEGKVIRSICDHLLQPETMELLAETMVEVQKADMEKPNAERDVLEQELRDVRRRSKNIMDAIETGSANPQLVARLDDLTQQENTLTYQLSTMEAEKPLLFTKEQYLFLLQQFYAQPAEQDDAYKRRLINTFVTNIEVSDSELLIYFNISEETENKNKNAPQLNFDKSSSTEKRLVRVARIELTAS

SEQ ID NO: 10405 - protein, 521 aa, synthetic construct
MENIIIYLRKSRSDDPALSVTDVLARHEQQLQEYAINTYNRQISEDHIYREIVSGETIADRPVMKQVIKLLETGTVDGVLVIEPQRLSRGDLEDCGKIVNTFRYTGTLVITPPKTYNLNDEYDRKFFEMELMRGNDYLEYTKKILNRGRIASVKQGNYIGSVAPYGYKKIKSGSGKDSYHTLEIVPEEADAVRLMYQLFVKEHYGFTKIARYLDDIGVKPRKTDHWSPAAIKDMLENPVYIGKIRWNYSKVQKTIINGQISKTRPRQKDISQWIYVNGRHEAIIEEAIYNKALEMRGKNPCVRKNKELSNPFAGLLYCGTCGRAMSYKHFKQYRGKSENVCTSMLCNNQAICKTKSIKYDTFYKRVVESLEENVADFEIKLKQEESNGKQFQKDLICSLEAKLNKLKEKDFRQKDAYEDGLYTKEEYATRNAKLQEQISATMESLSKARSNTPPVIDYRERISRFTDCLTALKDNTLSASEKNVLLKTCIDKIVYYNNMESKPGIGRYVDNVFQLDIFLLL

SEQ ID NO: 10406 - protein, 500 aa, synthetic construct
MRMCGYARVSTDEERQLDSLEHQMEFFSDFAKQNGHHLVNVYTDEGITGRQLKKRDAFNKMLSDSKLGLFDLLVVKDVSRFARNTVDLLTSIRQLKSRGIDVIFVNNSQKVLGESEFVITLLGAVAQEESSNLSKRVKFGKNITSKKGRVPPRIFGYDRIDNFTMEINEREAEVVREIYHLYIDEGLGCRLIAITLGEKQMKTKYGNDWNQRNIRRILENPIYSGHYINHRYTVVDFLEGTTKALPKEQHYHHDRPEWAIITPERFQQAQEILEQRRKQYATEYTHFTGRYSNRHLFSTLIRCKECGRAFSRRVTHYPNSDYIYWRCPTNNQYTAKRCSNNTIVREDDLIETLSTYLREVVSNKESIAQEIARKFKEANAVEGSKPDAQALEAKKVKLKAKLEKYMEMYANDIITMEALKSKTAEINESINVIDDQLILLEGQRTQERTIESITNEAMAEIERFLSLQSATNMDLRRIIDSIIVDDKKKVKINLKITGNL

SEQ ID NO: 10407 - protein, 464 aa, synthetic construct
MARSVTVIPARNRQRETGRRAVQEKKIRVAAYCRVSTDQEDQLHSFEAQVDYYTKYINDHENYEMAGIYADEGISGTNTKKREQFKRMIADCEGGKIDLVITKSISRFARNTQDCLAYSRKLKNLGIGIIFEKENINTLDSTGELLFTILSSLAQDESRNISENCKWGIRTKFKNGEMHLNTFKFLGYDKDENGKLVINKEQAKTVRRIYRDFLIGINPAQIAKELTEEKVPGCNGQTKWYPSTIVGILKQEKHMGDALLQKTYTADFLTKRQVKNNGEIAQVYVKDSHKGIIDKQTWNAVQEEFERRERFMKDHGTDRYSYGADCMPFCEKVFCGECKSLFTRHSWKSRGIVQWQCKNHRTDGRVTCSNAYVDNSDLEKGFVKAINKLVADREKFMERWNQIKTDGSPLEKIRAEQMMEATENEPLGRFVPEIAQLVLAEVTVLGAKKYEFFFLEGSRIKVSV

SEQ ID NO: 10408 - protein, 498 aa, synthetic construct
MEIQIREANSGQKQKLKVCAYCRVSTDADEQENSLENQIRHYKEVITSNPDYEYAGVYSDFAISGFKEKRPGLQKMLADAQKGKIDLILTKSVSRFARNTSIVLEATRKLKELNVGVFFELQNINTLSGEGELMLTILAAFAQAESESGSTGAKMVYQRKYEAGIPVQYLERSFGYTKDERGVYIADESEAVWVRKIYEMAADGYTPAAIKRYLNENGVKTVGGTKWIDSTVFRLIENEIYKGDYIMHKHFVNEERKLVRNRGEVDAWYIEDDHEAIVSPELWQKAQDAIEAKRDYLAEGSVIEEFTEDNYPYMNKIFCAKCGHPLYKRIYSNGNRLNWGCSGTKRYGKSFCEGINIPDGVLRKAWHFDGNMYIDEKPSVKGTKEFTYLKESSWKRRHKKKVPEAIPENTEEAYPYRKKIFCGLCGSRLVRHVNPKSHKVIWICNGAKRKGVAFCGGTRIPDSVIRGWGEIKKDIYIQRKDDKNGKKRYSYTSKKPTA

SEQ ID NO: 10409 - protein, 580 aa, synthetic construct
MEFSKLTRVAIYIRVSTTMQAENGESLNVQRTQLTTYAQMMLNALPENIVIFEDAGYSGKNMDRPKFQDMMSQIRAGKFSHLLVWKIDRISRNLLDFSMMYKELKELGVTFVSKNEQFDTSTAMGEAMLKIILVFAELERNMTSERVTHTMIAMAQSGRWNGGRVPFGYTYRTEGEKKEKQIFEIDKGEAALVQEIFDLYEQERSIVREAKILNDRNAISRYGHEWSPVTVHLVLRNIFYVGDYRYNALREGDRSKPKPESEWIIVKDHHPAIISREQFARVQAILKANKRYRKDMAPASSRERIHIFGGLLFCGNCGKPLNNSVSNKKADGWQYSNYPCPTRRRSSNKCTGKSTSDPVVGEFVFNYILNMLNAQKGFKDIQTPAQLQDQLLFGDAFHNVVSIDSDGLNSFFNLLSSGNISGAIYGKDVAVSKPKTAKVDPELVRLRKEKKRLERALDRLLNTYIMSDRPISENEYVRKRTDLETLLSDVNDKLGIAQSEEVQMALTDSEFLTKASQFIIGQKLSNRLYINYKNLAQSVDPSVLKTFIVSVIDNIVIYNGKVKSIVFRNGLAATFEYSSI

SEQ ID NO: 10410 - protein, 519 aa, synthetic construct
MKKVTKIAETASSKVKLKKIRVAAYCRVSTDSDAQLESLEAQKTHYENYITSRDDWEFAGLYYDEGITGTKKDKRPELLRLIDDCKAGKVDFVITKSISRFSRNTTDCLELVRKLLALHIPIYFEKENINTGSMESELFLAILSSMAEGESVSISENSKWSIQKRFESGTYKVSYPPYGYDWDGEQMVINPEQAAVVKEIFAALLSGKGTHAIADDLNRRGIPTKRNGRWTATTIRGMLSNEKYVGDCLFQKTYSDSRFVRHNNHGEQTQYMVKDHHEAIISREDFEAAHAFIHQRATEKGVVKGSDKYQNRYTFSGKIICGECGDTFKRRIHSCTGYKYTAWCCSTHIKDKDKCHMLFVKDDDLKQAFVTMMNKLVYAHRIILKPYVDALKNTSSDDSLRRIQEIQTLLAQNTEKRETLTKLMTQGIIDPILFNKETNELLSQADSFRDEINALKNAVSGDVTKVTAATALLHFTEKGGILQEFDDDLFKEYVNRIIVRSRNEVRFELKCGLALRERM

SEQ ID NO: 10411 - protein, 624 aa, synthetic construct
MIFDWDKVDSNTIIPMVFYGRVSTEHEAQLEAFKNQLQWYEDQLKMHPNWKLVEPIETYLDKGITGTQAKKRPGFLHMINDAKSGKFAMVVTRDVCRFARNTVDTLAYARQLKEIGIQIYFVFDNIKTIQDNDGEYRLTIMANNAQEESRRISERAKAGQYISRANGVLYGTGNILGYKRIRRKSDPDKKNAIGDKSVPTFEVVPEQAETVRLIFEMYAEGYGLKRIKNYLEQNGYKTATGKTKWFESSLSRILGNPMYIGKQYQCQTEVLDFLSHRVKKNSKEDYVLIEGDFEPIISEELFQKVQEIRASKVVKAGFTGKSHGVRQSKDKWILKLECGCGSGFQRYKWRTNASTGEEIGGYACRHRVIDGSTEFRKSKGMPIDDTCSLPSIPEWKLDYMALEIFKKIWGNQADTIFEVYRLISQNYHIEQVKTRESPEYLEKQIQKCQSRLVALVDLYTDGDISLEVYRSKRDEYTSRMETLKAQLKEITANSGDTQEELIKERLIAIKQLLDDMALCNKEKSPNELINNFVDKIVVRSQTEFEWYININGNAEKYIAENCPKIHNEPYRDRAEKTKKLRDSSYYNIFRLHIGFDEVRAFKKRFGKFIRQSQWKDTDVVVYMR

SEQ ID NO: 10412 - protein, 507 aa, synthetic construct
MKKYDAIYGRQSVDRVDSISIESQIEYCQYEIRGGAYKVFQDKGYSGKNTDRPQFQAMMEAIRRGEISRVVVYKLDRISRSILDFATMMAEFQEYGVEFVSCTEKFDTSTPMGRAMLNICIVFAQLERETIQMRVMDAYLSRSRKGFYMGGRIPYGYKLEPYLIDGKRTSHYVINPAEADVVKLIFSMYAEPQSSYGDIVRYLIEHGIENARTKDGGWDRCRIADMVKNPIYVKADLDVYRFYKDQGTVLHNSPEDYIGTNGCYLYSDKNSGRKSVHLEGQHVVLAPHEGIVPSHIWLKARLKCLNNKQVARPLKASNTWLAGKIKCGKCGYALTIRKCKLKTRTIRYFICSRRMQTNRCEGVGGIEADTFENLVLSEMIEHLKQFETLSSPHTLQENPKIHDINVKIEQITEEIDKLLDKVANADGVLMDYINKRITELDAQANVYRQQLSELSPLENQEKCNVAELRDYMQHWNELSYDDKRAVVDQLIVTIKATENSCEIIWKI

SEQ ID NO: 10413 - protein, 572 aa, synthetic construct
MASRIAEKLAAKKAAIYIRVSTHWQVDKDSLKVQRRELIAYVTLVLGITDYVVFEDPGYSAKNTDRPEYQAMMDRIRTGEFTHLVVWKIDRISRNLIDFATMHDELQSLGVTFVSKNEQFDTSSAIGEAMMRIILIFAELERKTTAERVTAVMLSRASDGQWNGGRVPFGYSWSKETKTFSIVPEEAKAIRRMAELYEQYQSLLYVAKYLNDAGIVTKTGGQWTPTTVRTILTNPWYIGQYVYNVHSDGKGIEKRDSDEWITVENHHEPILSEDVFYRMKFLLTRNKRGGVPSHKTYVRKNIHVFAGLLRCGQCGSNMTANLDRRRANGFRPSQYACGSRRRKGTSCTNKYISDTTLGPFVLNYVANIIRASKNSSETTTPEVLERKLLRGEAFEDVASVSTDALGQLLDAFRSAGDAVEYRPQIAFSGDDNSIREIDTLRARRRKLDNALARLNALYLYDDEAMPEKDFVMQRGQITKQLEEVNARIEELQNQESSEELGDDFIGKASYYIMANKLIEDRYIDYEKYIRAIDPSIPRSFLQQIIDHIVVNDGRVISITFKNGSTHTFTYKT

SEQ ID NO: 10414 - protein, 573 aa, synthetic construct
MPQALNAVIYARYSSHSQQEQSIEGQLRDCYAYAQREGLHVVGEYIDRAISGKTDERPDFQRMIADASKKQFQRVIVWKLDRFARNRYDSAHYKAKLKKYGVKVVSATENISDEPEGIILEGLLESMAEYYSANLSKHVRRGQRESIINGTYLGGVPPIGYKVENKRLVIDERTAPTIRYMFEQYAKGVPKREIIAELNARGIRNKKGKPLTLTSMQAALRNEKYIGIYRYSGQEVTGGCETLIDEATFRKVQERLDKVKHAPAAAKAKIDYLLQGKAFCGYCGSRMVGESGRGKMGNTYHYYACGKRKKEHTCAKKNEKKDFIEWYVVEQTVEYVLTPDRMDYIAAALVAQYEKDFGDNRIKDYEKQLERINGEIRALVDTLAVCPPSARQPIFDKMELLDVQKTDLEIDIAKLRVAARVQLTEEQIKVWLKQFCKGDLDDMEFRERIIDVFINSVYLYDDKTVIYYNIEGGKQVSYMEMLDSTEEPPFADDPQGFSGVRISNDTPRHQSLENSMFSRLFLLLGHHLFWGKQFKWCPWCPALWCPAHSTSYTLYKKDVYCGAPMVPGTAKKL

SEQ ID NO: 10415 - protein, 581 aa, synthetic construct
MAYAMKVPAASADDRIVAIYVRVSTGYQVDKDSLPFQKKELKAYCKHILHVDMSRVEIFEDAGRSGKNTKRPAYERMMQKVRAGLVSHVLVYKIDRISRNLVDFSLMYDDFKYNRVTFVSLNEQFDTSSAIGEAVLKIILVFAELERKLTSERVKDIMIGRANEGKWNGARVPYGWDWDSSAGWPVHSKKEAPFGRAMYEMYLEVKSTGKIRDYNNAHKIPTKRGGEWTSKTVGDFLRNPMNKGDYRYNYRESARGRKKPINEVVYLEGVFDPLIDPEIWEKVNKIMDSNRDKRNTGGLHPVEKNCNVFAGLIQCGSCGSGYLVGKKDKRRKNGFTPSMYYCGAKTRAIHCQNLNVSDVKIGPFVINYISAMVRVSNERRKIKAPEDLEEMLLSDKAVFADIMGLSSDSLNNTFELLTGKSATGGALWRADLVDQKGVAADPAEIESLKDQIRKYERAKERLEDAYYFSDDGMSEKEYLEKKNRFDSGRVAAENKLKELTETHIASGVDESAFVKSASAFLLTHKIRAGSHIVYSDLAGMVEEESIKEFFNLVLDHITVKDRRVTEIVFANGLSHKFIYRD

SEQ ID NO: 10416 - protein, 501 aa, synthetic construct
MNTVIYARYSAGPRQTDQSIDGQLRVCTEFCKQRGLTVVDTYCDRHISGRTDERPEFQRLIADAKAHKFEAVVVYKTDRFARNKYDSAIYKRELRRNGIQIFYAAEAIPEGPEGIILESLMEGLAEYYSAELAQKIKRGLNESALKCQSLGSGRPLGYTVDEQKHFQIDPESSQAVKTIFEMYIKGESNAAICDYLNARGLRTSQGNLFNKNSINRIIKNRKYIGEYRYNDIVVEGGMPAIISKETFCLAQAEMERRRTHRAPVSPKAEYLLAGKLFCGHCKGPMQGVSGTGKSGNKWYYYYCANTRGKERACDKKQVSRDRLEKAVVDFTVRYILQEDVLEELSKKVYAAQERQNNTASEIAFYEKKLAENKKAIANILRAIESGAMTQALPARLQELENEQTVIQGELSYLKGVRLAFTEDQILFALLQHLDPRPGESEQDYHRRIITDFVSEVYLYDDRMLIYFNISSADGKLKRADLSAIESGVFDTGLISSTRKRL

SEQ ID NO: 10417 - protein, 523 aa, synthetic construct
MAKSVTTIPATLSRFTAAPINSTKKRRVAAYARVSTDNEEQLTSYEAQVDYYTNYIQGRDDWEFAGVYTDEGITGTNTKKREGFKSMVADALAGKIDLIITKSVSRFARNTVDSLTTIRSLKEHNVECYFEKENIWTFDGKGELLLTIMSSLAQEESRSISENCTWGQRKRFADGKVTVPFNRFLGYDMGPDHNLVVNPEQAKLVKRIYGMFLQGQSPFQIARTLTEEGIPSPGGKDHWNPSNIKSILTNEKYKGDALLQKTFTVDFLTKKKKANEGEIPQYYVKDNHEAIIDPETFEMVQTLMATRKKGRNRKSSVSIFSSKVKCGDCGSWYGPKVWHSNDAYRKVIWQCNHKFDGEKCATPTLTEDEIKELFLRAANQVIDQKEQFIAIYDQVLSRSLDTTALESELSDLEAEINIAAELIEDCIKENAHVALDQAEYQKRYDGLVSRFDKANARHTEVTDLIAERMARKHQIESYLKELRSREPLTEFRETDWLAMVDYIAVHSKNDIRVTFKDGTEIKA

SEQ ID NO: 10418 - protein, 590 aa, synthetic construct
MKTVEKIERKLPVLKTRKRVAAYARVSMESERMQHSLSAQVSYYSALIQKNPEWEYAGVFADYGISGTGTKKREEFNRMLAECEAGSIDIILTKSIQRFARNTVDLLNTVRHLKDLGIEVRFEKENINSLSGDGELMLSILASFAQEESRSISENVKWGTIKRFKQGIPNGKFSIFGYEWQDDKLVIIPEEAEIIRWMYAEYMKGASRIEIGRALMDRGIYTRQGKPWVDSNVKVILTNITYTGNMLFQKEYCDDPITKHRRKNYGELPQYFVEDTHEAIIPMDEWQAVQDEFKRRRDLGPFGNKSLKLSAFSTKITCGCCGKHYRHSGKRNTAGEVYYIWTCQTKSQKGVSACPSKNIPEKMLQNTTAEVLGLAEFDEDAFSQQVKEVIVIGDDTLSFRFYDGHEVTTKWQSTAKTDWWTDERRKLWGERHKRKDTNPNKHLFYEFTGFIKCGCCGANYRCQSGKRKDGTPTRSWYCTGPKDQCHNPGIRDETMKRLVADVLGLGEFDEAAMDAQIENATILDHTVTFHFWDGHTESRDFLDKRHGTPWTEERREKARESMKAAWTDERREAMSERIKKIRSEKKWPNP

SEQ ID NO: 10419 - protein, 464 aa, synthetic construct
MARSVTVIPARNRQRETGRRAVQEKKIRVAAYCRVSTDQEDQLHSFEAQVDYYTKYINDHENYEMAGIYADEGISGTNTKKREQFKRMIADCEGGKIDLVITKSISRFARNTQDCLAYSRKLKNLGIGIIFEKENINTLDSTGELLFTILSSLAQDESRNISENCKWGIRTKFKNGEMHLNTFKFLGYDKDENGKLVINKEQAKTVRRIYRDFLIGINPAQIAKELTEEKVPGCLGQTKWYPSTVIGILKQEKHMGDALLQKTYTADFLTKRQVRNNGEIAQVYVKDSHKGIIDKQTWNAVQEEFDRREKFMEAHGTDRYSYGADCMPFCEKVFCGECKSLFTRHSWRSRGIVQWQCKNHRKDGKVACTNAYVDNADLENGFVKAFNRLVTDRDKHMERWQQMKSDGTPLEKIRAGQMMEAVGNEPLTRFVPEIAQLVLCEVTVLGAKKYEFFFLEGSRVKVSV

SEQ ID NO: 10420 - protein, 498 aa, synthetic construct
MEIQIREGNNRQKRKLKVCAYCRVSTDADEQENSLENQIRHYETVIKANPSYEYAGVYSDFAISGFKEKRPGLQKMLADAQKGKIDLILTKSVSRFARNTAIVLEATRKLKELNVGVFFELQNINTLSGEGELMLTILAAFAQAESESGSAGAKMVYQRKYEAGIPVQYLERSFGYTKDERGVYIADESEAVWVRKIYEMAADGYTPAAIKRYLNENGVKTVGGTKWIDSTVFRLIENEIYKGDYIMHKHFVNEERKLVRNRGEVDAWYIEDDHEAIVSPELWQKAQDAIEAKRDYLAEGSVIEDFTEENYPYMNRIFCAKCGHPLYRRIYSNGNRLNWGCSGTKRHGKSFCEGINIPDGVLRKAWHFDGNMYIDEKPSVKGTKEFTYLKESSWKRRHKKKVPEAIPENTEEAYPYRKNIFCGLCGSRLVRHVNPKSHKVIWICNGAKRKGVAFCRGTRIPDSVIRGWGEIKKDIYIQRKDDKNGKKRYSYTSKKPTA

SEQ ID NO: 10421 - protein, 465 aa, synthetic construct
MKGNAGDTIVKKIDLSPELVRVALYIRVSGEEQKIKGLSLEAQQERLEAYARERGWVIVGIYIDAAKTARKNIHKRTDFQRMMDSVKRDEVDILLFCRLDRWFRSVADYYKIMEVLEAHNCDWKTTDEEYDTTTANGRLYINVKLSIAQNEADIDGERIDVVFDSKIAHGTVVSGSAPFGFRVNEEKRLEVVPEDAAIVQDAFNYFETSISQRATVRYIRETYGVNWCDATFRRMLKEKLYTGVYDRGGRFNDHFCPAIISKQQFDRVQALLERNARSVPSGKVYIFTSILTCAECGHKLVGYKSSDYYYYRCNQHFQRGRCSHNHSAREDVVEAWLFDHLGEELERCQLEWDVEAAKKKASVARTDKAALKRKLTKLKELYVNDLIDIEDYKKDYQIYVSALNQIPEPAQEAPPDFAAVRRLLDNSFRTIYDTLTREEKRTLWRSVIKEIRIDNDQNITGVVFG

SEQ ID NO: 10422 - protein, 547 aa, synthetic construct
MGKRVCCLYRVSTLKQVEKDDIPMQKQRCHEFAAQMGWDIVREFSEKGVSGFKVSAKQRDAIQEIQREAALNTFDILLVFMFDRLGRRDDETPFIVEWFVNNGIEVWSAEEGQQRFDNHVDKLLNYIRYWQASGESIKTSIRTKTRLGQIVMEGRFRGGYAPYGYQLVKKGRMGKKNRELFDIEVNPMEAAAVRRIFELADQYGYGGRKTSTTLKEEGFINLRTSEPFHYSTIQNILINIAYTGVLRSGESVSEIFPELQIITPEQFQRVQKGREQRSADYLAKCAAAYGTETITLKDGSEAEASRPIRSYPRKNTGSALLSGNVYCGHCGGRIFASTARKTHHPTDGGTGRVAIYKCYNRTQHKGNCDGPTTYRAEKVDAVVSKLIRDILQKAGAVSEYDIVQNQIGATASDLQQQIRQAKLELSKKHIEQGRWEGLMLDSLDGKCPFTPEQVKSRLDSVKEAMTSLTASIESLETRLADSDRLTQELKEQHQQLLSWAEMFDNATPAERKLIASHLIRAVTLTRGYGIQIDFNISEAQYLNGMEL

SEQ ID NO: 10423 - protein, 580 aa, synthetic construct
MEFSKLTRVAIYIRVSTTMQAENGESLNVQRTQLTTYAQMMLNALPENIVIFEDAGYSGKNMDRPKFQDMMSQIRAGKFSHLLVWKIDRISRNLLDFSMMYKELKELGVTFVSKNEQFDTSTAMGEAMLKIILVFAELERNMTSERVTHTMIAMAQSGRWNGGRVPFGYTYRTEGEKKEKQIFEIDKGEAALVQEIFDLYEQERSIVREAKILNDRNAISRYGHEWSPVTVHLVLRNIFYVGDYRYNALREGDRSKPKPESEWIIVKDHHPAIISREQFARVQAILKANKRYRKDMAPASSRERIHIFGGLLFCGNCGKPLNNSVSNKKADGWQYSNSPCPTRRRSSNKCTGKSTSDPVVGEFVFNYILNMLNAQKGFKDIQTPAQLQDQLLFGDAFHNVVSIDSDGLNSFFNLLSSGNISGAIYGKDVAVSKPKTAKVDPELVRLRKEKKRLERALDRLLNTYIMSDRPISENEYVRKRTDLETLLSDVNDKLGIAQSEEVQMALTDSEFLTKASQFIIGQKLSNRLYINYKNLAQSVDPSVLKTFIVSVIDNIVIYNGKVKSIVFRNGLAATFEYSSI

SEQ ID NO: 10424 - protein, 539 aa, synthetic construct
MRNYPPLSSAEEYCIYLRKSRVDIEAEAHGEGETLARHEKLLLEVARRDKLNVTQIYREVVSGETIAARPVIQHVLQEVEQGRWAGVLVVEVERLARGDTIDQGIMAQTFKYSGTKIVTPLKVYDPNNEYDEEYFEFGLFMSRREYKTINRRLQRGRLASAKEGKWVSGIAPYGYEKVRVPNDKGWTLRPVEAEADIVRFIFRLYTSGEEGESGEVKKVGTYSLALRLDKMGVTPPGGAPCWSSTTIQSILENPVYIGKIRWNVHKTKKRIINNAIRVEHYTAPAEEQVFVDGLHPAIVDEAVFLAAQDIISQKGPPPVQAANTVSNPLAGLLVCGKCGRSIVLRPSAYGGMLMCPNRACDNVGSKYAIVEERLLQALSQWLDDYRLEWSDRPPSEEQSLIDLKGKSIRKAQAEVETLQKQLERTHDLLEQGVYDTETFLSRSRSITERINAANENIATLSAELVEDEARAASRKNIIPKVEKLLEVYSALPSAQAKNEMLKEVIEKAEYTKLQRSGRNGPFDNFDLLLYPKLPPSIVE

SEQ ID NO: 10425 - protein, 580 aa, synthetic construct
MYNMSPYSLSRSFRDKPCRAVIYGRASTEHEAQVKALQNQMQWYDDVARFHPQWNVISRYIDQGITGTQVYKRDAFMQMMEDAKQHKFDLIVTREVCRFARNTVDALVCVRQLAAMGIEVYFVNDNIWTLDGDGELRLTIMATMAQEESRKISERSLSGQRVSREKGVLYGNGNIFGYTRNKLTKQFEIDPDQAETVKMIFDLYDSGMGETLVAKELTRLGRKNGVGKVKWDAGKVSKIIKRKNYLGYTVYCQSYSNNYLEQKRIKRDESEFVYVKGGFPQIISEEQYERCNAIRRSRTKRLTDEKGRTRSFGVQQAQNVWGRKMRCRCGSPMLRHRWRTNSAGKPIYGYECKRHHDTPRIRLQNEQGNPTPICEIKPVGQSKLELMASKIFERVWGDQREIVLQTCKMLDACYKPDADRRADLMKAKDNSIQLLQQQLDDLVVVRARGEIEQDKFLQRTIEIQQQMEALRQSKAQIASEDYNPGRLDMEAIEAALCEAVEMHDGLVSEDFIDLFVSQVTPLSDSRFAWCLDFSPQPTVAFLNLAGQRKYTTCSMDSKLHFGSFADGEGHTIPFPGSLRR

SEQ ID NO: 10426 - protein, 458 aa, synthetic construct
MGEKLKNTALRVALYIRVSGKEQAIKGLSLEAQREDLEAYAREHGWIIAGVYTDAAKTARKRLGKRTNFLRMLEDVKLGKIDLILFTRLDRWFRSVRDYYKVMDVLEAHGCGWLTTQEQYDTTTAGGRLYINLRLSIAQNEADLCGERIGVVFDSKVRHGTVVSGKCPFGYRVNEDKRLEIVPEQAAIVLDAFQHYRATVSQRGTIKYIRDTYGVNWCDATFRRMLHEPLYTGRYDRNGRVKDDFCPAIVPRDLYDTVQTLTANNAKSSPTGRVYIFTSILVCDECRHKLAGRVSGKNGHIVYYRCNQHFQRGRCSNKKEVREELVETWLFNHLGEELEKYRLDWQVKQEQKKRAAVTVDRAAIRRKLARLKDLYLNELIDIEEYRRDYEKYTAMLEEQPPAPAENPPDFQAIEALLSQDFRAIYDTLEREQKRTLWRSVIKEIRVNSAQEVTGISFL

SEQ ID NO: 10427 - protein, 545 aa, synthetic construct
MPTSKNTARKYAAGGSSDNSCGVEPLRAVIYARYSSSGQREESIEGQLRDCYEFAKKHGIIVIGEYIDKAMTGRVDRRPDFQRMMKDSEKGRFNCVLLWKMDRFARNRYDSAMYKYKLKKNGIRIFYAKETIPDGPEGIILESVMEGYAEYYSENLAQNVKRGNYDSALELKTLGKTCLGLKTGPDGRYMIDQAEAAIVRRIFEEYAEGERAKDIYERLNSEGYRTSRGGKFNKNSLRRILSNKKYIGVYEYEDIYVENGIPAIITDRDLFERVQKMLKINHDAPARGKAQNFLLTTKLFCGLCGSPMIGDGGTSHTGKAYAYYSCTKRKRGRSCKKESVPKDWIEDLVVGELVKIVHNDELIEQIADRVMEYQKREKDQSGLHALEIRQKENEKAISNMLAAIEAGIITPSTKTRLMELEADRADIEKGIAHELLAEPEFERDQIIYFLERFRSGDINDEAYRIMLVDTFLNSVYLYDDDHLVLVMNYSGENCKVDLKLVEGAVSGDGCKGSAFAPSSALNGAKPNPVYFFKKVFAVVVNFARR

SEQ ID NO: 10428 - protein, 419 aa, synthetic construct
MKIKHIPPKKRMLGRKLRVCAYARVSGGDDEQEDSLENQIKRYEKLISSNAGWEFAGIYHDLNRTGYKANRKGFQALMADARAGKFDMVMVKSISRFARNTFDLLAATRELKSMNIAVYFELQDINTLTAEGELMLTVLGAFAQGLSDDASMGAKKLYRYKFSRLEHTAASERTFGFCGGSDGQIHVSPEEAEIVRLIFDLAEKGVWPSKIKEYLNTQGISSPSGGKWDDTGVARVLHNVMYKGDIILQKTVKDGRRNSRPNEGQADQWYIKENHEAIVSREQWDNVQRILEERRIHLDTPLPAAPDVPRSSRTKYPLTNMLYCPYCGEKLIHKWSNRVREYWACKTNIKVSAAACKGIWLPGSVANTWEGISEPVVVVPYRDEYGMQHFTAFPKDEFDVFSEDPERWALSTLERSERT

SEQ ID NO: 10429 - protein, 469 aa, synthetic construct
MAREVVHIPARRELTNRAAVKNKKVRLAAYCRVSTKNEDQLLSFENQKAFFEDYVVRHPQYELVGIYPDKGITGTNTKHREEFLRMIEDCKAGKIDMVVTKSISRFARNTEDFLRYARMLKEMGIGILFDKEGLNTLDGTTELLFTILSSLAQDESRSISENSQWGIRFLFSSEGRLHLNAKRFLGYDKDANGKLVINPEQAEIVKRIYREFMDGNGPGVIASRLRAEGIPGVMGECRWAASTIKGILRNEKYNGDALLQKTYTVDFLSKKMAKNEGQVEQTWVKDDHEAIIPKEYWNVVQLELDRREQFLRDYGLRTNGRYTDEQPFSTKVFCGNCNRLYRRRTLPRLNTSYSIVWMCTSYYEKKGVPGCGNFKLKETDLHRAFMEALNAVLTDKETYMPIWQKAIADSDLDPLRAFRSKQMMELAEYAPYTAFEAALVNKTLQRCEVNCNRTIDFFFLDGSSKQVQL

SEQ ID NO: 10430 - protein, 583 aa, synthetic construct
MTAVIYARYSTDSQREESIEGQIRECTAYAEKNGFTVVKHYIDRAISAKTDNRPQFQQMIKDSERGIFDVIIVWKLDRFARNRYDSARYKTQLKRNGVKLVSATEVISAGPEGIILESVLEGYAEYYSADLSEKVVRGMTENALKGIYNGGTIPFGYMIDETRHYQPDPLLAPYVEQTFQKYADGATMTDLRDWLKAHNIKNSMGGEMSYNTIQRMLSNRRYIGELRLRDVVQPNAIPVLVSEELFNKVQEKLAKNKKAPARHKAEESYLLTTKLYCGKCGALMFGESGVSHTGKMYTYYKCAAAKKKKTCDKKAVRKQWLEDLVVNETMKLVEDDASMNAIIAKVMELQNQESTDLPIYEKQLKETEVGITNMLNAIQMGILTSSTKERLEALEEQRKELQARIAEERLAKPKMKEEFVRFWLLRFRKLDMTQPEQRQALVDTFINAIYLYDDKVLITFNYKEGTETVAFGEAVKAEKSSDMSARGAPNIERKIVRFGVLFCYVTPKNRGLHGQCTVFARSAFSWESSAWAGIARFRPPVRAQSVSYGLLPPLLWENSPICRSSCRVHLRRCSGRCKSCRAS

SEQ ID NO: 10431 - protein, 520 aa, synthetic construct
MVKCMKSVPERAVPAVIYARYSSSHQREESIEGQVRECREYADREGYSVLQVYADRAITGRTDERPEFQRMLADASKGVFQAILIYKYDRFSRNRYSFAVWETKLKKHGVKVISARENVAEGAAGIVLKSVLQGMAEWYSVDLSEKVTRGMKENALKAKWTSGTVPFGYTRDAEQRLIIDPERGEYVRQIFEKVLAGEKYVDIASWLNMLGVRTARGAAWNKSSFTWMLKNVVYTGLFRWKDIEIKNAVPPIVSKELFEAVQRKLKTYGRRGINVQKSDKYLLTPNIICGECGGPMHGMSGKSRSGELYYYYACANKRAKRTSCSISPLNRDELEQAVYNCAREVLLHEENIKLIAEQAEAVAEAQVDNELAEMKAERSRVKKSIANYAAAIANGATSGTIIELINAAEAKAAALDEAIAERELVAAPPKISKEAIEYFLRNIAAAPDDKMKEKVISTMVNSVVVERVPDEGTKKDSDEKYSITVRFNFTDTPQLSALQSFDVREKSKMVTPAGLEPATF

SEQ ID NO: 10432 - protein, 569 aa, synthetic construct
MKQSNNKKSRDVTAFLYERLSRDDNLEGESYSIGNQKKLLAKVAKEKGYTNLVHFLDDGISGVTMDRPGFVEMIRQLEQGKAAAVFVKDLSRLGRNYIEVGRLTEEFFPDHDIRLVAVSDNIDTAEGENELAPIRNLFNEWYARDISKKRRISNKIKGNAGEPMGQPPYGYIKDPNDPKHWIVDDEAAQVVRRVYSMTLEGFGTEQIAAQLEKDDVLTPRAYWLTKGIKRPGKGKQQPPTKWNSSTITKILSLQEYCGDILNFKTYSKSYKNKKRIDNDRENWVVFQDVHEAIIERAVYEQVQQKRGKIRKRRTNNGEHNMFSGLLVCADCGSNLHFHFNQGNPEIKYFNCSNYKGNRGTCTSTHYVRVDFLEEVVLGEIRRLTKFASLYEDEFVKAVIGHSQQAEQTDRKLKEKELRTLLARDEELDGLFERIYEDNVSGKLSDDRFAKMSRRYEDEQKELSEKIKKLRSEIEKQSSRSMTTDMFIGLVRKYTRARKLTPRMLNELIEKIEVFNAEKIDGVWEQRLRIHYNCVGTIEIPTVLPLPIPEVSVNTRKGVVVNYAPCELAV

SEQ ID NO: 10433 - protein, 558 aa, synthetic construct
MSKRESKSSQKCLAAEQIGVIYARYSSHNQKEESIEQQIAECSDFAAKNGIRIVGIYADKAVSGRSDRRPNFQRMMRDAEKRHFQIVVAYKSNRIARNMLNALQYEARLDLFGIKTLYAKEEFGNTAAGRFALRTMMNVNQFYSENMGEDIKRGMVDNANECKVNGMLPLGYVKSKEGKYAVAPGEAAVVREIFDSFLKDVPVAEIARSLNQRGIRTKLGREWNKNSFHIMLKNDNYIGVYRHSGVVVEDGIPPILEKEVFAAVQEKLANKKKTAGRRSANGEYLLTGKLFCGYCGSYMIGVSGTGENGTVHNYYQCQKRHAENRCEKKNVRRDFIEKLIARLTQDYILQDETIEWIADSTMSFQAVARRQSGITQLERDLADNRKIAKNIMAAIEQGIITETTKARLLEVEGTIRDLERSLSIAKAASQPIERERVVFSLEQMREGNVGSKEHQKKLIDTFVKSVTLWDDRIQIDYYHTPGKHKFSYSLEELTSKVENESNAADVRAESLEVHHCRRELHRFTTAFYWQLHLCGYMARSKRRRNQIPASFLHVLMGV

SEQ ID NO: 10434 - protein, 482 aa, synthetic construct
MDAIYARQSIDKKGSLSIEGQIELCRKFTVDDALVFSDKGFSGKNTKRPAFGELMEAVEAGRVKKIVVYRLDRFSRSLADFSQIWELLRKNDVEFLSVNEQFDTSSPMGRAMLNIVMTFAQLERETTAERVRDNYHHRVSLGAWPGGPAPYGYALSKVELDGRKVSSLIADENAKTVLHIFEEYVRSETSLRALAKTLTERGIHGPKREAWDNVTLSRILRNPVYVQADEAVYCYYLAQGIQIRQMPEVFDGVHGCLLIGKRDRSRGKYTKKDEQMLSLSTHEGIIPSSLWLRVQDKLSGQMQLPRANAGKYSWLTGLLKCSKCGYAVKVNYIKSEQRCKLVCSGRSNFGNCDESIDVDLRELETHIANELQHILDACPAELPSVSEDHAQAKAVLEIEQKIDRLVNALAESSDVAVVYISKMIEKLHAEREQLLHTAPHSASQIRRLDFSRSAFDEKKLIAAEFIERIELDGNHVNIIWKV

SEQ ID NO: 10435 - protein, 448 aa, synthetic construct
MERIIQKVTPPAQKKVQKLKRVAAYARVSSGREAPLHSLSAQISQYSGMIQKTPGWQYAGVYADEALSGTKDSRGEFQRLLADCKAGKIDMVITKSVSRFARNTVTTLKTIRELRLIGVDVFFEEQNIHTMGEDGELLLTLLAAYAEEEARSVSENQKWRIKSNYEQGLPWSVTMYGYKQVNGRLEIVPEEAEIIRLAADLYLEGYGRYKLEDAFAAANIKGRHGASMSGNSIIDLLCNEKIVGDMLLQKTFVVDPISKELRKNNGEKPQYFVEGCHEGILDRETYEKVLAERARRAAAYKPRSGSYARNRFPFSSKVRCGKCGKCFTRKTVAPKTPYEKQVWICRTFNQKGKALCDAKQIPEDILKRLTAEAMGLPEFDEAAFAAKVEEIQVPENGTLVFAFYDGHTVTKTWNNPSRRHSWNPENRQRARELALRKAAERRLAQCQQ

SEQ ID NO: 10436 - protein, 537 aa, synthetic construct
MPAVTAARVTVIPAKKDRLPINVLSNETRKLRVAAYARVSTNNEEQLTSYEAQVDYYTRYIQSKDEWEFVEVYTDEGISATNTKKRDGFNRMVADALAGKIDLIITKSISRFARNTVDTLTTVRRLKEKGIEVFFEKENIRTLDGKGELLITIMSSLAQEESRSISENVTWGQRKRFADGKVSLPYRRFLGYEKGPEGLPVIVEDEAVTVRLIYRLFLYGKSPSAIAAYLTDEGIPTPGGKKVWRAKVVESILTNEKYKGDALLQKKFTVDFLTKKQKVNEGEVPQYYVTNSHPAIIEPEIFELVQYELKTRKTDGRFTSCQHPFSGRIICGECGGVYGSKVWHSNTENRSLVWQCNEKYRGQHCSTPHLTEDEIKAAFLAAFNSILGSRAEIMEAYNEVIEALTDTVDLDAEQETLQNESEVVLGLIQKIISENAQTAMDQEEYNRRYNAYSERFEAARKRLAEIAELRQERNAKKTRIRLFMESMNLHQELVQSFDEELWYSTVDYVTVYEEKRMVFTFRDGRQVEILAELWRAA

SEQ ID NO: 10437 - protein, 441 aa, synthetic construct
MIADALAGKIDLIVTKSVSRFARNTVDSLVTIRKLKENGVECYFEKEGIYTFDGKGELLITIMSSLAQEESRSISENITWGQRKSFSDGKVHLPYKRFLGYEKGEDGRPAVVESEAMIVRLIYRLFLEGKTPMGICKYLEELGIPSPGGKQTWSKTTIASILQNEKYKGDALLQKKFTVDFLEKKMKPNEGEVPQYYVAGSHPAIIEPDEWDHVQAEIARRKALGKAYSGKSVLSAKLVCEDCGAFFGSKVWHSTDRYRRTIWQCNGKFANEERCHTPVIDTETVQRLYIKAYNLMMQDRVKIIREIEEWRQHLTDFETLDAEIERQLEETQVVAELVKAAVRENASTAQSQEAYLKKYEALTVRYETAAAELERLQALRTSRSQTDRKMALYIRTLKKQPEVMHEWDDTIWTVMIEKAIVHKDGQITFVFQNGTEIKVGA

SEQ ID NO: 10438 - protein, 449 aa, synthetic construct
MSAPVVRAAGYIRVSTAEQALRGLSLEAQEAEIRRWAAEHHVRLENIYVDKGITARKQLHRRAAFMQMMQAVDAGQIDLILVMRLDRWFRNVYDYHKMMNEHLIPHGVNWCAVKEDYDTTTTNGRLMINLRLSIAEQECDTDADRIRDVQQNMVAKGRWPFGAAPLGYRIEEKRLVKDPHTQPQVEFFFRHMLANGSLRGALFAMNDRFGTSYEYRRAQDLSRKSVYYGVYGENQSFCPAYITLEEHQRIRSLAEKNVRVWSSPTAWPHLFSGLLICDDCHRRLNAQTIRRPSGVYTTYRCSHSTDNHGCANNRSISEKVIEEYLLNYVREDLAQYIVQMEVSQKKAAALPDNTAKIRAKQERVKTLFINNFIDLEEYKRRIQELEGQIIRRPPSEKTKDVSKLKRLLEDGALKMYPTLTREEKRAFWRGFLKELHIYRGTIQGPPIFL

SEQ ID NO: 10439 - protein, 525 aa, synthetic construct
MARAVTVIPPTIQPITHLARNAVVRRRVAAYARVSTSSEEQLTSYEAQVDYYTRFIQSKPEWEFVRVYTDEGISAVNTKKREGFNQMVRDALDGKIDLIVTKSVSRFARNTVDSLVTVRKLKEKGVEVYFEKENIYTLDSKGELLITIMSSLAQEESRSISENVTWGQRKRFADGKVSLPYSHFLGYRKGDNGLPEIVPEEAETVRWIYSLFLSGKTTGSIAGLLTREGIPTPAGKKKWVASTVESILKNEKYKGDALLQKAFTVDFLTKKQKKNEGEVPQYYVENSHPAIIDPAEWKLVQRELERRKAIGRSYSGNSIFSSRLVCGDCGGYFGSKVWHSTDKYRRTIWRCNSKFTGEEKCQTPHLTEEEIKARFLEAFNALVTDKERLLDECRTMQAALTDTGSLDSEIAALLSEMEVVAELTKRCIEENSTTAQDQVTYLERYNSLAERYETAKAKLEKLQAAKAQREAKAEDIGGFMFELAEYGEPITEFDDRLWLTVIDTVTVHRDGRLAFKFQTGHEITV

SEQ ID NO: 10440 - protein, 438 aa, synthetic construct
MARTIQQISFPAPMRPGLKRVAAYARVSSGKDAMLHSLSAQVSYYSALIQKHTGWLYCGVYADEAFTGTKDSRDGFQSLLAECRAGNIDMVITKSISRFARNTVTLLETVRELKALGVDVYFEEQSIHTMSADGELMITILASYAQEESRSASENQKWRIRRGFERGELVNLRFLFGYKIEKGRVAVDPEKAAVVREVFRRALEGESLTSLAIDLNRRGVTGALGGKWNSVRIREMLSNEKYLGNALLQKQYRNNHLEKKEIPNRGELPQYYAEGTHEAIIDQATFDAAQELLAGITENSPVKRPRRRSAFTSMITCTVCGRNYKRCTGGKRHFWNCPTVVQTDLPSCGTSQIPEKLLYDLAAQVLGLSQFDEDVFLERVKGIDALPDKTLVFHFKDGSTAERHWEHISRAKSWTPEMKEIARQRALAQRRGEKWQEP

SEQ ID NO: 10441 - protein, 537 aa, synthetic construct
MTETATGGTRVRMIPATVRRYAAARPLTERLRVAAYARVSTDDEEQQTSYEAQVDYYTKKIRENPEWIFVEVYADEGITGTSTKRRKNFNRMIDDAMAGRIDRIITKSVSRFARNTVDTLTTVRKLKEKGVGVTFEKENIDTLDSKGELFITIMSSLAQEESRSISENVTWGWRKRIADGKVSVAYSHFLGYEKGPDGNMQIVEEEAKVVREIYAMFLDGKTPSGIAAALTKRSVPTPAGKATWQASTVKSILSNEKYRGDALLQKTFTVDFLTKKAKVNEGEAPQYYVENSHPAIVSAEVFELVQAELAKRRQRGGRTSAVTPFSGRLVCGECGAYFGSKVWHSTDAYRSVIYRCNRKYEKKGAPCPSPHVREEELRTAFEKALGMLLERRSEIFSAYETIIANLTDTAQLDRELERAQARLDEAHQEMERMARRNAEIAQDQEEYNRAFDALSAKCSALKEKIGALKAQLAAKAGGRRKLEAFMAQLREKEALAPFDERTFAAMVDHIVVYPGEAKGAKKLIFRFRDGTEIPVDL

SEQ ID NO: 10442 - protein, 445 aa, synthetic construct
MKKEQKQQPMQIRQVKPDAPTPRRKRVAAYCRVSTGKDAMLHSLSRQISHYSAYIQRQPGWEYAGVYADEAYTGTKGDRPRFRQMLSDCRAGKIDLILTKSISRFARNTVTMLETVRELKALGIDVYFEEQNIHSMSGDGELMLTILASFAQEESKSVSDNCKWRIRKDFSEGKPMNLMLLYGYRSVDGQIVIDEDEAAVVRDVFRAYLDGAGSSRIAARLRETNTPRRLGGTWTGNHVVEMLTNEKYTGDALLQKTFVEDHLTKKQRRNTGQLDQYYAENTHPAIIDRETFERAQAILAQRREMINIRKPTTVRYPLSGKVVCGNCGAHYNRRTRSTGRNSIPRYTWQCVTYSSKGKRYCPASQIPEETLIALTCEVLDVEKLTEEAVDALDEIRVTGKGCLRFALRDGRVEERQWAWESRAKAWTPEMRRKASEQMKRRWRHD

SEQ ID NO: 10443 - protein, 580 aa, synthetic construct
MINSYFPKTVLNLGYNFSYKNNRIAKCSIIFVKQDVYCYNSHMKKAVLYARVSSNRQEKDGFSIPAQRKFLHEYANNNDIEIVEEFVVAESAKNAGRAEFNRMVNYLQEHEDERVILVEKVDRLYRNLLDYGTIDNISGLEVHFVKDNEILSETSRSSIKFMVGVRVLMAKQYVDNLAEESAKGLNERIEQGYALYPPLGYMYGNDGTHKHAIIKDPERAEYAIRAFNLFVYENLSASSINNILYEEGLRNPDGNKYAVSTIQRIFRNPMYVGDYVYQGKLYPNGKHEPLISRELFQLAQDKLNNANSTTRQHDIEFPYIGLFRCGICGCSYTAERKVKPSGKEYIYYHCTGKGKIKTCKKNSYISEDKIDKFIIEILKDLENIPQALIDKVKDSLKEIHDLKNNYSNTTQDNIYKRIKEIDKMIQNGYKRMLKSSDSAENELWNQAYRELKTEKEQLLEKLACINKADDEFYKQSDLILKFCKNASKIFMEATPSEKRTICEIIGSNFIASGKNIDITLYPVFYDIIEMNRLGRSQNGRFELSKSQSGTKKEPLNKALNLNGGNDEARTRDLMRDRHAL

SEQ ID NO: 10444 - protein, 523 aa, synthetic construct
MAQKVRIIPPTINRATSAPVSEVRKRRVAGYARVSTEQEEQQSSYEAQVSYYTDYIKGRDDWEFVRVYTDDGISATSTLHREGFQAMVADALAGRIDLIVTKSVSRFARNTVDSLTTIRKLKEHGTEVYFEKENIWTLDSKGELLLTIMSSLAQEESRSISENVRWGQRKKFNDGRFSLNYKHFLGYDKGPDGGLVINEEQARIVRRIFGEFLSGMSPYAIARGLTADGIPSPAGKPRWNDLTIRRVLSNETYKGDKLLQKTYSNDFLDKTRRKNHGEVPQVYVEGCHEAIIPEATFNRVQREIERRKGCHNSGGTIFSTKIFCVDCGQMYGPKVWHSNDPAHRRVIWQCNSKFDGQRCKTPHLTENEIKEAFVIALNRLLTIREEVIRNLREIQTALADTTAQETEVNRLTGELEVIAELLQQMIDQNARTAQDQSDYQRRYDELASRYQETDAALQAARGALSQAQSRNRQIADFIAEVDSLPGAVTEFSADYWGHLVEKVTVVRKKEMTFTFSCGVEIRV

SEQ ID NO: 10445 - protein, 464 aa, synthetic construct
MARSVTVIPARSQKVQTGHKAVQEKKIRVAAYCRASTDQEDQLHSFEAQVEYYTKYINEHENYEMAGIYADEGISGTNTKKREQFKKMIADCEGGKIDLVITKSISRFARNTQDCLAYSRKLKNLGIGIIFEKENINTLDSTGELLFTILSSLAQDESRNISENCKWGIRTKFKNGEMHLNTFKFLGYDKDENGKLVINKEQAKTVRRIYRDFLIGINPAQIAKELTEEKVPGCLGQTKWYPSTVIGILKQEKHMGDALLQKTYTADFLTKRQVRNNGEIAQVYVKDSHKGIIDKQTWNAVQEEFDRREKFMESHGTDRYSYGADCMPFCEKVFCGECKSLFTRHSWRSRGIVQWQCKNHRKDGKVACTNAYVDNADLEKGFVKAFNRLVMDRDKHMERWQQMKSDGTPLEKIRAGQMMEAVENEPLTRFVPEITQLVLCEVTVLGAKKYEFFFLEGSRVKVSV

SEQ ID NO: 10446 - protein, 668 aa, synthetic construct
MAYAKVKKHLKIWTKKKAALYVRVSTRYQVDKDSLPFQRKKLKEYCKFLGLEDYVIFEDDGYSAKNTERPHFQEMMSRVRSGEFSHLIVWKVDRVSRNLLDFAAMYQELKDHKVTFISMNEQFDTSTAIGEAMLKIILIFAELERNMTSERVTGIMLDRAEQGLWNGARMPVGYRWNNETKFPEPDPEEVKIVQLIFDKYEEWKSSIKIARYLNNNNFKSKRGGQWTSKLIHDIIRNPFYIGTYRYNLRESGRGPLKPESEWIVRENNHPAIIDKAQFDRCNKIMDQNGSSRDTSDLRARKYVHTFSGHLVCGKCGANMIASKDRARANGWRPSMYRCAQRSRMLDCDNSRTINESYIGPFIFNYIANLARVQKNFKNITTVEKLERELLKGETFDGVAGILPEGLNLTFQALSFRQVGNGTYIPDIDFLGDSDGASDHNQIELLKSEIEKSKNAVTRLTDVYLFDPDSMTKEEFATKKKELAKKIEGMERQLADLLDDSGNDDLADMSFIKKASAFLVAQRIVSKSFVDYVGMAQELDNEILKDFIDQIVDQIVVLDGRVQSITFINGLKHEFRYATPAELPVCQKCGGHIGSTCGCRTRTFDFSGKRYQRIKVGDPRDMLHGKKNPVCPECFAQEGRWHHWNCKVETCPICGGRLAECEHGPNGKN

SEQ ID NO: 10447 - protein, 549 aa, synthetic construct
MSRKKQVNQKITALYCRISLEDGGDNESMSISNQKLMLRDFAEKNGMFQYEYYVDDGYTGRNFNRPSFQRMIADIQAGKIGCVITKDLSRLGRNYIEAGSYIEIFFPKHNVRYIAITDGVDSLTRQEMDITPFKNILNDMYSRDISKKVLAGRMTRSRQGKFCGGQPPLGLMRDPEDKGHLIRDPETAPVIRKIYDMALDGWGCMRIAKQLMDDKVPITRVKSNTECDVNYYSWGSARISYILRNPFYKGAHLVCRTHQKGIRSNTYDIIPREDWEIIEDCHEAIISPEEWEQVQEIIDRRPTIMKGNSCPFYNLFHGIIYCATCGKSMQVRYEKVGRTGKNRFTGEQREPIDKAYYICQTYNRLGKNACTSHKIEARDLYNLVLNDIQELAKTALKDADAFYQRLSSRMERRYLLDASQTQKECQRLESRNREIDEMFLNLYTDKAKGILTEQRFMKLTATLEQEQEANQNRPQDLMLMMRHSDEQENEVRTFIKEIRRYAAIEELDEAVLNRLIGKILVGEVEKIDGQKVQEVRIVYNFVGEIPVEG

SEQ ID NO: 10448 - protein, 438 aa, synthetic construct
MSTDQEEQLLSYENQVNYYTNYISENPLYEYAGTYADEGISGTNTKKRDEFNRMIADCRAGKIDMIITKSISRFARNTLDCLNYVRELKDLGIGIIFEKENINTLDAKGEVLLTILSSLAQDESRSISENCTWGIRRRFETGKHKMSTKRFLGYDTDETGKLVINRTQEPIVIRLYQEFLDGKTTDYIKRIFEREGVKNWDGGTKWQSTTLMSMLENEKYKGDALLQKSYTVDFLTKKRTQNKGEIQMFYVEDDHDAIISKRIWECVQLEIKRRKKYLEEHGTNSYSRRPESNPFASKIICGDCNKVFARKGWRSSTGVDRKVWQCSERYTVKGVMGCANRHVEEETLIKAYLMAWNVLVENREDFMEQWTEQLQSENLLEGYRAEKFIEYTDGAEPLTEMDTDFMLKTLDHIKVFEDGTLLVVFLDGTEIECKNEEE

SEQ ID NO: 10449 - protein, 497 aa, synthetic construct
MIPTNFMYLRKSRAEEGQSTEEVLAKHRAALEELADRLGLPVDGVYEEVASGEKLYARPEMLKLLERIRAGEVEAVLCMDIDRLGRGGMADQGTILDAFRESGTLIITPEKTYDLTNDVDIEMTEFKAFFARAEWRAIRKRMRRGLMQTIEAGGYTANAPYGYRRCRIGKLPSLEVIPEEARFVRYIYERYLAGIGAQTIAQELNAMGSIPRRGAEWNRNTVRHVLRNPTFAGKVAWNRVKHYRPGAHGKDKHHVVYTPEGEWLMVDGVHEAIIPWDTWLEAQERRKQRYIPPSNTGQRANPFAGIIRCSKCGNNMQRMGTNKGEPYLLCTTKGCTAGAKFEYVEERMVELLYDELARLRLLIDSGAAPNIDALEAALAAAQREQERVQARIPRLYEFLEDGTYDRATFRSRLEAAEKELAELANKRADLERHIDERRRSDPRKAAAALENLVQLYPTMSPADKNSALKALGVEVTYTKGKKTKPRDFTLELQLRDF

SEQ ID NO: 10450 - protein, 520 aa, synthetic construct
MKRITKIEENMLLEKRKLRVAAYCRVSTARDEQLVSLAAQKAHYESYIKSNDEWEFAGLYYDEGISGTKKEKRDGLLAMVAACERGTIDFVITKSISRLARNTTDCLELVRKLLDLKIYIYFEKENLNTGSMESELMLSILSSLAESESVSISENEKWGIKRRFQNGTFIISYPPYGYDNVDGEMVIVSEQAEIVKQIFADTLAGKSTHEIANELNERGVATKKGGHWTPSTVNAIIGNEKYTGDVLFQKTYTDSSFNRHQNRGELDQYLMQDHHEAIISKEEFELANAVLKQRGREKGNGYDTGRYQNRYGFSGRICCGECGGKYKRRMHYKPSGQYVAWACANHLKDKESCSQKYITDDALKLAFVTMMNKLVFGHQMVLRPLLQSLQGLNAQSRLLKIEELETAIEKNREQKQVLTNLMASGYLEPALFNKESNELAAEAEALRQEKDGLMRSVNGDMVKIEELQRLLRFTSKGTMMTEFDDEIFLSFVERITVLSRKEVVFEWKCGLSLKERLVEP

SEQ ID NO: 10451 - protein, 523 aa, synthetic construct
MELSRNITVIPARRRVGNTAAAEQRPKLKVAAYCRVSTDSEEQASSYEVQVAHYTQFIQKNPEWELAGIYADDGITGTNTKKREEFNRMIQGCMDGKIDMIITKSISRFARNTLDCLKYIRELKEKNIPVFFEKENINTMDSKGEVLLTIMASLAQQESQSLSQNIKLGLQYRFQNGEVRVNHSRFLGYTKDEEGNLVIEPAEAEVVKRIYREYLEGASLLQIGRGLEADGILTGAGKAKWRPETLKKILQNEKYIGDALLQKTYTVDFLNKKRVQNKGIVPQYYVENSHEPIIPRDLYMQVQEEMIRRANLHSGANRKKRVYSSKYALSSIVYCSKCGEIYRRIAWNNRGKHSTVWRCCTRVEHGPTACDAPTIQESDLQAVVVQAINLALGSRESMMITLQENVESVIRQEDETSSEGIETKLLELQKELLKLANSKKDYNSVADEIDRLRELKQNALVESAEREGLKQRIREMREFLEQQSTEVTEYDELLVRRLIEKVTVYDGQFEVEFKSGAKVDVGR

SEQ ID NO: 10452 - protein, 517 aa, synthetic construct
MRKITRLEPKKTALPTRKKVAAYARVSKDTERLLHSASAQVSYYSELIQKNPEWEYAGVYVDCGITGTLTYKRDEFKRMLTDCEAGKIDIILTKSISRFARNTVDLLETVRHLKSIGVEVRFEKEGIHSFSEDGELMLSLLASFAQEESRSISENVKWGIHKRFKSGEIGVANKHILGYQYDEEQKKYIIIPEEAESVRWMFQMYIDGVTLRDIADNLNNAGICTILGNDFQEASVRQLIFNEVYAGDIRRQKCYVSDPIKKDKVPNRGELPQYYMADCHEAIIDRDTYAKVKAEMERRASLLNPTYCFTKKIRCGTCGAQFTRKKGKVRGKTYVHWICRSKKETGMTCSSVNFSEEELKNICADVLETDSFDEEIFESRVKDIIVLKNGDIEFHLVGGETRRWKNLHLNPPRHKVTLTDAFQGKIRCAKCGNTYQRVNSANKWVYWYCMGKKKKGMTCDNINYTDFQLRQITAHILGLEDFDEQVFSEQIEGITVLEDGNLEYHFYKGRTERWQRV

SEQ ID NO: 10453 - protein, 526 aa, synthetic construct
MPKVTMIPATINPLTHLPSVAARKRRVAGYARVSTDSDEQFTSYEAQVDYYTKFIQSKPEWEFVKVYTDEGISGTNTKRREGFKEMITDALDGKIDLIVTKSVSRFARNTVDSLVTIRKLKENGVECYFEKEGIYTFDGKGELLITIMSSLAQEESRSISENITWGQRKSFSDGKVHLPYKRFLGYEKGEDGRPAVVESEARVVKLIYGLFLEGKTQAGICKYLEELGIPSPGGKAKWSKTTVTSILQNEKYKGDALLQKKFTVDFLEKKMKPNEGEVPQYYVTGSHPAIIEPDEWEQVQAEFARRKTLGKAYSGKSVLSAKLVCEDCGAFFGPKVWHSTDQYRRTIWQCNGKFASEEHCHTPALDTETIQRLFIKAYNLMMQDRVPIIKEIEAWRQKLMDFGTLDADIERQLEETQVVAELVKAAVKENASTAQSQEAYLKKYEALTERYEKAAAELERLQSLRTSRSQQDKKMALYIRTLKKQPEVMHDWNDTIWTVMIERAIVHRNGEVTFAFANGTEIKVGA

SEQ ID NO: 10454 - protein, 497 aa, synthetic construct
MRYAIYLRKSRADDTSEPLEVTLQRHRQMLEKYMQQHDIAVQDEDVFEEVVSGDSLYARPQMLRLLEVVEAGTYTGVLCVDIQRLGRGSMQDQGMILDAFKWSDTKIITPTRTYDLSNDMDETYTEFESFMGRQEYKMIKKRLRRGLNATIENGGYIANAPYGYDKTKIGKTPSLKINEAEAKFIHMIFDLYQSGMGTATIATTIDRLGAKPRRGEHFARSTILKILKNDVYRGKIVWNRKTCVRPGQRGNEHHLTIYNAPEKWTVVDGLHPAIIDNEQFEAVQRILAGHYHPPANTGKRINPLAGLVLCGNCGRPLQRIAIQSAGGPLLGCQVPGCIVSSKLEYVEQAVLLEIQKEFDKLCANAEQKQQESQIDYAAMAKSIDAEISTAHQQLGRLYDLVEQGVYTIEVFNERRGALLSRISALEDERKNLVPPQQLDLEKMRANIEAVFDAYPTADFNTKNQLLKSIIDKIVYNKQKGVQPKGFTLEVFLHCLYL

SEQ ID NO: 10455 - protein, 408 aa, synthetic construct
MRVKVIKPQKALELNKKKVCGYVRVSTDSLEQEDSLDNQTVYFRDFIQSNPDWEFAGIYSDQGISGFKEERPGFQRMIADARAGKIDLIVVKSVSRFARNTETVLKFSRELKSMGIGIFFQLQNINTLSGAGELMLTILAAFAQAESEGASDNARLTYRRKFAAGIPASGLERTFGFTADDDGVIRIVESEAETVRLIFSLAHKGLWTGKIKAYLNKNGITNCTGKTWNDTGVSRILHNPAYKGDLVLQKTYLDSKRVRHKNEGQMDQWYITDNHPAIVSPEVWDEVQEILQSRSEHLLREKKKPAVPHNSHSTYPLSGKLFCPLCGEKLLHKWSKDEREYWACKTNIKVGASTCKGVWLPASVANSWGEITEPTTVVCYTDEYGMKHFTGYPKEEYEASPDCPYSIL

SEQ ID NO: 10456 - protein, 468 aa, synthetic construct
MAREIVHIPARQELRNRSVSIGQLIRVAAYCRVSTEQDEQLNSFENQVAYYTEFITRNPQYELAGIYADEGISGTSTKRRDEFNRMIRDCEAGKIDLIITKSISRFARNTQDCLNYSRKLKELGIGVIFEKENINTMDSTGELLFTILSSLAQDESRSISENCQWGIRSLFKQGVLHLNANRFYGYDKDEDGKLVINPEQAKIVRWIFQSYMDGTNPDVIARKLNERGVPGCSGEPKWSTSTIMGILQNEKHMGDAILQKTFTADFLTKKMVKNEGQLEQYYVKDDHEAIIDKDFWTAVQMEIARRREYLQRHGLRTMGRYTDTQPFSNKVFCGTCGNVFWRRTLSRLNGPVKVWMCGKRYQEKGKKGCSSGTIYEKDLHRAFLMAWNAILENREDFLTGWQEQLRGEDVLAAFRAKQFIQLTKNTELLREIDFSLVSRTLDHCVIEPLGVINFYFLDGTELGIEIED

SEQ ID NO: 10457 - protein, 558 aa, synthetic construct
MKKKPIEPEMQDAVIYTRYSSHNQRDCSIEQQVADCEIFARQNNLRVVKVYADRHLSGTTDNRPQFQQMLKDASHGHWAYVICWKIDRFARNRYDSATYKFRLKKAGVRVLYAKESIPDGPEGILLESVLEGSAEYYSAALAQNIRRGMKFNAEQCKVNSGSIPFGYCKGPDGRFAVHEANAEVVREIFRKAAAGMPFVDIANDLNSRGLKTSRGGRWNKGSFRLLMNEAYIGVYHFSDTRIEGGMPALIDQGTFWAANERLKANSSVRGRHQDGGDYLLTGKLKCAHCGSYMIGFSGTGKSGELHYYYGCQKRRRERACKKANVPREWIERVVVKAALDYVLRPEVMEWIADAVMEYQEREAASAQLAALTAELEENRKATDNVMKAIEAGIITSTTKQRLLDLEAKAQDLKRAIELEKLSHVRLERDQILFWLDRFRGGSLQSQEFRRKVIDAFVSVVYLFDDHLRIAFNYSGGSNAEADFDLVMDAEAAAGELSKKFAQGHVASTKCESGEPRHDLLRGYVLRPDHAALRAVKNKHSAFIAGCLFFARIVLTECL

SEQ ID NO: 10458 - protein, 522 aa, synthetic construct
MELLNVCIYLRKSRADREAEARGEGETLARHERILLDLAKKRGYNVGAIYKEIVSGETISARPVMQQVLREVESGMWDGVLVVEVERLARGDTIDQGVVARAFRYSETLIITPLKTYDPNNEYDEEYFEFGLFMSRREYKTIRRRLTAGRESSAKEGKYCGSKPPYGYSRVKLVSEKGWTLQPVPDQAEIVKLIFNLYVHGVAGERIGMAKICRKLNDSGIKTMDGGLWTVPRVQAILRNPVYAGMIRWNSRKAVKHIQDGQITISRPFAKDYILVEGRHPAIVSKELFQQAQDIVNQNPARPLNSLHVLRNPLAGIIRCGKCGYVMTRKAPSGRQVDLLRCPYSSCNNVSSKLPLVEKALLDGIQELVDGYKLNSNFSDQEYSLSISEKEEMIRGKLKEIDVLRKKKEKQYDLLEQGIYSTEEFLERSRATAAELSACDAVILSLKQEIEHEQELQFQRSSFIPKCEDLLANYWTWDTSTKNRFLRELIEKAVYTKNAKNTWKNGDDISFTLDIYPKIQQK

SEQ ID NO: 10459 - protein, 443 aa, synthetic construct
MHGKSLEAQKEYLASYAKDHGMIPVGIYADEGKTARKELKKRKAIHALLEDVKAGKIDVILFWRLDRWFRNMSDFYKVQDILDEYGVYWISASEPGLNMETRDGRLQLNVVLSIGQNEVDTTSERIKFVNEASIRQGKVIFGDGNMPRGYKVGIVDGKKCMVKNPDEEEMVNAFFDYFERHQSKQGTLRYMQRNYDPAFSYSVLRTMLSSEFYKGTYRGIPYCPAYLSEERWMRLQKINGRNVKHTPSGRVYLFSGLIRCPVCSQKLSGTGCSSIINRKTKEKRTYCYYRCNHALLDRICTNTHRVSQNLIEAYLLDNLEAEYEKFHIRCEKIEEQKAKIRETRTPEKLQKELERLNLLFQKGRIEWDYYSEEYDRIENELHELQQIRPEPQRDFSYLEELLQADFRTIYAQLTPENRRSFWRSTIKEIHLNEDFSVKSVDFL

SEQ ID NO: 10460 - protein, 510 aa, synthetic construct
MSYFIYARKSRKDAELEALGIDVLERHITTLLELAKTLSLPIGAIYREVVSGDSIDARPVMTQVLSEVEACMWDGALVMDVDRLARGDTIDQGRVQRAFFYSNTRIVTPNKTYDPANEYDNEYFEFSLFMSRREYATIKRRMQRGRERSSSDGYYVGNVAPYGWERVIAPDGKHYSLAPHQTEAPVLDLMYDLCGNKQYGYQKACTYMSNMGILARSGKPFTPSTLKGIISNPANIGKVRWGHRKTVRAVKDGRVVKSRPKATDYILSDAAWAPRISPDLFKRANQPKGCFSAPVRNDRPIQNLFAGLVRCSQCDRLMVRKKAQTKTPYDMLICQYTECSTVGIRIDELEEALLGWLKDYIAKYEFSDTHEEDTAAIAAKELIVTNFEAEHQTLLKQRESLFDFLEQGIYTKEIFIERSNALEQRIRDCMNNITAAREDLHTTIARQANRKNFVPKCKNLLSEWDSLTVSEKNSALRQLIDRIVLTKTKRNKKNQKNSEFTIDVYPKVPK

SEQ ID NO: 10461 - protein, 540 aa, synthetic construct
MATATRRVVRTMPQMFIDVADNQSERLQVAAYARVSTEKEEQEDSFERQVEHYKQLIYSKPEWQFVDVYADPGISGTRAEKRPDFLRMIEDCRAGKIQKVLVKSISRFARNTVDALQYIRELKDLGISVYFESENIDTLTPGGEVLLTILAAMAEQESRTISSNIKWAWQRKFQKGDVILNTGLMLGYRKIGKDDEGHDVYEINEEEAEIVRRIYREFIAGYSITQIAKRLQADGVKTKLGKENWRHNVIESILTNEKYTGNALLGKTFKPDVLTKYRQKNDGKKAPIYYVEGSHPAIIEKGLFDLAQQEMQRRRDANDNKVGGGRYSSRYPFSGMLVCGICGSKLRRQVRTMGSGKRTASWGCCNRINNGRAACDSHHVNEDVLEATYLTAMRRLVDSAEEVVEVVRDGTELALEPENKAAMERIDEETIQLQEAALALHKAKQRMEIGAVEYASRVKEYSERMKELEAERNELQGTAAKYAEVRMWLDTFIEQTMQSDTLTTVDGTTMKMLVDRIHVRNDGIVVEFKCGVAIEQEYVK

SEQ ID NO: 10462 - protein, 562 aa, synthetic construct
MAEQIIQLAKNVLKRVVCLYRVSTVGQVEKDDIPMQKQFCREFVQRQPGWEIVKEFSEKGVSGFKVSAKKRDAVQEIQRMALQGEFDILLVFMFDRLGRKDDETPFVVEWFVKNGIEVWSAMEGQQRFDNHVDKLLNYIRYWQASGESIKTSVRVKTRISQLTEEGYYTGGIVPYGYRLENRGRTNKRNKEVCDLAIDLDEAEVVKVIFQKYVYEGYGSQRISRYLAEQGFRNRKGGNIPTTSINRIIKNPLYIGILCNGESRSENVLTELQIIDVDLFERAQKMIESRAKPRTAHKEIPLNTRGQSLLVGNVYCGHCGKRLTLATSGRKYQKKDGTVVNKTYARYQCSYNIQHPGGCDGPSGYGAAKLDDLVDQIIRIQFERIKTAPPQALIREQQSREVEIAKAKLNLLNGQYQQKQRDYQDLRAETLRVIRGDSRLNVDFLNSIVDETITQLKELGQQVKEAEAELRELVSGAEQVKEEYAQLMNWAELYDKCTFEAKKMIAAQFVKAVHVKRDYEIDVEFNVAFDEFQSIYLEPEKEDEKKRGASTLLALGENVGQAV

SEQ ID NO: 10463 - protein, 520 aa, synthetic construct
MKNKSVTMIPATKRVGTLKVDAEEKPKLRVAAYCRVSTDSDEQASSYEVQVEHYANFINSNSEWELAGIYADDGISGTSTKNREEFNRLIQDCMENKVDRIITKSISRFARNTLDCLKYIRQLKEKNIPVFFEKENIDTMDSKGEIMLTIMASLAQQESQSLSQNVKLGLQYRYQQGEITINHNRFLGYTKDEDGHLIIEPTEAEVVKRIFKEYLEGSSLIQIARNLEADRILTGAGNKNWAGTTVKGILVNEKYMGDALLAKTHTVDFLTKKRVKNNGIVPQYYVENSHEPIIPKTLFLQVQEEITRRANLKNKKGSITYSSKYALSGITYCGKCGEIYRRLHWNNRGKKSIVWRCYSRLDKTKDCDARTILEEDLKQVVVDGINRVFGDEGRIKDILNSNIQKILKVDNTLEVETIDSQLQVLQQQLLEQSSKNQDVTDIGEQIIQLKEQKQNILIGKAVNDNSKQRMDEMLEFIDQNGHGGLEYDEVLVRRLVEQVQVYDEHITIKFKSGIEIEVQN

SEQ ID NO: 10464 - protein, 519 aa, synthetic construct
MKKITKIDTVVQVKPAKLKVAAYARVSTSSEEQLLSLENQKLHYEQRILANSNWEFVEMYFDEGISGTKIDKRNGLKRLLQDCETGKVDFILTKSISRFSRNALDCLEIVRRLIDLNIFIEFEKENINTQTMDGELMLSILSSLAESESRSLSQNTKWGIEKRFQNGTYKIGYPPFGYDWLDGAMVINKEQAVVVKDIFADILKGTSTGDIAEKLNQQGVTTKRRKTWHGTTIRGIIKNEKYIGDALFGKTFTDDSFKRKVNRGDKNQYFMEGHHSAIIDKETFEQAQQMLVQNAKSKNIVQEDDKYQNRYSFSGILKCGECGGTFKRRIQTKNKNEKYVAWACTTHLKDKHSCSMKFIKDEQIKLAFITMMNKLIFSHQILLKPLLADVRSTTYTVDNTQIVVLDDELEKLKKQQDNLVQFVANGYIDRPTFVKEQNQLTKQMDDLENKRKMLTVAISKGFDNLESLEELVKFTKQDQMLTSFEDTHFVIFVDEVVILSRTELVFKLKCGLKLKERLV

SEQ ID NO: 10465 - protein, 505 aa, synthetic construct
MELAFSYARFSTKSQSTGTSLERQLNASRLFCSERGLTLSPKGYHDLGVSGFKQVKRPELEQMLQAIQSGDIPSGSYILIEAIDRLSRKGISHTQDVLKQILQYKVKVAFVGEDAKTLAGQVLDENSLNDLSSVILVALAADLAHKESVRKSKLVKAAKSIIRKKGTEGHKVRGHTMFWIDWSDKKQDFVLNDRVKDVHKIIQLRREGQGPRKIAKTLNELNIPGPRGNPWNHMTVTVVLRSPVLYGAYQTHQIIDGQKVPDVLLENHYPAVITQEEFVTIQADSSKSNKGRPSKANPFSGVLRCECGQAMLFSKRTNLNKDGEPLEYEYHFCLGYAEGRCKNNKRIRDLVPLLVQLMDKLVINQAPKKNLNVELIKQKEQKIEQLNKMLIELDSPPLSVLKTIQTLEAELDILLNTHVEEPVQADVQTLSSITDAQEYNQHLKRLVKKIVVYQKNGPKNLRIKVYKTDGHYQNFLVKDGTVLFKSDTKALKELIDGFNKERRER

SEQ ID NO: 10466 - protein, 518 aa, synthetic construct
MPKAISYIRFSTKIQSVGDSTKRQSKYINDWLKRNPDYYLDESLRFQDLGISGFSGANARSGAFGEFLAAVESGYIEAGSVLLVESLDRVSRQDIDTAGEQLRKILRSGVEVVTLVDNEWYTKESLKDSLSMIKAMLVMERAHEESAMKSTRLRSVWAAKRERAAKGEIMSKRCAAWLKVSEDRSHFEFIPENVKAVQRVFQLRLEGLSHVKIAKQMNDEGFSTLNQFKSVKGGWSQSSVTELLSNRSVIGFKVPSKSMAVKGVSEIPNYYPSIITDEQFYAVQQLKQGSGRKPSSDLPLLTNLFKGVLRCSECGFIMVVAGVSAKRSGIYKCSMKSEGRCNSVGFSRLQTDRALVQGLLYNTNRLALNRDNGSAIGSLQSELEHLQKQRERLIKLAMLADDTESMAKDLKALNSQIKDAEKAVSEVHQREQSSQLETISHLDLTVKKDRIEAQIIIKRIVKEIRLNTAGKKCDVFLHNGLKLLNFPLDRALDGEIFLEVLPVLEADEFDFDTYRMIE

SEQ ID NO: 10467 - protein, 502 aa, synthetic construct
MSETTQIGVIYARYSSDKQRDESIDGQIRECMAYAEREGITITNTYIDRALSAKTDDRPEFRQMILDSNKQAFNYVLVYQLDRFSRNRYDSAIYKAKLRKNGIRVISVKENIKDDPSGIILESVLEGMAEYYSAELSQKVMRGMTDNVLQGKWVGTVVPYGYKLSNNRQLEINEHEANVVRKLFDMYLQRHTLSEMASYMNANGHLTHKGKPFNTNSIKAIISNEKYIGVYSWGSERIENAIPPIIDKNIFEKAQHKRNLRAKKKGNRSELYQLCGKLECGRCGGNYVGSTGTSKTGTLHHYYVCSNRRRKNACQAQNIRRDALDDIVISQTLAILNKPNVVNKIAKYAASSGKNLQSETVAQIDIIDAHIRDLKKSLDNYMTAIANGFISDVLKHRIEATEQELKDQIEIKTNLENTIIPVELTEDHIRFFLLKMAKENPSTLRGRARIIEAFVHHVTIYEDHIEIVFNYKNELSEFHDKTLESSLLNDLVTQKGFEPLAF

SEQ ID NO: 10468 - protein, 416 aa, synthetic construct
MAQVSVVTPVRPLAPKLVNVAAYARVSTNGAEQLASLSAQVSYYSRLIQSTPGWAYAGVFTDEGVTGTSMKSRQGLADLMNAARAGKIDLVLCKSISRLARNTVDLLATVRELKDLGVAVRFERERIDTLSADGELLLTLLASFAQEESRSLSQNVKWAIRNRYKNGGTNSFVVYGYSWADGEFTIIDDEAKIVRLLFANYLDGISPEKTATMLNAGGKRSRGGGRFYGSVFRRMLENERYKGCQMLQKMYRPTIQAPTRALNDGELPRYWVEQALPPIIDEAMFDAVQAEIAHRREVGPAATPSKNTGVFTGRICCGACGKSYQRKTRTYKSGTSYKFWRCWSACTGNGNPCGGHNLRESLLEHACAYMLGTQGFDPVQVGEQIVMIEAFEHQLTFHLADGTMTPVGLTSEGRLA

SEQ ID NO: 10469 - protein, 525 aa, synthetic construct
MSRTVTAIPATKKVRSAAASSGVPARRRVAAYARVSTEMEEQASSYEAQIDYYTTYIRSRNDWQFAGMYCDEGISGTSMKRREGFQTMIDDALAGKIDLILTKSVSRFARNTVDSLTTVRKLKDAGVEVYFEKENIYTFDAKGELLITIMSSLAQEESRSISENVTWGHRKRFADGKVMVPYKSLLGYKKGEDGSLVIDETQAPTVRLIYQLFLDGMAISEIKTELAARKILTPRGKEVWSTSTVRSILSNEKYKGDALLQKTFTTDFLTKKMKVNEGEVPQYYVTGNHEPIIAPRIWDQVQYELTTRHGNISSAKVGLFSTRLKCAQCGSWYGRKTWASNTKYKYTVWQCNHKYAGEHPCSTATVKDEHIKNAFVQALNQLIARQPRQSHLLQIFDSMLDTSRMEEQAAACQTKIVELTEQIEALIAENQQRALDQDAYQNKYTELDTAYRKTLARKTSLEADIAANTAKHAAVTTALDDLAGEPVSEFRPAQWSALIDHAIVDEDTIRFVFRVGEQVSMTLQG

SEQ ID NO: 10470 - protein, 544 aa, synthetic construct
MPDKRKKFKQNDNNLAIAYYRYSSSSQNDASIEEQQELVQLYAAEHGYSILKEYADRAMSGQDDNRPNYKLMLSEVAKLRPAVLIMWKNDRLGRDVLQLTYAKRKIREAGCSIEYVAENAPDVSTSQGKFTEAVMDAFAQMWSDSSRENIERRLRYNAKNALSNGQKILGYRTAADKRYEIDPAKAPVVQRIFHDYVDGKPMQQIADELNAQGITTALDRKFTVNGLRSVLKNDRYTGVYKYADIVIPDGMPVIIETDLFNKAQAMFAMNKRTGAGNRSKHMEGEPRYWLTGKLFCGECGSSMQGVSGTSKTGASHFYYYCKEQRHKRCEKKPVKAAFIEGLVQQLLKELLSDSENLMSLAVDAAAYYKERYVESSYLESLEKELADTQTALKNLVKAIEAGIFSETTQERLQELERRKKALTDAIETEKAKKELSEDEHSIKAYFGKFLYANLDDHEVRDMVLEYFVDKIYLYDDKVILTCRYSDADYEVDWEDFQKAKKVASGKVRPSRTQLHQEYAAGRFYLPAFLLLQFIRHIQQYIRYI

SEQ ID NO: 10471 - protein, 506 aa, synthetic construct
MRSVITYLRFSSAIQGAEGADSTRRQNELFKQWLRKNSDAQVVASFNDEGLSGYKGKHLSGQFGDMLSRIEAGEFPEGTILLVEAIDRIGRLEHLETEALMNRIIAHGIEIHTLQDGLIYTRDALSDDLGISIIQRVKSYIAHQESKQKSFRVSQKWEQRAKLALAGEQRLTRNVPGWIDPETFKLNEHAETVRLIFNLLLSGESLHNIARHLQSNGIKSFSRRKDANGFSVHSVRTILRSEATIGTLPASQRNERPAIPNYYEAAIDASAFNKAQEILDKNRKGRTPASDNPLTINIFKGLFRCQCGASVHPTGTKNKYAGVYRCNNHPDGRCDVPPLKRKPFDKWMIDNFLGMIDVVSDGESERKIAALQHEVETVTARIKKATALLLEMDDITELKAQVKELNQKRTELQTTIDTLKRKTSLSDKGLPQLKDIDLTTKAGRVECQLILSKHLKGLTLGKDLVTVTLQNDTEIIIPTDPLPLNDGTSILEIAEKELLGIDAYQL

SEQ ID NO: 10472 - protein, 580 aa, synthetic construct
MYNMSPYSLSRSFRDKPCRAVIYGRASTEHEAQVKALQNQMQWYDDVARFHPQWNVINRYIDQGITGTQVYKRDAFMRMMEDAKQQKFDLIVTREVCRFARNTVDALVCVRQLAAIGIEVYFVNDNIWTLDGDGELRLTIMATMAQEESRKISERSLAGQRVSREKGVLYGNGNIFGYTRNKLTKQFEIDPDQAETVKMIFDLYDSGMGETLVAKELTRLGRKNGVGKVKWDAGKVSKIIKRKNYLGYTVYCQSYSNNYLEQKRIKRDESEFVYVKGGFPQIISEEQYERCNAIRRSRTKRLTDEKGHTRSFGIQQAQNVWGRKMRCRCGSPMLRHRWRTNNAGKPIYGYECKRHHDTPRIRLQNEQGNPTPICEIKPVGQSKLELMASKIFERVWGDQREIVLQTCKMLDACYKPDADRRADLMKAKDDSIQLLQQQLDDLVVVRARGEIEQDKFLQRTIEIQQQMEALRQSKAQIASEDYNPGRLDMEAIEAALCEAVEMHDGLVSEDFIDLFVSQVTPLSDSRFAWCLDFSPQPTVAFLNLAGQRKYTTCSMDSKLHFGPFADEEGHTIPFPGSLRR

SEQ ID NO: 10473 - protein, 537 aa, synthetic construct
MAKKVLKKITKIEPVSSGSAANAVEVKRVCAYCRVSTNSADQKNSFEAQVDYYTRLIGEKEGWVLAGIYADEGRTGTKLYRRDDFQLMMEDCRQGKIDLILTKSVTRFARNTLDSIKAIRELKALGVAVYFEKERVNTLMEKSEQMITILSSIAQGESENISSNSKWSAVRRFQNGTFIISSPPYGYENNEDGELVIKEKEAKVVRRIFDAYLGGKGSYTIAAELEAAGIPTIRGAKEWQDSVIKGILQNCVYEGDLLLQKSYSTNGVPFTRKTNRGELPQYLITDDHEPILTREEAAAVRQIYEYRREQQCVDDTSVYQNRYAFSSRIVCGECGTNFRRQKIYIGKPYEKIQWCCYQHIKDSKKCSQKAVREDVIQAAFLTLWNRLASNYEEILIPMLAALKAIQGNPEQDREMQEIEQNIQELKRQGYRLGRILTEGSISSAIFIERQNQIEAQLEAHRRRLRQLQGQKAFEWEISQTEYLISVFRNRPAILEAYDEELFLLLVDHITVLPGRRLVFRLKNGLELEENEQEVRRV

SEQ ID NO: 10474 - protein, 536 aa, synthetic construct
MIPPNPENSRSARTQYKRLRVAAYCRVSTQQEQQETSYEAQVSYYTEKINSNPEWILAGIYADDGKSATMIRKRNDFQAMIDDCMAGKIDMVITKSISRFARNTVDSLTNIRKLKAKNIAVFFEKENINTLGDGGEMLITILSSQAQEESRNLSENVHWGYVRQFENGVVYVNHNKFLGYTKDEEGNLIIEPNEAKLVRRIFRMYLEGSSINKIAEILTNEGVKTVTGNTSWHASVISKMLMNEKYMGDALLQKTYTVDFLEKKRAVNKGIVPQYYIEGNHEAIIPRELFYQVQEERARRANVYRPAKKKGTTIRGKYSSKYVLADIMYCKECGQPYRRQVWVNGGTKKPVWRCYSRLKSGTKKCKHSPSLEEKALHEAIMEAVNSVVKDEGEFIDAFRDNVIRILGSYSDNVEPTEYDEKIDALQKQMLALIEDSAKTESADEEFDRAYREIADQIRAFKKKRTELIREKQLAEAYDQRVEGMGQYIQKTNYLKRQFDDELVRRLIKGIKVISEDKLEIQFHSGIVMTQTINNYD

SEQ ID NO: 10475 - protein, 506 aa, synthetic construct
MRSVITYLRYSSAIQGAEGADSTRRQNDLFKQWLKKNGDAQIVASFSDEGLSGYKGKHLTGQFGDMLARIEAGEFPEGTILLVESIDRIGRLEHLETEALMNRILGNGIEIHTLQDGLIYTKDALADDLGISIIQRVKAYIAHQESKQKSFRVSQKWGHRAKLALAGEQRLTKMVPGWIDPETLKLNEHAETVRLIFKLLLDGESLHNIARHLQSNGIRSFSRRKDANGFSVHSVRTILRSETTIGTLPASQRNDRPAIPNYYEAAIDASTFNKAQEILTKNRKGRTPASDNPLSLNLFKGLFKCRCGASVHPTGTKNKYQGVYRCNNHLDGRCDVPPLKRKPFDRWMIDNFLGMIDMGNDGESERKIAALQHEVEIVTSRIKKATALLFEMDDITELKTQVKELNQKRTALQTTIDSMKRKALLTDKKLPQIRDVDLTTKAGRVECQLILSKHLESLTLDEGFVTVKLQNGTKIIIPTDPLPLNDGTSIFEIADKKLLDIDVYRL

SEQ ID NO: 10476 - protein, 508 aa, synthetic construct
MKKAIAYMRFSSPGQMSGDSLNRQRRLITEWLKVNSDYYLDTVTYEDLGLSAFNGKHAQSGAFSEFLDAIEHGYILPGTTLLVESLDRLSREKVGEAIERLKLILNHGIDVITLCDNTVYNIDSLNEPYSLIKAILIAQRANEESEIKSSRVKLSWKKKRQDALESGTIMTASCPRWLSLDDKRTAFIPDPDRVKTIELIFKLRMERRSLNAIAKYLNDHAVKNFSGKESAWGPSVIEKLLANKALIGICVPSYRARGKGISEIAGYYPRVISDDLFYAVQEIRLVPFGISNSSKNPMLINLLRTVMKCEACGNTMIVHAVSGRLHGYYVCPMRRLHRCDRPSIKRDLVDYNIINELLFNCSKIQPVENKKDANETLELKIIELQMKINNLIVTLSVAPEVTAIAEKIRLLDKELRRASVSLKTLKSKGVSSLGDFHAIDLTSKNGRELCRTLAYKIFEKIIINTDNKTCDIYFMNGIVFKHYPLMKVISAQQAISTLKYMVDGEIYF

SEQ ID NO: 10477 - protein, 592 aa, synthetic construct
MIYAKSSVSDLTMKSYLYSRISTLQQVQGFGIARQIQTVTDFLENAVIDARLGYQLDPNDYEILESDIGKSAFKGDNWGSNSNLGRFYEDVINRRITRGVLIVENIDRLTRLSNYDASHKLTTLITSGIDIIEVESVTCFSVRIPDSLSVLAMSISRAHNESKRKSTMGQKTWTNRINQLKNEGKASAKICPRWLSIENDKYVLDEEQAQILLSIHQMFLDGHGNTAIVRRLNDEGKLNNGVLWNTLTLQKVLKDERLTGRGIIGKQRIIHDKDISKEEKDKIIKDKLVYIDNAFPVVVPMELFSRVQSKINSSKHGSKNPKTTKNMRNLFNGLSKCGVCGNQMIVCKNGHGNQFYTCLGRRSEKTCSNVGTNYYSFERLLLKNLKEINWDTIYNGSKSNNANSIDEQRQKIIEVEQSIKAFNNELIGLDDDNLELRIIRKIKKNKEILKSLVTDLNGLMTKEISHVEFEPNLELVHDQGNVKLRQDTNVALRKVIRSIDITRNENLVISFIKYYTDTISHLFIYDIKKNNTISKTYMTDDLVFHFDAGSIDVKTGKVELTGKELKEEDKIAFDIWLETFESAVKEVVKIEQ

SEQ ID NO: 10478 - protein, 627 aa, synthetic construct
MKKIFLYHRVSTEQQVEDGSGMARQAELLQSYIDRTRIVESMDDPVPVVLEDGGLSAFKGHNFLHGQLGRWMEEVRAGMWDGSILVVENIDRFSRQNPFNVMGYLHDLINHSVAIHDVNMNMVISRENSAMLPMVMMQAQRAYDESKFKSNRIRAGWAKKRDNAFNNGTIVTNKRPKWIDIVDNQYVLNAKARIVTEIFRLYQTGIGCPTIAKTLREMGDDWRFDRIWTGEAVHKILRNRRVTGVIFISELIRDYNSTENSIVQKRYEMNVYPPVIGEDEFNLVQQLLSSRRSGKATGGKRITKKRNDDGSVVTDINGYPTYDTIDCGEITKSNIFNAVCRCAKCGSPMYHNIVVSKRTPAKATSPVEQEYRYIRCLNERDGLCDNKSLRYDVIERFIMEHVKGLDFSTIIQENRINPEVELVRLKLEEEREHIREYEHGIKRLRNLGKKVPFDVLLELEDAQERLKALEDKQATFADVHVDLDVLKNVDLDALYDVTNIELRGRVENELSKVLEKVELHRDSKNYVITFKYRRVDVLKHVLMITASKTPVLVSGVCIETLGDTVAYSTPSFDIIVGDGGDLRFQPIDDEPLSIIDYSLLMNYVDGTEGADAVAAWMRHNMNFLFTK

SEQ ID NO: 10479 - protein, 524 aa, synthetic construct
MTKKVTTIPATITKFSQTPINRVTKRRVAAYARVSTEQEEQQTSYEAQIDYYTNYISGREDWEFAGMYSDEGISATNTKKRVGFQTMVTDALDGKIDLIVTKSVSRFARNTVDSLTTVRQLKEKGVEIYFEKENIWTLDSKGELLITIMSSLAQEESRSISENVVWGQRKRFADGKVTVPFKRFLGYDMGEDRNLVVNPEQAKLVKRIYGMFLQGKAPHTIAKILTEEPETLTPAGKQKWNPSTIKSILTNEKYKGDALLQKSYTVDFLTKEKKANEGEIPQYYVKGNHEAIIQPEIFDMVQKQMALRTKGNNRRRSTSIFSSKLICGDCGNFYGSKVWHSNTKYRRTVWRCNHKYGNDEKCQTPHLTEDEIKEIFIKATNQLVDMKDEVISNYDEMKEMLFGTVDLESEQGKLEDELNEVASLIEDCINENARVALDQSEYEKRYNSFVERFDKANGQLEEVKVQITERQARGQQIEIFLKDLEEVGVLEEFEDDLFLALVENIEVGRYKVVVRFKDGTEVEG

SEQ ID NO: 10480 - protein, 644 aa, synthetic construct
MLRPICYERVSSIQQIEGGGGLDDQRSALEGYLDRNSDKFSNDRIFIQDRGVSAFKNSNISSESQLGIFLQDVQNRKYGEGDALIVMSLDRISRRSSWAEDTIRFIVNSGIEVHDISASTVLRKDNPHSKLIMELIQMRSHNESLMKSVRAKAAWDRKIIEAVQNGTVISNKMPMWLKNVDNRYQVIQEKADLIIRCFEWYRDGFSTGEIVKRIADPKWQMVTVSRLVRDRRLLGEHKRYNDEIIHNVYPKVIDDDLFLTANRMMDRVMLEKNKPAEDLLLESDVVQEIFQLYESGLGSGAIVKRLPKGWSTVNVLRVLRDKNVVTQKIIDNLTFERVNQKLSMNGVANRIRKDITIAQDDYITNLFPKILKCGCCGGNIAIHYNHVRTKYVICRNREERKICDAKSIQYIRIEKNILKCVKNVDFQKLMIESTGSETSVLDGLREELSSLRREESSYNDKINERKLAGKRVGIHLNDGLTEVQDRIEEIEKEIISAQTVREIPKFDFDMDEVLDPMNIELRAKVRKQLRLVLKAVKYWMFDKRIFIQLEYFNDVLSHMLVIDNKRGGGEVMYEMSIEEKKGERIYTVHENGYAVFIASVTIGTELWSLALSRTRTIDSVGNYLSLLAREGFEIFVNEDQIDWF

SEQ ID NO: 10481 - protein, 416 aa, synthetic construct
MEICKLPPKPAQLRLTRVAAYVRVSRESERLTHSFSAQVSYYNKLITNTPGWEYAGVYSDYATTGTSTTGRGEFNQMIEQALAGSIDIILTKSISRFARNTVDLLSTVRALKAAGVSVRFERENIDTANAEGEVLLTLLASFAQAESESISANAKWGIRKKYKDGLLHSRHPYGYRYHHGQLDIIEEEAVIVRRVFSEFLEGISPEKTCKQMNQEGLRSRGGGKFSASVTRDWLENPTYIGTAILQQYFSAHAGDNTPTLNRGELDKYIVEDSHPPIIERSVFDAVQAELARRRATGGRGLTPTGGSSALTHRITCTICGRNYHRRTRRLAHSTYKYWWCETATKGKGNPCHAHQLREENLHTIIKRLLGLHAWDDQQVVDRIERIKASPNWLLTIHLSSGNTTMINCRTGEEVTA

SEQ ID NO: 10482 - protein, 502 aa, synthetic construct
MSETTQIGVIYARYSSDKQRDESIDGQIRECMAYAEREGITITNTYIDRALSAKTDDRPEFRQMILDSNKQAFNYVLVYQLDRFSRNRYDSAIYKAKLRKNGIRVISVKENIKDDPSGIILESVLEGMAEYYSAELSQKVMRGMTDNVLQGKWVGTVVPYGYKLSNNRQLEINEHEANVVRKLFDMYLQRHTLSEMASYMNANGHLTHKGKPFNTNSIKAIISNEKYIGVYSWGSERIENAIPPIIDKNIFEKAQHKRNLRAKKKGNRSELYQLCGKLECGRCGGNYVGSTGTSKTGALHHYYVCSNRRRKNACKAQNIRRDALDDIVISQTLAILNKPNVVNKIAKYAASSGKNLQSETVAQIDIIDAHIRDLKKSLDNYMTAIANGFISDVLKHRIEATEQELKDQIEIKTNLENTIIPVELTEDHIRFFLLKMAKENPSTLRGRARIIEAFVHHVSIYEDHIEIVFNYKNELSEFHDKTLESSLLNDLVTQKGFEPLAF

SEQ ID NO: 10483 - protein, 496 aa, synthetic construct
MYGYNLKPCLTRRNTLKRMEQITPPPISASPLVKVAAYARISMETERTPLSLSTQVSYYQQLIHDTPGWTFAGVFADSGISGTTTHRPQFQEMLALARKGAIDLILTKSISRFARNTVDLLETVRELKDLGVEVRFEKENISSTSADGELMLTLLASFAQAESEQISQNVKWRIWKGFEEGKANGFHLYGYTDSADGTDVQIIEEEAAVVRWIFAQYMKKISCEKMAAQLIADGRVPHLADNKLPGEWVRHILKNPHYTGDLLLGRWSTPEGRPGRAVRNTGQLPQYLVENAIPAIIDRDTFVAVQTEITRRRELGARANWSIETVALTSKIKCVSCNCSFVRNVRNPKTQNSISTEHWICTERKKGRKTGCDTCEISDTALKGFIAQVLDIETFDQEVFNERIDHIDVQGKDHYTFHYTDGTSSSHTWRPNLKKSSWTPARKAAWGELVRARWAEAKRLGLDNPRQAPTPPEALAKYRAVAKAEAERLRAERGER

SEQ ID NO: 10484 - protein, 522 aa, synthetic construct
MGKKQKTNGGDAVIYARYSSHNQRDVSIEQQVEACRKHAAELGLTVTATYEDRAISGKTDKRPSFQRMMRDAEQHKFAYVLAWKSNRIGRNMMQALVNESRLVDCGVKVFYAEEDFDDNAAGRFALRSMMNVNQFYIENMAEDVKRGLYDNAKKGLVNGSLPLGYKRGADGKPEIDEPKAAIVREIYTRVAAGELFASIAADLNARGIRTARGREWNKGSFHVLCHNDRYRGIYMYGDIRIPGGMPRIISDELFYDAQEAYGMKKDNRYGRARHGAENYLLTGKLYCGHCGSYMVGISGTSKTGEMHYYYACQKHRLEHTCEKKAIRRDVIENAVARVIMMYCLDDETIDFIVDSTIAYFKQKDHELHIEAMENELAAVQQAISNLMKAIEAGIITPTTRTRLLDLEEQQAKLSGKINTAKAERVEIDRDDLIAGLQLFRTGDIKNKKFLAKLFNTFLLAVYLYDDNRLKIVFSFTGNHNNIEIPLELDNDCPDSESGPYETEVRMSHLECTSRDSNPGPTD

SEQ ID NO: 10485 - protein, 541 aa, synthetic construct
MIENRMMTGNRVDCLYRVSTDKQVDYNDKSQADIPMQRRECHRFCEKMGWTIVHEEQEDGVSGHKVRAENRDKLQIIKERAKQGKFDILLVFMFDRIGRIADETPFVVEWFVKNGIRVWSTQEGEQRFDNHTDKLTNYIRFWQADGESEKTSIRTKTALGQLVEDGGFKGGLAPYGYDLVKSGRFNKRKHEVFELAVNEAEAAVVRIIFDKYVHEGFGAQRIATYLNNLGYRARTGKMWHHASVRGIICNLTYTGVLRSGESRSQTLPHLQIIEQELFEAAQHIRTSRANSAEQERRVPLNARGQSLLAGNVFCGHCGSRLALTTNGKAYPCKEDTHRIVKRVRYICYGKTRKQTECDGQTGYTAHILDGIIDKVVRQIFERMKAIPKSEIVNIRYREKMEERKALLKSAKSDYAKAAAELDTLRAEVIKSLRGESAFPQDLLSSLISDCETKCLEVQHTMEAAQAAYDEGQAMLDALNAQYDDIISWADMYDSASMESKKMIVSCLIRRVEVYRDYRLHIDFNIDFEQFSAGLDISAIAA

SEQ ID NO: 10486 - protein, 513 aa, synthetic construct
MAQGKLISPISKKAYERTKVAAYCRVSSNSADQLNSYAAQIQAYTKLIKSNAAWELVEIFADEGLSGMKAGNRVEFQRMIGMCEHKQIDLIITKSVSRFARNVKEALEYVRKLKLLGIGVQFEKEGIYTLALGDEMLLNTFSAIAQEESKAISQNQRLSIVKRMERGEYVDSNAPYGFRLQDKKLETFDQEADVVRYIFLQYLSGWSTGEIARDLTDKGIRTRLGKEQWRSTKISYILSNERYVGDCRYQKTYRDCIVPFKQSKNRGQEDMFYASGTHNPIIDRETFEKVQALLQNRKERFSKSEQQNIYPLTSRIRCSECGSYYHRRVRNGTIKWVCAKHNTDTHACPSGYYSEERIYDGFITMVNKLRFGEERILDQVIVKLETAATRYKRNNASAGEKSRSIAELNAKLAMLEQLRSKGYLAIEVYQSQARDIQKQISTLKAERRSAFESTIQTMLGEVLKMRSLFNEIEEPLEEFDDKLFLELVKDVEINKQDEMAVTFLGGLKFTELI

SEQ ID NO: 10487 - protein, 543 aa, synthetic construct
MEVKKIPKKTVTLIEPKRSILVNKEKYHQKRVAAYCRVSTDSEEQLTSYVNQKKFYTDMIARNTEWQFAGLYADEGISGTRADKRPEFNNMIKACLAGKIDYIITKSVSRFARNTVDCLDYVRMLRARGIGIFFEEQSIDTLKSDSELYLIIYAGFAQSESESISKNITWSYRKNFEDGKPIFMYKKLLGYKKGEDGKPEIVPREAKIVERIYTMYLSGMTVDVISRQLQSEHIVIPNKAFTFGKNMIMNILKNEKYCGDCILQKTVTVDCISKTRKKNEGEAPMYIVENSHPAIISREMFNRAQEELSKRKSRSPQSQKMALTASGKYSKYALTDVLICAECGSRYKRVTWTSLGQKRIVWRCVNRLDNGKKYCQHSPTLSESALQEAIVRALNKFNAEDTSTYLALMKATIGEAIGANGGSDEIDLLERRIDALNNRMLKIVSESVENGIDAEENEDEFKRISDQIKQLNRRIEAIRKTEGSNEEWKKRLNRIQAAINQREAHCNTYDDAIVRQMIECVKAHEGGRLTVIFGGGYEIEEQI

SEQ ID NO: 10488 - protein, 519 aa, synthetic construct
MKKVTKIDKIQPAKNAEDKLRVAAYCRVSTATDAQLESLEAQKSHYENYINSRDDWCFAGVYYDEGITGTKASKRPELMRLLADCKAKKIDFVITKSISRFSRNTMDCLEIVRTLLNLNIPVYFEKENINTSSMESELFLSVLSTMAEGESASISSNNRWSIKKRFENGTYRLSSAPYGYKLESGGLQVVSEQADIVKRIFRELLSGKGMYSIAKELNAEQVPTQKGGRWTSTSVHNILTNEKYTGDCIFQKTYADSNFNRHINNGELNRYLIQNHHEAIISHEDFKAAVALIEQRAAEKGIESGSYKYQQRYAFSEKIICGECGNTFRRRIHKGKYNSYVAWVCNTHLSDTNRCSMLFVRDDALKLAFVTMLNKLIFSYRLLLKPYLAVMQSNTADEALLRIQYLENQLDQNAEQRSTLHKLMAQGYIDQILYTQESNELLLQARDFRSEIEVLNNTVAGDTTKVYETERLINYCKRGEMLTDFNESLFELFVDHILIYSRQKIGFVLRCGLTFEEMI

SEQ ID NO: 10489 - protein, 522 aa, synthetic construct
MGNVMIIPAKRQVGNTSRRQEDKPKLRVAAYCRVSTDSDEQASSYETQVEHYTEYIKKNPEWEFAGIYADDGISGTNTKKREEFNRMIEACKAGEIDMIITKSISRFARNTLDCLKYIRMLKDKNIPVFFEKESINTMDAKGEVLLTIMASLAQQESQSLSQNVKMGLQFRYQNGQVQVNHNHFLGYTKDREGNLVIDPEQAEVVKRIYREYLEGSSMDKIAKGLEKDGILTGAGKKKWWTSTINKILRNEKYIGDALLQKTYTTDFLNKTRVKNNGIVPQYYVEGNHEAIIPKDIFLRVQEELVRRRVVKTSANGKKRSYSCNHCFAQIIICGECGEMFRRIHWNNRGCKSIVWRCLSRLEATGQECHARTVNEKVLENVVVQAINKLLGDKSTYQTQLQQNIAKVIRDAQKNTADGIDEQLLELQKELLKKANNKESYDEIAQQIFKLREQRQQCTVDTATRDAQIARITELQDFIKQQRTDLAEFDETLVKRWLKQITVYEGHYEVKLKSGLKVNIDIE

SEQ ID NO: 10490 - protein, 578 aa, synthetic construct
MPRRRTSAKDCVPQQKEIKVAIYIRVSTTHQIDRDSIPMQKKDLMTYCEFILNTDNYVIFEDAGYSGKNTVRPAYQKMMDRVRNDEFTHILVWKIDRISRNLLDFASMYQELKKLGVVFISKNEQFDTGTAIGEAMLKIILVFAELERNMTSERVTATMISRASNGQWNGGRIPFGYSYDSNTSTFSVREDEAAICRKLRDLYLENKSLVYTARALNAEGFKTRAGVDWTPPAVWIIASSPFYAGIYRYNRYKGTVGRTINSENEWVVIPDHHPAIFSLAEHEAMKSLLKTNSRNIENPVGRLHTTSNVHIFQGIAYCGKCKSRLTSSPGRKSSTGFRASNYSCPLRRKSKKCNNKTINDIVLGEFVINYILNMLNAKKMFSKIKTPDELQKQLLCGSTFSDIDHIDTDGLNEYYNLLSRYSSDNSFIFAKRPQKKKAAVSKELASLRKEKERQERAMTRLQDLYLYSENAMSEKDFIIRKEDISYRLKEINHKLGVLSDDSDSFLSDEEFIKQASHFLIQSELKNKKYIYFKNLVNTVSPEILKSYIDTILDSVYITDSKVTSIVFKNGLTHNFIYK

SEQ ID NO: 10491 - protein, 541 aa, synthetic construct
MPRKPAKHPAKPKRGKKLEIEEPGVLYGRYSSHNQKDISVEQQFEKGYELAVEYGIRIIDTYADRAVSGRTDKRRDFQRMMTDAAKGKFRYVIAWKSNRMGRNMLEALINEARLQDLGVRVLYVEEDFDDTAAGRFAARSMMNVNQFYSENMAEDIKRGLYDNAANCMVANGHLPYGYKADETLHYAIDEPKAAVIREIFTRVSCGEAFVDIMASLNARGIKTSYGRPWGRSSFQKILSNERYRGIYIYGDVRKEGGIPRIISDELYFKVQEVITTKKNPQGRHRVNGDYLLTGKLFCGHCKSPMTGVSGTGRSGNLHYYYVCQKRRTEKTCDKKNVRRDEIELQVAQAIKDYALKDDVIEWIADSTVAYNERKEAESKVGILEDQLAGTEHGIKNIMSAIEQGIITETTKSRLVELESERATIKANIAAARADIVTVSRDDIISGLEMFRDGDVHDKKYQARLFDTFLVAVYAYDDDLRLVFSFSGNKNTIQIPIESAVNAVENNEAECSFKLCSAPPKSKILLTNVNGIFNFVLFILHH

SEQ ID NO: 10492 - protein, 498 aa, synthetic construct
MEIQIRKGNSIQKRKLKVCAYCRVSTDADEQENSLENQIRHYKEVITSNPDYEYAGVYSDFAISGFKEKRPGLQKMLADARKGKIDLILTKSVSRFARNTSIVLEATRKLKELNVGVFFELQNINTLSGEGELMLTILAAFAQAESESGSVGAKMVYQRKYEAGIPVQYLERSFGFKKDERGVYIADEEEAAWVRKIYEMAADGYTPASIKRYLNENGVKTAGGAEWIDSTVFRLIENEIYKGDYIMHKHFVNEERKLVRNRGEVDAWYIEDDHEAIVSPKLWQRAQDALEAKRDYLAEGSVIEEFTEENYPYMNRIYCARCGHPLYKRIYSNGNRLNWGCSGTKRYGKSFCEGINIPDGVLRGAWHFDENMYIGEKQTDKGKKEFTYLKEASWKRRHKKKVPEAIPKNTEEAYPYRKNIFCGLCGSRLVRHVNPKSHKVIWICNGAKRKGVAFCRGTRIPDSVIRGWGEIKKDIYIQGKDDKNGKKRYSYTSKKPTA

SEQ ID NO: 10493 - protein, 467 aa, synthetic construct
MIRMARSVTVIPARNRQRETGRRAVQEKKIRVAAYCRVSTDQEDQIHSFEAQVDYYTKYINDHENYEMAGIYADEGISGTNTKKREQFKRMIADCEGGKIDLVITKSISRFARNTQDCLEYSRKLKNLGIGIIFEKENINTLDSTGELLFTILSSLAQDESRNISENCKWGIRTKFKNGEMHLNTFKFLGYDKDENGKLVINKEQAKTVRRIYRDFLIGINPAQIAKELTEEKVPGCLGQTKWYPSTVTGILKQEKHMGDALLQKTYTADFLTKRQVRNNGEIAQVYVKDSHKGIIDKQTWNAVQEEFDRREKFMESHGTDRYSYGADCMPFCEKVFCGECKSLFTRHSWRSRGIVQWQCKNHRKDGKVACTNAYVDNADLEKGFVKAFNRLVTDRDKHMERWQQMKSDGTPLEKIRAGQMMEAVENEPLTRFVPEIAQLVLCEVTVLGAKKYEFFFLEGSRVKVSV

SEQ ID NO: 10494 - protein, 456 aa, synthetic construct
MKRKEVAAGLVRVALYIRVSGEEQKIKGLSLEAQQERLEAYARERGWVIVGIYIDAAKTARKNIHKRTEFQRMMDSVKRDEVDILLFARLDRWFRSVADYYKVMEVLQAHNCDWKTTDEEYDTTTANGRLYINVKLSIAQNEADIDGERIDVVFDSKIAHGTVVSGSAPFGFRVNEEKRLEVVPEDAAIVQDAFNYFENTVSQRATVRYVRETYGVNWCDATFRRMLKEKLYTGVYDRGGRYNDQFCPAIIDRQQFDRVQALLTRNVRSAPSGKVYIFTSILTCAECGHKLVGYKSSDYFYYRCNQHFQRGRCSHNHSAREDVVEQWLFEHLGEELERCQLEWDVEAAKKKASVARTDKAALKRKLTKLKELYVNDLIDIEDYKKDYQIYVSALNQIPEPAQEAPPDFAAVRRLLDNSFRTIYDTLTREEKRTLWRSVIKEIRIDNDQNITGVVFG

SEQ ID NO: 10495 - protein, 523 aa, synthetic construct
MTTAKNVMVIPARRRLGNTVQAEERPKLRVAAYCRVSTDSDEQATSYEAQVEHYTAFIKQNSEWEFAGIFADDGISGTNTKKREEFNRMIGECMAGNIDLIVTKSISRFARNTLDCLKYIRELKEKNIPVFFEKENINTMDSKGEVLLTIMASLAQQESQSLSQNVKLGLQYRYQNGEVQVNHNRFLGYTKDEDGHLIIEPVEAEVVKRIYREYLEGASLLQICRSLKADSILTAANKPHWRPETVKKILQNEKYIGDALLQKTYTVDFLTKKRVKNNGIVPQYYVENSHEAIIPRELFMQVQEEMVRRANLRGGKDGKKRVYSSKYALSSIVYCGQCGDIYRRVHWNNRGYKSIVWRCVSRLEEKGSECTATTINEETLQTAVVKAINELLANKEPFLQALQKNIATILNEENDNATNDIDSKLEELQQQLLIQAKSKNDYEDVADEIYHLRELKQNALVENAEREGKRQRIAEMTDFFNEQSCELEEYDEQLVRRLIEKVTVFHDKFAVEFKSGVEIDVEG

SEQ ID NO: 10496 - protein, 521 aa, synthetic construct
MPYCMYLRKSRKDFEAESAGQGETLARHKAALLETAQRLHLAVSEIYQEIVSGDSIAARPEMQRLLADVEAGKWDGVLVMEVERLARGDTMDQGQVQRTFVYTGTKIITPTRTYDPSDPADAEYFEFGLFMSRREYQTINRRLLAGRERAVREGKWPQGHAPYGYKTVKVPKGKGYMLEVVPEEAEIVKSIFNWYVNGAEYNGAFLRVGARRISTMLNSMGLTTQAGNLWSAPAVRVILKNHAYIGKVTWYKQTLRKSMSNGAVVKKLERTPERTLICDGLHEAIISEELFEAAQARLSADSTGPATKGPLQSPLAGLLYCGLCGCVMARQHEKGKPAYYVCRNPLCRCRGSKLEVVEQRVVATLAHWLTGYEITAKAQAQTVDIGALQSALDGAQRELLAYQQQQTRLYDLLERGIYTEQVFLQRQSAITGEVQRLQAAVSDTEAAIAKAVRINASAREIVPAVHAVLDAYPTYTTAQEKNDALRMVLSRVEYTRTVGGFGSDPQDFEVKIFPRLPEPVE

SEQ ID NO: 10497 - protein, 569 aa, synthetic construct
MAEQNEKIVALYVRVSTGYQVDKDSLPFQKKELKAYCEHVLHIDKNCIEIFEDAGKSGKNTKRPAFERMMGKVKSGQVSHVIVYKIDRISRNLVDFSLMYDDFKYNNVTFISLNEQFDTSSAIGEAILKIILVFAELERKLTSERVTDVMIGRAQNGQWNGARVPYGWDWDEEKQCPVHSEKEAQYAIAMYEMYLNGGSTVSIRDYNNAHNIPTKRGGEWTSKTVADFLRNPINKGAYRYNYRESARGRKKPNEEVVFIENVFPPLVEPRIWELVNKRMDENTLKLNTSSMHTIRKNCNVFAGLIVCGKCGVNYQVTAKDRRKGSGFRPSSYACTGKYQKNHCDNLNVSDVKIGPFMINYIAAMVDASKSRKFIKDTKSLEQVLLSHINFSNIAGIANDSLQETLELISGYSASKSALWSAETLSKEQQTDVDSKQSELNERLQKVNRAMERLKKVYLFSDDGMDEKEFLEMKSSLEADRVKIENEIKGLSAPIATNVDQVAFIKSASEFLLMHKINSGEFVDYKELATLDEESLKQFMNSVIDHIVVRERKIVEIVFVNGLSHTLLYK

SEQ ID NO: 10498 - protein, 502 aa, synthetic construct
MEIQIREGNREQKRKLRVCAYCRVSTDADEQENSLENQIRHYETVIKANPSYEYAGVYSDFAISGFKEKRPGLQKMLADAQKGKIDLILTKSVSRFARNTSIVLEATRKLKELNVGVFFELQNINTLSGEGELMLTILAAFAQAESESGSVGAKMVYQRKYEAGIPVQYLERSFGFKKDERGVYIADEEEAVWVRKIYDMAAQGYTLAAIKRYLNENNVKTVGGAKWLDSTVLRILENEIYKGDYIMHKYFVNEERKLVRNRGEVDAWYIEDDHEAIVSPELWQKAQDALEAKRDYLAEGSVIEEFTEENYPYMNKIFCARCGHPLYKRIYSNGNRLNWGCSGTKRYGKSFCEGINIPDGVLRGAWHFDENMYIGEKQTDKGKKEFTYLKEASWKRRHKKKEPEPIPENTEPEYPYREKIFCGLCGSRLVRHVNTKNHKVIWVCNGRKRKGKDFCDGTRIPDTIIKGWGEIKKDIYIQRKDDKNGKKRYSYTSKKPKGADRA

SEQ ID NO: 10499 - protein, 464 aa, synthetic construct
MARSVTVIPARSQKVRTGHKAVQEKKIRVAAYCRVSTDQEDQLHSFEAQVEYYTKYINEHENYEMAGIYADEGISGTNTKKREQFKKMIADCEDGKIDLVITKSISRFARNTQDCLAYSRKLKNLGIGIIFEKENINTLDSTGELLFTILSSLAQDESRNISENCKWGIRTKFKNGEMHLNTFKFLGYDKDENGKLVINKEQAKTVRRIYRDFLIGINPAQIAKELTEEKIPGCNGQTKWYPSTVTGILKQEKHMGDALLQKTYTADFLTKRQVKNNGEIAQVYVKDSHKGIIDKQTWNAVQEEFDRREKFMESHGTDRYSYGADCMPFCEKVFCGECKSLFTRHSWRSRGIVQWQCKNHRKDGKVACTNAYVDNADLEKGFVKAFNRLVTDRDKHMERWQQMKSDGSPLEKIRAGQMMEAVENEPLTRFVPEIAQLVLCEVTVLGAKKYEFFFQEGSRVKVSV

SEQ ID NO: 10500 - protein, 521 aa, synthetic construct
MKKVHVIPASIQKYSEKPLDRHCKRKVAGYARVSTDHDDQLTSYEAQVDYYTHYIKSRSDWEFIGMYTDEGISATNTKYREGFKRMIEDALSGKIDLIITKSVSRFARNTVDSLMTVRKLKEKGIEIYFEKENIWTLDAKGELLITIMSSLAQEESRSISENVTWGHRKRFADGKVSLAYSHFLGYERGVDGNLVINKEQAETVKEIYRLFLSGFTYHSIARKLTEKGIKSPAGKDSWCAGTVRSILTNEKYKGDALLQKRLTVNFLTKEMKINEGEVPQYYVEHNHEAIISPQVFDLVQEEILKRKSGKTRYSGISIFSTKIKCGQCGSWYGAKIWHSNDSYRREIYQCNSKFKNHCNTPHLTPERIKEIFVSAVNKLITNKNEIIENLEMIRQQLCQTKSLEKEREHLKQDMLILSEIIKKNIAENARIAQNQNEYEKKYDGLMNKYNKMKNKYEIILDKIKKQQARNTQIVEFIDRIKKQGNITEFNEYLWASLVDFITVYNEQNIRITFRDGTEIKV

SEQ ID NO: 10501 - protein, 548 aa, synthetic construct
MGEWQNAQAEKWAALYVRLSRDDENEGDSNSIAHQIEILSKYARDRGITNFKIYKDDGYSGTNFNRPGFQEMLTDIEAGRVSTVIVKDMSRFGRNYLEVGMYTEIRFPELDVRFIAINDGVDTDSAADNDFTPFRNIINEWYAKDTSKKIRSYMKSKGESGKRLTTIPIYGFTQTSDTDKNWIIDPDAAEVVYRVGMDILNGYGPTQVATRLERAGILTPTAYFESKGMSYRVGSMKQPCQWSESMVSNIMDHYLEYLGHTVNFRTHRKSYKTKKTVENPPEQWRVFENTHPAIWTEEIAEAVKRAVTNRRRVTKMGDMGMFSGLVYCADCGKRLYFCRTVKWEHTQECYTCSTYRNRNGCSAHYIRAVVLEQLVLENLQKVISFAHFNEEAFAEMLMDGRKKALDAKQASVRRALNRQERRIAELDTIIRKLYEDNVCGKLTDERFTKLSAGYEQEQTELAASVQNLRSELAAAQEQTGNAEKFLKLVRKYTEPKELTAVMVQEFIEKIIVHAPDKSSGHRVQQIDIRYNFIGEMEFSAEYARKTTA

SEQ ID NO: 10502 - protein, 502 aa, synthetic construct
MEIQIREGNSRQKRKLKVCAYCRVSTDADEQENSLENQVRHYEMVIKANPDYEYAGVYSDFAISGFKEKRPGLQKMLADARKGKIDLILTKSVSRFARNTSIVLEATRKLKELNVGVFFELQNINTLSGEGELMLTILAAFAQAESESGSVGAKMVYQRKYEAGIPVQYLERSFGFKKDERGVYIADEEEAVWVRKIYEMAADGYTPASIKRHLNENGVKTVGGAEWIDSTVFRLIENEIYKGDYIMHKHFVNEERKLVRNRGEVDAWYIEDDHEAIVSPELWQKAQDALEAKRDYLAESSVIEEFTEENYPYMNKIFCARCGHPLYKRIYSNGNRLNWGCSGTKRYGKSFCEGINIPDGVLRGAWNFDENMYIGEKPTDKGKKEFTYLKEASWKRRHKKKEPEPIPENTETEYPYREKIFCGLCGSRLVRHVNTKSHKVIWVCNGRKRKGKDFCDGTRVPDTIIKGWGEIKKDIYIQRKDDKNGKKRYSYTSKKPKGADRA

SEQ ID NO: 10503 - protein, 463 aa, synthetic construct
MARSVTVIPARNRQASGHRAAPQKKIRAAAYCRVSTDQEDQLHSFEAQVDYYTKYINDHENYEMAGIYADEGISGTNTKKREQFKRMIADCEKGKIDLVITKSISRFARNTQDCLMYSRKLKNLGIGIIFEKENINTLDSTGELLFTILSSLAQDESRNISENCKWGIRTKFKNGEMHLNTFKFLGYDKDENGKLIINREQAKTVRRIYRDFLWGLNPAQIAKELEEEQVPGCLGQTKWYASTVVGILKQEKHMGDALLQKTYTADFLTKRQVRNNGEVAQVYVKDSHKGIIDKETWNAVQEEFDRREKFMQRHGTDRYSYGSECYPFCEKIFCGECGSLFTRHSWKSRGIIQWQCKNHRKDGKVTCTNAYVDNADLEKGFVKAFNRLVSEREKHMERWNAMKADGTPLEKIRAVQMMEATENGQLQKYVPEAAQLVLEEITIFGAKKYEFAFLEGSRVKVSV

SEQ ID NO: 10504 - protein, 518 aa, synthetic construct
MAFRVIYRLPKRKEVRLVEIQIMEGSREQKRKLKVCAYCRVSTDADEQENSLENQVRHYETVIKANPDYEYAGVYSDFAISGFKEKRPGLQKMLADAEKGKIDLILTKSVSRFARNTSIVLEATRKLKELNVGVFFELQNINTLSGEGELMLTILAAFAQAESESGSVGAKMVYQRKYEAGIPVQYLERSFGFKKDERGVYIADEEEAVWVRKIYEMAADGYTPAAIKRYLNENGVKTVGGTKWIDSTVFRLIENEIYKGDYIMHKHFVNEERKLVRNRGEVDAWYIEDDHEAIVSPELWQRAQDALEAKRDYLAEGSVIEEFTEENYPYMNKIYCAKCGYPLYKRIYSKGNRLNWGCSGMKRYGKSFCDGINIPDGVLRNAWHFEENTYIDEKASDKGVKEFSYLKERSWKRRHKKKQPPSIPENTEAEYPYREKIYCALCGSRLVRHVDTKSHKVTWVCNGRKRKGKDFCDGTRVPDTILKGWGEIKKDIYIQRKDDKNGKKRYSYTSKKPSGIGA

SEQ ID NO: 10505 - protein, 434 aa, synthetic construct
MERVVERVDALIPAQPKALRVCAYARVSTGKDAMLHSLSAQVSYYSKMIQSHNGWMYCGVYSDEAVTGTKRERAGFQHMIEECRQGNIDLVITKSISRFARNTVTLLQTVRELKSLGVDVFFEEQHIHTMSADGELMMTILASYAQEESLSASENQKWRVRKAFENGEIINLRFLFGYDITPDGIQVNEVDAAIVREIFARFNGGESMSSICRDLDARGHKGVLGGTWCAERMRNTLSNEKYLGNALLQKRYRNNHIEKKLLPNRGELPMYYAEGTHEPIIDQATFDKAQERLRMLAQQAANRKKPTRSVFSGLIHCGLCGNTYKRVTYRKKHYWNCTTFQTKGKSECAAKRIPEETLEVLTCEVLGEGSIDSDMVRSKITAIRAEKSNMVVFCMDDGSEIVKRWKDRSRAESWTPEMKEQARQRALQARRHKL

SEQ ID NO: 10506 - protein, 528 aa, synthetic construct
MSRTAARSVTVIPPTINPLTHLSKVAIQKRQVAGYARVSTDSDEQFTSYEAQVDYYTQYIKRNPEWEFVKVYTDEGISGTNTKHRIGFNEMIADAMSGKIDLIVTKSVSRFARNTVDSLVTIRKLKEKGVEVYFEKENIYTFDGKGELLLTIMSSLAQEESRSISENVTWGQRKRFADGKVNLPYKQFLGYRKGADGFPEVVPEEAIVVHRIYTRFMEGLTPGAIAKELTADGIPTPSRKQRWQTSTVESILQNEKYKGAALLQKCFTVDFLTKKRKVNEGEVPQYYVEHSHEPIITPEEFDKVQTELARRKRISRQYSGKSIFSSRIICGDCGSYFGSKVWNSTSKYRRVIWQCNGKFKGEHKCETPHLDEETIKARFVTALNAIIESKDNILEDCRLMQATLTDCTGIDTEIESLLEEIDVVTELTKRCIAENSQMAQNQEEYAARYNGFVERYEKAKAQLEQLRTTKAEREAQAEAIGAFMFEVQELDALTEFDEKLWLTIIDTITVHADGRMTFKFQGGTEIEA

SEQ ID NO: 10507 - protein, 528 aa, synthetic construct
MSRTAARSVTVIPPTINPLTHLSRVAVQKRRVAGYARVSTDSDEQFTSYEAQLDYYTQYIKRNPEWEFVKVYTDEGISGTNTKHRIGFNEMIADAMSGKIDLIVTKSVSRFARNTVDSLVTIRKLKEKGVEVYFEKENIYTFDGKGELLLTIMSSLAQEESRSISENVTWGQRKRFADGKVNLPYKQFLGYRKGADGFPEVVPDEAIVVRRIYTRFMEGLTPGAIAKELTADGIPTPSRKQRWQTSTVESILQNEKYKGAALLQKCFTVDFLTKKRKVNEGEVPQYYVEHSHEPIITPEEFDKVQTELARRKRISRQYSGKSIFSSRIVCGDCGSYFGSKVWNSTSKYRRVIWQCNGKFKGEHKCETPHLDEETIKARFVTALNAIIESKDNILEDCRLMQATLTDCTGIDTEIESLLEEIDVVTELTKRCIAENSQTAQNQEEYAARYNGFVERYEKAKARLEQLRTTKAAREAQSEAIGAFMFEVQELDALTEFDEKLWLTIIDTVTVHTDGRMAFKFQGGTEIEA

SEQ ID NO: 10508 - protein, 521 aa, synthetic construct
MKKVTKIESVQNAKTVKQKLRIAAYCRISTGSDAQLESLDVQKSHYERYITSRDDWQFAGLYYDEGITGTKTEKRPELLRLIADCEAKKIDLVITKSISRFSRNTTDCLELVRKLLSLNIPLFFEKENINTGSMESELFLAILSSMAEGESASISENAKWSIKRRFQNGTFKLSYAPYGYDWDGTNLTVNPEQAKTVKRIFSDVLSGKGTNTIADALNAEAVPSKKNGRWTSSSVRGILANEKYTGDVIFQKTYTDDNFNRHKNHGEVDQYMMANHHEAIISHEDFEAANALVDQRALEKGIQKGNDKYQQRYAFSSKIICSECGNTFKRRIHSCATYKYVAWTCNTHIDDKNACSMKYIYDEELKAAFITMMNKLIYSHKFLLKPYLKVLENSSGEEAVQRIQHLERLLEQNSEQRETLTKLMAQGYIDQILYNQEMNALLLQADSYRSDIETITTSMTGDAAKVTETAMLLQFVSHSEMLTEYSEELFEEFADHIEVQSRNEVRFILKCGLTFTERMGD

SEQ ID NO: 10509 - protein, 502 aa, synthetic construct
MEIQIREGNSRQKQKLKVCAYCRVSTDADEQENSLENQIRHYETVIKANPSYEYAGVYSDFAISGFKEKRPGLQKMLADARKGKIDLILTKSVSRFARNTSIVLEATRKLKELNVGVFFELQNINTLSGEGELMLTILAAFAQAESESGSVGAKMVYQRKYEAGIPVQYLERSFGFKKDERGVYIADEEEAVWVRKIYDMAAQGYTLAAIKRYLNENNVKTVGGAKWLDSTVLRILENEIYKGDYIMHKYFVNEERKLVRNRGEVDAWYIEDDHEAIVSPELWQKAQDALEAKRDYLAEGSVIEEFTEENYPYMNRIYCARCGHPLYKRIYSNGNRLNWGCSGTKRYGKSFCEGINIPDGVLRGAWHFDENMYIGEKQTDKGKKEFTYLKEASWKRRHKKKEPEPIPENTETEYPYREKIFCGLCGSRLVRHVNTKNHKVIWVCNGRKRKGKDFCDGTRVPDTIIKGWGEIKKDIYIQRKDDKNGKKRYSYTSKKPKGADRA

SEQ ID NO: 10510 - protein, 519 aa, synthetic construct
MNAVIYARYSAGPGQNEQSIEGQLRDCRDYAKKNDITIIDTYIDRHISGTDFENRTEFNRLIKDCERHQFSAVIVWKVDRFGRNREEIAMNKVKMKKHGVKLLYAKEHIPNGPEGIILESLLEGMAEYYSAELSQKVRRGLRESMLKGHALGGNPMLGYKIINKKYVVDPVTSPIVVEIFERYAAGETAKAIATDLNTRGVVNAKGDPFKNNTIYFILRNEKYIGIYRYGDIVVNDVIHPIINMELWGKVQMILEMNSRNRSRSRCTAPEEFLLTGKIFCEYCKRPIIGESGTSRNGASHYYYKCSSRKNKGVKCAKSTFRKTDLENFIVSQTIDNVLHPDTIDYLAKKVVEIQNSDAQELQMQSLRKQLSDVQKGLNNLVNAVEMGIITDTTKERMMALEERKEELKICIAKAEIKRPKLTEEMVEYWLNKFRDQDVDSTEFKIRLINTFVNSIYLHNDYAIIVYNFCDDESGHRAEIRAQLDDALRAKKEDQTCSSDPTQVPATGIEPVRAIRPAGF

SEQ ID NO: 10511 - protein, 515 aa, synthetic construct
MSYLVYLRKSRKDLENPFMTTEEILNRHECILLDLAKKMNLSIGDIYREIVSGDSISARPVMQKLLREVESGMWEGVLVVEVERLARGDTVDQGIVQRTFQYSETLIITPQKTYNPSSESDQTFFEFGLFMSRQEYKTIKRRLKSGVMSAVREGKWPYNSAPYGYRRYKLANQKGWSLEFDDQERPIAELIYHLFCDEKRGLGYISDYLEARNIKSRTGGRFTESFLREFLRNPANDGKVFYGRRKVVTKIVNGSSVRTRPRADEYIEVAGLHDPLIPHDLFLKAQERFRVSTPRNPSSYAVKNPLSGILVCSECGHKLQRRPASTSKRGAPYDVLMCKTRGCPTIGSAVEVVEREVLRALEDIVRGYEADVPSVPSLIPQKEELLHNAILHRADLNKQQERIYTLLEQGIYSTDVFLDRSKAMESQMQEAEHSIEIFKKELEEEKIKYDNWKSFVPTCKQLLKLYWTLTPDARNAALKEVIDRIEYKKLTRNPKGMYDVATFELTLYPKIPSKS

SEQ ID NO: 10512 - protein, 545 aa, synthetic construct
MRTIHKIERSIPNLRQRKKVAAYARVSVDSERMHHSLSAQVSYYSSLIQKNPEWEYAGVYADYGISGTRIKKRQEFQRMLEDAEAGKIDVILTKSIQRFARNTLDLLRTVRYLKEIGVEVWFEKENIHTLSGEGELMLTILASFAQEESRSISDNIKWRFKKKFEQGIPHAKFFVYGYRWEGDNLVTNPYEAKVVQRIFEDYLSGKTRKDIVRELKAEGIRTMYGNFFKDASIRQILTNPVYTGLLEIQKTFVVDPINKHQIYNHGEKDKYVVEHHHEAIIEPGVFEQVQVEMARRKQDGLQKGGYARKFLNTCCFTGVIKCGICGKSYTHVVRRYKGKVSEYWACESHKGKGTNCGAHGSIPEPALKKACASVLGTEDFEEQKFLQKVTMIVVPAYKKLMFYMTDGRVIEKNWESTALKDCWTEELKKKQRNWMTRYRQDGGTGRFTVFSGRIRCPRCEVTFIRILDKRKDGAVPYWRVRGRHKCIHRTGIKEDTLKKTAAYILGIPEFDAEVFKTQIKDIEIQVDGSLLFRFLDGHTEGVDLL

SEQ ID NO: 10513 - protein, 521 aa, synthetic construct
MRVVQRIPATIRNFKAKPLDTQQKRRVAGYARVSTDHEDQVTSYEAQVDYYTSYIKGRNDWEFAGIYTDEGISATNTRHRDGFNTMVKDALDNKIDLIITKSVSRFARNTVDSLTTVRKLKDKGIEVYFEKENIWTLDAKGELLITIMSSLAQEESRSISENVTWGHRKRFADGKVSLAFSHFLGYDRGADGNLVVNKEQAETVKLIYRLYLSGYTFHSIAKKLTEQKIPTPARCKIWRPNTVRSILMNEKYKGDALLQKKFTVDFLTKKSKRNEGEVPQYYVQNNHEAIISPQVFDLVQEEMRKRKNSKIRHSGISIFSSKIKCGQCGSWYGAKVWHSTDKYRQTVYRCNDKFKRHCKTPHLTENEIENIFVRAVNQLIKNKDEILSNIILLKIRLVDTTDLEKKRNALEFNMNLLAERVQQLISENACLTQDQVQYNQEYSELVNRYEKIKIKYDQICDTMKQRTSRGQQLERFIENLQKQKFISIFDKRLWCSLVDFITVNEKDDIWVTFKDGTEIKA

SEQ ID NO: 10514 - protein, 524 aa, synthetic construct
MLGYGYCRYSSEMQDEKSIEQQKMEINEYAQRNNITITNFYCDEAKSGTKDNRENFQCMISDACKNKDIECILVWKTDRFARNTQDSLFYRNKLKKNGTKLISITQPIDDSTPEGQLMSTFLAGIDEYYSQNLASNIKRAQKSKAQKFEFQGGIPPLGYKIIDKHYEIEEKEANIVQTIFKKYLEGYSLIDISEYLNSLNFKTKKNKKFGKNSVYDILGNIKYTGTYIHNKAYKHNSHIFRDDAFIYEGAIPEIISKEEFNMVQQKRKKRNSGEFSSKHLYLLSGLIVCGKCGKTYTGSTSVKNKNGKRYETGYYRCSARNKLDKCDAPVLKQAELENLIIKLLADKLLNSADIDNVVIKVQEEYQKMYDESLDIIKQLEYEISNVDAKIENVTSVIAEGVSSKSLSNKLIELEEQRELLQEKLSFSKNINKHEIKVEDIKNLLKSDIMNLTKNTHSKEIIKKWVKKIEVHNNELVVNFSLNADSAPCMVARVRFELTTYRVWTGCSSQLSYLAICYLLTRFTL

SEQ ID NO: 10515 - protein, 521 aa, synthetic construct
MATVTMIPARPTIGARKKTEDAPKLRVAAYCRVSTDTDEQATSYDAQIEHYTEYIEKHPGWELAGIYADDGISGTNTKKREEFNRLIEDCMAGRVDMVVTKSISRFARNTLDCLKYIRQLKDKNIAVFFEKEAINTLDAKGEVLLTIMASLAQQESQSLSQNVRLGLQYRYQQGKVQVCANRFLGYDKDEDGNLVINPVEAEVVKRIYREYLSGKSYYQIGQELSADGIRTAAGSDYWLASTLKKILTNEKYIGDALLQKTITTDFLNKKRVVNKGIVPQYYVEGSHEAIIPRDIFMQVQEEMLRRARLQTGTGKRRTYSGKYALSHHVYCGHCGDIFRRSQWFIRTERLPVWRCVSRLEKNKSDVDCPSRTLYERDLHAAVVTAINQVIAQKDEFLPGMRLAIENALGHTNSAQIAEIDAKLEALQKELLKKANAKQGFDSLADEIETLREDKQALLLEDSNHAAMRQRLDELEAFLDGQTTEVTDYDEGLVRRLIERITVFDDHLIFEFKTGLETEVRM

SEQ ID NO: 10516 - protein, 521 aa, synthetic construct
MKTITKIEPTAARPSRVKTRVAAYCRVSTGMDDQLISLETQKSHYEELISANPDWVFAGLYYDEGISGTSKEKRPALQRLIADCEAGRIDRILTKSLSRFARNTTDCLELTRKLLDLGITIFFEKENLDTGSMESELLLSIMSSLAESESVSNSENNKWSVRHRFENGTYKIASAPYGYDAKDGDLIINAEEAEWVRWIFDQALNGMTSGRIAHELNAKQVLTKKKSTWRASTVRGILRNEKYTGACLFQKTYSDFRFKRHKNYGEKDQFLVEDHHEPIVSKEDFEAVEALQRQRAHEKNIQRGDPRYQNRYPFSRKLVCGECGGSFKRHTNSTGKQRYPVWICGRHLEDKTSCPMKTVRECDLERAFTTMMNKLIFAKKEMLEALLDGMHVDTHKDNLRRIDHIDRKLEQNTERRQTLTTLMTRGYLEPALFTQESNDLASEAEALTAEKEQLTKEVSGSFQKTDALGDLIRFVSHAQPSTVFDGDLVERFLDKATIRTRSEIVFHLKCGLNLTERIGEK

SEQ ID NO: 10517 - protein, 473 aa, synthetic construct
MKSVIYVRVSTEEQAKHGYSIAAQLEKLEAYCVSQGWELVGEPFIDDGYSAKDLNRPHFQEMMNVVKAGGIDVVLVYRLDRLTRSVSDLYEILQELDQYNCKFKSATEVYDTTNAMGRLFITLVAAIAQWERENTAERVRMGMEKKTKLGEWKGGTPPYGYRVVDEKLVIYEDEAKVVKEVFKLSKTLGFLTIAKQLTSRGFPTRYGGEWHVDSVRGIANNCVYAGYLTFNESKKDYKKPPREQKLYEGNHERIISREEFWGLQDILDKRRTFGGKRETSNYYFSSILKCARCGHSIAGHRSGNKKTYRCSGKKTGKKCSSHIILEDNLVKTVFAHFSQLTEQFLTADGDSEYPTERLATLKSELSAVEKLMQKKKTMFENDVIDIDELISSTSTLRDKEKEIRRELNSIKQIDTSSDTLKSIVENMDTLWLHANDYERKELMTTVFSQLVIDTKDEYRSSKQAREIVIVSAK

SEQ ID NO: 10518 - protein, 482 aa, synthetic construct
MENNLRTVEYERVSTDEQAVEGYSLTSQQEKIRKFIESQGNWDLVDTYIDDGYSAKDLNRPAMQKLIEDAKMGKFDVVVFYKLDRLVRSVSSLHTLLKTFEENGVMIKSVTEVFDTTSALGRFFLTLVAAMAEWERETISERVLLNMGKKAEVGERNGAKAPFGYKSINSKLEIHEEEAILVKEIFRLYNDGKGLRSIAKYLQQLNIDKDIRTISRMLENPVYCGKVRWGHNSNRIETIIIKSEHIPAIIREETYDEAQNRRIANTKEGKKATSPYPFSGVLRCARCGSALSGQFKKERGTKHYICIGKKNKGTCDLPIFTEKALISEFLKGLSTDNPESFINSIVPNLEESVSVQNNDLIIAEIEKQLNIIKKRKKNWMLALGDGIMTHKDYSEMMSQVLKEENLLIEQVKNLSSKKNVKDTSQIIEQAKNISAMWDRASDNDKKNFINILFEEIVVDVPSDYRRGRGNSPSVDIKEVKLR

SEQ ID NO: 10519 - protein, 552 aa, synthetic construct
MSTITKIQSYQRDVKQLRVAAYCRVSTDNIEQLESLENQRIHYQEYISNHSDWQLAKVYYDEGISGTQLTKRDALKELLADCHNHRIDLVVTKSVSRLSRNTTDCLQIVRELQQLNIPIIFEKEHINTGAMASELFLSILSSIAQDESHSTAGNLRWAIRQRFASGKFRVSSAPYGYSIEDGNLVINRAEARIVREIFQQFSKGMSASQIAKGLSHKHIPTKRGGQWRSNTVINILRNINYTGDMLCQKTYRDDQYHRHFNQGELTQYLIEDHHPSLVNHETFNRIQALLKDAAQKRHIETDSHKYQHHYLFSGKIICGNCGTTFKRQTRPNKICWACQRHLKSAKQCPIKAVPEASLEVAFCNMMNKLIYSRKFLLQPLLENLQVQVNSDTHGRLNSLTERIKANNHKAETLTELMQSGLIDKSIYVNQTAQLEQDTYQCREKAKELHSRNTDSANSFEDVRSLLHWCQQDQELSGFDKTPFQDFVQQIVVHSSIVVFKLKCGLKLTEKLTKAVTINNHFYRNIIRQRFNEPIKQAEYLYSIIESEGDLIG

SEQ ID NO: 10520 - protein, 525 aa, synthetic construct
MGKVRIIPAHQQKGNSVHHQRSPQPFEKLRVAAYCRVSTDYDEQASSYETQVAHYKELIQKEPTWEFAGIYADDGISGTNTKKREQFNKMIAACKAGKIDLIVTKSISRFARNTIDCLKYIRDLKAINVAIFFEKENINTMDAKGEVLITIMASLAQQESESLSQNVKMGIQYRYQQGKVFVNHNHFLGYTKDAQGNLVIEPEEAKVIKRIFYSYLNGMTMKQIADSLKADGILTGGKTKNWRSSSVAKILKNEKYMGDALLQKTYTVDFLNKKRVKNEGIMPQYYVENDHPAIIPKSVFMQVQQIIKQRRNGITTKNGKHRRLNGKYCFSQKLFCGKCGDILQRNMWYRPEKVAVWRCASRIRRSKIGRRCMIRNVKEPLLKEATVEAFNQLIEGHELASKQIKANIMKVIKSSKGPTLDQLDKQLEEVQMKLIQAANQHQDCDALTQQIMDLRKQREKVQNCETDKQAKLHTLDEINKLVELHKYGLVDFDEGLVRRLVEKITIFQRYMEFTFKDGEVIRVNM

SEQ ID NO: 10521 - protein, 530 aa, synthetic construct
MTYQEGGEAMKKITKIEGNKVASIIKPKLRVAAYCRVSTGSDEQLVSLQAQKSHYETYIKANPEWEYVGLYYDEGISGTKKENRTELLRMLSDCENKKIDLIITKSISRFARNTTDCLEMVRKLLDLGIYIYFEKENINTQSMESELMLSILSGLAESESISISENNKWAIQRRFQNGTFKISYPPYGYDNIDGQMVVNPEQAEIVKYIFAEVLSGKGTQKIADDLNQKGIPSKRGGRWTATTIRGILKNEKYTGDVILQKTYTDSRFNKRTNYGEKNRYLIENHHEAIISHEVFEAVEAALNQRAKEKGIEKRNDKYQNRYSFSGKIICSECGSTFKRRIHSSGTRKYVAWCCSKHLKQITECSMQFIRDEDIKKAFVTMMNKLIFGQKFILRPLLEGLRNQNNVASFHRIEELETKIENNMEQSQVLTGLMAKGYLEPALYNKEKNSLVQERERLLAEKDQLTRFVNGNLAKVEEVNHLLRFATKSKMLTAYEDELFENYVEKIVVFSREEVGFELKCGITLKERLVN

SEQ ID NO: 10522 - protein, 578 aa, synthetic construct
MNKHVFRNSISKQADAAKRVATYYRVSTGRQYANEASIPSQRKITASFCDQNGYLVVEEFVEAKTATDDRRPVLQDMIERACAPDHPYDAIIFYAFNRFFRNVAEMELTIRKLRKHGVEVVSVTQPTGDDPSQILVRQIIGAFDEHTSREISKNTTRAMRESAKQGFWNGATPPLGYRIIEAERRGQKIKKKLDIDAVEAETVRLMFKLYLDGDGETGPLGVKETTKWLNSHGYRTRRGATFGVGPVHKILTNACYSTGQWPYGVRSSRDGRKHDPSTVIHISVPVLIEQADFDRAQAKLARSNPKTTPPRVVNGPSLLTGIAVCASCGSGMTRTGTTNRQGRSYSYYSCAGCQQKGKSVCKGRHVPAAILDDVVLTNLKQRVLAPDRIADLLKSLIERQAAKSQSADDRLLALQKELSDCEDRMKRLYRSIEDGIVELDDILRDRAAALKAQRERAKAALDHARAQCGTAAAVTAEKIDAFARLMNAKLDAGDTNTRKGYISSIIDAVEVDDHAIRIVGSKDILQAAIAGKQTENGNVRGFVRKWRTRHDSNVWPSPSEQFSLPILNARQGTLQCDM

SEQ ID NO: 10523 - protein, 570 aa, synthetic construct
MKTVAIYSRKSRFTGKGDSIENQIEMCKEHIKKFVSPNVEFLIYEDEGFSGGNTNRPAFQRLINDIKYGNINLLICYRLDRISRNVADFSSVLDVLQEYKVDFISIKEQFDTSSPMGRAMIYIASVFAQLERETIAERIKDNMLEMAKKGKWTGGKLPLGFTSKKIAYIDEEGKKRFKVTLEHDSKDLEFVKFLYEKYLELGSLHKLETYTHENNIRSASGKIFEKSTLKIILQNPIYVKADENVFNYFENKGWSVYGEPDGLHSLLSYNKTETAKKDGKLTKRNKDESESLVAVSDVKGFIDSSLWLKVQYQFKKNKNTFPRLGKTHNALLVGKLFCGNCGTRMIIQHGRTSTKTGIKTFYYVCSLKKTSKKKLCSAHNVKTDFLENLVLDSLEKLYYKKDFINDSLKINLKENKDNIKEINTTKKLIELNKNKINSLIEKLSLDFDNILSDILIPQIKKIKIENDVLESKLEELKLKKQESEMNRIEIDLITSLLNKCKNIKELTRTEQKQIIDCLVDSIYYYSNDNGNDKIKIKFINDIDSINTLLSDEEKRQFEKLSFYSHSMSSI

SEQ ID NO: 10524 - protein, 505 aa, synthetic construct
MAGKNKAVKYGRVSSDRQEKEGFSLPAQDKLLNDYALKNNFDIVGSFFEAETAKKAGRKQFNEMLKFLKKNKSVRIILVEKTDRLYRNLKDYVLLDEIENLEIHFVKEGTILSEKSRSQDKFMHGIRVLMAKNYIDNLSEEIKKGLKEKAEQGYCPTKAPFGYRNIIRKDGKRIIVPDTETAPYIVRAFELYSNGVLSYESIAEILTKDGFRPNNKKCTKRNIELILHNSFYIGAFKYMGKKYDNAQHEAIVSPELFYAVQQRLATHTPRPQINNFTYLGLLKCSHCGCSITAEIKKGKYVYYHCTGKKGGSCKSKYIREEKITTAIESFLKNLILTQEEIDGLLALAKEMLKQKAAFTAHTTEQLEKEIKKLRNRLDNLYTDKADGLIEQEFYENKKSVWQGELDKLLLEYEIVNKQDRTFIDSLENVLELSKNAHSAFLQREGQEKIELLKIVGQNFWFDGENVIIEPFPPFDLIYKRNTSHKLEMAGVEPASIVDKNEHLRV

SEQ ID NO: 10525 - protein, 527 aa, synthetic construct
MPEQYCLYLRKSRADMDAEKSGDEDTLLRHEKLLMQVAKSKNLNITDIYREVVSGETISARPQMQRLLSAVGQGVYTGVLVVEVERLARGDTIDQGLVAQAFKFSNTLIITPTKTYDPNNEFDEEYFEFGLFMSRREYKTINRRLQRGRIASVQEGKFVGSITPYGYDKVKLEHDKGYMLVPNPDEAPTVRLIFSLYVNGLPQEDGTTRRLGVTMICRYLNEHSIPNRTGNVWVNATVRDMIRNIVYDGKTRWNWRPTHKKMVDGIVKLERPRTKPDTWIISDGMHEPLIDHDTFVKAQVLIDSNPPRPIGERETVRNPLAGIVICGKCGRRMVRRPKGSRQPEDVIMCGCAACHNVSVYSRYLEGAIIDGLKSWVDTYKLQCSDDDVGTETIAALSEQRAAINKQIQDYKRQRENVYTLLEQGVYTTETFLQRLKIISDKIGVATSSLADLEQVVADEERRLRGKKSIIPKIENLLAAYWSLDSAAAKNDMLKEVIEKVVYEKDKGGRWADPTDFRIKIYPRLPRN

SEQ ID NO: 10526 - protein, 569 aa, synthetic construct
MKGAIYSRVSTEGQDYSKQTNELKEYASKNGIDIVYVFEEKESGFNNDRPEFEKVRKLTKLDIDIILVWEISRISRRAIYLQQQVQEFTDKGICIYAKKEGFSTLNGDGTVNASTKMLIGFASIIAEQEAATLKERTISSKRNKILREGKSYTGVAPYGYDYSKDTKKLSINKEEAEVVKRIFQLSIDGYSAYRIPIILNAEGILSKKGNSWTVASIRTLLSNPVYMGKANYTLKSEKPKEGKTYRKAIEVASVDVPPIIDAELFNLSLEKITGRTNRSKSTGTKYNPLLRGLIICPNCGRRYTYKNRNQTYTCNNLIDNKLCKAKTITTKLDSIIWNVVKIFFYKELAAGKAQEQIEPLQVEIESYKQQLLLLDGKQSELTSKANIIINAAIEIKIQFPNMPDLYTNKLKEADVINKEAGRYLKERERLEKLIHSNESRIKNINKASKESSLVDSITDETEKYDLVHRAVECIMIFGEDKTSIIVVTFTTGQTIYIGYFSKRNSKYYTIFYPSVDIYFDIHKEKGYINHLKEEVAGIMPISQLNKQTVEYCITDFVNYLDIEDNRRYY

SEQ ID NO: 10527 - protein, 610 aa, synthetic construct
MTAVIYARYSSDNQREESIEGQIRECTAYAEKNGITIVKHYIDRAISAKTDNRPEFQRMIKDSDKKLFDIVLVWKLDRFARNRYDSARYKTQLKKNGVKLMSATEIISEGPEGIILESVLEGYAEYYSADLAEKVVRGQTENILKGRCNGGRGTFGYTLDSERKFHIDPLTSPFVLESFKKYNEGSTMKEIRDWLNENGIKNPVGGAFTYNSVEHMLKNRRYIGELKFRDVVVPDAIPPIVPLELFDDVQEKIAKNKKAPARRKAEDDYLLTTKLFCGYCGALMFGESGTSRTGEVHRYYKCATAKKHKGCKKKTVRKQWLEDLVVNQTMQLVKDDAAMESIIAKVMELQNKENTNIPLYEKQLRDAESGIQNMLNAIQAGILTSSTKERLEQLEETKRELEARIAEEKLAKPKVTEEFIRFWLLRFRKLDMSLKDQRQALVDTFINAIYLYDDKVLITFNYKEGTQTVTFGEATEVASEGNGSDLDCFTAPKNAVRSKDFMAFLFFATQLHGFCTVGARFVFSVLNYVGRGIALQSVPFFAFRSTVQGEAVPSFQGLHLSGAPKARPWRALCSPGQAEFGRWLLVWRRKNFQTFCPAPCGKTAGYGRKC

SEQ ID NO: 10528 - protein, 573 aa, synthetic construct
MAKVKLPDKPRVAIYTRVSTLHQIDKDSLPMQRQDLINYARLILNTEDYVVYEDAGYSGKNTDRPKFQEMMQQVRLGMFTHILVWKIDRISRNLLDFATMYSELKQLGVVFVSKNEQFDTSSAMGEAMLKIILIFAELERNMTSERVTAAMLSRAANGQWNGGRVPLGYDYDPETKTFTVNESEAAVVKIIHDKYEQERSLVSLARYLNGHGYRTRTGCTYSPSTLLIILRNVFYCGDYRYNVLKDGDRQKRKKESEWITVKDHHPAIISREQKDEIARILKENRRLECERRGIYSKKKNVHVFGGLVICGNCGHAMTSTIRPADQDGIRWSVYVCPTKRRSEYLCKGRATSEVVLGEFVFNYVLNMLNVQKNFDSINSVEDMEKMLLSGGTFRDVDGIERAGLDDLYNMLASGLTEKAPFDSSVEVRKKPVVSDIELENLNTEKTKIERAAERLQSLYLYSDDSISQKDYIIQREKLMSQLAEVNEQIGMVMSNADEKDVSDEEFVHAASKFILTQKLEGRTYIYYKRLATTVSREVLRSFVMSIIENITIYDGRVQTIVFKNGLSHTFILK

SEQ ID NO: 10529 - protein, 512 aa, synthetic construct
MSTKKDEQLGSYENQKAYYTEKIMANPNWTMADIFADEGITGTSACKRKDFLRMIRQCRKGKIDMILAKSVSRFARNTVDTLSYTRELRSMGIPVIFEEQNINSIYPESEFLITIHGAFAQSESEGISSRVKWGKHQAMRTGKANIQYKTLLGYEKGPDGEMVVNAEQAETVRKIYELYLSGQTLRNIKETLETGGFKNAAGTTEWMTSNLRTILSDEKYCGDVLLQKTFIRDCISKQVIRNTGQLPMYLIQNHHEAIIPRERFDAVQMELARRRAQTGGTKKSAPTGMSRYSGKYALSGLLFCGECGTAYRRVVWTQHGEKRAVWRCSSRLDYGKKYCKESPTLDEAPLQQAVLAAINASMSGRKVLADQLVDAMEQELAPVPGESMSLGDIDRAVTELGKQFDMLLAEAANGDVDEYAERFRAISTTMEELKRRKAAILSIRQEQIGRRIHAAASAMTAVTMGITDWDDGVVYQMLEKVTVLAGNRIKVTFRNGVEIEQTVDQPKRRKFA

SEQ ID NO: 10530 - protein, 484 aa, synthetic construct
MNAVIYARYSCDRQTEQSIEGQLRECKAFAASEGIHIIGEYIDRAISGTTANRPEFQRMIADSRYKTFQAVIVYKLDRFARNRYDSAMYKSKLKANGVRVLSAKEHITDSPEGIILEGLLEAMNEYYSAELSQKIKRGMRENAIKGKTTGGNVALGYRIGADKQMEIDPAGASLVRRIFTSYDRGMTFTEICDDLNHAGYTTSRGKQFRIDTISRILANQRYTGTFQCAGEDAHCPPIIEPELFRSVQERLAESRHKHRHTQSPHEYVLTGKAICGTCGRRLTGRAGTSKMDKRYYYYCCPNKCCGWLPAAELEHAVLDAIAQYTTPEACEQIANATYALYQQSTHENADLTAAQRRLQETEKKLENAVNAVLNGITSAALQATMQQLEQQKAALETEVRLLQTDAPELKLEHFQYFAHRLLEVQAEGTEKILQLLVNQVIVYKEQITVLVNLTDKTKTPPLEQVTAALRESSCSIACGGGDEN

SEQ ID NO: 10531 - protein, 509 aa, synthetic construct
MPKVTVIPSSINRATRQDISAPTRRKVAAYARVSTDFEEQLTSYEAQISYYTNYIQRNPDWEFVKIYTDEGISATSTKHREGFNSMIADALDGKIDLIITKSVSRFARNTVDSLTTIRKLKEYHVECFFEKENIWTFDSKGELLITIMSSLAQEESRSISENVTWGQRKRFADGKVSLPYAHFLGYRKGENGLPEIVPEEAEIVRYIYQRFIDGLTPYKIANELTAQGIPTPCGKEKWSASTVKSILTNEKYKGDALLQKKFTVDFLTKKQQINEGQVPQYYVENSHPAIITPEEFDFVQSEFQKRCVKPYSSTSIYATKIICGDCGSYFGAKVWHSNSKYRRVIYQCNSKFKGSHFCTTPHLYEPEIQEKFLQAFAQYFSQKDVVIKNCQFALTRLKKQESKKAELQDELIAVNEKLKDYIQHGGEDFDTLNAKYEELSAQLDAEETAEFDRKRRIAKMKKILLMLKKTDSVLETFDESVWNAVLENLTVFHDGSLVFLFRDGMEVKV

SEQ ID NO: 10532 - protein, 432 aa, synthetic construct
MRAALYIRVSTEEQARNGLSLGDQRESLLAYAADNGMEVVGVYEDAGISARKPYKQRPALLRLLADCKGGKIDTILFVKLDRWFRSVAGYYAVQEELDRCHVTWQATREDYETRTASGRLKVNIMLSVAQDEADRTSERIKAINEGKRLKGQPTTWRTPIGICVKDRHYAIDEETADAARDMFPAFIRLQSILALRRYMATEWGIKRSYNKYKDALSNRLYLGEAFGVENALPALVDQETFNLARRILEQRSQRNASADRIYLFTGILRCRECGRNMQPETVKQVYKYYRCRTHTLDPADCPHILRIREDVLEDYLLREFEGIAKKYYSKSKTAEKKPPKTAEQIKRKMQKLKDLYLSDLIEIEEYKKDYTDLKQQLAAINPEPVKEFDLETLRRELKEYPDLDRQAKKEFWVRTIQRIDADNDGAFFVTPS

SEQ ID NO: 10533 - protein, 493 aa, synthetic construct
MGQKCVIYTRYSSDRQREESIEGQIRVCEDYAKRNGLEVLHIYADRAMTGRSDQRPEFLTMIRDAASMSFDTVLVYKLNRFARNRYDSAKYKHKLKKYGVKVVSAMENIADDPSGILLESVIEGMAEYYSVELAENVVRGMTENALEGKWPGGIVPLGYKLDADHHLVIDEPNALVVRRIYQMILDGRTPASICRILNAEGKRTATGRAFNHNSITRLLSNERYIGIFSWRDVRRTGVVPRILDDRTFYAVQELRKSRQRHKGVAKRSENYMLTGKIFCGRCGSPMVGKSGTSKGGCIYYYYNCQRHIDGSGCPARPVRTDKLEDRVVQVTTKILSQPDAIKAIARQAIAIQKERRESLEVQSLKAQVSDLSKKLDNCLKAVDNGAFSETLCNHMRGYENRLRDMKAALSRAQLMDRGGKLTEKQIEFFFFAISRQLKQEPRYKEILLSSLVRCVIVNDDSIEIQYNYKKELPTLANPVKVKSSHKVLMVTPE

SEQ ID NO: 10534 - protein, 492 aa, synthetic construct
MNVAIYLRKSRADENNPLETLERHKEILLSYAKDNNLTVIDIFEEVISGGMLYNRTEMLKLLDAIPSHIYDAVLCIDLDRLGRGSAADSEKIFDVLKENDVKIITLKKIYDLNNEYDEDYSEFEMFMARKELKFITRRMNRGRIKSINDGCFVSGAPFGYRNAVINKKHTLEVYEPEAKYVRMIFDMYVNQSMGITSISRQLANLGVLSKKNTPLHPTTIARMLRNHTYIGKIVWNKSKSVKGKNTQEKTSKDDWLYVPGLHEPIIDEDTFNKAQDIINLKYKPPMRTGTLQNPFAGLLKCANCGRAIVINTSNETVEKYRLCCRTLGCNKASALSIVEDKVFEVLTKEFKDIELSLKNIRQSHNKDKLSCLDTIATLETELKKLDKQQLRLYDLLEQEVYTKELFLERNNAISDRRKKINATIAQEREKFKLVDTSSIEERLPLLHELLTNYHSLSAAEKNSILKNFVKKIEYKREKSAPEGDIFLKIYYK

SEQ ID NO: 10535 - protein, 474 aa, synthetic construct
MKVGIYSRVSTQEQAREGYSIGEQVERLKNYCAAKGWILYKTYTDAGFSGANTDRPGMQQLISDVADGKIDMVLVYKLDRLSRSQKDTLFLIEDVFIKNNVNFASITENFDTSTPFGRAMIGILSVFAQLEREQFRERSIMGKDARAKEGLHHGGGAPTGYDYIDGQLIINKEEAELIKEAYRLFLEDDMTMMGIAAKLSVFSEKFKYDHRIRKMLTNPLYAGWTHCRDELYKGQHEAIISQEVFDNVQTKLKIRAENNPHYRNAFNRTSLLAGILWCKKCGARYFKRVRRYEKGSKVYYYNKYQCYSRSSYKNMVRDKSCKNKIWTMDVLDKAVIDEIKALVANPAEVDNIIKLNQSNNNITEKKEFYKKRIKEIEKQMNKLTDLYSIDGIDIDFVAKKITTLNTDKKRIESEMNAINEHKPLISAEDAKKRLSGISNILDNGEFTEKVKVITSLINRIEVDDDDIYIYWNFV

SEQ ID NO: 10536 - protein, 573 aa, synthetic construct
MAYNAQNKTGARVAIYVRVSTLHQIDRDSLPMQKQDLLAYAKLMLNTDDCVIFEDAGYSGKNTDRPKFQEMMSQMRAGAFTHLLVWKIDRISRNLLDFATMYNELKALGVTFVSKNEQFDTSTAMGEAMLKIILVFAELERNMTSERVTATMISRANNGLWNGGRIPFGYDYDYETHEFSVNEEESKVVILMHDMYEQEHSLVRVVRELNERGYRSRAGNLWSPVSLLIILRNVFYCGDYRYNMLKEGDRQKVKDESEWVTVENHHVAIIPKDQKERIMATLDSNSKLCKQRNIYKSSKHTHVFGGLIYCGSCGKPLGSTPGNLTRDGWHYSKYTCPTRRKSVTLCTGKSTSDPIIGEFVFNYILNMLNAQNDFEKISSPEELEKLLLIGDTFAYIDHIEPNGLNDLFNVLSSGAVKGAVFGKGASLPTKKATVEPEVARLRNEKQKTERALDRLRSLYLYADEAMSEAEYMIQKNKLEETLEDINDQIGMMNTDSWQQSVSDEEFIQRASEFIIAQKLSGRKYVNYKRLAMSVDSEVLKNFVVSIIDSITIQDGLVSNIVFKNGLCHTFIFR

SEQ ID NO: 10537 - protein, 526 aa, synthetic construct
MVEKHLTDGTTALAGQPRVIKIEAAEKPRNAHLRVAAYTRVSSDSDDQLNSFAAQNRYYAELISGKAEWRMVDIYADEGITGTSAAKREDFQRMMADCRRGLIDQILVKSISRFARNTKDCLEAVRELKELGVNVRFEREGIDTANVSSELITAIYAAFAQKESESISGNMRWSCQRRMEAGTFLPSSMAYGYKLVGRKIEIDADAALVVCRIFQWYLNGVNRIAIAKKLNEEGISSGQRKKWHSASVRYILTNEKYTGDSLWQKTYTSDTLPATRHKNTGEHEQYYAVGTHPPIIPRETFDQVQTLMQKRSVGQAVTHERLCARMRCSCGSRIRAKQVNGRWYWCCCRHDEKGDCAIKPVPEAQTDEAICRLYYKLKHQSLPILEQMIETLRTIRDRRLLWSEDIVSLNKKISELSSQNQTLAFLKQNGLVDPDIFIAKSNELTRQLRQAKLDKEKLMDAEGDATAQRTRELIALLEDGPDFLDRPDTELCGALVAEIIVESNDTLRFRLHNGLELRESIERTVR

SEQ ID NO: 10538 - protein, 539 aa, synthetic construct
MNETAPRVVKIPAKPESVRQAELKRQLRVAAYCRVSTKEEDQANSYEVQKEYYTDKIMSNPAWTMAGVFADKGITGTSVKKREDFMRMIRHCRQRKIDVVLTKSFSRFARNTVDCLYYTRALKELGIAVIFEKENINSLEEDSELRITLSGAFAQSESESISANVTWGKRRAMESGKATIQYKYLYGYRRGADDKPEIIPEEAEVVRWIYERYLAGASTRMLRDELHEQGVIYSEKSPQWTLPHIKSILRNEKYCGDVLMQKTFQQDVINRRVIKNTGQLPMYLIENHHEGIVSREKYNAVQAEMARRKAAKSPSKRASTGLSAYTSRYALSDRLVCGECGTLYRRCTWTRPDGKRVVWRCVSRLDCGKKYCHSSPTLDEVPLQQAIIAALNTVLPDLDGRIRQITEALEAEVIPFPGSGMSLGDIDRRLTELEAQFQRLLEKAADDPIAYGDQFKEILDEQTALKELRATILAENKKHAEADRRIRDAAGMLENAVPHIAEWDESAIRQLVAQVKVLSKNEISVTLKSGIEIRQSISN

SEQ ID NO: 10539 - protein, 541 aa, synthetic construct
MTDEKPRVIIIPPKPELQQTTAVTKQLRVAAYCRVSTKEEEQASSYEAQCEYYTDKIMSNKEWTMAGIFADEGITGTSTKKRTEFLRMIRLCKQKKIDLILTKSIQRFARNTLDCINYTRILRQLGIGVLFEKENINSLPPDSEFMITMYGAMAQSESESISGNIRRGRQMHAKVGTLKVPCYRLYGYEKDTEGKFRVIPEQAEIVRELYKRYESGASLRNLQDWLEENQIKTVLGESKWTATSIKSILTNEKYCGDVLLQKTFRTDVISKKVIKNVGQMAQYYMPDHHEAIVSREQYNAVKAEMARRSALRSPSKAAVTGRSCYTSKYALSDRIVCGECGTLYRRCTWTSRGRKYPVWRCTSRLNYGTKYCHDSPTIKEEPLQNAILAAINSAMSNKPALLDLIKNAVSLELLPVQGQTMSLADIERRLTQLDEQFQRLLAEAIDAEDKESCNTQFAGILAEQTALKKQKEGILQSSTDADRVCTRMKQAEQAIESTASTITEWNENAVRQIVECVTVLSADEILVRIKGGAEFRQTVNM

SEQ ID NO: 10540 - protein, 533 aa, synthetic construct
MAKKQTDGNLALEQQRVIVIPAHDEIVARKLRVAAYAHVSSSSEDQLNSYRVQNQYYSELISSNPDWEMVDIYADEGITGTSVEKREDFQRMIKDCRKGKIDRILVKSISRFARNTKDCLAAVRELKELGVSVQFEEQGIDTSKVSSEMVTAIMASLAQKQSESISGNVKWGVQKRIQDKTFVTCKEPYGYRLVDRRLCIVESEAIIVRMIYEKYLAGISMEFIRDQLNVANIPFRENEKQHRWTRKAISYILANEKYIGDSLWQKTYSGDTFPYKQRKNKGEKEQYYVENTHQAIVEKSVWHAVAELRMQRAGEKHPEDYYAPSAFRKKVLCGCCSSMFRLRQNRGCTYWSCRQHDIDRNSCPNSQIPETVMQEAFCRLYYKLKHHGSPIFTQMLSNLQKIRYSRMLWSEDVISINKKISDTLSQVQFLTQLQQAGGVDPDTFISSNNKLSEQLRRLKQEKARLLDTDSDDLADRTRDLMDALEDGPDFLDSFDAELFDALVEKIIVDSNERLRFRLKNGLELTEQIERTRR

SEQ ID NO: 10541 - protein, 544 aa, synthetic construct
MRVVLYMRYSSDRQTEQSIEGQNRVCTAFCEQQGYEIVDRYIDRATSAFKDTDKRTEFQRMIRDSEKQLWEGIVVYKLDRFARNRYDSATYKARLKKNGVRVISATENISDNPEGVILEAVLEGMAEFYSKELSQKITRGMFESANKCHSIGGHIPLGYKIENKKLVIDEAGAAIVREAFDLYANGATVAEICETFNTKGYRTAKNAEFNKNSFRSMFKNERYIGIYKYKDLRIEGGVPAIVDKDTFAIVQKKLSKNAEAPSRGKAKIDYLLSQKLFCGHCGSLMTGESGTGKGGTTYFYYTCGKRKREHTCDKKPLKKDFIERAVVEDALTLLTPETIDELADIAVNESIREMEENSIIPALKDQLHDTERSINNLVKMVEKGVESDTIADRLKELEKEKRAIEKRLVVAQDDYVLLEKDHIVWWLSEFCNGDIEDEEFRRHIIDLLVNSVTVWDEPDGWYKITSVYNLTSNKTKTFRCSDLSGQAPPKEIRRNTVSAVFLYNRPTVFVPVPHRQRRHHEKETDRKRVRLCCQHAVWLVLRRR

SEQ ID NO: 10542 - protein, 590 aa, synthetic construct
MKTVEKIERKLPVLKTRKRVAAYARVSMESERMQHSLSAQVSYYSALIQKNPEWEYAGVFADYGISGTGTKKREEFNRMLAECEAGNIDIILTKSIQRFARNTVDLLNTVRHLKDLGIEVRFEKENINSLSGDGELMLSILASFAQEESRSISENVKWGTIKRFKQGIPNGKFSIFGYEWQDDNLVIIPEEAEIIRWMYAEYMKGASRIEIGRALMDRGIYTRQGKPWVDSNVKVILTNITYTGNMLFQKEYCEDPITKHRRKNYGELPQYFVEDTHEAIIPMDEWQAVQDEFKRRRDLGPFGNKSLKLSAFSTKITCGCCGKHYRHSGKRNTAGEVYYVWTCQTKSQKGAAACPSKNIPEKMLQNATAEVLGLDEFDEDAFSQQIEEVIIIGDDTLTFRFYDGHEVTTKWQSTAKTDWWTDERRKLWGERHKRKDTNPNRHLFYEFTGFIKCGCCGANYRCQSGKRKDGTPTRSWYCTGPKAQCHNPGIRDETMKRLVSDVLGLDEFDEAAMDAQIENATILDHTVTFHFRDGHTESRDFLDKRHGTPWTEERREKARASMKAAWTDERREAMSERIKKIRSEKKWPNP

SEQ ID NO: 10543 - protein, 532 aa, synthetic construct
MAKSVTTIPATLSRFTAAPINSTKKRRVAAYARVSTDNEEQLTSYEAQVDYYTNYIQGRDDWEFAGVYTDEGITGTNTKKREGFKSMVADALAGKIDLIITKSVSRFARNTVDSLTTIRSLKEHNVECYFEKENIWTFDGKGELLLTIMSSLAQEESRSISENCTWGQRKRFADGKVTVPFKRFLGYDMGPDHNLVVNPEQAKLVKRIYGMFLQGQSPFQIARTLTEEGIPSPGGKDHWNPSNIKSILTNEKYKGDALLQKTFTVDFLTKKKKANEGEIPQYYVKDNHEAIIDPEIFEMVQTLIATRKKGRNRKSSVSIFSSKVKCGDCGSWYGPKVWHSNDAYRKVIWQCNHKFDGQKCATPTLTEDEIKELFLRAANQVIDQKEQFIAIYEQVLSRSLDTTALEGELSELEAEINIAAELIEECIKENAHVALDQAEYQKRYDALVARFDKAKARHTEVTDLIAERTARKHQIETYLKELRGREPLTEFRETDWLAMVDYITVHSKDDIRVTFKDGTEIKAYPPQTQQRL

SEQ ID NO: 10544 - protein, 513 aa, synthetic construct
MGKAKLISPITRQSVQRQRVAAYCRVSSNSADQLNSYAAQIRVYTKLINNKPEWELVDIFADEGLSGTKAETRPEFQRMIHMCERREIDLVITKSVSRFARNVPESLEYARKLKLLGIGIQFEKEGINTLAMGDEMLLNTFSAIAQEESQSISQNLRLANVKRMELGEYVSSCAAYGYRLVDKALVPYEPEAKVVRDIFGKYLQGWSTNQIAKYLNESAVPSKFGHGTWTQTVVKYIITNERYIGDSKFQKKYAEPTVPFKRHKNRGEMDMFYVKATHPAILDAEVYYQAQELLKRRQEKYAKNDTLNTYPLTSRIRCSECGSFYHRKVRGGIVKWVCGKHSKDAATCPASYYSEERIYDGLASVINKLRFGEEDILAQVIDKLEAATTTYKRNNKEASDLSQSIAEINAKLLVLDQLRSKGYLEPEIHQAQTIDLRNQLNKIRAQRSSTFETKITEMLEQVRKLKRLIDELEEPMEVFDERLLVECITDIHINNCDEMTVTMLGGLEFKEQL

SEQ ID NO: 10545 - protein, 544 aa, synthetic construct
MEVTKIPKKRVTVIDPKRSVIVDKAKYNQLRVAAYCRVSTDSEEQLTSYNTQMKVYTEMISAKKEWTFAGMYADEGISGTRADKRPAFKRLINDCLSGKVDYIITKSVSRFARNTVDCIDTVRMLTGRGIGVFFEEQNIDTLKSDSELYLVIYAGFAQSESESMSRNITWSFRKNFEDGKAVFIYKKLLGYRRGEDGNPEIVPYEAEIVERIFNMFLAGQPVNVIAQTLRKENIQIPGKDLTFSKAMIMSILKNEKYCGDCILQKTVTVDCISKTRKVNEGEAPMYLVENNHPAIISREIFNRTQEEISRRNVSAPKSSRNCITASGKYSKYALTEVLKCAECGSNYRRCTWTSHGQRRIVWRCVSRLDYGKKYCKDSITVFETALQEAIVRALNRFNAENESTYLTLMKATIGDAIGINGGSDEIDLLSRRIDALNKRMMSMVNETIQSGLDIESNEDEFKEISENIEQLKRRIDAIRESQIEDGRLADRLEQIQNIIDQREENKDQYDDSIVRQMIECIKVHKDGKLTIIFGGGYEIEEYLE

SEQ ID NO: 10546 - protein, 512 aa, synthetic construct
MKRITKIDAAAKETKKLRVAAYARVSTDSADQLISLEAQKEHYEQVIKNCPNWEFAGLYYDEGVSGTKMAKRDGLLRMLADCERGLIDYILVKSISRFSRNTVESVETVRRLSAMGIYIFFEKENIDTGKMEGELMLSIMSSLAEDESRSLSENNKWSIQKRFQNGTYVIGTPAYGYKNADGKMVIDEEKAEVVRRIFDSVLEGKSGGTIAKELNAKGIPTARGVQWRSSVITAMIRNETYTGVAVFQKTYKDDQFNSHVNHGERGMYRIEGHHDPIVSEEVFLAANTAVDNNAKEKGVVRNSGKYSVRYALSGKIFCGECGGKCKRKKIYGDIWYGCETHARESKKCRQLPVRADMVEAAFVNMMNKLIYGRDAVLLPMSGRLLGGGDKEIIDRLAEINTELDAVAERRQAADKFFAKGLLDAAVYREELDELARKEKELHTVRAGIEGDPNLDSDRQRALNELLRYTAKAELLTAFSDEVFTKHVDRVIIFSRKEVGFAMKCGPVFRERI

SEQ ID NO: 10547 - protein, 519 aa, synthetic construct
MAMAQNITFIPAVKTVGTQKPAEKKQKVRVAAYCRVSTEFEEQESSYETQVAHYTSYINGNPEWEMVEVYADNGISGTRTAKREAFNRMIADCEAGRIDMIITKSISRFSRNTVDCLKYTRKLKEMNIAVFFEKENINTLDAKGEVLMTIMAALAQQESESLSANVRLGIQFRNQQGKVQVNHNWFLGYTKDENGKLIIVPEEAEVVRRIYREYLEGASFVKIRRGLEADGILNGAKHTRWHETNIRQILTNEKYIGDALLQKTYTVSVLDKKRSMNDGAMPKYYVEGCHEAIIDKETFLLVQEELARRSALYKGGKKRMYSSKYALSGNVACGHCGNIYRRVTWYVGDTKPVVWRCVSRLTPGEECVGRSVPEEELHAAIASAVNMTYANRDDIIPVLKENIESVVGCDVDEEIEVIDNMIRKSQMDLLDAGKDEARIQEIGERIVSLHERRQDVLTQAALKKDKIDRIKAMIRFIEEQTGEAEYSEILVRRMVEKVTIHEDRITVEFKSGLAIDVDA

SEQ ID NO: 10548 - protein, 457 aa, synthetic construct
MSEKNIISDGKVMRAALYPRVSTEEQAKYGLSIHDQQNDLERYAKEHGMKIVGVFADAGFSARKKIEKRPAMMALLDAIRRDEVDIVLVTKLDRWFRNIGEYYKVQDILDAHNVSWKAIYEDYETATASGRLKINIMLAVAQDEADRTSERIKKINEGKRLRREALTGDKPLGYTIINKKFVKDPQTALAVDAFFRKYMACGSVSATQDYIREEFGLTIPYQGANKMLRSTAYYGVYYGVDGMCPPYITKEQYDQIQTMRRKVIKRTDENRIYLFSGLIVCGDCGGRIGGKVNQDHKTFHYNCSNHFCRRKPCGNNRSISEKKLEKYLLDTVECKLESYKTEFSAVQENVVEKDYRSEINALRGKLSRLKDLYLNELLTMDEYKKDYASITEKIHELEIKQQPPRPSNLPQIQKLLSHNWRDMYGALSPMQKREFWRIIIKEIRWYPDRHIEFDINF

SEQ ID NO: 10549 - protein, 436 aa, synthetic construct
MERTITQVPTLPKLARKKRVAAYTRVSCGKDAMMHSLSAQISYYSDLIQKQSGWQYVGVYSDEAVTGTKETREGFQRLLHDCRSGKVDMIITKSISRFARNTVMLLNTVRELKSLEVDVFFEEQNLHSLSGDGELMLTILASYAQEESRSVSENCKWRIRNQFKQGEPTWFKTYGYRMCNGRLEIHEPEARVVRYIFRLYLLGNGMEAIINHLQQLGVRAPEGNIWYKNTVAYILTNERYVGDLLLQKTFIEDHLTKRRRVNTGELPQYFVEGTHEAIIDLATFMEVQKLLAKKRVHFHPNRQERTRYLFSGMLECGKCGAKYRRKITMSGTKYSKPVWICTTYNVRGKAYCASKQIPDEILTAVTANVLGYKEINREILEGEIEKILVSGQNELTFLLKDGTERVVEWEDHSRSESWSTEMRHEASEKMKRRSAS

SEQ ID NO: 10550 - protein, 538 aa, synthetic construct
MSVVSTVKPKITVLPATKNRFTAIPLNSLQKRRVAAYARVSTDSDEQFTSYEAQIDYYTKYIQAREDWEFVKVYTDEGISALSTKHRHGFNDMIQDALAGKIDLIITKSVSRFARNTVDSLLNVRELKEHGVEIFFEKENIWTLDSKGELLITIMSSLAQEESRSISENVTWGQRKRFADGKVSMPYKQFLGYEKGPDGAPVINEAEAAIVRLIYRLFLEGRTPAGIGAVLEGMGVPSPSGKEKWSQTTIISILTNEKYKGDAVLQKRFTVDYIKKKMKVNEGEVPQYYVHNSHEAIISPMEFDLVQAEFARRKQIGRSYSGNDLFASRLYCGDCGGLYGQKVWHSNDPYRRTVHHCNGKFKGNQKCSTPTLPPEEIQRRFLLAYNQMMGERNTVIEDCELMRAALTKGERIEQQIQSITEEIEVIAGLVQSCVNENATNALPQQEYSQKYNSLVNRYERAAAKLAELKAERAKIEERDRKIQIFIEMLKTQPLILDKWDAHLWNVLLEKATVFKDGSILFEFKNNYTVTITSEAGAA

SEQ ID NO: 10551 - protein, 578 aa, synthetic construct
MIDNCVRAVFYARVSTQEEEQLKALPKQVEECKDIIASKGWRLIDGYVDEGKSGTKKDGRKAYIKLLEDMQEDKFDIIVVKSQDRLQRNTFDWYKFADLLNKNNKRLYLYMDNKFYEPSEDALITGIKAILAEQYSRDLSKKLNNYHEHRIEKARAGEEVPAMGNGQTYGYQLINGKWVVDESQRELVRKMYELYTDLHSVRKVRDALNEQGYRNQRGNLFTDENIGRIVKNVMHKGWVILNRHHREFDSKETIRRWEDEWVIVKKDHEPIVSEELWDAVNDEIQSHRNKGNSGTRGKRGGTDPLSGKMVCSCCGRVLWKHASQGSYKSKEGRKYTYKRYTQWYCSGKMGRGELACTNPATISGVKLQKYLVEMADMFLDYSTVEYSKNLLKRRTISWLEDLKDKLTTPNDNGKIEQDLKALEGKRGKLIDLYTDELISKEEFKSRSVDLDAEIEKKRALLVPVEENPDIKAIEDTIANIDAEIEVLFEDEAMVEEKKVQFIQEHIKKIYVSKNSDVFIVLDNVAGAFLFIDKEDTRIEVVPVAEYNPEELSEEGITENDFVPFDRESMPFPHGRIYS

SEQ ID NO: 10552 - protein, 535 aa, synthetic construct
MKKKQPNTRHGRAAIYARYSSHNQREASIEQQVKACRELAVRLGLDVVETYEDKAISGKSDRRPSFQRLLRDAEKGYFDCVLAWKSNRMGRNMLQAMTNEARLKDWGVRTFYAEEDFDDTAAGRFALRNMMNVNQFYSENMAEDITRGMMDNASKCLSNGALPLGYKAGENGRIVLDKAQAAVVQEIYTRVACREPFVDIAADLNRRGIKTKRGGPWTKSSFYTICRNERYRGIYIYDDVRVEGGVPRIVSDGLFYRVQEVLKVKKTPQSARHHTGAEDYLLTGKLFCGKCGRPMTGVSGTSRSGEMHYYYTCQKRRRERACDKKNVIREQIEKSVAQAIKQYMLTDEMIQHMADATMAYNARQEKDLHLQDLQGQLAAVKTSAANLLKAIEMGVITETTKARMVELEQEQGRLNAQIENARAELVPITRDNFVSLLHIYRDGDINDSKYLASLFETFLVRVDLYDDHFLIWFNPLGQKTPADIPITSIENGDVDEFFDECRSKNVFDWGGKWSTKIKAPAVPRRVFLFWCSVSC

SEQ ID NO: 10553 - protein, 581 aa, synthetic construct
MARKRTNLIGNTPSVRETKVAIYIRVSTIHQVDKDSIPMQKKDLIAYCQLILGTDNYEIFEDAGYSGKNTDRPAFQNMMGRIRKGEFTHVLVWKIDRVSRNLLDFAEMYEELRSLRVTFVSKNEQFDTSTAIGEAMLKIILVFAELERNMTSERVTATMISRANSGQWNGGRIPFGYSYDPKEKVFSIREDEASICRELKDLYLLNRSLAYVSRALNEKGYKTRAGVNWSPHSVWIIASSPFYAGIYRYNRYKGVESRTINPEEEWVMIQNHHPAIFTLEEHQAMRSIMKSNKRNMDNLPGRVHLSTKTHIFQGIMYCDKCGSKMVSTPGRLHVDGYRTSNYGCPLRRNTKKCNNPTVNDIVIGEFVINYILNMLNAKKTFSTINTPDELNAALLSGSVFSEVSSVEENGLNSFFNLLSRYGSDRSYIFSVKSPRKKKAAVDPELSKLRKEKEKQERALQRLQDLYLYSETSMSEKDFIIRKSEISSHLDNINRQLGLMTQDQASFLSDEEFIKQASHLLIQKELKNKKYIYFKKLVSTVDPDILKAYMETILDSIYTADGKITAITFKNGLTHRFIYKDK

SEQ ID NO: 10554 - protein, 506 aa, synthetic construct
MAIALYARKSIERENSISCETQIEYCKSVIKPDERSEKTIEFIDNGYSGGNVDRDGFQKMMRQIERGKISKVIVYRLDRISRSLSDFVGILETLKKHNVQFVSSQESFDTSSPYGEMIVKILMVFAEFERKSIIERVKHAYAYRSEMGLYMGGRRPYGFNLKDTVINNVKTKMFEPVTNEIEQIKYIFENYSVPNVTLRRLMDNLIDNNISATTGSWSTAKLSNIIKNPIYVKADNAIYEYYSKRNANIMSDINQFDGLHGIQTYGKSKHTADDMSDIKIVVMPHDGIINSELWLKCQKKIVKNKKLGNSVNNSTSWLGGKIACKQCGRTMTVTKGGKKKDGTQTRYFSCTGKSHNRICNGPKVTLYADSLEDMVYKLIAEKLQSLKGSRKKISTDNSNKINLLKNQLSEIKQSQEKIVNMLLDDSFKSDMKSLLNEKAKKLSEESKAITEKIEDLESEENEIISVINLSQKWKSANTDERKAVCNVLIHKIFICEDGTCEVVWNI

SEQ ID NO: 10555 - protein, 527 aa, synthetic construct
MYYLMYLRKSRADLEAEARGEGETLARHRRALRELAARNGHEIRREYAEIVSGETIASRPQMQHLLMDIADPECEGVYVMEVERLARGDTMDQGRVAQAFLYSNTKIITPAKTYDPRNEFDQEYFEFGLFMSRREYKTINRRIQAGRIQSVQEGKFPSSVAAYGYRKVRVPGGKGYTLEVNPEEAAVVRQIFQWYVHGIDGKPAGVARIVRQLEKLSIPSGERSPGWRAARINRMLHNEVYIGKVRWGHVSVQRTLTPDGVQAKRAVSHNYRLYEGLHPAIVEEELFQAAQRKLTGTRVPLRNGMALANPLAGLVFCKHCGHQMTGQTASGKRVAQIFCKMHGCPTVANARGPVEDAILGELRAWLDDYQAHIDPFRKLTQGDNEERSLLEKALAQQEEQKKKLLKQKSSLHDLLEEGVYDVATFQERLAALQIRLRETDAAMEAAKAQLGTLGPQYRPAEQLMPAVQHVLDVYHTTASAQEKNDLLKSVISRIVYDKTVRGTTSPKSNPNSFQLDIFPALLTDLRP

SEQ ID NO: 10556 - protein, 433 aa, synthetic construct
MPRAITIVPKPPKLEKKKRVAAYARVSSGKDAMLHSLSAQVSYYSDLIQNHDDWLYVGVYADEAKTGTKESRADFQRLIADCRAGKIDMVITKSISRFARNTVTLLQTVRDFKAWEVDIFFEEQNIHTMSGDGELMMTILASYAQEESRSASENQKWRIKRNFEEGMPWNGAMLGYRLKNGRYEIIPEEADLVRRIYDEYLSGDGYLTIAKRLNEDGIPSRFGKQWGQSVISKILSNYTYTGNLILQKTFRENHITKKTVINNGELPKYHAEDAHDAIIDMETFQAVQTEKARRAARFIKKPTPKKTYPFTSLLVCDGCGKNYRRKVTKTGPVWVCGTFNSMGKAACASKQIPEETLQAVTAEVLGQMDFSEELLHRLIKSILVCNENVLIFRFYDGSEVTRKWKDRSRSQSWTDEMKATARQKALERRNQNA

SEQ ID NO: 10557 - protein, 526 aa, synthetic construct
MPKVTMIPATINPLTHLPSVAARKRRVAGYARVSTDSDEQFTSYEAQIDYYTKFIQSKPEWEFVKVYTDEGISGTNTKRREGFKEMIADALDGQIDLIVTKSVSRFARNTVDSLVTIRKLKENGVECYFEKEGIYTFDGKGELLITIMSSLAQEESRSISENITWGQRKSFSDGKVHLPYKRFLGYEKGEDGRPAVVESEARVVKLIYGLFLEGKTQAGICKYLEELGIPSPGGKQTWSKTTITSILQNEKYKGDALLQKKFTVDFLEKKIKPNEGEVPQYYVTGSHPAIIEPDEWEQVQAEFARRKTLGKAYSGKSVLSAKLVCEDCGAFFGPKVWHSTDQYRRTIWQCNGKFANEERCHTPVVDTETIQRLFIKAYNLMMQDRVQIIKRCEAWRARLMDFGTLDADIERQLEETQVVAELVKVAVKENASTAQSQEAYLKKYEALTERYEKAAAELERLQSLRTARSQQDKKMALYIRTLKKQPEVMHDWNDTIWTVMIEKAIVHKDGQITFVFQNGTETKVGA

SEQ ID NO: 10558 - protein, 500 aa, synthetic construct
MRMCGYARVSTDEERQLDSLEHQMEFFSDFAKQNGHHLVNVYTDEGITGRQLKKRDAFNKMLSDSKLGLFDLLVVKDVSRFARNTVDLLTSIRQLKSRGIDVIFVNNSQKVLGESEFVITLLGAVAQEESSNLSKRVKFGKNITSKKGRVPPRIFGYDRIDNFTMEINEREAEVVREIYHLYIDEGLGCRLIAITLGEKQMKTKYGNDWNQRNIRRILENPIYSGHYINHRYTVVDFLEGTTKALPKEQHYHHDRPEWAIITPERFQQAQEILEQRRKQYATEYTHFTGRYSNRHLFSTLIRCKECGRAFSRRVTHYPNSDYIYWRCPTNNQYTAKRCSNNTIVREDDLIETLSTYLREVVSNKESIAQEIARKFKEANAVEGSKPDAQALEAKKVKLKAKLEKYMEMYANDVITMEALKSKTAEINESINVIDDQLILLEGQRTQERTIESITNEAMTEIERFLSLQSATNMDLRRIIDSIIVDDKKQVKINLKITGNL

SEQ ID NO: 10559 - protein, 432 aa, synthetic construct
MRAALYIRVSTEEQARHGLSLGDQRESLLAYAADNGMEVVGVYEDAGISARKPYKRRPALLRLLEDCKDGKIDTILFVKLDRWFRSVAGYYAVQEELDRCHVTWQATREDYETRTASGRLKVNIMLSVAQDEADRTSERIKAINEGKRLKGQPTTWRTPIGICVKNRHYAIDEETADAARDMFPAFIRLQSILALRRYMATEWGIKRSYNKYKDALSNRLYLGEAFGVENALPALVDQETFNLARRILEQRSQRNASADRIYLFTGILRCRECGRNMQPETVKQVYKYYRCRTHTLDPADCPHILRIREDVLEDYLLREFEGIAKKYYSKSKTAEKKQPKTAEQIKRKMQKLKDLYLSDLIEIEEYKKDYTELKQQLAAINPEPIKEFDLETLRRELKEYPDLDRQAKKEFWVRTIQRIDADNDGAFFVTPS

SEQ ID NO: 10560 - protein, 485 aa, synthetic construct
MPTSDLKIAAAYIRVSTDDQEEYSPDSQVRLIREYARKNGYLLPEEYVFQDDGISAATARKRPAFNRMIALAKEKERPFDAILVLMFSRFARNREESVLYKGLLRKQGISVISVKEPAVDGPFGTLIESIIEWFDEYYLINLSAEVKRGMSEKFLRGEAMGTAPFGYRIDSANKTFTVDPERAEIVCDVFRSYADGAGLRDIAVQLSDAGITTRRGNRPDNRFVEYMLRNPVYIGKIRWTPGHKTRYSRVHIADGVEVVDGKHPPIVSMDLWEAVQRRMDQRKAAYGRYQRQAPAAWMMRGLVRCSACGATLIMAGRSSSCPFLQCHSYAKGSCHTSHSLSLRRANAAVLTGLRRSVGTLTFHMVPHLTSAPSRIADYGRLLEQERRRLARCKDAYQAGVDTLEEYRDNKARLEERIRRIEEQAASAAAAPESFDKAAYGKKTADILRFLETSADEGAKNEVLRSVVDHITYEKASRHLAIYFYT

SEQ ID NO: 10561 - protein, 558 aa, synthetic construct
MSKRVRTLLRVSSRQQLHDDDIPIQRAEAEQFIAKQKDWVFDKEYLEKGISAYHNGVEDRAVLQEIMQDAKQGEFEILLAYMSDRIGRQEEYSFYVAELNRMGIEVWTIKDGQLKTEEHIDKLLNYIRFWQNEGESKKTGMRVHDTMVEMVKDGRFVGGKAPYGYKLVLSGKISNHGRALHKLVIVPEQAEVVRQIFGYAVNQGMGFQKIAKTLNENGVPAPILEQWKNGTVRSILTNPIYMGVVAYNRRKNGHANSTRLDRKEWTYAREQNPEIAIVSQELWERAQEIREARKNKINAARQATNELYMEQYNVPFSTRGRLALTGMVYCGYCGKRLKNTGYANHWTCKKTGEKKVSYVGRYGCPNGCKPRSTYSQEYLESIVFATVETYLENLKKIDISKELEEMQTQQGKTIKREIKDLEKEIKNLLADIETLEEKLPEAIRGEFAFSVDKLSAIISDKESLKKEKEIQKKSLQKQLEEISLQSNELMTFVEAMPKWNEIFSQADVQTKQMILSTLIDKIIVKDDDITIKFKIRLDNFLDEKLLESSGVDVPEQRL

SEQ ID NO: 10562 - protein, 612 aa, synthetic construct
MRAAFLIRCSTKKQDYERQVNDLTRLAKKFGYTSSDNMIFGEHITGKDDASKRDRQSIQRLKDAAINKEFDVVLVSEVSRMSRDPMSGRLYVRQLINMDIPVYFRDIDTWTIDPVTGKKVRDAETIIGAAFDAAWKYIKSMKTQIASGRRDELDNNQMSIGQPFFGYKRYGGRDKGKKNSWVINDDAAKVVVDVFEEYVKDGATLKSTALAITAKYGEQFNKKFSIGTIEHILTFEPYCTGIKVVSLTDPDTEDVDEFEVEIPTIITRAMFDKATTKRATNRTARTPYPKQATYILSKLLKCPICEHSLTPQKRGGDKGDKYRLMNGKVAIRWSCMSGINNATDCSSRITISNEKLEAIIWGLVKQELIGFANLNDEDRVAKVEELTDKITNLEMNIANFTSHISNMDRLIERAYSAYMDAPDSVMDIAKDKYYKTLTKCENERAECKDKIEALSAEKLRLENMRTFFNQPTLPKDAIEKAESDPIKMRNLVMELIDKIYPYRITTYVSPATNRIMKNGIVLLEVYTINGIYNVLYDGNQRNNKVAYYISSVYATFQNGRNKFDAYDTGEYFVISHATLVTETEDVDMLVTFNELIKICMQNGWEIDYTYKM

SEQ ID NO: 10563 - protein, 539 aa, synthetic construct
MAKTVRTVQKIESRASLTSSTPDIEQPRKRVAAYARVSTDSEEQLSSYEAQVEFYTRYIKGNPSWEFIDVYTDEGISGTNIRKREGFNRMVNDALSGKIDLILTKSISRFARNTVDTLTTVRTLKDHKVEVYFEKENIYTLGTKGEVMLTIMGSLAQEESRSISENVTWGKRRSMEEGKFSLAYKHFLGYEKGEDGLPRIVEHEAEIIREIYQLFLGGSTVRSIADHLTAKGIPTPAGKKKWSVSTIMSILQNEKYKGDALLQKTYTADFLTKKVKKNCGEVPQYYIENSHPAIIDAETFDLVQKEIERRRPHRHQLHRSSPLNAKIICGECGGFYGRKVWHSNSKYRKSIWQCNCKYDNESHCSTPNLNEDEIKNAFVTAFNQLLDDKASHIARLKEIQTELSDTSLLEEQLHAATSEHARLLANLRQYMEENTRQIQDQTEYNRKFNEMDAACQEQEEKIASIRKQLLDQQTRKEQVARSMSFLVEQTDYIAEFDADLWNAMIENVTVSLDKTLSFRFYDGAVITIDLSAETPKSTK

SEQ ID NO: 10564 - protein, 444 aa, synthetic construct
MRKITKLNQTAPAPVKRKKVAAYARVSSGKDAQLHSLSVQISYYNNYIGNRGDWELAGIYADEALTGTKEGRPEFQRLLTDCRNGKIDMVITKSVTRLARNTLTLLETARELKSLGIDIYFEKENIHTMSMDGELMLTLLASFAQEESRSASENCKWRIRKMFEQGCPVNGNMLGYRLKDGLIYVVPEEAQIVQMIFTDFLSGMGKGAIAKKLTNMGIPAKFSKFWSISTIYGILRNERYVGDLLLQKTYQSDHISKKKVINHGELPMYLVKDNHEAIIDRETFRQVQLELKHREETYYWKHGSSDPHLFTGMLHCGICGRTYRRKTANNNSKYAKPVWICETYNTHGKSKCPSQQIPENIIISKTLEVLNVAELDREMLLQHIKEIQVPAHNQLIYVLTDGRIIEVPWQHSSRKESWTESMKQDARDRQLQFRERVNKNGKNS

SEQ ID NO: 10565 - protein, 457 aa, synthetic construct
MREITKIGGRNTQPVKRKRVAAYARVSSGKDAQLHSLSAQISYYNSYIGSRGDWELAGIYADEAMTGTKENRPRLQKLLSDCRAGKIDMVIVKSITRLARNTVTLLETARELKALEIDIFFEKENIHTLSTDGELMLTLLASFAQEESRSASENVKWRIRKNFERGIPTGGGLFGYRFKDGMLQVVPEEAEIVKQIFNNFLSGMGIAPIAKKLNREGVPTRWGNLWSKSTIRGILQRETYTGNLLLQKTYRSDHITKKKMINYGELPMYYVEDSHEAIIDRETFQRVQNELERRAAEYSRPHTARPASPYLFTGMIRCGFCGRHFSRKLTASDKKYTKKPQWVCSTFHVYGKSECPSQRIPEDILIAKTSEVLGYDGWGREELTRDIEEILVPEHNCLVYVFHDGHMESVHWRHPSRRESWTSEMRQKARERQLEVIRQKRKGDEEECRHLQEKSKR

SEQ ID NO: 10566 - protein, 473 aa, synthetic construct
MAKITKVEQTLPTIKEKKKVAAYARVSMESERMNHSLSAQISYYSSLIQKNPDWQYAGVFADDGVSGTGTAKRSEFRRMIETAENGEIDIILTKSIQRFARNTVDLLETVRHLKDIGVEVRFEKEHINSMSGDGELMLTILASFAQEESRSISENVKWGTRKRFEKGIPNGKFRVYGYRWEGDELVIVPEEAKIVRRIFQNFLDGKSRLETEREFAAEGITTREGCRWVDSNIKVVLTNITYTGNLLLQKEFIADPISKQRKKNHGELPQYYVEDTHPAIIDKATFDYVQSEIARRKELGCFANKALNLSCFSTKIKCGNCGRSYVRSARKRGQYVLWTCGSKKGRGKVSCGAKDVPEEQLKRICCDVLRLGEFDADIFSGRIEQVRIIGTDTMEFHFYDRSSVETKWKTTAKRDMWTPERKALWSEYNYAGGRNGTGMGFNEYVKRKEGKMHGTKKSDDNSADNQPLHGGAD

SEQ ID NO: 10567 - protein, 521 aa, synthetic construct
MTTIPPTISRYTAVPISSTKKRRVAGYARVSTEHEDQATSYEAQVDYYTNYIKSRDDWEFAAIYTDEGISATNTKKREGFKAMIADALAGKIDLIITKSVSRFARNTVDSLTTIRQLKEHNVECYFEKENIWTFDSKGELLITIMSSLAQEESRSISENVTWGQRKRMADGKVSFAYSRFMGLDMDKETGKIVVNPEQAEVVRLIFRLFLEGMTPHSIAAELTHRGIKTPGGKDVWNQQTVRRMLSNEKYKGDALLQKEFTVDFLQKKMKKNEGEVPQYYVEGNHEAIISPAVFDMVQAELARRSKGGTRYSGVSIFSNKIKCADCGGWFGSKVWHSTDRYRKVIYRCNRKYNGEKCGTPHVTEDEVKAAFVSAYNQLVTEKKEIIANAEIIRRTLCATDSLREERQKLEDEMLVLVEMTQSIVAENARIAQDQDEYQNRYDGLVQRYETAKTRYDEVAAAISAKEAQSERLVDFIRMLKKQDGSIAEFDERLWGCMVDFVTVGRKKEITVTFRDGTEIQA

SEQ ID NO: 10568 - protein, 454 aa, synthetic construct
MKKISKIEPILPALPERKKVAAYARVSQDSERLMHSLSAQVSFYSAYIQKNPEWEYAGVYADGAVSGTGTEQRDEFNRLIADCEAGKINIVLTKSISRFARNTVDLLDTVRHLKEIGVEVRFEKEHIHSLSEDGELMLTLLASFAQEESRSISENVKWAIRKGFEKGKQNGNRRIYGYEWDGEKYVIVPEEAENVRLMFENYVNGIPLEDTVRQLKEMGVRTLRGYEFTSVQITYILQNERYCGDKLLQKRFVEDHISHKEKMNEGELPMYYIEDCHEAIVDRSTFRWVQEEIRRRRAEGHTAQPGIKTYCFTNKIFCGECGRTYVRAMHHYKVMPPCVYWTCKTKKAKGESCKSKNLPEEALKKAIAKAMGLPEFDEAAFMEQVEKIVSVEPRDIILHFRDGRTVREPVIMKGYKKEHYPPEVLAYRAEQRRLKQLREEAEAYGKDNSDTGND

SEQ ID NO: 10569 - protein, 524 aa, synthetic construct
MAKITAIPATIDRYSAAPISGLKKRRVAAYARVSTDHEEQLTSYEAQVDYYTNYINGRDDWEFVSVYADEGITGCNTKKRDGFNKMVADALAGSIDLIITKSVSRFARNTVDSLTTIRKLKEHKVECYFEKENIWTFDGKGELLLTIMSSLAQEESRSISENCTWGQRKRFSDGKFSVAFSNFLGYDRGENGELVLNEEQAAIVRRIYGLFLQGRSPYAIAKLLTSEGIPTPSGKEKWCGATVKSILQNEKYKGDALLQKRYTVDFLTKKKKVNQGEVPQFYVEGSHAAIIEPSVFDAVQKQMAVRHPGKNRHSSVSIFSSKIKCGDCGGWYGSKVWHSNDKYRKVIWQCNHKFDGGEKCATPHLEEAEIKELFLKAANILCTEKDEVIADFEAIKDTVFATAGLEREKADLQEEMNVVAGLIQQCINENARVALDQAEYQERYNALADRFDKAKERLEAVSMEITEKQARREMAERCLTEIAKQEGVVSEFDEDLWYALVDFVTVCGKDDVRFTFKDGTEIKV

SEQ ID NO: 10570 - protein, 524 aa, synthetic construct
MPNVKVIEPTRNLHTHRLTVERAKRRVAAYARVSTDSDDQENSFDAQKSFYERYIKENPLWEFVGIYADEGISGTSTKGRKEFQRMINDAKNGKIDLIIAKSMSRFARNTLDTLTYIRELKARGVECFFQKENIYTFDSKGELLITIMSSLAQEESRSISENVKWGIRKSFADGKVYLPHKNFIGYKYDENKNIIIDKDTEWVVKLIYKEFMSGRTFRQICKILEEKGVKTPGGKYKWSETTVRSILRNEKYCGSAILQKTFVEDFLTHTTKVNNGEIPKYYVRDSHPYIIPKEEWDMVQLELQRRAELRYSYSSKNCFSSKLICADCGHLYGSKVWHSTDKYKKTIWQCNYKFDKKNKEQCQTPTLNEEEIKAMFVDAYNKMIVRKDEILKNLELVLNQIVSVESIEDKIKEVNKDIESVVNDVEILIHSSKDTDEIKQKELELKYDKLIHKLKDLEHQKEEVMDKRNKINTFISTLKDKVDVISEFDEELFNIMVDKAIVNRDKSIEFIFNSGYKVKVEARK

SEQ ID NO: 10571 - protein, 436 aa, synthetic construct
MEKRIEKVAVMPKLKQRKRVAAYVRVSMDKETMLHSFTAQASYYKELISKHKDWEFVDIYADYGISGTKVNRPEFSRMIEDCRNGKIDMIITKSISRFARNTALLLATIRELKALHINVYFEEQNMNSMSEQGELMLTLLASIAEAEAKSMGENVKWRINKTFEQGEIYSTTRFYGYDIIDKKFVINEEQASVVRRIFQMVLDGLGYIKIIEVLNKENIKSPSGSKWTIRSLERIVKEDTYIGKLTLQKTYRAENHTKKRNLGELRKYIVEDNHEAIIDRDTFNKVQEIIALRRNKAKGEYDSNDLFKGMIRCSLCGASYQRKKRYGYNLYDWKCWNYLYSSKSERCKTVSLPESILIEKTKEALEVDELTSKLVKDKIKVIFAHPNRVLEFVFNDGTKKTIAWELKSRKYSWTPELREEARRRAIKRNTGRKEEE

SEQ ID NO: 10572 - protein, 596 aa, synthetic construct
MEVELIKAHDSFDGSARRKIERLRVAAYCRVSTDDEDQIKSYNSMVTHYTELIKNNKEWIFSGIYADKAITGTKVDKREEFQRLIQDCMDGKIDMIIAKSLPRFARNTLDTLKYVRMLKERNIAVYFEVEKINTLKDGEFLMTILSSVAQQEVENTSAYVKKGLKMKMKRGELVGFQGCLGYDYDVETKSISINEEGAVVVRYIFDRYVAGAGSTMIARELNEQGHLTIRGNPWTSSSVMGIINNEKYKGDILLGKTFTVDPISKRRLENLGEEDRYYIHDHHEPIITEEQFERAQEMRRRRNGNRKCGVTPGKREKFSRQFAFSCMVECGFCGSNLSRRRWHSSSKYKKTIWQCVKSTKEGKRFCPDSKGIPEQVIEEAFIESYRMLCNDNKDVLEEFLKRTEKALGENSIEDQLHKLKKSIDKVSLKRKKLLDNYLKGIIEQDIYEETDVGYERKLSNIRANIEMLEQQMEDEVSLKRRVEDFKKALSQNEVLQEFDRGIFESIIEKVIVGGYDEDGNKDPYKITFIYKTGFKNEIGNAKERFGKSSGIGDKVKKMCSDISDEVKGVCSDVSLNTCGDGSIDVKSRRKIAAKAQ

SEQ ID NO: 10573 - protein, 533 aa, synthetic construct
MICAAYVRYSSEGQRDGYSIEAQLNAIKNYCEREGYTLSFTYADEARSGTIDDRAEFQQMITDAKAKKFECLIVHKFDRFARNKYDATIYKKVLRDAGVRIISVLEPLDNSPEAGIMEALYDALAEYYSKNLSRETLKGKNEAAKRCQFLGGGYVTYGYAVENKKYVIIPEEAKIIQEIFSRVASGESYGSVSRSLYDRGVRNRQGRIISSTSISRMLDNPMYKGTYIFGLRSRDKTKTPITIEDGCPAIVSKELFEQASSIKKKHQEEWWTHTREVRAREKETTYLLTGYIFCGVCGSNYYGHKSKSTGHNRKGERIYKYEYHSYRCSKRHLKTEACTVRDYKKICDNVFLRKEPLEDYTIELIERCISSDSIIDSIVTLLKDARKRQSEQLFDVKSIKKSIQKLESQEDKLLDAYISGLISKEKYEERLKDCRTKKASLNQELARVEAAQSNKPLPTTKQIKSTFLKALKGDKSDIEYRKMLISTFLESIIVYPDRLEFTFKFPIFNGSYSSSVGSDIFVRSNTTVSTWKV

SEQ ID NO: 10574 - protein, 502 aa, synthetic construct
MEIQIREGNSRQKQKLKVCAYCRVSTDADEQENSLENQIRHYKEVITSNPDYEYAGVYSDFAISGFKEKRPGLQKMLADARKGKIDLILTKSVSRFARNTSIVLEATRKLKELNVGVFFELQNINTLSGEGELMLTILAAFAQAESESGSVGAKMVYQRKYEAGIPVQYLERSFGFKKDERGVYIADEEEAVWVRKIYDMAAQGYTLAAIKRYLNENNVKTVGGAEWLDSTVLRILENEIYKGDYIMHKHFVNEERKLVRNRGEVDAWYIEDDHEAIVSPELWQKAQDALEAKRDYLAEGSVIEEFTEENYPYMNRIYCARCGHPLYRRIYSNGNRLNWGCSGTKRYGRSFCEGINIPDGVLRGAWHFDENMYIGEKQTDKGKKEFTYLKEASWKRRHKKKEPEPIPENTETEYPYREKIFCGLCGSRLVRHVNTKSHKVIWVCNGRKRKGKDFCDGTRVPDTIIKGWGEIKKDIYIQRKDDKNGKKRYSYTSKKPKGADRA

SEQ ID NO: 10575 - protein, 469 aa, synthetic construct
MARTIVHIPAQPRAATTSATQVTRLRTAAYCRVSTEQEEQLNSYEAQVDYYTNYIKSNPRYEFAGIYADRGITGTNTKRREEFNRMIADCEAGKIDFVIAKSVSRFARNTEDCLFYTRKLKDLGIGIYFEKENINTLDGGGELLLTILSSLAQEESRNISENCKWGIRKKFHDGKLHLNADRFLGYDKDEKGKLVINEDQAAIVRRVFYEYIWEGLNPDAIARRLQAERIPGCMGKPRWSVSTIQAMLRNEKYMGDALLQKTYTADFLNKKSVKNHGEVEQVRVKGDHEAIIEPEIWDAVQLELQRRHRYTEEHNIRFRGRNSDAQPFSCKVICGVCGNPFWRRTWYRENKTIKVWQCGQRYQEKGVVTCVSENLKEETLYNAFVVAWNAIVDNRKELLPEWEETMQKGNALERLRAQQMMELTDRPKLFSIDLSLVGKCLDFVEVNNGGVLNFHFLDGSQICVETNVE

SEQ ID NO: 10576 - protein, 407 aa, synthetic construct
MRIKIIKAKPPEIHKQRVAAYARVSTDSPDQEGSLESQTQYYSEYLSQNPAYEFVGIYSDKGITGYKEQRPGFQQMMHDAMNGSIDLIYVKSISRFARNTEVLLKAVRALKSKGVGVFFEVQNINTLSGDGELMMTILAAFAQGESDNYAELTRMHFKRLFSQGKPTRCTAATFGYSEDEYGGLIVNESEARVVRKIYELALRGATLSGIANWMNNNKIPAIKGGLWNPTGIRRILQNVTYQGDLMLQKSYLDTKRHRHPNKGQVESWYVQDNHPAIISRDDWQKVQTILDNHVIPSAQPVAYAKKDEFGNYLLAGKLFCPLCGASLQHKFSNSRTSEFWACRTNLKKTKAACPGIYVPAQVAEEWVITEPTTVLESKDDFGILHFTPVPKRNYERRVGCPYTKKEA

SEQ ID NO: 10577 - protein, 542 aa, synthetic construct
MTTQQTPQKRRITVIPPNPQLTERDIHKKHLRVAPYCRVSTDSEEQLNSYNAQIAYYTEKIAATPEWTMVRLYADEGITGTSMKRRKEFLKMLRDCDQGKIDLIITKSVSRFGRNTLDGLDTVRKLKRKGIGVFFEKENVNTLYMDNEMILTFMMSQAQAESESLSGNVKWGHRRNFKDGKVYYHYASFLGYRKGPDGLPEIDPDEAAIVRRIFARYLLGQSVHQICRDLMSDGVKTAQGSDSWHDSVVRKMLQNEKYIGDALLQKTFMADLFTHEQRKNMGELPQYYVHECHPAIIDRDTFQRVQEELARRSSLRKTSSKAKTELGKYCGKYVLSELLVCGECGSPYRRVVWSRPEGKRIVWRCINRLEHGKKICKKSPTWNETDIQAAVTAAMNELFHAQTAKEALEASITAALAGEDGELSLPTLEAQIRSLTERQLELFQLAVSAGPDCLEYDEEIQRVNIAKTSLMAKKAELEREGRTAAAFDRRMEDIANELEQTAGTITEFDEVTVRQLVSNIKVVSEDTLLICFKDGTEITQTI

SEQ ID NO: 10578 - protein, 529 aa, synthetic construct
MVQTNTTAARRPRITVIDPRKPEAAKLRVAAYARVSSDSADQLNSYMAQVDFYTKFISSREDWELVDVYADEGLSGLEARKREEFNRMIADCRDGKIDRVLVKSTSRFARNTTDYIRYVRELLRLGISICFEKENIDTGKMTTEQIAQIYGAFSQMESTNHSNNMRVSVRMRMEKGIFVPPSTPYGYRLAGRELEIVPEEAEIVRYIYNAYLKGQGTADIAHELNELGAVRGHGREGWHPNTVQYILTNVSYTGDMLWQKSFATDTIPFRQVPNRGQKPRYFVENCHPPIVSKEDFQRVQDLMALRRTQFAGNASKPEASVYSKRIVCGDCGSVCRRKVTNGKTYWVCNRHDDAKSRCPVPQVPEAEITAALLRLYHKLKADGGTILRTVLEQLRELRERELRTNCKISDIDKEIARLSEQNLVLVRLKSKGYVDPALYLSQQGEIEQKLRTLRRLRRRIMDSTGEDTQIQDTEIMLDCLEDGPQWLGEPSQELFESLVRRIVIVSADTLKFTLLNGLELTERIGKAVR

SEQ ID NO: 10579 - protein, 534 aa, synthetic construct
MGRRQQTDGSLALEQKKVIVIEAAQRPEAQKLRVAAYCRVSSDSSDQMNSFAAQLNYYTTLINSKDNWTMADIYADAGISGTSAEKRPDFQRLLSDCRRGRIDKILVKSISRFARNAVDCLETIRALKAIGVGVCFEEQGIDTSEMTGELLTAMFSAIAQKESESISGNMRWSYRQRMEKGTFLPSSMPFGYKIKDRSIVVDEAQAEIIRRIFNSYLAGQSMDEIAAQLNRENVPVKIGKEDRKWLQTAISYILSNERYIGDSLWQKTYATDTLPARQIRNHGERQQYYAEATHAPIIEKEVYLAVQKLKSQRSKKYGSRNPYMENSLHKIIFCGKCGTPFRRKVCRGITYWVCHNHDNGRENCPVPQIAEEALRAAFLRIYHKLRLHGKSILKQMIADLQSVRERRMLWSIDIIELNKRISDINDQDRMLADMNKCGLVDPDIFISRSNELAQQLRAVKQEKERILGAECDDTIPRTRELMETLEALPEFLPVFDGEIFADLVVGITVDAGNILRFRLKNGLELTETAERSVR

SEQ ID NO: 10580 - protein, 545 aa, synthetic construct
MTGTTPRVIVIPPKPELARSRTVQRQLRVAAYCRVSTDDEEQLTSYEAQQTYYTDKIMTNPQWTMAGIFADEGITGTSAAKRPEFLRMIRKCRQKKIDLVLVKSISRFARNTVDCLNYIRVLRALGIAVIFEKENINTLESDSEMLITMMGAFAQAESESMSANIVWGKRQAMREGKANVQYQHLYAYELDESGNPRIIPEQAAVVRQIYDRFIAGHSVRMIKKTLEQQGVPTAKGGDVWSESVIRSILKNEKYCGDVLMQKTYTQDCISKKQIRNVGQLPMYLMRDHHEGIISRDRFNQAQAEFARRNAGRAPTRKLAPTGRSCYSAKYALTERLVCGECGTLYRRCVWVKRGQKFAVWRCASRIDYGTKYCHDSPTLREASLQAAILAAINSVMSQREALVGQIEESMRMELIPFPSGTVSLSDIDRQLEELDGEFQALFAESKDGGFMQHAEEFKRISDDMAALKEQKASLLERQNSDSAANGRIKSALDILSTGSGAFTEWSETLVRQLVDTVKVLSADRIRVCLRGGIEIEQTLGEGELQ

SEQ ID NO: 10581 - protein, 455 aa, synthetic construct
MGKNEVAPLRVALYVRVSGQEQAIKGLSLEAQQESLEEYARERGWVIVGVYIDAAKTARKSLGKRTNFLRMLESVKQDNVDLILFTRLDRWFRSVADYYKVMEILDAHNCGWLTTQEQYDTTTAGGRLYINLRLSIAQNEADLCGERIGVVLDSKVKHGTVVSGKIPFGYRINEEKRLEVVPENAAIILDAFEHYRSTVSVRATAAYIQRTYGLNWDNVRCRRNLAQTLYIGHYESNGRVNPNFCPPIVPRDLYDDVQKLLSNNTKANPTGRVFLFTSLLICAECGHRLAGLQTGYGPYYRCPQHYSRRTCDHKKQIRETAVEEWLFTFLGDELKKQRLEWDIKEARRRQTAASIDRAAIRRKLSRLKELYVNEMIDLEEYRRDYELYTAQLSERTAPSAEEERPNFEAVEAILASGFRKIYDGLEREEKRTLWRSVIKEIRVDKERQITGISFL

SEQ ID NO: 10582 - protein, 572 aa, synthetic construct
MRKGVCILKKVRILLRVSSNQQLEADGDLGVQRQLVKEYVAKQADWVLDDKEYFEGSNSGYKNTVAERSVLQDALQDAERKEYDILVAYKDDRIGRRMWEIGAYVMALKSYGTDIYTVKDGCISPETDDIMGQMMLALRYGNAQKSSSDTGMRVKDTAQKLVQKGKFMGGAAPYGYRLELSGEISKHGRALKHLVIIPEYAEVVKYIYDLSLKKEYGSTKIAKALNEHDKYKNLAPKDSWKSGTITSILTNPIYAGHTAYKRRERVNGKYHRLNSEDWITSFEANENIMIIDGDTWDRVQEKRKQRGDKYIKTLEHKNVKVIRRNDGMLALIDVLYCGYCGRKMTNGSKYNYWTIKGTNEKRTSKIAIYKCQDAWQGVPHDKPKQIRADKIEPIVFNAIAQYIGKLQENENIFQQIENNQEKEKKSKEKELKKEKESLEKIQKKIMIMEEHIPDAMTGEYPLSLQELVTIINKYKEQLQEQQKLVSKKEIEWKAASVSVNDWEDIKSKLPSWQDIFLNTDTATKRVLVNKLIERIDVKKDEIIVRFKVNLNDFFVQPRTSDGFGVQSARVQL

SEQ ID NO: 10583 - protein, 526 aa, synthetic construct
MGQMVGNPKVTVIPARPRMGLGRNNEEKQKIRVAAYCRVSTDSDEQATSYEAQIEHYTAFIKKNPDWEFAGIFADDGISGTDTRKREEFNRMIEECMEGKIQMVITKSISRFARNTLDCLKYIRQLKDRGIPVFFEKENINTMDAKGEVMLTIMASLAQQESESLSQNVKIGLQYRYQQGLVQVNHNRFLGYTKDAEGHLVIEPEEAEVVKRIYREYLEGANLLQIGKGLEADGILTGGGKKKWRPETIKKILQNEKYIGDALLAKTYTVDFLTKKRVKNNGIVPQYYVENSHEPIVPRDLYMQVQEEMVRRANLHSGENRKKRVYSSKYALSSIVYCPKCGEIYRRIAWNNRGKRSTVWRCCTRVEHGPEGCDAPTIHESELQEVVARAINDLLGGRDTFLPILQANILQVLENNSSGKIAEIDRRLVEQQQKLLKLANGKKDYNAVADEIHSLREQRQKVLAQDAERDGQKKHIEEMKAFLEEQKDIPIEYDEQLVRRLVEKVTVFDEKIAVKFKSGVEIEVDR

SEQ ID NO: 10584 - protein, 527 aa, synthetic construct
MSHTGKKGEWMKRITKIDMAEPLITKKLRVAAYCRVSTGSDEQLVSLEAQKSHYESFIKANPEWEFAGVYYDEGITGTKKEKRTQLLRLISDCEAHKVDFIVVKSISRFARNTTDCLELVRKLTDLGVFIYFEKENINTQSMESELMLSILSSLAESESVSISENSKWGVKRRFQNGTFKISYPPYGYDYVDGGMEINQEQAETVKYIFAQVLSGISTHQIADELNARKVPTKKGGKWTASTIRGMIYNEKYVGDVIFQKTYTDEHFNRHTNYGEKDQYLMQCHHEPIISREDFEAAGAVLNQRRLEKGITKGSGKYLNRYPFSGKIICSECGGKFKRRIHSKNGGKYVAWCCGKHIDDVTACFMKFIRNADVEKAFVTMMNKLVYGRRFVLRPLLESLREMDRSDSFGMIQELELKMEKNAEQRQILTGLMAKGYLEPALFNKENNELLQEAAELEMQKNGLSHSVNGEIVKTGEVEALLKFAEKGEMLTAFDGELFGRFVEQITVYSRNEIGFQMKCGLTLRERM

SEQ ID NO: 10585 - protein, 527 aa, synthetic construct
MRVSVNLNAQKPDTTTNAVIYARYSSHGQTEQSIEGQLAKGHEYAAAQGYTVVHEYIDRAMTGRNDNREAFQKMLSDTGKHQFQVVIVWKVDRFGRNREEIAFNKHTCKKNGVRVEYVAESLPNSPEAVILESVLEGMAEYYSIQLSQNIRRGQLESAKKCQCVGGSVPLGYTLDSDKHFVIDPQTAPVVKKIFDLYAEGATISEITGQLNEQGIRTARKQLFTKNSLTKLLKNEKYIGVYTYKDIVRVEGGVPAIVDESTFDRVQELLKINRRAPSHTWTKVEYLLTDKLFCGHCGSPMVGESGFSHTGAKYSYYGCIKRRREKACDKKPVRQDWIEALVLDETVKLLHDDELMEYIIDRTWEYYQVTDKVQEEKAVLEAQLAEVDKAINNLVRAIEAGIFNAATKSRMDELDAQKAALTASLADLELTSGIRITRDHIEYFLLRLRDLDVKDRECQKRLVQTFVNAVFIYDDGRVKITYNYSGQSSTITLNQIASAEKGKGFVCCLPCSTSSPRFPRGVAALFLF

SEQ ID NO: 10586 - protein, 516 aa, synthetic construct
MAHAQKQVRIIEPLERFVNRINLVGCYARVSSDSEDQLNSYNNQVDFYESYVNSLENSKLVKIYTDEGITGTRMDKRDGFLQMIEDCRKGLINTIITKSISRFARNITETLSVVRELKSIGVSVYFMTEKIDTAKMGSEMMLAVYAACAEIESKAISNAQKWAFRTRAKEGRYNQPKLPYGYQRIDGEVKVIEEEAKIVEDIFNKYVNKDFSVTKLVDYLNKHYFKKKKWSQSTVSSMLKNERYCGDMLLQKKYSPDVFPYKLVTNKGELAQYYVYDVFPKIIDRELFEKANEKLVNNKLKFNKNQTDGNREYLLTSKIKCEHCGGTFKRRVLRNKEYWSCSNHVTSAKKCEVKMIETDEIEDAFLKIFYKLKENIHVLEAYKKHIVNFTTNDDDKCELDLVNRELKKVSSSINTLVRYYQKDLISLEDYKKKHNELLVDKSVFEMQKCKLNEKIYQRFEVIQTQIIIECLESVKEITALDEEIFNTLVDSIEVGTLDIQFTLKNDLKLKVERKQF

SEQ ID NO: 10587 - protein, 555 aa, synthetic construct
MNYIIRDDKGHETTAPKVKVIAPRKKFQPSYNDRQNRKIRVGAYCRVSTDSDEQELSYETQCEYYENYIGSHENWELVAIYSDEGITGTSTNKRSDFMRMIDDARAGKLDMIITKSITRFARNTVDSLMYLRILKEYNVDVYFEVENVHSLEANEMLLTILSSVAQQSSEDKSESIKWGYQRQFEKGKVYAANMYGYKSNRGTLDIIEEEAEVVREIFSKYLSGMSESKIARYLTENKVPKKNGSTKWDSGTIGRMLQNEKYSGDALLKKTFSIDFLHKKRYKNEGQKKMYFVENSHPAIVTKEVFKAAQVERTKRNMKSNDEKEVVESHHQNRYSSKNPLSNKIICSECGALYRRAIWTKRNKEKEPVWRCSNRLKNGKAICPNSVTLKEKPLLDALTSLINGKTKSKEKTRLELAKELSEYLNPKDIVEKKQKLNCELENVNSQINELLDKGMLLVARGVQDESQIEEHLAQCYQTKQMLKKELQKLDDKYNALKQGRQEKLLKTLERNSNEHTVMTQEDLAVFIDRIVVKKDKIEIETIDDQKCELLLNQIS

SEQ ID NO: 10588 - protein, 514 aa, synthetic construct
MGIPLLSGGIYMDNRLKAVAYARFSSDNQRDESIDAQISAIENYAKINNIEIIGTYIDRAKSATTDQRPNFQKMIADSSTGTFDIIIVHKLDRFARSKYDSAIYKQKLKVNHVRLISVTENIDGSPESIILESVLEAMAEYYSKNLAREVMKGLCENAKNTIHTGGIPPLGYDIKDKKLVINRHEAEAVRIIFDMYNDGYSYGEIIKTLNDTGYKTKIGNNFGKNSLYEILRNEKYMGVLTYNKSSEKSATGTYNRHKYKDNENIIRINGGCPAIITSDVFYTARDRQLYNKQVSQSNRTRQKYLLSGMLYCDVCGSPLYANRRKKDSQITYRCCKKYRSVDKCTCKEINQQWIDLEIIKIIKKHILNEQNVDYILQTINDYNNSQKSKQANIFLEYTNELTDIKNAKENILNAVEEGFAKEHFKHRLDTLIQRESYLKHQLHTMDNIHHLSISKTDILLISNKFNRLLKENDITALRAMLNDFIDKIYIGNNKVTVYLKERWFRTTILTLDRY

SEQ ID NO: 10589 - protein, 567 aa, synthetic construct
MENQIVALYVRVSTGHQVDKDSLPFQKKELRSYCKHILHIDEKRIEIFEDAGRSGKNTKRPAFERMMKKIRAGLVSHVVVYKIDRITRNLVDFSLMYDDFKYNHVTFISLNEQFDTSSAIGEAVLKIILIFAELERKLTSERVKDIMLDRALSGQWNGARMPYGWRWNEETQMPEHDPIELVFARRMYDLYEETKSSCKVRDYNNFNGVPTKRGGEWTSKTVADFIRNPMNKGDYRYNYRESARGRKKPEDEVIYAEGVFPPLVPPEQWERCNAIMDRNAAAKRSQGFVHGRKHCHIFSGFLVCGKCGAHFQAIKKDRARANGFTPSLYRCGDRFRKKSCDAVGCSDVVLGPFIFNYIRAMVQASAKRYKIKSPEELEHILLSDTIFSDVAGIISEDSEKTFRLFSGASGSVSYSPEPLPAPSSSSGRAEELKQIIVKTERAMERLKKAYLFADDAMGEKEYLETKLSLETSKIEAENELKALVESRFTSSMSELSFIRSASSFLLAHEIKTQDHIVYNEFAAAVDDEILREFLSMVIDQIVITDGRPAEITFKNGLRHRFLYRESK

SEQ ID NO: 10590 - protein, 504 aa, synthetic construct
MNYNDSKSIYLMYLRKSRADEYNQDVENILKRHEEELQSLAKREFGELIPEKYIFREVVSGGTIKDRPLMKEILKMMESGIIAGVLVVDPQRLSRGDLLDQGHIINAFKYTNTLIITPYKTYDLNDTTGTDMKLLKMELNHGADYLDYYKMVQARGKLASVRAGNFIQPIPPFGYRKVRYGKVTTLEPIEDEARIVRIIFQKYAEGKTICGVTNELNAEGYIPPSKQIWTKGSVKRILSNPVYDGKIRWGFTPNKTVMEDGKLKKYRPERHDYLLFDGKHDAIVNHGLFMSVQERLSKNKSFTNDRSLKNPLYGIMYCKRCGRKISRLNVAESRGGHRYACPNKLCDVQSSRYDLVIEAVIDTIQCAIDDFDITFHDCNSSGSDEKIRELRQELTRLNNKEDTLFELLETKVYSTSVFTQRHAELEKKRQEIIGKINTLSLIPPPESCNNKKMRFKDALLALKDESMPPKEKNHLLKKCIERIDYDIEGVRYHSKVKLDVYFKF

SEQ ID NO: 10591 - protein, 518 aa, synthetic construct
MQENETYVIYLRKSRADSEKSSLEEVFAKHESELQSLAERTLGNRIPEDKIFREVVSGETITDRPVISQILKVMESKKIKGVFVVDPQRLTRGDLLDKGHLINVFKYTNTKIITPYKTFDLNNDFDLKLFKMELDKGSDYLEYYKMIQARGRIASVRSGQYIGSTAPYGYDKYSYKENKHTVNTLKPNSDEATVVQLIYHLYVNESLSYAAIANKLNTMNIKPRKSTSWSPYSLKEILHNPVYIGKVRWNRRKTVMKYKNESLLKTRPIALNDSIISDGIHEAIIDEALFDSAQECNGKTPRNHSSSKLINPLAGLIFCGNCGRAMSYKTYKNNAGSEKQPPRYLCNNQSNCHTKSAKATDVINQIISALECYIEDFKVKLENDDGNSFNVRSQIISVLNKQLQDLEVREETQYEMLENKIYTPELFKKRRQKLLEEREVLLDKLQEAKVQEPVKIDYQEKIISFTDTVEALKNPDIDILQKNMLLKKCIKKITYTTDKEKGNRWRESTFEIDITPLI

SEQ ID NO: 10592 - protein, 571 aa, synthetic construct
MTDVKEDTKKIVRILLRVSSDQQLEANGDLSIQRKLVVEEVKKHEEWILDSKEYFEGSNSGYKNSVADRDVLQEALRDAENREYDILLAYKDDRLGRRMLEIPMYIMSLKQFGVDVYTVKDGLLTPDLGDVMGMLKLAMQYGMAEKSSSDTGMRVKDTAQKLVQQGKFMGGKAPYGYKLEYSGEYSKHQRALKHLVIVPEQAEVVKYIYKLSLYKEYGSGKIATTLNLDNRYKNLAPNDVWKSGTITSILTNPIYAGYTAYGRRQHTAGRYRSLSQEDWIIAEKPNDEITIIDRDVWEKVQISRQKRGTKYQKQPWNEKATVISRNDGQLALIDVAYCGYCGRKLTNGTKYDYWTIKGTGERRSSQKSIYKCQNVWQGVPHEKMKQIRADKIEPIVFKKLSEYVGRLQEDENIFEQILENQSFEKSQQEQILVREKRNLQEIEKNIDILNDAIPNAITGTYPLSLEDLAKSIERQKDKASKQKTVVEELETNIKNLSVSQEDWENLYHNLPTWQDIFMNADVATKRVLVNKLIERIDITDDTVVIHFKVDLDHFCPQPRMTNYDGVPEPGL

SEQ ID NO: 10593 - protein, 461 aa, synthetic construct
MKLERCAIYIRVSTAEQMMHGKSLEAQREYLEAYASEHNMVVAGVYADEGKTARKELKKRKAIHALLEDVKAGKIDVILFWRLDRWFRNLSDFYKVQDILDEYHVRWISTSEPGINMETRDGRLQLNVVLSIGQNEVDTTSERIKFVNEASIRQGKLIFGDANMGYGYKSGTVNGVKCMIKDPEREEAVNAFYQYFFKHQSKTGALKYIQENYDPDFSYSSMRTLLSSEFYKGTYRGAPYCPAYLSTEDWDRLQKISDKNIKVNRSNRVYLFSGLIYCPNCDNLLSGCGCSSIINRKTGAKRTYCYYRCNKAYMDNHCNYRHRLSQNLVESYLLEHLEDEYQRYHVRSGQIREKQKKEKKIKTPEKLRSELERLNLLFQKGRVEWEYYNKEYSRIEYELKEALAIQQEIERDVSYVNEIIQSDFRSMYAKLSLENRRAFWRSIVSDIHVAKDSTVKEVNFL

SEQ ID NO: 10594 - protein, 652 aa, synthetic construct
MRKQKCYIYMRVSTAMQVEGYSLEAQKDRLTKFAQFQDMEIVREYCDAGKSGKNITGRPEFSRMLQDVAEEKDGVSYILVFKLSRFGRNAADVLNSLQYIQDYGVNLICVEDGIDSSKDSGKLTITVLSAVAEIERENILVQTMEGRKQKAREGKWNGGQAPFGYELDSKNSTLIVNPEEAEIVRIIFDQFTRMEAGADSICKYLNQHGYTKKRLRDQEVSYFSRSTILKILDNPVYVGKIAYGKNKTEKVKRTRDQYCRVKQDEYLLADGLHDAIIDEETWEAAKEKRKRTGVRWVKTHSLDHEHILSGLIKCPLCGGGMSGTVQRRKNKKTGEYKDTFYYRCHHRKRVDGHICDYKPMLNQKVFNAEIEEFIRYMAGGEKFKEFLMEKLEEKVDVSSLEEEKKQLAGQFQQAQGSRKKLVQMLERLDPGDKHYDRKYQDMQERMDNLYDRIAELEEAITDVETKIGASYGKQVTGKKIYQFLLDFDILYGKMTDLEKKEFMRTFIESIELDPDEKDMGRIIKHIDLTFPVYYDGQEGDRIRMPKENTVETVVLLSRKTPDDTIEVDLNLDELDATSAETKATYEEIKKYVKEKYQLKVSNLYISQIKRKCGIEVGINYNLPKSENPKVPQCPPEKERAIRDALEHFQMVS

SEQ ID NO: 10595 - protein, 667 aa, synthetic construct
MCADRNEGTRYIIGTGSRVTTGIRKGGENLKRKKCYIYTRVSTAAQTEGYSLDAQQKRLKDFAEYKGLEIAGEYCDAGKSGHSIKGRPAFMEMMDDITSGKDDISFVLVFKLSRFGRNAADVLKSMQTLMDYDIDLICVEDSIDSSTQGGRLTLAILSAVSEIERENIRIQFMSGKMQKVLKGGWAGGPIPYGYRSREGELVIEPSEAEVIRLIYEKYLEPPMKLNSVVRWLNSHGYQRISQGTIRPFNSDFVSRILNNPFYCGKIVYYRRANKGSPDPKQEIVVQGKHEAIVTEKIWEQAQEKREQLARVKGKRDEEDRISLLSGLVKCPVCGGGLISKKNKSLNHNYGGYYKTVYSYGCRNYRTSEGRVCSFCHTYNQERLDAAVMEVIQKVTGTEEFRTAFARTVGNQMSEEAVETQLKMLRKEMHHQEHVKYKLGMELDHLDVLAESYDQQYEKLQAEVDAAYDRIGRIEDKIEKLKRKLLRMKQGIHSSDNICLILDHFDRLYEKMNYEERRTLCRQFIQRIEVFPEKGDDKRILKSITFRFPVYFDLGGNQEEDDEDTPDEMVVFTLDCSRLPITAAESKATYAEIKAHVLRIHGLKVSSLYIAQVKRKYGIEMGTAYNKPEKNKNHIPRCPKEKELAILDALKTYRMIPESTEYFEEAAE

SEQ ID NO: 10596 - protein, 491 aa, synthetic construct
MRFLNVALYVRVSTDIQVDGYSIDEQLERLEKYCDAKDWIIYNKYIDPGFTGSNINRPGLTKLLQDIHKGKIDLVLVYKLDRLSRSQKDTLYLIEEEFLPNNVDFISMTENFDTSTPFGKAMIGILSVFAQLERENIKTRLAMGHIGRAKAGYWRGGSNPPIGYDFINGKLIINEYEALQVRTIYKMFLDGETIHGITRYMSEHFTNRYSNYRTPGQTGVILRNRLYIGKIKYKGVEYDGVHDPIIDIDTFERVQKRYKEISGKWSDHYRSPFKAKHLLTGLLYCGNCGARYFACTQRRKDKTTGKYIKSTESYVYYKCYTRDGNKSMRKGDYCKNPTIRVDKLDKVILDEIKKLKLDPDRLERIINIESKEKVENTELTVLRNKLDNTQSKIDKLMDLYTIGTIPITEIGDRIKPLYEEKEKIELEINTRENELQEPHGLSISETRDILNQFADIDNLDHDLKRELVQSLIERIEVLPEPDSIKIYWKFV

SEQ ID NO: 10597 - protein, 604 aa, synthetic construct
MKKVFVYHRVSSDQQLDGSGIARQAELLEGYLERTGICAEMDDPAPVVLSDQGVSAFKGLNISEGELGAWMEQVRNGMWDSSILVVESIDRFSRQNPFDVMGYINALMAHNVAIHDVMANIVISRSNSQDLPFVMMNAQRAYDESKYKSDRIRKGWAKKREQAFNKGTIVTNKRPQWIEVENDKYVLNHKAAVVKEIFALYQTGMGCPTIAKQLQKKEGEQYKFNRPWTGELVHKILTNRRVTGKIFISEIIRNHDDIDNPVTQKKYDMDVYPVVINEEEFELVQELLKSRRPNAGRVTVKKDGQEEVLIKSNLFSGIARCTECGGPMYHNVVRAKRTPKKGDPKIEEYRYIRCLNERDGLCENKAMTYETVERFVVEHLLGMDLSTVMKEQEFNPEIEVLRIQIDQAMDQITNYENGIERRKSTGKPISFEMREELDDAKSELERLLARQASLATVQVDVPVLQDVNVTELYDVNNVDIRTRYENELNKIVSIIRLKRNGTSYTIDINYKQNEVKRHVLFIENKKKEQKLISEVIIEDVDGAKFYYTQSFVISFKDGEIRFQQTKKDLSIIDYSLLLNYVDAVDRIDAVGVWMRNQFNFLTSN

SEQ ID NO: 10598 - protein, 463 aa, synthetic construct
MARSVTVIPARNRQASGHRAVPQKKIRVAAYCRVSTDQEDQLHSFEAQVDYYTKYINDHENYEMAGIYADEGISGTNTKKREQFKRMIADCEKGKIELVITKSISRFARNTQDCLMYSRKLKNLGIGIIFEKENINTLDSTGELLFTILSSLAQDESRNISENCKWGIRTKFKNGEMHLNTFKFLGYDKDENGKLIINREQAKTVRRIYRDFLWGLNPAQIAKELEEEQVSGCLGQTKWYASTVVGILKQEKHMGDALLQKTYTADFLTKRQVKNNGEVAQVYVKDSHKGIIDKETWNAVQEEFDRREKFMQRHGTDRYSYGSECYPFCEKIFCGECGSLFTRHSWKSRGIIQWQCKNHRKDGKVACTNAYVDNANLEKGFVKAFNRLVNEREKNMERWNAMKAEGTPLEKIRAMQMMEATESGQLQKYVPEVAQLVLEEITIFGAKKYEFAFLEGSRVKVSV

SEQ ID NO: 10599 - protein, 501 aa, synthetic construct
MEIQIREGSREQKRKLKVCAYCRVSTDADEQEYSLENQVRHYETVIKANPDYEYAGVYSDFAISGFKEKRPGLQKMLADAGKGKIDLILTKSVSRFARNTSIVLEATRKLKELNVGVFFELQNINTLSGEGELMLTILAAFAQAESESGSVGAKMVYQRKYEAGIPVQYLERSFGYTKDERGIFVADEAEAVWVRKIYEMVADGYTPASIKRYLNENGVKTVGGAEWIDSTVFRLIENEIYKGDYIMHKHFVNEERKLVRNRGEVDAWYIEDDHEAIVSPELWQRAQDALEAKRDYLAEGSVIEEFTEENYPYMNKVYCAKCGYPLYKRIYSKGNRLNWGCSGMKRYGKSFCDGINIPDGVLRNAWHFEENTYIDEKASDKGVKEFSYLKERSWKRRHKKKQPPSISENTEVEYPYREKIYCALCGSRLVRHVDTKSHKVTWVCNGRKRKGKDFCDGTRVPDTILKGWGEIKKDIYIQRKDDKNGKKRYSYTSKKPSGIGA

SEQ ID NO: 10600 - protein, 581 aa, synthetic construct
MSRTTNKRPGKAKSGLSRKQKVAIYIRVSTLYQVDRDSLPMQRKDLIAYASLILGIEEYEIFEDAGYSGKNTDRPAFQEMMQRIRKGEFTHVLVWKIDRISRNLLDFAEMYEELQVLRVTFVSKNEQFDTSTAIGEAMLKIILVFAELERNMTSERVTATMISRANSGLWNGGRIPFGYDYDPDKTAFSIREDEEKVCQMIKNDYMEHKSLVHTSRMLNASGYKTRAGVEWSPTAVWIIISSPFYAGIYRYNRYKGTERRVENPEDEWIMIQNHHPAIFSLEEHEKMLAILDENSRNRRSVGQKHQTERVHIFGGIAYCGKCGSKMVSTPGRLHANGYRPTNYSCPKHRKTKECDNPTVSDTQVGEFVINYILNMLRAKKKFSTVENPEDLEHCLLYGNTFSEVEHIDGNGLNEYFNLLSRYGSDDSYTFSIKKSRKKKAEVDPEVEALRKEKEKQERAMKRLQDLYLYSDTSMSEKDFIIRKTEISKRLKEINAMLGMVAKNSEPSLSDEEFVRQASHLLISRELQNRQYIYFKNLAQSVSPEILKAYMETVLDSVLLVDGRVSSIVFRNGLTHKFKYKS

SEQ ID NO: 10601 - protein, 562 aa, synthetic construct
MKNKIAIYIRVSTTHQIDKESLPFQRRELENYAKYVLNIDDMEFFEDAGYSGKNIMRPAFQSMMSRVRLGEFSHILVWKIDRISRNIIDFANMFEELKKLNVTFVSKNEQFDTSSAIGEAILKIILVFAELERNLTAERVSDVMISRASTGQWNGGRVPLGYNYDKENHTFTVNQQEAEIVKFIFDYYIDNGSMVSLVNALKDKEIKTKTNGAFSLSAVATVLNNIFYTGKYRYNYRKQGDRQQVKPKSEWIVIDNHHPAIISEEVFKRAEEIKQTNLRLKNEKGKIVKKNNIHLFSNLLECDVCHNNFSSSLDRPRVNQGGYRHSMYNCYGRRIGACKSKYVSDVYLGKFVFNYIANLYKAYCSFGKSTTFETFKKKMLRGNIFSDIKEVTNLEGIYNIFCSKYNDKATANIINYKNTKQDFGNELRIALSEKGKYERALARLKDAYLFSDDAMTQNEYISQKHSIEVKLSATNKKLDKLQSKDDTPFDDVEFLNVLSYFILNQNLQDKREIDFVDFITSVDKKIISDFVHKMFIKFIISNGKIKSMTFRNGITNTFVYDD

SEQ ID NO: 10602 - protein, 557 aa, synthetic construct
MARKKNIAAGQNAVIYARYSSHNQREVSIEQQIAECTKHAAALGLRIVGTYEDRAISGKTDNRPRFQQMMRDAEKGKFQAVVAWKSNRIGRNMLQAMVNEAKLDDYGVKVFYAEEDFDDTAAGRFALRNMMNVNQFYSENMAEDITRGLYDNASKCMANGRQPLGYKRGEDGRVVLDEANAAVVREIFTRVAAGDLFVDIARDLNAQGIKTSKGANWNKGSFQSICQNERYRGIYIYGDVRVADGIPRIVSDDLWYRVQEAMRMKKNPVGTRHRVGAEDYLLTGKLRCGHCGSYMTGVSGTSRNGELHYYYTCQKRRTEHACDKKNIRRDVIEPAVAQAIKMYCLTDDVIAWIADRTVEYWEKHDNDLQIEALEQQLEENKKATSNMLKAIEMGIITEATRTRMVELETEQSRLSVQLNAAKEDVVKIDREQIISYLELLQQGDIHDRDFQMELFKNFLVAVYVYDDNRMKLVFSCMGDQNSVEIPLETGEDPPDGGLSLDAKMFVLTPDSSTKKALYFVGSMVLFFFIPAKRSGVHRSPCRRASDTPDLNRNRYLI

SEQ ID NO: 10603 - protein, 463 aa, synthetic construct
MTDKIERCAIYIRVSTTEQMMHGKSLEAQKEYLTNYAREHNMAVVGVYADEGKTARKEFKKRKAIHSLLRDVEAGKIDVIIFWRIDRWFRNLSDFYKVQDILDSHNVRWISTSEPGINMETRDGRLQLNVVLSIGQNEVDTTSERIKFVNESSIRSGKLIFGDANMGYGYKSGIVDGQKRMVKDPDREHVVDAFYKYFFKHQNKCATLRYIQETFDPDFSFGIMRTLLSSEFYKGTYRGFPYCPAYLTEDEWNKLQKIQKRNVKATPSGRIYLFAGMIRCPVCGQLLCGTGCSSIINRKTGAKRTYCYYRCNRAMIDHICSYRHRLSQNLVENYLLDNLENEYKNYKVKCDKIEKEKEKQKKKQSPEKLRKELDRLNFLFQKGRIDWDYYNEEYGRVESELNDLQSALPEPVTNYGYLEELLDTDFRTMYDQLSQENRRAFWRSIIQEIHINEDSTITSVDFL

SEQ ID NO: 10604 - protein, 515 aa, synthetic construct
MSYLIYLRKSRKDLENPFMTTEEILNRHECILLDLAKKMNLSIGGIYREIVSGDSISARPVMQKLLREVESGMWEGVLVVEVERLARGDTVDQGIVQRTFQYSETLIITPQKTYNPSSESDQTFFEFGLFMSRQEYKTIKRRLKSGVMSAVREGKWPYNSAPYGYRRYKLANQKGWSLEFDDRERPIAELIYHLFCDEKRGFGYISDYLEARNIKSRTGGRFTESFLREFLRNPVNDGKVFYGRRKVVTKIVNGSSVRTRPRADEYIEVAGLHDPLIPHDLFLKAQERFRVSTPRNPSSYTVKNPLSGLLVCSECGRKLQRRPASTSKRGAPYDVLMCKTRGCPTVGSAVEVIEREVLHALEGIVRGYEADVPSVPSLVPQKEELLHNAVLHRADLNKQQERIYTLLEQGIYSTGVFLDRSKALEKQMQEVNHSIEVLKNELEEEKIKYNNWKSFVPTCKQLLEIYWTLTPDAKNSALKEVIDRIEYKKLTRNPKGMCDVATFELTLYPKIPMKS

SEQ ID NO: 10605 - protein, 483 aa, synthetic construct
MKQKIAAPPADPVVDLVDLYIRVSTTEQALEGYSVAEQESRLRRYSEAMGFRIHKVHIDAGFSGASLDRPAIKEVIRDIQSHLVSKVIVWKLDRLSRSQKDMLVMLEDVFLANDCDFISMMESFDTSTAFGRAIVGILAAFAQLERENIKERTTMGRRARLAKGHYNGSRPPLGYRFLEGSNDLKVEPYEANMVHEIFSSFLAGQSINAIAATMQRKYPTTRTWNNTMIRRTLKNPVYMGKVKDVDVIRDGIHEPLISESEFVMANAVLSHNREIKKQSCRSNSLLTGLLYCGDCGARMQPRQIARGYPLRRYVCYSVSRTNKSMIRSDHCTNRLHPYTLEELDDIIIGEIKKLAADEDYLRAIIREDAGPILDESELLKDRLSEIDKQTDKLLNLFQIGVVDLSQIEQRLADLKQEREALKERLERTAPVVQMDIQKIQSYADAFQEALDSGDAECQSSIIRLLIDKIVVLNEDIEIHWTFC

SEQ ID NO: 10606 - protein, 469 aa, synthetic construct
MARTIVHIPAQPRATTVSATENTRLRTAAYCRVSTEQEEQLNSYEAQVDYYTHYIKTNPKYIFVGIYADRGITGTNTRHRDDFNRMIEDCEAGKIDFIIAKSVSRFARNTEDCLFYTRKLKDLGIGIYFEKENINTLDGGGELLLTILSSLAQEESRNISENCKWGIRKKFRDGKLHLNANRFLGYDKDEKGKLVINKEQAAIVRRVFYEYIWEGLNPDAIARRLQAEGVPGCMGQPRWAVSTIQAMLQNEKYMGDALLQKTYTPDFLNKRAIKNKGEVEQVRVKGDHEPIIEPEIWDAVQLELQRRHRYTEEHNIRFRGRNSDVQPFSCKVICGVCGTPFWRRTWYRNHRPIKVWQCGKRYQEKGVVTCSSENLKEETLYNAFVVAWNAIVNNRQGLLPEWEETMQKGNALERLRAQQMIELTAGTRLTAIDLSLVGKCLDYVVVNNGGILAFHFLDGSQICVETEAE

SEQ ID NO: 10607 - protein, 580 aa, synthetic construct
MVRRKTALRGVSASTRITKVAIYIRVSTIHQVDKDSIPMQKKDLIAYCQLILGTDNYEIFEDAGYSGKNTDRPAFQDMMGRIRKGEFTHVLVWKIDRISRNLLDFAEMYEELQSLRVTFVSKNEQFDTSTAIGEAMLKIVLVFAELERNMTSERVTATMISRANNGQWNGGRIPFGYSYDSGTSTFSIREDEAAVCRRLKDLYLDNKSLVYTARALNADGYKTRAGADWTPTAVWIIASSPFYAGIYRYNRYKGTENRTLNPEEEWVMIPDHHPAIFTLEEHEAMKSSLKTNARYVDNPVGKPHATANIHIFQGIAYCGKCGNKMVSTPGKKHADGYRPSNYSCPLHRRSKKCDNATVNDMIVGEFAINYILNMLNAKKTFSNIDTPEELQRHLLTGSTFSDISSIEEDGLNDFFNLLSRYGSDNSYVFAIKTPRRKKASVNPELAALRKEKEKQERALQRLQDLYLYSDKSMSEKDFILRKSEISDRLKNINAQLGLITQNPDSLLSDEEFIKQASHLLIQKELKGRKYIYYKNLATSVDPEILRTYMETILDSIYIIDGRISSIVFKNGLTHKFIYKN

SEQ ID NO: 10608 - protein, 519 aa, synthetic construct
MKKVTKIDKVQNVTSKKQKLRVAAYCRVSTSNDAQLESLETQKAHYESYITSRDDWQFAGLYFDEGITGTKKDRRPELIRLMQDCAAKKIDFIITKSISRFSRNTTDCLELVRKLQELDVPIYFEKENINTGSMESELFLTILSSMAEGESTSISENSKWSIKKRFQNGTFKLSYAPYGYRWDGRTLRILPEQAKVVKRIFADVLSGKGTDAIAKALDDEGVPTKRGGKWTSTSVRGILSNEKYTGDVIFQKTYTDDSFNRHTNKGELDMYYVADHHEAIISKEDFEAAGLLITQRAAEKGIKRESQKYQQRYAFSGKIICNECGDTFRRRMHSSTYGKYVAWCCNTHLADKDKCSMLYLRDDDLKLAFVTVLNKLIYSHKLVLKPYAAALQNNSGDESLIRIQHLERLLEQNTEQRETLTRLMAQGYIDQVLYNSETNALLTQANTYREDIEVINATMSGDSSRFFEAERLLHFAERGSMLEEYSEDLFERFVDHIQVYSRHEVGFVMKCGLTFKEMI

SEQ ID NO: 10609 - protein, 700 aa, synthetic construct
MDSNAFLNDLMSKMKLPEAKGKKKAEQSESVAQILAAMQKVKTEKKKPPVTSYAPTKEMPVNELESMEEFSQLASDVMQECRPAIPAVKTSISEKTVRVAAYIRVSSTNPAQEDSYEMQERYFMSLLAGNAGWTSAGIYSDHGISATSREGRTGFNRLLRHCKQGKIDRVICKSISRFARNTQDFLVALRTLKENNVTILFEREAMDTADAYSEFILTTLAAIAQEESRSISANIAWSNQKRFPAGNVCNKDIYGYEFRKGEYTVNENGYRYRAVFIIPEEAEIVRMVFRFFTKEKLSFTQIAQKLDALHIPPPNSGCRQRQKRKPTVLPAGALKEEDKRGWTATDVRYMIANVRYCGSVLCQKTYTDHRNGHKQKVNKGEKPKYLIRNHHPAIISEELWQEAQEVWKAYTAKYRGIEKGRNERNYSKLLLCGECGRYFQGHSTTRTTIWRCATKLAQQGQKRCRMEPIYEEQIQTLLCKAFAEKFKLGEKMDAEVHEVMQMISKAPIDNARNQALKNLTEKLREIHDFDHMEQEGDFLKRQLSAVNYSIRDVHQHIRDIQAEKEALKVRCEVLGEPRDKEAVTELENRLLNEEEQLEKLEHEAQQQAEQVRYMEDYWKKLEQTHEIREKTLQWLDSLAGGTQMFLDEAVGTYVKAFVLSVTIFSPKHFRIHWFDDTCTEVECDSVFEGYQQPGMIRRKY

SEQ ID NO: 10610 - protein, 524 aa, synthetic construct
MRFFNYGRKSVYSDKSDSIDNQFRMSREYCEQKFPGKIESWQEFSDEDFTGANTSRPDLQRMLSYIEDGFCDVLVVYQLDRLSRNVRDFSNIYAMLEEHNVMFISIKENIDTTTPIGRAMMYVTVVFAQMERETTATRVADNMRGLAKKGYWMGGQAPLGYSIKHIVIGDKKHSALELDPDGVRYVAQIFDDFLSSHGSLNAMVTRFRHQGIRTLTGKFFSKAHLHNILTMPYCVEATPEVYDYYAAKGCIMDSASPREKWDGSTGVLIYGRFSDKNQKHLVQPPENWTICLGLQKPFIPAEKWLAVQERFKQNTFCKDAKWPVPLLRGILRCNKCGSLMPVSRRKKVDGTCSSWYYCRKRKDEGSEACDMNQIKCDLIDEKVLEIFRKIALDPDSIHQFVKTESPSEIPNLSFISSRISSVESKIGKLAASLALAENSTASKYIIEEIERLDAELTALKREASHAEMKIHQAAAKERNSQATAIEIAKFINNLDGFSAKEKNEIARSVIRDCRWDGEKLFLTL

SEQ ID NO: 10611 - protein, 539 aa, synthetic construct
MYQSNNHSTYAALYTRFSRDEPDGESNSIANQKKLLLNYAHSRGIVNTKFFVDDGFTGTNFNRPDFKAMIAECESKKISTIIVKDMSRLGRNYLMVGYYTEIYFPENNIHFIAINDDVDSVKGDNEFTPFRNIMNEWYVKDTSKKVKSVIHNKGMSGERICNNVIYGYKHNPDNPKEWIVDEEAAQNVRTIFQMFLNGKGTSQIAKYLHSEKILVPSVYAREHGKISARATPADPCLWDSKTIREMLKRQEYVGDTVNFKTKKVSYKSKKKIYLDKSEYVIFPDTQEPIIDRDTYERVQKIMESRKKVPIVREPDPLGGYIFCADCGSRMYITRSTVFPKKNCYHCGRYKRSSELCSSHYIRECVINQLILNELQKVFSIVKNDRERFLNVAIQSYANRTSYDVKKLRKDKQLCEQRIQELDILIKKIFEQSVLGTLSKERLATLAAGYESEQAEIKNKLSAISKEIEITDSKQLNADRFIAIVDKYTNIDSITPEIMSEFIDKVMVHKPIYDGNNKRHQTIEIYFNGIGAFDYDSCNS

SEQ ID NO: 10612 - protein, 501 aa, synthetic construct
MEIQIREGSREQKRKLKVCAYCRVSADADEQENSLENQIRHYETVIKANPDYEYAGVYSDFAISGFKEKRPGLQKMLADAEKGKIDLILTKSVSRFARNTSIVLEATRKLKELNVGVFFELQNINTLSGEGELMLTILAAFAQAESESGSAGAKMVYQRKYEAGIPVQYLERSFGYTKDERGVFVADEAEAVWVRKIYEMAADGYTPASIKRYLNENGVKTVGGVQWGDSTVFRLLENEIYKGDYIMHKHFVNEERKLVRNRGEVDAWYIEDDHEAIVSPELWQKAQDALVAKRDYLAEGSVIEEFTEENYPYMNKIYCAKCGYPLYKRIYSKGNRLNWGCSGTKRYGKSFCDGINIPDGVLRSAWHFEENTYIDEKASDKGVKEFTYLKERSWKRRHKKKQPSAIPENTETEYPYREKIFCALCGSRLVRYVNPQNYKVTWVCNRRKRKGKEACDGTRVPDTVIKGWGEIKKDIYIQRKDDKNGKKRYSYTSKKPSGIRV

SEQ ID NO: 10613 - protein, 485 aa, synthetic construct
MPTSDLKIAAAYIRVSTDDQEEYSPDSQVRLIREYARKNGYLLPEEYVFQDDGISAATARKRPAFNRMIALAKEKERPFDAILVLMFSRFARNREESVLYKGLLRKQGISVISVKEPAVDGPFGTLIESIIEWFDEYYLINLSAEVKRGMSEKFLRGEAMGTAPFGYRIDSANKTFTVDPERAEIVCDVFRSYADGAGLRDIAVQLGDAGITTRRGNRPDNRFVEYMLRNPVYIGKIRWTPGHKTRYSRVHIADGVEVVDGKHPPIVSMDLWEAVQRRMDQRKAAYGRYQRQTPAAWMMRGLVRCSACGATLIMVGRSSSCPFLQCHSYAKGACHTSHSLSLRRANAAVLAGLRRSVGTLTFHMIPHLTSAPSRTADYGRLLEQERRRLARCKDAYQAGVDTLEEYRDNKARLEERIRRIEEQAASAAAAPESLDKAAYGKKAADILRFLETSADEGAKNEVLRSVVDHITYEKASRHLAIYFYT

SEQ ID NO: 10614 - protein, 598 aa, synthetic construct
MQSDKKQKQLTGITALYCRLSRDDNTDRESNSIANQKKMLQAYAKENHMGSTKFYVDDGYTGTNFNRPGFQELLDDIEMGYVSTIIVKDMSRFGREYLQVGYYTENYFPDHNVRFIAINDNVDCVDGATDMDDFIPIKNIMNELYAKDISRKVRSAHNTRGRAGEPLSQPPYGYVKDPQDKKRWIIDPEAAAVVREIFKLYLDGNGEDTIARIMQDEQHLNCTAYWASKGINRGGKKSQPNPYKWKSSTIHGILTRQEYCGDVLNFKTHSKSFKNHRRIDNPKEDWMVFEDRHEAIVERDTYIKVQKRLKSTHQRAPKEANGPKSIFCDILRCADCGSKMWYHTNTQNKDIHYFSCSNYVKDYRGTCLTRHYIRADAVEAVVEMELRRLAEYLVADENRFAEILARKSNKQYESEKKAAASELRKSEMRIEMIPKLLKSLYEDKVDGKTTEENYSILSSEYADEREQLKKKILKLRKKLAEMGEKENEREEFIRAIRKFMEMRTLTKQVLNELIDHIDVYETQGTGKNKTQRIVIYYKFVGYLDIDPTQCHPNYTADIREGVAVEYVSCEPSDGQKELFPEQYGVEDDSFEEEETEQA

SEQ ID NO: 10615 - protein, 590 aa, synthetic construct
MKTVEKIERKLPVLKTRKRVAAYARVSMESERMQHSLSAQVSYYSALIQKNPEWEYAGVFADYGISGTGTKKREEFNRMLAECEAGNIDIILTKSIQRFARNTVDLLNTVRHLKDLGIEVRFEKENINSLSGDGELMLSILASFAQEESRSISENVKWGTIKRFKQGIPNGKFSIFGYEWQDDKLVIIPEEAEIIRWMYAEYMKGASRIEIGRALMDRGIYTRQGKPWVDSNVKVILRNITYTGNMLFQKEYCEDPITKHRRKNYGELPQYFVEDTHEAIIPMDEWQAVQAEFKRRRDLGPFGNKSLKLSAFSTKITCGCCRKHYRHSGKRNTAGEVYYIWTCQTKSQKGASACPSKNIPEKMLQNATAEVLGLDEFDEDSFSQQIEEVIVIGDDTLTFRFYDGHEVTTKWQSTAKTDWWTDERRKLWGERHKRKDTNPNRHLFYEFTGFIKCGCCGANYRCQSGKRKDGTPTRSWYCIGPKDQCHNPGIRDETMKRLVADVLGLDEFDEAAMDAQIENATILDHTVTFHFRDDHTESRDFLDKRHGTPWTEERREKARESMKAAWTDERREAMSERIKKIRSEKKWPNP

SEQ ID NO: 10616 - protein, 523 aa, synthetic construct
MAKSVTTIPATLSRFTAAPINSTKKRRVAAYARVSTDNEEQLTSYEAQVDYYTNYIQGRDDWEFAGVYTDEGITGTNTKKREGFKSMVADALAGKIDLIITKSVSRFARNTVDSLTTIRSLKEHNVECYFEKENIWTFDGKGELLLTIMSSLAQEESRSISENCTWGQRKRFADGKVTVPFKRFLGYDMGPDHNLVVNPEQAKLVKRIYGMFLQGQSPFQIARTLTEEGIPSPGGKDHWNPSNIKSILTNEKYKGDALLQKTFTVDFLTKKKKANEGEIPQYYVKDNHEAIIDPETFEMVQTLMATRKKGRNRKSSVSIFSSKVKCGDCGSWYGPKVWHSNDAYRRVIWQCNHKFDGQKCATQTLAEDEIKELFLRAANQVIDQKEQFIAIYEQVLSKSLDTTAFEGELTELEAEINIAAELIEECIKENAHVALDQAEYQKRYDGLVARFDKAKARHTEITDLIAERMARKHQIETYLKNLRSREPLTEFRETDWLAMVDYITVHSKKDIRVTFKDGTEIKA

SEQ ID NO: 10617 - protein, 569 aa, synthetic construct
MKQSNNKKSRDVTAFLYERLSRDDNLEGESYSIGNQKKLLTKVAKEKGYTNLVHFLDDGISGVTMDRPGFVEMIQQLEQGKAAAVFVKDLSRLGRNYIEVGRLTEEFFPEHDIRLVAVSDNIDTAEGDNELAPIRNLFNEWYARDISKKRRISNKIKGNAGEPMGQPPYGYMKDPDNPKHWIVDDEAAQVVKRIYGMTLDGMGTEQIAAQLEREEILTPRAYWLKKGVKRPGKGKQQPPTKWNSSTITKILSLQEYCGDILNFKTYSKSYKNKKRIENDRENWVVFKDVHEPIVDRAVWEQVQQKRGKVRKRRTNEGEKNMFSGLLVCADCGNNLHFHFNQGNPEIRYFNCSNYKGNRGTCTSTHYVRVDFLEQVVLGEIKRLTKFASRYEDDFVKAVMGSTQQNVALDRKLKEKELAALQARDEELDGLFERIYEDNVSGKLSDDRFAKMSRRYEDEQKEISEKIKALRAEMDKLSSKSVTADMFISTVRKYTRAKVLTPRMLNELIDHIEVHQAEKIDGIWEQHLVIHYNCVGAIFIPDVFPLPAPQVSVNTRKGVVVNYAPGQLAV

SEQ ID NO: 10618 - protein, 684 aa, synthetic construct
MSILQTIKTIIRVVLYLRLSDEDKNKLSKEELSQSIKNQEIMLRDYAEEQGWEVVGVYNDDDWSGSDATRPDFNRMIEECKNGNVDIVLCKTQARFARDMELVEKYVHNLFHEWNVRFITVVDRIDNARKETKKTSQILGLTDQWYLEDTSLNIRETLKSKRKDGQLTSSFATYGYMKDPENKNHLIIDPISAEVIKRIYDEYLSGTGLDKIARRLNEDKILSPYEYKLLNGSKLKIPVIKDYVNYGYIEKTGTYMLDVSFTNKEEYILKDLVSFNYITTDMKSFNNKCDIVLKKYTNNRTKIYYSENDNIDINNFNIDDCILLNENDVIPKTAKVIISYTKELDRTHTINYQFEITLKENREHEDYYINICGKATDEIKKSDFIHNIRKKFKWSSSTIRTLLTDEVYIGNMVQFKSTTVSYKNHTVVWNDDETRIRKDNTHEPIIAKDIWYTVQERLENTARSCKGGTVHPLCNKVYCSNCNQIFTKTGNRRSDGTGYLCCKDKKTNWSNCDNKASIREDQLHQFILEKMNEMLKKFYEEDDLKEMQNEVIEQDLYKDKLNSLEKELQSINKELQGKSTYFQKLYEDRTNGILPEKEFLILMNKYKDDNEKLEERQKIVKKEISSTLAKKETVKTKKNIFKKYRHIEELSIEIVEDFIDKILIGSYDETTNSRDIKIIWNFTI

SEQ ID NO: 10619 - protein, 585 aa, synthetic construct
MKQSKKVSDKLSNQKCALYVRVSTHWQIDKDSLPVQREDLINYSKYALNIDKYEIFEDAGYSAKNTDRPAFQQMMARLRTGEFSHLVVWKIDRISRNLLDFAEMYAEIKKLGITFVSKNEQFDTSNAMGEAMLKIILVFAELERNMTSERVTAVMLSRASNGQWNGGRVPYGYNYDKETGLFSINEAEASVINMIYDTYERVHSLLVVARTLNEKGILPRSGTPWSPTTISTILKNPFYTGAYRYNYHDESKSGGNTSSKFLKPKADWISVQEHHPAIVSAERQERVCAILEDNRRSNKRSSKTYVRKNIHIFAGILYCGYCGNQMQSTIDRERADGYRPSIYACSRKRRFDDCENKYISDVVVAPFVLNYIANVIKAQNNFGKSTSIETFERKLLRGPTFSEVEHIEQVGLQEMYDMLRSGISDAVYTSRTLSDIAGAEELADERDLLLAEHRKKERALARLKSLYLYNDEAISESDYIIERKNLSDSIASIDKRLEEIEKHSSRQFTLSDDEFLAKASMFIMTHHLQDKRYVDFEKLIRKVEPIIIKEFINSVTQKIVIKQGRIISIRFKNGIEHKFLYKTQE

SEQ ID NO: 10620 - protein, 521 aa, synthetic construct
MKKITKIDGVQNNSTIKKELRVAAYCRVSTGSDAQLESLETQKIHYERYINSREDWKFAGLYFDEGITGTKAEKRPELLRLITDCEARKIDFVITESISRFSRNTTDCLALVRKLQSLNIPIFFEKENINTGSMESELFLAILSSMAEGESASISENSKWSIKRRFQNGTFKLSYTPYGYDWDGANMIINPAQAAVVKRIFADILSGKSTNAIADELNAEKIPSKKNTNWTSSTIRGILANEKYTGDVIFQKTYTDENFNRHTNYGEVDQYMASDHHEAIISHADFEAANALVSQRALEKGVKKGSDKYQKRYAFSGKIICGECGDTFKRRIHTCTTYKYVAWACNTHLKDKSTCRMKYVRDNDIKAAFVTMLNKLIYGHRLVLVPYLKALENFSGDEALQRIQHLELLLDQNSEQRETLTKLMAQGYIDQILYNQETNALLLQAETYRSDIEAITICMTGDSAKVTETNLLLHFVSHADMLTTYSEELFESYADHVEITGRNEIKFVMKCGLTFTERIGD

SEQ ID NO: 10621 - protein, 522 aa, synthetic construct
MGNVMLIPARRQVGNNARKQEEEKPKLRVAAYCRVSTDSDEQATSYEAQVEHYTEYIQKNPDWEFAGIYADDGISGTNTKKREEFNHMIDDCKAGTIDMIITKSISRFARNTLDCLKYIRQLKDMNIPVLFEKESINTMDAKGEVLITIMASLAQQESQSLSQNVKLGLQYRYQQGKVQINHNRFLGYTKDAEGNLIIDPEQAEIVKRIYREYLEGLSMDKIAAGLERDGILTGAGGKRWHTSTINKILRNEKYIGDALLQKTYTTDFLNKTRVKNNGLVPQYYVEGNHEAIIPKDIYLQVQEELVRRRVVKTSANGKKRSYSCNHCFSQIVICGECGEMFRRLHWNNRGVKSIVWRCISRLESTGLECHARTINELVLQDAVVKAINQMLGDKSSYQAQLQLNIASVIRASQATPVEHIDEKLIALQQELIQKAQSKEAYDEIADEIFRLRELRQQTTVDTAARDEQIKRINDLQDYIAQQTTHLTEFDESLVRRWIKQITIWNDHITVELKSGVSIDVDA

SEQ ID NO: 10622 - protein, 463 aa, synthetic construct
MPSKIERCAIYIRVSTAEQMMHGKSLEAQKQYLTNYAKEHNMTVAGVYADEGKTARKELKKRKAIHSLLEDVKAGKIDVIIFWRIDRWFRNLSDFYKVQEVLDDNNVRWISTSEPGINMETRDGRLQLNVVLSIGQNEVDTTSERIKFVNEASIRQGKLIFGDVNMGYGYKSGIIDGVKRMVKDPDREDTVNAFYRFFFKHHAKGLSMRYIQENYDPDFTWANMRTLLSSEFYKGTYRGIPYCPAYLTESEWNNLQEIQNANVKRAPSGRIYLFSGMINCPICGRRLSARGGSSIINRKTGAKKVYCYYRCNKAFIDHKCSYRHMVSQNLIERYLIDHLEYEYNKFKIKCEKIEKEQEKKKKVQTPEKLQKELERLNLLFQKGRIEWDYYSKEYDRIENELNELLNTAPELEPDYAYLEELLNTDFRTMYYNLTQENRRAFWHSIIREIHLNTDHTVDSVDFL

SEQ ID NO: 10623 - protein, 510 aa, synthetic construct
MPTDYALYLRKSRADLEAEAHGEGDTLARHEHILMELAKSRALPIGAIYREIVSGERIANRPVMQQLLSEVEDGRWKGVLVTETSRLARGDTIDQGIVAQAFKFSGTLIVTPAKTYDPTQEADEEWMEFGLFMSRQEYRMIRRRMNAGTKSAKKEGRYVGSRAPYGYERCKLHGRGWSIRPIEPESVVVKMIYELFLSGKGAGEIATYLNQINIPSPTQRTWVRQTVGLILQNPHYAGLIPDAVHPYKKVIKDGQLTVKRPLNKQCELYEGVHEAIIPRETWEETQRLLTKNHKPRVPSALQQHNPLAGLLYCDKCGQKMQRHPQTDRNFEKYYCPTVGCPTVSAPLSQVEALVLQGLKEFLYNLEMQQPEQPDFTTEQNALKNIDSRLVEQRKRLTKTFELVEDGIYTREAFLQRQSEINAEISRLQTASEELQRKLDAHAAELSARENAAPQIQHVLDVYDRKSAPAERSALLKQVIDRIDYHKTTKQRWSAENDLSVTIHPKISARK

SEQ ID NO: 10624 - protein, 492 aa, synthetic construct
MNVAMYLRKSRADENNPLETLERHKEILLSYAKDNNLTVIDIFEEVISGGMLYNRTEMLKLLDAIPSHIYDAVLCIDLDRLGRGSAADSEKIFDVLKENDVKIITLKKIYDLNNEYDEDYSEFEMFMARKELKFITRRMNRGRIKSINDGCFVSGAPFGYRNAVINKKHTLEVYEPEAKYVRMIFDMYVNQSMGITSISRQLANLGVLSKKNTPLHPTTIARMLRNHTYIGKIVWNKSKSVKGKNTQEKTSKDDWLYVPGLHEPIIDEDTFNKAQDIINLKYKPPMRTGTLQNPFAGLLKCANCGRAIVINTSNETVEKYRLCCRTLGCNKASALSIVEDKVFEVLTKEFKDIELSLKNIRQSHNKDKLSCLDTIATLETELKKLDKQQLRLYDLLEQEVYTKELFLERNNAISDRRKKINATIAQEREKFKLVDTSSIEERLPLLHELLTNYHSLSAAEKNSILKNFVKKIEYKREKSAPEGDIFLKIYYK

SEQ ID NO: 10625 - protein, 528 aa, synthetic construct
MAKTVSVIMPTKRLHSNEPTKQNVKRRVAAYARVSTDSEEQLTSYEAQVDYYTKLIQRNGDWEFVDVYTDEGISATNTKYRDGFNRMVQDAMDGKIDLIITKSVSRFARNTVDSLVTVRDLKAHNVEVYFEKENIYTFDGKGELLITIMSSLAQEESRSISENVTWGCRKRFADGKVSMPYSAFLGYEKGEDGQPRIVESEAKVVRLIYKMFLEGKTPTYIAKYLTSEGIPTPTGRDKWSVTTIESILRNEKYKGSALLQKTFTVDFLSKKKKVNEGEIPQYYVEDSHPAIISKEVYDLAQIELEKRRQNKGYKSSASAFSGKLYCGECGSIYGSKVWHSNSKYRRTIWQCNAKFKNERKCQTPHLTEDMLKSAYIDVFNSLIDNREEIISVIRQTVEKLMDTTAIDKKLFMAKNAADNKQKTVQEYMALNGKVVIDQKVYNEKFDRLMEIYQAAEDEYTRIKREKTELMDRCKRCKAFIKTLSNSSVLQEFDDGLFCGTVEKISVFENKLEFEFKDGTKIPYLLTNK

SEQ ID NO: 10626 - protein, 420 aa, synthetic construct
MDKTVQKIEARKPLIPVRKKVCAYARVSSGKDEMLHSLSAQISYYSDYIQSRRDWLYVGVYADSAVTGTKDSRDEFQRMLTDCKNGKIDMIITKSISRFARNTVTLLSTVRELKELGVDVWFEKENIHSISGDGELMLTILASFAQEESLSVSENCKWRIRHNYEEGIPNGFTVYGYNVKKRNLTINEEQAAVVREIFDMYLNGKGSKVIARTLNERAIPAPGGETWHQARIMKILRNEKYIGDLNLQKYYSENHITKRTLVNDGCLKRYYVTENHEPIIDSGMFDRVQQLIKDKAERHPHIAPYDYSFKDKVFCGKCGAKYYRKKVHTGTQYEHFVWRCNTYSNKGKKYCSNKQIPDEVLVNMAKRYDTKIEKILILESGRVHFVFADGNEDIQEWEINRKWTDEMKERNYYNQRRRWL

SEQ ID NO: 10627 - protein, 463 aa, synthetic construct
MTTKVERCAIYIRVSTTEQMMHGKSLEAQKEYLTNYAREHNMAVVGIYADEGKTARKELKKRKAIHSLLQDVEAGKIDVIIFWRIDRWFRNLSDFYKVQDILDSHNVRWISTSEPGINMETRDGRLQLNVVLSIGQNEVDTTSERIKFVNEASIRNGKLIFGDVNMGYGYKSGIVDGQKRMVKDPDREHVVDAFYKYFFKHQNKCATLRYIQETYDPDFSFGIMRTLLSSEFYKGTYRGFPYCPAYLTEDEWNKLQKIQKRNVKATPSGRIYLFAGMIRCPVCGQLLCGTGCSSIINRKTGAKRTYCYYRCNRAMIDHICSYRHRLSQNLVENYLLDNLEDEYKNYKVKCEKIEKEKEKQKKKQSPEKLRKELDRLNFLFQKGRIDWDYYNEEYGRIESELNDLQSALPEPVTNYSYLEELLNTDFRTMYDQLSQENRRAFWRSIIQEIHVNEDHAIISVDFL

SEQ ID NO: 10628 - protein, 522 aa, synthetic construct
MELLNVCIYLRKSRADREAEARGESETLARHERILLDLAKKRGYNVGAIYKEIVSGETISARPVMQQLLREVESGMWDGVLVVEVERLARGDTIDQGVVARSFQYSNTLIITPLKTYDPNNEYDEEYFEFGLFMSRREYKTIRRRLTAGRESSAKEGKYCGSKPPYGYSRVKLVGEKGWTLQPVPDQAEIVKLIFNLYVHGVSGERIGMAKICRKLNDSGIKTMDGGLWTISRVQAILRNPVYEGMIRWNSRKSVKHIKDGQITISRPFAQDYILVKGRHPAIVSRELFQQAQDIVNKNPARPLNSLHVLRNPLAGIVRCGKCDHVMTRKSPNGRQGDLIRCPYSSCSNISSKLPLVEKALLDGIQELVDGYRLNNSVSDQEYSLSISEREKMIQGKLKEIDILKKRKQRQYDLLEQGIYSTEEFLERSRATAAELSACDAVILSLKQEIEHEQELQFQRSSFIPKCEDLLANYWTWDTSTKNRFLRELIEKAVYTKNAKNTWKNGDDISFTLDIYPKIQQK

SEQ ID NO: 10629 - protein, 463 aa, synthetic construct
MPSKIERCAIYIRVSTAEQMMHGKSLEAQKQYLTNYAKEHNMTVAGVYADEGKTARKELKKRKAIHSLLEDVKAGKIDVIIFWRIDRWFRNLSDFYKVQEVLDDNNVHWISTSEPGINMETRDGRLQLNVVLSIGQNEVDTTSERIKFVNEASIRQGKLIFGDVNMGYGYKSGIIDGVKRMVKDPDREDAVNAFYRFFFKHHAKGLSMRYIQENYDPDFTWANMRTLLSSEFYKGTYRGIPYCPAYLTESEWNNLQEIQNANVKRAPSGRIYLFSGMINCPICGRRLSARGGSSIINRKTGAKKVYCYYRCNKAFIDHKCTYKHMVSQNLIEQYLIDHLEYEYNKFKIKCEKIEKEQEKKKKIQTPEKLQKELERLNLLFQKGRIEWDYYSKEYDRIETELNELLNAAPELEPDYAYLEELLNTDFRTMYYNLTQENRRAFWHSIIREIQLNTDHTVDSVDFL

SEQ ID NO: 10630 - protein, 525 aa, synthetic construct
MANVTVIPATRNIHTGIRKDAVTKRKTAGYARVSTDSEEQLTSYEAQVDYYTSYIQSRPEWEFVKVYTDEGISATDTRHRDGFNEMIKDALDGKIDLIVTKSVSRFARNTVDSLSTVRKLKERGVEVYFQKENIFTFDSKGELLITIMSSLAQEESRSISENVTWGKRKRFADGKVSLAYSTFLGYKKGEDGQMEIVPEEAETVRLIYRMFMQGKTPYAIAKYLTEQEIPTPTGKSGWRHRTVENILTNEKYKGDARLQKCYTVDFLSKKRKANEGEVPQYYVEGSHDAIISPSEWQLVQLEMERRRAAGRSNCCSPFSAKLKCGDCGAYFGSKVWHSNSKYKRTVWQCNAKFKGEHKCTTPHLYEQRIQELFLEALSSLMENRDSLIDDCRAVMHVLGDCKAIDREMDEVRNEMEVTTGLIQKLIDENATRKMDQNDYRKRYDGYVSRYAALESRMDSLEKERKEREFKYDIFSGFLFELGEIHELPLAFDDRLFYQLVDYATVYSDGRVVFTFRNGTEITTEM

SEQ ID NO: 10631 - protein, 503 aa, synthetic construct
MAGRITQVTFGSPQLPRDKNVAAYCRVSSGKDAMRHSLAAQVSYYSELIQNHAGWEYAGVYADEAVTGTKDSRKNFKRLLSECRAGKIDMVITKSISRFARNTVTLLETVRELKTLGVDVYFEEQNIHSLSADGELMLTILASYAQEESRSASENQKWRIKKNFEEGKPWSSTLLGYRNVNGRYEIVPEEAETVRMIFAWYLEGAGATAIRNRLNAMGIKTRLGNSWSRSPILKLLRNYAYTGNLILQTTYREDFITKRSVKNKGEKPMYHAQGTHEAIIDMDTFNRVQEEIQRRAEHFASPDGNKSTARYPFTSMVKCSRCGKSYVRSGAPKYRTWTCHTRRKDGLNCCGAEIIPEEELFRLTAEVIGGEVTEDAVRDKITVIRAEKDRTLVFCLKDGKETVKRWREHEIKYICTEEQKRQISLKNSGRKRTDEQKRQQSERMKEYWRTHEFPEERRRLISEKKKAYWSDGEASAEHREMLRQRMKEVRTMRKNGRKEENDG

SEQ ID NO: 10632 - protein, 573 aa, synthetic construct
MAKRSAKKNEYQSAEQIGVIYARYSSHNQKEESIEQQIAECSDFAAKNGIRIVGIYADKAVSGRSDRRPNFQRMMRDAEKRQFQIVIAYKSNRIARNMLNALQYEARLDLLGIKTLYAKEEFGNTAAGRFALRTMMNVNQFYSENMGEDIKRGMVDNANECKVNGMLPLGYVKSKEGKYAIAPDEAAVVREIFDSVLKDVPVAEIARSLNQRGIHTKLGREWNKNSFHIMLKNDNYIGVYRHSGVVVEDGIPPILEKEVFTAVQEKLANKKKTAGRRSANGEYLLTGKLFCGYCGSYMIGVSGTGENGTVHNYYQCQKRHAEGRCEKKNVRRDFIEKLIARLTQDYILQDDTIEWIADSTMSFQAMARRESGVAQLERDLADNRKVAKNIMAAIEQGIITETTKARLLEVEGTIHDLERSLSIAKAASQPIERERVVFSLEQMREGNVGSKDHQKKLIDTFVKSVTLWDDRIQIDYYHTPGKHKFSYSLEELTSKAENESNASDVRTDSLELHHCRRELHRFTTAFLLAAAPSRLYGTIKKTQESNSCVFFACIDGCVPQCSARLGIVWSSKR

SEQ ID NO: 10633 - protein, 529 aa, synthetic construct
MSRYCIYLRKSRADLEAEAHGEGETLSRHKTALLELARRMGITISATYEEIVSGETIAARPQMQRLLSEVGAGEWDGVLVMEIERLARGDTMDQGLVAQTFKYSGTKIITPLKTFDPQNEFDEEYFEFGLFMARREFTTTNRRLVRGREASAKDGKYVGSVPPYGYRKVKIPNDKGFTLEIIEEQAKVVRMIFEWYAEGAEVNSQKKRIGPYTIAVRLNELGIKSVAGKDYWTIYGVQHMLINPVYIGKIRWGYRKVKKTVTPEGMKKKSREFAQDGDYIVVDGLHEPILSEELFYKVQDLIAANPPTPIKYRHKNINPFAGLIFCAKCGHCMNYRRGYGRQPDYIGCYTAGCKNKASRFDLVEQRVLSILNSWVKDYSVDKAQIKHEADLNAELSNAISLAEKEIETLQDQLDKVYSFFERGTYTEKIFKQRSSVIEQQIMEIGEKIDRLKAEHQQVLERQNVQAEFVPSIKHLLEIYDTLEPVEKNKWLKQIIDRIVYEKNADGKYHNVDPGDFTIGILPRLPKRGS

SEQ ID NO: 10634 - protein, 517 aa, synthetic construct
MQKNNKSIGNRCVIYARYSCSNQTEQSIEGQMHDCEQFAARNNLQIVNSYIDRATTATTDKRPQFLKMIADSKQCVFDVVLVWKLDRFSRNRYDSAMYKKKLKDNGVRVMSAMENITDSPEGVLMESVLEGFAEYFSKDLSQKVKRGMRETAAKHKITNRIPFGYCKSEEDTYIPDPHTANAVRKVFDMYITGFRKSDIADWLNSNGYKTSYGNQFTLTAITPLIKNTRYIGKYYYADNEYTDETQRIVTDDIFYKAQQKAIANQHGGSCKAIERYLLSNKLYCGYCHNKMIGECGKNQNGLAYHYYTCVGRKRKHICNRKNIKKKDIEQYVINAISCLLNDEYAINKIIETAINYQQNDVEHINEIKDIESTIKEIERKISNILSAIEAGIFTDSTKNRLQELENQKTRLTQELNYKNQSSTKIPRTTLKQILKNLDLSEAATNPEKQNIIDLLIHRVYLWQDKILIVFNQSNLCDNEISVDDTDVNTIIKTLSEPNASSSDSVEYGTPDQSRTGD

SEQ ID NO: 10635 - protein, 485 aa, synthetic construct
MPTSDLKIAAAYIRVSTDDQEEYSPDSQVRLIREYARKNGYLLPEEYVFQDDGISAATARKRPAFNRMIALAKEKERPFDAILVLMFSRFARNREESVLYKGLLRKQGISVISVKEPAVDGPFGTLIESIIEWFDEYYLINLSAEVKRGMSEKFLRGEAMGTAPFGYRIDSANKTFTVDPERAEIVCDVFRSYADGAGLRDIAVQLGDAGITTRRGNRPDNRFVEYMLRNPVYIGKIRWTPGHKTRYSRVHIADGVEVVDGKHPPIVSMDLWEAVQRRMDQRKAAYGRYQRQAPAAWMMRGLVRCSACGATLIMAGRSSSCPFLQCHSYAKGSCHTSHSLSLRRANAAVLAGLQRSVGTLTFHMVPHLTSTPSRAADYGRLLEQERRRLARCKDAYQAGVDTLEEYRDNKARLEERIRRIEEQAASAAATPESFDKAAYGKKAADILRFLETSADEGAKNEVLRSVVDHITYEKASRHLAIYFYT

SEQ ID NO: 10636 - protein, 546 aa, synthetic construct
MRVSVNLNAQKPDTTTNAVIYARYSSHGQTEQSIEGQLAKGHEYAAAQGYTVVHEYIDRAMTGRNDNREAFQKMLSDTGKHQFQVVIVWKVDRFGRNREEIAFNKHTCKKNGVRVEYVAESLPNSPEAVILESVLEGMAEYYSIQLSQNIRRGQLESAKKCQCVGGTVPLGYTLDSDKHFVIDPQTAPIVKKIFDLYAEGATISEITGQLNEQGIRTARKQLYTKNSLTKLLKNEKYIGIYAYKDVVRVEGGVPAIVDKSTFDRVQELLKINRRAPSHTWTKVEYLLTDKLFCGHCGSPMVGESGFSHTGAKYSYYGCIKRRREKACDKKPVRQDWIEALVLDETVKLLHDDELMEYIIDRTWEYYQVTDKVQEEKAVFEAQLAEIDKAINNLVRAIEAGIFNAATKSRMDELDAQKAALTASLADLELTSGIRITREHIEYFLLRLRDLDVKDRECQKRLVQTFVNAVFVYDDGRVKITYNYSGKSSTITLNQIDGAEKGKGFVCCLPCSTSSPRFPRGVAAFFCFGVLGKIGCKYTTNFSCIVL

SEQ ID NO: 10637 - protein, 500 aa, synthetic construct
MRMCGYARVSTDEERQLDSLEHQMEFFSDFAKQNGHHLVNVYTDEGITGRQLKKRDAFNKMLSDSKLGLFDLLVVKDVSRFARNTVDLLTSIRQLKSRGIDVIFVNNSQKVLGESEFIITLLGAVAQEESSNLSKRVKFGKNITSKKGRVPPRIFGYDRIDNFTMEINEREAEVVREIYHLYIDEGLGCRLIAITLAEKQMKTKFGNDWNQRNIRRILENPIYSGHYINHRYTVVDFLEGTTKALPKEQYYHHDRPEWAIITPERFQQAQEILEQRRKQYATEYMHFTGRYSNRHLFSTLIRCKECGRAFSRRVTHYPNSDYIYWRCPTNNQYTAKRCSNNTIVREDDLIETLSTYLREVVSNKESIAQEIARKFKEANAVEGSKPDVQTLEAKKVKLKAKLEKYMEMYANDVITMEALKSKTAEINESINVIDDQLILLEGQRTQERTIESITNEAMTEIERFLSLQSATNMDLRRIIDSIIVDDKKQVKINLKITGNL

SEQ ID NO: 10638 - protein, 434 aa, synthetic construct
MERVVERVDALIPAQPKVLRVCAYARVSTGKDAMLHSLSAQVSYYSKMIQSHNGWMYCGVYSDEAVTGTKRERAGFQHMIEECRQGNIDLVITKSISRFARNTVTILQTVRELKSLGVDVFFEEQHIHTMSADGELMMTILASYAQEESLSASENQKWRVRKAFENGEIINLRFLFGYDITPDGIQVNEKDAAIVREIFARFNGGESMSSICRDLDARGHKGVLGGTWCAERMRNTLSNEKYLGNALLQKQYRNNHIEKKLLPNRGELPMYYAEGTHEPIIDQATFDKAQERLRMLAQQAANRKKPTRSVFSGLIHCGLCGNTYKRVTYRKKHYWNCTTFQTKGKSECAAKRIPEETLEVLTCEVLGAVSFDPDMVRSKITAIRAEKSNMVVFCMDDGSEIVKRWTDRSRAESWTPEMKEKARQRALQARRKKK

SEQ ID NO: 10639 - protein, 499 aa, synthetic construct
MSRTAARSVTVIPPTINPLTHLSKVAVQKRRVAGYARVSTDSDEQFTSYEAQVDYYTQYIKRNPEWEFVKVYTDEGISGTNTKHRIGFNEMIADAMSGKIDLIVTKSVSRFARNTVDSLVTIRKLKEKGVEVYFEKENIYTFDGKGELLLTIMSSLAQEESRSISENVTWGQRKRFADGKVNLPYKQFLGYRKGADGFPEVVPEEAIVVHRIYTRFMEGLTPGAIAKELTADGIPTPSRKQRWQTSTVESILQNEKYKGAALLQKCFTVDFLIKKRKVNEGEVPQYYVEHSHEPIITPEEFDKVQTELARRKRISRQYSGKSIFSSRIVCGDCGSYFGSKVWNSTSKYRRVIWQCNGKFKGEHKCETPHLDEKAIKARFVTALNAIIESKDNILEDCRLMQATLTDCTGIDTEIKSLLEEIEVVTELTKRCIAENSQMAQNQEEYAARYNGFVERYEKAKARLEQLRTTKAAREAQAEAIGTFMFEMQELDTITEFDEK

SEQ ID NO: 10640 - protein, 528 aa, synthetic construct
MKFKYPAMGTTKNAVIYARYSSHSQREESIEGQLRICHEYAKAEGLAIVGEYIDRAISGTTDARPDFQRMIDDAKKSQFSYVIVYRLDRFARNRYDSVLYKHELKQCGVKVVSATEGIGTGDESILLEALIEASAEYYSMELSRKIKRGRQDSAMKGNFLGGSVPLGYKVVDSKFIIDDETAPIVRYIFERYAAGTGKKQIIDELTAKGYMRRNGKPFTYRSFDSVLRNRKYTGEFTQTGITVEGGCPAIVDTEMFEKVQARLEINRRAPAKAKAKTEYLLSGKMFCGYCGEPMIGISGTGRHEKTFYYYSCVGRRGKSGCKKQHEKKDFIEWYVCEQTVQYMQDPERLSHVAKRIIEINDAEFDGGKVKELERAVENCDSDIRKLVDALTTIPDAARPALYDKIERIGAAKADMEIDLAKLRVLSEVRYKQEDVEAWIRSMCRGDLMDFEFRRQLIDVFINSVYLFDDRVVIVYNIKHGKQVSAIDVLNAVEELDGVELFPDSAEDSSAGGNGSFLSRILKFSFGIE

SEQ ID NO: 10641 - protein, 519 aa, synthetic construct
MKKVTKIAETASSKVKLKKIRVAAYCRVSTDSDAQLESLEAQKTHYENYITSRDDWEFAGLYYDEGITGTKKDKRPELLRLIDDCKAGKVDFVITKSISRFSRNTTDCLELVRKLLVLHIPIYFEKENINTGSMESELFLAILSSMAEGESVSISENSKWSIQKRFESGTYKVSYPPYGYDWDGEQMVINPEQAAVVKEIFAALLSGKGTHAIADDLNRRGIPTKRNGRWTATTIRGMLSNEKYVGDCLFQKTYSDSRFVRHNNHGEQTQYMVKDHHEAIISREDFEAAHAFIHQRATEKGVVKGSDKYQNRYTFSGKIICGECGDTFKRRIHSCTGYKYTAWCCSTHIKDKDKCHMLFVKDDDLKQAFVTMMNKLVYAHRIILKPYVDALKNTSSDDSLRRIQEIQTLLAQNTEKRETLTKLMTQGIIDPILFNKETNELLSQADSFRDEINALKNAVSGDVTKVTAATALLHFTEKGGILQEFDDDLFNEYVNRIIVRSRNEVRFELKCGLTLRERM

SEQ ID NO: 10642 - protein, 572 aa, synthetic construct
MASRIAEKLAAKKAAIYIRVSTHWQVDKDSLKVQRRELIAYVTLVLGITDYVVFEDPGYSAKNTDRPEYQAMMDRIRTGEFTHLVVWKIDRISRNLIDFAAMHDELQSLGVTFVSKNEQFDTSSAIGEAMMRIILIFAELERKTTAERVTAVMLSRASDGQWNGGRVPFGYSWSKEAKTFSIVPEEAKAIRRMAELYEQYQSLLYVAKYLNDAGIVTKTGGQWTPTTVRTILTNPWYIGQYVYNVHSDGKGIEKRDSDEWITVENHHEPILNEDVFCRMKFLLTRNKRGGVPSHKTYVRKNIHIFASLLRCGQCGSNMTANLDRRRANGFRPSQYACGSRRRKGTSCTNKYISDTTLGPFVLNYVANIIRASKNSSEATTPEVLERKLLRGEAFEDVASVSTDALGQLLDAFRSAGDAVEYRPQIAFSGDDNSIREIDTLRARRRKLDNALARLNALYLYDDEAMPEKDFVMQRGQITKQLEEVNARIEELQNQESSEELGDDFIGKASYYIMANKLIEDRYIDYEKYIRAIDPSIPRSFLQQIIDHIVVNDGRVISITFKNGSTHTFTYKT

SEQ ID NO: 10643 - protein, 576 aa, synthetic construct
MKKNFKMPGSGSETPIRVAIYVRVSTVYQIDKDSLPMMKQDLTSYCKYILNTDDFVIFEDAGYSGKNTDRPAYQKMMSQIRQGLFTHLLVWKIDRISRNLLDFANMYAELKDLGVTFVSKNEQFDTSTAIGEAMLKIILVFAELERNMTSERVTATMINRASNGVWNGGRIPFGYSYDKPTQVFSINPEENKIYNFMVETYEDTQSIVHTSRRLNEAGYRSRNGNMWSPVAVWTILRNPWYKGVYRYNYYKIPGRKAIKDESEWVIVENHHPASIDPDRFDRIQATLDKNARYRNAPGRKTAQKNVHVFSGLVWCAECGSAFTASPGKLHVSGYRPSKYGCPNVRKTKTCHAKYTSDVVLGEFLLNYILNILNAQKQFAYIHSTDDLQKRLLHGSTFSNVDHVDPDGLASLLNMLEKCSGSDPVLLKRPRSKPKMDPELKRMMADQKKQQRALDRLNDLYLYSDDSISEREYLVRKQQITDRLQEINEAIGMMSQEPWMRTMNDEEFIRQASSFILTQKLADKQYIYYENLAESLDPEILKNFFVSILDSIILRDGRPETVVFRNGLSHTFTYKDS

SEQ ID NO: 10644 - protein, 541 aa, synthetic construct
MFREMIQFSNNEVIEYLRKSRSDDPLMSVGEVLEKHEKLLMEYSERNLGGKIPEKNIYREIASSETIDGRPEMLKLLKEIESPQIKAVLVVEVQRLSRGDLEDAGRLIKLLRYTGTFVLTPYKVYDLTDDYDRDAFERELKRGNEYLEYFKKIQSRGRLLSVQEGNYLGSVPPYGYNKIFITEGKKKCPTLEEKKSEADIVRMIFRLYADENMSRDSICRYLDDLKIKPPKGDYWSSATLKDMLSNVHYIGKVKWNWRKVERIVSDQEVIKTRPKSKNHLVFEGKHKGIVSTSLFMKAQERTGKVHRAKANTKVRNPLAGLLYCKCGRSMSFRTYKNTDGTLRSEPRLLCDGQIHCNTGSVKYDEMMERICDVLTSCISEFEILIEKDSGENIILHEKLVKELAVKLKELEDKEVRQWEMYTERAMPKSVFDRLNEKLLKEKNETRKSLRKAYDTMPKKENYQEKIIKFSDSLAALKNPEVSAELKNNYLKSIIERIDYTRESPVRITKKNCLSYGIDPKDLKSGGNWYSPPFHIDIKLRL

SEQ ID NO: 10645 - protein, 555 aa, synthetic construct
MIPNLNDLMSFKPSVAPDEPTALYARLSVDDANDGDSNSIVHQKEMLERYCKDNGYTNYKFYVDDGFSGTNFDRPDFKRMIADVEAGKIKRVIVKDLSRFGRDYLQVGMFTEVLFAQYDIHFIAIANNVDSQKGENDLTPFVNLFNEWYARDCSRKQRAVQRMKGTSGKRLSTQTPYGYLKGEDGHLIPDEETAWVVKLIFDLCIQGYGPTQIANELTRRNIPTPGTMEHRRTGNMRHYSPETECVWCSRTVYFILARKEYLGHTVNFKTYSKSYKLKKRIPTPEEQQVVFENTHEALIDQEDWETVQRIRAGRRRLNKQEIPALFSGLLYCADCGSLLRVHRGKNISKGQECYCCGRYRVRTKSCSMHYIREVTLAELVKDNLKQIVKTAAEDEQEFVRRLTCQSAKEQAVKTRVLKKELELKERRVKELDGIIKRLYEDNITGKLSDERFKIFSADYEQEQHSLREEVVALQKQFDDAENTCTNISSFLKMAKRYADFDELTPAMLRDLIEKIIVYEGDKSSGHREQRIEIYYTFIGAAENSQIIVKRKKKAA

SEQ ID NO: 10646 - protein, 518 aa, synthetic construct
MQENETYVIYLRKSRADSEKSSLEEVFAKHESELQSLAERTLGNRIPEDKIFREVVSGETITDRPVISQILKVMESKKIKGVFVVDPQRLTRGDLLDKGHLINVFKYTNTKIITPYKTFDLNNDFDLKLFKMELDKGSDYLEYYKMIQARGRIASVRSGQYIGSTAPYGYDKYSYKENKHTVNTLKPNSDEATVVQLIYHLYVNESLSYAAIANKLNAMNIKPRKSTSWSPYSLKEILHNPVYIGKVRWNRRKTVMKYKNESLLKTRPIALNNSIISDGIHKAIIDETLFDSAQNRSGKSPRNHSSSKLKNPLAGLMFCGNCGRAMSYKTYKNNAGSEKQPPRYLCNNQSNCHTKSVKATDVINQIIGALECYIEDFKVELENDDGNSFNVRSQIISVLNKQLQDLEIREETQYEMLENKIYTPELFKKRRQKLLEEREILLDKLQEAKVQEPVKIDYQEKIISFTDTVEALKNPDIDILQKNMLLKKCIKKITYTTDEEKGNRWRESTFEIDITPLI

SEQ ID NO: 10647 - protein, 504 aa, synthetic construct
MNYNDSKGIYLMYLRKSRADEYNQDVENILKRHEEELQSLAKREFGELIPEKYIFREVVSGGTIKDRPLMKEILKMMESGIIAGVLVVDPQRLSRGDLLDQGHIINAFKYTNTLIITPYKTYDLNDTTGTDMKLLKMELNHGADYLDYYKMVQARGKLASVRAGNFIQPIPPFGYRKVRYGKVTTLEPIEDEARIVRIIFQKYAEGKTICGVTNELNAEGYIPPSKQIWTKGSVKRILSNPVYDGKIRWGFTPNKTVMEDGKLRKYRPERHDYLLFDGKHDAIVNHGLFMSVQERLSKNKSFTNDRSLKNPLYGIMYCKRCGRKISRLNVAESRGGHRYACPNKLCDVQSSRYDLVIEAVIDTIQCAIDDFDITFHNCNSSGSDEKIRELRQELTRLNNKEDTLFELLETKVYSTSVFTQRHAELEKKRQEIIGKINTLSLIPPPESCNDKKMRFKDALLALKDESMPPKEKNHLLKKCIERIDYDIEGVRYHSKVKLDVYFKF

SEQ ID NO: 10648 - protein, 503 aa, synthetic construct
MLRAALYARFSSENQREESILAQFRDSTEYCKKHGYAIVAKYADEAKSGTTTIGRDQYKLMLKDAQKGKFDIVVFHKIDRNARNELDYYITKHKLEEAGVKYAYSRQDIDSTSPEGQMMESMLVGMAAYYSRNLSNEIKKGLRENAIQGKCTGGRLPYGFSVDADKKLIINEKEAAAVRMIFDWYSAGVHYGVIRKRLFNAGYRNRAGKEFTIASIYEILRNRKYVGDLYLGKTLFRKGKRNTHQTSANVQYFENAIPAIVSRDIFEEVQVKLDQNKRRSGAGNAKAIYALSGLIHCGQCGSAMVAHSTKNSRGIKNYYYRCPKGRLVGDEKCPQKFINRDDIENTVYQLIRKLFTAPDAHNQIKRIIAKNNMTVKVPDYTEQIKRLKNQESDASKRLDKLYDLYMTDNEDEFTLSKMTQLKEEILKLRTQIKETEDRQIIAQSATFDIDKIIDTFQKQLKQKQSPEFIKTLFELAVKNITVYPDKIKVALLVTQERFELPTP

SEQ ID NO: 10649 - protein, 656 aa, synthetic construct
MSLRSKYTEHQICKLEKKEFMKEASFDDIFIDYGHDLNTLILCRESTAHEDQQKALNDQVERMKAIVDKHRQLHLVDEGIIIEDAKSGLAMDVRPKFQATIKRAVAEDIDVILVQEASRFSRNTGDFFYNMNILQNSGVGILIMEGEFWTYFMAPADYPRLANEVAKGQAESLTTARRVNRGIETYRSRGQLVSGNMFGYDLVKAVERKDNTYKINPVDGATVQLIFYMYVNKGIGTELIATHLNANNYPTAKRKGEWSASKVRRVIINEKYANLIMYGKYKVVDTSTKKKIATHIKPVRTTTYDKDGNIIQERNVQYGTWEPLVDEETWWKAQEIMDSRSNSYNLKDDTGKSKRCANGLRTSNDAYANKAYCCCGHTLSPQYTHAATDTKYAQFRYNCRWQINSHTDEYRKKHGLPPSDCTCKLPAVTDVAMRLMSIKVFEYLFTDIRDTIDDTVRIIEMANKQAVDSLNNSGVSVEDLEATYAKLNNRLSRFADMYADGDLTREQYRDKKSSVEEELKHTKELIDSKKLAISEQKKKSLDIETIKARLNTYVDLKGYGVSNEMIEFFVERIIRRPNNEYVWELNLTCQPSKPNKYKIKKYNKEYSDSLQDDSNFNIIKTFVISLDECKKFCETLAHRQFRASYWNQITVKIAVK

SEQ ID NO: 10650 - protein, 526 aa, synthetic construct
MIQTGKITALYARFSHDEGNSGHDSNSIANQKELLAEYANTHGFINHQFYTDDGYSGTNFERPAFQKMMTDVENGLIGTIIVKDMSRLGRNYLMVGQYTEIIFPEYNVRFVAISDNVDSAEGLSDLIPFSNLINEWYAKDISKKMRAMITQKGNSGRRLCSRAIYGYKKSPEDKEKWIIDEYAASVVRRIYELYISGNGVSRIANILRDEKIQRPFVYLYQKESDTPYEWTGATITVIITNREYCGDTVNFKTHKPSYKSKKIIKNPPELQRVFLDTHPTIIDRVIFEKAQNRYAKRCRKKKSKTKDTLFTGYVYCKDCKSRFHVFRHKARGNMIVSYECSGYRKQQKKCTYHRIDEDALKQCVLQKIKLMWYEAKSDIRSFKAKVRKRLNADETASRSKIQSEIDAAQTRIAEIDKYVQGLFEAKVRNEIDSDIFGSLSKTYTEEKAELNAKIADLILQENSAKDAYQKINRLYEAIEKYDSITELTSEVLSDFVDRIEVGEHLKGTKEQKIDVFFVGVGLMDTL

SEQ ID NO: 10651 - protein, 523 aa, synthetic construct
MRFFSYGRKSVFSDKSDSIDNQFRMNREYCESKFSGRVDSWQQFSDEDFTGANTSRPDLQRMLSFIKGGFCDVLVVYQLDRLSRDVRDFANIYALLEEHGVMFISIKENIDTTTPIGRAMMYVTVVFAQMERETIAARVTDNMLGLAKKGYWTGGNPPVGYVRKHIVVNGKKHCSIEVDPDGARYVTKIFDTFLAYNCSLQGMETRFKNQGIRTQSGKFFSTTQLHKMLTMPYCVEATPEVYDFYAAKGCIMDPGSPREMWDGSVGVIIYGRSTEKNKKHQAQPPEKWTVCLGKHKPFMPAEKWLAVQSRFTQNKCIKDAKWPVPLLKGVLRCKCGNLMQVSRKKKVDGTCSSWYYCRKRMRQGVDACDMGQIKCDLLDEKVLELFRGITADPALIQKFVKAEAPADVPDLKAAQARVSACERKIGRLAASLALAEDSAASKYIIAEMERLDVELGALKREASLAEMESHRAAASAKDAKATAAEIAKLIHGLDGFDDKEKNAIARAVIQECTWDGERLFIKL

SEQ ID NO: 10652 - protein, 491 aa, synthetic construct
MQAERLFLAGCYFYTQNCATSHIYTKEGDYMKLERCAIYIRVSTAEQMMHGKSLEAQREYLEAYAREHNMVVAGVYADEGKTARKELKKRKAIHALLEDVKAGKIDVIIFWRLDRWFRNLSDFYKVQDILDEYHVRWISTSEPGINMETRDGRLQLNVVLSIGQNEVDTTSERIKFVNEASIRQGKLIFGDANMGYGYKSGTVDGVKCMIKDPEREEAVNAFYQYFFKHQSKTGALKYIQENYDPDFSYSSMRTLLSSEFYKGTYRGAPYCPAYLSTEDWDRLQKISDKNIKVNRSNRVYLFSGLIYCPNCNNLLSGCGCSSIINRKTGAKRTYCYYRCNKAYMDNHCNYRHRLSQNLVESYLLEHLEDEYQKYHVRSGQIREKQKKEKKIKTPEKLRSELERLNLLFQKGRVEWEYYNKEYSRIEYELKEALAIQPEIGRDVSYVNEIIQSDFRSMYAKLSLENRRAFWRSIVSDIHVAKDSTVKEVNFL

SEQ ID NO: 10653 - protein, 516 aa, synthetic construct
MSYCIYLRKSRKDLEAEQHGEGETLARHERALLSLAKKNNLIISNIYREVVSGETIAARPVMQQLLHEVEQNLWDGVLVMEVERLARGDTIDQGVVQRAFQYSNTLIITPSKTYDPANEFDEEYFEFGLFMSRREYKTIKRRMQNGRYAAISEGKWPYNSAPYGFRRTKLEKEKGWTLAFDENEAPVVRLIFSMFTGPERVGIRSITRTLNSYGTKPRNSKLWSESTVRGILSNVVYDQCVKIGERKVVRTVENGVLTTARPRTSDYTIVSGRHPRLIDHDVFAEAQSYLGCGSPKPAGSNIIKNPLAGIIVCSECKKKMIRRPPSGTASRVPYDLMLCSTYDCPTIGSPLDLVEREVYNALSDWVEGYRLSGQMPSKSLIPEKEVLLESAQQALDQLLRQKGTMYDLLEQGVYSTEVFLERSDSLQNRISEAESNVAQLKLELDKERQREANIEQFLPACEDLLSCYWDLSIPERNRLLKLLIESIEYKKLTKNKRGHLNEPNFELTIKPRIPRK

SEQ ID NO: 10654 - protein, 465 aa, synthetic construct
MARSITVIPASQPYRVGGRTQQKTRNLRVAAYCRVSTDQEEQLNSFENQVEYYTKYIQDNPLYQMAGIYADEGISGTNTKKREEFKRMIRDCEEGKIDLVITKSISRFARNTQDCLEYSRRLKNLGIGIFFEKEHINTLDASGELLFTILSSLAQDESRNISENCKWGIRSKFKKGIPQVDCTKFLGYDKGEDGKLIVNQEQAKIVKRIYREFLNGYNPAAIAKMLMEDHIKTGTGREEWRSASVRAILKNEKYMGDALLQKTYTADFLTKKVKKNHGEVEQFYVKESHEAIIPKEQWEAAQLELERRDSYMQELGLTFYGYGSEVNPFSCRVVCGKCGAVCGKKSWKSRGVEFWQCNNRSKNHGVKGCASENLPHENLFKGFITAWNQIVAEREQYLPKWEKKKKEGNPLEKLRAEQMIELTLQPPLTKMLPELGQMVLERVIVQGKEIMVIRFLDGTEIKVRI

SEQ ID NO: 10655 - protein, 520 aa, synthetic construct
MQYEEYLIYLRKSRSDASLEAMGVDVLERHEQILLDLAKRMNLSIGGIYREVVSGESISARPEMQKLLSEVESGRWEGVLVMEVERLARGDTVDQGIVQRAFQYSGTKIITPTKTYNPNNEFDEEYFEFGLFMSRREYKTIRRRMRAGVTAAVKEGKWPFNQAPYGWQRVKLEHGRGWVLAPDPDEAPVVKLIFRLYTGPDRIGITHICRYLDNRGIKPRNGDTWLECSVMGILRNVVNDQRVGIGRRKVIKQVQNGSVSKVRPHSDYDFTAPGLQPRLIDHNIFLEAQEYLAKNSHKLSESYGIKNPLAGILVCSCCGKKMQRRPASRDGSSGRCPYDVLMCNTRGCPTIGSTLELVERELIQALSDWVAGYQLDPTLEVENKVPEKEQLLSSAVSNHDLLLKQNGNLYDLLEQGVYTTEIFLERSHELQKRIKESEAHIEILKKDLEYEKEKIANIENFIPSCKELLSCYWDLSVQDRNKALKMLLESVEYTKTKRNRKGDKDNPTFTLNLKPRIPRI

SEQ ID NO: 10656 - protein, 623 aa, synthetic construct
MKAKKTDNGKITALYERLSRDDDLTGDSNSIINQKKLLEDYAKEHGFTNCVHFTDDGWSGANFDRPNWKRMIAAIEAGEVSHVLVKDLSRVGRDYLQVGFYTEVMFKERGVRFIAIANGVDSDKSESSEFAPFLNIMNEWYVRDSSRKITSVLHARGMSGKHTNSHCIYGYKKDPNDKDHWIIDEEAAEVVRRIYRMALESKGPYEIARILALEKVERPSYYLAQRGVGKHQSNFNPAERYTWRGGTVADILSKPEYMGHTVNFRTYKESYKDKRSRMTPKEDLVIFENTQEAIIDKETWERVQSLRKTIRRTDTIGAANPLTGLMFCADCGAKMYNHRGGAGLARDWAGRPNGRKRPERDEYNCSRYDLGNQHYNRYCTTHLIRTAVVNELLLEAIKEVCDYALNNEAAFMEQVCSASSERQVKAAKAIRQRKQRSEKRADELSRLIRKLYEDNVNGRLSDKLFEQMLHDFEAELESLTESVTQDEQELDRISRETVNAEKFLALVKKYTDFSELTPAMINEFVEKILVHQAEGKGASRTQEVEIFFNFVGKVEIPHEEIVLTEEEKAALAEQERRRAKKAEYNRRYMEKKRREWREQREREQEQKPHKLPPVADEKGEKSA

SEQ ID NO: 10657 - protein, 590 aa, synthetic construct
MGLFLLYGKNIMRNKSLAGRANNRAERPRKVAIYIRVSTTHQIDKDSLPMQRKDLIAYCELILGIEDYEIFEDAGYSGKNTDRPAFQEMMQKIRSGSFSHLLVWKIDRISRNLLDFAEMYEELQSLRVTFVSKNEQFDTSNAMGEAMLKIILVFAELERNMTSERVTATMISRANQGLWNGGRVPYGYSYDAETSVFSIIQDEADVCQLMKTDYFEHKSIIHTAKLLNDRKVPTRSGALWSPTAVWKILSSPFYAGIYRYNHYKGTENRTINPEEEWVLVPDHHPAIFTLEEHEKICDIMDTNKRMSNLPGQKHRAKNVYAFSGILYCGKCGSKLVSTPGRLQADGFRTTTYSCPKKRKTHECDNPSINDLIVGEFVINYILNMLNAKSSFSSISSPAELEVHLLYGGSFKDVQHISEDGLNEFYNLLSRYGSDSSYVFAVKRPRKKKAAVNPEVEALRKDKEKQERALKRLQDLYLYSERAMTEKDFIIQKNEISSRIQDINTRLGMVTHDANSTLSDEDFVRQASHLLITKKLIGREYIYYKSLAQTVSPDVLKIYMETILDSVYVIDGRVSSIIFKNGLTHTFIYKK

SEQ ID NO: 10658 - protein, 492 aa, synthetic construct
MNVAMYLRKSRADENNPLETLERHKEILLSYAKDNNLTVIDIFEEVISGGMLYNRTEMLKLLDAIPSHIYDAVLCIDLDRLGRGSAADSEKIFDVLKENDVKIITLKKIYDLNNEYDEDYSEFEMFMARKELKFITRRMNRGRIKSINDGCFVSGAPFGYRNAVINKKHTLEVYEPEAKYVRMIFDMYVNQSMGITSISRQLANLGVLSKKNTPLHPTTIARMLRNHTYIGKIVWNKSKSVKGKNTQEKTSKDDWLYVPGLHEPIIDEDTFNKAQDIINLKYKPPMRTGTLQNPFAGLLKCANCGRAIVINTSNETVEKYRLCCRTLDCNKASALSIVEDKVFEVLTKEFKDIELSLKNIRQSHNKDKLSCLDTIATLETELKKLDKQQLRLYDLLEQEVYTKELFLERNNAISDRRKKINATIAQEREKFKLVDTSSIEERLPLLRELLTNYHSLSAAEKNSILKNFVKKIEYKREKSAPEGDIFLKIYYK

SEQ ID NO: 10659 - protein, 465 aa, synthetic construct
MKGNAGDTIVKKIDLSPELVRVALYIRVSGEEQKIKGLSLEAQQERLEAYARERGWVIVGIYIDAAKTARKNIHKRTDFQRMMDSVKRDEVDILLFCRLDRWFRSVADYYKIMEVLEAHNCDWKTTDEEYDTTTANGRLYINVKLSIAQNEADIDGERIDVVFDSKIAHGTVVSGSAPFGFRVNEEKRLEVVPEDAAIVQDAFNYFETSISQRATVRYIRETYGVNWCDATFRRMLKEKLYTGVYDRGGRFNDHFCPAIISKQQFDRVQALLERNARSVPSGKVYIFTSILTCAECGHKLVGYKSSDYYYYRCNQHFQRGRCSHNHSAREDVVEKWLFEHLAEELERCQLEWEVAAAKKKASVARTDKAALKRKLTKLKELYVNDLIDIEDYKRDYQIYTAALKQIPEPSIEPPPDFAAVRKLLDNDFKTIYENLTREEKRTLWRSVIKEIRIDNDQNITGVVFG

SEQ ID NO: 10660 - protein, 599 aa, synthetic construct
MRKINKIEPTLPVLPTRKKVAAYARVSVETERLHHSLSAQVSYYSELIQANPEWEYVGVYADDGITGTKASKREEFQRMLDDCEAGKIDIILTKSISRFARNTVDLLETVRHLKELGIEVRFEKENINSLSGDGEVMMTLLASFAQEEITSLSNNVKWGVRKRMEQGIPNGHFRIYGYRWEGDQLVIEPEEAAIVRRIFQNFLDGKSRLETERAFEAEGITTANGCRWVDSNIKVVLTNITYTGNLLLQKEFIEDPITKRRKKNRGELPQYYVEDTHEAIIDMETFQYVQEEMARRKELGAFANKSLNITCFTSKLKCSKCGSSYVRNQRSNRTKYTSTYGDTIVAWGCGTTKKKGGRCSNKDIPERVLREACATALGLDEFDEDVFLERVDYIQVLEGQVLEFHFYDGTTALQEWVSTAKKDCWTDEHKDRQREWIKNYMANASDGRFSEFTTRIRCEHCGSTFRRNTQPSKSATGGKMHYWRCPTSGDCVTTCIREDRLKDITASVMGLVEHDADAFKEQVEYISVSHDMKLTFHFFDGHEETVQYNTKRQGTPWTEERHKKFSASMQGKYTEERREAMSQKMKQIRSEKHWSSKRK

SEQ ID NO: 10661 - protein, 527 aa, synthetic construct
MVVQKKVTTIPASLTRFTATPITELKKRRVAGYARVSTDHDDQFTSYAAQIDYYTNYIKSRDDWEFVDVYTDEGITGTSVKHREGFKRMVADALTGKIDLIVTKSVSRFARNTVDSLTTIRQLKEKGIEVYFEKENIWTFDGKGELLLTIMSSLAQEESRSISENCTWGQRKRFADGKVTVPFNRFLGYDRGPDGNLVVNPEQAVIVQQIYAMFLQGMSYHGIAKKLTADRIPTPGGKDKWSISTVRSILSNEKYKGDALLQKSYTVNFLTKKTKINEGEIPQYYVEDNHEAIISPDVFAMVQREMTKRGRGKNYHSSVHAFSSKIRCGHCGSWYGSKVWHSNSQYRKTIWQCNHKFDGDERCDTPHLSDEDIQRLFLSAANKLLVDKTEVIANCREMMDLLFNTTELEAEQATLLEETQLISDMVQQTIYENAHIALDQTEYQKRYEGLTQRFETAKQRLETVMAELDRMQTQRADIEAFLESFEALPDTLTEFKLENWHSLVDYATVYSTDDIRFTFKHGQEVQA

SEQ ID NO: 10662 - protein, 591 aa, synthetic construct
MAKITRVEQVVPTIKTKKKVAAYARISMESERMNHSLSAQISYYSSLIQKNPDWQYAGVFADDGVSGTGTAKRDEFRRMVEAAENGEIDIILTKSIQRFARNTVDLLETVRHLKDIGVEVRFEKEHINSMSGDGELMLTILASFAQEESRSLSENCKWGIRKRFEKGIPNGHFRVYGYRWEGDDLVIVPEEAEIVRRIFQNFLDGKSRLETEREFAAEGITTREGCRWVDSNIKVVLTNVTYTGNLLLQKEFISDPISKQRKKNKGQLPQYYVENTHPAIIDKETFDYVQSEIARRKELGPRANKSLNLTCFSGKLKCPFCGISYAHNKRTDRGFMEYWACGSRKKKGGRCPVGGSINHENLKKACADVLGLDEFDENVFSDTVDFINVPERYVLEFHLKDGGVVTKECPNTGHRDCWTAEYRAKTSEKRRKKPNCKGSSVMTGKIKCVHCGCNFRRASQPSATSESGKAYYWRCAERNECGTVGLREDLLKPFIAETLGIAEFDDDEFDRQIGHIDVLSATEMVFHFKDGRTVNRTWEQPKRVGRPWTDEQRAKFKESVKGRYTPELRQQMSEHMKQSRKERGKAWRKEK

SEQ ID NO: 10663 - protein, 526 aa, synthetic construct
MAQRKVTAIPATISRYTATPINSTKKRRVAGYARVSTDHEDQTTSYEAQVDYYTSYIKSRDDWEFVAIYTDEGISATNTKKREGFKAMIADALAGKIDLIVTKSVSRFARNTVDSLTTVRKLKDEGIEIYFEKENIWTLDSKGELLITIMSSLAQEESRSISENVTWGQRKRMADGKVSFAYSRFLGLDKDKETGKIVVNPEQAETVRLIFHLFLEGMTPHSIAAELTSRGIKTPAGKDVWNQQTVRRMLSNEKYKGDALLQKEFTVDFLQKKMKKNEGEVPQYYVEGNHEAIISPAVFDMVQAELAKRTKGGSRYSGVSIFSNKIKCADCGGWYGSKVWHSTDRYRRVIYRCNRKYNGEKCETPHVTEEEVKAAFVSAYNKLVTEKKEIIANAEIIRKTLCVTDALQEEKGKLEEEMAVLVEMTQNIVAENARVAQDQDEYQKRYDGLVNRYDEAKARYDAVVAAISAKEAQNERLADFIKVLKAQDGTISEFDGSLWGGMVEFVTVGRDKAITVTFRDGTEIQA

SEQ ID NO: 10664 - protein, 525 aa, synthetic construct
MAYCLYLRKSRSDIEAEAHGEEETLARHERILLDLAKRCEYNVTQIYREVVSGETIASRPVMQQVLQEVEQGMWDGVLVVEVERLARGDTIDQGIVAQAFKYSDTKIITPIKVYDPTNEFDEEYFEFGLFMSRREYKTINRRLQRGRLAASQEGKFVSGSKPYGYERVRCSDGKGWTLRPVEDEADIVRYIFKLYAYGIESESGEVHYPGTASIATMLDKLGVKTPSGGDTWQSHTVYKILQNPVYIGKVRWGERQTKRISENGVIKKKRVHVPESEWLLVDGLHPAIIDVATFNRAADMMKQKGPVPLPGTYSLSNPLAGIVVCAKCGRNLTQRNSQSYPMLCCPNKRCTNVGAKLSLIEERILQGLSGWLADYRLKWDDGSAAPDTQIPETEKAITRAKSEVATLRKQLSRTHDLLEQSVYDTDTFLLRSRDVNERITAAEKKVSKLTELLAELKRREDSKKNIVPKVEKLLEVYETFPNAQAKNDMLKGILEKVVYLRENRSNKGGPLDNFELTLFPKIPRS

SEQ ID NO: 10665 - protein, 505 aa, synthetic construct
MTKNAVIYARFSSDKQREESIDGQIRECRAFAEANEINIINTYIDRAMSARTDQRPSFLQMVKDSAKHLFDYVIVYQLDRFSRSRYDSAIYKHRLKKNGVKVLSAKENIKDDPSGILLESVIEGMAEYYSAELSQKVKRGMTENLLEGKWIGGIVPFGYELTSENKLAISPTTGHLVSEIYDKYLSGVKTTDILSKLNSLGIKTQRGCNFTRNSLNRILKNQIYTGTFTWAGTSYPDYAPALITQEQYTAMQNLFESRKRKSNTARRVSPQYALTGKIYCGTCGLPMTGYCGKSHTGTTYYYYQCSSKNNKSEKAARSQIACDAKNISRDKLEKLVLDTTISILKNKDAVKCIADQCMTIQKAELEHKPAEQLRLESQIKEIEKRLKNSVKAVENGLISQTITNNIETYEKQLTELNAQLDGLKLETHIIPITEEAVIYYLNQLTERANKKDGYSLDTFDDFIRRVVVTGKRVDIYYNYTAVPNILENPAVKMLRGSSEDYLVTR

SEQ ID NO: 10666 - protein, 525 aa, synthetic construct
MWMLPPMSVDDIIMYLRKSRTDDPALTVLEVLSKHEQMLDDWVVRNIPDDGRRIPEANRYREVVSGETIESRPCVQEVLRRVESPRVKAVLVVEPQRLSRGDLEDIGRLVKLLRYSNTIVITLQYTYDLRDERDRDMFERELKRGNEFLEYQKRIMGNGRLLSVQNGNFIGQKPPYGYNKVVIKEGKRKCHTLEPDPERAPIVKMVFEMYAGGTSATQIAKTLRTMGVTTADGGKWVTSSVKQMLTNDHYIGMVHWNKRKTVKVVEDGEVVATRPRNSDFLVYPGKHQPIIEKELWDAVQAIKGNIPPIKNRAKYANPFAGLVVCQCGGKMVRQQYVRDGVERCAPRLVCPNQAECHTASCSLPEFTEAVIEALEKGIKNFELMMADAPEDDATQQERLIAQLEKRLAELDRLELAQWDKYTQEAMPKHVFDALNKKVVQEKEETLQALKTAMETVPIRVDYEKKRETFATAVKTLQDPNASVKEKNLLLKQCIERINYNRKPKESDNRRFGNPEPLELELQFKV

SEQ ID NO: 10667 - protein, 545 aa, synthetic construct
MSSVDKTAVIYARYSSHGQTEQSIEGQIAAAQKYAEGKGYTIIHIYADRAMTGRNDDREQFQKMLSDTATHQFGVILLWKIDRFGRNREEIAFNRYRCKKNGVRVERVAEDVPDGPEGVILDSVLEGMAEYYSLQLAQNVRRGQRESAKKSQTVGGCNIIGYKVNPDTKRYEVDPKTAPFVTEVFKRYANGETISEIVAWLNVQGVRATRGGEFTVNSLHRLLKNEKYTGVYIFHDIRNEGGMPALTDRATFDKVQEMLKVNRRAPARVWSKTEYLLTDKLFCGHCGAMMVGESGHGRNGTKHSYYTCWNRKKKKSCSKKPVRQDVIEPMVLRVISKMLSDEATLEYIADQVWAVYERSDTSGDTIKALDKQIADVDRALSNVMKAIEMGIINEMTKARMDELTDQKQALSVARAEAGLAGGFKLTRDMILFFLHDMAATNMTDRDCQKRLIKTFVNAIYLYDDHFDIAFNYTSNGKMVVKMQEINDTTSGEVFGRCAQSPAKVSRTSSGVRLFLLAVRRELQWRCKSIQFSRCFGGIYFSLQPT

SEQ ID NO: 10668 - protein, 522 aa, synthetic construct
MELLNVCIYLRKSRADREAEARGEGETLARHERILLDLAKARGYNVGAIYKEIVSGETISARPVMQQVLREVEAGMWDGVLVVEVERLARGDTIDQGVVARAFQYSSTLIITPLKTYDPNNEYDEEYFEFGLFMSRREYKTIRRRLTAGRESSAKEGKYCGSKPPYGYSRIKLIGEKGWTLQPVPDQAEIVKLIFNLYVHGVSGERIGMAKICRKLNDSGIKTMDGGLWTVPRVQAILRNPVYAGMIRWNSRKAVKHIQDGQITISRPFAQDHILAEGRHPAIVSKELFQQAQDIVNRNPARPLNSLHVLRNPLAGIVRCGKCGYVMTRKSPSDRQGALLRCPYSSCDNISSKLPLVEKALLDGLQELVDGYKLNSSFSDQEYSLSISEKEEMIRGKLKEIDILKKKKEKQYDLLEQGIYSTDEFLERSRATAAELSACDTVIYSLRQEIKHEQELQFQRSSFIPKCEDLLTHYWTWDTSTKNQFLRELIEKAVYTKSKRNTWKNGDDVSFTLDIYPKIQQK

SEQ ID NO: 10669 - protein, 524 aa, synthetic construct
MGKRVTTIPATLNLYDSVSLKNPQKRKVAGYARVSKDIEEQATSYAAQVDYYTAYIKKNPEWEFAGIYTDEGITATTTKKRNGFKQMIADALAGKIDLIITKSVSRFARNTVDSLTTVRELKENGIEIYFEKENIWTFDSKGELLITIMSSLAQEESRSISENVKWGKRRAFANGKGSLSFNTFLGYDRGPNGEFVINEEQAATVRYIYEKFLEGFSAYRIAKDLTEMGIKTPGGKEKWANSSVLKILKNEKYKGDLLFQKTYIKDFLSHKSVRNNGEIPQYYIEDHHEGIITAEQFDQVQLELYRRKKIKKYSGISIFSSILKCGNCGGWYGSKVWNSNTKYKKTIYQCNKKYKNRCKTPNLSEYEIKQLFVQVVNQLISEKEEIIKNTEEMKKTICDINSLTMELKDKTAEINTVVEQINNIVIQNSKVSLNQDEYNKEYFRLKRKYDTIASEIDRLSKQIKEKDLQGKLFDNFISTFKKQNETISEFDEFLWSGLVYEIVVYTKQDVRFFLKNGLEIDTGL

SEQ ID NO: 10670 - protein, 541 aa, synthetic construct
MALTYVVAYARFSSDNQREESIDAQLRAIRQYCQQHDYILLDTYVDEARSATTDDRPAFQQMIKDSASGDWSAVIVHKLDRFSRNRYDSAIYKKQLKDNGVHVESVLERLDDSPESVILESLLEGMSEYYSKNLAREVLKGKHETALQCKHNGGQPPYGLMVNKDGTYAINEYEAEAVRMIFRLTGEGYTMAEIKATLADRGFTTRSGRSFATTTINTMLHNEKYCGTYVYNRTKPQPKGGKRTNESRPDDEIIRIPHGIPAIIDNRTFEEVQVILKRRSNMGAKRARAAKEVYLLQGLIKCGNCGAAMVGSRRKDGRNKTLRITYECNGRKRKATNCKMRGINRDFVENIVINYIEQHILSDEAMERVKEKIVIELNRMAADSPSSLPSLNKELRDTEQKLDKLIEAITAGINALVIKDQIEALDKKKQQLEAQIEQLKARQQMTASFDDVALDDYIKQYRDIRSKTRPHQKEIINKFVDEVLVYDNDQDGDKIVIKTKIPESYVTIFSGDSICSLSAPLNGHYTNTYYFKGGFAVLVWL

SEQ ID NO: 10671 - protein, 527 aa, synthetic construct
MNIVIYARYSSHSQTEQSIEGQLQTCYEFAKNNGHIVIGEYIDRAQSGTTDSRAEFQRMIADSDRHTFEAVLVYQLDRFARNRYDSAINKAKLKKNGVRVISARENISDDASGILVEGVLESMAEYYSAELSQKIRRGMDINAEKCLSNGSNPGLGYYVDEERRFYVDPEGAAVVREIFEMYASGKTVADITKYLNAKQVKTSLGKEFNKNSLHRLLRNKRYIGYYIYKDTETPDGMPRIIEDELFERVQHILDRNKKAPARSRGKEEYLLTTKLFCGYCREMMTGYGGTGKSGKTYHYYACNNFKRRKCKKKVVNKQRIEDRVVLECRKLLTESNIEKIAISVSAACEADYDSSAIKRIKAAIQEADTAIENLWKALERGQSVDMITERIEKRKREKDELQGQLAIEMGKQITFTAPQIKAFLYSLKRGNINDEHNRRGIINIFLRAIYLFDDRFTLILNGGDRQITIDNILIDEIEEHFEDAVSSHAECSPLVADAPLHDVNPNLFVLTKNASHYGFGVLFGKEV

SEQ ID NO: 10672 - protein, 528 aa, synthetic construct
MPKAIKVIPATKDRFTALPTVSIAKRRVAAYARVSTDSDEQFTSYEAQIDYYTQYIKKREDWEFVKVYTDEGISGTNTKRREGFNDMVADALAGKIDLIVTKSVSRFARNTVDSLVTVRKLKEHHVEVFFEKENIYTFDSKGELLITIMSSLAQEESRSISENVTWGQRKRFADGKVSMPYKQFLGYDRGEGGVPVINEKEAEIVRMIYRLFLEGKTASGICKHLMSLGIPTPGGKTKWGQGTVMSILQNEKYKGDALLQKKFTVDFLTKKQKVNEGEVPQYYVEGSHPAIISALDFDRVQAEIARRQSLGRSYSGSSLFASKLICGDCGGFYGKKVWHSTDAYRREVWRCNSKFNGKAKCETPTLSTESIQQMFLQAYNQLMGNREQVIQACEVMREVVADCSKLDSEIATMNEEIQVIAGLVSQCIKENTTTQQPQEEYTEKYNRLVKTYEKAVSQLNKATADRESRMQRDRELRIFIGSIKEKPLVLEIWDEGLWITLLETATVHADNRITFRFKDGTDIEVGAE

SEQ ID NO: 10673 - protein, 428 aa, synthetic construct
MPKKVAKVAQIPKLQRKKQVAAYARVSSGKDAMLHSLSAQVSYYNDLIQKEDGWEFVGVYADEAITGTKEGRTDFQRMLTDCRNGKIDMIITKSISRFARNTVTLLETVRMLKALEVDVFFEEQNIHTMSADGELMLTILASYAQEESRSASENQKWRIKKNFEEGMPWCGRMLGYRIRAGQYYIIPDEAEIVRRIYREYLDGAGPNGIANRLTEDGVPTRNGGIWQPQTIAKILRNYTYTGNLLLQKTFRENHITKKTIRNTGQKTQYLLENAHEAIIPLKTFNAVQTEIERRSESRKSSPPAKPNFTYTGLIQCAKCGKNYRRKTTATRIVWICATFNTRGKKHCASKQIPEELLDALVAEVFDTPANIQKIIADDGNTLHFHLVDGSVVTRIWSDRSRAESWTPEKRESARKRAKERSQTQCQKQ

SEQ ID NO: 10674 - protein, 481 aa, synthetic construct
MRGVIYARYSPGPHQTEQSIEGQVADCQQYAEEHGIDIIEIYADRHVSGKSVVGRDEFQRMLRDAEKGRFDCVLVWKIDRFGRDRQDIAMGKMALKRAGVKLMYARESVPEGPEGIILESVLEGLAEYYSADLRQKVIRGMKETAKKGQYCGQSLPIGYKVDAERHIVVDEREAAVVREAFKLHIAGGQIRDIVQLFADRGIMGRRGKPVSNAVVYRMLRNEKYLGEFYIQDVKLNVEPIIDQATFLEAARHFKTSRNNAAGRAKVNYLLSCKMFCGYCGSMISAEAGTGKLGKVYRYYKCGDKKRGKKCELKPFPKDHLEDAIILATVNDMLTDEMIEKLTVRILEVQEQENADDPVVGLRRRLDSNKKRQRNLLDAIEEGGARGLVSRLAALEEEEEQLVLEIQRAEIKRPRLTHEVVEAWLRSFRVGDVTDDDFRARLVDTFIARVELRNDEALIFYNIREKGPHSRVRVRPEWWRWR

SEQ ID NO: 10675 - protein, 560 aa, synthetic construct
MKKKQPNTRHGRAAIYARYSSHNQREASIEQQVKACRELAVRLGLDVVETYEDKAISGKSDRRPSFQRLLRDAEKGYFDCVLAWKSNRMGRNMLQAMTNEARLKDWGVRTFYAEEDFDDTAAGRFALRNMMNVNQFYSENMAEDITRGMMDNASKCLSNGALPLGYKAGENGRIVLDKAQAAVVQEIYTRVACREPFVDIAADLNRRGIKTKRGGPWTKSSFYTICRNERYRGIYIYDDVRVEGGVPRIVSDGLFYRVQEVLKVKKTPQSARHHTGAEDYLLTGKLFCGKCGRPMTGVSGTSRSGEMHYYYTCQKRRREHACDKKNVIREQIEKSVAQAIKQYMLTDEMIQHMADATMAYNARQEKDLHLQDLQGQLAAVKTSAANLLKAIEMGVITETTKARMVELEQEQGRLNAQIENARAELVPITRDNFVSLLHIYRDGDINDSKYLASLFETFLVRVDLYDDHFLIWFNPLGQKTPADIPITSIENGDVDEFFDECRSKNVFDWGGKWSTKIKAPAVPRRVLFVLLLRELLRSRTGRQYRSTAANSPVDCLPARG

SEQ ID NO: 10676 - protein, 485 aa, synthetic construct
MPTSDLKIAAAYIRVSTDDQEEYSPDSQVRLIREYARKNGYLLPEEYVFQDDGISAATARKRPAFNRMIALAKEKERSFDAILVLMFSRFARNREESVLYKGLLRKQGISVISVKEPAMDGPFGTLIESIIEWFDEYYLINLSAEVKRGMSEKFLRGEAMGTAPFGYRIDSANKTFTVDPERAEIVCDVFRSYADGAGLRDIAVQLGDAGITTRRGNRPDNRFVEYMLRNPVYIGKIRWTPGHKTRYSRVHIADGVEVVDGKHPPIVSMDLWEAVQRRMDQRKAAYGRYQRQAPAAWMMRGLVRCSACGATLIMAGRSSSCPFLQCHSYAKGACHTSHSLSLRRANAAVLTGLRRSVGTLTFHMVPHLTSAPSRAADYGRLLEQERRRLARCKDAYQAGVDTLEEYRDNKARLEERIRRIEEQAASAAAAPESFDKAAYGKKAADILRFLETSADEGAKNEVLRSVVDHITYEKASRHLAIYFYT

SEQ ID NO: 10677 - protein, 536 aa, synthetic construct
MPRKKKLQEVGGLRLVAYYRYSNGGQQTEQSIEGQRRDCEAYAKAHGYKIVHEYIDRHISGKSDSRPAFQQMISDSDSHLFDAVICWKTDRLARSRYDSIIYKTRLRRNGVKILYAAETVVDGPEGIIIEGLMESLAEYYSAELAQKLRRGQRESALKCIALGGNRSFGYDIGPDKHYCINEKQAPAVRYIFEQYAAGATAADIVRELTARGYRTSRGNPFNKNSICRIITNEMYLGVYKYADIRIEGGVPAMIDRELFNRCQTQLAFNRAHGGGKGAPRADYVLVGKLDCGLCGHAMKGASATGHTGSKHYYYTCTQHVEKKCPKTSIEKNYLEQVIVDGVAKYVLTPEKISQIVDCMMELQTKEQEPKGNPEKDALEAELAECRRKQNNILEAIEEGGSARLAARLRTLEEQEAQLTFALGEINNAPTPPQFSREALTFMFEQFRREEDEVDEEYRRRILDTFVSSILLYEDRAEVKFNITDQKTGDFERVILPISANKKPPEDDDITSNSEGSTALRLVEAMGVEPMSEKSSV

SEQ ID NO: 10678 - protein, 525 aa, synthetic construct
MQQALNAVIYARYSSHSQQEQSIEGQLRDCYAYAQREGLHVVGEYIDRAISGKTDERPDFQRMIVDASKKQFQRVIVWKLDRFARNRYDSAHYKAKLKKYGVKVVSATENISDEPEGIILEGLLESMAEYYSANLSKHVRRGQRESIINGTYLGGVPPIGYKVENKRLVIDERTAPTIRYMFEQYAKGVPKREIIAELNARGIRNKKGKPLTLSSMQAALRNEKYIGIYRYSGQEVTGGCEALIDEATFRKVQERLDKVKHAPAAAKAKIDYLLQGKAFCGYCGSRMVGESGRGKMGNTYHYYACGKRKKEHTCAKKNEKKDFIEWYVVEQTVEYVLTPDRMDYIAAALVAQYEKDFGDNRIKDYEKQLERINGEIRSLVDTLAVCPPSARQPIFDKMELLDVQKTDLEIDIAKLRVAARVQLTEEQIKVWLKQFCKGDLDDMEFRERIIDVFINSVYLYDDKTVIYYNIEGGKQVSYMEMLDSTEEPPFADDPQGSSGVRISNDTPRHKKPVNKPVYRLFNFCL

SEQ ID NO: 10679 - protein, 453 aa, synthetic construct
MKTATKVKKLRVAAYCRVSTDADEQLNSFENQVSYYTEYINSKEEYEMAGIYADEGISGTSTRRRNEFNRMIEDCEDGKIDLVITKSISRFARNTQDCLSYARKLKNMGIGVFFEKEGINSLDGTGELLFTILSSLAQEESRSISENCKWGIRKGFSDGKLHLNTNRFLGYDKDTNGELVINKDQAATVRRIYEEFMNGINPDIISMRLNEEQIPGVTGEAKWTCGTIWGILKNEKYMGDACLQKTYTEDFLTKKTTKNNGQITQYYIENDHDAIIDKKFWNAVQLEIARRRAFMEKYNLRTLGRYTDEQPFSNRVICGTCGHVSWRRTLTRSNGKFKVWMCGQRYRQKGVLGCKSKSVYEKSIHEAFVKAWNQIVENRDEYIQEWKENMKGENALLAFRSKQMMELTNSKPMKRISLSLVGKVLDHCILYDDRICFILLDGTEITVEIKNKR

SEQ ID NO: 10680 - protein, 505 aa, synthetic construct
MKITAIAPKDNSRKKLKVAAYCRVSTEADEQENSLNNQKDFYEKHIRSNKSYEFAGIYYDLGISGFKEKRPGFQQMIADAMNGKIDLILTKSISRFARNTVTTLKVVRKLKSAGVGIFFELQNLHTLSNEGELMLSIYAAFAQAESEDSSMNMYMAHQRRFKKGIPAIRVYECYGYRLNSDGEIVLDEIQSQVVKTMFDLALQGIWVSKIRAYLDKNGIPSPQEKRWNDTAVNRILRNEIYKGDVMMQKTYIDADRVRHRNTGQKDRFYIEDHHPAIVDRFVWNEVQEVLDIRSMQLKQKLPKRSMGGNSHNKYSLTRMLYCPHCGSPLHHRVNSGGKYTYWCCGKKIKKGKDACIGITVPEDLTREWKITEEVTVFEEKDEFGRQHFSFMPKKEYEKSRKCPYEPTEKKGRDSHSIYPLSGKMYCGLCGSLMHHQIAWNGKEFWWCSKRIKKNACEGIKVPAEIADSWEFEGTITVMEGVDENGEKSYSYQSRAQTHHENGNKG

SEQ ID NO: 10681 - protein, 526 aa, synthetic construct
MQYCLYLRKSRADSEAEARGEGETLARHEKALLDLAKKLNLNITAIYREIVSGETIAARPVMQQLLQEVEQGIWDGVLVMEVERLARGDTIDQGIVAQTFKFSDTKIITPIKTYNPNNEFDEEYFEFGLFMSRREYKTINRRLQRGRMASVKDGKYVANKAPYGYNRIRIENDKGWTLEINKEEADVVRLIFELYTVGEKQSDNTFNRLGTGFIAKRLNAMKVPPKRGKVWVVASIRDILINPVYIGMIRWNWRPQQKKMIDGQLHISRPRATDYLLCKGLHPPIISKETFNIAQDLMRHNPARPIGEKNTVKNSLSGIVVCGNCGRHMVRRPHTKYPDMLICSEPTCNNVGSQLRVVEERILQSLKEWLGEYKISWDITSPPVERISQVSIKKKALQKEQHELDTLNKQISKTHDLLEQGIYTTDVFLERSRALSLRMDEVKEHIAILDKELKTEITREDSAVNIIPKVEKLLEVYHDLPSPKAKNDMLKDVLEKVVYTKKERSKKGNLDNFNIAIYPKIPKYIT

SEQ ID NO: 10682 - protein, 700 aa, synthetic construct
MDSNAFLNDLMSKMKLPEAKGKKKAEQSESVAQILAAMQKVRAEKKKPPVTSYAPVKEMPVNEPESMEDFSQLASDVMQECRPAMPTVPAASQEKDVRVAAYIRVSSTNPAQEDSYEMQERYFMSLLAGNAGWTSAGIYSDHGISATSREGRTGFNRLLRHCKQGKIDRVICKSISRFARNTQDFLVALRTLKENNVTILFEREAMDTADAYSEFILTTLAAIAQEESRSISANIAWSNQKRFPAGNVCNKDIYGYEFRKGEYTVNENGYRYRAVFIISEEAEIVRMVFRLFTKEELGFTQIAQKLDAMHIQPPNSGCRQRQKRKPTVLPAGTLKEEDKRGWTATDVRYMIANVRYCGSVLCQKTYTDHRNGRKQKVNKGEKPKYLIRNHHPAIISEELWQEAQEVWKVYTAKYRGIEKGRNERNYSKLLLCGECGRYFQGHSTTRTTIWRCATKLAQQGQKRCRMEPVYEEQIQALLRKAFAEKFKLGEKMDAEVHEVMQMISKAPIDNVRNQALRNLSEKLREIHDFDQMEQEGDFLKRQLSAVNYSIRDAHQHIRDIQAEKEALKVRSEVLGEPIEKEAVTELEDRLLNEEEQLEKLEHEAQQQAEQVRYMEDYWKKLEQTYEIREKTLQWLDSLAGGTQMFLDEAVGTYVKAFVLSVTIFSPKHFRIHWFDDTCTEVECDSVFEGYQQPGMIRRKY

SEQ ID NO: 10683 - protein, 492 aa, synthetic construct
MNVAMYLRKSRADENNPLETLERHKEILLSYAKDNNLTVIDIFEEVISGGMLYNRTEMLKLLDAIPSHIYDAVLCIDLDRLGRGSAADSEKIFDVLKENDVKIITLKKIYDLNNEYDEDYSEFEMFMARKELKFITRRMNRGRIKSINDGCFVSGAPFGYRNAVINKKHTLEVYEPEAKYVRMIFDMYVNQSMGITSISRQLANLGVLSKKNTPLHPTTIARMLRNHTYIGKIVWNKSKSVKGKNTQEKTSKDDWLYVPGLHEPIIDEDTFNKAQDIINLKYKPPMRTGTLQNPFAGLLKCANCGRAIVINTSNETVEKYRLCCRTLGCNKASALSIVEDKVFEVLTKEFKDIELSLKNIRQSHNKDKLSCLDTIATLETELKKLDKQQLRLYDLLEQEVYTKELFIERNNAISDRRKKINATIAQEREKFKLVDTSSIEERLPLLRELLTNYHSLSAAEKNSILKNFVKKIEYKREKSAPEGDIFLKIYYK

SEQ ID NO: 10684 - protein, 501 aa, synthetic construct
MEIQIREGSREQKRKLKVCAYCRVSTDADEQENSLENQVRHYEMVIKANPDYEYAGVYSDFAISGFKEKRPGLQKMLADAEKGKIDLILTKSVSRFARNTSIVLEATRKLKELNVGVFFELQNINTLSGEGELMLTILAAFAQAESESGSAGAKMVYQRKYEAGIPVQYLERSFGYTKDERGVFVADEAESVWVRKIYEMAADGYTPASIKRYLNENGVKTVGGVQWVDSTVFRLLENEIYKGDYIMHKHFVNEERKLVRNRGEVDAWYIEDDHEAIVSPELWQKAQDALAVKRDYLAEGSVIKEFTEENYPYMNKIYCAKCGYPLYKRIYSKGNRLNWGCSGTKRYGKSFCDGINIPDGVLRSAWHFEENTYIDEKASDKGVKEFIYLKERSWKRRHKKKQPSAIPENTETEYPYREKIFCALCGSRLVRYVNPQNHKVTWVCNRRKRKGKEACDGTRVPDTVIKGWGEIKNDIYIQRKDDKNGKKRYSYTSKKPSGIRV

SEQ ID NO: 10685 - protein, 463 aa, synthetic construct
MPSKIERCAIYIRVSTAEQMMHGKSLEAQKQYLTNYAKEHNMTIVGVYADEGKTARKELKKRKAIHSLLEDVKAGKIDVIIFWRIDRWFRNLSDFYKVQEVLDNNNVRWISTSEPGINMETRDGRLQLNVVLSIGQNEVDTTSERIKFVNEASIRQGKLIFGDVNMGYGYKSGIIDGVKRMVKDPDREDTVNAFYRFFFKHHAKGLSMRYIQENYDPDFTWANMRTLLSSEFYKGTYRGIPYCPAYLTESEWNNLQEIQNANVKRAPSGRIYLFSGMINCPICGRRLSARGGSSIINRKTGAKKVYCYYRCNKAFIDHKCTYKHMVSQNLIEQYLIDHLEYEYNKFKIKCEKIEKEQEKKKKIQTPEKLQKELERLNLLFQKGRIEWDYYSKEYDRIENELNELLNTAPELEPDYAYLEELLNTDFRTMYYNLTQENRRAFWHSIIREIHLNTDHTVDSVDFL

SEQ ID NO: 10686 - protein, 502 aa, synthetic construct
MEIQIREGNSRQKRKLKVCAYCRVSTDADEQENSLENQIRHYKEVITSNPDYEYAGVYSDFAISGFKEKRPGLQKMLADARKGKIDLILTKSVSRFARNTSIVLEATRKLKELNVGVFFELQNINTLSGEGELMLTILAAFAQAESESGSVGAKMVYQRKYEAGIPVQYLERSFGFKKDERGVYIADEEEAAWVRKIYEMAADGYTPAAIKRYLNENGVKTVGGAEWIDSTVFRLIENEIYKGDYIMHKHFVNEERKLVRNRGEVDAWYIEDDHEAIVSPELWQKAQDALEAKRDYLAEGSVIEEFTEENYPYMNKIFCARCGHPLYKRIYSNGNRLNWGCSGTKRYGKSFCEGINIPDGVLRGAWHFDENMYIWEKQTDKGKKEFTYLKEASWKRRHKKKEPEPIPENTETEYPYREKIFCGLCGSRLVRHVNTKNHKVIWVCNGRKRKGKDFCDGTRVPDTIIKGWGEIKKDIYIQRKDDKNGKKRYSYTSKKPKGADRA

SEQ ID NO: 10687 - protein, 523 aa, synthetic construct
MAKVTTIPATISRFTATPINEKKKRRTAAYARVSTDSAEQLTSYEAQVDYYTNYIKGRDDWEFVTVYTDEGITGTNTKHRDGFNRMVQDALDGKIDLIVTKSVSRFARNTVDSLTTVRKLKEKGVEIYFEKENIWTLDSKGELLITIMSSLAQEESRSISENCTWGQRKRFADGKVTVPFKRFLGYDRGPDGNLVLNPKEAVIIRRIYSMFLRGMTPYGIATQLTADGIKSPGGKDKWNAGAVRSILTNEKYKGDALLQKSYTVDFLTKKKKANKGEIPQYYVEGNHEAIISPDVFEQVQWELERRKQGKGRHSGVHLFSGKIKCGQCGEWYGSKVWNSNSKYRRVIWQCNHKFDGDEKCTTPHLTEENIKMMFVSAVNQLISKKDAIITVLMASLDTAFDLTTLKAEQAELESEMTVLSDLIQKCIYENAHVALDQAEYQKRYDGLTARFDAAKARYESLDETIRSKQSRRTTIETFLETLAKADLVDKFDTALWCGLVDFVTVHSKDDVRFTFKNGQEINV

SEQ ID NO: 10688 - protein, 587 aa, synthetic construct
MRVINKIEPKVPQMPTRKKVAAYARVSMESERLQHSLSAQISYYSELIQKNPAWEYVGVYADDGVTGTKAEAREEFNRMLADCKAGKINIILTKSISRFARNTVDLLSTVRNLKELGISVQFEKERIDSLSEDGELMLTLLASFAQEEVRSLSDNVKWGTRKRFENGIPNGKFQIYGYRWDGDHLVIEPEEAKIVKLIYDNFLNGLSAETTEKQLAEMGVKSYKGQHFGNTSIRQILGNITYTGNLLFQKEYVVDPVSKKRKINRGELPQYWVENTHEAIIPMEVYQAVQTEKARRRELGALANWSINTSCLTSKIKCGCCGKSYQRSTRKGRKDPNANYTIWVCGTRKKSGNVLCRNKDIPETMLKQACTTVLGLDEFDESVFSEQIEYIEVPAPNEMLFYFKDGHTIPHHWESTLRKDCWTDERRAAKGRYVQAHQLSPNSSCFTSRIRCDCCGENYRRRRSKHKDGSSDAVWRCASSGKCDNPSIKEETLTELCAKAMGMTAFDETAFREQIDCIHITAPFRLSVHFFDGYTFDAQWENKRKMPRHSEERKQHMREVMIEKWRERHGKSNNHSGNNQPVHGHTN

SEQ ID NO: 10689 - protein, 503 aa, synthetic construct
MEITVEKVDTGVQKLGFQALSTLKTVRVAVYARVSTDQEIQLHSLEEQMKAFRAKIAQHPGWMLVDVYADEGISGTSVKKRKEFLRMMEECEAGKVDYIMAKSISRFARNTVECLSYVRHLQSIGVQLYFEKEGLDTATSVSELILTVMAAFAQEESRSISENLKWGIRKRFESGESRWTKTYGYRKTKDGEIVIEPDEAAIVRMIFKMYQYGIPMTDILDELTFIQAPSARGKQTWNKTALKYLLENEKYIGDMRLQKWVSVDHISHRSVRNDSTVIPVYNVRNHHVPIIDRHTYQQVQRIMELKSPHGEYSRYPYFDTNIVCPLCGKKMIPRVMKVNSHKRILGCFDVDGCRGYAVKGYLVDAALLEAYNTLEIKEKKRTVAMQRMLEIKAESPKLDTVQYYWLDDLVGHIEFKQDTMRVFWKCGLESEVALNASKVEEPTHVAELYRNSLDRAQRSENKPVSVVRADKKSVNTREAQRNAAMQTAKNLRAKENGVAANDY

SEQ ID NO: 10690 - protein, 404 aa, synthetic construct
MIIKKVMPKIPVAKKRVAAYCRVSTFRNEQDESFETQQKYYEELIQSHPDWELVKVYADRHSATRVKNRPGFQEMAAAAEAKKLDIIICKSISRFSRNMVDCQQYAKWFRTLGVTIIFEEQNIRTDDPTCDFVLSILAAVAQDESHSISENEKAAYASRFARGEYNLGNNRILGYDCVDGELVPNKDAWIVKEVFRRFIEGESYRQIAKGLEELGAQSLHSKKGFGVETLRYMVSNETYVGDKRLQKKAPLDYLTKKPNPNQKVESNYLWDDHEAIIDRETWDKAQEILEKRKELAKVGIHKTNREHHFLYGKVFCGECGAPFLRRTLKAAGGFKTQSTYKAWNCRNRQKGKGNERCGNRFIKEEKLIDAILRELEWLNMDQERFAKEVSKVLVYPDHIEVEKN

SEQ ID NO: 10691 - protein, 539 aa, synthetic construct
MPRKPAKHPAKPKRGKKLEIEEPGVLYGRYSSHNQKDISVEQQFEKGYELAAEYGIRIIDTYADRAVSGRTDKRRDFQRMMTDAAKGKFRYVIAWKSNRMGRNMLEALINEARLQDLGVRVLYVEEDFDDTAAGRFAARSMMNVNQFYSENMAEDIKRGLYDNAANCMVANGHLPYGYKADETLHYAIDEPKAAVIREIFTRVSCGEAFVDIMASLNVRGIKTSYGRPWGRSSFQKILSNERYRGIYIYGDVRKEGGIPRIISDELYFKVQEVITTKKNPQGRHRVNGDYLLTGKLFCGHCKSPMTGVSGTGRSGNLHYYYVCQKRRTEKTCDKKNVRRDEIELQVAQAIKDYALKDDVIEWIADSTVAYNERKEAESKVGILEDQLAGTEHGIKNIMSAIEQGIITETTKSRLVELESERATIKANIAAARADIVTVSRDDIISGLEMFRDGDVHDKKYQARLFDTFLVAVYAYDDDLRLVFSFSGNKNTIQIPIESAVNAVENNEAECSFKLCSAPPKPRLRSRLRTEFCSILSAIQ

SEQ ID NO: 10692 - protein, 519 aa, synthetic construct
MKKVTKIDKVQNVTSKKQKLRVAAYCRVSTSNDAQLESLETQKAHYENYITSRDDWQFAGLYFDEGITGTKKDRRPELMRLMQDCAAKKIDFIITKSISRFSRNTTDCLELVRKLQELDVPIYFDKENINTGSMESELFLTILSSMAEGESTSISENSKWSIKKRFQNGTFKLSYAPYGYRWDGRTLRIIPEQAEVVKRIFADVLSGKGTDAIAKALDDEGVPTKRGGKWTSTSVRGILSNEKYTGDVIFQKTYTDDSFNRHTNKGELDMYYVADHHEAIISKEDFEAAGLLITQRAAEKGIKRESQKYQQRYAFSGKIICNECGDTFRRRMHSSTYGKYVAWCCNTHLADKDKCSMMFLRDDDLKVAFVTVLNKLIYSHKLVLKPYAAALQNNSGDESLIRIQHLERLLEQNTEQRETLTRLMAQGYIDQVLYNSETNALLTQANTYREDIEVINATMSGDSSRFFEAERLLHFAERGSMLEEYSEDLFERFVDHIQVYSRHEVGFVMKCGLTFKEMI

SEQ ID NO: 10693 - protein, 591 aa, synthetic construct
MKEVEVIKARNDLQTRTRGKTIELMRVGAYCRVSTDSADQLNSYKSQVAYYTDMIKKNKEWVLADIYADEAITGTQVAKREDFQRMINDCMNGEIDMVITKSISRFARNTLDTLKYVRMLKERNIAVYFEDEKINTLTMDGELLLVVLSSVAQQEVENISANVKKGLKMKMKRGELVGFQGCLGYDYHKDTKTITVNEEEAEIVRYIFNRYIEGAGGSVIAHELENLGYKTKYGSSTWVQSTVIGIIKNEKYKGDLLLGKTFTVDPISKRRLENFGEEDKFYIRNHHEPIISEEVFEKAQEILARRNVNRGKIGEGSTKREKYSRKYAFSCMLECGFCGGTLTRRNWHSSSQYSKVIWQCVTATKKGKKFCKHSKGIPETAIEEAFVESYRLLCDDNKDVLEEFLQRMDDTLSSSVVSKQLAKAEKEIGALEKKKSKLVDMRLEEIIDKETYESKYADLVSKQEQLVEERKKLQETSDNEKDIKKRLKEFKKTLEQNEVLDKFDRYVFESIVEKVIVGGLDENGNVDPAQLTFVYKTGLKNNVDGAKFKPQRKNARGRHRTEELCSHDSNEVDKMCSDSSNDTCRDGLLDV

SEQ ID NO: 10694 - protein, 521 aa, synthetic construct
MGNVMVIPAKRQIGNTGRKQDAKPKLRVAAYCRVSTDSDEQATSYEAQVEHYTEYIKKNPEWEFAGIYADDGISGTNTKNREEFNRMIEDCEAGTIDMIITKSISRFARNTLDCLKYIRQLKEKNIPVFFEKEAINTMDAKGEVLLTIMASLAQQESQSLSQNVKLGLQFRYQNGQVQVNHNRFLGYTKDEDGNLVIDPEQAEVVKRIYREYLEGYSMDKIAAGLEADGILTGAGKPRWHTSTINKILRNEKYIGDALLQKTYTTDFLNKTRVKNTGIVPQYYVEGNHEAIIPREIYMRVQEELVRRRVVKTSANGKKRSYSCNHCFSQIIICGDCGEMFRRIHWNNRGCKSIVWRCISKLEPTGLECHARTINELDLQEIVLTALNELLGDKSKYQKQLQQNIASVIRASAAITTDGIDEKLMELQQELVKKANNKEAYDEIADQIFALREKRQQASMDTVQRDEQLQRITELQDFIKDQHSDLTVFDEALVKRWLKQITIWDDHCTVELKSGLKVDVER

SEQ ID NO: 10695 - protein, 498 aa, synthetic construct
MQIEVRKADMGKEKKRLKVCAYARVSTEASEQENSLENQVSHYTEMIQSNPAYEFAGVYADFGISGFKESRPQFQKMMQDAKNGKIDLIITKSVSRFARNTAIVLKASRELKERNVGIFFELQNINTLTEAGELLLTILAAFAQAESESASESSKMAYLHRIENGEVVAYLERSYGYEKDENGEYRAKEPEASVIREIYDLVIQGVNCTNIARVLNARNIQTVQGAEWTASTVFRIVENEIYKGDVLMQKTFIDEKRHQVQNRGEKAMYYAKDNHPPIVSEKTWEKAQRKLEDMRAERAEHSVIQEFTEENYPYMNHIFCAKCGWPLKPRVYSHGHRLSWDCSGQKRGTKKFCTGIHVLDNDLRKMKIEGNRYFSETVDKYGEVHLKHVGERTWKNKHKKKKFNHKDLYPELNEENYPYYRRLHCARCGSRLGRYISHGTVRWICSSYKRKGQAKCPGVRIPDEIIKGWNLPDGKIYIMGKEDKNGEKHYSYTSESAL

SEQ ID NO: 10696 - protein, 520 aa, synthetic construct
MQYEEYLIYLRKSRSDASLEAMGVDVLERHEQILLDLAKRMNLSIGGIYREVVSGESISARPEMQKLLSEVESGRWEGVLVMEVERLARGDTVDQGIVQRAFQYSGTKIITPTKTYNPNNEFDEEYFEFGLFMSRREYKTIRRRMRAGVTAAVKEGKWPFNQAPYGWQRVKLEHGRGWVLAPDPDEAPVVKLIFRLYTGPDRIGITHICRYLDNRGIKPRNGDTWLECSVMGILRNIVNDQRVGIGRRKVVKQVQNGSVSKVRPHSDYDFTAPGLQPRLIDHDVFLEAQEYLARNSHKLPESYGIKNPLAGILVCSCCGKKMQRRPASRDGSSGRCPYDVLMCNTRGCPTIGSTLELVERELIQALSDWVAGYQLDPTLEVENKVPEKEQLLSSAVSNHDLLLKQNGNLYDLLEQGVYTTEIFLERSHELQKRIKESEEHIEILKKDLEYEKEKIANIENFIPSCKELLSCYWDLSVQDRNKALKMLLESVEYTKTKRNRKGDKDNPTFTLNLKPRIPRI

SEQ ID NO: 10697 - protein, 443 aa, synthetic construct
MSHTKGVNYMERVVKRVGTLIPAQPKALLVCAYARVSTGKDAMLHSLSAQVSYYSKMIQDHCGWVYCGVYTDEAVTGTKEERAGFQRMIQECRQGHIDLVITKSISRFARNTVMLLETVRELKSLGVDVFFEEQNIHTMSADGELMLTILASYAQEESLSASENQKWRIRKAFENGELANLRFLFGYNITADGVQVNEKDAAIVREIFARFNEGESMRSIGRDLDARGYRGVLGGTWCAERMRNTLSNEKYLGNALLQKQYRNNHIEKKLLPNRGELPMYYAEGTHEPIIDQATFDKAQKRLKMLAQQTANRKKPTHSAFTGLIHCGLCGNTYKRVTYRKKHYWNCTTFQTKGKSECAAKRIPEETLDALTCEVLRVAHLDPDTVRSKITAIRAENNNVVVFCMDDGSEIVERWADRSRAESWTPEMKEQARQRALQARRSKK

SEQ ID NO: 10698 - protein, 528 aa, synthetic construct
MSRTAARSVTVIPPTINPLTHLSGVAKQKRRVAGYARVSTDSDEQFTSYEAQVDYYTQYIQRNPEWEFIKVYTDEGISGTNTKHRVGFNEMIEDALAGKIDLIVTKSVSRFARNTVDSLVTIRKLKEKGVEVYFEKENIYTFDGKGELLLTIMSSLAQEESRSISENVTWGQRKRFADGKVNLPYKQFLGYRKGADGFPEVVPEEAVIVRRIYTRFMEGLTPGAIAKELTADTIPTPSGKQRWQTSTVESILQNEKYKGAALLQKCFTVDFLTKKKKANEGEVPQYYVEHSHEPIITPDEFNKVQVEFERRKRISRQYSGKSIFASRIICGDCGSFFGSKVWNSTSKYRRVIWQCNNKFKGEHKCETPHLDEKTIKARFVAAFNAILDSKDNILEDCRLMQATLTDCTGIDEEIQTLLEEIEVVTELTKRCIAENSQTAQNQEEYAARYNGFVERYEKTKAQLEQLRTTKAAREAQAEAIGAFMFEVQELDALTEFDEKLWLTIIDTATVHADGRMTFKFQGGTEIDV

SEQ ID NO: 10699 - protein, 485 aa, synthetic construct
MPTSDLKIAAAYIRVSTDDQEEYSPDSQVRLIREYARKNGYLLPEEYVFQDDGISAATARKRPAFNRMIALAKEKERPFDAILVLMFSRFARNREESVLYKGLLRKQGISVISVKEPAVDGPFGTLIESIIEWFDEYYLINLSAEVKRGMSEKFLRGEAMGTAPFGYRIDSANKTFTVDPERAEIVCDVFRSYADGAGLRDIAVQLGDAGITTRRGNRPDSRFVEYMLRNPVYIGKIRWTPGHKTRYSRVHIADGVEVVDGKHPPIVSMDLWEAVQRRMDQRKAAYGRYQRQAPAAWMMRGLVRCSACGATLIMAGRSSSCPFLQCHSYAKGSCHTSHSLSLRRANAAVLAGLQRSVGTLTFHMVPHLTSAPSRTADYGRLLEQERRRLARCKDAYQAGVDTLEEYRDNKARLEERIRRIEEQAASAAAAPESLDKAAYGKKAADILRFLETSADEGAKNEVLRSVVDHITYEKASRHLAIYFYT

SEQ ID NO: 10700 - protein, 556 aa, synthetic construct
MKKFPIDLSCLTEEEISQFQEDPYTLYNGDQNVAIYLRYSSTGQSDQSIEGQLRDCRTFCKANHYRIVAIYVDRATTARKDVEKRVHLMEMISDSAKQNWEYVIVWKLDRFARNRNDSAIMKMRLRKNGVKVLSATEHLTDSPESIILESVLEGMAEFFSAELSQKVTRGMRESALKCHSVGGHIPLGYKVENHKLVVDPDTAHIVQEAFSLYANGESVADICRKFNSAGYKTAKNTEFNRSSFKAMFRNTRYIGTYTYKDIVIENGIPAIIDKELFETVQRRLSKTATAPARGKAKVDYLLSGKLFCGHCGASMNGESGAGRHGKVYHYYSCYTKKRKLGCDKRPLKKDYIEGIVARDALNLLTDHLIDEIADMAIRQSEQDLINDTHIPQLTAQLSEVEKSITNITAAIEKGIASETLMNRLVQLEHEKKTLNKEIKAEEKFVYRIDRDQIVFWLSQFKYGNIEDEDFRRRLIDLLVNSVTVWDEPDGYKITTAYNLTSCKTKTFRVEKNPAAEEATGFDFGESECTLAAAGCKAGFPPLPAAISLPWCSMWLW

SEQ ID NO: 10701 - protein, 558 aa, synthetic construct
MTNAVIYARYSPGPNQTDQSIEGQIHECTRFCEDNNLRIVGTYIDRKQTGRNDNRADFQKMLRDSSRHGFSTVVVWKIDRFGRNREEIAKNKAVLRMNGVRVLSAKEHIPDGPEGIILESVLEGLAEYYSANLSQNIKRGMRESALKCQFNGSGLSTGYTVDADHKYRIDPDGAAVVRTIFEMYDSGKKIAYIQRYLQQSNIKTMRGKEYTHYGISRILRNRVYIGEYHWHDIVVPGGVPQIIDNDLFDRVQKRLEANKHAPAARRGDVDFLLTSKLICGNCKSTMIGDCGTGKNGARWYYYTCRAKKTKSSKCRKKSVPKEALEREVTALTAAYVLRDDVIDYIADKVVEIQKSEHDDKSMLRYFESQLKDTNKAIANIMRAIEAGIITETTRSRLEELEDTKRDLETEIIKEKVARPTIEREQVIFFLEKFRGGNVDDKEYQRKIIDTFVHKVILYDDKITITYNYSTDSTKNAENTVESIESAASAAECKCSNKPSSSPPVTRILLLQCSCYFFRRGSNRTVLRSRIPSVRWTVGKSACVSAHGSAPSVPLRLHQ

SEQ ID NO: 10702 - protein, 526 aa, synthetic construct
MQYCLYLRKSRADSEAEARGEGETLARHEKALLDLAKKLNLNITAIYREIVSGETIAARPVMQQLLQEVEQGIWDGVLVMEVERLARGDTIDQGIVAQTFKFSDTKIITPIKTYNPNNEFDEEYFEFGLFMSRREYKTINRRLQRGRMASVKDGKYVANKAPYGYNRIRIENDKGWTLEINKEEADVVRLIFELYTVGEKQSDNTFNRLGTGFIAKRLNAMKVPPKRGKVWVVASIRDILINPVYIGMIRWNWRPQQKKMIDGQLHISRPRATDYLLCKGLHPPIISKETFNIAQDLMRHNPARPIGEKNTVKNSLSGIVVCGNCGRHMVRRPHTKYPDMLICSEPTCNNVGSQLRVVEERILQSLKEWLGEYKISWDITSPPVERISQVSIKKKALQKEQHELDTLNKQISKTHDLLEQGIYTTDVFLERSRALSLRMDEVKEHIAILAKELKTEITREDSAVNIIPKVEKLLEVYHDLPSPKAKNDMLKDVLEKVVYTKKERSKKGNLDNFNITIYPKIPKYIT

SEQ ID NO: 10703 - protein, 506 aa, synthetic construct
MNGVIYARYSSENQREESIDGQLRECTAFAQHNDIQIVGEYIDRAFSAKTDNRPSFQKMIKDSAKGEFDVIIVWKLDRFARNRYDSAHYKNILKKNGVKVVSATEAISSGAEGIILESVLEGMAEYYSAELAEKVSRGMKENALKCKYNGGSVPLGYYIDESKHFQIDSSVAPFVVECFEHYADGMTMKQLRDELNMKGVKNSRGGKLSIDVISRMLTNRKYLGEYTFQDITIKDGIPAIVSTSLFEKVQDRLTKTKKVPSSHKADDDYILTTKLFCGKCKSFMVGESGTNAQGKKYRYYKCVNHKKHQGCDMKSIRKDLIENMTIKYIREFLNDEDLINTLIDLAYDAQHKENEQLPLLRKQLAQTEKGIKNIVDAIEQGISTKSTRERLLDLEQRKNDIEMSISKESIENPMLTKKQFKFWFDQLKKLDISKSEQRQKLVDLFVNSIIIYDDHIKFFFNYKEHTETITFDELNNCSDLPDSPRPKGLPNGSPYFLPKIAKNRII

SEQ ID NO: 10704 - protein, 578 aa, synthetic construct
MRKVSKIEPIFPSLPTRKKVAAYARVSMETERLNHSLSAQVSYYSNLIQSNPGWEYAGVYADNAVTGTKSSSREEFQRMLEDCEAGKIDIILTKSISRFARNTVDLLETVRHLKELGIEVRFEKEHINSLSGDGEVMLTLLASFAQEEVRSLSENVKWGTRKRFEQGIPNGRFLIYGYRWEGDHLVVEPEEAKIVRLIYDNFLKGLSAEATEKQLEEMGVKSMKGMHFPNSSIRVILKNITYTGNLLFQKEYTLDPISKKTRKNHGELPQYFVENTHEAIIPMETYQAVQAEIARRRELGALANWSINTSCFTSKIKCGICGASYVHNTRKNRAKTSQLGERYTFYGCGTNKRKGAHCSSGTIREDVLKEECAKALGLPKFDEETFSERVAKITIPATGTMLFEFTDGTFLEHHWSRNAKKESWTAERRKAVSEYRRSRETGWKCYNTFTHFIKCRRCGANYRCQTHKRVDGTVVRSWYCSSPTAEGCSKVGIREDTLRALIADVMGLPEFDEELFNQQLAYATVPADNQIVFHFRDGHEASRTFVQKRQMPRQTEERKKHMSEVMKAKWRERHAEND

SEQ ID NO: 10705 - protein, 479 aa, synthetic construct
MITTPITSYIKSRDDWEFVDVYTDAGITGTSTKHREGFKRMVADALAGKIDLIVTKSVSRFARNTVDSLTTIRQLKENGIECYFEKENIWTFDGKGELLLTIMSSLAQEESRSISENCTWGQRKRFADGKVTVPFNRFLGYDRGPDGNLVVNREQAAIVQHIYAMFLQGMTYNGIAQQLTDDGILSPGGKPKWNTSAVKSILSNEKYKGCALLQKTYTVDYLTKKKKVNEGEIPQYYVEDNHEAIIDPDTFEMVQREMEKRGKGRKYHSGVHTFSGKIRCGECGSWYGSKVWHSNSKYRKVIWQCNHKFDGDHHCSTPHLTDDIIQQVFLSAANKLLATKDTVIADGREMIALLFDSTNLEREQEELQQETQVVSDMVQQCIYENAHVALDQTEYQKRYDGLTERFEKAKARLDAVTVEIHQMQTQRASIEDFLKAFAAMPDELTEFTLESWHGLVDYGTVYAADDIRFTFKNGQEVKA

SEQ ID NO: 10706 - protein, 478 aa, synthetic construct
MYANLCDVAHILKEGDHMKLERCAIYIRVSTAEQMMHGKSLEAQREYLEAYAREHNMVVAGVYADEGKTARKELKKRKAIHALLEDVKAGKIDVIIFWRLDRWFRNLSDFYKVQDILDEYHVRWISTSEPGINMETRDGRLQLNVVLSIGQNEVDTTSERIKFVNEASIRQGKLIFGDANMGYGYKSGTVNGVKCMIKDPEREEAVNAFYQYFFKHQSKTGALKYIQENYDPDFSYSSMRTLLSSEFYKGTYRGAPYCPAYLSTEDWDRLQKISDKNIKVNRSNRVYLFSGLIYCPNCDNLLSGCGCSSIINRKTGAKRTYCYYRCNKAYMDNHCNYRHRLSQNLVESYLLEHLEDEYQRYHVRSGQIREKQKKEKKIKTPEKLRSELERLNLLFQKGRVEWEYYNKEYSRIEYELKEALAIQQEIERDVSYVNEIIQSDFRSMYAKLSLENRRAFWRSIVSDIHVAKDSTVKEVNFL

SEQ ID NO: 10707 - protein, 523 aa, synthetic construct
MARVTTIPATISRFTATPINEKKKRRTAAYARVSTDSEEQLTSYTAQVDYYTQYIRGRDDWEFVEVYTDEGITGTNTKHREGFKRMVADALAGRIDLIVTKSVSRFARNTVDSLTTVRQLKEKGVEIYFEKENIWTLDSKGELLITIMSSLAQEESRSISENCTWGQRKRFADGKVTVPFNRFLGYDRGPDGNLVVNPEEAVTIRRIYSMFLQGMSPYGIATRLTADGIKSPGGKEKWNAGAVRSILTNEKYKGDALLQKSYTVDFLTKKKKINEGEIPQYYVEGNHEAIISPEVFELVQQELECRKQSRGRHSGVHLFSGKIRCGQCGEWYGSKTWHSNSKYRRVVWQCNHKFDGDQKCTTPHLTDDDIKGLFVSAVNQLITQKDAIITALTASLDTAFDLTALKAEQTELESEMTVVSDLIQKCIYENAHVALDQVEYQKRYDGLTERFDTSKARYEALDETIRSKQSRRAKIEAFLEALAKAKLVDTFDTALWCGLVDFVTVHGKDDVRFTFKNGQEIKS

SEQ ID NO: 10708 - protein, 591 aa, synthetic construct
MRIINKIEPKVPQMPTRKKVAAYARVSMESERLQHSLSAQVSFYSDLIQKHPGWEYAGVYADNGISGTKTTSREEFMRMLADCEAGKIDIILTKSISRFARNTVDLLETVRHLKDLGISVHFEKERIDSMSEDGELMLTLLASFAQEESRSISENVKWGTIQRFKEGIPNGQFTIFGYKWVDDKLVIIPEEAEIVRFMYSEYMKGASRIEIGRALMERGIYTRKGCPWVDSNVKVILTNITYTGNMLFHKEYCLDPITKKRKKNRGELPQYFVEGTHEAIISMEEWQAVQEEFKRRRDLGVFGNKSLNLSCFTGKIKCGHCGQSFVRNTRRRRLKGVPVEQCDKYTTYGCGTQKKKGRSCPARDIPEETLKAKCAEVLGLDEFDEETFSAQVEKIIVPEHLVLEFYMTDGRVIRTEWVSTAKKDAWTAERRAAKGKLVQERQITANSSCFTSRIRCEMCGENYRRQRSKRVDGTFVNVWRCASSARCKSQSLPEPTLHELATTAMGLAEFSEDAFRQQIQYISIVDKGRLVFHFFDGRDIEAEWKNKRTMPPHSEERKAEMSRKMKENWRKRRGESNDHSGNDQPVHSDTD

SEQ ID NO: 10709 - protein, 510 aa, synthetic construct
MSTNYALYLRKSRADLEAEAHGEGDTLARHEHILMELAKSRALPIGAIYREIVSGERIANRPVMQQLLSEVEDGRWKGVLVTETSRLARGDTIDQGIVAQAFKFSGTLIVTPAKTYDPTQEADEEWMEFGLFMSRQEYRMIRRRMNAGTKSAKKEGRYVGSRAPYGYERCKLSGRGWSIRPIEPESGVVKMIYELFLSGKGAGEIATYLNQINIPSPTQRTWVRQTVGLILQNPHYAGLIPDAVHPYKKVIKDGQLTVKRPLNKQCELYEGVHEAIIPRETWEETQRLLTKNHKPRVPSALQQHNPLAGLLYCDKCGQKMQRHPQTDRNFEKYYCPTVGCPTVSAPLSQVEDLVLQGLKEFLYDLEMQQPEQPDFTTEQNALKNIDSRLAEQRKRLTKTFELVEDGIYTREAFLQRQSEINAEISRLQTAREELQRKLDAHTAELSARENAAPQIRYVLDVYDRKSAPAERSALLKQVIDRIDYHKTTKQRWSAENDLSVTIHPKISARK

SEQ ID NO: 10710 - protein, 526 aa, synthetic construct
MDEMKITVIPALKKSRGIIGTDEKPKLRVAAYCRVSTDTDEQATSYEAQVEHYTAFINKNSEWDLAGIYADDGISGTNTKKREAFNRLIDDCMDGKIDMVITKSISRFARNTLDCLKYIRQLKDKHIPVFFEKENINTMDSKGEVLLTIMASLAQQESQSLSQNVKMGWQYRFQQGKMMINTNRFLGYTKDEEGNLVIVPEEAEIIKRIYYEYIEGASECKIAKGLEADGVLTGAGKTKWWPSSLTKMLTNEKYMGDALLAKTYTVDFLSKKRVKNNGIVPQYYVENSHPAILSKEVFNMAQEERARRSKVHKKQRGRVAGNGYSSQFALSGRVICSECGEIYRRIHWNNRGKKSIVWRCVSRVDKTGKTCANSPTVQEPILHQAVMKGINESFTDKDRWKEALSKNVQIAIGSGNAKEIHEIDERLEELQQKLMKLVMGNASYDDVAEEIHVLRDKKLALITEDSAKSNEEKRLNELLDFIEQQDSELKDYDEKLVRRVVEEVEVQGTKLVVKLKSGAEIEVETE

SEQ ID NO: 10711 - protein, 517 aa, synthetic construct
MKKITKIEPKSTEAKSKLRVAAYARVSTSSEDQLVSLEAQKAHYEEFILKNSEWTFVGLYFDEGITGTSTDKRFGLQDLVKDCENHQIDLILTKSISRFARNTMDCLEIVRKLSDLGVVIIFEKENINTQTMDGEMMLSILSSLAENESFSLSENQKWSVEKRFQNGTFKISTPPFGYENIDGRMVVNATEASIVQMIFKEVIAGKGAFTLAKRLNEMEIKPRRGSKWAENSVLYLLKNRHYTGDAIFGKTYTDANYKMRPNKGQRNMYIVENHHEPIISHETFERVQEIVSRRGIEKASHKKSNYQNRYAFSGKIFCGECGEKFKRRVHHKNADDTYVAWACSTHTNDKHACSMLFIREEQIRKAFTLMLGKLHFGHDLILRPLLSDLRKVDKGGIYAKSEFLQDEVENKLLQLDKLNFFRTQALIDNAFYIKEKNIIEQNLYRLKQEKASMLTPLADDDKEQEVKELLKFVSSKQFEQGFDDETFSRYVQSIEVISRQAVDFKLKCGLVLREELS

SEQ ID NO: 10712 - protein, 501 aa, synthetic construct
MEIQIREGNGRQKKKLKVCAYCRVSTDADEQENSLENQIRHYKEVITSNLDYEYAGVYSDFAISGFKEKRPGLQKMLDDARKGKIDLILTKSVSRFARNTAIVLEATRKLKELNVGVFFELQNINTLSGEGELMLTILAAFAQAESESGSVSAKMVYQRKYEAGIPVQYLERSFGYTKGERGVFIADEAEAVWVRKIYEMAADGYTPAAIKRYLNENGVKTVGGAEWIDSTVFRLIENEIYKGDYIMHKHFVNEERKLVRNRGEVDAWYIEDDHEAIVSPELWQRAQDALEAKRDYLAEGSVIEEFTEENYPYMNKIYCAKCGYPLYKRIYSKGNRLNWGCSGMKRYGKSFCDGINIPDGVLRSAWHFEENTYIDEKASDKGVKEFSYLKERSWKRRHKKKQPPSIPENTEAEYPYREKIYCALCGSRLVRHVDTKSHKITWVCNGRKRKGKAFCDGTRVPDTVLKGWGEIKKDIYIQRKDDKNGKKRYSYTSKKPSGIGA

SEQ ID NO: 10713 - protein, 463 aa, synthetic construct
MARSVTVIPARNRQASGHRAVPQKKIRVAAYCRVSTDQEDQLHSFEAQVDYYTKYINDHENYEMAGIYADEGISGTNTKKREQFKRMIADCEKGRIDLVITKSISRFARNTQDCLMYSRKLKNLGIGIIFEKENINTLDSTGELLFTILSSLAQDESRNISENCKWGIRTKFKNGEMHLNTFKFLGYDKDENGKLIINREQAKTVRRIYRNFLWGLNPAQIAKELEEEQVPGCLGQTKWYASTVVGILKQEKHMGDALLQKTYTADFLTKRQVRNNGEVAQVYVKDSHKGIIDKETWNAVQEEFDRREKFMQRHGTDRYSYGSECYPFCEKIFCGECGSLFTRHSWKSRGIVQWQCKNHRKDGKVACTNAYVDNADLEKGFVKAFNRLAGEREKHMERWNAMKADGTPLEKIRAVQMMAATENGQLQKYVPEAAQLVLEEITIFGAKKYEFAFLEGSRVKVSV

SEQ ID NO: 10714 - protein, 518 aa, synthetic construct
MQYEEYLIYLRKSRSDASLEAMGVDVLERHEQILLDLAKRMNLSIGGIYREVVSGESISARPEMQRLLSEVEAGRWKGVIVMEVERLARGDTIDQGIVQRAFQYSGTQIVTPAKTYNPNNEFDEEYFEFGLFMSRREYKTIRRRMRAGVTAAVKEGKWPFNKAPYGWQRVKLEHARGWVLAPDPEEAPVVKLIFQLYTGPDRIGITNICRYLDNRGVKPRNGDTWTECSIMGILRNIVNDQRVGIGRRKIVKQVQNGSVSKVRPHSDYDFTAPGLQPRLIDHDVFLEAQTHLGKNSHKLPESYGIKNPLAGIVVCSCCGKKMMRRPASKTPGGATYDVLKCNTRNCPTIGSALDLVEREVIQALSDWVAGYQLDPTLEVENKVPEKEQLLSSAISNHDVLLKQNGNLYDLLEQGVYTTEIFLERSHELQKRIKESEAHIEVLKKDLEYEKEKIANVENFIPSCKELLSCYWELSAQDRNKALKMLLESVEYTKTKRNKYGDKDNPTFTLNLKPRIPRI

SEQ ID NO: 10715 - protein, 506 aa, synthetic construct
MRSVITYLRFSSAIQGAEGADSTRRQNDLFKQWLKKNSDAQVVASFSDEGLSGYKGKHLTGQFGDMLARIESGEFPEGTILLVESIDRIGRLEHLETEALMNRILGNGLEIHTLQDGLIYTKDALADDLGISIIQRVKAYIAHQESKQKSFRVSEKWKQRAKLALAGEQRLTKMVPGWIDPDTLKLNEHAETVRLIFKLLLSGESLHNIARHLQSNGIKSFSRRKDANGFSVHSVRTILRSETTIGTLPASQRNDRPAIPNYYEAAIDAATFNKAQEILDKNRKGRTPASDNPLTINIFKGLFRCQCGASVHPTGTKNKYAGVYRCNNHLDGRCDVPPLKRKPFDKWMLENFLGMIDVGNDGEAEGKIASLQHEVEIVTTRIKKATALLLEMDDIDELKIQIKELNQRRTELQTTIDNMRRKASLTDKELPQLKDIDLTTKAGRVECQLILSKHLKGLTLGKDSVIVTLQNDTEITIPTNPLPLNDGTSIFEIAEKELLEIDAYQL

SEQ ID NO: 10716 - protein, 539 aa, synthetic construct
MKKTKNSVQRAVIYARYSCSNQTEQSIEGQLADCEKFAEKYNYYIVDTYIDRAMSATTDRRPQFQQMIADSATGGFDVIIVWKLDRFARNRYDSAVNKQKLNSNGVKVVSVMEHIEDTPEGALMESVLEGFAEYFSKDLSQKVSRGMRETALKFKATGLIPYGYKKTSDNICVPDEHTAPVVKKIFEMYSGGMINKDICDWLNSHGYRTSNGNLFKNQYLRKILNRRRYTGSYTYGDLELHDENQRIISDELFDRVQIQLQAKKRTGRIAREQYVLVGKLFCGYCRNPIRGESGRNHQNRIYTYYKCSVNKTGGKCPKTTVQRDIIENNTIKFILKNFLNDEIINSIVDTIQASETAENNSAELIALRTQIEDTDRKINNLLSAIENGIFTPSTKQRLNDLENAKEKLKYELIVKQSEKNNFNATAFKRFLKNIDVDDFKTTEQRQKLINLVLYREYLWNDKVLYIFNLTPSKPNDSVDIDSYVDALLASTGSTGSTSPTDGVPQVAISELLFGYFFVMGFFPFHKHFALSFFALYIYR

SEQ ID NO: 10717 - protein, 490 aa, synthetic construct
MTDKNLLVITLHRKEPGKQRIAAYCRVSSRSDEQLNSLTNQIDFYRSRFENDDTVVFVGIYAEEGLSGTQAKSRPQFMKMIEDCRSGMIDCIWTKSVSRFGRNTVDTLIYTRELRSLGIDVFFEKENIHSTESSGELMLTLMAAFAESESETMSENIKWGKRRRYEQGITGSITLNGMYGFRQNKGIVTIVENEAELVRRIYKDFIDGYSYGEIADRLIAEGVPTRMPGASWAKTTVQHIIRNEKYCGDCLFQKAFIANPITHQQVRNNGELPKYLVEDCLPAIVDKETWKLAQAVAARHTPHKQASNERYPFTGKLFCGVCGKPYCYYNYTTTNKQPLAAYRCMSRKTQSAVEVPGQTYTPPHKATFNLNASPELIAYRERYCKPPKERPMLCTDVRISIDLPQKAFCRAWNLIVAKKLRYQATLRSTVDNAEDILVRYRAEEMCLLIDEIGKLTEFSYPLMLKTLDRVVVNTNGKLSFIFQSGIKITV

SEQ ID NO: 10718 - protein, 551 aa, synthetic construct
MQVMTNKKVKKIEATKPTLSAQYSTFTRKRKVAAYARVSTAKEEQENSFDAQVSYYTQKIQANPEWVFVEVYSDEGITGTNTKKREGFNRMIEDALAGKIDLILTKSVSRFARNTVDSLVTIRQLKEKGVEVFFEKENIYTLDAKGELLLTIMSSLAQEEARSISENTSWGRRKSFADGKVSLGYSNFLGYDKGPDGELVINEEQAKIVRRIYAEFLAGKTPGGIAKGLTADGIETPGHKKVWQASTVLNILKNEKYYGAAILQKQITVSYLTKEKRPNTGELPMYYIEKDHEPIVSPETFQMVQEEMRRRREAGSNMQCVSIFSSRIICGDCGGYYGRKIWHSSTKYTAWHWHCNAKFQKRKYCETPTLKEESLEETFVEVFNGLIADKDEIMENYRLCIDAVTDDSEYRRQLEDLNNGCGEVQTLIRSLLMTYSRQDTAEDIHEKLQEYEERLDTMARLKQELDLKIAACAAKRVQITGFLNELMKHDAPLAKFDPLVWQAVINYATVNRDCTITFTFRDGTEKTVPIKNGVRPYTKRNKPQEVDGNDG

SEQ ID NO: 10719 - protein, 434 aa, synthetic construct
MEKTIVNIAPAAAETPCTKRVAAYARVSCGKDTMLHSLAAQIDYYRDYIIRNPEWRFAGVYADEAKTGTKDNREQFQLLLTECRSGNVDMIITKSISRLARNTVTLLETVRELKSLGVDVFFEEQNIYTLSAEGEVMLTLLASFAQAESLSCSDNCKWRIRKGFEEGRASTCTMLGYRLINGEITLIEDEAKIAKRIFDLYLAGYGLQKIANTLNEEGLYSIFGNEWHPTTLRKVLTNEKYCGDLLLQKVYCENHLTKKMVPNNGELPQYFVEDDHPAVVSRETFAAVQKELKRRAEEKTPTVGSTSVFTGKIRCSCCGKNYRRKTTPYNIVWCCSTYNSKGKKCCPESKVIPEETLKRAAAGILKTDSFSGEEFERQICTIEAHPGNLLRFIFIDGSTTDYVWKDRSRSESWTDEMKAAAAKKAKERYASHDK

SEQ ID NO: 10720 - protein, 513 aa, synthetic construct
MAKAKQKAATNDISKLAVIYARYSSHNQTEQSIEGQLAAGHRYADLKGYTVVHEYIDRAMTGRNDNRDDFQKMLSDTSKKQFGAIIVWKVDRFGRNREEITFNKYRCKKNGVRVEYVAENLPDSPEGVILESVLEGMAEYYSLQLSQNVQRGLLESAKKHQVIGGNVPLGLMMDAHKKYVPDLKTAPTVKLIFDMYAEGSTTSEIINHLNSIGMRTKAGKPFTKSSLTTVLKNEKYIGVYKYKDIIRDEGVIPPIVDKEIFYKVQELLKVNRRMPSHKWSYSDYILTDKLFCGKCGTAMVGESGFGKMGVKYSYYICAKRRKDKTCDKKPVRQEWIEEIVLQRVQGILQNEELLEFIAENTWQYYLAQDESMEKLKGLQTELDKVEKSAANLMKAIEAGIFNDMTKARMDELDDQRAVIKKAMAEIEIEKGFKLTKDHILYFLEQFKKLDYKDRDCQRRLIDVFVNSIFVYDDKLRIAFNFGGSDSTITLNEVDKADRGEGFVCCASCPVIKP

SEQ ID NO: 10721 - protein, 464 aa, synthetic construct
MARSVTVIPARSQKVRTGHKAVQEKTIRVAAYCRVSTDQEDQLHSFEAQVEYYTKYINEHENYKMAGIYADEGISGTNTKKREQFKKMIADCEGGKIDLVITKSISRFARNTQDCLAYSRKLKNLGIGIIFEKENINTLDSTGELLFTILSSLAQDESRNISENCKWGIRTKFKNGEMHLNTFKFLGYDKDENGKLVINKEQAKTVRRIYRDFLIGINPAQIAKELTEEKVPGCLGQTKWYPSTVIGILKQEKHMGDALLQKTYTADFLTKRQVRNNGEIAQVYVKDSHKGIIDKQTWNAVQEEFDRRERFMEAHGTDRYSYGADCMPFCEKVFCGECRSLFTRHSWRSRGIVQWQCKNHRKDGKVACTNAYVDNADLEKGFVKAFNRLVTDRDKHMERWQQMKSDGTLLEKIRAGQMMEAVGNEPLTRFVPEIAQLVLCEVTVLGAKKYEFFFLEGSRVKVSV

SEQ ID NO: 10722 - protein, 407 aa, synthetic construct
MRIKIIKAKPPEERKLRTAAYVRVSTDSEDQEGSLENQTRYYSDFLSHNPAYEFVGVYSDRGVTGYKEKRPGFQQMMHDAMAGSIDLIYVKSISRFARNTEVLLKTVRALKSRGVGVFFEVQNINSLSADGELMLTVLAAFAQGESDNYAELTRLHYKRQFCQGTPSRRTAATFGYCEGNYGELKVNEPQARVVRQIFSLALEGATLSGIANWLNNHKIPAIQGGQWNPTGIRRILRNVTYQGDLMLQKSYLDTKRQRHPNKGQVESWYVQDNHQAIVSREDWQRVQELLDNYTPPVARPVAYARKDEAGQYLLAGMLYCPWCGAVLHHKWCNKKTTEYWACSTTSKKSKNSCPGIYVPAQEAEKWTISEPTTVLQSKDDFGNQHFTPVPKRNYERRVGCPYIKKEA

SEQ ID NO: 10723 - protein, 469 aa, synthetic construct
MARTIVHIPAQPRATTVSATDNTRLRTAAYCRVSTEQEEQLNSYEAQVDYYTHYIKTNPKYIFVGIYADRGITGTNTRHRDDFNRMIEDCEAGKIDFIIAKSVSRFARNTEDCLFYTRKLKDLGIGIYFEKENINTLDGGGELLLTILSSLAQEESRNISENCKWGIRKKFRDGKLHLNANRFLGYDKDEKGKLVINKEQAAIVRRVFYEYIWEGLNPDAIARRLQAEGVPGCMGQPRWAVSTIQAMLQNEKYMGDALLQKTYTPDFLNKRAIKNKGEVEQVRVKGDHEPIIEPEIWDAVQLELQRRHRYTEEHNIRFRGRNSDVQPFSCKVICGVCGTPFWRRTWYRNHRSIKVWQCGKRYQEKGVATCSSENLKEETLYNAFVVAWNALVDNRQELLPEWEETMQKGNALERLRAQQMIELTAGARLTAIDLSLVGKCLDYVVVNNGGILAFHFLDGSQICVETDAD

SEQ ID NO: 10724 - protein, 602 aa, synthetic construct
MYITVTLDPNGIYDAYLRKSRADMELEKLKKFDTLKQHEKFLKDRANQLGIKIRKIYREVVSGESIQERPEMQEVLKNVETGTIDGILVVEVERLTRGDAKDQGTVTQAFKYSNTKIITLNKIYDPNSDEDEEYFEFGLFMSRREYKTINRRMQRARIANVLDGKYCASEPPFGYKKVRVKYGKGYTLEPVSEEAEIVKEMYQKRADGMGYDIICNWLNTLDFKPKKSDVWTPATIKGMLSNPIYIGKIRWNSNKQKKILINGQIIKKRKKGNNEDLILVEGLHPAIISNELFDIVQGIKPNKASTKHNTELQNPLATLVKCADCGRSMQRRPYYDNKKQEPKLRRKYDIDKEKLRLCLREHKGEYSLRDIATVLKVRKHCVDHWFASNQSKFTMPYADKWEELKKLLNINTTEFDKAITTYESNLIEPHEDTLICPKAHCTNIGSNLALVEQETIKALQEYISSQKELLATYNPAEEDDNVMFVSLSKELDKYNKQLDKAYELVEQGIYTPQEFTKRTKTIKDKITNTEKELNKYQIKLNKDRIEKLLPKIEKVIDSYYKVTSAEKKNKLLKSVISYIEYKKEKGGRGYESNFSIVIHPKF

SEQ ID NO: 10725 - protein, 523 aa, synthetic construct
MAEKTITVIPARKRIGSRRQVTEEKPKLRVAAYCRVSTDRDEQESSYEAQMEHYTEFIDRNPEWQLAGIYADDGISGTNTKKREEFNRMIEDCMASKIDMVITKSISRFARNTLDCLKYIRKLKEKNISVYFEKENINTMDAKGEVLLTIMASLAQQESQSLSQNVKLGLQFRYQAGKVQVNHNRFLGYTKDDEGNLVIVPEEAEIVLRIYREYLEGASLFQIGQGLEVDGIKTAAGNNYWLQSTLKKILTNEKYIGDALLQKTYTVDFLNKKRVANNGIVPQYYVENSHPAIILREKFMKVREEMYRRAHMECGPDQKRRIYSSRYALSSIVYCAHCNDIFRRINWNNRGCKSTVWRCLSRVEKNRPSCTARTVKEELLHEVIVRAVNEVITESSSFIPALQASFERCLGDSNSAAVEGIDAHLLELQQELLKLANARQNYDALVDEIDELRAEKEELLLQEANKDGIRQRMADMVAFLQSEPEEVIEYSEALVRRMIEKITVFDDHFVVEFKSGIEITINE

SEQ ID NO: 10726 - protein, 508 aa, synthetic construct
MKRITKIEGNTILLNAVRKTRVAAYCRVSTGSDKQLLSLETQKGHYERYIKAHPDWEYAGLYYDQGITGTKKDKRPALMQMVADCEDGRIDRVITKSISRFCRNTTDCLELVRKLLGLGIPIYFEKEDLDTGSMESESVSIAENSKWSIRRRFENGTFKLAYPPYGYNYIGDGEWAINEEQAKWVRFIYSETLSGKGSDAIAAELIELGAPTKKGGKWTSTSVRGILSNEKYTGDCIFQKTYTDERFNRHTNYGEMDQYYMEGHHDAIVSHEDFDAVAALVEQRAKEKGITRGDSKYQARYPMSGKVFCGECGSPLKRRMNYSTHIQYPALTCSGHLKDKNSCSQKFIREDALQMAFVTMMNKLIFAHKEVLQPLFSSLRSISQKDAVSRLSELDERLAKNAERQNTLTTLMTRGYLDPALFTQESNDLLTEAQALTEEKEHLVFSVNGETKKAGKLADLIRFCNRGEMLTEFDGDCFSQFVERVVIHERTTVGFELKCGLTLKERIR

SEQ ID NO: 10727 - protein, 520 aa, synthetic construct
MPRKKAPAAEAPRLVAYYRYSGGSRQTEQSIEGQRRDCEAYARAHGMTILREYVDRHISGKTDDRPAFQQLVADSAKHTFDAVICWKTDRLARNRYDSAVYKKKLRDNGVEILYAAESNISGAEGIIIEGLMEALAEYYSAELAEKARRGMRESALKGKALGSSRPLGLTVDADKHYIIEPTGAEAVRYIFEQYAAGLSSSSIVERLNAMGLRTSHGGPFNKSSINRIIQNEMYRGVYVSKKFDVRIEGAIPAIIDNDLWERAQKMFERNRQSRTPHASRADYILSGKLYCGECGCLMKGVCGRSSGNGQMYHYYACPGRSIGRACTRKNIPQDELEAMVVNAVADLLLEPALLEQIADAIVELQQAEAARPDPEKQALEKSLSDVRSKIQNILTAIENGTSSAALSARLADLEQQESTLSYQLSSLTAKKPLTFTRDQILFLLQQFRVSPSERTKAYCRRLVDTFVDHIELTNTELILYFNISDETIDKNKKAPRSNPSKESSTEKRLVRVARIELTAS

SEQ ID NO: 10728 - protein, 513 aa, synthetic construct
MQENKQNIRFTALYCRLSSDDELKGDSNSIIHQKQILQDYALKNSLTPTEVYVDDGFTGTNFDRPDFKRLLSDVENDLVKTIIVKDLSRFGRNYLKVGYYTEILFPSKGVRFISVSDNLDTSAKDEINDFIPFKNIMNEWYAKDLSRKQRAVIKSKGNAGKRLSTRPIYGYKKAENGDWIIDEPAAIVVRKIFDLYLKGYGPASIANYLFANKVKIPSLTGLQISDKTRNPYRWSKDSVAHILTCQDYCGDMINFKRSDVDNLVIFPDKQDPIISREIFAEAQKLRLSKKPVRHSYSEPVLFSDFLRCADCKNRMYAQRRYKGSTSYTCSTARKVQGCSSHYINENRLSDCVKSEINKLIANKTKVVEFAKAKMHTDAKTAQCASVKNLKNAQTRISEIDAILKNLYEDKVRGNITLETFKKLENEFLREQANLNQTVINQSRIKVNIDSQSKKICEFLRKLEMYKVPIQELSRNVLIDLIDKIEICEAEKENNKRSQQVHIYYLGIGKIDLE

SEQ ID NO: 10729 - protein, 546 aa, synthetic construct
MKAAIYSRKSKFTGKGDSIENQIQLCMDYSKSIGIKEFLVYEDEGFSGGNIDRPQFKKMMQDAKDKKFDCLVCYRLDRISRNVSDFSTLIEKLNKLEISFISIKEQFDTSTPMGRAMMFISSVFAQLERETIAERIKDNMYELARSGRWLGGKTPHGFTSKKISFLDENLKERSMYQLEVNDEQMEIVKLIFNKYLELRSLSQLYKYVYHNGIKGPRGGKFDPSSLSGILRNPAYVKANEDILDYLRSLGMEVVGVPDGQCGILTYAKNTSNSIAAIAKHHGVIEPDVWLEVQSILNENKDKIPRISTGKTALLSGLLKCGKCGSNMRIMYKGKRNDEDLKYYYVCGTKRSLGVEGCNCKNLNGPLVENLVIDKIKNCNIESVINAFNSNNAKVDTVFSDVRSKINLLKNSISEKEKLISNLVMELAKNTGSVASEYIISQIEGLNGEIDSLKSKVSELESSSVDINSASLNLDIIVSNLKKFNYEVDDASLDDKRLLLSTIVDSIVWDDASGNLSIVYMGAKMDDLVSLSDGSHFCSDGRSYIYE

SEQ ID NO: 10730 - protein, 501 aa, synthetic construct
MEIQIREGSREQKRKLKVCAYCRVSTDADEQENSLENQIRHYETVIKANPDYEYAGVYSDFAISGFKEKRPGLQKMLADAEKGKIDLILTKSVSRFARNTSIVLEATRKLKELNVGVFFELQNINTLSGEGELMLTILAAFAQAESESGSAGAKMVYQRKYEAGIPVQYLERSFGYTKDERGVFVADEAEAVWVRKIYEMAADGYTPASIKRYLNENGVKTVGGVQWVDSTVFRLLENEIYKGDYIMHKHFVNEERKLVRNRGEVDAWYIEDDHEAIVSPELWQKAQDALVAKRDYLAEGSVIEEFTEENYPYMNKIYCAKCGYPLYKRIYSKGNRLNWGCSGTKRYGKSFCDGINIPDGVLRSAWHFEENTYIDEKASDKGVKEFTYLKERSWKRRHKKKQPSAIPENTETEYPYREKIFCALCGSRLVRYVNPQNYKVTWVCNRRKRKGKEACDGTRVPDTVIKGWGEIKKDIYIQRKDDKNGKKRYSYTSKKPSGIRV

SEQ ID NO: 10731 - protein, 505 aa, synthetic construct
MQINVMEGRSKAGRKLKVCAYCRVSTDADEQENSLENQMSHYESLIKSNPDYEFAGIYSDFAISGFKEKRPGLQKMMSDARAGKIDLILTKSVSRFARNTAIVLEATRELKELNVGVFFELQNINTLSGEGELMLTILAAFAQAESESGSEMAKMVYRRKYEAGIPVQYLERSFGYSKTEEGYYIADEKEAFWVRKIYEMIADGYTVAAVTRFLNQQGIKTSGGAEWLNSTVIRIVENEIYKGDYIMHKHFVNDERKLVTNRGEVDAWYIEDDHEPIVSSELWQKAQDAVAQKREYLATGSVITDFTEDNYPYKDRIFCAKCGHPLYKRIYSNGNRLNWGCSGTKRYGKKFCEGVNIPDIILREAWKYDGNMYIGTKDNNKGTQEFTYLKETSWKRRHKKKIPEHMVPECNEENYPYLKKIYCGICGKRLTRRINTKSGKIAWICSGRKRKGASFCSGTQIPDSVLKMWGDIKNDIYIVRKDEDNGKKRYSYTSKKSADGSKKQL

SEQ ID NO: 10732 - protein, 493 aa, synthetic construct
MDNRIDAIYGRQSIDKKDSISIESQFEFCRYELKGGEGREYKDKGYSGKNIERPDFQRLLQDIKLGLIKRVIVYKLDRISRSIVDFAKLMELFKQYDVEFVSCTEKFDTSTPMGRAMLNICIVFAQLERESIQMRVQDAFYSRCTKGYYMRGRTPYGFDTEPIVMDGIKTKKLVETPEMDFAELMFQMYAEPGNSYGDITRYFVKNSIKVYDKALQRAFISKLLRNPVYVQADMDIYEYFKAQGVKIESPPEMFTGDNSCYLYQGREGEEQILVIAPHQGRIPSQLWLAVQRKLSQNTTFQNGRKCHHTWLAGKIKCGRCGYALTALKAQNGVVYLRCKQRADNGSCEGAGTLTAQSMESFVYGEMVAKMRKYHTLKGGKEQSYNPKLTAARVALAKTESEIEKLLDTLSGANPLLLQYANNKIEELDAERQKQLKLVADLTANSVSDTQIDSITNYLNDWESVSFDDKRKVVDILISHIDATSESVAIHWKI

SEQ ID NO: 10733 - protein, 513 aa, synthetic construct
MPEVRLITPITRQNTKKMQVAAYCRVSSNSADQLNSYAAQIRAYKKYIGARDDWELVDIFADEGLTGMKSETRDEFQRMIRMCELKQIDLIITKSISRFARNTKDALAYVRKLKLLGVGVQFEKEGISTLSMGDEMLLNTFSALAQEESQSISMNQRLSIVKRMELGEYVDSNAPYGYRLVDKMLTVYEPEAGIVRNIFALYLQGFSTSEIAKELNKLNIPTKAGKETWRPSRVAYILKNERYIGDSFYQKTYRETTVPFNQHPNRGQEDRFYAKGTHPGIVEKDVFDAAQTLIEKRKDVFAKATTQNIYPLTSRIQCSECGSFYRRRIVSGTVKWVCSLHKDDSTACDSNYYSEERIYDGFISLVNKLRFSEDNILGQVISRLEMTLAAMKRNNLAARDLSKSIAELNAKLLMLEQLRSKGYLAPEVYQAQANEISAELAKLKDVRQEKFNSKAAIMLEEVKKLKMLIFELEEPLDAFDEKLFLEIVKSIQINKEDEMSVELLGGLRFRERI

SEQ ID NO: 10734 - protein, 497 aa, synthetic construct
MRGVIYARYSPGPHQTEQSIEGQVADCQQYAEEHGIDIIEIYADRHVSGKSVVGRDEFQRMLRDAEKGRFDCVLVWKIDRFGRDRQDIAMGKMALKRAGVKLMYARESVPEGPEGIILESVLEGLAEYYSADLRQKVIRGMKETAKKGQYCGQSLPIGYKVDAERHIVVDEREAAVVREAFKLHIAGGQIRDIVQLFADRGIMGRRGKPVSNAVVYRMLRNEKYLGEFYIQDVKLNVEPIIDQATFLEAAQHFKTSRNNAAGRAKVNYLLSCKMFCGYCGSMISAEAGTGKLGKVYRYYKCGDKKRGKKCELKPFPKDHLEDAIILATVNDMLTDEMIEKLTVRILEVQEQENADDPVVGLRRRLDSNKKRQRNLLDAIEEGGARGLVSRLAALEEEEERLVLEIQRAEIKRPRLTHEVVEAWLRSFRVGDVTDDDFRARLVDTFIARVELRNDEALIFYNIREKGPHSRVRVRPEWWARQELNPRPVRYERTALTN

SEQ ID NO: 10735 - protein, 517 aa, synthetic construct
MGKRVTTIPATLNLYDSVSLKNPQKRKVAGYARVSKDIEEQATSYAAQVDYYTAYIKKNPEWEFAGIYTDEGITATTTKKRNGFKQMIADALAGKIDLIITKSVSRFARNTVDSLTTVRELKENGIEIYFEKENIWTFDSKGELLITIMSSLAQEESRSISENVKWGKRRAFANGKGSLSFNTFLGYDRGPNGEFVINEEQAATVRYIYEKFLEGFSAYRIAKDLTEMGIKTPGGKEKWANSSVLKILKNEKYKGDLLFQKTYIKDFLSHKSVRNNGEIPQYYIEDHHEAIIPKELFLQVQDEIARRASERDIEGKRKGFSANHAFSQIVFCAECGGQYRRIHWNNRGKKSIVWRCLTRLKNKDKCRARTVKEEVLQEAFLDALNEMLANSNDYLNRLTANLEVAIKHNSTDEKLAEKMKVLQQDLLDRTERRENYDDVATEILRIRELQEQSNMDSVTKAEHKKRIQELQRFIKSQPTAVTKFDESLAKNLLSQIIIHDDFLEFKFKSGVTMSVEK

SEQ ID NO: 10736 - protein, 491 aa, synthetic construct
MYLRKSRQDNPEETVEEVLFRHEVQLQEYAMKNFHYRIKEEDIYREVVSGETIEDRPKMKKVLKLIESSTVKGVLVIEPQRLSRGDMLDCGTIVHVFRYTNTLVVTPPKTYDLTEKYDRKFFEMELSRGSDYLEYTKEILNRGRVLSRKQGNYIGSVAPYGYTKIKNGKEHSLVINEEEAQYVRMAYDLFIQGHGSHYIGEQLEAMGAKPRKAKHFTPANIRKMLRNPVYIGQIVLNRSQSVKVYEDGCLKTKRVYNPDYETVPGKHEPIISNEIFELANSEACRKARVPSSKEIRFIFAGLAKCSVCGGSLGLKIHTGREHPYRVGCLKKKYCTNTSILYEDFIDLVVNALKEQIQDFEVQIETNVYKDAFETQSLLESLTKRLEKTDEKMGQLCQYLEEGMYTPDMFVKRRDTLIQEKDELQKAVREARKKMSGMKDIKEKTSSLHEALNLLRDDSISPRLKNTFLKKIIKVIYFSRINDEIVLKVVLR

SEQ ID NO: 10737 - protein, 522 aa, synthetic construct
MSSVDKTAVIYARYSSHGQTEQSIDGQIAAAQKYAEGKGYTIIHIYADRAMTGRNDDREQFQKMLSDTATHQFGVILLWKIDRFGRNREEIAFNRYRCKKNGVRVERVAEDVPDGPEGVILDSVLEGMAEYYSLQLAQNVRRGQRESAKKSQSNGGTRMIGYKVNPDTKRYEIDPDTAPFITEVFRRYAGGQTMAEIAAWLNAQGLRATRGGMFTVNSLHRLLKNEKYTGVYIFRDIRNEGGMPALIDRATFDKVQEMLKVNRRAPSRVWSRAEYLLTDKLFCGHCGAPMAGVSGHGHTGVKHNYYTCLNRKRKKSCTKKSVRQDVLEPLVLKSIRNLLQDDATLKYIADRVWAEYERSDTSGDTIRALDRQIADVDRALSNVMKAIEMGIINEMTKARMDELTEQKQALSAARADAGLARGFKLTRNMILYFLRKMAAMDISDRDSQKRLIKTFVNAIYLYDDHFDIAFNYTENGKVIVKMQEIDDASTGGAFGCCAQCPTKVKTPAVPRRVFLFWCSVSC

SEQ ID NO: 10738 - protein, 451 aa, synthetic construct
MPNLRRIEAAVPAIREKKKVAAYARVSMQSERMLHSLSAQVSYYSGLIQKNPDWEYAGVYADDFISGTNTVKRDEFKRMLADCEAGKIDIILTKSISRFARNTVDLLETVRHLKDLGVEVQFEKERIRSMDGDGELMLTILASFAQEESRSISDNVKWGIRKRMQNGIPNGHFRIYGYRWESDELVIVPEEAEIVKRIFQNFLDGKSRLETERELAAEGITTRDGCRWADSNIKVVLTNVTYTGNLLLQKEFVADPISKQKKKNRGELPQYYVEDTHPAIIDKATFDFVQEEMARRREMGPLANKSLNTSCFTGKIKCPYCGQSYMHNKRVKNGNIQEFWNCGSKKKKKIGAGCPVGGTINHKNMVRVCTEVLKLDEFDESVFLEQVDHIDVPERYTLEFHMADSSVITKDCPNTGHQDCWTPERRAAKAEFMRKEMARRKERKDEWRREK

SEQ ID NO: 10739 - protein, 523 aa, synthetic construct
MAQRKVTAIPATIKKYTAVPIGSKRKRRVAGYARVSTDHEDQVTSYEAQVDYYTNYIKGRDDWEFVSIYTDEGISATNTRRREGFKAMVADALAGKIDLIVTKSVSRFARNTVDSLTTVRMLKEKGVEIYFEKENIWTMDAKGELLITIMSSLAQEESRSISENTTWGQRKRFADGRASVAYKRFLGYDRGPNGGFVVNQEQAKTVKLIYKLFLDGLTCHAIAKELTGRKLPTPGGKAVWSQTTVRSILTNEKYKGDALLQKEFTVDFLQKKTKKNEGEVPQYYVEGNHEAIIDPITFDYVQAEMARRTKDKHRYSGVSIFSSKIKCGECGCWYGSKVWHSTDKYRRVIYQCNHKYKGGKPCSTPHVTENQVKDAFVRAVNILLSEKEELSANAQMVIAMLCDSAELEKRQAELKEELEVVVGLVERCVAENARVALDQDEYTERYNGLVSRYEAVKGQYDEITQAIADKADRRKLLEQFLQTLETQDTITEFDERLWSSLVDFVTVYSEKDIRVTFKDGTEI

SEQ ID NO: 10740 - protein, 575 aa, synthetic construct
MAYNKLSLPGHIRVAIYVRVSTMHQIDRDSLPMQKQDLIAYAKIMLGTDDCVIFEDAGYSGKNTDRPKFQEMMSQIRAGGFTHLLVWKIDRISRNLLDFATMYNELKELGVVFVSKNEQFDTSTAMGEAMLKIILVFAELERNMTSERVTATMISRASNGLWNGGRVPYGYEWNSESKEFSCNADECNIARMIHDLYEEERSLIREARILNAKGYRTRAGNEWNPVSLLIILRNVFYCGDYRYNVLKEGDRQKVKDESEWITVENHHPAIVSREQKMRIISILDSNSRINKKKNNYKSGKYTHIFSGLVFCGNCGCPMGAAPASLRADGWRYSKYSCPTRRKSSTACIGKSTSDPIVGEFVFNYILNLLNAQRDFSEITSPDEMQDKLLTGNTFSYIDRIQEDGILDLYAVLAAGKVQGAVYGKGANIPSKQEKGSEIASLRIEKQKTERALDRLRNLYLYSEDAMSEKEYLLERTRLTEKLEEINEEIGMMQSDEWQQSVSDETFIARASEFIIAQKLTDRNYINYKRLAQSVDAEVLRSFVTSIIDSIIIQDGKVQRITFKNGLSHTFIFKKS

SEQ ID NO: 10741 - protein, 577 aa, synthetic construct
MSINRNNTSETPKKAALYVRVSTNYQIDRDSLPMQRQELITYAQLMFGINDYVIFEDAGYSGKNTDRPEFQNMMRRIRAGEFTHLLCWKIDRISRNLLDFASMYQELKDLGVTFVSKNEQFDTSTAIGEAMLKIILVFAELERNMTSERVTATMLSRAQNGLWNGGRVPYGYDYDKDSKTFSINQEEAFLVRKMYDLYSEHRSLVMVSRTLNEDGYASRAGNDWSPVSIFIILTNPFYTGIYRYNHYKIPGLKIEKDPSEWIEVPDHHPRIISDEQFDNVNRILQSNSRSKRLPGQQHTSKGTHIFGGLLYCGTCGSQYVSTPSRLLASGYRPSKYACPNLRKKKTCNTKSISDPVIGEFVLNYVLNMMHARAAFSSIHDTSELQDALLNGGTFQNVDHIGKDGLDSCFHMFSSTPLDGKRFRKPKKATTIDPELKRLRAEKRKTERALDRLMNLYLYADNPISEKDFVIRKQALDDYLKEINENLGMIDRGRGIETISDENFIKRASYFIMSKELAGKDYIYFKKLAMDMDAEILRDFFQEIIDSIVMEGSNVKEIVFRNGLAHTFFYKDTEKPEA

SEQ ID NO: 10742 - protein, 521 aa, synthetic construct
MNDTAKTTDINEEPMMKNVCAYCRVSTNIPHQKGSYESQLEYYENMIRSKADWNFVGIYADYGKSGTKEKGRTDFMRMLEDCEAGEIDIICTKSISRFARNTVECIQVVRKLKEMHIDVYFEKERIHTLPEKSELLLSIYSSVAQAESESISSNQKWSIQKRFLNGTYILPNPAYGYCTNANGLLELDQKQAAVVRFIFDEYLEGNGIWRIAKSLNEQKIPTKTGKAAWLGGAIYIILKNSVYTGDLLLQKTYSEDIVPFVRRKNNGEYRQVLIENDHEPIVTHEEYEAVQRMLKQKAKVKKAGKEEQLEEHSEFKGKVICGICGSSYNRQVKKGRTGKSNITWSCARRIQTKDLCENDIIKESQLEQLFITMWNKLSNHCDEILVALMKELEHLKATPMIQKQLEQLDKRIQEQKKQREILNHLASGEMIDSAFYMEQQNMISKNLKEYQREKEQYLQKSRQRKELIQTKELIKQFKKGPQYLEVYDKTLFQAIVKKIIVNPNELVFELTNGLKLTERRK

SEQ ID NO: 10743 - protein, 539 aa, synthetic construct
MNSTATDRKIKIIPPKANMNTEKKKKVKKINVAAYCRVSTAQEDQETSYEAQVAYFTKLITENPSWNLAGIYADDGISGTDMKKRDNFNAMMERCLQKDGDIDLILTKSISRFARNTVDCLSCIRKLKERNIAIYFEKEHINTLESTGELLITILSSQAQEESRNISENVKWGLKRKYEKGEMLVRRMFGYGKGTDGQLYIIPEEAEVVRLIYGKYLEGESLNSIARLLKEKGIKTIRGNIEWNVNSIRTILINEKYIGDAMAQKTFTTDYLTKTRKENQGELQKYYVENAHEAIIPREVFYKVQEELRQRANIYKKSSKKETESKGKHTGKYALSKITVCKECGCEYRRQIWSKYGEKKAVWRCENRLRNGTRYCKDSPTIEENVLHRAVLHAINQVLENKGDFVQTFRKNVVTALTHGTEDSEYAREKKKLQKEMAELIQQQAKQNGDKTAFEEHCQAITAQIEALEMKQIKAASRGEKGRKMEDIENFLDKTNCILTEYNDKLVRQLIENINVVNARKVEVVFKSGITVEEMLPEY

SEQ ID NO: 10744 - protein, 479 aa, synthetic construct
MRGVIYARYSPGPRQTEQSIEGQVADCKYYAEEYGIDIIEIYADRHVSGKSVVGRDEFQRMLRDAEKGRFDCVLVWKIDRFGRDRQDIAMGKMALKRAGVKLMYARESVPEGPEGIILESVLEGLAEYYSADLRQKVIRGMKETAKKGQYCGQSLPIGYKVDAERHIVVDEREAAVVREAFKLHIAGGQIRDIVQLFADRGIMGRRGKPVSNAVVYRMLRNEKYLGEFYIQDVKLNVEPIIDQATFLEAAQHFKTSRNNAAGRAKVNYLLSCKMFCGYCGSMISAEAGTGKLGKVYRYYKCGDKKRGKKCELKPFPKDHLEDAIILATVNDMLTDEMIEKLTVRILEVQEQENADDPVVGLRRRLDSNKKRQRNLLDAIEEGGARGLVSRLAALEEEEEQLVLEIQRAEIKRPRLTHEVVEAWLRSFRVGDVTDDDFRARLVDTFIARVELRNDEALIFYNIREKGPHSRVRVRPEWWR

SEQ ID NO: 10745 - protein, 525 aa, synthetic construct
MTKKSVKITEFSRLENKVAALWTRVSTEKQERNNCSLETQQRICREYAERNGIAIKKEFGGTHESAKTEGQMYRQMIAEVAKDKEINIILVYSFDRFSRAGNEAITTKAYLKSKGIYVVSATQTTDPDSSVGTFMEDMLFLFNQFENNLRRDKCVTGMTECLKRGYWFSNVPLGYDRKKVGREHIITVNEDGKILRNAFLWKANEGLGDIAIVDRLRSLGLTIDRKHLNKILHNPFYCGYIKHSLLGDEIIKGKHEPLIDEATFNKVNSLSSAGYEHREITDEFPLKRHVICSDCGGYLTGYTVKARGRNYYKCNKKGCKSNHSTDKMHSKYVGLLNSYQIPQELIPVLTGVFEKVFKENNDMKTETRRMLLKSQTECNAKLEKLQIRYGLGEISDEVYQTTYKHLNAKIAEIKKGLEEASQNLSNMAKFVDEAIVMSCKLGDLWISAGFESRQGLQKLVFPTGVLFDKEVNDYRTDNENEVFKIFRRISASYKEDKTKATTDFHQLSPSVGMRRLERPTPTSRT

SEQ ID NO: 10746 - protein, 502 aa, synthetic construct
MEIQIREGNSRQKRKLKVCAYCRVSTDADEQENSLENQIRHYEEAITSNPDYEYAGVYSDFAISGFKEKRPGLQKMLADARKGKIDLILTKSVSRFARNTSIVLEATRKLKELNVGVFFELQNINTLSGEGELMLTILAAFAQAESESGSVGAKMVYQRKYEAGIPVQYLERSFGFKKDERGVYIADEEEAVWVRKIYEMAADGYTPAAIKRYLNENGVKTVGGAEWIDSTVFRLIENEIYKGDYIMHKHFVNEERKLVRNRGEVDAWYIEDDHEAIVSPKLWQKAQDALEAKRDYLAESSVIEEFTEENYPYMNRIYCTRCGHPLYKRIYSNGNRLNWGCSGTKRYGKSFCEGINIPDGVLRRAWHFDENMYIGEKQTDKGKKEFTYLKEASWKRRHKKKEPEPIPENTETEYPYREKIFCGLCGSRLVRHVNTKSHKAIWVCNGRKRKGKDFCDGTRVPDTIIKGWGEIKKDIYIQRKDDKNGKKRYSYTSKKPKGADRV

SEQ ID NO: 10747 - protein, 464 aa, synthetic construct
MARSVTVIPARSQKVRTGYKAVQEKKIRVAAYCRVSTDQEDQLHSFEAQVEYYTKYINEHENYEMAGIYADEGISGTNTKKREQFKKMITDCEGGKIDLVITKSISRFARNTQDCLAYSRKLKNLGIGIIFEKENINTLDSTGELLFTILSSLAQDESRNISENCKWGIRTKFKNGEMHLNTFKFLGYDKDENGKLVINKEQAKTVRRIYRDFLIGINPAQIAKELTEEKVPGCLGQTKWYPSTVTGILKQEKHMGDALLQKTYTADFLTKRQVRNNGEIAQVYVKDSHKGIIDKQTWNAVQEEFDRREKFMELHGTDRYSYGADCMPFCEKVFCGECKSLFTRHSWRSRGIVQWQCKNHRKDGKVACTNAYVDNADLEKGFVKAFNRLVTDRDKHMERWQQMKSDGTPLEKIRAGQMMEAVGNEPLTRFVPEIAQLVLCEVTVLGAKKYEFFFLEGSRVKVSV

SEQ ID NO: 10748 - protein, 581 aa, synthetic construct
MAYATKTLAASADDRIVAIYVRVSTGYQVDKDSLPFQKKELKAYCKHILHIDMSRVEIFEDAGRSGKNTKRPAYERMMQKVRAGLVSHVLVYKIDRISRNLVDFSLMYDDFKYNRVTFVSLNEQFDTSSAIGEAVLKIILVFAELERKLTSERVKDIMIGRANEGKWNGARVPYGWDWDSSAGWPVHSKKEAPFARAMYEMYLEVKSTGKIRDYNNAHKIPTKRGGEWTSKTVGDFLRNPMNKGDYRYNYRESARGRKKPADEIVYLEGIFEPLVDPEIWEKVNKIMDINRDQRNIGGSHPIEKNCNVFAGLIQCGSCGSGYLVGKKDKRRKNGFTPSLYYCGAKTRAIHCQNLNVSDVKIGPFVINYISAMVRVSNERRKIKSPEELEEMLLSDKAVFADIMGLSSDSLNTTFELLTGKSATGGALWRADLVDQEGAAADPAEIENLKDQIQKYERAKERLEDAYYFSDDGMSEKEYLEKKNRFDSGRVAAENKLKELTETHIASGVDESSFMKSASAFLLTHKIHAGSHIVYSDLAGMVEEESIKEFFNLVLDHITVKDRRVTEIVFANGLSHKFIYRD

SEQ ID NO: 10749 - protein, 577 aa, synthetic construct
MSINRNNTSETPKKAALYVRVSTNYQIDRDSLPMQRQELITYAQLMFGINDYVVFEDAGYSGKNTDRPEFQNMMRRIRAGEFTHLLCWKIDRISRNLLDFASMYQELKDLGVTFVSKNEQFDTSTAIGEAMLKIILVFAELERNMTSERVTATMLSRAQNGLWNGGRVPYGYDYDKDSKTFSINQEEAFLVRKMYDLYSEHRSLVMVSRTLNEDGYASRAGNDWSPVSIFIILTNPFYTGIYRYNHYKIPGLKIEKDPSEWIEVPDHHPRIISDEQFDNVNRILQSNSRSKRLPGQQHTSKGTHIFGGLLYCGTCGSQYVSTPSRLLASGYRPSKYACPNLRKKKTCNTKSISDPVIGEFVLNYVLNMMHTRAAFSSIHDTSELQDALLSGGTFQNVDHIGKDGLDSCFHMFSSTPLDGKRFRKPKKATTIDPELKRLRAEKRKTERALDRLMNLYLYADNPISEKDFVIRKQALDDYLKEINENLGMIDRGRGIETISDENFIKRASYFIMSKELAGKDYIYFKKLAMDMDAEILRDFFQEIIDSIVMEGSNVKEIVFRNGLAHTFFYKDTEKPEA

SEQ ID NO: 10750 - protein, 573 aa, synthetic construct
MAYNAQNKTGARVAIYVRVSTLHQIDRDSLPMQKQDLLAYAKLMLNTDDCVIFEDAGYSGKNTDRPKFQEMMSQMRAGAFTHLLVWKIDRISRNLLDFATMYNELKALGVTFVSKNEQFDTSTAMGEAMLKIILVFAELERNMTSERVTATMISRANNGLWNGGRIPFGYDYDYETHEFSVNEEESKVVILMHDMYEQERSLVRVVRELNERGYRSRAGNLWSPVSLLIILRNVFYCGDYRYNMLKEGDRQKVKDESEWVTVENHHVAIIPKDQKERIVATLDSNSKLCKQRNIYKSSKHTHVFGGLIYCGSCGKPLGSTPGNLTRDGWHYSKYTCPTRRKSVTLCTGKSTSDPIIGEFVFNYILNMLNAQNDFEKISSPEELEKLLLIGDTFAYIDHIEPNGLNDLFNVLSSGAVKGAVFGKGASLPTKKATVEPEVARLRNEKQKTERALDRLRSLYLYADEAMSEAEYMIQKNKLEETLEDINDQIGMMNTDSWQQSVSDEEFIQRASEFIIAQKLSGRKYVNYKRLAMSVDSEVLKNFVVSIIDSITIQDGLVSNIVFKNGLCHTFIFR

SEQ ID NO: 10751 - protein, 563 aa, synthetic construct
MDEKIVALYVRVSTGYQVDKDSLPFQKKELRAYCEHVLHINKKRIEVFEDAGRSGKNTKRPAFERMMEKVKSGQVSHVIVYKIDRITRNLVDFSLMYDDFKYNNVTFISLNEQFDTSSAIGEAILKIILVFAELERKLTSERVKDVMIGRAQNKQWNGARVPYGWDWDAEKKCPVHSKKEAPYAKAMYQMYLDGGSSVTICDYNNSHNIPTKRGGEWTSKTVADFLRNPINKGDYRYNYRESARGKKKSDDEVIYIKGVFPPLIDPNIWDEVNRRMDANSQNRNTSVFHPIRKRCNVFAGLMICGKCGSGYQVKGKDSRKGDGFRPSSYACTGKYQKKNCDNLNVSDVKIGPFMLNYIAAMVDASKSRRFIKDSESLERVILSHISFSDVAGISVSSLQDTLDLLFGRSGSELLSGKPISSGATDESKTTELKEKLQRTDRALERLKKAYLFDDDGMDEKEFLEMKSKLEVDRIKLENSIKGLESSSISENVDQAAFLKSASQFLISHKINSGDYIDYSRLAALDEESMKAFVNSIVDHIVVLDKRITEIVFKNGLTHTLLYR

SEQ ID NO: 10752 - protein, 523 aa, synthetic construct
MRFFSYGRKSVFSDKSDSIDNQFRMNREYCKSKFSGRVDSWQQFSDEDFTGANTSRPDLQRMLSFIKGGFCDVLVVYQLDRLSRDVRDFANIYALLEEHGVMFISIKENIDTTTPIGRAMMYVTVVFAQMERETIAARVTDNMLGLAKKGYWTGGNPPVGYVRKHIVVNGKKHCSIEVDPDGARYVTQIFDTFLAYNCSLQGMETRFKNQGIRTQNGKFFSTAQLHKMLTMPYCVEATPEVYDFYAAKGCIMDPGSPREMWDGSVGVIIYGRSTEKNKKHQAQPPEKWTVCLGKHKPFMPAEKWLAVQSRFTQNKCIKDAKWPVPLLKGVLRCKCGNLMQVSRKKKVDGTCSSWYYCRKRMRQGVDACDMGQIKCDLLDEEVLELFRGITADPALIQKFVKAEAPADVPDLKAAQARVSACERKIGRLAASLALAEDSAASKYIIAEMERLDVELGALKREASLTEMESHQAAASAKDAKATAAEIAKLIHGLDGFDDKEKNAIARAVIQECTWDGERLFITL

SEQ ID NO: 10753 - protein, 526 aa, synthetic construct
MQYCLYLRKSRADSEAEARGEGETLARHEKALLDIAKKLNLNITAIYREIVSGETIAARPVMQQLLQEVEQGIWDGVLVMEVERLARGDTIDQGIVAQTFKFSDTKIITPIKTYNPNNEFDEEYFEFGLFMSRREYKTINRRLQRGRMASVKDGKYVANKAPYGYNRIRIENDKGWTLEINKEEADVVRLIFELYTVGEKQSDNTFNRLGTGFIAKRLNAMKVPPKRGKVWVVASIRDILINPVYIGMIRWNWRPQQKKMIDGQLHISRPRATDYLLCKGLHPPIISKETFNIAQDLMRHNPARPIGEKNTVKNSLSGIVVCGNCGRHMVRRPHTKYPDMLICSEPTCNNVGSQLRVVEERILQSLKEWLGEYKISWDITSPPVERISQVSIKKKALQKEQHELDTLNKQISKTHDLLEQGIYTTDVFLERSRALSLRMDEVKEHIAILDKELKTEITREDSAVNIIPKVEKLLEVYHDLPSPKAKNDMLKDVLEKVVYTKKERSKKGNLDNFNIAIYPKIPKYIT

SEQ ID NO: 10754 - protein, 526 aa, synthetic construct
MINMVSFDNIIIYLRKSRSDDPAQTVEEVLAKHERILQDYCIKEYGKVIPEKRIYREVVSGETIQDRPVMQKLLKELETNNIYGVLIVEPQRLSRGDLQDCGQIINSFRYTNTAVITPGKTYNLQDEYDRKFFEMELTRGNDYLEYTKKILNRGRVASVKQGNYICSVRPYGYKKVVIGTGKDKCHTLEIIPEEAEAIKLMYHLYLDENMGFTNIARTLDSMHIKPLKSSNWSAATIRDMIDNPIYIGKIVWNNRKVVKKWENEQIIKVRPRNKGDDVICVDGKHEAIIDEETFNAARQKRGLTPKVRKFKELRNPLAGILFCSTCGHSMSMKKYVDKRSHTGKVTTIMLCNKQAVCHTKSAQYEQIVAKIKESLADAIANFEIKMKEQENNNIDIHKQRITSLKDELNRLYNKDVRQKDAFEDGIYTKEEYIERNSKLQSQILNIKAEIENEKNNTPVIIDYQNKITTFTECLTSLDDDSISAADKNSLLKNCIDKIIYHNDMPSLPGIGRYIENSFRLEIFLKM

SEQ ID NO: 10755 - protein, 523 aa, synthetic construct
MREFKQEELLPAVAYYRYSPGGGQTEQSIEGQRRDCMAYAKSHGYVIVKEYIDRHLTGRNDKRPAFQMMMQDAQLHRFTTLIAWKNDRISRNRRDALNYKDQLKKCGVQICYAEMDIPKGPEGILMESLMDGLAEYYSAELSQKIRRGMTESAYKCHALGSYPPFGLMVREKKFVPDPQTAPYVRWIYEQYAQGTQIKTICDALNAKGLRTRRGGEFNKNSLRRILSNKKYIGIYEAKGIRTENAIEPIIDRDLFDAVQARIPLNNHQGGRTGAKRIYPLSGIAYCAICGAPLIGDQGTGRAGRTYSYYACTGKKHRRHCNKKNVRQEVLDDAVLHTTLDYVLAPSVLPQIAAQAAAASASNDTTRAELNAAQAALDDTNRRINNILTAMEDGSFSKAAASRLTVLESEQSRLEAQIKALKRKRPTLSPNRIEFFLESMSQRTGELPQDYLNRIIKIFVSRVDLSNEDLKITYALTKKTAIPHGTAVNSATNKERTIELNPCSTVALSGGADGSRTHVRKEIS

SEQ ID NO: 10756 - protein, 463 aa, synthetic construct
MRRKTTAPVEKILLRVAIYIRVSTDKQVKDGDSMRDQLATGQKYIDSHENMILVDTYIDDGISGQKLKRDDFQRLIDDVRAGRIDLIIFTRLDRWFRNLRHYLNTQDILDKHGVSWTAIEQPYFDTSTPHGRAFVNNSMIWAELEAQNDSDRILGVFDDKVDNGEVLSGSTPLGYTIVNKHLVPDDDAPTAVAIFQYYRKTGNLSMTLRYMESEFGLVRSAASLKNMLTNTKYIGEFRDNKNYCPAIIDRDLFFDVQRLLKINIKSGKKHDYIFSGLVVCDDCDHIMSGCQQRAKGRVRADGTQIVYKYSVYRCRQGVNLHRCPNRKLVFETTLEKMLLERIRPELENYIAEYEVANLPALRTDAKRRSVEGKMQKLKDLYLNDLITMDEFKLDREKLLMQLEKINAEDSRPVKDLSYLKNFLKMDFESVYDSLSILERRELWRSIVKEIRVDHDKNIHIIFL

SEQ ID NO: 10757 - protein, 526 aa, synthetic construct
MANVTVIPATRNFHTGIRKDAVVQKKTAGYARVSTDSEEQQTSYEAQVDYYTNYIKNNPEWEFVGVYTDEGISATGTKHRDGFNQMIQDALDGKIDLIVTKSVSRFARNTVDSLTTVRKLKEKGVEVYFQKENIYTLDSKGELLITIMSSLAQEESRSISENVTWGQRKRFADGKVSIAYSSFLGYQKGEDGQMEIVPEEAEIVRLIYRMFMQGKTPYAIAKYLMEKKVPTPTGKQRWQHRTIENILTNEKYKGDARLQKCYTVDFLSKKRKVNEGEVPQYYVEGSHDAIIAPAEWQMVQLEMERRRNMGRSHNCCGTFSAKLKCGDCGEFFGSKVWHSNSKYKRTIWQCNAKFKGESKCTTPHLYEQRIQELFLEALGRLLENRETVMDDCRAVMDVLGDCSTIEKELESVSSEMEVVTGLIQKLIVENATRKLDQNDYRRKYEGYVNKYAALESRMDSLKKDRESREIKFGIFSGFLFELSELEELPLEFDVKLFHSLVDYATVYHDGRVVFAFRNGTEVETRI

SEQ ID NO: 10758 - protein, 498 aa, synthetic construct
MEIQIREGNREQKRKLRVCAYCRVSTDADEQENSLENQIRHYETVIKANPSYEYAGVYSDFAISGFKEKRPGLQKMLADAQKGKIDLILTKSVSRFARNTSIVLETTRKLKELNVGVFFELQNINTLSGEGELMLTILAAFAQAESESGSAGAKMVYQRKYEAGIPVQYLERSFGYTKDERGVYIADEEEAVWVRKIYDMAAQGYTLAAIKRYLNENNVKTVGGAEWLDSTVLRILENEIYKGDYIMHKYFVNEERKLVRNRGEVDAWYIEDDHEAIVSPELWQKAQDALEAKRDYLAEGSVIEEFTEENYPYMNRIYCARCGHPLYRRIYSNGNRLNWGCSGTKRYGKSFCEGINIPDGVLRKAWHFDGNMYIDEKPSVKGTKEFTYLKESSWKRRHKKKVPEAIPENTEEAYPYRKKIFCGLCGSRLVRHVNPKSHKVIWICNGAKRKGVAFCRGTRIPDSVISGWGEIKKDIYIQRKDDKNGKKRYSYTSKKPTA

SEQ ID NO: 10759 - protein, 464 aa, synthetic construct
MARSVTVIPARNRQRETGRRAVQEKKIRVAAYCRVSTDQEDQLHSFEAQVDYYTKYINDHENYEMAGIYADEGISGTNTKKREQFKRMIADCEGGKIDLVITKSISRFARNTQDCLAYSRKLKNLGIGIIFEKENINTLDSTGELLFTILSSLAQDESRNISENCKWGIRTKFKNGEMHLNTFKFLGYDKDENGKLVINKEQAKTVRRIYRDFLIGINPAQIAKELTEEKIPGCNGQTKWYPSTIVGILKQEKHMGDALLQKTYTADFLTKRQVKNNGEIAQVYVKDSHKGIIDKETWNAVQEEFERRERFMKDHGTDRYSYGADCMPFCEKVFCGECKSLFTRHSWKSRGIVQWQCKNHRTDGRVTCSNAYVDNSDLEKGFVKAFNKLVADREKFMERWSQMKTDGSPLEKIRAEQMMEAMGNEPLGRFVPEIAQLVLAEVTVLGAKKYEFFFLEGSRIKVSV

SEQ ID NO: 10760 - protein, 563 aa, synthetic construct
MESSKAKKAVLYVRVSTQHQVDKDSLPMQKQDLTSYCKYVLGINDFVILEDAGYSAKNTDRPAFQEMMSRIRTGEFTHILVWKIDRISRNLLDFASMYAELKELGITFISKNEQFDTSSAIGEAMLKIILVFAELERNMVSERVSAVMLDRAKNGAWNGGRSPTGYRIENGKYVIHEEEAAIVRMLFDECEHGKSLIQLAKVINGMGVKPRYGKVWHESAIRKILTNKTYYGALEYSTKKGGEVLIENHHQPLITYEQYEKCRSIMSSRSRKKGFAAKSYTRKHTHIFAGLVTCGYCGGHLVAQLDKARREGDYRPSYYICTGRRNLKICKNKLVPDMIIGQFVLRYLSNLLRAYRHFNENTTLEDVRQTILSGLEAFGVIGISENGLSETFNAYLNSDGTQNAFTYRPKLELGGDQNSEASALVNTISKESRALERLTQLYLYSESPISESEYSKERKELEKRIYDAKVRLERIQVAEVQCNKLKDEWRTQASYLILTKELMDEQQTDFSLLLRALDKQVLKDFVQATIQNIVIKDRRIEQITLMSGITHEFVYCNETKKEG

SEQ ID NO: 10761 - protein, 511 aa, synthetic construct
MNTVIYARYSAGPRQTDQSIEGQLRVCTDFCKQRGLTVIDTYCDRHISGRTDERPEFQRLITDAKRKKFEAVVVYKTDRFARNKYDSAVYKRELKRNGIQIFYAAEAIPDGPEGIILESLMEGLAEYYSAELAQKIKRGMHESALKCQSTGSGRPLGYRVDEQKHFQIDPESAQTVQTIFEQYIKGESNAAICELLNSRGLRTAQGKPFNKNSINRIIKNRKYIGEYRYHDIVVEGGMPAIISKDTFNLAQAEMERRRTRKAPKSPKAEYLLAGRLFCGHCKGPMQGVSGTGKSGNKWYYYYCGNTRGENKTCDKKQVSRDRLERTVVDFTVRDILQEEVLEELARKVHAAQERQNDTASEIAFYEKKLADNKKSIANVLRAIESGATTQTLPARLQELENEQAVILGEISFLKGKRLAFTEDQIFFALMKHLEPYPGESEQDYRRRIISDFVSEVYLYDDRLLIYFNISSEDGKLKSADLSNIEGGEFDEGLVSSTTSEQALYRLLRLIL

SEQ ID NO: 10762 - protein, 503 aa, synthetic construct
MLRAALYARFSSENQREESILAQFRDSTEYCKKHNYAIVAKYADEAKSGTTTIGREQYKLMLKDAQKGKFDVVVFHKIDRNARNELDYYITKHKLEEAGVKYAYSRQDIDSTSPEGQMMESMLVGMAAYYSRNLSNEIKKGLRENAIQGKCTGGRPPYGFSIDPDKKLIINDKEAAAVRMIFDLYSAGVHYGVIRKRLFNAGYRNRAGKEFTIASIYEILRNRKYVGDLYLGKTLFRKGKRNTHQTSANVQYFENVIPAIVSREIFEEVQVKLDQNKRRSGAGKAKAIYALSGLIYCGKCGSAMVAHSTKNSRGIKNYYYRCPKGRLVGDEKCPQKFINRDDIEETVYQLIRKLFTAPDAHDQIKRIIAKNNMGVKVPDYTDQVKRLKKQESDASKRLDKLYDLYMTDREDEFTSAKMAQIKEEILRLRTQIKEAEDRQAIAQSTTFDIDKIIDTFQKQLKQKQSPEFIKTLFELAVKNVTVYPDKIKVVLLVTQERFELPTP

SEQ ID NO: 10763 - protein, 504 aa, synthetic construct
MEIQVLEARSLKDYRKKVCAYCRVSTDALEQENSLENQIAYYENLIQSNPEYEYAGVYYDYAISGYKEKRPGLQKMLTDARNGKIDLIYTKSVSRFARNTAIVLKASRELKELNVGIFFELQNINTLSSQGELMLTILAAFAQAESESGSVGAKMVYQRKYEQGIPVQYLERCFGYSKNEKGEFVPDTEQAKWIVKIYEMAAEGYSLSTIADEMNAAGVKTDKGAGWVESTVKRILENEIYKGDYIMHKNYVNEERKLVRNRGEVDAWYIEDDHPPIVSRQLWDKAQEARKKKRDYLDMDCQIREVTEENYPYKGHLFCAKCGSPLTHRIYSNGNRMSWDCSGRRRHGKDFCTGIHVPDTAVRQWKFDGNIYISVKDSRKSIKEFSYTKESSWSRRHKKKEFVRDVPELTEENYPYYRSIFCAECGSRLVRHIKKHGDIVWECNGRKRKGATYCEGVRIPDRVVQAFMPIRKAIYIKERKGRNGTKHYSYSCKKPERATRKEQG

SEQ ID NO: 10764 - protein, 435 aa, synthetic construct
MAAYCRVSTDQEDQLHSFEAQVEYYTRYISDHPNYEMAGIYADEGISGTNIKKREQFRRMISDCETGKIDMVITKSISRFARNTQDCLQYSRMLKNLGIGILFEKEHINTLDSSGELLFTILSSLAQDESRNISENCKWGIRSKFKKGEMHVNTHKFLGYDKVDGKLVINEREAKIVRRIYREFLWGHSPQEIAKGLEDEEIEGCMGAKKWYPSTVINILKNEKHMGDALLQKSYTADFLTKKQVKNHGEVTQVYVKGSHIGIIDKETWNAVQLEFARREEFVKEHGLKGYGYGRECNPFTSRIFCGECGSPYTRHTWRSRGIMQWQCKNHMTNGKVTCVNGFVSQNDLELGFVKAYNMLLKHKEILIPRWKDTIETGNALEKLRAKQFLDLSEQPELECYVPELAQLVIQRVIIKGTKKYEFTFMDGRRETVCV

SEQ ID NO: 10765 - protein, 523 aa, synthetic construct
MRFFSYGRKSVFSDKSDSIDNQFRMNREYCESKFSGQVDSWQQFSDEDFTGANTSRPDLQRMLSFIKGGFCDVLVVYQLDRLSRDVRDFANIYALLEEHGVMFISIKENIDTTTPIGRAMMYVTVVFAQMERETIAARVTDNMLGLAKKGYWTGGNPPVGYVRKHIVVNGKKHCSIEVDPDGARYVTQIFDTFLAYNCSLQGMETRFKNQGIRTQSGKFFSTTQLHKMLTMPYCVEATPEVYDFYAAKGCIMDPGSPREMWDGSVGVIIYGRSTEKNKKHQAQPPEKWTVCLGKHKPFMPAEKWLAVQSRFTQNKCIKDAKWPVPLLKGVLRCKCGNLMQVSRKKKVDGTCSSWYYCRKRMRQGVDACDMGQIKCDLLDEEVLELFRGITADPALIQKFVKAEAPSDVPDLKAAQARVSACERKIGRLAASLALAEDSAASKYIIAEMERLDVELGALKREASLAEMESHRAAASAKDAKATAAEIAKLIHGLDGFDDKEKNAIARAVIQECTWDGERLFIKL

SEQ ID NO: 10766 - protein, 499 aa, synthetic construct
MIAIYARQSLDKKDSISIETQIELCKKEIGDEPYKEYVDRGYSGKNTNRPQFKAMMQDVENGVISKIIVYKLDRLSRSTLDFGELMDALSKHNVEFSSTREKFDTSTPIGKAMLNIIMVFAQLERETIQVRVQDNFRMRSSRGAYDAKAPYGYAKTKVMVQGKAVSTLKPDKAYSLMVKKIFEQYAYTSTSLGYLARTLNQQGIKSANGAAWDSCKLSKLLCNPIYVKADAEVYKYYRAKGMEITNDIDDFRGQYGCVTYGQWDRAKNKFAQLSGLTLSIGLHEGIIDAKTFLACQYKLADNTQINNTGRGKHSWLTGLLKCGCCGKAMKVMTYKDTATFRCSGAMNTGLCSDSPSVCVHEMEEAVEREIFAHVARHQELVVQKRKEEDNKAHNYKIAIAKLDDQIANLITALADGTELTMKYINGRISELQKQRDILAAELQQHKNATKQQDDIKQFHDIINLWPGMTIPQKHEIAMMLIKRVEIQEDTTRIYWKYDL

SEQ ID NO: 10767 - protein, 526 aa, synthetic construct
MKMKRVICLYRVSTVGQVDHDDIPMQKIACREYAATHPDWEIVDEISEKGVSGYKISTNARDAIIEIKKKAINREFDVLLVFMFDRLGRREDETPFVVQWFVQQGIEVWSTREGEQRFDNHVDKLLNYIRFWQASGESEKTSIRVKTKHIQMVEAGQYRGGYVPYGYKLEHQGRTNKKNQPVRDLVIDEDEAAVVREIFHLLTDEGYGTVRVANYLNDKGIKTKRGKSLWRGTSIRALIDNPIYIGIYHMDGAQSQPFDHLKIVDEAMFERCQQTVKGRATCLGDKMTMPVRTDTRSLLSGIIYCADCGSRLAYSHNVTRRKLADGTERVYERECYRCYRKINARETCDGQSSYNAETINETVLYEVRRILNAIKSKPEAALLEKAKECTTGVNEIAYRQAEADFFEAHKQITALEDQTMKFLTGENTVDISIINAMMPKYKEKLANAQKRMDETRDKMEAEKATAKNAVQEVTDLLSWAEAFDDATIEEKHMIIARLVERIDIGHDYEIEMKFRISVEQYMRIAA

SEQ ID NO: 10768 - protein, 523 aa, synthetic construct
MRFFSYGRKSVFSDKSDSIDNQFRMNREYCESKFSGQVDSWQQFSDEDFTGANTSRPDLQRMLSFIKGGFCDVLVVYQLDRLSRDVRDFANIYALLEEHGVMFISIKENIDTTTPIGRAMMYVTVVFAQMERETIAARVTDNMLGLAKKGYWTGGNPPVGYVRKHIVVNGKKHCSIEVDPDGARYVTQIFDTFLSYNCSLQGMETRFKNQGIRTQSGKFFSTTQLHKMLTMPYCVEATPEVYDFYAAKGCIMDPGSPREMWDGSVGVIIYGRSTEKNKKHQAQPPEKWTVCLGKHKPFMPAEKWLAVQSRFTQNKCIKDAKWPVPLLKGVLRCKCGNLMQVSRKKKVDGTCSSWYYCRKRMRQGVDACDMGQIKCDLLDEKVLELFRGITADPALIQKFVKSEAPADVPDLKAAQARVSACERKIGRLAASLALAEDSAASKYIIAEMERLDVELGALKREASLAEMESHRAAASAKDAKATAAEIAKLIHGLEGFDDKEKNAIARAVIQECTWDGERLFITL

SEQ ID NO: 10769 - protein, 523 aa, synthetic construct
MAKSVTTIPATLSRFTAAPINSTKKRRVAAYARVSTDNEEQLTSYEAQVDYYTNYIQGRDDWEFAGVYTDEGITGTNTKKREGFKSMVADALAGKIDLIITKSVSRFARNTVDSLTTIRKLKEHCVEVYFEKENIWTFDSKGELLLTIMSSLAQEESRSISENCTWGQRKRFADGKVTVPFKRFLGYDMGPDRNLVVNPEQAKLVKRIYGMFLLGKSPFQIASTLTEEGIPSPGGKDHWNASNIRSILTNEKYKGDALLQKTYTVDFLTKKKKANEGEIPQYYVKDNHEAIIDPETFEMVQTLMSTRKKGRNRKSSVSIFSSKVKCGDCSSWYGPKVWHSNDAYRKVIWQCNHKFDGQKCATPTLTEDEIKELFLRAANQVIDQKEQFIAIYEQVLSRSLDTTALEGELNELEAEINIAAELIEECIKENAHVALDQAEYQKRYDGLVARFDKAKARHTEVTDLIAERMARRHQIESYLNELRNLKPLTEFRETDWLAMVDYITVHRKNDIRVTFKDGAEIKA

SEQ ID NO: 10770 - protein, 575 aa, synthetic construct
MKTVEKIERKLPVLKTRKRVAAYARVSMESERMQHSLSAQVSYYSALIQKNPEWEYAGVFADYGISGTGTKKREELNRMLAECEAGNIDIILTKSIQRFARNTVDLLNMVRHLKDLGIEVRFEKENINSLSGDGELMLSILASFAQEESRSISENVKWGTIKRFKQGIPNGKFSIFGYEWQDDKLVIVPEEAEIIRWMYAEYMKGASRIEIGRALMDRGIYTRQGKPWVDSNVKVILTNITYTGNMLFQKEYCEDPITKHRRKNYGEMPQYFVEDTHEAIIPMDEWQAVQAEFKRRRDLGPFGNKSLKLSAFSTKITCGCCRKHYRHSGKRNTAGEVYYIWTCQTKSQKGASACPSKNIPEKMLQNTAAEVLGLDEFDEDVFSQQIEEVIVIGDDTLTFRFYDGHEVTTKWQSTAKTDWWTDERRKLWGERHKRKDTNPNRHLFYEFTGFIKCGCCGANYRCQSGKRKDGTPTRSWYCTGPKDKCHNPGIRDETMKRLVTDVLGLDEFDEAAMDAQIENATILDHTVTFHFRDGHIESRDFLDKRHGTPWTEERREKAKKIHEGRLDRRAQGGNE

SEQ ID NO: 10771 - protein, 507 aa, synthetic construct
MPEALNAVIYARYSSDRQTEQSIEGQLRECYAFAKANDIAVIDTYIDRAISGKTDNRPAFQKMIEDSAKRQFQAVIVYRLDRFTRNRYDSAIYKARLKKNGVKVLSAMENLNGSPESIIMESLLEGMAEYYSVELSQKITRGMRENALKGKALGGQRVLGYKVNSDCYFEIDETTAPVVVDIFKLYSSGKTVKEICDILNARGVKTARGGAFNKNSLHTILTNKKYIGIYKTKYGEIVGGIPAIIDKELFEMVALRMEQNKKAPARAKAEINYLLSTKLFCGKCRSAMVGESGTSKTGKKYYYYACVKKKREKACDKSNVKKDWIEDLVIQRTVTDILKDDVIEKIADRLVELQKAEAAESGTMLYLENSLAEIQVSIKNIMTAIEKGIITESTKTRLTELEDEKRNVEIEIAKESIARRIISREQIIYWISSFKDGDITSEKYCQQLIDTFVHAVFVYDDKIVITYNYSGENNTATISDLDLSSPPNRYWTNTYFFSGGFAVKCSL

SEQ ID NO: 10772 - protein, 540 aa, synthetic construct
MENFASTKPKIRVIPAKTRQELVSTSVGKRQEKLRVAAYARVSTEHEEQESSYEAQVKHFTKLIAERQDWEMVKIYADPGLSGKNIKRPEFLKLMKAREDGLVDKIITKSVSRFARNTIDCVESVRKLRNMGIGVYFEKENLDTLHENSEFVLTIMASLAEEESRSMSNNIRWSVRKKFEQGKVILNTARFLGYKREKNSNILEIVPEEAITVRRIYREFLAGASLKDIADALERDSIPSPSGQSKWHVSTIRSILTNEKYQGDCHLQKTYLPDFLSPRRVENVGQADSWYVEDSHAAIITREQFTLVQEEFKRRKSLRASTETGNGKFSGKYAFSGMIVCGECGETYRRHQQYNQYKVYPTWACKVHENTGAKHCTAKPIKEKALEDAVVRAINKLLDNKEQFLTELKATVLEVMLDDSNDPIVRIDTEIAELQNDITVALEHMQKAEITVEEYKTLVDGYKRKIDVLNLDKEEIIFENGEMQLLEYRIAEVEDLLGNGRILEEFDKNVFKGLVQRIIVLSQKEIQIDFKCGITVKETL

SEQ ID NO: 10773 - protein, 528 aa, synthetic construct
MKFLDVAKLLNVCIYLRKSRADREAEARGEGETLARHERILLDLAKKRGYNVGAIYREVVSGETISARPVMQQLLQEVEAGKWDGVLVVEVERLARGDTIDQGVVSRAFQFSNTLIITPMKTYDPNNEFDEEYFEFGLFMSRREYKTIKRRLTAGRESSAKEGKYCGSKPPYGYSRVKLEGEKGWTLRPLPEQAEVVRYIFNLYVNGDCGQRVGMSKICRKLNDTGIKTMDGGLWTVPRVQAILRNPVYAGMIRWNSRKAIRHIQNGEIVISRPFTQDHILVEGRHPELVSKDLFRQAQEIVNKNPARPVTSLHVLRNPLAGIICCGKCGHIMTRKAPSKRQGDLLQCAYSSCDNISSKLPLVEKALVDGIQELVNGYKLNSNTSEQGHLCSISEKEKMVQKKQDEIENLRKKKERQYDLLEQGIYSTEEFLERSQNTAREIADCANSINTLQQEIQYEQALYLQQSSFIPKCENLLANYWSWDVLTRNQFLRELIEKAVYTKNTKNTWKNGDNISFSLDIYPKIQRK

SEQ ID NO: 10774 - protein, 524 aa, synthetic construct
MLMIADYSRKSVYSDKSDSTQAQYNLALDYCKGHYNDYEVIRYEDEGYTGANTDRPAFSCMVNDIKDGKINIVICYKIDRVSRDVKDFSNFFSFLQDHNVEFVSIKEQIDTSTPLGRAMMYICSVFAQMERETIAERVKDGMTDLSKTGKWAGGRAPLGYKRERVEISGKSHTVLIPDAQGCKLLNLISDTFLDTGYSLTQLERYCRENNITTSRGAYFSSSQIWTILKNPIYCTADQAAYDYFEGLGCQMGVDRDKFDGKRAIMSYGRTAGGKRKKHVVNPPEKWVISVGLHAPLWTSEKYIAIQDRFGNNQIDKARKHKIGILKGVVKCKCGYTMRVQHKVDNANGKIYDNYFCSLRNRRGKSFCDMHFTPVSTLDDAVIEILKQIKLDKSMIDNFIVDDSKINVAYRSRSDVQRDIDRIDGKILNLTNALGNASGSTASKYIVQEIERLDRELSGLKYELLEISTNEKKRNRANYDRELKYKMVCDIVDNLEYADYDEINGLLKDLFKECVYDGQTLHIKI

SEQ ID NO: 10775 - protein, 532 aa, synthetic construct
MVLLDTYCIYLRKSRADAEAEARGEGETLARHEHTLCDLAKRQKLHISKIYREIVSGETIAARPQMQQLLQDVESGIYAGVLVMEVERLARGDTIDQGIVAQAFKYSGTKIVTPTKTYNPDNEFDEEYFEFSLFMSRREYKTIKRRMQAGRAAAAKEGKFVGNIPPYGYDRKKLDHDSGFMLVPNEKAKIVKIIFEWYTVGVVMPDGTRQRIGTTHIANRLHQMGIKTPRGGRWNNYSVRSILLNPVYCGVIRWGYRRGKSKLQNGVITKTRPTAEDGYIEAKGLHEPIISQDTYETAQELAHAAAKIPKVKLGGALKNPLAGIVVCRKCGKSMGRQPYTSEKYSGEMLICKNPDCRCVSSDIHIVEQRLLDSLAEWLHQYEVQWKEHTLQAAAAEPKDDQTAVLEDLRKEQAKAKAQLAKAYDLLEQEIYDTNTFVERSSILKAKIADLQDSIDHVEKSVREMSSRDDDMQKIIPKVKHILEVYSTLPDASAKNQLLKEVLEKAEYSKDHSTRWHGNPDDFDLVIFPKLPR

SEQ ID NO: 10776 - protein, 519 aa, synthetic construct
MKKVTKIENNHPSKAVKKKIRVAAYCRVSTASDAQLESLETQKSHYESYIQSREDWEFAGLYFDEGITGTKADKRPMLMQMIADCKAKKIDFVITKSISRFSRNTTDCLELVRTLLNLNIPVFFEKENINTGSMESELFLSILSSMAEGESASIAENNKWSIKKRFENGTYKLGCVPYGYSVTDGILEIIPEEAKVVKRIFSSLLGGKGTDAIAKELNAEHIPARKGNHWSPATIRGIIANEKYTGDCIFQKTYTDDNFNRHTNDGVLDQYYMANHHEAIISHEDFEAAAALIEQRAAEKGIDKGNPKYQQRYAFSGKIICHECGNTFRRRIHSSTYGKYAAWCCNTHIEDTNKCSMLFIRDEDIKVAFATVLNKLIYGHNLVLKPYLQASKHNSNDANILRIQQLESLLEQNAEQRETLHKLMGQGYIDQILYTQENNALLSQADGYRQDIEVLNQFMSGSSTRIYETERLLHFCEHEDMLKEYDENLFEIFVDHIEVYSRNEIGFVMKCGLTLKEMI

SEQ ID NO: 10777 - protein, 541 aa, synthetic construct
MEKDKKVTALYCRLSKDDGSAHESLSIRTQKAMLMEYATRNGFGNCQYYVDDGYSGTNSDRPAFQELLDDIRDGKVATVITKDQSRLGRNHIETGTYMEIFFPEHGVRYIAINDGYDSNEQSQMDIAPFRNIINEMYAKDTSRKIKSALRTRKKSGKYISSGAPFGYQKDPADHNHLVIDPNTAPVVEYLYSLAEEGLGLHRIAKRLHDEKILKPCYYKKEMFGRFVDDEKMYDWDSAYVSQILHSPVYAGHIIYEAKPTVSMKSKKRRYIPFEERAIVPNTHEAIIPQDRWENVQRILYSRSGSFMCDKTEYDNIFKGIVRCADCGRTMLVKVEARRKRNNILDQTFYCCSTYRKYGAKACASHNLEARVLHEAVLADIQAHAKAAVGNRDALVRKIADQMHLRVSSDRAQHKRELKQCKARIAEIEDLYAKLYEDVSKGLLPEKRFQMLADRYDKEQAELTEKIEQYEQEGRAEHDQMDKIQDFIDEVSKYAGITELNYKILHQLIDKILVSKAEKVDGEYVQKIQIFYRFIGPLDAIE

SEQ ID NO: 10778 - protein, 572 aa, synthetic construct
MASRIAEKLAAKKAAIYIRVSTHWQVDKDSLKVQRRELIAYVTLVLGITDYVVFEDPGYSAKNTDRPEYQAMMDRIRTGEFTHLVVWKIDRISRNLIDFAAMHDELQSLGVTFVSKNEQFDTSSAIGEAMMRIILIFAELERKTTAERVTAVMLSRASDGQWNGGRVPFGYSWSKEAKTFSIVPEEAKAIRRMAELYEQYQSLLYVAKYLNDAGIVTKTGGQWTPTTVRTILTNPWYIGQYVYNVHSDGKGIEKRDSDEWITVENHHEPILNEDVFCRMKFLLTRNKRGGVPSHKTYVRKNIHVFAGLLRCGQCGSNMTANLDRRRANGFRPSQYACGSRRRKGTSCTNKYISDTTLGPFVLNYVANIIRASKNSSDTTTPEVLERKLLRGEAFEDVVSVSTDALGQLLDAFRSAGDAVEYRPQIAFSGDDNSIREIDALRARRRKLDNALARLNALYLYDDEAMPEKDFVMQRGQITKQLEEVNARIEELQNQESSEELGDDFIGKASYYIMANKLIEDRYIDYEKYIRAIDPSIPRSFLQQIIDHIVVNDGRVISITFKNGSTHTFTYKT

SEQ ID NO: 10779 - protein, 465 aa, synthetic construct
MARSITVIPASQPYRVGGRSQQKTRNLQVAAYCRVSTDQEEQLNSFENQVEYYTKYIQENPLYQMAGIYADEGISGTNTKKREEFKRMIRDCEEGKIDLVITKSISRFARNTQDCLEYSRRLKNLGIGIFFEKEHINTLDASGELLFTILSSLAQDESRNISENCKWGIRSKFKKGIPQVDCTKFLGYDKGEDGKLIVNQEQEKIVKRIYREFLDGYNPAAIAKMLMEDHIKTGTGREEWRSASVRAILKNEKYMGDALLQKTYTADFLTKKVKKNHGEVEQFYVKESHEAIIPKEQWEAAQLELERRDSYMQELGLTFYGYGSEVNPFSCRVVCGKCGAVCGKKSWKSRGVEFWQCNNRSKNHGVKGCASENLPHENLLKGFITAWNQIVAEREQYLPKWEKKKKEGNPLEKLRAEQMIELTLQPPLTKMLPELGQMVLERVIVQGKEIMVIRFLDGTEIKVRI

SEQ ID NO: 10780 - protein, 498 aa, synthetic construct
MQIEVRKADMGKEKKRLKVCAYARVSTEASEQENSLENQVSHYTEMIQSNPAYEFAGVYADFGISGFKESRPQFQKMMQDAKNGKIDLIITKSVSRFARNTAIVLKASRELKERNVGIFFELQNINTLTEAGELLLTILAAFAQAESESASESSKMAYLHRIENGEVVAYLERSYGYEKDENGEYRAKEPEASVIRGIYDLVIQGVNCTNIARVLNARNIQTVQGAEWTASTVFRIVENEIYKGDVLMQKTFIDGKRHQVQNRGEKAMYYAKDNHPPIVSEKIWEKAQRKLEDMRAERAEHSVIQEFTEENYPYMNHIFCAKCGWPLKPRVYSHRHRLSWDCSGQKRGTKKFCTGIHVLDNDLRKMKIEGNRYFSETVDKYGEVHLKHVGERTWKNKHKKKKFNHKDLYPELNEENYPYYRRLYCARCGSRLGRYISHGTVRWICSSYKRKGQTKCPGVRIPDEIIKGWNLPDGKIYIMGKEDKNGEKHYSYTSESAL

SEQ ID NO: 10781 - protein, 416 aa, synthetic construct
MARKKSKLNDNNLAIAYYRYSSHSQNEASIEQQRELAHEWADAHGLKIVREYEDAAISGTKEDRPGFQLMLSEVAKIRPNTLIAWKTDRLGRDKYVLAMAKKTIRDAGCEIHLLAENIPTDTAEGILIEGLMEALAEYYSRNLSVHIQRGMDFNAEHANFNGHKVFGFKTEKVDKKRKYVIDPDTAPFVQLMFTKYAEGEPMQSICDEFNEAGLRTSRGNPFGVKTMHRMLKNRAYIGEYRHGEFVVPGGMPALVDEETFDRAQKRLAENKRKGSQRARGMDEDGAPRYWLTGKLYCGECGETMQGVSGTSKTGRTYYYYYCSAQRKKLCAKKKVKKDWIEDLVTDVLRYIIDDSENLMSLAVDAAVYYKEHYKETGYLEGLEAKRKEVEKGIANLMKAIEGGALSDTPHRAPEPA

SEQ ID NO: 10782 - protein, 576 aa, synthetic construct
MKKNFKMPGSGSETPIRVAIYVRVSTVYQIDKDSLPMMKQDLTSYCKYILNTDDFVIFEDAGYSGKNTDRPAYQKMMSQIRQGLFTHLLVWKIDRISRNLLDFANMYAELKDLGVTFVSKNEQFDTSTAIGEAMLKIILVFAELERNMTSERVTATMINRASNGVWNGGRIPFGYSYDKPTQVFSINPEENKIYNFMVETYEDTQSIVHTSRRLNEAGYRSRNGNMWSPVAVWTILRNPWYKGVYRYNYYKIPGRKAIKDESEWVIVENHHPASIDPDRFDRIQATLDKNARYRNTPGRKTAQKNVHVFSGLVWCAECGSAFTASPGKLHVSGYRPSKYGCPNVRKTKTCHAKYTSDVVLGEFLLNYILNILNAQKQFAYIHSTDDLQKRLLHGSTFSNVDHVDPDGLASLLNMLEKCSGSDPVLLKRPRSKPKMDPELKRMMADQKKQQRALDRLNDLYLYSDDSISEREYLVRKQQITDRLQEINEAIGMMSQEPWMRTMNDEEFIRQASSFILTQKLADKQYIYYENLAESLDPEILKNFFVSILDSIILRDGRPETVVFRNGLSHTFTYKDS

SEQ ID NO: 10783 - protein, 520 aa, synthetic construct
MKNVTKINQVDFSIFKKTRVAAYCRVSTDSDEQELSLETQKNHYESYIKANSEWEYAGIYYDDGVSGTKTAKRDGLLRLMEDCEKGLIDLVITKSISRFSRNTTDCLTLVRKLLNYEVYVIFEKENINTGSMESELMLAVLASMAESESRSISENEKWSIKKRFQNGTYVISYPPYGYANVDGEMVIVPEQAEVVKEIFAGCLAGKSTHIIAKELNEKGVPTKRGAKWTGTTINGILTNEKYIGDALFQKTITDASFKRKRNYGEEEQYYCENHHEPIIDKDTFEKAKEAIRQRGLEKGNCSENTAKYQNRYAMSGKIKCGECGRSFKRRYHYTSHGRSYNAWCCGGHIEDSSSCSMKFIRDDDLKRVFLTMMNKLRFGNDLILKPLLISITTSNSKKNIHSMEDIEKDMQSNEEQRKQLNTLLTRGYLERPVFAEAHNKLIMEYEQLAAKRDLLYRMDNAGYTMEQALSDMVSFLNGAEPFTEWDDSLFERFVEKVKVLSREEVEFELKFGLRLKERID

SEQ ID NO: 10784 - protein, 510 aa, synthetic construct
MSSVDKIAVVYARYSSHGQTEQSIEGQIAAAQKYAEQHGYTIIHIYADRAMTGRNDDREEFQRMLSDTATHQFGVILLWKIDRFGRNREEIAFNRYRCKKNGVRVERVAEDVPDGPEGVILDSVLEGMAEYYSLQLAQNVRRGQRESAKKSQTVGGCKIIGYNVNPDTKRYEVDPKTAPFVTEVFKRYANGETISEIVAWLNAQGVRTTRGGEFTVNSLHRLLKNEKYTGVYIFHDIRNEGGMPALIDHATFDKVQEMLKVNRRAPARVWSKTEYLLTDKLFCGHCGAMMVGESGHGRNGTKHNYYTCWNRKKKKSCDKKPVRQDVIESLVLRSIGKLLENPATLENIADQVWAAYERSDTSGDTIKALDKQIADVNKALSNVMKAIEMGIINEMTKTRMDELTDQKQALSAARAEAGLAGGFKLTRDMILFFLQEIAALDMADRDSQKRLIKTFVNAIYLYDDHFDIAFNYTDNGKVVVRMQEINDAACGEVFGRCAQSPAKSRLSRLR

SEQ ID NO: 10785 - protein, 434 aa, synthetic construct
MERVVERVDALIPAQPRALRVCAYARVSTGKDAMLHSLSAQVSYYSKMIQSHNGWMYCGVYSDEAVTGTKRERAGFQHMIEECRQGNIDLVITKSISRFARNTVTLLQTVRELKSLGVDVFFEEQHIHTMSADGELMMTILASYAQEESLSASENQKWRVRKAFENGEIINLRFLFGYDITPDGIRVNEKDAAIVREIFARFNGGESMSSICRDLDARGHKGVLGGTWCAERMRNTLSNEKYLGNALLQKRYRNNHIEKKLLPNRGELPMYYAEGTHEPIIDQATFDKAQERLRMLAQQTANRTKPTRSVFSGLIHCGLCGNTYKRVTYRKKHYWNCTTFQTKGKSECAAKRIPEETLEVLTCEVLGEGSIDSDMVRSKITAIRAEKNNVVVYCMDDGSEIVKRWKDRSRAESWTPEMKEKARQRALQARRKKE

SEQ ID NO: 10786 - protein, 529 aa, synthetic construct
MNRTATRSVTVIPPTINPLTHLSRVAVQKRRVAGYARVSTDSDEQFTSYEAQVDYYTQYIKRNPEWEFVKVYTDEGISGTNTKHRIGFNEMIADAMSGKIDLIVTKSVSRFARNTVDSLVTIRKLKEKGVEVYFEKENIYTFDGKGELLLTIMSSLAQEESRSISENVTWGQRKRFADGKVNLPYKQFLGYRKGADGFPEVVPDEAIVVHRIYTRFMEGLTPGAIAKELTADGIPTPSRKQRWQTSTVESILQNEKYKGAALLQKCFTVDFLTKKRKVNEGEVPQYYVEHSHEPIITPEEFDKVQTELARRKRISRQYSGKSIFSSRIICGDCGSYFGSKVWNSTSKYRRVIWQCNSKFKGEHKCETPHLDEETIKARFVTALNAIIESKDNILEDCRLMQATLTDCTGIDKEIQTLLEEIEVVAELTKRCIAENSQTAQNQEEYTARYNGFVERYEKAKAQLEQLRTTKAEREAQAEAIGAFMFEVQELDALTEFDEKLWLTTIDTVTVHADGRMTFKFHGGKTLTSY

SEQ ID NO: 10787 - protein, 541 aa, synthetic construct
MRIAIYSRKSKFTGKGESIGNQVEICRDYITTNYNDEEHFIQVFEDEGFSGKNLDRPQFKKMMEIENLRPFDLIVVYRLDRISRNVGDFASLIEKLNKKNTSFVCVKEHFDTGNSMGRAMMNIAAVFAQLERETIAERIKDNMYLLAKEGHWLGGTTPLGYKSIEVTNGKRTHFELIIDESQIDLVNIIFSKYKQLGSINGVETYLFANGYKTQKNNYWHKSNVKRILTNPIYCIADIDSLNYFTELGCNVCFTLDDCNGTKGIYPYNRFSGQKREMQSYDKWIVTISEHQGILTGKEWVAIQQQLKANSKDGFGGKASERRSTSNTSLLSGVLFCSCGAYMRPKKYPSGNTFYICENKMDKKITECNNSNINADELDKIVLNELFSFDIKDGVVDSQIQNLKEQIANIDNDLQKQIGRLKKQIETNKNTVNKFMNIVALSIENDTPEQVVEVYNQKINELLNQNKITQKRIDELQDTNIVQAKMNDRLNSLTDAILYLKENFDKLTIVEKRGFIKNIVDRIVWDGKNVNIFIKGISELSE

SEQ ID NO: 10788 - protein, 623 aa, synthetic construct
MKAKKTDNGKITALYERLSRDDDLTGDSNSIINQKKLLEDYAKEHGFTNCVHFTDDGWSGANFDRPNWKRMIAAIEAGEVSHVLVKDLSRVGRDYLQVGFYTEVMFKERGVRFIAIANGVDSDKSESSEFAPFLNIMNEWYVRDSSRKITSVLHARGMSGKHTNSHCIYGYKKDPNDKDHWIIDEEAAEVVRRIYRMALESKGPYEIARILALEKVERPSYYLAQRGVGKHQSNFNPAERYTWRGGTVADILSKPEYMGHTVNFRTYKESYKDKRSRMTPKEDLVIFENTQEAIIDKETWERVQSLRKTIRRTDTIGAANPLTGLMFCADCGAKMYNHRGGAGLARDWAGRPNGRKRPERDEYNCSRYDLGNQHYNRYCTTHLIRTAVVNELLLEAIKEVCDYALNNEAAFMEQVCSASSERQVKAAKAIRQRKQRSEKRADELSRLIRKLYEDNVNGRLSDKLFEQMLHDFEAELESLTESVTQDEQELDRISRETVNAEKFLALVKKYTDFSELTPAMINEFVEKILVHQAEGKGASRTQEVEIFFNFVGKVEIPHEEIVLTEEEKAALAEQERRRAKKAEYNRRYMENKRRQWREQREREQEQKPHKLPPVADEKGEKSA

SEQ ID NO: 10789 - protein, 503 aa, synthetic construct
MLRAALYARFSSENQREESILAQFRDSTEYCKKHNYAIVAKYADEAKSGTTTIGREQYKLMLKDAQKGKFDVVVFHKIDRNARNELDYYITKHKLEEAGVKYAYSRQDIDSTSPEGQMMESMLVGMAAYYSRNLSNEIKKGLRENAIQGKCTGGRLPYGFSVDADKKLIINEKEAAAVRMIFDWYSAGVHYGVIRKRLFNAGYRNRAGKEFTIASIYEILRNRKYVGDLYLGKTLFRKGKRNTHQTSANVQYFENVIPAIVSRDIFEEVQVKLDQNKRRSGAGNAKAIYALSGLIHCGQCGSAMVAHSTKNSRGIKNYYYRCPKGRLVGDEKCPQKFINRDDIENTVYQLIRKLFTAPDAHDQIKRIIAKNNMDVKVPDYTDQVKRLKKQESDASKRLDKLYDLYMTDREDEFTSAKMAQIKEEILRLRTQIKEAEDRQTIAQSTTFDIDKIIDTFQKQLKQKQSPEFIKTLFELAVKNVTVYPDKIKVVLLVTQERFELPTP

SEQ ID NO: 10790 - protein, 514 aa, synthetic construct
MQKRRTKYANSQGDNAVIYARYSSHNQKDTSIEQQIEVCTKYARDNGYRITNIYADRAISGKTDARPQFRLMMQDAREHKFDVVISWKSSRLGRNMLDAMTNDIILRNLGIKCFYTEENFDDTAAGRFALRNMMNVNQFYIENMAEDILRGMRDNAKKCRVNNGSPPLGYRRGDDGKYEIVPEEAETVREIFTKVLAGMAFVDIANELNARGIKTKKGAPWGRSSFSRLLSNERYIGTYKWSDIVIENGMPAIIDREVFEMAQKKIKGERPLRRRHNENGDYLLTGKLFCGKCDSPMTGMSGTSKSGAKHHYYACYSARKDGSCDKKAVKRDWVEKTVALFIKEHVLRDEVIEWMVDQYMVYQKATFESQRIMEMRNQLKDVQSQLDNLVDAIARGIYTDSTKDKLLKLEADKKEIEQDIRLATYNLKEYDREHVRCYFLSFKEGSVESKDYLKRLFDQFVTKIYLYDDEIRIAFSGTKDDSPVSFKIIDEAEELAVSSVRLSSASSHQRIIKG

SEQ ID NO: 10791 - protein, 631 aa, synthetic construct
MEEITNIYDSRIFIQNRKKISGNLKVCAFTRVSTEHEQQVNALENQNQWITDLINQHPEWEFDTEKDLYVDEGISGTSMNKRKSFNEMISKAKAGVYDLIITREVCRFMRNAKITLMLVDELKQRGVEVYFVNDGIWTFNQDDYFKLTIMATYAEQESRKVSERVFSGQAVARANGRHFGTGNILGYDVVKQDKKCPDSKPTTYVINEEQAETVRLIFNMVLAGYGVKKIKLYLQDNGYKTALGKTKWHESTIERILRRRTYIGEYEYMQSYTIDPLTHERVNQKDKSRRIIKKGNFPAIISKETWEEVQKVLDSRINCYTNGSNQIIKRGILTSNDVYCRKMRCGCGRRFRRDECRDGKLITYKCLQVVEDGSIKERQKRSKQLEDNCCINGIVDWKLDLITLRVFDSLSCNVDEVKEKVLNVIDKAFEGSGGNFRKAKNKEELEKRIQKLENDQKNLLDFLMEGVISKDEFKYKKEEIIREIDEKKSLLKECKEINDNVDEKSRVLKEVRNFIKKSCRFPAVGSEVTSVSDRIIETYVNSIKVCADNVFEYNIRIDPNANYDKPLYVPDEEYIPSVHPASKKLDNSNAVLIKEFQITYNEAKKYANSLGRRAKKDSWDKPATIRIYTNV

SEQ ID NO: 10792 - protein, 585 aa, synthetic construct
MAYRKITDIRDTIGMRAVFYARVSTAEEEQLNAIELQIEENRGCIKDHGWKLVGEYIDRSKSGTMVKGRDDYQRLYEDLYEDLFDIVVIKDQERLQRNTLDWYLFINRVVQTGKLLFMYMDGKFYSPDDALITGVRAIIAEEFSRNLSKKLHNYHDHRIEKARQGQEIALQGSGNVYGWDKKDGKYYINPEQAKVRRLMCEGIMARKGSTLIAKELNDAGYRNTVGKPWKPMDIPKFVYDCKNVGTMIINKERHDFESKQTIKLPKEEWVYVENALPPIVTQEEWDLICKIHEERVIATGSDRRGKKTSGYSFSGKLVCGICGAPYWRKQRVSKDEYWVCSTKQTKGRRTRKRDSTMGKAGEINPLGCDNENISYNSLMEIMGVVSERLQANTDTIKHDMINWLTKLRKQLLETNGGHTEADLQRELSRKSKLLDAYLDGILNKQEYQKKAEELDERIIQLKAETEKNKANSGDIAEIDKVLANIDEEVSRYVDGNEKLKVEYLLEHLEQVQIFPDKVIVIVPILSEGIVVEKTQYVSREKWCGKNNDAAHYFRAFKERRRRSVAGRRADDKKYSEAEKPDRLCA

SEQ ID NO: 10793 - protein, 640 aa, synthetic construct
MYCIYLRKSRADMEAEARGEGETLARHKRILTELAQRRDLEIGEIYQEVVSGESLASRAEAQRMLSDVQAGMWEGVLVMEIERLARGDTIDQGIVMNTIKYSGTKIITPTKTYDPNNEFDEEYVEFSLFMSRREYKTIARRMNAGRIASVKEGNYIGSRPPYGYDKVKDDKSFTLAPNPAEADIVRSIFSWYVHGCINENGELERIGISKIARKLNDMHVPTRKGGAWVTATIRDMIKNPVYIGKIRWNWRKGVTQFKDGKKTVARPHSPEDSWLLVDGRHVPLVDEDTWNAAQSIIANNRPATVPGNREMQNPLAGLMVCGKCGRKMVRRPYSNREQPPSLICSCNACDNVSAALHLVEERIIEALAYWLKNNAIKYENAQPTATDEEQAAIGNLNAEIAELEKQRKNLFGFLERGIYSEAEFRERRADIDAQIAALREDVKTLGDKIILKETYNEAIRNEVPKIRTVVETYSSLSSARAKNDMLKEVLSKVVYARDKGGRWSGLCDNFVLDLYHKIPTPSPELLQRWDNHIQVGGTDEIAHWEMIGTMIHQCLRDATLKDIEAAGLMGYYTMHSKGVYPADPNGVPFTAAYLQCTGDPIADITEDMAADAAMSKRQHFAQKKKNCPAWQCFFLRCINK

SEQ ID NO: 10794 - protein, 511 aa, synthetic construct
MERDLSLDRCQGDCVIYARYSSHNQRDVSIEQQVADCEAYARSLGLRVVKVYADRALSGMTDKRPQFQTMLRDAAHRRWAYLIVWKIDRFARNRYDSATYKFRLKRCGVRVLYAKESIPDGPEGILLESVLEGSAEYYSANLSQNIRRGMRYNAMNCKVNSGSIPFGYRKGEDGRFAVDPGEAEVVREIFRKVADGIPFVEISNDLNGRGIRTKRGGLWGRNSFHRLLTNETYVGVYRFGDVRVEDGVPPVIDRALFLAVDERLKNKKNPQGRHRENGEYMLTGKLFCGLCGAPMVGVSGTARSGALHHYYVCQKRRTERSCSKANVGRDWLERVVVQATLDYVLKPEVIEWMADAVMAYQEREANSAVLLGLRDQLSENQRATANLMKAIEAGIITLTTKGRLVELEAEASRLRDAITLEEAAQTHIERDFMVYWFEKFRGGDLEDAAFRRRVIDSFVNAVYLWDDRLRVAFNYSGKGSAVDMELVMDAEALAGPEGRFVLAPPASTKTI

SEQ ID NO: 10795 - protein, 547 aa, synthetic construct
MKLLVPYIRWSTKEQDSGDSLRRQTNLIDAFYAKHKDDYYLLPAHRYVDKGKSGFHQQHKAQGSDFRRMFENVMSGVIPEGSLIVVENFDRFSRADIDTAIDDVRQILRKGVSILTLGDGELYDKSALTDPVKLIKHIIIAERAHQESLVKQKRIAQVWNHKTQLARELKKPMGKQAPGWLELSEDGSHYIVDEDKASLVNIIYDKRLSGMSMFAICKWLNEQGYPTINQRKVRISKTKKPDGNWSALSVKHILTSRSVLGYLPAKISTEDRKTVLREEIEGFYPQIVTDSKFYAVQQLLEETGKGKTSSGEHWLYVNILKGLIRCKCGLVMTPTGIRKPVYQGTYRCNGNKESRCNYGTVSRKLLDTQLCSRLFSKLSQLHDEATDTAKLDEIQRRLNTVDSELEKLTETLIQLPNITQIQEALRVKQEEKDELIVQLSREKARVKSVSSLDLSGLDMESVEGRTEAQIIIKRLVKEIVVSGNEKLVDIYLHNGNMIRGFPLDGKDDHTLTLEEATDEMQSLDDMLIFGEPVTRIYPAGDMEEVDA

SEQ ID NO: 10796 - protein, 464 aa, synthetic construct
MARSVTVIPARSQKVRTGHKAVQEKKIRVAAYCRVSTDQEDQLHSFEAQVEYYTKYINEHENYEMAGIYADEGISGTNTKKREQFKKMIADCEGGKIDLVITKSISRFARNTQDCLAYSRKLKNLGIGIIFEKENINTLDSTGELLFTILSSLAQDESRNISENCKWGIRTKFKNGEMHLNTFKFLGYDKDENGKLVINKEQAKTVRRIYRDFLIGINPAQIAKELTEEKVPGCLGQTKWYPSTVTGILKQEKHMGDALLQKTYTADFLTKRQVRNNGEIAQVYVKDSHKGIIDKQTWNAVQEEFDRREKFMELHGTDRYSYGADCMPFCEKVFCGECKSLFTRHSWRSRRIVQWQCKNHRKDGKVACTNAYVDNADLEKGFVKAFNRLVTDRDKNMERWQQMKSDGTPLEKIRAGQMMEAVGNEPLTRFVPEIAQLVLCEVTVLGAKKYEFFFLEGSRVKVSV

SEQ ID NO: 10797 - protein, 502 aa, synthetic construct
MEIQIREGNSRQKRKLKVCAYCRVSTDADEQENSLENQIRHYKEVITSNPDYEYAGVYSDFAISGFKEKRPGLQKMLADARKGKIDLILTKSVSRFARNTSIVLEATRKLKELNVGVFFELQNINTLSGEGELMLTILAAFAQAESESGSAGAKMVYQRKYEAGISVQYLERSFGYTKDERGIFIADEDEAVWVRKIYEMAADGYTPAAIKRYLNENGVKTVGGAEWIDSTVFRLIENEIYKGDYIMHKHFVNEERKLVRNRGEVDAWYIEDDHEAIVSPELWQRAQDALEAKRDYLAEGSVIEEFTEENYPYMNRIYCARCGHPLYKRIYSNGNRLNWGCSGTKRYGKSFCEGINIQDGVLRGEWHFDENMYIGEKQTDRGKKEFTYLKEASWKRRHRKKEPEPIPENTETEYPYREKIFCGLCGSRLVRHVNTKSHKVIWVCNGRKRKGKDFCDGTRIPDTIIKGWGEIKKDIYIQRKDDKNGKKRYSYTSKKPKGADRA

SEQ ID NO: 10798 - protein, 560 aa, synthetic construct
MKRMKCYIYTRVSTSMQVDGYSLDAQKDKLRKYAEFQNMLVAGEYCDEGKSGKNIEGRPEFLRMLRDIESGKDGVSFVLVFKLSRFGRNAADVLTSLQRMQDYGVNLICVEDGIDSSKDSGKLMISVLSAVAEIERENILVQTMEGRRQKAREGKWNGGFAPYGYKLVDGQLQIAEEEAEVIRIIYDKYIHTTMGTARIANWLNEHGYSKICRHNNKREAFTGSFLIGVLDNPVYCGKLAYGRRHNEKIPGTRNQYHIVKQKDYALYDGIHEPIISEEDWQLAQKQRQQTNKRQIKTHSLDHEHVLSGLLKCPVCGGGMYGNVNRKKKGDGTYYRDYFYYACKHRLHVDGKRCDYHHQWGEEIIDGAVEEIIHKLVNTPAFEQGIREKIGGKLDTAELDAEMETLRKQLRQLTGTKDRLGEQIDALDFDDPHYTRKAQDLQERQNRVYDQIASIEVSIAEVQTRMDNIRQHRISTDNVYQFLLYFDKLYDQFTDLEKKTFMNSFIERVEIYPERQSDGRIVKRIEFRFPVYFNGSEISGLCWDETDMSETVCLMSRVEGK

SEQ ID NO: 10799 - protein, 522 aa, synthetic construct
MGNVMVIPARRQVGNTVKQSAQKKLRVAAYCRVSTDSEEQETSYEAQVTHYTEYIQKNPEWELAGIFADDGISGTNTKKRDEFNRMIDECMAGNIDMVITKSISRFARNTLDCLQYIRQLKDKNIPVYFEKEAINTLDAKGEVLITIMASLAQQESQSMSQNIKLGLQYRYQQGKVQVNHNRFLGYTKDENGHLIIDPEQAEIVKRIYREYLEGSSMDKIADGLMADGILTGAGKTKWHTSTINKILRNEKYMGDALLQKTYTTDFLTKKRIKNNGTVPQYYVEGDHEAIIPKELFMQAQAELVRRRVVHVSPTGKKRSFSCNHCFAQMVFCGDCGELYRRVHWNNHGCKSIVWRCISRLEPTSAEKNCTNRTVNELLLQEVTVKAFHQILTERDFFLKTLQQNIAKAVVNADTLSPDGIQARLEELQKELIKKANNKQDYDAIADEIFRLRDQKEQSEVDSHHREEAMSRIKELQDFISGQETDITEFDEALVKKLIEKITVFEDHFTVEFKSGINVDIEC

SEQ ID NO: 10800 - protein, 519 aa, synthetic construct
MKKVTKIAETANSKVKLKKIRVAAYCRVSTDSDAQLESLEAQKTHYENYITSRDDWEFAGLYFDEGITGTKKDKRPELLRLIDDCKAGKVDFVITKSISRFSRNTTDCLELVRKLLALHIPIYFEKENINTGSMESELFLAILSSMAEGESVSISENSKWSIQKRFESGTYKVSYPPYGYDWDGEQMVINPEQAAVVKEIFAALLSGKGTHAIADDLNRRGIPTKRNGRWTATTIRGMLSNEKYVGDCLFQKTYSDSRFVRHNNHGEQTQYMVKDHHEAIISREDFEAAHAFIHQRATEKGVVKGSDKYQNRYTFSGKIICGECGDTFKRRIHSCTGYKYTAWCCSTHIKDKDKCHMLFVKDDDLKQAFVTMMNKLVYAHRIILKPYVDALKNTSSDDSLRRIQEIQTLLAQNTEKRETLTKLMTQGIIDPILFNKETNELLSQADSFRDEINALKNAVSGDVTKVTAATALLHFTEKGGILQEFDDDLFNEYVNRIIVRSRNEVRFELKCGLTLRERM

SEQ ID NO: 10801 - protein, 485 aa, synthetic construct
MPTSDLKIAAAYIRVSTDDQEEYSPDSQVRLIREYARKNGYLLPEEYVFQDDGISAATARKRPAFNRMIALVKEKERPFDAILVLMFSRFARNREESVLYKGLLRKQGISVISVKEPAVDGPFGTLIESIIEWFDEYYLINLSAEVKRGMSEKFLRGEAMGTAPFGYRIDSANKTFTVDPERAEIVCDVFRSYADGAGLRDIAVQLGDAGITTRRGNRPDSRFVEYMLRNPVYIGKIRWTPGHKTRYSRVHIADGVEVVDGKHPPIVSMDLWEAVQRRMDQRKAAYGRYQRQAPAAWMMRGLVRCSACGATLIMAGRSSSCPFLQCHSYAKGACHTSHSLSLRRANAAVLAGLRRSVGTLSFHMVPHLTSAPSRTADYGRLLEQERRRLARCKDAYQAGVDTLEEYRDNKARLEERIRRIEEQAASAAAAPESFDKAAYGKKAADILRFLETSADEGAKNEVLRSIVDHITYEKASRHLAIYFYT

SEQ ID NO: 10802 - protein, 434 aa, synthetic construct
MERVVEQVVFPEKFPRMQNVAAYARVSSGKDAMLHSLSAQVSYYSRMIQQHPGWKYCGVYADEAITGTKDSREQFQKLLERCRNGEIDLILTKSVSRFARNTITLLETVRELKLLGVDVYFEEQNIHSLSSDGELMLTILASYAQEESFSSSESRKWQIRKDFSNGKIGSITILGYRRNADGILEIEPKEAELVRMIFSDYISGMGQQRIANKINEMGIPTRQGNLWTHPRIREILTNEKYIGNLLLQKYYRNNHIEKIKTKNQGELARYYVEQAHEPIVDFDTFIKVQTILDQRHEQYTHDGSTNRYPLSGLITCGLCGKNYQRKQLPQGIIWLCATFLRRGKKYCPGSKQIPESILYSLICDILKLTEFDEVVFRDNIHHIVIPKPFEVQFFFHDGTSETRHWEYPSRSESWTEEMKQAARERSRKWNEKLP

SEQ ID NO: 10803 - protein, 468 aa, synthetic construct
MSDKIVKKVENLPQLTAVKRTDKLIQRVAAYARVSTGKEEQQTSIVAQKEYYTDYIKSHARWQFVGVYADEGISGCSTKRREQFKQLMSDCMAGKIDMVLTKSISRFGRNTVDTLTAIRELKSKGIGVYFEKEQVWTMDSKGEFIITLMSSLAQEESRSMSENILWAVRKRYAQGKGSFAYSRVLGLDKGKEKFEIVVNREEAVIVCKIFRMFIQGLTPHTIAIALTAAGIPSPGGCEVWSAATVRRMLSNEKYKGDMLLQKEFTVDFLTKKVKKNEGELPQYYVSNNHEPIIDPWLFDFVQENFKNRKRENKRRYSGIGFFSSKIICVKCGATFGPRPWHSTSYNNSVWQCRNRYSAVKCKTTNIYDKLLFYVLHDVARKKIVAKDIRTAIVEFAADAVSADRLAAIERYIENFESMSAWKMLSDADDLSFVIDKVLVKPDRSIEVLWLDGSVDGYEIPRYTPKGGI

SEQ ID NO: 10804 - protein, 524 aa, synthetic construct
MLSIPKVAQYARFSSDNQRSESIDAQIRAMNQFCKQNHWQVVSTYTDEARSATTDNRPQFQQMIADSSKGLFDIVLVHKLDRFSRDRYDSAIYKKKLKKNHVKLCSVLERMDDSPESIMMEAVLEGMSEYYSKNLAREVMKGMNETALQCKHTGGCPPLGYDLDENRHLVINESEAQAVRIIFQMFADGYGYTTIIDYLNAHGYKTKRGKIFGKNSLYEMLSNEKYTGVFVFNKAAARTDGKRNNHAQKESYIRIEGGCPTIIGKKLFAQVQRIKAKNRRNTGRYHSKEFYLLTGKLVCDVCGKRMIGNLRFSGRSKTRLATYRCNTHRAACNNKELNKDYLDAYIDVLIGERLKSKNLRRAVAKVNQQVQKFNHNFDANYEGISAQYTEVQDSLANITRAIEKGIFTDDLLQRAEQLENEKAKLETRLHELKLLEPIAYEDVAYLHTQWKELKRNTEEFRTFIQQFVKAIHVRPYDFDIVLDMGFGVVELTETIPMRRGELYEMFDSKVKEQRICLKNQKADT

SEQ ID NO: 10805 - protein, 514 aa, synthetic construct
MPTDYALYLRKSRADLEAEAHGEGDTLARHEHILMELAKSRALPIGAIYREIVSGERIANRPVMQQLLSEVEDGRWKGVLVTETSRLARGDTIDQGIVAQAFKFSGTLIVTPSKTYDPTQEADEEWMEFGLFMSRQEYRMIRRRMNAGMQAAKREGRYISNVPPYGYERYKLDGRGWSLRPIESQAKVVRMIFDLYLSGLGYCEIEKRLNALHIPAPKSDKWSARTIPGILRNAHYIGCIPAAFRPGKKVVKDGQVKVTRPRVKSCELYKGLHEPIIDRAVWDQVQARLGKNAAVRTPGNRQQSNPLAGLIVCDCCGKRMQRRPQTGTGSQTQIQCTTRGCATVAHNADELEQLVLDSLRTFLARLEVGTPVAPDLSAEQHALSEIEKQLTDLEARQRRTFELVEDGTYTREIFLSRQAELTAERERLTADRTAIQHKIEQAQHEYDARTGLAPAVRHVLDTYNTDLPAAERNKLLKQVIDRIDYHKRTRTRWTKESDLSLTLHPVVFSSSANR

SEQ ID NO: 10806 - protein, 567 aa, synthetic construct
MSEDKRIVALYVRVSTGYQVDKDSLPFQKKELKAYCEHVLHIDKKRIEIFEDAGKSGKNTKRPAFERMMEKVKHGQVSHVIVYKIDRISRNLVDFSLMYDDFKYNKVTFISLNEQFDTSSAIGEAILKIILVFAELERKLTSERVTDVMIGRAQSGLWNGARVPYGWDWDDENKCPVHSKTEAKYVKQMYEDYLNGGSSVSIAKSYNANKIPTKRGGEWTSKTIADVIRNPMNKGDYRYNYRESARGRKKPQEEVIYIKGIFEPLVSINDWEKANKLMDGRGLKMNSSGQTIMNKRCNVFTGLIFCGKCGERYNVRSKDSRQGSGFRPSSYACGKRSRKGTCDNPNVSDVAIAPIIINYIAAMVDITKHKRYIKTTKELEQMILKRISFSDIVGISEDSLKDTLDLLYGKNGTQLWSANTVSQEDKSENKQKLTELQAKLEKTERAIERLKKAFLFDDDGLDEKEFLEMKSALEIDRVKIENEIKGMETESISVNVNQVEFIKTASQYLLMHELNKDEIINYKELAIADEDSIKNLFNSVLDHITVMDKRITEIVFKNGLTHKLLYK

SEQ ID NO: 10807 - protein, 490 aa, synthetic construct
MFFVDGKEMRIKLKNKTVVAIYIRVSTQEQALEGFSIDEQQRRLLSFCEAKNWTVYKSYIDPGYSGSNLNRPAIQQLIKDAENHCFDMVLIYKLDRLSRSQKDTMHLLEDVFLSNKVDLMAMNESFDTSTPFGRAMIGILSVFAQLERENIKERTSMGRKARISKGYFHGSHPPLGYQFKPGGNDLETNPYESIMVREIFEKFLNGETIYSIAQCMAETYGNNVREWSNTMVRRILKNPVYVGKVRYGGDLFDGLHESLVSEKDFAKAQAVLVRNKELDRRTYEYKTPAGGTADHLLTGLLYCGDCGARMAYNKVSKNVNRYSCYSVSRKNKSLIRSEYCTNRLNPYTAQELEELILGEISKLSKFPDGVLETIEQASPEDKSTPIQTRLDEINAQISKLLDLYQLGFTDLSQISEKLESLKDEKNKLENQLENLKITPTIEVDAVYETLEDFDDLLEYGTPHEIHSVVHTLIDKIVILNDDIKIYWSFC

SEQ ID NO: 10808 - protein, 523 aa, synthetic construct
MRFFSYGRKSVFSDKSDSIDNQFRMNREYCESKFSGQVDSWQQFSDEDFTGANTSRPDLQRMLSFIKGGFCDVLVVYQLDRLSRDVRDFANIYALLEEHGVMFISIKENIDTTTPIGRAMMYVTVVFAQMERETIAARVTDNMLGLAKKGYWTGGNPPVGYVRKHIVVNGKKHCSIEVDPDGARYVTQIFDTFLAYNCSLQGMETRFKNQGIRTQSGKFFSTTQLHKMLTMPYCVEATPEVYDFYAAKGCIMDPGSPREMWDGSVGVIIYGRSTEKNKKHQAQPPEKWTVCLGKHKPFMPAEKWLAVQSRFTQNKCIKDAKWPVPLLKGVLRCKCGNLMQVSRKKKVDGTCSSWYYCRKRMRQGVDACDMGQIKCDLLDGEVLELFRGITADPALIQKFVKAEAPADVPDLKAAQARVSACERKIGRLAASLALAEDSAASKYIIAEMERLDVELGALKREASLAEMEGHRAAASAKDAKATAAEIAKLIHGLDGFDDKEKNAIARAVIQECTWDGERLFIKL

SEQ ID NO: 10809 - protein, 456 aa, synthetic construct
MRNQNTSEVPIRAALYVRVSGEEQKIKGLSIEAQKERLVAYAKERGWIIAGLFVDAAKTARKNMHKRSEFQKMLDLVRADGVDMLLFCRLDRWFRSVRDYYKVMEVLETHNCQWKTTDEEYDTTTANGRLYINVKLSIAQNEADICGERIHVVFDSKIQHGTVLSGKCPFWLRINNERRYELIPENAAIIQDAFNHFENTTSQRATIRYIRETYDVNWCEATFRRMLRDKLTIGVYDKNGRYNDDFCPPVISKEQFEHVQELLRRNSRHNPAGRVYIFTGILVCEECRHNLVGYYSRGYIYYRCSQHFQRGRCIHNHSAREDVIEAWLFDHLGEEIEKYEVAWNVQAAERKRTAASIDRSVLRRKLTKLKDLYMNDLIDIDEYKKDYETYTAALSALEDPEEEKHIDLSGVRRIISHDFREIYDSLTREEKRTLWKNTLKEIRVNNANEITGISFF

SEQ ID NO: 10810 - protein, 561 aa, synthetic construct
MPRKPAKHPAKPKRGKKLEVEEPGVLYGRYSSHNQKDISVEQQFEKGYELAAEYGIRIIDTYADRAVSGRTDKRRDFQRMMTDAAKGKFRYVIAWKSNRMGRNMLEALINEARLQDLGVRVLYVEEDFDDTAAGRFAARSMMNVNQFYSENMAEDIKRGLYDNAANCMVANGHLPYGYKADETLHYAIDEPKAAVIREIFTRVSCGEAFVDIMASLNARGIKTSYGRPWGRSSFQKILSNERYRGIYIYGDVRKEGGIPRIVSDELYFKVQEVITTKKNPQGRHRVNGDYLLTGKLFCGHCKSPMTGISGTSRSGNLHYYYVCQKRRTEKTCEKKNLRRDDIELQVAKAIKRRTLDDDTINWIADSVVEYSQHQESASGIGLLEDQLKDTQRSIKNLMAAIEQGIITPTTKARLMELEKEQSDIDRKITMAKADVIPVNRDQLVGWLKKLQAGDVHDKKYQAELFDTFLIAVYVYDNPDGQDYMKVVFNYAGSKNTVEIPLDPSVIDNVENIETGAVRLSSAQVHQSRARRTERSPGSAPISAIYMVGGVFVLVCPLDAEE

SEQ ID NO: 10811 - protein, 513 aa, synthetic construct
MKRITKIEAAGVKNKQKLRVAAYARVSTDSDEQLVSLKTQKNHYERYIKARPEWEYAGLYYDEGVTGTKLAKRDGLLRLLADCDKGMIDYIIVKSISRFSRNTVDSIEIVRKLCQDGIYIYFEKEKIDTGKMEGELLLSILSSLAESESRSISDNETWSIQKRFMNGSFKIGYPPYGYKNVKGEMIIEPEKAEIVRWIFDEILAGKSPAEVAKELNQKGVPSKRGGRWEGHVINGMLRNEKYTGDVLFQKTYTDDRFNRHVNRGEKNQYYMQNHHEAIVSHEVFDAANALIEANGLEKGIHKDSDKYKNRYAMSGKIICAECGGTWKRVKLGNRFGFACNTHVKDMNACSMMSIKEDPVKAAFVTMMNKLTFARGKILVPYSEMLKRGSDEGTFERLDEIDTLLEKNMERRQQIMQFFTKGLLDPAVYAEENDSLTDEEKRLTSEKELLSGQMSGSHDQQEALTRLLRYTAKGKTITEFDDDLFTEHVDHVVVYKRTEIGFAMKCGPIFRERI

SEQ ID NO: 10812 - protein, 523 aa, synthetic construct
MPLAQNITVIPARRSIGTQKPAAKIQKIRVAAYCRVSTEFEEQESSYDVQVDHYTNYIKSNPEWEMVEVYADDGISGTNTKKRDEFNRMIEDCKAGKIDMILTKSISRFSRNTVDCLKYTRELKDMNIAVFFEKENINTLDAKGEVLMTIMAALAQQESESLSANVRLGIQFRNQQGKVQINHNWFLGYTKDEDGKLIIVPEEAAVVQRIYAEYLDGQSFLQIKRGLEADGVLNGAGHKKWHESNIKQILTNEKYIGDALLQKTYTVNTLEKKRVNNNGIAPKYYVEGSHEAIIDKDVFLRVQAEIARRANILTDGKKRIYSSRYALSSIVFCGHCGDIFRRIKWNNRGCKSVVWRCVSRVLKKSSGIDCPARTIHEEDLQAAVVTAVNDAWSRKDAILPELRENIRSVLQEDTDAKLAEIDAEVNQKQAELLDAGKDQNKIDEIAEAIMTLRETRQSILTEAAMKKDVQDRIEDLATFLDEQVEAVTEYSDALVRRLIERITVYDEKLIVEFKSGLEVEVEA

SEQ ID NO: 10813 - protein, 526 aa, synthetic construct
MANVTMIPATRQKHSKLPVGGRKKRRVAGYARVSTDSEEQLTSYQAQVDYYTQYIRSNVDWEFAGVYTDEGISALNTKHREGFNSMVADALAGKIDLIVTKSVSRFARNTVDSLSTIRKLKEHGVEVYFQKENIWSFDGKGELLLTIMSSLAQEESRSISDNVTWGQRKRFADGKVNIPFSSFLGYRRGEDGNPEIVPEEAETVRTIYKMFIGGKTVNAIAKHLTAQGIPTPRGKTVWQTSTIESILTNEKYKGDAVLQKKFTVDFLNKKMKVNEGEVPQYYVTDSHPGIIDKAEWDLVQAEMAKRKAKGRHHNSLSPFSSKIICGDCGGYFGSKLWHSTDKYRRTIWQCNSKYQGEKKCGTPHLNEEDIKRLFLEATSELMADRDALLEDCIVMRNTLADTMAIDRECEKLTEEMDTVSILIQKLIAENAAKAMDQDEYNSKYDALARRYNAAQERCDKLQGRKATIGFEVDVLECFMFEISALPDLPVEFSDHLWNSMIDHVTVYHDDRVAFSFKNGREIIKTL

SEQ ID NO: 10814 - protein, 424 aa, synthetic construct
MPKTIEQRVFPKQMPRKKRVAAYARVSSAKDAMHHSLSAQISHYSSYIQSHPGWEYVGVYADEAKTGTKDSREQFQKLLADCRAGLIDIVLTKSISRFARNTVTLLETVRDLRSLGVDVHFEEQNIQTLTADGELMLSILASFAQAESQSVSENQKWRVKKNFQEGKPWGGTLLGYRYYDGRYVIEPTEAETVRRIYREYLSGKGTTAIANGLNADGVPTRLGGVWHKSAVMKILKNYTYTGNLLLQKTYRKDYISKETVPNNGEMPMYHAADSHEAIIDLDAFDAVQAEIERRSKKYTSTKRNYAARYPFSGMIVCGNCGKHYRRKTTLGGIVWICTTFNTQGKAVCPSKQIPEEKLYEMTADIDLGDVDSIIAESGNIIRIRMKDGSEITRHWADRSRAESWTDEMKEQARQKQLERSKCNG

SEQ ID NO: 10815 - protein, 668 aa, synthetic construct
MAYVRNKKKILKFWSKKKAALYVRVSTRYQVDKDSLPFQRKKLKEYCKFLGIEDFVIFEDDGYSAKNTDRPHFQEMMSRVRDGEFSHLIVWKVDRVSRNLLDFAAMYQELKDHKVTFISMNEQFDTSTAIGEAMLKIILIFAELERNMTSERVTGIMLDRAEQGLWNGARMPVGYRWNPEIKFPEPDPEETKIVQFIFDEYERVRSTTKIARYLNHNQIASKRGGQWTSKLIRDIIRNPFYIGTYRYNLRESGRGPLKPESEWIVRENNHPAIITKEQFDRCNAIMDENGTSRDTSELRARKYVHTFSGRLVCGKCGANMIASKDRARANGWRPSMYRCAQRSRMMDCDNSKTVNESYIGPFIFNYVANLARIQKNFKNIKTLEQLEKELLKGPEFENMKVSKESLRRTFDALAFQEVGKGAYLPDIDLSDGDDDYTAAEQLSILKRELDKCKTAIDRLTDLYLYDPDSMTKEEFAKKKKDLVNKIAGYEKQIEASQATGDKDDLADLEFIRKASAFLVAQRIVSKKHVDYIQMALDLDNEILKDFVDQIIDRIEILEGRVQSIRFVNGLVHEFTYSTPANLPVCQKCGGRIGSTCGCRTRTFDFAGKPYRRIKVGDPGDKFQGVSGAVCPECSAQAGRWHHWKCGIERCPICGEQLIACEHGPNGKD

SEQ ID NO: 10816 - protein, 521 aa, synthetic construct
MNKSITVIPARRRVGNTVNKEVKPKLRVAAYCRVSTDSDEQATSYDTQVEHYSNFIQKNEEWEFAGIFADDGISGTNTKKREEFNRMISECMEGHIDMIITKSISRFARNTLDCLRYIRQLKEKNIPVFFEKENINTMDSKGEVLLTIMASLAQQESESLSKNVKMGMQFRFQKGEVQVNHNRFMGYTKDEDGHLIIEPAEAEIVKRIYREYLQGASLKQIGDGLMEDGILTGARKPKWRPESVKKILRNEKYIGDALLQKTYTVDVLTKKRVKNNGIVPQYYVENSHEPIIPRDLYMQVQEEMLRRSNLHSGANRKKRVYSSKYALSSIVYCSKCGEIYRRVAWNNHGKRSTVWRCVNRVEHGPDCCDAPTVKEEELQSVVVKAINMALGGKEDMLADLEENIAMVLALEDETSIESLDAKLEDLQQELLKRANARQDYEYLADEIDHLRERKQKVMAENAEREGLKQRIAEMQQFLAEQRGTIQVYDEQVVRKLIEKITVHDEKVTVAFKSGMEIDVKI

SEQ ID NO: 10817 - protein, 628 aa, synthetic construct
MKAAFLIRCSTKNQDLNRQTRDLTRLAKSMGYEYDLENLVYGEKITGKDDVTKKNRDSIDRLLRAAKEQRFNVVLVSEVSRMSRDPASGRIYVRLLINMNIPVYFKDIDLWTINPETGKKVRDAELVIGAAFDAAWKYLKSMKTQIASARRNELDNNRISIGQPYFGYKRYEGTDKSKKNQIVVNEEEAEVVQAVYNEYLKEGATLKSTALAITDKYGEKLNRKFSLGTIEHILTYESYATGIKKVNLKDPDTDEVEVFDVNTPIIIDKELYEAATNKRKKNRVKDEPYPNQQVYLLSKLIKCPDCGYTLTPRRKAGEFGQTYRLVNGKPAISWLCMSGINNITDCTNRTSIANEKLEPIIWELVKKELIGYANMNDEKREEQIRECEEKIEYQNYSIQNFTKEIDKLKKRLSTAYQFSINAAEMAGDDEDMRTMAMEEFNRTAKGVRQEMKNFEKSIEQAKGELEKLRDLKTFYSQPTLPKDYLEQIEGNFTEKRNLVKQLITKIVPYRITTFKKKERESGVKTCNKMITVKNGAVLLEVYTIGGVYNVFYNANSKFQVKTAYYVHGEYATFQNGIRKFPAYDEGEYFVISNANMVMETDDIDEVVTVNEFVDIAIANNWVIEYQYQ

SEQ ID NO: 10818 - protein, 572 aa, synthetic construct
MASRIAEKLAAKKAAIYIRVSTHWQVDKDSLKVQRRELIAYVTLVLGITDYVVFEDPGYSAKNTDRPEYQAMMDRIRTGEFTHLVVWKIDRISRNLIDFAAMHDELQSLGVTFVSKNEQFDTSSAIGEAMMRIILIFAELERKTTAERVTAVMLSRASDGQWNGGRVPFGYSWSKETKTFSIVPEEAKAIRRMAELYEQYQSLLYVAKYLNDAGIVTKTGGQWTPTTVRTILTNPWYIGQYVYNVHSDGKGIEKRDSDEWITVENHHEPILNEDVFCRMKFLLTRNKRGGVPSHKTYVRKNIHIFAGLLRCGQCGSNMTANLDRRRANGFRPSQYACGSRRRKGTSCTNKYISDTTLGPFVLNYVANIIRASKNSSEATTPEVLERKLLRGEAFEDVASVSTDALGQLLDAFRSAGDAVEYRPQIAFSGDDNSIREIDTLRARRRKLDNALARLNALYLYDDEAMPEKDFVMQRGQITKQLEEVNARIEELQNQESSEGLGDDFIGKASYYIMANKLIEDRYIDYEKYIRAIDPSIPRSFLQQIIDHIVVNDGRVISITFKNGSTHTFTYKT

SEQ ID NO: 10819 - protein, 525 aa, synthetic construct
MAKNVTTIPATRNRYTANPINSKKKRRVAGYARVSTDMEDQQTSYAAQCDYYTQYIQSRDDWEFAGLYSDEGITATNTLKRDGFNKMIEDALAGRIDLIITKSVSRFARNTVDSLSTIRKLKDNGCECYFEKENIWTFDSKGELLITIMSSLAQEESRSISENCTWGWRKRCADGKVTVPFGRFLGYDRGEDGNLVVNQEQAVIVRKIYGYFLQGRSPYQIAKLLTEEGIPTPGGKKVWGKAVVQSILTNEKYKGDALLQKVYTTDFLTKKKKKNEGEVPQYYVEGNHEAIISPEVFDRVQILMQAREPGKNRNSSVSIFSSKIICSDCGSWYGSKVWHSNDKYRKVIWQCNHKFDGEEKCSTPHLDEETIKQIFIKALNILCKERDLIIAGFEEIKDTAFLTDELEAEAGQQNGEMNVVAELIQNCIDENARVAQDQTEYEKRYDTLVQRFDTAKAKLEETQAAIAKRQAQRQMMENFMEVLRSLPEQVDYFDEGTWYAMCDYITVYSKDDIRVTFHNGMEIRV

SEQ ID NO: 10820 - protein, 514 aa, synthetic construct
MATIKKIEPKTPTLAKRKRVAAYARVSRDTERLMHSVSAQVSYYSSLIQKNPEWEYAGVYADSGISGTGIKERDEFQRLIEDCEVGKIDIVLTKSISRFARNTVDLLATVRRLKEIGVEVRFEKENISSFSGDGELMMTIIASFAQEEVRSTSENIKWGIRKGYANGIDVARNKKVFGYRYDGEKYIIQEDEAEIVRFIFKSMADGIAPNVIVKELAAMGAKTWRGYDFCYGNLNTILRNEIYIGDRRMQKCFVADPIKHNKVKNRGELPQYYISDCHEPIIDKETFDKVQEILKQRAEAVPTYPFTKKIVCGTCGRAFTRKKGKIKGKTYIHWICRGKKEIGTTCSSVNFSEEELEKISAQMMEMQDFDSEAFENTVSMITVEKNGNLRFQFTDGSMKVWENLHLHPQRHEVTVTDCFQGKIVCAHCGNTYHRVVSGDRWVYWYCMGKKKKGVDCHSINYADFQLRRISASILRLWSFKESEFEKNIEKIVVLEDGSLEYHFYEGRTEMWQRM

SEQ ID NO: 10821 - protein, 530 aa, synthetic construct
MEQYLIYLRKSRSDLEAEAHGEGETLSRHEHTLLELAKRQHLNVTDIYREVVSGDTIAARPMMQRVLSEVEQGVWSGVLVMEVERLARGDTIDQGIIAQTFKFSGTKIITPIKTYDPDNEFDEEYFEFGLFMSRREYKIINRRLQRGRLASAKEGKWPSGLAPFGYRRVKLKNEKGCSLEPIEEQAAIVRMIFDLYTVGLQDKDGSARPLSLGSIATRLNDMRIPSPSGSQWARITIRGIIKNPTYIGMVRWGSRETKKKVVDGKVVSVRGPADPEKECVFKGIHPPLIPKETFELANDKLARSENTSTHKEKVVRNPLAGLLVCSECGRQMMRMINPVHPDMPVVRCPRRGCPNCSSYLPIVEERVIQGLSEWMKGYELEWSSAAESSSVSSVGVREKALASAEAELRKLQQQLERTHDFLEQGVYDTDTFLSRSRMLSDKIAVAKDSVARCSRELTEEKLRETSRRDIIPKVRNLLDVYPLLETAEEKNALLKEVLEKVVYQKLNEKRKKSPDGFTIEIYPRIPKSEK

SEQ ID NO: 10822 - protein, 501 aa, synthetic construct
MQINIIEGKSQNNRKLKVCAYCRVSTDADEQENSLENQISHYEDDIRSNPDYEYAGVYSDFAISGFKDKRPGLQKMLADARKGKIDLILTKSVSRFARNTSIVLEAVRELKELNVGIFFELQNINTLSGEGELMLTIIAAFAQAESESGSIGAKMVYRRKYEKGIPVQYLDRSFGFTKDERGVFIADENEAVWVRKIYEMVADGYTVAAVKRYLNEQGIKTVSGTKWIDSTVFRLIENEIYKGDYIMQKHYVNEERKLVRNRGQVTSWYIEDDHEAIVSPELWQKANDLIAKKREYLATGSFIEEMNDKNYPYRNSLFCHKCGYPLYPRIYSNGNRLNWGCSGTKRYGKNFCEGINVPDGVVRAWKFEGNIYVKVVNSGKHIDRFSYTKEASWKRRNKKKVVESGVPELTEANYPFKDKIFCAHCGSPLVRHFNTKNHKVFWICNGNKRKGKSFCQGIRIPDEEVRAFGEIKKDIFIEGKVDRYGKKRYSYTCSAPKSDSQ

SEQ ID NO: 10823 - protein, 463 aa, synthetic construct
MARSVTVIPAAPQRVTVSRGQVVEKKIRVAAYCRVSTDHEDQIHSFDAQVDYYTKYIKEHENYELAGIYADEGISGTNTKKREQFKRMIADCKAGKVDLVITKSISRFARNTQDCLQYSRMLKNLGIGIIFEKENINTLDSTGELLFTILSSLAQDESRNISENCKWGIRTKFRNGQMHLNTYKFLGYDKNEEGKLIINKEQAKTVARIYEEFLWGINPQQIAKELEEEGVPGCCGQTKWYTTTVIGILKNEKHKGDALLQKTYTADFLTKRQVKNNGEIMQVYVEDSHEGIVDKFTWEVVQAEFRRREEFMKKHGLTKYFYGSECNPFTSKVFCGECGHSYTKHSWKNRGVEQWQCKNHRTNGRLTCKNQFVDAGDLEKAFVQAYNELITEELNRERWKKQLESEDALGSYRASQMLELLEQGTLSSFAPEIAQLTVIEVTVLGAKKFEFEFVDGSKINVTM

SEQ ID NO: 10824 - protein, 576 aa, synthetic construct
MKKNFKMPGSGSETPIRVAIYVRVSTVYQIDKDSLPMMKQDLTSYCKYILNTDDFVIFEDAGYSGKNTDRPAYQKMMSQIRQGLFTHLLVWKIDRISRNLLDFANMYAELKDLGVTFVSKNEQFDTSTAIGEAMLKIILVFAELERNMTSERVTATMINRASNGVWNGGRIPFGYSYDKPTQVFSINPEENKIYNFMVETYEDTQSIVHTSRRLNEAGYRSRNGNMWSPVAVWTILRNPWYKGVYRYNYYKIPGRKAIKDESEWVIVENHHPASIDPDRFDRIQATLDKNARYRNTPGRKTAQKNVHVFSGLVWCAECGSAFTASPGKLHVSGYRPSKYGCPNVQKTKTCHAKYTSDVVLGEFLLNYILNILNAQKQFAYIHSTDDLQKRLLHGSTFSNVDHVDPDGLASLLNMLEKCSGSDPVLLKRPRSKPKMDPELKRMMADQKKQQRALDRLNDLYLYSDDSISEREYLVRKQQITDRLQEINEAIGMMSQEPWMRTMNDEEFIRQASSFILTQKLADKQYIYYENLAESLDPEILKNFFVSILDSIILRDGRPETVVFRNGLSHTFTYKDS

SEQ ID NO: 10825 - protein, 558 aa, synthetic construct
MLQSDKITALYCRLSQEDLQAGESGSIQNQKVILQRYADEHHFLNTRFFVDDGFSGVSFDREGLQAMLQEVEAGHVATVITKDLSRLGRNYLKTGELIEVIFPEYDVRYIAINDGVDTAREDNEFTPLRNWFNEFYARDTSKKIRAVKQAKAQRGERVNGEVPYGYIIDPENKNHLLPDPETAHVVRQIFAMYIRGDRICEIQDWLRENKVLTVSELRYRRTGSCRHPRPHPSCIYNWPDKTLYDILSRKEYLGHTVTAKKCKVSYKSKKTRVNPEDKRYFFPNTHEALVDEETFDLAQKRIATKHRPTKSEEIDLFSGLLFCGDCGYKMYLQQGAGTLERKHAYTCGRYRNRIRTGEVCTTHYIRKSVLKELVLGDIQRVLSYVKAHEQQFIADATEYGDVKANRALREKRGELDKAKARLGELDHLFRKLYEDNALGRLSDQQFTFMVSGYDDEKAALVEKIRGLEKEVSTVTERRDDVGRFVQIVRKYTDVQELSYEIVHEFIDRILVYELDKDTNTRKVEIYYSFVGQVDTGEAHTESVSFFRQIGADVKSYAV

SEQ ID NO: 10826 - protein, 515 aa, synthetic construct
MERYNESSDVRQLFRGAVQATKDEAMRIADMSGETTKRVAAYCRVSTDSESQETSIETQRAYFEHEIGNHPGWKLVQIYADHGVTGTISMKRPAFRQMIEDALAGKIDYILIKSISRFSRNTVDCLQYVRMLREKGVYLHFEKENIDTSSAYSEMLMTVLAAFAQEESVSISENIAWSFRKKYEAGIPRRFVLFGYRLDEDGEYRIVEEEAAVVREMFTLYEHGYSHKQIANAFNRKGYKSPTGLTWGETSIHRMLDNEKYVGDVMMQKRVTLDPLTHREVKNDQTVYPSYYVQDHHAAIIDRAQYNRVRKIRAMCNSKLGPLQYPYDDKLVCPICGQRLIQRRSDVLDNKSAWHCERNESSCERYVLNSVIVNEAVLNACKALNRDEIQVVIEKLQGEKPQRSKSREKLTAAEHLLELWKKRLFLKKVDYYWLDDTVDRITFSKENTLTVHWRCGLKTTVPLPVRRHRENPVYAAEVYRKRKAEGTLKPRRRIQKRLEDPNPIPIISVKEGQKK

SEQ ID NO: 10827 - protein, 416 aa, synthetic construct
MKIHHIPSIHQRSKKRVAAYCRVSTDMKSQEESFETQVSYYRSYIERNDEWVLAGIYADGGVSATGAAKRPEFMRMIADAMEGKIDLILVKSISRFSRNVVDCQVYVQQLRSKGVEVRFEKERLSSLDASSEMIFSMMAAIAQDESRSISQNIRWGYEKRFAQGIHHMGNRRVLGYDEVNGVLTPNKDAWIVRMAFELFNQGMSYQKIAEAITAAGGKRMRGSTAFSASSIQSIVDNEIYVGDRMLQKRPPQHYLTKKPDPNAQYQTYYWRDTHEGIIDRKTWEKAQAVLDARKRDRISGVYKKTPATHFLYGKVFCARCGAPYKRRTLSGGTADGAPVYHKVWNCRERQKGKAGNGCRNTSVAEEELLRGISDALGWEWKGAEVFDAERFLREVQAVHLENGAVSVQKWTQRVSA

SEQ ID NO: 10828 - protein, 438 aa, synthetic construct
MIEDALAGKIDLIVTKSVSRFARNTVDSLVTIRKLKEKGVQVYFEKENIYTFDGKGELLLTIMSSLAQEESRSISENVTWGQRKRFADGKVNLPYKNFLGYRKGADGFPEVVPEEAVIVRRIYSRFMEGLTSGAIAKELIADGIPTPSGKLRWQSSTVESILKNEKYKGAALLQKCFTVDFLTKKKKINEGEVPQYYVEHSHEPIITPEEFDKVQTELARRKQISRQYSGKSIFSSRIVCGDCGSYFGSKVWNSTSKYRRVIWQCNGKFKGEHKCETPHLDEETIKARFVTALNAIIESKDNILEDCRLMQATLTDCTGIDTEIESLLEEIDVVTELTMRCIAENSQTAQNQEEYAARYNGFVERYEKAKAQLEQLRTTKAEREAQAEAIGAFMFEVQELDALTEFDEKLWLTIIDTVTVHTDGRMAFKFQGGTEIEA

SEQ ID NO: 10829 - protein, 493 aa, synthetic construct
MPEALNAVIYARYSSDRQTEQSIEGQLRECYAFAKANDIAVIDTYIDRAISGKTDNRPAFQKMIEDSAKRQFQAVIVYRLDRFTRNRYDSAIYKARLKKNGVKVLSAMENLNGSPESIIMESLLEGMAEYYSVELSQKITRGMRENALKGKALGGQRVLGYKVNSDCYFEIDETTAPVVVDIFKLYSSGKTVKEICDILNARGVKTARGGAFNKNSLHTILTNKKYIGIYKTKYGEIVGGIPAIIDKELFEMVALRMEQNKKAPARAKAEINYLLSTKLFCGKCRSAMVGESGTSKTGKKYYYYACVKKKREKACDKSNVKKDWIEDLVIQRTVTDILKDDVIEKIADRLVELQKAEAAESGTMLYLENSLAEIQVSIKNIMTAIEKGIITESTKTRLTELEDEKRNVEIEIAKESIARRIISREQIIYWISSFKDGDITSEKYRQQLIDTFVHAVFVYDDKIVITYNYSGENNTATISDLDLSSPPYDTNPP

SEQ ID NO: 10830 - protein, 485 aa, synthetic construct
MPTSDLKIAAAYIRVSTDDQEEYSPDSQVRLIREYARKNGYLLPEEYVFQDDGISAATARKRPAFNRMIALAKEKERPFDAILVLMFSRFARNREESVLYKGLLRKQGISVISVKEPAVDGPFGTLIESIIEWFDEYYLINLSAEVKRGMSEKFLRGEAMGTAPFGYRIDSANKTFTVDPERAEIVCDVFRSYADGAGLRDIAVQLGDAGITTRRGNRPDNRFVEYMLRNPVYIGKIRWTPGHKTRYSRVHIADGVEVVDGKHPPIVSMDLWEAVQRRMDQRKAAYGRYQRQAPAAWMMRGLVRCSACGATLIMAGRSSSCPFLQCHSYAKGSCHMSHSLSLRRANAAVLAGLRRSVGTLTFHMVPHLTSAPSRAADYGRLLEQERRRLARCKDAYQAGVDTLEEYRDNKARLEERIRRIEEQAASAAAAPGSFDKAAYGKKAADILRFLETSADEGAKNEVLRSVVDHITYEKASRHLAIYFYT

SEQ ID NO: 10831 - protein, 507 aa, synthetic construct
MKRAISYIRFSSEKQSRGDSLRRQAKMVTDWLKAHPEYYLDESLTFRDLGVSGFTGKHLKGGLGDFLTAIEKGLVKAGDTLLIESLDRLSRQDVDQASELLRNILRSGVDVVTLSDGEHYTRESLKDPLALIKSILIMQRSHEESLRKSERIQAAWDAKKEAAKAGIKISRRCPAWLKLNDDRKSFSIIPEKVVTVKRCFQLRLEGKSIWEIVRTLNDEGHQTLNQYKAGKFGQTSVQDLLKNRSVIGYFTPKGCEEIAGYYPSIIPETDFYKVQQLSYSRYGRKPASDKPLSVNLFKGVIRCSECGHALIITGFSDTRSGIYRCPLRNENRCSAKGLSRKQTDGTLLALLSRLDRFDSDTTNTIDTLKLHREHISSNIEKLVQLSLEIEDLSAITSKLRQLKGELSQVDADIEKETQRLKSIDVGCLSDCDLTTKAGRIEAQLIIKSAVKEVVLNTAKRRCKVTFHNGKAITLPITENPSDNVTEAIQSLSEVTERGLIDVDEVII

SEQ ID NO: 10832 - protein, 523 aa, synthetic construct
MAKVKVIPQTINPMTMSVIGSTQKRKVAAYARVSTENEEQQSSYEAQVKYYTEHIATRPDWEFVKVYSDEGISGTNTKRRVGFRSMIQDAVDGKIDLILTKSISRFARNTLDSISYIRQLKAAGTEVYFEKENLWTFDSKSEMVLSMLSAIAQEESRSISENVKMGKRWQMKEGKVTIPCKAFLGYQNIDGKITIDKDEAIIVRRIYSMFLKDGMTRKAIADTLKAEGIPTPSKKGCNWTVNNIQSILTNEKYKGDALLQKVYCDDYLEHKVKKNNGVLPQYYVENSHPGIINKEEWTMVQEELKRREGIRYSYQTSNPYLAKLRCSECGHFFGIKVWHSNSIHRKEVLQCNGKYKCGCKSPNLSQDEVNRKFIEAYNQVMDNKKGLIEDTKEVIEMLTSTEKIDAKVQALTNEMEEVQLLVENLIHDNARRNQDQEEYERHYQELVSQFNAAKAKMKSLLEEKQSKLDRIEILNAFIVSLEDKEAVIDEFSTDLWNLMIQDALVSEDGTIKFVFKNGTEITM

SEQ ID NO: 10833 - protein, 536 aa, synthetic construct
MPRKKKLQEVGGLRLVAYYRYSNGGQQTEQSIEGQRRDCEAYAKAHGYKIVHEYIDRHISGKSDSRPAFQQMISDSDSHLFDAVICWKTDRLARSRYDSIIYKTRLRRNGVKILYAAETVVDGPEGIIIEGLMESLAEYYSAELAQKLRRGQRESALKCIALGGNRSFGYDIGPDKHYCINEKQAPAVRYIFEQYAAGATAADIVRELTARGYRTSRGNPFNKNSICRIITNEMYLGVYKYADIRIEGGVPAMIDRELFNRCQTQLAFNRAHGGGKGAPRADYVLVGKLDCGLCGHAMKGASATGHTGSKHYYYTCTQHVEKKCPKTSIEKNYLEQIIVDGVAKYVLTPEKISQIVDCMMELQAKEQEPKGNPEKDALEAELAECRRKQNNILEAIEEGGSARLAARLRALEEQEAQLTFALGEINNAPTPPQFSREALTFMFEQFRREEDEVDEEYRRRILDTFVSSILLYEDRAEVKFNITDQKTGDFERVILPISANKKPPEDDDITSNSEGSTALRLVEAMGVEPMSEKSSV

SEQ ID NO: 10834 - protein, 523 aa, synthetic construct
MAKSVTTIPATLSRFTAAPINSTKKRRVAAYARVSTDNEEQLTSYEAQVDYYTNYIQGRDDWEFAGVYTDEGITGPNTKMREGFKSMVADALAGKIDLIITKSVSRFARNTVDSLTTICSLKEHNVECYFEKENIWTFDGKGELLLTIMSSLAQEESRSISENCTWGQRKRFADGKVTVPFNRFLGYDMGPDHNLVVNPEQAKLVKRIYGMFLQGQSPFQIARTLTEEGIPSPGGKDHWNPSNIKSILTNEKYKGDALLQKAFTVDFLTKKKKANEGEIPQYYVKDNHEAIIDPETFEMVQTLISTRKKGRNRKSSVSIFSRKVKCGDRGSWYGPKVWHSNDAYRKVIWQCNHKFDGEKCATPTLTEDEIKELFLRAANQVIDQKEQFIAIYDQVLSRSLDTTALESELLDLEAEINIAAELIEDCIKENAHVALDQAEYQKRYDALVVRFDKAKARHTEVTDLIAERMARKHQIEAYLKNLRSREPLTEFRETDWLAMVDYIIVHNKKDIRVTFKDGAEIKA

SEQ ID NO: 10835 - protein, 590 aa, synthetic construct
MKTVEKIERKLPVLKARKRVAAYARVSMESERMQHSLSAQVSYYSALIQKNPEWEYAGVFADYGISGTGTKKRDEFNHMLAECEAGNIDIILTKSIQRFARNTVDLLNTVRHLKELGIEVRFEKEKINSLSGDGELMLSILASFAQEESRSISENVKWGTIKRFKQGIPNGKFSIFGYEWQDDKLVIIPEEAEIIRWMYAEYMKGASRIEIGRALMDRGIYTRQGKPWVDSNVKVILTNITYTGNMLFQKEYCEDPITKHRRKNYGEMPQYFVEDTHEAIIPMDEWQAVQAEFKRRRDLGPFGNKSLKLSAFSTKITCGCCRKHYRHSGKRNTAGEVYYIWTCQTKSQKGASACPSKNIPEKMLQNTAAEVLGLDEFDEDVFSQQIEEVIVIGDDTLTFRFYDGHEVTTKWQSTAKTDWWTDERRKLWGERHKRKDTNPNRNTFYEFTGFIKCGCCGANYRCQSGKRKDGTPTRSWYCTGPRSECRNPAIRDETMKRLVTEILGLDEFDEAAMDAQIESATILDHMVTFHFRDGHIESRDFLDKRHGTPWTEERREKARESMKAAWTDERREAMSERIKKIRSEKKWPNP

SEQ ID NO: 10836 - protein, 502 aa, synthetic construct
MEIQIREGSREQKRKLKVCAYCRVSTDADEQENSLENQVRHYETVIKANPNYEYAGVYSDLAISGFKEKRPGLQKMLADAEKGKIDLILTKSVSRFARNTSIVLEATRKLKELNVGVFFELQNINTLSGEGELMLTILAAFAQAESESGSAGAKMVYQRKYEAGIPVQYLERSFGYTKDERGVFVADEAEAVWVRKIYKMAAEGYTPASIKRYLNENGIKTVGGVQWVDSTVFRLLENEIYKGDYIMHKHFVNEERKLVRNRGEVDAWYIEDDHEAIVSPELWQKAQDALAAKRDYLAEGSVIEEFTEENYPYMNKIYCAKCGYPLYKRIYSKGNRLNWGCSGTKRYGKSFCDGINILDGVLRSAWHFEENTYIDEKASDKGVKEFTYLKEHSWKRRHKKKQPSAIPENTETEYPYREKIFCGLCGSRLVRYVNPQNHKVTWVCNRRKRKGKEACDGTRVPDTVIKGWGEIKNDIYIQRKDDKNGKKRYSYTSKKPEGADRA

SEQ ID NO: 10837 - protein, 464 aa, synthetic construct
MARSVTVIPARSQKVRTGHKAVQEKKIRVAAYCRVSTDQEDQLHSFEAQVEYYTKYINEHENYEMAGIYADEGISGTNTKKREQFKKMIADCEGGKIDLVITKSISRFARNTQDCLAYSRKLKNLGIGIIFEKENINTLDSTGELLFTILSSLAQDESRNISENCKWGIRTKFKNGEMHLNTFKFLGYDKDENGKLIINREQAKTVRRIYRDFLWGLNPAQIAKELEDEQVPGCLGQTKWYASTVIGILKQEKHMGDALLQKTYTADFLTKRQVKNNGEVAQVYVKDSHKGIIDKETWNAVQEEFERREKFMQKHGTDRYSYGSECYPFCEKIFCGECGSLFTRHSWKSRGIIQWQCKNHRKDGKVACTNAYVDNADLEKGFVKAFNRLVGEREKHIERWNSMKLDGTPLEKIRAGQMMEATESGQLQQYVPEAAQLVLEEITIFGAKKYEFAFLEGSRVKVSV

SEQ ID NO: 10838 - protein, 512 aa, synthetic construct
MPKTEEKQTITAVIYARYSSDRQREESIEGQIRECKAFAAANGYRIIGTYIDRAMSARTDQRPDFQRMIHDSDRHLFQFVIVYALDRFSRSRYDSAIYKNRLKKNGVRVLSAKENIRDDPTGVILESLLEGYAEYYSLELAQKVRRGMADNLLEKKWVGTVIPFGYKKGTDSRLYVDESKRQAVIDIFQMYSDRYRLVDIIAYLNAHHFTTAQGRPFSRNSLNNILVNSIYTGTFRWAGTVYPGYAPRIISDELFNKVQKIKEGRKRNMIKSTSPDYELTGKIFCGRCGRPMVGVSGTGKSGNTYFYYKCSGKTHGRKDCDAKAIRRDAVESAVYNATVAMLKQPHAIKIITAQAILVQEREQGNPEVDRLKHEKAALDAKIRNISKAVAAGLTADEIISQANEYSNRSKELESLIQVEELKEKTFTLTPEAVTFFLEKLLEKAETGSTTLSTFWDFIRCIKINGCIAEIHFNYTAVPATLDNPIRVKIETNEECSNDDVLVDHQGFEPRTP

SEQ ID NO: 10839 - protein, 444 aa, synthetic construct
MKRIIRKLEPAIPKLPRLLRVAAYARVSSGKDAMLHSLSAQVSYYSKLIQNTPSWQYAGVYADEALSGTKDRRREFQRMLADCRAGKIDRIITKSISRFARNTVTTLETVRELSQLGVDVYFEEQNIHTLGAEGEIILTLLAAYAEEEARSVSENQKWRIEDNFKQGRIWSTTMFGYTIQNGVLTPVPEEAAVIRKVADLYLQGVGRAQLERAVAKLGFLSRQGKPLRGAPMIDLICNEKVAGDMLLQKTYVSDPITKVGKVNRGERTMYHIEGSHEAILDRETYEKVLVERQRRAALCPPHPGRPTVYPFTGKVLCQNCGKHFRRRIAGYGPYKKPVWICSTFFHKGKAVCPAKQIPERILEEMTTKAMGLPHFDAAAFAETVAEIQVPENGVLNFLFRDGHTVHLTWDNPSRRESWTPEMRQQAREASLRRLAEGGDAVCRQ

SEQ ID NO: 10840 - protein, 544 aa, synthetic construct
MQAVRMPKVTVIPAKKDLPLYALSTEAQAKLLRVAAYARVSTDSAEQLTSYRAQVDYYTRYITGHDGWELVEVYTDEGISGTTIRKREGFQRMIADALAGKIDLIVTKSLSRFARNTVDTLTTVRALKEKGVGVFFEKENIHTLDSKGELLITIMSSLAQEESRSISENVTWGHRKRFADGKIMLAYKNFLGYRKGPDALPEIVEEEAKIVRQIYRMFLCGKAPNAIARYLTEAGISTPGGKTTWRAKVVESILTNEKYKGDALLQKSVTVDYLQKKIKPNEGEAQQYYVEGSHPAIIQPELFDLVQYEMKRRKADAIQSFSTHPFTSKLFCGECGGRYGSMVEHTTDKYRRAVWVCGNKRYHGLKCKTERLLDSEIQTAFLKAFNRILGRRTQIMDAYHEVLGVLTDTTALDAALARLSEESEVVAAMIQKAVDENSSTVQDQQEYERKYTALCERYMDTKRQLDELSDQRAERLAKRTKITMFLEELHAQKDFVTEFDEELWYMTVDRVDVYAQMRLIFTFKDGSTVEVQAQKAAPRSLTTV

SEQ ID NO: 10841 - protein, 519 aa, synthetic construct
MKKVTKIAETASSKVKLKKIRVAAYCRVSTDSDAQLESLEAQKTHYENYITSRDDWEFAGLYYDEGITGTKKDKRPELLRLIDDCKAGKVDFVITKSISRFSRNTTDCLELVRKLLALHIPIYFEKENINTGSMESELFLAILSSMAEGESVSISENNKWSIQKRFESGTYKVSYPPYGYDWDGEQMIINPEQAAVVREIFAALLSGKGTHAIADDLNRRGIPTKRNGRWTATTIRGMLSNEKYVGDCLFQKTYSDSRFVRHNNHGEQTQYMVKDHHEAIISREDFEAAHAFIHQRATEKGVVKGSDKYQNRYTFSGKIICGECGDTFKRRIHSCTGYKYTAWCCSTHINDKDKCHMLFVKDDDLKQAFVTMMNKLVYAHRIILKPYVDALKNTSSDDSLRRIQEIQTLLAQNTEKRETLTKLMTQGIIDPILFNKETNELLSQADSFRDEINALKNAVSGDVTKVTAATALLHFTEKGGILQEFDDDLFNEYVNRIIVRSRNEVRFELKCGLTLRERM

SEQ ID NO: 10842 - protein, 546 aa, synthetic construct
MKQKLVAAIYARKSVILKKGDTLNIQEDKCRENLKLRYKYDYDLTIKCFTDEKTGKDMDREEMQSMIEQIKEGKVQVVCAYKLDRFGRNAIELVNFIELLKKYNVKLHCVDDQINYDPTDDNDVMTKLMIVLLSVLAEMERNNIRQRVIVTVYSLARKGFWLGGTAPYGFVSVRVPNEGIIDDVGAKSICILNPYAEEIQVVKYMYATYKDEDVSYSELANRCNDLGYEPRFASMFDQHTIQGMLMNLVYVKAAPQIYDWLISKGYSVENIPARDKFDGKHALLTYGKTLRGEEADNNIEAENKNRKDVKDWIVAIAPHEGVIEANDWLVVQNKIERNKGSKSKKNTKHNNVLITSDMFRCGCCGGVISSFNRKSRTDDNVLYPHYRCENKRKRRGKLCDVDNLPATDVDEKIIDLIFEKRDEIASSVEYIKRNLMPARKEYVKKNIIPKLEKEIKVQLKKIDGFLENMSSGKLNDNVLEMVNNKIEECNVKIKELEERIAEEDNKMLSMDKNHQNLDLLIDKFFSLDKTDFMKLPMKDKRNLVRL

SEQ ID NO: 10843 - protein, 542 aa, synthetic construct
MVVCIATEGGENVAKKQTSGNLALEQQRVIVIPAHDEIAARKLRVAAYARVSSSSEDQLNSYRVQNQYYSELISNNPDWEMVDIYADEGITGTSVEKREDFQRMMQDCRKGKIDRILVKSISRFARNTKDCLAAVRELKELGVSVQFEEQGIDTSKVSSEMVTAIMASLAQKGSESISGNVRWGVQNRMQDGTYMTASVPFGYELCDKKMKINQEEAQIVRQIFDLYLSGVSIEKIVLELNAGCHEISDKKIWCKTAVSYILGNERYIGDRLLQKFYMTDTLPTKQVRNNGEKAQYYVENTHPAIIDRERFHAAQALRVCRKKRNGCAITMRQSNLRGNCFCGMCGGKLRSKEENGIIYWVCKTHSKDKKSCANSPVQEKIMEQAFCRLYYKLKHHGGPIFTQMLSNLQKIRYSRMLWSEDVISLNKKISDTLSQVQFLTQLQQAGGVDPDTFISSNNKLSEQLRRLKQEKGRLLDTDSDDLADRTRDLMDALEDGPDFLDGFDAELFDALVDKIIVDSNERLRFRLKNGLELTEQIERTKR

SEQ ID NO: 10844 - protein, 541 aa, synthetic construct
MTDEKPRVIIIPPKPELQQTAAVTKQLRVAAYCRVSTKEEEQASSYEAQCEYYTDKIMSNKEWTMAGIFADEGITGTSTKKRTEFLRMIRQCKQKKIDLILTKSIQRFARNTLDCINYTRILRQLGIGVLFEKENINSLPPDSEFMITMYGAMAQSESESISGNIRRGRQMHAKVGTLKVPCYRLYGYEKDADGKFRVIPEQAEIVRELYKRYESGASLRNLQDWLEENQIKTVLGESKWTTTSIKGILTNEKYCGDVLLQKTFRADVISKKVIKNVGQMAQYYMPDHHEGIVSREQYNAVKAEMARRSALRSPSKTAVTGRSCYTSKYALSDRLVCGECGTLYRRCTWTSLGRKYPVWRCTSRLNYGTKYCHDSPTIKEEPLQTAILAAVNSAMSNKPALLDLIKNAVSVELLPVQGQSMSLADIERHLEQLDEQFQRLLAEAIDAEDKEACNAQFAEILSEQTTLKKQKEEILQSSMDADRVCAKMKQAEEAIENTVSTITEWNENAVRQIVERVTVLSADEVLVRIRGGAEIKQRLER

SEQ ID NO: 10845 - protein, 553 aa, synthetic construct
MKGAVIYARYSSERQNEQSIEGQLRICNQYAEANGLTILDTYIDRAMTGTNDHRPAFQQMLSDSEKPMPWDIVLVYAIDRFGRNSIEIAVNKQRLKKNHKTLISATQRTSENIDGSKNLDGILLENVYIGLAEYYSAELSQKIKRGLYENRSKGLFPGGRIAYGYRVENKRVLIDEERAKIVLYVFQQYAQGVIAKDIIADLTEKGVTYHGKPFALNTLYGMLRLRKYIGICNCAGTDYDNIYPPIVPTALFDEVGRILEKNKIGSKSREVEFLLKGKLICGYCGKSLQGDSGTSKNGTVKYYYKCMGRKKMNICEKDIMPKEKLEQAILDATMQVFGTPDGISAIADEIIKIHEKRMHDRSVLTILMNERDAIKKSLANIMKAIEQGILNATTKSRMDELEAQLSEVEDKIVVEQYKAQNQLKKEEVVEYLTHTIKQQPKLLIKNLIQKIVLYDDRFEIYYNYLNYMPPAEDDPDKTIRELSLSGCSDTSPLCPPENPLFSGFFHVPEIVHFVNLTSKLHRNDVKNDVKNDVKFDVRIPGENRRTICVYRLP

SEQ ID NO: 10846 - protein, 553 aa, synthetic construct
MEKSKRVVGYARVSTEAQDITRQIELITAYCNDRNYHLIKIIQEKISGARKDRKSLNELLEVDDTVADMIIVSELSRLSREDDILSVLSTINELLKQGVDILFLDKQDRIYKAGTVLSLYDIITLSVEAKASADERYKIAGRMQTGLRSKLAEFTNMFAGGTVPFGYKIIHNPEYKLNQTPKNLLVVDTPKAEAVKYLFQQLIDGNTIRQTVRVYNKLFPYKLSYSGICRIIRNPKYKGEIYRRGKLYGIMNELQIITPEDFDKANKQMRENSLFQSNAPKYYNPLKGLLFCPCGCSLYMKPNHNSYLIYRCSSAYNEKQKCENYGVKCAYILSSVWICVKETLHTEEYKRFNTQRANELQGVNKQIRETIIRKVNSVDELKAQSASLIAKIKKLNNEDLISELETDYNVLCKQIKQTEQEISELNGQIVENDAEIKRNMEQKDFSKMEQSALYKEKLQKAVYHSLSAMRGILEIIFKNGMTRYVLIKKHRNGGTYLLPDTFKGDMERKQIIVPSLRTDKDNPYSTQPINLRYTFDEFFKAMPVEEYQIPITE

SEQ ID NO: 10847 - protein, 533 aa, synthetic construct
MEKKQLTDGSMALQEKQYRVITIEATEKPQDIKLRVAAYARVSSASDDQLNSFAAQNRHYADLISGKENWSMVDIYADEGITGTSAEKREDFQRLLADCRRGLIDQILVKSISRFARNTTECLETIRELKSLGVSIYFEKENIDTATMSGEMMTALFAAFAQAESESISGNMRWSYQKRMQSGKFITCKAPFGYRLCNGKLEIVESEAQIVRLIFDRFLAGYSTTEIASEITSLGIPTRDKIPYWQHTTVCYVLKNEKYVGDSLLQKRYSTDTLPVKKKINHGNKDQYYITDSHPPIVDRLVFERAQALYKAKSSKITHAPREQYPFTMTILCGNCGTHFKRRKLKDITYWVCRKHDRQKDACAMEQIPESQIEEAFLRLYYNLKHYGEPILSQMITSLLTIRNRRMLWSLDVIELNKQISELSSQNQMLTTLKQQGLIDPDIFISQSNELTEQLRTAKLKKERLLASDGDNTIAQTQELMDILEAGPDFLDAFDAELFGELVDKIIVDSKEQLRFRLKNGLELTETIERTVR

SEQ ID NO: 10848 - protein, 541 aa, synthetic construct
MRDNPPRVITIPAKVESTAQQAVQRQLRVAAYCRVSTDDEEQLTSYEAQQTYYTDKIMGNKDWTMAGIFADEGITGTSARKRPEFLKMIRQCKRKKIDIILTKSISRFARTTVDCLNYIRALRELGIAVIFEKENINTMESDSEILITMLGAFAQAESESISANVRWGKRQAMREGKAIIQYKRLYAYEKGEDGMPQIIPGQADVVRSIYSRYLTGASLRMLKDWLESEQIPNVAGGIEWTISSIRSILTNEKYCGDVLLQKTYISDCISRKVIRNTGQLPMYLVENHHDGIVDRKTFDAVQAEMARRNAGKSPSKKNAPTGMTSYASKYALSERLVCGECGTLYRRCTWSKRGKKRVVWRCVSRLDYGTKYCHNSPSVDEDQLQRSILAAINSAMSQKSTLIRKITGAMEQVLAPIPGESMSLSDIESRLDELNDLTRTLVAKAAHTENPSIYTAQLKEIMDEAAVLKEKRQAIEGQRKSNTQAIRRIEEAAAVMEGTSAEIQEWDETLIRQLVDTVKVVSAEHITVILRGGIQVEQDMI

SEQ ID NO: 10849 - protein, 553 aa, synthetic construct
MEKSKRVVGYARVSTEAQDITRQIELITAYCNDRNYHLIKIIQEKISGARKDRKSLNELLEVDDTVADMIIVSELSRLSREDDILSVLSTINELLKQGVDILFLDKQDRIYKAGTVLSLYDIITLSVEAKASADERYKIAGRMQTGLRSKLAEFTNMFAGGTVPFGYKIIHNPEYKLNQTPKNLLVVDTPKAEAVKYLFQQLIDGNTIRQTVRVYNKLFPYKLSYSGICRIIRNPKYKGEIYRRGKLYGIMNELQIITPEDFDKANKQMRENSLFQSNAPKYYNPLKGLLFCPCGCSLYMKPNHNSYLIYRCSSAYNEKQKCENYGVKCAYILSSVWICVKETLHTEEYKRFNTQRANELQGVNKQIRETIIRKVNSVDELKAQSASLIAKIKKLNNEDLISELETDYNVLCKQIKQTEQEISELNGQIVENDAEIKRNMEQKDFSKMEQSALYKEKLQKAVYHSLSAMRGILEIIFKNGMTRYVLIKKHRNGGAYLLPDTFKGDMERKQIIVPSLRIDKNNPYSTQPINLRYTFDEFFKAMPVEEYQIPITE

SEQ ID NO: 10850 - protein, 668 aa, synthetic construct
MAYAKKKKILNFWTKKKAALYVRVSTRYQVDKDSLPFQRKKLKEYCKFLGLEDFVIFEDDGYSAKNTERPHFQEMMSRVRSGEFSHLIVWKVDRVSRNLLDFAAMYQELKDHKVTFISMNEQFDTSTAIGEAMLKIILIFAELERNMTSERVTGIMLDRAEQGLWNGARMPVGYRWNNETKFPEPDPEEVKIVQLIFDKYEEWKSSIKIARYLNNNNFKSKRGGQWTSKLIHDIIRNPFYIGTYRYNLRESGRGPLKPESEWIVRENNHPAIIDKAQFDRCNKIMDQNGSSRDTSDLRARKYVHTFSGHLVCGKCGANMIASKDRARANGWRPSMYRCAQRSRMLDCDNSRTINESYIGPFIFNYIANLARVQKNFKNVTTVKKLERELLKGETFDGVDGILPEGLNLTFQALSFRQVGNGTYIPDIDFLGDSDSASDRDQIELLKSEIEKSKNAVTRLTDVYLFDPDSMTKEEFATKKKELAKKIEGMERQLADLLDDSGNDDLADMSFIKKASAFLVAQRIVSKSFVDYVGMAQELDNEILKDFIDQIVDQIVVLDGRVQSITFINGLKHEFRYATPAELPVCQKCGGRIGSTCGCRTRTFDFSGKRYQRIKVGDPRDTLHGKKNPVCPECLAREGRWHHWMCGIERCPICGEQLNSCKHGPNGKG

SEQ ID NO: 10851 - protein, 514 aa, synthetic construct
MAKRKFNKGGEVRLVAYYRYSGGSGQTEQSIEGQRRDCEAYARLHNMTIQKEYVDRHISGKTDDRAAFQQMIADSDKGAFDMVICWKTDRFARNRYDSAVYKKRLRDNGVEIVYAAESNISGAEGIIIEGVMEALAEYYSAELAEKMRRGMRESALKGQAISRCRALGLKTDEHKRFVIDEKTAPTVRFIFEHYAAGESAMSIVEQLNAKGLRTSQGNPFNKSSIPRIIQNEAYRGVYISKSYDVRIEGAIPAIIDDELWERAQTMLKLNRQLKAKNEPKADYILSGKLYCSCGSLMRGMSGHSATGEVYRYYTCPNKDCHLRNIPKDDLEGKVMQSIVDHLLQPESMEALAEAMVEVQKADVEKPNAERVAIEQSLSDVRRRSKNILDAIENGTANAQLCARLDDLTEQEQTLSFQLSSLEKEKPVVFTKEQYLFLLEQFFMEPSERTPEYGRRLVNTFVTSMVVSGRELVINFNVSDETVNKNKKTSQTNLQKESSSGMRLVRVARIELTAS

SEQ ID NO: 10852 - protein, 490 aa, synthetic construct
MMNKNLLAITPHRKEPGRQRIAAYCRVSSRSDEQLNSLANQIDFYRSRFENDDTVVFVGIYAEEGLSGTQAESRPQFMKMIEDCRSGHIDCIWTKSVSRFGRNTVDTLIYTRELRSLGIDVFFEKENIHSTESSGELMLTLMAAFAESESETMSANIKWGKRRRYEQGITGSITLNGMYGFRQNKGVMTIVEDEADLVRRIYKDFIDGYSYCEIADRLIADEVPTRMPGASWAKTTVQHIIRNEKYCGDCLFQKAFIANPITHQQVRNNGELPKYLVEDCLPAIVDKETWKLAQAVAARHTPHRQAPNERYPFTGKLFCGICGKPYCYYHYTTTNKQLLAAYRCMSRKTQSAAEVPGQTYTPPHKATFNRNASPELIAYRERYCKPPKERPMLCTDVRISIDLPQKAFCRAWNLIVAKKLRYQATLRSTVDNAEDILVQYRAEEMCLLIDEIGKINEFSYPLMLKTLDRVVVNANGKLTFIFQSGIKITV

SEQ ID NO: 10853 - protein, 548 aa, synthetic construct
MANKTVKKIEATKPTLSAQYSTFTRKRKVAAYARVSTAKEEQENSFDAQVSYYTQKIQANPEWVFVEVYSDEGITGTNTKKRDGFNRMIEDALAGKIDLILTKSVSRFARNTVDSLVTIRQLKEKGVEVFFEKENIYTLDAKGELLLTIMSSLAQEEARSISENTSWGRRKSFADGKVSLGYSNFLGYDKGPDGELVINEEQAKIVRRIYAEFLAGKTPGGIAKGLTADGIETPGHKKVWQASTVLNILKNEKYYGAAILQKEITVSYLTKEKRPNTGELPMYYIEKDHEPIVSPETFQMVQEEMRRRKEAGSNMQCVSIFSSRVICGDCGGYYGRKIWHSNTKHASWHWHCNAKFQKRKYCETPTLKEESLEETFVEVFNGLIANRKEIEENYRLCIDTITDDSEYRRQLEDLNNGCGEVQTLIRSLLMTYSRQDTADDIHEKLKEYEDRLDTMARLKQELDLKIAACAAKRVQITGFLNELMKHDAPLAKFDPLVWQAVINYATVNRNCTITFTFRDGTEKTVPIKNGVRHYTKRTKPQEGDGNDE

SEQ ID NO: 10854 - protein, 490 aa, synthetic construct
MLSKNACAYIRVSTDKQEELSPDAQKRLILEYCKKNNLTIMSEHIFVENGISGKKADKRPQFQRMIALAKQKEHPFDVILVWKFSRFARNQEESIVYKAMLQRVGVEVVSISEPIIDGPFGSLIERIIEWMDEYYSIRLSGEVMRGMTEKAMRGGYQSTLPLGYHMNPDTGVPEIYEPEAAIYRIILDRYLNAGMSPLAIARELNAAGYRTRRGAPFERRTIIYILENPFYTGMIRWNRQNHSDHTIKDRSEWIFAKGAHAPLIDKDTYDHIQAVTALRTRPYKARGTSSIKHWLSGIVKCSDCGKSLVGNALYKGVPSSWQCSDYNKGRCSHSHFIKNTALEQAVFNALEHAITSGDISYTLKSTDSSSDLASNLDRMLSKIDDKERRIKQAYRDGIDSIEEYRENKEILTKERQDILSRLAALSERSSEDDKKKLLAEVQSVYDIVTGNADKLTKANAIRSIVDHCVYDKANDSFDIFFFFSKGSEPL

SEQ ID NO: 10855 - protein, 421 aa, synthetic construct
MAKIIKVEQTVPTIKTKKKVAAYARVSMESERMNHSLSAQISYYSTLIQKNPDWQYAGVFADDGISGTSIEKRDEFKRMIAAAEKGDIDIILTKSIQRFARNTVDLLETVRHLKDIGVEVRFEKEHINSMDGDGELMLTILASFAQEESRSISENVKWGTRKRFEQGIPNGKFQIYGYRWDGDYLVIEPEEAKIVKFIYDNFLNGLSAETTEKQLEAMGVKSYKGQHFGNTSIRQILGNITYTGNLLFQKEYVADPISKKSKINRGELPQYWVENTHEAIIPMEVYQAVQAEKARRRELGAFANWSINTSCFTSKIKCGCCGKSYQRSNRKGRKDPNANYTIWICGTRRKSGNAHCRNKDIPEAMLKQSCAAVLSLDEFDESIFSEQIERIEIPAPNEMLFYFKDGHTVPHHWESTLRKDC

SEQ ID NO: 10856 - protein, 524 aa, synthetic construct
MAKVKTIPATISQFTAAPINSTKKRRVAGYARVSTDHEDQATSYEAQVDYYTNYIKSRDDWEFVAIYTDEGISATNTKKREGFKAMIADALAGKIDLIITKSVSRFARNTVDSLTTVRELKDKGIEIYFEKENIWTLDSKGELLITIMSSLAQEESRSISENVTWGQRKRMADGKVSFAYSRFLGLDKDKETGKIVVNPEQAETVKLIFRLFLEGKTPHAIALHLTAQGIKTPGGKDMWNQQTIRRMLSNEKYKGDALLQKEFTVDFLQKKLKKNEGEVPQYYVEGNHEAIISPAVFDLVQEELAKRSRGKTRYSGATIFSNKIRCADCGSWYGSKVWHSTDSYRKTIYRCNNKYEGTKCETPYVTEEDVKAAFVSAYNRLVTEKEEIIANAELVRRTLCATDALQIEKQRLEDELSMIVSMTQSIVAENARIAQDQGEYKKRYDSLVDRYDETKAQYDSVAESITAKEAKSVRLAEFISLMKAQKGVIREFDIGLWSSTVEYVTVDRSKGITVTFRDGTEIKA

SEQ ID NO: 10857 - protein, 541 aa, synthetic construct
MTDEKPRVIIIPPKPELQQTTAVTKQLRVAAYCRVSTKEEEQASSYEAQCEYYTDKIMSNKEWTMAGIFADEGITGTSTKKRTEFLRMIRQCKQKKIDLILTKSIQRFARNTLDCINYTRILRQLGIGVLFEKENINSLPPDSEFMITMYGAMAQSESESISGNIRRGRQMHAKVGTLKIPCYRLYGYEKDADGKFRVIPEQAEIVRELYKRYESGASLRNLQDWLEENQIKTVLGESKWTTTAIKGILTNEKYCGDVLLQKTFRTDVISKKVIKNVGQMAQYYMPDHHEAIVSREQYNAVKAEMARRSALRSPSKTAVTGRSCYTSKYALSDRLVCGECGTLYRRCTWTSLGRKYPVWRCTSRLNYGTKYCRDSPTIKEEPLQAAILAAINSVMSNKPALLDLIKNAVSVELLPVQGQTMSLADIEHRLVQLDEQFQQLLAEAVDAEDKEACNTQFAEILAEQTTLKKQKEAILQSSIDADRVCTRMKQAEETIENAAPTITEWNENAVRQIVERVTILSADEILVQIKGGAEVKQRLER

SEQ ID NO: 10858 - protein, 540 aa, synthetic construct
MKQPYNTTIYNTALYLRLSRDDELQGESGSIQTQRMMLRQYAAEHGLTVVDEYIDDGWSGTNFERPSFQRMIDDIEDGKINCVVTKDLSRLGRNYILTGQYTEIYFPSKGVRYIAINDNVDTINGESELAPFLNILNEMHARQTSKKVKAAMRTRFANGAHYGAYAPLGYVKDPDKKGHLLIDPETRWIVEKIFDLAVHGRGAASITRILVEEKVPTPGWLNYERYGTFANIYAGAPAEKAYAWTIAQVKSILKEETYIGHSVHNKQSNISFKNKKKVRKPQEEWYRVENTHEAIISEEVFQKVQELIASRRRKRRNGTTQIFAGLIKCADCGWSLAYGENKQNKNPYGYYHCSKNGQGLRQCSMHYIRYDVLYAYVLARLQYWSMLAQKDEDKLLKRLLNASDRERNSAKKKQAAELKKAEKRKAEVDGLFAKMYEDWSAGRITEYNFNMLSEKYQNEQKELETKIRQLHETMEAAVQTAADAEKWIALMKQYVNPVELTAELLNTLIEKITVHEAVKGEDGSREQEVEIYYRFIGKID

SEQ ID NO: 10859 - protein, 463 aa, synthetic construct
MRRKTTAPVEKILLRVAIYIRVSTDKQVKDGDSMRDQLATGQKYIDSHENMILVDTYIDDGISGQKLKRDDFQRLIDDVRAGRIGLIIFTRLDRWFRNLRHYLNTQDILDKHGVSWTAIEQPYFDTSTPHGRAFVNNSMIWAELEAQNDSDRILGVFDDKVDNGEVLSGSTPLGYTIVNKHLVPDDDAPTAVAIFQYYRKTGNLSMTLRYMESEFGLVRSAASLKNMLTNTKYIGEFRDNKNYCPAIIDRDLFFDVQRLLKINIKSGKKHDYIFSGLVVCDDCDHIMSGCQQRARGRVRADGTRIVYKYSVYRCRQGVNLHRCPNRKLVFETTLEKMLLERIRPELENYIAEYEVANLPALRTDAKRRSVEGKMQKLKDLYLNDLITMDEFKLDREKLLMQLEKINAEDSRPVKDLSYLKNFLKMDFESVYDSLSIPERRELWRSIVKEIRVDHDKNIHIIFL

SEQ ID NO: 10860 - protein, 516 aa, synthetic construct
MARKKKVSPGNRLVAYYRYSGGSQQTEQSIEGQRRDCEAYARQHGLTIVHEYIDRHISGRGVESRLAFQQMIADSSKHLFDLVICWKTDRFARNRYDSAVYKKKLRDNGVRILYAAESSVEGPEGIILEGLMESLAEYYSAELAQKMRRGMRESALKGRAINPSRPLGLTTDEHKRFIIDEKNAPTIRFIFEHYVAGESSAFIVEQLNAAGLRTSKGNAFNKCSIPRIIQNEAYHGVYICKAYDVRIDGAIPAIIDDDLWKRAQKMLTLNKQHRAPHSSHADYLLSGKLFCGCCHSLMRGISGHNCRNDVYYYYACGNKADGGTCKKKNIPKDVAENLVVNAICENVLRPDTLEDLADAIAAAQQADVNQPDPERAMLEQNLADVHRKINNIIESIENGTASSRLSARLADLEQQESTLNYQLESLKEVHPPVLDRERILFLLEQFLISPNERTEDYNRRIIDTFVNRIEITDTEMLIYFNLSEASASEKQKNSQPNSCSTGNHLVRVARIELTAS

SEQ ID NO: 10861 - protein, 581 aa, synthetic construct
MYGLNSDFQKRDVAIYARVSTEHEAQLSALENQMDWYKPILEARPDWTLTAQYIDEGITGTSAEKRPRFMQMIEDARQRKFNMIITREVSRFARNTVDTLQYTRLLKEYGVEVFFINDNIKTFDGDGELRLTIMATLAQDESRKTSIRVKAGQQTSMQNGVFYGNGNILGYDRVGKEMVINPEQAKTVRMIYDMYLSGMGVTAIQYELEKAGRLTAMGKERWFSSYIAKMLRNSFYCGIITYHKEYTPDFLKQKKIKNYGDLEYVQVQGTHEPIVTVEEYEQVQKLMDAKSVVMKNHNKGKRRVGRMQHTTAFGRLMICQCGNKFNLRFHSRDGRTDGVDYQCYTSVNRGSVAKRLNKGISIEHSCESPYIQGWKLEMMAEQVFDRYIENADKVMDLSYAMLEKHIADQEELPDNTDVIQRKQGEIEKLMNKRTNLIEMRAEGDIDKEMFRSKKQEIEDRVAKLTEEIKGLQPEKEPTSNEDYSAKLLELRERLKEYTGFDYSVIPESIVEAFVERIWVSKDEFRWYLRTGSKEKGEFDPDNHIKIGSFTLTIDDAKKYIYSFSTRRRVYKWVDLNVSVWI

SEQ ID NO: 10862 - protein, 531 aa, synthetic construct
MAATARSVKVIPQTINPATRMPDAGITKRRVAGYARVSTDSDEQFTSYEAQVDYYTQFIKSKPDWTFVDVYTDEGISGTNTKHRAGFNKMIQDALDGKIDLIVTKSISRFARNTVDTLTNVRTLKEHNVEVYFEKENIYTFDSKGEVLITIMSSLAQEESRSISENVTWGHRKRFSDGKVSLGYSSFLGYEKGPDKDHPLVIVEDQAAIVRRIYTMFIDGKTPFTIAKTLTEEGIPTPGGKSKWGSAVVESILTNEKYKGSALLQKKFTVDFLQHKMKENNGEVPQYYIEHSHDAIIPPEDWELVQLEMARRKNLGRRYSGNSVFGARLICEDCGGFFGAKTWNSTNKYKRTVWQCNDKFKDKEHRCTTPHLNEDDIRVRFIATYNSLIPDRENILDDCRRMMYALTDTTEIDGKITDLMQEAEVVTELTRKLIEENAANAMNQSEFSRKYKGYEDRYAAIRDKVEKLREQSEQRKVQADSISAFMFELHETDEPVVEFDSKLWLSVIDCVVVRHNGTLLFRFRNGMEIEG

SEQ ID NO: 10863 - protein, 433 aa, synthetic construct
MDRKVRKLDASFPAKPKLLNVAAYGRVSSGKDAMLHSLSAQVSYYSEMIQNHPGWNYCGVYADEAMTGTKDNRENFQRLIADCRAGKIDMIITKSISRFARNTLTLLNIVREFKKLGIDIFFEEQNIHTMSGDGELMLTILASYAQEESRSASENQKWRIRKSYEKGELVQWRIQYGYNITKDKIEINPEQAEVVRNIFDRAIAGETFGSICRDLNARGISTYFGKKWTARRITEILSNEKYIGDAVLQKSYVNNHIEKKIVKNNGELPMYYAEGTHEAIIDKETFEKVQAVVKAVREKYCGKNSPKRYPFTSTIKCGLCGENFKRVTANGRISWNCRSFQEQGRAFCKSKSIPETTLISVTAEVLGLDSFDEKIFYEKIDHIKVPGANSLIFYFKDGRSVERKWKDRSRSESWTPEMREAARQRAIKQRRDK

SEQ ID NO: 10864 - protein, 523 aa, synthetic construct
MVSFDNIIIYLRKSRSDDPVQTVEEVLAKHERILQDYCMKEYGKAIPEKRIYREVVSGETIQDRPIMQKLLKELETDNISGVLIVEPQRLSRGDLQDCGQIINSFRYTNTAVITPTKTYNLSDEYDRKFFEMELTRGNDYLEYTKKILNRGRVASVKQGNYICSVRPYGYKKIVIGTGKDKCHTLEIIPEEAEAIKLMYHLYLDENMGFTNIARTLDSMHIKPLKSSNWSAATIRDMIDNPIYIGKIVWNNRKVVKKWENEQIIKVRPRNKGDDVICVDGKHEAIIDEETFNAARQKRGLTPKVRKFKELRNPLAGILFCSTCGHSMSMKKYVDKRSHTGKVTTIMLCNKQAVCHTKSAQYEQIVAKIKESLADAIANFEIKMKEQENNNIDIHKQRITSLKDELNRLYNKDVRQKDAFEDGIYTKEEYIERNSKLQSQILNIKAEIENEKNNTPVIIDYQNKITTFTECLTSLDDDSISAADKNSLLKNCIDKIIYHNDMPSLPGIGRYIENSFRLEIFLKM

SEQ ID NO: 10865 - protein, 502 aa, synthetic construct
MEIQITEGNSRQKRKLKVCAYCRVSTDADEQENSLENQIRHYKEVITSNPDYEYAGVYSDFAISGFKEKRPGLQKMLADARKGKIDLILTKSVSRFARNTSIVLEATRKLKELNVGVFFELQNINTLSGEGELMLTILAAFAQAESESGSVGAKMVYQRKYEAGIPVQYLERSFGFKKDERGVYIADEEEAVWVRKIYEMAADGYTPASIKRYLNENGVKTIGGAEWIDSTVLRLIENEIYKGDYIMHKHFVNEERKLVRNRGEVDAWYIEDDHEAIVSPELWQKAQDALEAKRDYLAESSVIEEFTEENYPYMNKIFCARCGHPLYKRIYSNGNRLNWGCSGTKRYGKSFCEGINIPDGVLRGAWHFDENMYIGEKPTDKGKKEFTYLKEASWKRRHKKKEPEPIPENTETEYPYREKIFCGLCGSRLVRHVNTKSHKVIWVCNGRKRKGKDFCDGTRVPDTIIKGWGEIKKDIYIQRKDDKNGKKRYSYTSKKPKGADRA

SEQ ID NO: 10866 - protein, 540 aa, synthetic construct
MKQPYNTTIYNTALYMRLSRDDELQGESGSIQTQRMMLRQYAAEHGLNVIDEYIDDGWSGTNFDRPDFQRMIDDIEDGKINCVVTKDLSRLGRNYILTGQYTEIYFPSKGVRYIAVNDNVDTINGENELAPFLNILNEMHARQTSKKVKAAMRTRFANGAHYGAYAPLGYVKDPDKKGHLLIDPETRWIIEKIFDLAVHGRGAASITRILVEEKVPTPGWLNFQRYGTFANIYAGAPEEKAYAWTIAQVKSILKEETYIGHSVHNKQTNISFKNKKKVRKPKEEWYRVENTHEAIISEDVFRQVQEQICNRRRRQKNGTTQIFSGLVKCADCGWSLAYGVNSQNKNPYAHYHCSKYGQGLHQCSMHYIRYDVLYAYVLSRLQYWSVLAQQDGDKLLKRLLNASDKERNTARKRQTAELKKAEKRKAEVDTLFAKMYEDWSAGRITEYNFNMLSEKYQGEQRELDAKIERLHEAMEAAAQTAVDAEKWIGLMKQYVNPTELTAELLNTLIEKILVHEAVKSEDGSREQEVEIFYRFIGKIE

SEQ ID NO: 10867 - protein, 573 aa, synthetic construct
MAKVKLPDKPRVAIYTRVSTLHQIDKDSLPMQRQDLINYARLILNTEDYVVYEDAGYSGKNTDRPKFQEMMQQVRLGMFTHILVWKIDRISRNLLDFATMYSELKQLGVVFVSKNEQFDTSSAMGEAMLKIILIFAELERNMTSERVTAAMLSRAANGQWNGGRVPLGYDYDPETKTFTVNESEAAVVKIIHDKYEQERSLVSLARYLNGHGYRTRTGCTYSPSTLLIILRNVFYCGDYRYNVLKDGDRQKRKKESEWITVKDHHPAIISREQKDEIARILKENRRLECERRGIYSKKKNVHVFGGLVICGNCGHAMTSTIRPADQDGIRWSVYVCPTKRRSEYLCKGRATSEVVLGEFVFNYILNMLNVQKNFDSINSVEDMEKMLLSGSTFRDVDGIERAGLDDLYNMLASGLTEKAPFDSSVEVRKKPVVSDIELENLNTEKTRIERAAERLQNLYLYSDDSISQKDYIIQREKLMSQLAEVNEQIGMVMSNADEKDVSDEEFVHAASKFILTQKLEGRTYIYYKRLATTVSREVLRSFVMSIIENITIYDGRVQTIVFKNGLSHTFILK

SEQ ID NO: 10868 - protein, 426 aa, synthetic construct
MRVKVINKRPASVLQKKRVCAYARVSTDSRRQEDSLENQMETYERMITGNPEYEFIGVFADQGISGYCENRPQFQRMMEKARAGEIDLIITKSISRFARNTVTVLKFARELKKLGVGIFFEEQNINTLSGDGEMMLAVLASFAQEESRSMSENNKWSIRKKFERGEVMITTSRFLGYDKNEYGDLIVNRKEAEIVSLTFDLYLLNVGSSRIGELLDYLGVKTVTGTTWESGTINGMLCNEKYKGDFHLQKYYTPENKRNHTRKNNGEVQSYYILEKHEPIVTPEVWEKVQEVREQRKRDRNIGQDSTMKFQNRYPLSGMLICPYCGKTLRRRQVYNKKIQWLCSTYIEKGVKACKGIRIDDAELQGLNITEQTVIEEVVKNGKKHYCYTSKADFDCGIRNSTGSTEVEDGSVLQSVNRPRRTVIKL

SEQ ID NO: 10869 - protein, 529 aa, synthetic construct
MSNARIIEIPATRQIRSGKNNTMRKMRVAAYCRVSTEEEEQQGSFETQKLYYTEKINSTSEWELAGIYADDGISGIHTKKRDGFNQMIQDCKKKKIDLILTKSISRFARNTLDSIQYVRMLKAIGIAVIFEKENINTSTMNSEMILTVLSAFAQAESESISQNVARGKRMGFRQGKFPFPYGQILGYRKGLDGKPEVIPEEAEVIRMIFNSYLQGASLLTIKKKLEAGGVLTARGNKKWSSESVQRILQNEKYCGDVLLQKTFIEDVLTGVSKKNTGQLPQYYIENNHEGIVTKQMFREVQAEIARRNSKSAANQRKRHQGRYNSKYALSERLVCGDCGSPYKRVTWNIHGRKQIVWRCVNRLEYGTKFCSHSPSIPEEELHQAILKAVQNLAANFTDEVAAQLDGILRQMKAGENLKAQLQKQLEKAQQEFDRLLEMSLELDESTPFLDDKLRKLSGKIKILKANIAESTDGKREDEEATKQLTAQDLLIKEYDDILTARIIEKVIVHSRQEIEIYFIGGYTQKIDLI

SEQ ID NO: 10870 - protein, 534 aa, synthetic construct
MKKRINTNSAARAVIYARYSSANQRDCSIEQQVEKCRELAAREGVTVIEIYADRAISGKTDRRPNFQRMMKDASLRQFDVVLAWKSNRMGRNMLQAMMNEEQLRSNGIRTIYAEEDFDDTAAGRFALRNMMNVNQFYSENMAEDISRGLMDNASKCMSNGSLPLGYKTGKDQKVVLDEAEAAIVQEIFTRVSCYEPFIDIARDLNRRGIKTKKGAEWGRSSFHTICRNERYRGIYIYRDIRVEGGMPRIVSDELFYKVQEVLKVKKNPQGRRKRSGYEEYLLTGKLYCGHCGSPMTGIAGTSKTGAMHYYYTCQKRRTDHSCDKKAVRRDQIEKAVAIAIQQQLLTDENIQMMADETMAYNARTEIKYRLQSLQQQLYSNETSTANIMKAIEMGIITDTTKARLLALEQEHGQLLAKIDTAKAEMVPINREDFVSLLDIYRTGDVNNKKYLAALFDTFLVRVDLYDDHFKITFDPTGGKMPVDIPIGAEDSPESPGDSPESSDFEASPQDAEKFVLALHNRTKILERLFGDFLF

SEQ ID NO: 10871 - protein, 513 aa, synthetic construct
MKKQPTGGKRLVAYYRYSGGSHQTEQSIEGQRRDCETYARIHGMVILHEYIDRHISGKTDDRPEFQQMIADAGKGMFDYVICWKTDRIARSRYDSIIYKKKLRDNGVELLYAAEANVEGSGGIIVEGLMEALAEYYSAELAEKVRRGMRESALKGKAIGSSRPLGLTVDKDKKYIIDPAGAAAVRYIFEQYAAGAASSAIVAHLNEQGLCTSRGNPFNKSSVVRIIQNEVYRGVYVSPKFDVRIEGAVPAIIDDDLWERAQKMFIRNRQSRSPRNDRADYILSGKLFCGECGTAMKGVSGHSSNGEVYFYYNCPCKDCHRRNIPKDELEGLVIRTVCNDVLQPDVMDRIADSVIEAQTAELNQPNPEKEALQHELADVQRKAKNLLSALENGTAGAMLTNRLAELEQQANTLSYQLSSLESEPKFPVFSKEEVLYLLEQFLIAPSEKTKAYRRRLIDTFVSKIEVSNTELTIYFNIAEEDCGKMKKAPQSNQPEGCSTEKQMVRVARIELTAS

SEQ ID NO: 10872 - protein, 464 aa, synthetic construct
MKQTNTDIIRVALYPRVSTEEQFLRGYSLQTQEEVLVQYAADHGFKVVGIYRDEGHSARKPAMKRAVMQQLLTDVQAGKIDRILFIKLDRWFRNVREYHKIQEILEANHVTWQATMEDYNTATADGRLKVNIMLSVAENESDRTSERIKFVFDGKRRRKEWCFTGGPDKWPYGYRPEVVDGVKRCVKDPETAPIVQDFWDYVLNYNSVRKAGMYCCEKYGITRHYRSWSCTARNEIYTGTFKGVEDYCPAYISREDWERIILGHETIKKTQRPERIYLFTGLLRCPDCGTTLKATFKSDPRDRNKEYLSYRCGRANINLCTFHHQLSERRVEKYLLNTIRAQLEEYLVDVETQQTQKRRQLNIQDVLSLNEQLRRLNIIFMAGNISDEEYASETKRLKQELEKSKQAAQQTELPNLQAIKDFLSGNILDLYATLPKEDKRRLWRSLISEIQVEGTTPTKIIPRP

SEQ ID NO: 10873 - protein, 580 aa, synthetic construct
MPEKIINCAIYTRKSTEEGLEQGFNSLDNQYEFCTNYLKSLNDPALQLLPARYDDGGYSGGSLNRPALQRLLADIQCGLVNRVIIYKIDRLTREIRDFFKLLDIFEKYNVEFVSVKENQYYNTTTAIGRLMVNMFLVFAQFERENAGDRIRDKIATSKAKGMWMGGCPPYGYDIGDRCLVINETEAQNVRFIYQTFCNTHSLADTTDALNSGGIRTKRYTTRQGRTFGGRKFSVKTVQRILQNPLYKGMVAHRGKQYPGQHAAIIDAVQFDMVQAVFAAHKEKRETRRPKMPSSGGERETAALTGLIFCGCCGSAMTPSYCCKGDIRYHYYRCYRRASKLEDKCPINQIRTSEIDRVVMEQVLAILKSRDFFVQYISHHHEFDVSTAFALFNSLDDVWNSLFETEKRRILRELLAKVTIYKDKIVLDVKKAGLAGVFAELSQNNRLAEVEYKENETFQISVAYRATRLANGAKIIVPATAKEESRFNGSLRLARQIAKGFAWRKMMESGLSLQELTASAKTNERDIRFAMRLSMIDPAIVESVLSGKSPEFLTYAFMKKHPIPLLWSDQRKLYGFEERKQ

SEQ ID NO: 10874 - protein, 512 aa, synthetic construct
MNAVIYARYSSHNQTEQSIEGQLRDCYEYAKRNDLAIIGEYIDRAISGKTDERPDFQRMIKDASKRQFERILVWKLDRFARNRYDSATYKHKLKQYGVKVISAMENVGEGDESVLLEALLEASAEYYSLDLKKKIARGMRESALRGKFVGGTLPWWCRVDDEQKLTVIDERAAIVREAFMRYDSGEGSKSIVSDFAKRGLRSNRGVPVTLSWLLSILKNRKTIGEYTYNGIEIPGGLPAVVDKPLFDRVQDRIARNRRTGGGEARAKTEYLLQGKLFCGLCGSPVTAECGQNHKGVVYNYYACSLKKKKHQCKKANERKDFLEWYVVEQTLDYVLTPARTEYIASAIVAEYEREFDKSGIRVLEQKIALTEGEIQKTMDLCIQATTDAMRDRFMKRCEELDAKKADMEIDLSKLRVAASIVYTKDEVCAWLRQFCTGDCLDPAFRRRIIDVFINTVYLYDEKLIIYYNLRDSRQVSYIEAIGASSEIENLLPVPDNKKSAVECSTADENGGA

SEQ ID NO: 10875 - protein, 523 aa, synthetic construct
MAKSVTTIPATLSRFTAAPINSTKKRRVAAYARVSTDNEEQLTSYEAQVDYYTNYIQGRDDWEFAGVYTDEGITGPNTKMREGFKSMVADALAGKIDLIITKSVSRFARNTVDSLTTICSLKEHNVECYFEKENIWTFDGKGELLLTIMSSLAQEESRSISENCTWGQRKRFADGKVTVPFNRFLGYDMGPDHNLVVNPEQAKLVKRIYGMFLQGQSPFQIARTLTEEGIPSPGGKDHWNPSNIKSILTNEKYKGDALLQKAFTVDFLTKKKKANEGEIPQYYVKDNHEAIIDPETFEMVQTLISTRKKGRNRKSSVSIFSRKVKCGDRGSWYGPKVWHSNDAYRKVIWQCNHKFDGQKCATPTLTEDEIKELFLRAANQVIDQKEQFIAIYDQVLSRSLDTTALESELLDLEAEINIAAELIEDCIKENAHVALDQAEYQKRYDGLVPRFDKANARHTEVTDLIAKRTGRRRQIETYLKELRSREPLTEFRETDWLAMVDYITVHSKDDIRVTFKDGTEIKA

SEQ ID NO: 10876 - protein, 456 aa, synthetic construct
MRNKEIAPALVRVALYIRVSGEEQKIKGLSLEAQQERLEAYARERGWVIVGIYIDAAKTARKNIHKRTEFQRMMEAVKRDEVDILLFARLDRWFRSVADYYKVMEILQAHNCDWKTTDEEYDTTTANGRLYINVKLSIAQNEADIDGERIDVVFDSKIAHGTVVSGSAPFGFRVNEEKRLEVVPEDAAIVQDAFNYFENTVSQRATVRYVRETYGVNWCDATFRRMLKEKLYTGVYDRGGRYNDQFCPAIINRQQFDRVQALLTRNVRSAPSGKVYIFTSILTCAECGHKLVGYKSSDYFYYRCNQHFQRGRCSHNHSAREDVVEQWLFEHLGEELERCQLEWDVEAAKKKASVARTDKAALKRKLTKLKELYVNDLIDIEDYKKDYQIYVSALNQIPEPAQEAPPDFAAVRRLLDNSFRTIYDTLTREEKRTLWRSVIKEIRIDNDQNITGVVFG

SEQ ID NO: 10877 - protein, 499 aa, synthetic construct
MNVVLYMRYSSDRQTEQSIEGQKRVCMDFCERQGYNVVGEYIDRATSAYKETAKRTNFCRMIRDSSNGLWQGVVVYKLDRFARNRYDSATYKVRLKKNGVKVISATENISDSPEGVILESVLEGMAEFYSKELSQKVSRGLNESAHKCNSTGGAIPLGYKTVDKKLTVDEPNAQIVKEAFDLYAGGATISEICEKFNSQGYRTKKGTEFNKNSFKSMFRNEKYIGTYTYKDIRIEGGIPAIIDKETFETVQKKLSANAQAPARGKARMNYLLSQKLFCGHCGANMIGDSGRSKTGETYYYYSCSTRKRFHSCKKRTIRKDLIERIVAENAMRLITPEMINTIADMAIKCNREDIESDAIIPALTADLKEINTSIKNLLKMVERGVESETLDLRLKELEKRKKDTESRLDAAKSEYLTLDKTVIVGWLSQFLSGDIEDEDFRRHLIDTLINSVTVWDEPDGGYKITTVYNLKGNTQTYRVNADGSSDMKRNSPPKKRQFS

SEQ ID NO: 10878 - protein, 516 aa, synthetic construct
MTGKQVTVIPMKPKKWVADNTEEKPKLKVAAYCRVSTEMEEQASSYEAQVQHYTDYIQKNPDWELAGIFADEGISGTDTKKRAEFNRMIDACKNGEIEYIITKSISRFARNTVDCLQYIRKLKELKIAVFFEKENINTMDAKGEVLLTIMASLAQQESQSLSQNTKMGVQYRFQQGQLRINHNHFLGYTKDEDGNLVVEPNEAEVIKRIFREYLEGSSLQEIAKGLMDDGILTGGKRKLWRAEGVRLILRNEKYMGDALLQKTFTVDFLTKKRVKNDGSYAQQYYVENSHPAIIPKDIFMQAQQELDRRKSMKNKNSQCFSGKYALTGITICGDCGNVYRRVHWKNRGTVWRCKSRVDKREHNCSGRTIYEKDLHQGILQAINETLIDRDIFLQQLTDNINSVLTDVLTEQLVVLDKQLKDLESEIISVAIGGQGYDELVSQIFSLRDERDAVAKQIAANTNLQQRVDEMEAFVKEHDVITEYSEVLVRRLIEKVTIFKKNIVVDFKSGVSMAVEI

SEQ ID NO: 10879 - protein, 540 aa, synthetic construct
MKQPYNTTIYNTALYMRLSRDDELQGESGSIQTQRMMLRQYAAEHGLNVIDEYIDDGWSGTNFDRPDFQRMIDDIEDGKINCVVTKDLSRLGRNYILTGQYTEIYFPSKGVRYIAVNDNVDTINGENELAPFLNILNEMHARQTSKKVKAAMRTRFANGAHYGAYAPLGYVKDPDKKGHLLVDSETRWIIEKIFDLAVHGRGAASITRILVEEKVPTPGWLNFQRYGTFANIYAGAPEEKAYAWTIAQVKSILKEETYIGHSVHNKQTNISFKNKKKVRKPKEEWYRVENTHEAIISEDVFRQVQEQICNRRRRQKNGTTQIFSGLVKCADCGWSLAYGVNSQNKNPYAHYHCSKYGQGLHQCSMHYIRYDVLYAYVLSRLQYWSVLAQQDGDKLLKRLLNASDKERNTARKRQTAELKKAEKRKAEVDTLFAKMYEDWSAGRITEYNFNMLSEKYQGEQRELNAKIERLHEAMEAAAQTAVDAEKWIGLMKQYVNPTELTAELLNTLIEKILVHEAVKSEDGSREQEVEIFYRFIGKIE

SEQ ID NO: 10880 - protein, 465 aa, synthetic construct
MKGNAGDTIVKKIDLSPELVRVALYIRVSGEEQKIKGLSLEAQQERLEAYARERGWVIVGIYIDAAKTARKNIHKRTDFQRMMDSVKRDEVDILLFCRLDRWFRSVADYYKIMEVLEAHNCDWKTTDEEYDTTTANGRLYINVKLSIAQNEADIDGERIDVVFDSKIAHGTVVSGSAPFGFRVNEEKRLEVVPEDAAIVQDAFNYFETSISQRATVRYIRETYGVNWCDATFRRMLKEKLYTGVYDRGGRFNDHFCPAIISKQQFDRVQALLERNARSVPSGKVYIFTSILTCAECGHKLVGYKSSDYYYYRCNQHFQRGRCSHNHSAREDVVEKWLFEHLVEELERCQLEWEVAAAKKKASVARTDKAALKRKLTKLKELYVNDLIDIEDYKRDYQIYTAALKQIPEPSIEPSPDFAAVRRLLDNDFKTIYENLTREEKRTLWRSVIKEIRIDNDQNITGVVFG

SEQ ID NO: 10881 - protein, 558 aa, synthetic construct
MAKKKKPAGGIAVIYARYSSHNQRDVSIEQQIEACRKHAAELGLTIIATYEDRAISGRTDNRPAFQRLMHDAEKGKFSYVLAWKSNRMGRNMMQAMVNESRLMDCGIKVYYAEEDFDDSAAGRFALRSMMNVNQFYSDNLAEDVRRGLMDNANKCMVNGRQPLGYKRGKDGKVVVDEPAAAIVREVYTRVASGELFTDIARDLNRRGIKTADKGEWNKNSFHRLCSNEKYRGIYIYGDVRIEGGIPTIIDDPLWYKVQEALRVKKLKRNGRHRPGDEDYLLTGKLRCGKCGGYMIGMSGRSKTGDIHYYYACQNRRVGRTCDKKNIRRDVIEPAVAQAIKEYCLTDDAIEWIADKTVEYWEKADRNLQLDSIEGDLVAVQSSISNVMKAIEMGVVTETTRDRLIELEKQRTDLKSKLALAKEEVVHVDRKKLISSLLLFRNGDIHDRQYQEDLFKTFLISVYVYDDDNNGHLKIVFNAFGDNNTVDLPIDFGETDNQSAFSDGAEKFDYSLHRSTKKPSGLCRMVFLFYIVIQKQRTVFATVRPFLCSYYRMLMRPAP

SEQ ID NO: 10882 - protein, 506 aa, synthetic construct
MDHNRSADLTGLDAAVYLRKSRMEEGLATDEVLAKHQKTLYDYAAAHGIHILAEYPEVVSGESLYTRPQMLRLLQDVEDGHYDAVLCMDLDRLSRGRMKDQGIILDAFRESGTLIITPEKVYNLSDEIDEEYAELKTFISRREYKIITKRLRRGLQMSIQEGCYVANAPYGYHKTVVDRKPTLEIYEPEAKFVRMMFQLYAQGYGCVAVARHVNALGARPHRSPEFSRNSVAKILRNPTYVGKIVWNQKKHIRKGAKGNPKHITIYQPRDQWTITDGLHPAIVDRELFDQVQAIMDGRYQPAKNDGTVRSPLAGLVKCVNCGQNMQRMVMKQKAYLLCMRPGCCSSTQFDLVEGQILDYLEDTLAKLTMNQPQHIPGRNTDVLETTLAAVKNELAGTDRQKNRLYELLELGEYDLPLFRERMAAVKEKRAALEKKEAELERSLREVQCSNPALLAERIRAVLDAYGTADPAGKNSLLKSVLDTVWYQKEKKTKPSDFQLTFTLRAL

SEQ ID NO: 10883 - protein, 543 aa, synthetic construct
MEVTKVPKKIVTVIEPKRSMTVDKEKYRQKKVAAYCRVSTDSEEQLVSYANQKKVYTEMIASRKDWCFAGLFADEGKSGTRADKRPEFNKMINDCLAGKIDYIITKSVSRFARNTVDCLDYVRMLKSKGIGVYFEEQQIDTLKTDSELYLVIYAGFAQSESESISKNITWSVRKKFEEGTPVFMYKRFLGYRKGADGEPEIVPSEAVIVERIFNLYLAGETVDKISKMMQAENYDVPGKAISFSKGMIMNMLSNERYCGDVILQKSVTVDCIEKKRKKNTGEAPMYYVQNNHPAIIDRVTFNKVQEELARRKTKTPGSAKSSITSTGKYSRYALTDVLICGNCGTCYRRVTWSRNGTKRIVWRCISRLDYGKKYCSDSPTIMEDKLQEAIVRAVNKFNEQDNATYKALMRATISEALGLNGDPEEVDMLERKIEALNNKMLALVNESVSSGDGIEAHESEFMTLSQETELLKQRIAAIQESTAKDNGEQNRLEQIQAIIAERESKCMEYDDSIVRQMVECIKVYPGGKLEIIFGGGYLVEESV

SEQ ID NO: 10884 - protein, 513 aa, synthetic construct
MPEVRLITPITRQSTKKMQVAAYCRVSSNSADQLNSYAAQIRAYKKYIGARDDWELVDIFADEGLTGMKSETRDEFQRMIRMCELKQIDLIITKSISRFARNTKDALSYVRKLKLLGVGVQFEKEGISTLSMGDEMLLNTFSALAQEESQSISMNQRLSIVKRMELGEYVDSNAPYGYRLVDKMLTVYEPEAGIVRNIFALYLQGFSTSEIARELNKLNIPTKAGKETWRPSRVAYILKNERYIGDSFYQKTYRETTVPFNQHLNRGQEDRFYAKGTHPGIIEKDVFDAAQILIEKRKDVFAKATTQNIYPLTSRIQCSECGSFYRRRIVSGTVKWVCSLHKDDSTACDSNYYNEERIYDGFISLVNKLRFSEDNILGQVISRLEMTLAAMKRNNLAARDLSKSIAELNAKLLMLEQLRSKGYLAPEVYQAQANEISAELAKLKDVRQEKFNSKAAIMLEEVKKLKMLIFELEEPLDVFDEKLFLEIVKSIQINKEDEMSVELLGGLRFRERI

SEQ ID NO: 10885 - protein, 485 aa, synthetic construct
MPTSDLKIAAAYIRVSTDDQEEYSPDSQVRLIREYARKNGYLLPEEYVFQDDGISAATARKRPAFNRMIALAKEKERPFDAILVLMFSRFARNREESVLYKGLLRKQGISVISVKEPAVDGPFGTLIESIIEWFDEYYLINLSAEVKRGMSEKFLRGEAMGTAPFGYRIDSANKTFTVDPERAEIVCDVFRSYADGAGLRDIAVQLGDAGITTRRGNRPDSRFVEYMLRNPVYIGKIRWTPGHKTRYSRVHIADGVEVVDGKHPPIVSMDLWEAVQRRMDQRKAAYGRYQRQAPAAWMMRGLVRCSACGATLIMAGRSSSCPFLQCHSYAKGACHMSHSLSLRRANGAVLAGLQRSVGTLTFHMVPHLTSAPSRTADYGRLLEQERRRLARCKDAYQAGVDTLEEYRDNKARLEERIRRIEEQAASAAAAPESFDKAAYGKKAADILRFLETSADEGAKNEVLRSVVDHITYEKASRHLAIYFYT

SEQ ID NO: 10886 - protein, 529 aa, synthetic construct
MSRTAARSVTVIPPTINPLTHLSKVAVQKRRVAGYARVSTDSDEQFTSYEAQVDYYTQYIKRNPEWEFVKVYTDEGISGTNTKHRIGFNEMIADAMSDKIDLIVTKSVSRFARNTVDSLVTIRKLKEKGVEVYFEKENIYTFDGKGELLLTIMSSLAQEESRSISENVTWGQRKRFADGKVNLPYKQFLGYRKGADGFPEVVPDEAIVVHRIYTRFMEGLTPGAIAKELTADGIPTPSRKQRWQTSTVESILQNEKYKGAALLQKCFTVDFLTKKRKVNEGEVPQYYVEHSHEPIITPEEFDKVQTELARRKQISRQYSGKSIFSSRIVCGDCGSYFGSKVWNSTSKYRRVIWQCNGKFKGEHKCETPHLDEETIKARFVTALNAIIESKDNILEDCRLMQATLTDCTGIDTEIESLLEEIEVVTELTKRCIAENSQTAQNQEEYAARYNGLVERYEKAKARLEQLRTTKAAREAQTEAIGAFMFEVQELDALTEFDEKLWLTVIDTVTVHADGRMTFKFQGGKTLTSY

SEQ ID NO: 10887 - protein, 434 aa, synthetic construct
MERVVERVDALIPAQPKALRVCAYARVSTGKDAMLHSLSAQVSYYSKMIQSHNGWMYCGVYSDEAVTGTKRERAGFQHMIEECRQGNIDLVITKSISRFARNTVTLLQTVRELKSLGVDVFFEEQHIHTMSADGELMMTILASYAQEESLSASENQKWRVRKAFENGEIINLRFLFGYDITPGGIQVNEKDAAIVREIFARFNGGESMSSICRDLDARGHKGVLGGTWCAERMRNTLSNEKYLGNALLQKRYRNNHIEKKLLPNRGELPMYYAEGTHEPIIDQATFDKAQERLRMLAQQTANRTKPTRSVFSGLIHCGLCGNTYKRVTYRKKHYWNCTTFQTKGKSECAAKRIPEETLEVLTCEVLGAVSFDPDIVRSKITAIRAEKNNVVVYCMNDGSEIVKRWKDRSRVESWTPEMKEKARQRALQARRKKK

SEQ ID NO: 10888 - protein, 499 aa, synthetic construct
MKTAVIYARYSSDTQTEQSIEGQLRVCNEYAKNNDILILRTYIDRAMTGTNDNRPDFRQMIEDSKKHDFSIVLVYKFDRFSRNKYETTKHKKTLKDNGVKVVSATEYIPDSPEAIILESMIEGYAEYYSAELSQKVKRGMNETRQKGNFTGGTIIYGYKLENHKVVIDEEKAEVVRFIYDQYAQGVYVKDIIKTLTERGIFNRGKKFARNTVYNILKNEKYSGIYRHGNEVFTNMYPQIVPTEIYENVRRKTETNKYGTRSVEVVYLLRNKIKCGYCGSPISAECGTAKNGQKIRYYKCLGRKHQSGCKKSQVRKEILEKYVLDNVCEQMQRPEILDKMATYLLQVQENRIKQNSVLTNLIKEKRQTENTINNIMQAIELGGQSATVMKRMRELEEKLTDIEKRLTIEKSQTAFRLSKEQMIDYYKSALEKEPQQLINYFIKEIQLYDDKMIIIYNTPKTINLDESQGFSFYEKNVKMPYVIQNREYYGLKDFRLVMRI

SEQ ID NO: 10889 - protein, 556 aa, synthetic construct
MKKAVIYARYSCERQTEQSIEGQLRVCQEFAEKNDILIIDTYIDRATTGTNDNRAAFQTMLKDAEKPVPWDIVLVYALDRFGRNSIEVAVNKQKLRKNNKLLISATQRTSENIDGSKNLDGILLENVYIGLAEYYSAELSQKIRRGMNESRQKRQYTGGFVLFGYDIKDKKYVINETEAEIVRQVFADYANGRIVKDICKELAERGIKNKFGRTFVPNTIYRMLRLEKYIGIVRYGDEVFENTLPPIVDMETYAKVQSIIAANKRAPSRRKSYGKFILSGKLYCGECGSLMTGDSGTSHRGVVYFYYTCFDKKRRKGCTMPSVQKDDIENTVFKVCCDVLESGFIPAIVDTAYAIQMEELASNITVISLQSQLKEKEKALRNILRAIEDGIYTSTTKQRLEELEKDVETIKSKIEVETIKQQQVASKEDYAEFLKQFIGRQVKNEDFKESLFELLIRKVVLFRDKIRITFNFSPDKGKSDDNIDVDAAEIQEAQKEYNGCVIADKKQKNNPSQKACSGSDYSLLAEAVGFEPTNELPRYRISSAGRYDHFDTLPYF

SEQ ID NO: 10890 - protein, 539 aa, synthetic construct
MKEDAPRVIKIPAKPEATRQAEARRQLRVAAYCRVSTKEEDQANSYEVQKEYYTDKIMSNTAWTMAGIFADKGITGTSAKKREDFMRMIRHCRQKKIDVILTKSVSRFSRNTVDCLYYIRALKQLGIAVIFEKENINSLEEDSELRITLSGAFAQSESESISANVTWGKRRAMEAGKVSIQYKKLYGYRKGEDGQPEIIPEQAEIVRWLYERYLTGASLRMIKDELEQQGVKCFEDSPEWTISRIRSILQNEKYCGDVLMQKTFRQDFINRKAIKNTGQLPMYLIENHHEGIVSREKYDAVQAEMARRNAAKSPSKNAVTGMASYASKYALSERLVCGECGTLYRRCTWTRNGEKRVVWRCVSRLDYGKKYCHNSPTLDEAPLQQAILAALNTAMADKNSLIRQITDAMETEIIPFPGGTMSLGDIERRLRELEQQFQTLLEKATDDPAAYGGQFKEILDEQTFLKEKRSVILANNNEQAKANQRIMDAAQTLENASPYITEWDESAVRQLVETVKILSKDEVAVTLKGGIEICQKIMY

SEQ ID NO: 10891 - protein, 439 aa, synthetic construct
MAKRDDFQRMMADCRRGLIDQILVKSISRFARNTKDCLQNIRELKELGVNVRFEREGIDTVNVSSELITAIYAAFAQKESESISGNMRWSYQRRMESGEFNTCKAPWGFRLDGRKLKICESEADIVQRIFREYLSGKNPQEIADDLNASCLTERVWNYKAVDYILQNERYAGNALLQKRYTPDMLSRQQKTNHGEREMYFVPESNDAIISPEIFERAQVLRQKRSLGKAPVHSEIISQIRCICGARMRFKNVNSKWYLCCTNHDAKGDCLITPIRETQIYESFCRLYYKLKHQSIPILEQMLTNLQMIRNRRMLWSPDIVALNKRISDLSSQNQTLAFLKQQGLVDPDIFIAKTNELTKQLRQVKLEKEKLMDAESDMTALQTRDLIDLLEGGPEFLDSFDTELFGELVEKIIIEGNDSVRFCLKNGLELQESIERTVR

SEQ ID NO: 10892 - protein, 437 aa, synthetic construct
MNDIERVIERVDFQIPMQPKALRVCAYARVSSGKDAMLHSLSAQVSYYNNLIQSHAGWLYCGVYSDEAITGTKSQRDGFQRMLASCRAGEIDLIITKSISRFARNTVTLLETVRELKSLGVDVFFEEQNIHTMSVDGELMLTILASYAQEESLSASENQKWRIRKAFESGELVNLRFLFGYSITADGIQVNEKEAAVVREIFTRFNGGESLSSISRDLNDRGCERPLGGTWCADRIRNLLSNEKYTGNALLQKQYRKNHIDKKLVPNRGELPMYYVTGSHEPIIDQAAFDKAQVRLNKLARQAENRRKPTRSTFSGLIRCGLCGSAYKRVTCRSKHFWNCTTFQTKGKSECAAKRIPEETLEALTCEVLGTVSFDPDMVRSKITAIRAEKNNVVVFCMDDGSEIVKRWTDRSRTESWTPEMKEKARQRALRARREKE

SEQ ID NO: 10893 - protein, 528 aa, synthetic construct
MNRTAARSVTVIPPTINPLTHLSGVAVQKRRVAGYARVSTDSDEQFTSYEAQVDYYTQYIKRNPEWEFVKVYTDEGISGTNTKHRIGFNEMIADAMSGKIDLIITKSVSRFARNTVDSLVTIRKLKEKGVEVYFEKENIYTFDGKGELLLTIMSSLAQEESRSISENVTWGQRKRFADGKVNLPYKQFLGYRKGADGFPEIVPEEAIIVHRIYTRFMEGLTPGAIAKELTVNGIPTPSGKQRWQTSTVESILQNEKYKGAALLQKCFTVDFLTKKKKLNEGEVPQYYVEHSHEPIITPEEFDKVQTELARRKRISRQYSGKSIFSSRIICGDCGSYFGSKVWNSTSKYRRVIWQCNGKFKGEHKCETPHLDEETIKVRFVAALNAIIDSKDRILEDCRLMQTTLTDCTGIDAEIERLLTEIDVVTELTQRCISENAQSAQNQQEYTARYNGLVERYEKAKAQLEQLRTTKAAREAQAEAIGGFMFEVQELDTLTEFDEKLWLTIIDTVTVHADERMTFKFQGGTEIDV

SEQ ID NO: 10894 - protein, 540 aa, synthetic construct
MRSKQLQLNNKVGLYMRLSKDDERAGESLSIENQRIILTKYAQERGWTITDEYIDDGYSGTNFDRPEVQRLLEDAKTGKIDTIIVKDLSRFGRNYIFVGQYVDYIFPMYNIRFIAISDNVDTANTNSAGMDMMPIMNVFNEWHSANTSKKIRAVAEANAKAGKYRSTHAPYGYVKGTGDKCLPVIDEPAASVVRRIFEMRASGKTYKEIYTVLNDEKVPIPAVYLYEKFGITNKKPNKNLWADSILRSILKNPMYLGHLVRLRYTTISYKNKRRVEREPIVFPNAFEPIITQELWDKCRELDESVSHGKHTSWGIMPPLSGLMYCADCGGKMKLGRQDLKPSKAHPEKRSRYHYICGNHSRFGKYYCYNHYIRIEDIEQIVLDDIRSKARLVLEDEDKARTDFLKHKEQMSAAQYKSDSKALTQKTKRYEELERLMQSVYEDKVIGKIPEEICLKLLAKYTEEQNALKSEIDELENKLSVVTKNESDVDEFICRLKHYANVPELTRELCLELIEYITIGAKPGDKMGTREIHIYYKLLGN

SEQ ID NO: 10895 - protein, 578 aa, synthetic construct
MKGAIYSRVSTEGQDYSKQTNELKDYAKRNGIEVVYVFEEKESGFNNNRPEFEKLRKLTKQDIDIILVWEISRISRRAIYLQQQVQEFTDKGICIYAKKDGFSTLNDDGSVNASTKMLIGFASIIAEQEAATLKERTISSKRNKILREGKSYTYYAPYGYDYSKETKMLSINEKQAQVVKRIFQLSIDGYSTERIAILLNAEKIPTKGKKENWTAGTVCNMLTNPVYKGEANYTLKKEKKAGSTYCKPMEVVTISTPAIIEKEQFELSLQKLAERTKRSNSFGTKYNPLLRGLIHCPHCDVKYVYNFGTNQYLCVNKYKKASNKNVHCTAKCISNKLDSIVWNVVKTFFYKELAAGKAQEQIEPLQAEIESYKRQILLLDGKQSELTARANIIVDAAIEIKIQFPNMPDLYANKMKEVEEINKEASKYQKEKERLEKLIHSNESRIKNINRASKESALVESITDETEKYDLVHKAIDKIMIFGEGKTSIIIVTFSTGQTIYLGYSSKSNSKYYTIFYPSSDIYFDIQTSKGYINHLKEKATINSDGSIYLGDLTGEVKEYSIIDFVNYLDIEENRRYY

SEQ ID NO: 10896 - protein, 517 aa, synthetic construct
MQKNNKSIGNRCVIYARYSCSNQTEQSIEGQMHDCEQFAARNNLQIVNSYIDRATTATTDKRPQFLKMIADSKQCVFDVVLVWKLDRFSRNRYDSAMYKKKLKDNGVRVMSAMENITDSPEGVLMESVLEGFAEYFSKDLSQKVKRGMRETAAKHKITNRIPFGYCKSEEDTYIPDPHTANAVRKVFDMYITGFRKSDIADWLNSNGYKTSYGNQFTLTAITPLIKNTRYIGKYYYADNEYTDETQRIVTDDIFYKAQQKAIANQHGGSCKAIERYLLSNKLYCGYCHNKMIGECGKNQNGLAYHYYTCVGRKRKHICNRKNIKKKDIEQYVINAISCLLNDEYAINKIIETAINYQQNDVEHINEIKDIESTIKEIERKISNILSAIEAGIFTDSTKNRLQELENQKTRLTQELNYKNQSSTKIPRTTLKQILKNLDLSKDATNPEKQNIIDLLIHRIYLWQDKILIVFNQSNLCDNEISVDDTDVNTIIKTLSEPNASSSDSVEYGTPDQSRTGD

SEQ ID NO: 10897 - protein, 468 aa, synthetic construct
MARQVVHIPAQRSIGNRAVAQNTKLRVAAYCRVSTEQDEQLNSFENQVTYYTEYINRNPNYELAGIYADEGISGTSTKRREEFNRMIADCEAGKIDLIITKSISRFARNTQDCLNYSRKLKDLGIGITFEKENISTMDSTGELLFTILSSLAQDESRSISENCQWGIRSLFKQGVVHINTNRFYGYDKDEDGRLVINPEQAKVVRWIYESYMDGINPDILAKRLMEQQMPGCMGEPKWTVDTIMGILQNEKHMGDAILQKTFTADYLTKKQVKNEGQLAQYHVKDDHEAIVSKELWEVVQLEIQRRKDYMKRYGLRTMGRNTDEQPFTNRVFCGVCGQLYWRRTLYRLNGSIKAWMCASRCKGKEVKGCINDNLLEADLHKAFIMAWNAMLENRADFLENWKVQLADQNPLVAFRAKQFMKLTDKAKPMKELDVSIVSKTLDHCDIKPLGVIDFYFLDGSHIGLVTKD

SEQ ID NO: 10898 - protein, 412 aa, synthetic construct
MRIKVIKPTVAAENKRLKVCAYVRVSTDSLEQEDSLDNQTAYFKDYIQSNPAWEFVGIYADQGISGFKENRPQFQRMIADARAGKIELIVVKSVSRFARNTETVLKFSRELKSIGVGIFFELQNINTLSGAGELMLTIIAAFAQAESQGASDNANLTYKRKFEAGIPAQDLNRTFGFDTDEGGNTYIIEEQADTIRLIFDLAQQGVWPSKIKQYLNKHGITSCAGGKWDDTGVFRVLHNPAYKGAMVLQKTYLDSRRVRHKNEGQKDQWYIADNHPAIVPPEQWDAVQEILLARSEQLAPRPPQKPSQPRSSRNQYPLTNKLFCPLCGQKLHHKWSNQGKNEYWACSTNVKQGTKACKGIWLPAEEANAWGDISEPTTAICYEDEYGMRHFTAYPKAEYELSDECPYQRKEK

SEQ ID NO: 10899 - protein, 518 aa, synthetic construct
MKAVIYARYSSDSQREESIEGQLRECAAFAEKNGITVLRHYIDRAYSAKTDNRPEFQSMIKDSGKRLFDMIIVWKLDRFARNRYDSARYKAALKKNGVKVVSATEVISDGAEGIILESVLEGYAEYYSADLSEKVVRGMTENALKSKYNGGTLPIGYQIDSDQCFQLDPLTAPFVREAFQRYDEGATMTQIRDWLNGQGVKNTRGQKMTYNSIQHLLNNRRYIGEYTYRDIVVPDAIPAIVPQDLFDRVQEKLAKNKKAPARHKAEDDYLLTTKLFCGYCGAYLCGESGTSHTGNVHHYYKCVSVKKKRTECHKKSVKKEWIEDLVVNETMKMVMDDTAIEAIVSMLMDLQDRENVNLPLYEQQLREADTAIQNLLNAIQQGILTKSTKGRLEELEATKEELETKIACEKLAKPKVSAEFMTFWLHRFRKLDVRQKSHRKMLIDTFVNAIFLYDDKMVITFNYKDGTDTITFDDLKAALDKEKTGSDLDCSTAPKREAKKDIGCKSPVFSRLPRPVDE

SEQ ID NO: 10900 - protein, 519 aa, synthetic construct
MKKVTKIEKLQNVTSKKQKLRVAAYCRVSTSNDAQLESLETQKAHYESYITSRDDWQFAGLYFDEGITGTKKDKRPELMRLMQDCAAKKIDFIITKSISRFSRNTTDCLELVRKLQELDVPIYFEKENINTGSMESELFLTILSSMAEGESTSISENSKWSIKKRFQNGTFKLSYAPYGYRWDGRTLRVIPEQAEVVKRIFADVLSGKGTDAIAKALDDEGVPTKRGGKWTSTSVRGILANEKYTGDVIFQKTYTDDSFNRHTNKGELDMYYVADHHEAIISKEDFEAARLLITQRAAEKGIKRESQIYQQRYAFSGKIICNECGDTFRRRLHSSTYSKYVAWCCNTHLVDKDKCSMMYLRDDDLKVAFVTVLNKLIYSHKLVLKPYAAALQNNSGDENLVRIQHLERLLEQNTEQRETLTRLMAQGYIDQVLYNSETNALLSQANTYREDIEVINATMSGDSSRFFEAERLLHFAERGSMLEEYSEDLFERFVDHIQVYSRHEVGFVMKCGLTFKEMI

SEQ ID NO: 10901 - protein, 521 aa, synthetic construct
MGNVMVIPAKRQIGNTGRKQDAKPKLRVAAYCRVSTDSDEQATSYEAQVEHYTEYIKKNPEWEFAGIYADDGISGTNTKNREEFNRMIEDCEAGTIDMIITKSISRFARNTLDCLKYIRQLKEKNIPVFFEKEAINTMDAKGEVLLTIMASLAQQESQSLSQNVKLGLQFRYQNGQVQVNHNRFLGYTKDEEGNLVIDPEQAEVVKRIYREYLEGYSMDKIAAGLEADGILTGAGKSRWHTSTINKILRNEKYIGDALLQKTYTTDFLNKTRVKNTGIVPQYYVEGNHEAIIPREIYMRVQEELVRRRVVKTSANGKKRSYSCNHCFSQIIICGDCGEMFRRIHWNNRGCKSIVWRCISKLEPTGLECHARTINELDLQEIVLTALNELLGDKSKYQKQLQQNIAAVIRASAAITTDGIDEKLMELQQELVKKANNKEAYDEIADQIFALREKRQQASMDTVQRDEQLQRITKLQDFIKDQPSDLTVFDEALVKRWLKQITIWDDHCTVELKSGLKVDVER

SEQ ID NO: 10902 - protein, 554 aa, synthetic construct
MALLPRKPAKHPAKPKRGKKLEIEEPGVLYGRYSSHNQKDISIEQQFEKCYELAAEYGIRIIDTYADRAVSGRTDKRVDFQRMMADAAKGKFRYVLAWKSNRIGRNMLEALVNEARFQELGVRVLYVEEDFDDTAAGRFAARSMMNVNQFYSENMAEDIKRGLYDNAANCMVTNGHLPYGYKADETLHYAIDEPRAAVIREIFTRVSCGEAFVDIMSSLNARGITTSYGRPWGRSSFQKILSNERYRGIYIYGDVRIEGGIPRIVSDELYFKVQEAITTKKNPQGRHRVNGDYLLTGKLFCGHCKSPMTGISGTGRAGKLHFYYVCQKRRTEKTCHKKNVRRDVIELKIAKAIRDYALKDDIIEWIADSCVEDHDRRVSESHLSVFEDQLAEVNRSIKNVMSAIEKGIITETTKGRLMELEAERTAIEGKICAAKAAIVPTNRERLVEWLRSLREGDMHDKKYQAGLFDTFLVAAYLYDDNRVKIVFSFAGDKNTIEIPLEDVIDSIDDEASCVRLSSTLSHHQEGTKKMYPAKSPILSGFFAAQKPFFGASKS

SEQ ID NO: 10903 - protein, 573 aa, synthetic construct
MAKVKLPDKPRVAIYTRVSTLHQIDKDSLPMQRQDLINYARLILNTEDYVVYEDAGYSGKNTDRPKFQEMMQQVRLGMFTHILVWKIDRISRNLLDFATMYSELKQLGVVFVSKNEQFDTSSAMGEAMLKIILIFAELERNMTSERVTAAMLSRAANGQWNGGRVPLGYDYDPETKTFTINESEAEVVKIIHDKYEQERSLVSLARYLNGHGYRTRTGCTYSPSTLLIILRNVFYCGDYRYNVLKDGDRQKRKKESEWITVKDHHPAIISREQKDEIARILKENRRLECERRGIYSKKKNVHVFGGLVICGNCGHAMTSTIRPADQDGIRWSVYVCPTKRRSEYLCKGRATSEVVLGEFVFNYILNMLNVQKNFDSINSVEDMEKMLLSGSTFRDVDGIERAGLDDLYNMLASGLTEKAPFDSSVEVRKKPVVSDIELENLNTEKTRIERAAERLQNLYLYSDDSISQKDYIIQREKLMSQLAEVNEQIGMVMSNADEKDVSDEEFVHAASKFILTQKLEGRTYIYYKRLATTVSREVLRSFVMSIIENITIYDGRVQTIVFKNGLSHTFILK

SEQ ID NO: 10904 - protein, 530 aa, synthetic construct
MIESILYKTAIYCRLSLDDGSLGESGSIQTQKMMLEKYCRDNNFTIKEVYIDDGYSGLNFDRPAFKRLIADIESGKINLVITKDLSRLGRDYLQTGYYTEQYFPLHNVRYIAVNDGVDTLIDNNDIAPFKNILNDMYAKDLSRKVKSAKRQRALNGLFISAQTPYGYIKDPTNKNHLIVDEDVRHVVELIFNMCVNGKGAPTIAKVLEEKGILNPAAYKILKGSTRFAKLQGTNHYKWKAVTVRKILTDMVYCGHMENGKYKVENYKTKRRVKVPDSEHIVVKNTHEAIISEETFETVQTVLSARHYPAHHEHENLFKSILFCECGKRMAIAHKVRNNKKDTFYKCANHENNPHECPRSNIIQYSQIKSVIEKEIFDLMNKLKHNEKAFETFVSKLKKEESKDKSSEIKKTESRINTLIKIASKLYEDYASDLINERTYKELLLRNKQEQDLLEQKLQSLRNVQENITYKLMRLDQLKHEFNRFLDNVELSSDMVNSLIERIELSYYTKTEDGKKHRRIIIKYKFIDDSL

SEQ ID NO: 10905 - protein, 525 aa, synthetic construct
MKDNKIYNTALYCRLSLDDGSIGESGSIQTQKIILEEYAKIHGFKIYDVYVDDGYSGLNFNRPGFQRMLQDIDNGKVNLVITKDLSRLGRNYIETGYYTEHYFKDVGVRYIAINDGIDTINDNNDIAPFKNILNDMYSKDLSRKVKATKKSRNQRGLYTTTQVLYGYKKDPENNNHLIVDEEVRPVIELIFRLALEGHGCPKIASILTERGIYTPGYYKRMKGNIRFARFKNKGWTYVTVRKILGDVVYLGHIESNKYEVINYKTKKCVPVPKERHLIVKNTHEAIISQEDYDSVQSMIAARTHPWVHNHENLFKGIIYCAHCGNRMALVYQKRKYGTVSHTYKCTTYMRNKDYCPRPNTLLHRQIKSIVEQELRYLVSNINRDEFLTKLIERKKKESSGVNIESKIAKLEARKDKLYQLTKKVYDDALNEIIDSDTSSKMIKEYQEEQKKIASEIETLKNLKQEEESTIENYKLLKEKVNEFLEFKELNSLIVHSLISRIEVGYRDNPRTIKIYYKFIDDSISN

SEQ ID NO: 10906 - protein, 538 aa, synthetic construct
MKETKLNKTAIYWRLSQDDGMVGDSSSIQTQKMMLEQFVKDNNFVLYDIYVDDGYTGLNYNRPGFERLIQDIENGKIDIVVTKDLSRLGRDYIMTGYYTEIYFPEHNVRYISVNDNIDTLYDNNDIAPFKNILNDMYAKDISRKVKTAKRQRMYKGYYISCQTPYGYKVNPNNKTQLIVDEEVKDNIKLIFELSLMNLGSKSICNELNRRGIPTPGAYKASSGEQRFINLLESTKSSRRNYDVRLWNTNTVNKILKDRVYVGDMVNHKYEVKNYKTKKRTRVPEHERIIVKDTHEPIISRDDFEKVQLMISNRKYENNYTNPNLFKSIVKCKKCGRTLTFCYNKRNKSGIRVYKYACMGRYLGDKDIHESVVITYKDLEEIVTSRLRSLMESIKNKGDAFIEDIISSIDIDSESKQLDVQKSKIESRLNVITKSMKKLYEDNVCGRIADDNYQILLTDFQKEQKELISRLEDLTTKSNKYKTQFERIKEFRQVADKYLNFTELTNEIVHSLIDHIEIDVNTINNKKIKEINIIYRFIC

SEQ ID NO: 10907 - protein, 599 aa, synthetic construct
MIDNCVRAVFYARVSTQEEQQLKALPKQIQENRDKIREKGWVLVDGYVDEGKSGTVIKRRDEYQRLLEDMELNKFDVVVVKDQERLQRNTRDWYNFIDRLVQNKLKLYFYLDNTFYSPDNALITGIKAIMAEEYSRNLSKKMNNSNKRRIEKARAGEEVSAMGNGQTYGYSIVNGKWVVDESQRELVKKMYEFYTELHSIRKVRDALNEQGYRNQRGNLFTDENIGRIVKNVMHKGWVILNRHHREFDSKETIEKLEDEWVIVKNDHEAIVSEELWDAVNDEIQSHRNKGNSGTRGKRGGTDTLSGKMVCNCCGRVLWKHASQGSYKSKEGRKYTYKRYTQWYCSGKMGRGELACTDPATISGVKLQKYLVEMADMFLDYSTVEYSKNLLKRRTISWLEDLRDKLTTPTDNGKIEQDLKALEGKRGKLIDLYTDELISKEEFKSRSVDLDAEIEKKKTLLVPVEENPDIKAIEDTIANIDAEIEALFEDEAMVEEKKVQFIQEHIKKIYVSKNSDVFIVLDNVAGAFLFIDKEDTRIEVVPVAEYNPKELSEEGITENDFVPFDRESMPQHHGPKHLYPSGTQTAPRCCFRDRFSCDQP

SEQ ID NO: 10908 - protein, 506 aa, synthetic construct
MNTVIYLRKSRADEEAEKQGEYETLARHKSTLLKIAKEKKLNIVEIKEELVSGESISNRPKMLELLSEVEKGMYDAVLVMDIDRLGRGNMQDQGLILSTFKESNTKIITPRKIYDLNNEFDEEYSEFEAFMARKELKLITRRMQRGRIKSVEDGKFIAQAAPYGYKVEYNGKDRYLVIDEGKSEVIKIIFDMYSQNIGANRIASHLNELGYRTTTGRTWYDKAIRDIIKNKTYCGYIVWNKVERKKVSQRIKSIDKQIESKGKHEPIISEELWNKCQNIRTKRSISPTPNNIMTNPLSGVVKCNLCGYTLVAKSSTVKQPDGSIGYTKYLVCTNCRNRGTKLAIVEEKILYSLASWLTEYKVLLNNTDFKQENNIENYTKIVDNLKKELDNLNKQKENLHDLLERGIYDVDTFIERSNNIGTRIDSINDTLDSTMNIIENERKKEQAKYNIIPTLENVLEQYYNTDDILLKNKLLKSVLDKVVYTKDHKRRDEYDFDIVLYPKLPH

SEQ ID NO: 10909 - protein, 504 aa, synthetic construct
MRVVLYMRYSSDRQTEQSIEGQNRVCTAFCEQQGYEIVDRYIDRATSAFKDTDKRTEFQRMIRDSEKQLWEGIVVYKLDRFARNRYDSATYKARLKKNGVRVISATENISDNPEGVILEAVLEGMAEFYSKELSQKITRGMFESANKCHSIGGHIPLGYKIENKKLVIDEAGAAIVREAFDLYANGATVAEICETFNTKGYRTAKNAEFNKNSFRSMFKNERYIGIYKYKDLRIEGGVPAIVDKDTFAIVQKKLSKNAEAPSRGKAKIDYLLSQKLFCGHCGSLMTGESGTGKGGTTYFYYTCGKRKREHTCDKKPLKKDFIERAVVEDALTLLTPETIDELADIAVNESIREMEENSIIPALKDQLHDTERSINNLVKMVEKGVESDTIADRLKELEKEKRAIEKRLVVAQDDYVLLEKDHIVWWLSEFCNGDIEDEEFRRHIIDLLVNSVTVWDEPDGWYKITSVYNLTSNKTKTFRCSDLSGQAPPLKYNPNTLFFIGTLF

SEQ ID NO: 10910 - protein, 523 aa, synthetic construct
MRFFSYGRKSVFSDKSDSIDNQFRMNREYCESKFSGQVDSWQQFSDEDFTGANTSRPDLQRMLSFIKGGFCDVLVVYQLDRLSRDVRDFANIYALLEEHGVMFISIKENIDTTTPIGRAMMYVTVVFAQMERETIAARVTDNMLGLAKKGYWTGGNPPVGYVRKHIVVNGKKHCSIEVDPDGARYVTQIFDTFLAYNYSLQGMETRFKNQGIRTQNGKFFSTAQLHKMLTMPYCVEATPEVYDFYAAKGCIMDPGSPREMWDGSVGVIIYGRSTEKNKKHQAQPPEKWTVCLGKHKPFMPAEKWLAVQSRFTQNKCIKDAKWPVPLLKGVLRCKCGNLMQVSRKKKVDGTCSSWYYCRKRMRQGVDACDMGQIKCDLLDGEVLELFRGITADPALIQKFVKAEAPADVPDLKAAQARVSACERKIGRLAASLALAEDSAASKYIIAEMERLDVELGALKREASLAEMESHRAAASAKDAKATAAEIAKLIHGLDGFDDKEKNAIARAVIQECTWDGERLFIKL

SEQ ID NO: 10911 - protein, 463 aa, synthetic construct
MARSVTVIPARNRQVSGYRAAPQKKIRVAAYCRVSTDQEDQLHSFEAQVDYYTKYINDHENYEMAGIYADEGISGTNTKKREQFKRMIADCGKGKIDLVITKSISRFARNTQDCLMYSRKLKNLGIGIIFEKENINTLDSTGELLFTILSSLAQDESRNISENCKWGIRTKFKNGEMHLNTFKFLGYDKDENGKLIINREQAKTVRRIYRDFLWGLNPAQIAKELEDEQVPGCLGQTKWYASTVIGILKQEKHMGDALLQKTYTADFLTKRQVKNNGEVAQVYVKDSHKGIIDKETWNAVQEEFERREKFMQKHGTDRYSYGSECYPFCEKIFCGECGSLFTRHSWKSRGIIQWQCKNHRKDGKVACTNAYVDNADLEKGFVKAFNRLVGEREKHIERWNSMKLDGTPLEKIRAGQMMEATESGQLQQYVPEAAQLVLEEITIFGAKKYEFAFLEGSRVKVSV

SEQ ID NO: 10912 - protein, 501 aa, synthetic construct
MEIQIREGSREQKRKLKVCAYCRVSTDADEQENSLENQVRHYETVIKANPDYEYAGVYSDLAISGFKEKRPGLQKMLADAEKGKIDLILTKSVSRFARNTSIVLEATRKLKELNVGVFFELQNINTLSGEGELMLTILAAFAQAESESGSAGAKMVYQRKYEAGIPVQYLERSFGYTKDERGVFVADEAEAVWVRKIYEMAADGYTPASIKRYLNENEVKTVGGVQWVDSTVFRLLENEIYKGDYIMHKHFVNEERKLVRNRGEVDAWYIEDDHEAIVSPELWQKAQDALAAKRDYLAEGSVIEEFTEENYPYMNKIYCAKCGYPLYKRIYSKGNRLNWGCSGTKRYGKSFCDGINIPDGVLRSAWHFEENTYIDEKASDKGVKEFTYLKEHSWKRRHKKKQPSAIPENTETEYPYREKIFCALCGSRLVRYVNPQNHKVTWVCNRRKRKGKEACDGTRVPDTVIKGWGEIKNDIYIQRKDDKNGKKRYSYTSKKPSGIRV

SEQ ID NO: 10913 - protein, 548 aa, synthetic construct
MKFKYPAMGTTKNAVIYARYSSHSQREESIEGQLRICHEYAKAEGLAIVGEYIDRAISGTTDARPDFQRMIDDAKKKQFSYVIVYRLDRFARNRYDSVLYKHELKQCGVKVVSATEGIGTGDESILLEALIEASAEYYSMELSRKIKRGRQDSAMKGNFLGGAVPLGYKVVDSKFIIDDETAPIVRYIFERYAAGIGKKQIIDELTAKGYMRRTGKPFTYRAFDSVLRNRKYTGEFTQTGITVEGGCPAIVDTEMFEKVQARLEINRRAPAKAKAKTEYLLSGKMFCGYCGEPMIGISGTGRHEKTFYYYSCVGRRGKSGCKKQHEKKDFIEWYVCEQTVQYMQDPERLSHVAKRIIEINDAEFDGGKVKELERAVENCDNDIRKLVDALTTIPDAGRAALYDKIERIGAAKADMEIDLAKLRVLSEVRYKQEDVEAWIRSMCRGDLMDFEFRRQLIDVFINSVYLFDDRVVIVYNIKHGKQVSAIDVLNAVEELDGVELFPDSAEDSSAGGNGSFLVADAPPYMKNPNLFPIGNGFGFLIFIKDIID

SEQ ID NO: 10914 - protein, 526 aa, synthetic construct
MIQTGKITALYARFSHDEGNSGHDSNSIANQKELLAEYANTHGFINHQFYTDDGYSGTNFERPAFQKMMTDVENGLIGTIIVKDMSRLGRNYLMVGQYTEIIFPEYNVRFVAISDNVDSAEGLSDLIPFSNLINEWYAKDISKKMRAMITQKGNSGRRLCSRAIYGYKKSPEDKEKWIIDEYAASVVRRIYELYISGNGVSRIANILRDEKIQRPFVYLYQKESDTPYEWTGATITVIITNREYCGDTVNFKTHKPSYKSKKIIKNPPELQRVFLDTHPAIIDRVIFEKAQNRYAKRCRKKKSKTKDTLFTGYVYCKDCKSRFHVFRHKARGNMIVSYECSGYRKQQKKCTYHRIDEDALKQCVLQKIKLMWYEAKSDIRSFKAKVRKRLNADETASRSKIQSEIDAAQTRIAEIDKYVQGLFEAKVRNEIDSDIFGSLSKTYTEEKAELNAKIADLILQENSAKDAYQKINRLYEAIEKYDSITELTSEVLSDFVDRIEVGEHLKGTKEQKIDVFFVGVGLMDTL

SEQ ID NO: 10915 - protein, 425 aa, synthetic construct
MHILTIKPKLKLDIAVKRVAAYIRVSYLDEHTSHSLERQREYFKALIAGNPEWSSAGIFCDSGKSGTGIDKRNGFKAMIAECEAGRVDMVITKSISRFARNTVDLLKAIRRLRELGIAVWFEKERINTLTSTGELMITLLASYAEEEVMSISQNVKWGIQKRFKEGRPQCCQRVFGYVWDEDKAGYVIKEDESAIVRKMYDDFLSGMSPYQICKRLKADGITTVRGKYASTGNLLRMLSSEFYLGRLVLQKTFVADSLTHKRETNNGELPKYVVDDDHEAIIDDETFQRAQELIRKRQELGLKKRANLNIYPFTQMVVCGKCGSYYHRHVGHKESSEKTTWICGTHRRSARKCRNRNVPEWVLMEKSAEALGLKEFDAETFKENIDHVVANEDDSLAFCFKDGRVTVTKWKGIRKCAQSRKYQRR

SEQ ID NO: 10916 - protein, 466 aa, synthetic construct
MEGDKKMRTVTEIPATIDRYTHSSLVAKKKKRVAGYARVSTQFEEQQGSYIMQMKYYRDYIKAHDDWKLVKVYGDDGVSGTSTSKRGDFQAMMKDALKGKIDMIVTKSISRFGRNTVDTLVAVRKLKERGIGVYFEKENIYTLDTKGEVLITIMSALAQDESRNISENTTWGHRKKFASGRFSLAYSKFLGYDKGPDGKLVINEEQAKVVRLIYRLFLEGYTHKLICRILEEKGIKTAAGRSKWYWLGVNGVLTNEKYKGDALLQKTFTTDFLTKKEKKNEGEIPQYYIKDDHPAIIPPAIFDMVQDEIAKRKKLHRNSSGEDLFMFTIKCGNCGAWYGRKTWHSNDKYRSHKYICNSRYDKGKKKCPSPALTETDIVNVYIKVVNKLFRGVQQDVVDGIASLKEVMPDKADVFERLAARLTDDRKPIKAYDRELWRNFIDEIDVFPDMHFNVKLKDESTTTVYLD

SEQ ID NO: 10917 - protein, 488 aa, synthetic construct
MSKKRAVAYIRVSTEKDAQLHSYDFQEQYWRGVFEDDPETELVGIYADKGISGHSVQKRPQFLVMMQDARDHKFDRIYTKSVSRFARNTTQLLEAVRELRDIGIEVVFEKENIHTFEPTSEVFLTIAATIAENDLDVDSERMRWSVRHRFENGWISIGSGLYGLRLTADNELEIVPEEAAVIRYIFDAYVNGGLGSKRIADALNESGVKTRDDGAWNAKHIVALLRNEKYKGDVIMGKSVTHFGVHRDNTNGEFAPRYYMEDTHEAIVDKQTWEAAQQILAERGRNIPRQVTSHTFTSMIRCGCCGTNFVHKVNNSNFKWRTDIWVCGRSLAKGIKACDNSRIKDAVLKEKFVDAYNEFIEQRPHGDSLIALQEVLEDLRQQERDLAELMMQRLISKAAYDTERSEINARIAAINEKNADRRIRRVPESEHQPITEFNAEKATRFLSKVIVTKFTVTFVFYNGAKISRRYDNGQPGKKPGWNRKKEDA

SEQ ID NO: 10918 - protein, 540 aa, synthetic construct
MATATRRVVRTMPQMFIETVDIDQGKLKVAAYARVSTEKEEQEDSFERQVEHYKQMIASKPDWKYVDIYADPGISGTRAEKRPDFLRMIEDCRAGNIQKILVKSISRFARNTVDALNYIRELKDLGISVYFESENIDTLTPGGEVLLTILAAMAEQESRTISSNIKWAYQRKFQNGDIVLNTGLMLGYRKVGKDDDGHDVFEINEEEAEIVRRIYREFIAGYSITQIAKRLMADGIKTKLGKEKWSHNVIESILTNEKYTGNALLGKTWKPDVLTKYRQKNDGKKAPIYYVEDTHPAIIEKDMFDLAKKELERRRGSKEQVVGGGRFTSKYPFSGLVECGTCGGRLRRHVRTMGTGKKVASWGCATRIVNGRQACDTHHINESVLEATYLAALRDLLDNASDVVEAVKEGAELALEPENRAAIERIEAEIVGIQEAVLELHRAKQRMEVSAVDYAAKVKEYSEQMKAKEAERDELQDTAVKYTEVRTWLETFMDQIMQSTSLTKVDGTTMKLLVEKIIARDTGIEVVFKCGVSVEHEYVK

SEQ ID NO: 10919 - protein, 473 aa, synthetic construct
MNAVYVRVSTDEQAKTGYSLQDQLQSCRQRLLSLGLPNISEYVDDGYSGEFLERPALERLRDDLRAGTIENVCVYDPDRLSRNLTNQLILADEIEKAGAKLLFVTGDYDASPEGRLFFSMRGAISAFEKAKIRERTMRGKRAKVLSGKPLFAAPPFGYSCDRVAGQYVIVPEEAEIIRDIFARYSGKKYGILPLGADLRACGIVNIRTGKPFSASVLHRMITNEMYAGTKWTFQIYQKLIAQKKRKIIHRDKSEWVAITIPAIIDRETWEKTCEVREQNKVMAKRNSKREYLLSGVIKCAGCGYAMRGITYPKRTKKEYGYYVCTAYINENICNCKTGIPVQELDEAVWNHILQTYSASYIAANKRRKTIDKPRHDTEAQLANLKARKATILKWVSAGTVDMDEAEKELKNLNTSINAVMESLESKPKIIDISPKEIASAKTMDEKRRVLLKLKIKVYAKKEGGKISYTIRDS

SEQ ID NO: 10920 - protein, 470 aa, synthetic construct
MARSITVIPARANRTSLAENLVPTKKRVAAYCRVSSDQAEQLSSYEAQVTHYTSYINSNPEYELAGIYADQGISGTNTKKREQFNKMIEDCKARKIDMIITKSISRFARNTLDTLTFVRMLKDLGVEVLFEKENIRTLDSKGEVLLSILSSLAQDESRSISENSTWGIRRRFEQGKIQINHVKFLGYDKDEDGNLIINEKQAKIVRRIYTEFLNGKGANRIAKDLELDGVPNWNGKSKWYEGSIRKMLSNEKYKGDALLQKSYTVDFLSKKRVENTGQVPQYLVEDSHPAIIDKEMWEAVQLEMERRKAYALEHGIQKLEYASTDNPFAGKVICGCCGKIFGRKVWNSTDERHRRIIWRCNGKYPAKGKKGCISKHIDDRVLYQAFVGAFNIMVENKDYFMEKWQERLESDNVLVRYKAKQFMGILADSQMMETFDIALYFALVEKITVYDGGRLMVSLLDRTDVECESE

SEQ ID NO: 10921 - protein, 470 aa, synthetic construct
MARNITVIPARANRTSLAENLVPTKKRVAAYCRVSTDQAEQLSSYEAQVSYYTSYINSNPEYELAGIYADAGISGTNTKKREQFNRMIADCKAGKIDLIITKSISRFARNTLDTLTFVRMLKDLGVEVLFEKENIRTLDSKGEVLLSILSSLAQDESRSISENSTWGIRRRFEQGKLQINHVKFLGYDKDEDGNLIINEKQAKIVRRIYTEFLNGKGANRIAKDLELDGVPNWQGKPKWYEGSIRKMLSNEKYKGDALLQKSYTIDFLSKIRAENTGQVPQYLVEDSHPAIIDKDMWEAVQLEMERRKKYAEEHGIQKLELATEDNPFSGRVICSYCGKMYGRKVWNSTNERLRRIIWRCNGKYPAKGKKGCISKHIDDRVLYQAFVGAFSTMVENKGYFLDKWQECLGSDNVLVRYKAKQFIGIITGAVAITEFDTDLYFALVEKITVLDGGKLVVSLLDGTAVECSME

SEQ ID NO: 10922 - protein, 519 aa, synthetic construct
MSKKKPAENTAVKIPAVIYARYSSSGQREESIEGQIRECTEYAERHGFVIVEHYTDKALTGRTDKRPGFQKMIADSEKCTFQAVICWKTDRFARNRYDAATYKYKLKKNGVRLYYAREAVPEGPEGIILESVMEGFAEYYSANLSENVKRGYYDSALQYKTLGHKVLGYRRSASDQYEIDPETAPIVKRIFDEYASGRSMQDIIADLNAEGYKTTAGGLFNKSSLRRILQNKKYIGVYEYRDIYAEDGVPAIIDRDLFDRVAERLKLKAHAPRAREGVRFLLTSKLFCGYCGEPMTGESARGEHGQTYYYYTCNNRKRGTCRKKRVNKEDFENFVISSLVEILQDDYYIETLADLCLKQIEETRDDSTLQIIERKQKENQKAIDNMITAIKAGIITSSTKEALQELETERERLQVAYAKEIMKTPDIDRDQIIFILDKIRKGDPADTRYQVRIVETFLNSIYLYDDGKTVIHLNFKGDNATVTLAYTEKAAAKAEPVKSSTNEPPALPLYFYGFEKNTL

SEQ ID NO: 10923 - protein, 432 aa, synthetic construct
MAKNVVQIQPNKPELQQRSRVAAYARVSCGKDTMLHSLAAQIDYYREMIIRNPEWRFAGVFADEAKTGTKEDRPEFQALIAKCRAKKIDMVITKSISRFARNTVTLLKYVRELKNLGVDVFFEEQNIHTISADGEVMLTLLASFAQAESLSVSENCKWRIRKGFEEGKSTSVRLLGYQLIDGEFTIIPEEAETVRRIFNLYLQGYGIQTISNMLESENRATVCGGVWLPNKVAEILDNEKYCGDLLLQKTIVQNHIDKKTILNTGQLPQYLIENNHDAIIDKDIFLKVSEERKRRAINKGVKREYSALTGMIRCPYCGKNYRRKTTTRCIKWCCSTFNSKGKKFCPDSKMIPEDTVIQAICSMLNMDSFDEKKFVKLIDHIDACKENTLRFHFTDGNSRDYVWADRSRAESWTPEMRETARKNTIRRRSNGK

SEQ ID NO: 10924 - protein, 545 aa, synthetic construct
MANKKITVIQPTKPLHSSDFQSYSKRRLVAAYARVSTDHEEQESSFEAQVSYYEQKIKANPAWQFVEVYSDEGITGTSMKKRDGFNRMIKDALAGKIDLILTKSVSRFARNTVDSLTTVRKLKDKGVEVFFEKENIYTLDSKGELLITIMSSLAQEEARSISENTAWGHRKRFADGKFSLAYSTFLGYDKGPDGELVINEEQAVIVRRIYDDYLAGLSPYTIAKRLTEDGIETPAHKTVWQASTVYSILKNEKYYGAAILQKCITTDFLSKKQIKNTGQLPQYYIANDHEAIIPPEKFKMVQDEMQRREDAGFKAQCVSIFSARIVCGDCGGFYGRKIWHAGSKYASWRWHCNNKFQKRKYCSTPTLKEESLKEAFLEVFNGLIKRRDKIEKNYNRCLDAITDTSEYERQLEELNKGCAEVHQLIKSLLISHGKQSEDESISDMYAEYENRLDTLAKLKQELDMKIAACSAKRTQVNGFLSELKKHDQPLVEFDDLVWQAVIHHARVDNNNTITFVFRDGTEVTTPIKNGVKPYRKRKKEEPSDE

SEQ ID NO: 10925 - protein, 488 aa, synthetic construct
MSNAIPIIIEPHEPERGKYRVAAYCRVSSSSDEQMHSYYAQVGYYKKLFAEVDSYVFVGVYGDAGISGTRTCNRDGFLKLIEDCRNGLVDCIWTKSVSRFGRNTVDTLIFTRELRNLGIDVFFEKENIHSIDSSGELLLTLMAAFAESESKNMSDNIAWGKRRRFAEGLVQTITIGNLLGFRQENGVVTVVEEEAEIVRKIFQKYLDCYNFGEIAEMLNQENAPKRFKGKWSRTEVRNIILNEKYAGDCLLQKYYVVNPLEHKRAPNTGQLAQYFVEGCFPAIVKKDDWLVAQEMAKSLSNRSVVNSDERPFVGMMYCAVCGKQCKIHTTVGMGGNPLRRYRCVSFKDNSGVEIPGMTYVRPHTSRYIKNPTPKLKAWREKYAPPRMTRQYYCSDTRIEADHPYEVFIKAWNYLVTNRQRYLPTIYNMISAEDVLLRFNASVMYKLLSKGDMLHEFDTRLFRKTVDRIEVHPSGKLTFMFKTGLKITK

SEQ ID NO: 10926 - protein, 524 aa, synthetic construct
MKRVICLYRVSTLGQVDHDDIPMQKTACREYAARHPDWKIVDEISEKGVSGYKISTNERDAILEIKNRAVQHQFDVLLVFMFDRIGRRDDETPFVVQWFVQQGIEVWSAREGEQRFDTHVDKLMNYIRFWQASGESEKTAIRVRTKHSQMVQECQWRGGLVAYGYHLVQKGRTNKKNQPVPDLEIDEDEAKIVREIYHLLVDEGYGTNRVAKYLNAKGIKTKRGTTLWRGTSIRALIDNPIYKGILRFGPERSQPFKHLIIIDEARYDKCLEIVKGRAKGSTKDQDSPKTSASRSLLTGLLYCADCGSKLCFTHNTTRRHLASGDIRLHERDLYRCYRKISAPDSCNGQSAYHVEPIIEAVETKVREFLSQIGEIPEEDLLKLAASRKQEVCEVALKQARSDYENAKRQVDALEDQAIKALTGESQLDLNIINSMLVKHRAKMTEALDAMEEAEGRMNAEKQNARNVKAEIDEIRSWVDQYAESSVEAKHMVIARLIDRIEVGSGYEVHIQFRVSVAQLVRKTA

SEQ ID NO: 10927 - protein, 527 aa, synthetic construct
MANITVIPASKTLHSKMPVNAQSRRKVAGYARVSTDSEEQLTSYEAQVDYYTKYIRSNPDWEFVNVYTDEGISATNTRHRDGFNRMIADALAGKIDLIVTKSVSRFARNTVDSLTAVRKLKEHGTEVYFEKEGIYTFDSKGELLITIMSSLAQEESRSISENVTWGQRKRFADGKVSLPYKSFLGYRKGPDGLPEIVPEEAEVVREIYKLFIQGKTVNWIATHLTAKGIPTPRGKEKWQTSTIESILTNEKYKGSAVLQKKFTVDFLSKKMKVNEGEVPQYIVDQSHPAIINPAQWQKVQDEMAVRKSRGKHHNSLSPFSAKIVCGDCGEFYGSKVWHSTDKYRRVIWQCNGKFKGEHRCGTPHLYEEDIKRLFLRAVADLTEDREVLLETCRMIHDEYLNTDAIDAEYATLNDEIEIVSGLTKKLIAENATTAIPQDEYNRKYDALVERYHAAQDRLDELQNLRITRSFQADVLECFMFEIKAIDTTLPLEFTDRFWNNLIGRVTVYHDGRMVFRFKNGAEVTETL

SEQ ID NO: 10928 - protein, 426 aa, synthetic construct
MAREVKQVTFTKAAIPKLTRVAAYARVSSAKDAMHHSLSAQVSYYSGLIQQHPGWQYVGVYADEAKTGTKDTREGFVRLVSDCKAGKVDMVITKSISRFARNTVTLLETVRDLKALGIDVFFEEQNIHTLSADGELMLSILASYAQEESLSASENQKWRVRKNFEEGKPWNGTLLGYRYRNGVYVIEPDEAETVRRIFREYLSGKGIVSIANDLNADGVRTRYENAWSKGGVSRILHNYAYTGNLLLQKTFRENHLTKKTAVNEGQLPMYHAEGTHEAIISMEEYEAVQAEIARRAAKYVPPDRCFTGRYPFSSLIVCAHCGKHYRRKVTATGPVWICSTYNDQGKAACPLSKQIPEPTLTAMTADLDIGDLTEIIAEDRNTLVFRFKDGRKAVKRWQDRSRAKSWTPEMKEAARQKAIERNRHNG

SEQ ID NO: 10929 - protein, 513 aa, synthetic construct
MAKIAMIPKISRKQGKKVRVAAYCRVSTDHKDQVNSYEAQVRYFSGLYNNSETEQLVDIYADEGISGTSVEKRIQFGRLMEDCRAGKIDRVITKSISRFARNTKDCLQYIRELKSLGITIYFEKENIDTARLSDEMMITVMGGLAQEESQSISNNIRWSYQRAMANGTLHHSHIPYGYIRGKDGNMEVDEEKAEIVRRIFDMYINGMGIKKIAVQLNEEGIPSPTGIQWNNITINKMLRQEKYIGDTLWQKTYSEFMGKKYQINNGQQTKYYLRDTHPAIISREIFAKAAEMKLKSAAPKGSSIDSIFKKKLFCGKCGHIYSSSNYRNNLSWSCAKRYGIADQCDNITVRDETLNVAFRAMCDKLHIHGTEIFGKCLDNLQRLRKAQEGGTTEDKKILSEIAELKEKKHRLSKLLTKHFIEPEQYSEQVFEIDGQIRALTRGMDKAPAKKDELRMRIEELAEIFKRYDGSVRSQTEILDTVVEKIIICDDGTIRFKMLAGLEFTERLSGYNGE

SEQ ID NO: 10930 - protein, 545 aa, synthetic construct
MSRNIPTADNVTVIPALSPAEIKERKFKQIRVAAYCRVSTDHEEQQNSYQVQIAYYTDLINSNPEWTLAGIFADEGISGTQTKNRTQFNKMIRKCKQKKIDLVLCKSISRFARNTVDCLEYIRELKLLGIGVIFEKENINTMTMNSEFIISLYGSFAQAESESISKNVTWGVEKSFKEGKVKYSLDKMLGYRRGDDGKPIIVEEEAETVRYIYKLYLDGLSLKRIARKLRDEGIKKWNGKTDWTPGTVYYILKNEKYAGDAVLQKTYTVDCILHKQVKNNGEKNKYIVYDCHPAIIGRDTYNRVQQELARRGSIRKRSDKTETEQGHYASKYALSDILICGECGTAYRRVTWTSHGHKLIVWRCISRLDHGSKYCKNSPSINEEKLQTAIVDALNRVYADGEKMLEEMKRNLMMVMTDKDIAASEIEKMKMRLNEISKARNSLVHLITSGSVDEDSLDKDFQDLINEEKFLKEQIADRKSRSKLSDEKRYHLMSAFEELQKAKFQMTEYDDVTVRKVIECIRVLSKTEVQIIFKGGFEMNITVDT

SEQ ID NO: 10931 - protein, 487 aa, synthetic construct
MSKYCMYLRKSRADIEAEARGEGETLTRHQNMLLELAKKQGLNIVKIYKEIVSGDSIAARPQMQALLADISEGKYTGVLVVEIERLARGDTIDQGIVAQAFKQSGTKIITPTKTYDPDNEFDEEYFEFSLFMSRREYKTIKRRMQAGRLAAIKEGNYLGTSAPYGYKKIQPEPKVHTLEIIPEEAEIVRMVYADYLDGHGAKFIAEKLNKLGISPQKSQFWEAPSIKKMLANPLYCGLIGWKTKSNGDTLYKGLHEAIISRQTFDAAQRKKKTNPAAQVGANNSLLNYYHGIMYCKNCGHQMRRRLIKASEHEHLLCTHRECRGKVVSATFEAIDEAVISALIFRLTQLDNLEGDPEAAAAQPANKKAPLEAELSKAKKQLSRMYDLLEQDIYDANTFLERSKVVTQRISSLEAALKELDAEAPRQRLTPEEARNRLTKVIADFPTADPAEKNRLLRSVVNKIYYIKTSRMCRNNKTSDLALEVDFL

SEQ ID NO: 10932 - protein, 619 aa, synthetic construct
MEKRNKCYIYMRVSTAAQIDGYSLDAQKERLTEFAEYRELTIAGEYCDAGRSGHDVKGRPEFRKMLDDIASEKDGISYVLVFKLSRFGRNAADVLRSLQLIQDYGADLVSVEEGIDSSTQGGKLMLSLLSAVAEIERENINVQFLSGRIQKIREGGWGGGTAPFGYRLTDQGLVPDPEEAGMVRTMYSIFLREGAGWSTAAREMNDMGLSRTYRGRTVPFTASFVKVIILNPVNAGYVHFGLRSDRRDTIIAKGSHEALIPEETWQQAKAKAAAISEKSRAKEKRTRQHLLSGIIRCPVCGAGLVGTTDQKVNPNHGGMYADMHYYVCRYHRKCEGRTCSFGGRVKQEKADEAVREAIQQVMNTDAFRKAIEERFGEQDGGPDREEALRQARGRLRRIREEQAALMDAQDTLDILSNDYEDRYDALQGRIDGLYDDIDRAEEEIRALNGEGRDGEKRRLDREQVMHFLGDFDRIWEKMDAGERKEYFRTFLDRVEIFEKPEEGRLLKSITFRIPVGEKNGSFQFTLDCTALPKSRAESKATYGQIKAFVMERHGAKVSTLNISQIKRRMGLPMGRAYNKPEKNQYRVPGCTPEKAAYILEALKYFRMVPEDAVLGEEEK

SEQ ID NO: 10933 - protein, 561 aa, synthetic construct
MNGKQTKCYTYIRVSTEMQVDGYSLEAQKNAIQKYADFQHMQIAGEYCDAGKSGKSITGRPEFMRMLDDVSGQKDGISYILVFKLSRFGRNAADVLNSLQYIQDYGVNLISVQDGIDSSRDSGKLTITVLSAVAEIERENILVQTMEGRRQKAREGKWNGGQAPFGYDLNPKTGVLTINEKDAEAVRTIFDRYVMHHEGFDYIASYMNRHGYSKEKKKDRELSIFTVAHIKDIISNPVYIGKIKYGENTFEKVKGSRDRFRRVKNADYPVYDGLHEPIISQETWDEAQRIRQGKMRINVKKTNHVHILSGIVKCPLCGRGLAGNVRKRRNKNGTVAEDYFYRCNHGKRDAEGHRCTYSPSWEESAFDAFIEQAVLDTVRRSDFGEYCLSRISNQVNVSSLEEERSRLQDRLRQATGARNRLLSMMEKLDPSDRHYDRKVQDMQDRLDGLYDKISEAEDDIHDLTAKIGGMESERLSVKEMYEILRQYDKLYAKMSPEEKKTFYNNLIRSIELDPDERDVKKAVKEIRLRFPIAVDGEEIQGIRWAEGETVETVVLLSRTSA

SEQ ID NO: 10934 - protein, 502 aa, synthetic construct
MIAALYARYSSDNQRAESIVAQLRAGREYCQRRGYTIIKEYADEAYTGTNDRRPQYQQMLADARRGLFEVVIFHKVDRSARNEYDYYRHKRDLTACGVMVEYSGQSIDMSTPEGALMENQMVGLAAYYSRNLSREVKKGLKENVLAGKLTGGKPPFGFTTDADKRLIPDAGEASAVRHIFTMYADGHGYSDILSYLNSHGFRTRTGRPFGKNSLHDIFRNRRYIGVCILGKNQKYADGHRNSHRADHSGMIIVEDGCPAIVSKELWQRVQSRMDSNRHRPGAFRAKHNYLLSGFIHCGLCGGTMSGTGTLSHGHVLRYYRCSAKTNHGKAACANRGVSADRLESFIIKYLRRVMLSPNILMRIAARVAAIIRESVGTVDDARRRLQQQETKLARALDRLYDMVEYGEPDEFDRERMAKVKAELNAVRADLRDIKQRKQQETTPADVVSYIRQTFLPMLEQSDKLHIVLSALVHDVIVTPDKVRVQFNVAAFECGGFAPERTR

SEQ ID NO: 10935 - protein, 452 aa, synthetic construct
MMKDAAHGKVRYVVVWKTDRFARNRYDSATYKYRLKRYGVRVLSAKEAIPDGPEGILLESVLEGSAEYYSANLSQNIKRGMRYNATLCKVNNGSMPYGYCKGEDGRFAIVESEAEAVREIFRKVAEGVPFVEISNDLNGRGIRTKTGGLWGRNSYHGMLKNEIYVGVYRYSDVRVEGGAPAIVDKARFLEVQQRLATKKNPQGRHRENGEYMLTGKLFCGLCGAPMVGVAGTGKHGELHHYYVCQKRRREKSCSKENVNRDWLERFVVQSTLDYVLQPEVIEWIADAAMEYQEREGNSAVLLGLRDELDANAKATTNVMKAIEAGIITVTTKARLTELEAEAARLRDAITVEEAALTHIERDYLIYWIKRFYGGPIEDAAFRRKVIDTFVNSVYLWDDRIRIAFNYHGKGSTVDAELVTNAESAASAVDGGAVEGSYKLSGAPPLHHLKRSI

SEQ ID NO: 10936 - protein, 514 aa, synthetic construct
MTGVIYARYSEGPHQTDQSIEGQVADCKAYAAKNGINILGVYADRHISGKSAATRPEFQRLIDDAQAGRFECVIVWKIDRFGRNRQDIALYKLKLKRAGVKLFYAAESVPEGPEGIILESVLEGIAEYYSEDLRQKVIRGRRETLKKGKLAGTALPIGYKRVDGRPVIDESTAPLVREVYRMYIAGEGVKSCIEYLNAHGVTGSRGGKISQAVVYRMLRSKRYIGIFDESGIELRADPIIDEATYEEAQKMHKGSRQNAAAKAKDEYLLSCCCFCGYCGAMLVGDSGTGKSGRTYHYYTCGKRKRKGSKACQLKSLNRDFLDDLVISATVEDMLTEETIKALTDEVMDIQAEGQKESPAVALKSALDGNKKKQANIVRAIELGNTPDILISRLQELQNEATDLEAEIRQAEYERPTVSREAVEGWLRSFKMGDKKDPAFRKRLVETFVARVDVYKDKAVIYYNITEKRAASGVRIRPVTWAQRGSNPRPSGCDPDALPAELCARNENYYTPVLL

SEQ ID NO: 10937 - protein, 546 aa, synthetic construct
MKTSKRANAQQNTGAAVIYARYSSHNQKDASIEQQIEACMKKATAAKLHVVDTYADRAKSGKTDKRKNFQRLMRDAGTGKFQYVIAWKSNRMGRNMLQAMVNAEILSEQGIKCLYVEEDFADTAAGRFALRNMMNVNQFYSENMAEDIRRGMMDNAKQCKAVGSPPYGYKIAKDKHLEIDEGAARVVREVYEKVAVGTRIIDIVRSLNERGIKTRRGFEWNKSSFNKMLQNERYRGIYIYNDMRIEGGMPRIISDELFYKVQEAIKMKPNPRCTGRRHENSVYLLTGKLFCGHCLSPMVGDSGKSHTGAMHYYYKCQKRKKQHICNKRNVQRDYIETLIAKKIYEHCLQDNIMEKIADATVERNIKRLKESNVGTLEEELNDVNKRIGNLMKAMEAGAMSQNTIARFHELEDQQMKLSIKLNDAKVHVVSCSKEQLMAGMRVFRKLDVEDKKSQAELFDMFLKAAFLYDDKLRIVFQIPNEHDSVEVPIERMAENKGLEEIRDTLPEKFGQKKICSTKLYSSTFTMSGVVKNNTEMLVKQASPYFL

SEQ ID NO: 10938 - protein, 523 aa, synthetic construct
MSTHTNCYIYARYSPGPQQTEASIEGQIRECKEYAHRNDMRVLGIYTDSKQTGRNDKRAGFQQMLRDCKRGGVSVVLVWKIDRFGRNRAEMAQNRAILKMSGVRVVSCMEHIPDTPEGIILESVLEGLAEYYSANLAENVRRGLKENALQCKANGAGQSLGYIVGDDRHYKIEPGEAAIVKRIFTEYDSGRKVADIWRDLRAEGIKTKRNKDFTQYAVSRILQNRAYIGEYRYGDVVTPGGMPRIIDDDLFERVQARRSAGGRKPRRRGISSEVEFLLTGKAFCGHCKGTMRGTSGTGKSGNKFYYYACHDKIFKHTKCKKRNVGKDWLEREIVRITAEHILTDSVIDFIADKVVALQAAEQADKSMLHYYEQQLKDTCTALNNIVKAIEAGIVTDTTKARLLELEERKAALETDIAKEKVSLPTLDKLQVVYFLEKFKGGDIDDKQYQRDIIDLFVNSVYIYDDHLTILYNVSSIIHCAKHASPFAQLQRAIFFCNVFYEKCYFSWLRYLKNCDVCDIMYKI

SEQ ID NO: 10939 - protein, 561 aa, synthetic construct
MYYKSRPVLQHQTAMVIVPRRIIRAISDLFHYITGGDSVRFFCYGRKSVFSDKSDSVDNQLRMCLDYCESKFHGKIDSWECFSDEDFTGANTDRPQLQLMFSRIRENAADALVVYQLDRLSRNVRDFSNMYAMLEEHGVMFISIKETIDTTTPIGRAMMFVTAVFAQMERETIAERVSDNMLGLARKGYWTGGNPPVGYVRKSIVEHGRKHVTIIPDPDGVDYVNRIFDTFLSSNRSLQGMETQFKNSGIKTLSGKFFSSTQLYKILTMPFCVEATPEVYDYYANKGCIMDPDSPREKWDGSVGVMVYGRTTGKNKKHQLQPPEKWTVCLGHHEPFMKADKWLLVQSRFSEHKCIKDAKWPVPLMKGVLRCKCGSLMSVSRKKRVDGSCSSWYYCRKRMRQGVSYCDMGQTACDKLDSRLISIFRDIAADPRLINQYLKKTEDKPLRDPKAILSSITSCDSKIGRLTASLALAESSSISKYIIAEIKRLDSEKSRLQKELTDIEHESKRKMTREKDSLKAIAEITRLISGLDGFNDKERNEIVRSVVKTCTWDGVNLFITL

SEQ ID NO: 10940 - protein, 590 aa, synthetic construct
MKTVEKIEKTKSVIPKRKRVAAYARVSMESERMQHSLSTQVSYYSSLIQKNPEWEYAGVYADYGISGTGTKKRDDFNRMLADCEAGKIDIILTKSIQRFARNTVDLLNTVRHLKDIGIEVRFEKENINSLSGDGELMMSILASFAQEESRSISENVKWGTIKRFKQGIPNGKFTIFGYEWEDDHLVPIPEEAEIVRWMYSEYMKGASRIEIGRALMERGIYTRQGKPWVDSNVKCILTNITYTGNLLFQKEFCEDPITKHRKKNRGELPQYFVEGTHEAIIPMDEWQAVQEEFKRRRDLGPFGNKSLKLSAFSTKITCGCCGKHYRHSGKRNTAGEVYYIWTCQTKSQKGASACDSKNVPEKMLQKASAEVLGIPEFDEAVFAEQIQEIIVVGKDTLTFRFYDGREITTQWTSTAKTDWWTPERRRLWGEAHKRKDTNPNRNVFYEFTGFIKCGCCGANYRCQSNKLKDGTPTRSWYCTSPRTKCQNPGIRDDTMKRLVTDVLGLDEFDEATMDAQIEHASVLANTVTFHFRDGHTESRDYLDKRRGTPWTPERREKAIASMKDAWTDERKAAMSKRIKEVRREKKWPNP

SEQ ID NO: 10941 - protein, 523 aa, synthetic construct
MAKSVTTIPATLSRFTATPLGSTKKRRVAAYARVSTDQEEQLTSYEAQVDYYTNYIKGREDWEFAGIYTDEGITGTNTKKREGFKSMVADALAGKIDLIITKSVSRFARNTVDSLTTIRSLKEHNVECYFEKENIWTFDGKGELLLTIMSSLAQEEARSISENCTWGQRKRFADGKVTVPFNRFLGYDRGPDGNLVVNREQAKLVQRIYGMFLTGMSPMRIAKTLTAEGIPSPGGKDHWNPSNIKSILTNEKYKGDALLQKTYTVDFLTKKKKANEGEIPQYYVRDNHEAIISPETFERVQTMMAARTKGKNRLSSVSIFSSKIKCGDCGSWYGSKVWHSNDKYRRIIWQCNHKFEGKKCTTPVLTEDEIKDIFVRTANMVITEKDEICSTYEQIMAPLLSTSELEKEQAELETEINVTAELIEECIKENAHVALDQADYQKRYDALVARFEKAKDRLTEISDLIVDRLARRHQIEMYLQELRERELITEFHDADWLSMVDHITVYSKNDIRVKFKDGTEIKA

SEQ ID NO: 10942 - protein, 516 aa, synthetic construct
MARKKKVSPGNRLVAYYRYSGGSQQTEQSIEGQRRDCEAYARQHGLTIVHEYIDRHISGRGVESRLAFQQMIADSSKHLFDLVICWKTDRFARNRYDSAVYKKKLRDNGVRILYAAESSVEGPEGIILEGLMESLAEYYSAELAQKMRRGMRESALKGKAINPNRPLGLTTDEHKRFIIDEKNAPTIRFIFEHYAAGESSASIVDQLNAAGLRTSKGNSFNKCSIPRIIQNEAYHGVYICKAYDVRIDGAIPAIIDDDLWKRAQKMLTLNKQHRAPHSFHADYLLSGKLFCGCCHSLMRGISGHNCRNDVYYYYACGNKADGGTCKKKNIPKDVAENLVVNAICENILRPDTLEDLADAIAAAQQADVNQPDPERAMLEQNLADVRRKINNIIESIENGTASSRLSARLADLEQQESTLNYQLESLKEVHPPVLDRERILFLLEQFLISPNERTEDYNRRIIDTFVNRIEITDTEMLIYFNLSEASASEKQKNSQPNSCSTGNHLVRVARIELTAS

SEQ ID NO: 10943 - protein, 530 aa, synthetic construct
MEQYLIYLRKSRSDLEAEAHGEGETLSRHEHTLLELAKRQHLNVTDIYREVVSGDTIAARPMMQRVLSEVEQSVWSGVLVMEVERLARGDTIDQGIIAQTFKFSGTKIITPIKTYDPDNEFDEEYFEFGLFMSRREYKIINRRLQRGRLASAKEGKWPSGLAPFGYRRVKLKNEKGCSLEPIEEQAAIVRMIFDLYTVGLQDEDGSARPLSLGSIATRLNDMHIPSPSGSQWARITIRGIIKNPTYIGMVRWGSRETKKKVVDGKVVSVRGPADPEKECVFKGIHPPLVPKETFELANDKLTRSENTSTHKEKVVRNPLAGLLVCSECGRQMMRMINPVHPDMPVVRCPRRGCPNCSSYLPIVEERVIQGLSEWMKGYELEWSSAAASSSVSSVGVREKALASAETELRKLQQQLERTHDFLEQGIYDTDTFLSRSRMLSDKIAAAKDSVTRCSRELTEEKLRETSRRDIIPKVKNLLDVYPLLETAEEKNALLKEVLEKVVYQKLNEKRKKSPDGFTIEIYPRIPKSEK

SEQ ID NO: 10944 - protein, 523 aa, synthetic construct
MVSFDSIIIYLRKSRSDDPAQTVEEVLAKHERILQDYCMKEYGKAIPEKRIYREVVSGETIQDRPVMQQLLKELETGNISGVLIVEPQRLSRGDLQDCGQIINSFRYTNTAVITPGKTYNLSDEYDRKFFEMELTRGNDYLEYTKKILSRGRVASVRQGNYICSVRPYGYRKITLGSGKDKCHTLEIIPEEADAIRLMYHLYLDENMGFTNIARTLDSLHIKPLKSDNWSAATIRDMIDNPIYIGKVVWNSRKVVKKWENEQITKVRPRNKGDDVICVNGRHEAIIDEHTFEAARNKRGLTPKIKKFKELRNPLAGLLFCGTCGHGMSMKKYVDKRSHTGKVTTVMLCNQQAVCHTKSAQYEDILAKIKVSLANAIFDFEIKLKEQENNNIDMHELRMSSLLDELNRLYSKDVRQKDAYEDGIYTKEEYIERNSKLQERILNVKEDIADEKKNIPVKIDYEDKIITFKDCLASLDDPNISAADKNILLKSCIDKIIYYNDMPSKPGIGRYIENSFRLEIFLKL

SEQ ID NO: 10945 - protein, 494 aa, synthetic construct
MTAVIYARYSSDNQREESIEGQIRECTAYAEKNGITVVKHYIDRALSAKTDNRPDFQQMIKDSEKRLFDIVLVWKLDRFARNRYDSAHYEYQLERNHVKLVSATEPISDSPAGIMVKSMLTGMAEYYSAELSEKVVRGMTENVLKGKYNGGTIPIGFKVDEEKFFQIDPLKAPFVVEAFQRYNEGATMKELMNWLNDSGVTTNRNQKFTYNSVQTLLTNKRYIGENHFKDIVMPDSIPAIVDKDLFEEVQQKIKKNSRAPARHKAEDDYLLTTKLFCGMCGAMMFGECGTGRNKVVHHYYKCATAKRFKTCKKKTVRKEWLEDLVIAETMKLIQDDAVIDAIVAEVMELQDQENTTLPLLEKQMREVENGIENMLNAIQAGVLTNSTKSRLEKLEAQQKELEVRIAEEKIARPRLSENQVRFWLTRFRKLDPNVKSHRETLINTFVNAVYLYDEKVLITFNYKDGTKTITFDEIAAKDAPEGNGSDLGCFAPPI

SEQ ID NO: 10946 - protein, 668 aa, synthetic construct
MAYAKVKKHLKIWTKKKAALYVRVSTRYQVDKDSLPFQRKKLKEYCKFLGLEDYVIFEDDGYSAKNTERPHFQEMMSRVRSGEFSHLIVWKVDRVSRNLLDFAAMYQELKDHKVTFISMNEQFDTSTAIGEAMLKIILIFAELERNMTSERVTGIMLDRAEQGLWNGARMPVGYRWSNKTKFPEPDPEEVKIVQLIFDKYEEWKSSIKITRYLNNNNFKSKRGGQWTSKLIHDIIRNPFYIGTYRYNLRESGRGPLKPESEWIVRENNHPAIIDKAQFDRCNKIMDQNGSSRDTSDLRARKYVHTFSGHLVCGKCGANMIASKDRARANGWRPSMYRCAQRSRMLDCDNSRTINESYIGPFIFNYIANLARVQKNFKNIATPEKLERELLKGETFDGVAGILPEGLNLTFQALSFRQVGNGTYIPDIDFLGDSDSASDRDQIELLKSEIEKSKNAVTRLTDVYLFDPDSMTKEEFATKKKELAKKIEGMEHQLADLLDDSGNDDLADMSFIKKASAFLVAQRIVSKSFVDYVGMAQELDNEILKDFIDQIVDQIVVLDGRVQSITFINGLKHEFRYATPAELPVCQKCGGRIGSTCGCRTRTFDFSGKRYQRIKVGDPRDALHGKKNPVCPECFAQEGRWHHWNCKIEACPICGERLAECEHGPNGKN

SEQ ID NO: 10947 - protein, 590 aa, synthetic construct
MGLFLLYGKIIMRNKSLAGRANNRAERPRKVAIYIRVSTTHQIDKDSLPMQRKDLIAYCELILGIEDYEIFEDAGYSGKNTDRPAFQEMMQKIRAGSFSHLLVWKIDRISRNLLDFAEMYEELQSLRVTFVSKNEQFDTSNAMGEAMLKIILVFAELERNMTSERVTATMISRANQGLWNGGRIPYGYSYDAETSAFSIIQDEADVCQLMKTDYFEHKSIIHTARLLNDKKIPTRSGALWSPTAVWKILSSPFYAGVYRYNHYKGTENRTLNPEEEWVLVPDHHPAIFTLEEHEKLCDILDANKRTANLPGQKHRAKNVYVFSGILYCGKCGNKLVSTPGRLQADNFRTTTYSCPKKRKTHECDNPSVNDLIVGEFVINYILNMLNAKSSFSSINSPAELEERLLYGGSFKDVQHISEDGLNEFYNLLSRYGSDSSYVFAVKHPRKKKAAVNPEVEALRKDKEKQERALKRLQDLYLYSERAMTEKDFIIQKNEISSRIQDINTRLGMVTHDANSTLSDEDFVRQASHLLITKKLIGRDYIYYKALAQTVSPDVLKIYMETILDSVYVIDGRVSSIVFRNGLTHTFIYQK

SEQ ID NO: 10948 - protein, 563 aa, synthetic construct
MNQSNQIRKTALYCRLSQDDGIEGDSNSIQNQKAILQKFAEDHHFPSPCFYVDDGFSGGTFQRPAFQQMISDMENGEIGIIVTKDLSRLGRNQLHTGLYIEERFPMFGVRYIAINDNVDTDSSESNDLMPFKNLFNEWFIRDTSRKIRAVLKAKAERGERLGTRTPYGYRKDPDTKKLIVDEEAAAIVRRIFAMCAGGSGPSQIARILKKEQILTPTMYAYTRYGITHTCLDTAHPYNWSDSAIANLLENEIYLGNTVNMKYSTKSYKDKRRVEHPREECMVFENTHPALITREVWDMVQRVRKNKRRLTKMEEQSKYSGLVFCADCGSNMVLHRAHTMSASYNHFTCRTYKKDGEACTGHYIRECVLDEIVLEDLRRVTSAAREHPEKFAAYIGSKQSTELQREIRRQEKELAAMRKRKMELDTIFKKLYEDSVLGRITTEQFQMLSGSYTEEQSRITAGIPQKESEIQCLRETVSGTDSFLDKAKRYTDITELTPELLRLFIEKIVVHEKEVKWSKHAPQTVEIYYNGIGYVGSGQQDVEEALEAPESLQTQDTEKPRQAS

SEQ ID NO: 10949 - protein, 521 aa, synthetic construct
MKKVTKIDGVQKNTAINSRLRVAAYCRVSTSSDAQLESLEAQKSHYEQYINSREDWQFAGLYFDEGITGTKAEKRPELLRLITDCEARRIDFVITKSISRFSRNTTDCLALVRKLQSLEIPIYFEKENINAGSMESELFLAILSSMAEGESASISENAKWSVKRRFQNGTYKLGYTPYGYDWDGKNMIINPDQAAVVKRIFADILSGKSTNAIADELNAEKVPSKKNTNWTSSTIRGILANEKYTGDVIFQKTYTDENFNRHTNYGEVDQYMALDHHEAIISHSDFDVANALVNQRAAEKGIEKGSDKYQQRYAFSGKIICGECGDTFKRRIHSCTTYKYVAWACNTHLKNKESCHMKYVRDDEIKAAFITMLNKLIYGYRLILTPYLKVLENSSGDEAIHRIQHLEQLIAQNSEQREALTKLMAQGYIDQILYNQETNELLLQAETYRSDIEAITIGMTGDAAKVTETRLLLHFVSHTDMLTAYSEELFENYADHIEVMSRNEIRFVMKCGLTFTERIGY

SEQ ID NO: 10950 - protein, 522 aa, synthetic construct
MGNVMLIPARRQVGSNARKQEEEKPKLRVAAYCRVSTDSDEQATSYEAQVEHYTEYIQKNPDWEFAGIYADDGISGTNTKKREEFNRMIDDCKAGNIDMIITKSISRFARNTLDCLKYIRQLKDMNIPVLFEKESINTMDAKGEVLITIMASLAQQESQSLSQNVKMGLQYRYQQGKVQINHNRFLGYTKDADGNLVIDPEQAETVKRIYREYLEGLSMDKIAAGLERDGILTGAGGKKWHTSTINKILRNEKYIGDALLQKTYTTDFLNKTRVKNNGLVPQYYVEGDHEAIIPKDIYLQVQEELVRRRLVKTSANGKKRSYSCNHCFSQIVICGECGEMFRRLHWNNRGVKSIVWRCISRLESTGLECHARTINELVLQDVVVKAINQLLGDKSNYQAQLQLNIAAVIRASQATAIDGIDEKLMALQQELIQKANSKEDYDEIADEIFKLRELRQKTTVDSAARDEQIKRINDLQDYISQQTTYLTEFDESLVRRWIKQITIWDDRITVELKSGVSIDVDA

SEQ ID NO: 10951 - protein, 523 aa, synthetic construct
MRFFSYGRKSVFSDKSDSIDNQFRMSREYCDTKFSGQVDSWQQFSDEDFTGANTQRPDLQRMLSFIKNGFCDVLVVYQLDRLSRDVRDFANIYSLLEEHGVMFVSIKENIDTTTPIGRAMMYVTVVFAQMERETIAARVTDNMLGLAKKGYWTGGNPPRGYVRKHIVVDGKKHCSIEPDPDGVRYVTRIFDTFLAMNCSLQGMETRFKNQGIRTESGKFFSTTQLHKILTMPYCVEATPEVYDFYASKGCIMDPGSPREKWDGSVGVIIYGRSTEKNKKHQAQPPEKWTVCLGMHKPFMPAEKWLAVQARFGQNKCIKDAKWPVPLLKGVLRCKCGNLMQVSRKKKVDGTCSSWYYCRKRMRQGVDACDMGQIKCDLLDNEVLELFRGIAADPAMIQKFVKAEAPDEVPDLKAAQARVSACENKIGRLAASLALAEESSASKYIIAEMERLDVELGALKREAALAEMESHRAAASAKDAKATAVEIAKLIHGLEGFDDKEKNAIARAVIQECTWDGERLFITL

SEQ ID NO: 10952 - protein, 415 aa, synthetic construct
MRTIRKIEQSIPIIKKRKKVAAYARVFMESERMQHSLSAQVSYYSSLIQKNPDWEYAGVYADYGISGTSIKKRQDFQRMLEDAEAGKIDIILTKSIQRFARNTVDLLQTVRRLKELGIEVWFEKENIHTMSEDGELMLTILASFAQEESRSLSDNIKWRFRKKFEQGIPHAKFFVYGYCWEKDNLVIKPEEAAIVREIFDAYLQGRTRKDILRELKQRGIRTMYGNYFKDASIRQILTNRIYTGVLEIQKTFVTDPITKRQAVNHGEKNKYVVERHHEAIISSDMFERVQQELKSRKEMGMQRGGYARDFLNTSCFTGIIKCGICGKSYVHVVRKYKGRIREYWTCDSHKGKGTNCGAYGSVPQSALKKACAAVLSTDEFDEELFVRRVKKIVVPSYKKLVFYLRDGSIVERQWD

SEQ ID NO: 10953 - protein, 516 aa, synthetic construct
MSYCIYLRKSRKDLEAEQHGEGETLARHERALLSLAKKNNLIISNIYREVVSGETIAARPVMQQLLHEVEQNLWDGVLVMEVERLARGDTIDQGVVQRAFQYSNTLIITPSKTYDPANEFDEEYFEFGLFMSRREYKTIKRRMQNGRYAAISEGKWPYNSAPYGFRRVKLEKEKGWTLAFDENEAPVVRLIFSMFTGPERVGIRSITRTLNSYGTKPRNSKLWSESTVRGILSNVVYDQCVKIGERKVVRTIENGVLTTTRPRTNDYTIVSGRHPRLIDHDVFAEAQSYLGCGSPKPAGSSIIKNPLAGIIVCSECKKKMIRRPPSGTASRVPYDLMLCSTYDCPTIGSPLDLVEREVYNALSDWVEGYRLSGQMPSKSLIPEKEVLLESAQQTLDQLLRQKGTMYDLLEQGVYSTEVFLERSDSLQNRISEAESNVAQLKLELDKERQREANIEQFLPACEDLLSCYWDLSIPERNRLLKLLIESIEYKKLTKNKRGHLNEPNFELTIKPRIPRK

SEQ ID NO: 10954 - protein, 516 aa, synthetic construct
MARKKKVSPGNRLVAYYRYSGGSQQTEQSIEGQRRDCEAYARQHGLTIVHEYIDRHISGRGVESRLAFQQMIADSSKHLFDLVICWKTDRFARNRYDSAVYKKKLRDNGVRILYAAESSVEGPEGIILEGLMESLAEYYSAELAQKMRRGMRESALKGKAINPNRPLGLTTDEHKRFIIDEKNAPTIRFIFEHYAAGESSASIVDQLNAAGLRTSKGNSFNKCSIPRIIQNEAYHGVYICKAYDVRIDGAIPAIIDDDLWKRAQKMLTLNKQHRAPHSSHADYLLSGKLFCGCCHSLMRGISGHNCRNDVYYYYACGNKADGGTCKKKNIPKDVAENLVVNAICENILRPDTLEDLADAIAAAQQADVNQPDPERAMLEQNLADVRRKINNIIESIENGTASSRLSARLADLEQQESTLNYQLESLKEVHPPVLDRERILFLLEQFLISPNERTEDYNRRIIDTFVNRIEITDTEMLIYFNLSEASASEKQKNSQPNNCSTGNHLVRVARIELTAS

SEQ ID NO: 10955 - protein, 512 aa, synthetic construct
MERAVIYARYSSDQQREESIDAQVRACREYCQRKGYLVTKIYADEAKSGKSIAKREQYKKMLSDSQKNLFDVVVFHKIDRNSRNELDYYLTKNQLISSGIKYEYAAQNIDTSPAGQMVEGILVAVAANYSRNLAEETKKGLKENALKALFNGGRPPLGFEINQENKYIINDYEAGAIRIIFDLYLKGKGYHYIISQLNSLGYKTREGRKFGKNSLYDILRNPKYCGTYTFNKVNKDPSGKRNSHKISENTIIVEDAIPAIISKEDFRKVQEKMNQNRYRSAAYKSKETYLLTGKVFCGICGAAMNGHRASSNGKKYVYYTCSGRDRLGASACQNKVVPRDDLEELVLLTIEQELLSENSLKKLKDTIEMEYQAVANEYADEASSLSEQKAIAERKLNNLYTIIEQGTADEYDLERLAAVKQELSQIKEKLAKCAGANSIATINPAHIEKVLKVCRKMLFKNITNESLRMLFDDLVNKITIDAKKITLQLKLECSGTYGAEGRTRTGTWGNHA

SEQ ID NO: 10956 - protein, 635 aa, synthetic construct
MLLDCIIDSWLIVLIAIILNVTDMRAAFLIRCSTKKQDYERQVNDLTRLAKKFGYTSSDNLIFGEHITGKDDASKRDRQSILRLKDAAVNREFDVVLVSEVSRMSRDPMSGRLYVRQLINMDIPVYFRDIDTWTIDPVTGKKVRDAETIIGAAFDAAWKYIKSMKTQIASGRRDELDNNQMSIAQPYFGYKRYGGRDKGKKNRWVINDDAAKVVVDVFEEYVKDGATLKSTALAITAKYGEQFNKKFSIGTIEHILTFEPYCTGIKVVHLTDPDTEDVDEFRVEIPTIITRAMFDKATTKRATNRTARTPYPKQATYVLSRLLKCPICEHSLTPQKRGGDKGDKYRLMNGKVAIRWSCMSGINNATDCSSRITISNEKLEAIIWGLVKQELIGFANLNDEDRVAKVEELTDKITNLEMNIANFTSHISNMDRLIERAYSAYIDAPDSVMDIAKDKYYKTLTKCENERAECKDKIEALNVEKLRLENMRTFFNQPTLPKDVIEKAESDPIKMRNLVMELIDKIYPYRITTYVSPATNRVMRNGIVLLEVYTINGIYNVLYDGNQRNNKVAYYISGVYATYQNGRNKFDAYDTGEYFVISHATLVTKTEDVDLTVTFNELIKICMQNGWEIDYTYKT

SEQ ID NO: 10957 - protein, 523 aa, synthetic construct
MRFFSYGRKSVFSDKSDSIDNQFRMSREYCDTKFSGQVDSWQQFSDEDFTGANTQRPDLQRMLSFIKNGFCDVLVVYQLDRLSRDVRDFANIYSLLEEHGVMFVSIKENIDTTTPIGRAMMYVTVVFAQMERETIAARVTDNMLGLAKKGYWTGGNPPRGYVRKHIVVDGKKHCSIEPDPDGVRYVTRIFDTFLAMNCSLQGMETRFKNQGIRTESGKFFSTTQLHKILTMPYCVEATPDVYDFYAAKGCIMDPGSPREKWDGSVGVMIYGRSTEKNKKHQAQPPEKWTVCLGMHKPFMPAEKWLAVQARFGQNKCIKDAKWPVPLLKGVLRCKCGNLMQVSRKKKVDGTCSSWYYCRKRMRQGVNACDMGQIKCDLLDEEVLELFRGITADPALIQKFVKAEAPADVPDLKAAQARVSACERKIGRLAASLALAEDSAASKYIIAEMERLDVELGALKREASLAEMESHRAAASAKDAKATAVEIAKLIHGLEGFDDKEKNAIARAVIQECTWDGERLFITL

SEQ ID NO: 10958 - protein, 543 aa, synthetic construct
MARKKNIAAGLDAVIYARYSSHNQREVSIEQQIAECTKHAAALGLRIVGTYEDRAISGKTDNRPRFQQMMRDAEKGKFQAVVAWKSNRIGRNMLQAMVNEAKLDDYGVKVFYAEEDFDDTAAGRFALRNMMNVNQFYSENMAEDITRGLYDNASKCMANGRQPLGYKRGEDGRVVLDEANAAVVREIFTRVAAGDLFVDIARDLNAQGIKTSKGANWNKGSFQSICQNERYRGIYIYGDVRVADGIPRIVSDDLWYRVQEAMRMKKNPVGTRHRVGAEDYLLTGKLRCGHCGSYMTGVSGTSRNGELHYYYTCQKRRTEHACDKKNIRRDVIEPAVAQAIKMYCLTDDVIEWMADRTVEYWEKHDNDLQIEALEQQLEENKKATSNMLKAIEMGIITEATRTRMVELETEQSRLSVQLNAAKEDVVKIDREQIISYLELLQQGDIHDRDFQMELFKNFLVAVYVYDDNRMKLVFSCMGDQNSVEIPLETGEDPPDGGLSPDAKMFVLTPDSSTRRKSTARKRVVFFVVTDQRRNYELRDRIQQ

SEQ ID NO: 10959 - protein, 499 aa, synthetic construct
MTAVIYARYSSDNQREESIEGQIRECTAYAEKNGITVIKHYIDRAFSAKTDNRPEFQQMIKDSGKKLFDVVLVWKFDRFARNRFDSANYKMILKKNGVHLISVMEPIAEGSQGILVETLLEGMAEYYSAELSEKVIRGQTENALKGKCTGGTGTIGYKIDEDKFYHLDPLTSPLVLEAFQRYDNGEKMVEIVNFLNDKGVRNMQGGKMTHSSVNTMLKNRRYIGELSFRDIVVPDAIPAIVPKDLFDRVQKRMDKNKRAPACGKADEEYLLTTKLFCGKCGALMFGESGTSATGRTYYYYKCANVKRRKGCNKKTVQKEWLEDLVVRETMKLIQDDVVIDKIVQLVMDVQNQENTTIPLLEKQLREVNKKLDNLMKAIEDGLYTRTTKERLEALEIQKDELTAKIADEKLKKPSFNEDFIRFWLLKFRKFDISQQKQRKALIEIFVNAIFLYDDRILITFNYKDGTQTVRFEDTLTADSAEEKSSDLSSLAGSQWDSNK

SEQ ID NO: 10960 - protein, 523 aa, synthetic construct
MPNTESFTVNEILVYLRKSRSDSPDMSVEKVLRKHEEMIQQYASTHFRSPIPEKNIFREVVSGETIDSRPQMKNLLKMIESEQFKAVLVVEPQRLSRGDLEDCGRLINILRYTNTTVLTLTHSFNLQEEYERKFFEMEITRGNDYLEYTKRILKRGREASVAKGNYIGSVDPYGYKKTVIKKDGVTCHTLEIIPEEADTVKLIHELYAYTPGGIGFTNIAHKLDAMHIKPKKAAHWTPAIISSILCNPLYLGMVRWNNRKVVKYISEGQLAKARPQNSEAKYYKGLHEPIITQELYDACMAKRGTNPSLRRNKELCNPFAGLLYCGTCGHAMSLKIYKNHNSVSQMMLCNHQAYCHTKSVLYSAFLRRFISSMEDTLNDFELAQKSDDGRTQAISKTIVINLENKLKKLNEKDARQKDAYEDGIYSKEEFLKRNVRTQQDIASTIIALEDARAKKADIIDYEEKIRRFKDCLHALNDPELSAAEKNRFLKSCVDKILYYNNMESKAGIGRYIENVFSLEIQYK

SEQ ID NO: 10961 - protein, 521 aa, synthetic construct
MKTVTKIESNQCTTGSEKKLRVAAYCRVSTDSDDQLESLAEQKKHYETYIQAHENWDFAGLYYDEGISGTKKEKRSELMRLLSDCEAGQIDFIITKSISRFARNTTDCLEMVRKLLAINVAIYFEKENINTTSMESELVLAVLSSLAENESVSISGNEKWSIRQRFQSGTYKMNPPPYGYRWNGEQLEVNNDQAEIVKRIFAEFLSGKGVMHIARNLDSDNIVPARGKHWCQSSILRILKNENYTGNAVFQKTFTDESFHRCVNYGQLDKYLVADHHEGIISKADFESASALIDRHSVEKNVTKGSHKYQLRYCFSGKIVCGECGATLKHRTHSIGDETYEAWCCSTHIYNKESCSMKFIRDDDIKLAFVTMMNKLVFGHKLILKPYLLTLRSSSTDSSIQRIQQLRLLIEQNTGQHETLTRLMANGFIDRVLFGRELNAIMAQTDEYRAEIDTLSSSVTGDGAKLKETERLIKLVERGRMFMEFDADLFSKLVDRICAFSRNEIGFVLKCGLTLRERIGE

SEQ ID NO: 10962 - protein, 581 aa, synthetic construct
MARKRTNLIGNTPSVRETKVAIYIRVSTIHQVDKDSIPMQKKDLIAYCQLILGTDNYEIFEDAGYSGKNTDRPAFQNMMGRIRKGEFTHVLVWKIDRVSRNLLDFAEMYEELRSLRVTFVSKNEQFDTSTAIGEAMLKIILVFAELERNMTSERVTATMISRANSGQWNGGRIPFGYSYDPKEKVFSIREDEASICRELKDLYLLNRSLAYVSRALNEKGYKTRAGVSWSPHSVWIIASSPFYAGIYRYNRYKGVESRTINPEEEWVMIQNHHPAIFTLEEHQTMRSIMKSNQRNMDNLPGRVHLSTKTHIFQGIMYCDKCGSKMVSTPGRLHVDGYRTSNYGCPLRRNTKKCNNPTVNDIVIGEFVINYILNMLNAKKTFSTINTPDELNAALLSGSVFSEVSSVEENGLNSFFNLLSRYGSDRSYIFSVKSPRKKKAAVDPELSKLRKEKEKQERALQRLQDLYLYSETSMSEKDFIIRKSEISSHLDNINRQLGLMTQDQASFLSDEEFIKQASHLLIQKELKNKKYIYFKKLVSTVDPDILKAYMETILDSIYTADGNITAITFKNGLTHRFIYKDK

SEQ ID NO: 10963 - protein, 574 aa, synthetic construct
MRKKKIDAPKEKPQRAAIYLRVSTAYQVDRDSLPMQRKDLVGYCEYALNISDYTIFEDAGYSGKNTDRPAFQKMMMQIRNGMYSHLLVWKIDRISRNLLDFAQMYEELKMLGVTFISRNEQFDTSTAMGEAMLKMVLIFAELERKTTAERVTATMISRANDGTWNGGRVPFGYDYNKETQTFSVNGDESFIVLEMYDLYEKTDSLVHTARELNDRGYVSRQHNPFSPVSVWTILRNPWYIGTYRYNYYKIPGRKAIKDESEWVVIPDHHTPLVSKERFDRVQKMLDSNARYRNTPGRSATQKNVNIFSGLIWCACCGAAFTASPGKLHASGYRSAKYGCPNVRKTKTCNAKYTSDTVLGEFLLNFILNVINAQKSFDQIKSPADLEARLLRGDTFKNVAGIDSASVAALYEMLAEYSPADSVLLKKPTVKKNLDPELRKLRADKRKTERALARLDHIYLYSNKQMSDKEYLIKKNDLMNDLKEQDKSIGLLTSESWAQSLSDDDFLEQASSFIMSQRLQEREYIYFQGLAECTEPSVLRSFFLSIVDSVRMRNGHVETLTFKNGISHKFTYLAI

SEQ ID NO: 10964 - protein, 569 aa, synthetic construct
MKQSSNKKSREATAFLYERLSRDDNLEGESYSIGNQKKLLTKVAKEKGYTNLVHFLDDGISGVTMNRPGFVEMMQQLEQGKASAVFVKDLSRLGRNYIEVGRLTEEFFPDHDIRLVAVSDNIDTAEGENELAPIRNLFNEWYARDISKKRRISNKIKGNSGEPMGLPPYGYIKDPNNPKHWVIDEEAAQVVRRIFDMTLEGFGTEQIATQFEKEGILTPQAYWIQKGIGRPGKTKTRPATKWNGSTITHLLYQQEYCGDVLNFKTYSKSYKNKKRIHNDPENWVVFQDVHEPIIERAVFEQVQQKRGKMRKRRTSNGEHNMFSGLLVCADCGCNLHFHFNQGNPEIKYFNCSNYKGNRGTCQSTHYIRVDFLEEVVLGEIRRLTKFASLYEDDFLKAVIGHSQQADEADRKLKEKELKALLARDEELDGLFERIYEDNVSGKISDERFSRMSRRYEDEQKELTEKIKQLRSEIEKQSSRTMTTDMFISLVRKYTRAKKLTPRMLNELVEKIEVFNAEKVNGVWEQRLRIHYNCVGTIEIPSALPLPTPDVSVNTRKGVVVNYAPCDVAI

SEQ ID NO: 10965 - protein, 541 aa, synthetic construct
MTDEKPRVIIIPPKPELQQTTTVTKQLRVAAYCRVSTKEEEQASSYEAQCEYYTDKIMSNKEWTMAGIFADEGITGTSTKKRTEFLRMIRQCKQKKIDLILTKSIQRFARNTLDCINYTRILRQLGIGVLFEKENINSLPPDSEFMITMYGAMAQSESESISGNIRRGKQMHAKVGTLKIPCYRLYGYEKDADGKFRVIPEQAEIVRELYKRYESGASLRNLQDWLEENQIKTVLGESKWTTTAIKGILTNEKYCGDVLLQKTFRTDVISKKVIKNVGQMAQYYMPDHHEAIVSREQYNAVKAEMARRSALRSPSKTAVTGRSCYTSKYALSDRLVCGECGTLYRRCTWTSLGRKYPVWRCTSRLNYGTKYCHDSPTIKEEPLQAAILAAINSAMSNKTSLLDRIKNAVFLEHLPVQGQTKSLADIERRLAQLDEQFQQLLAEAIDAEDKESCNTQFAEILAEQTTLKKQKEAILQSSMDADRVCTRMKQAEQAVENAAQTITEWNENAVRQIVERVTVLSTDEILVQIKGGAEIKQRLER

SEQ ID NO: 10966 - protein, 528 aa, synthetic construct
MAKKQTNGNLALEQQRVIVIPAHDEIVARKLRVAAYARVSSSSEDQLNSYRVQNQYYSELISGNPDWEMVDIYADEGITGTSVEKREDFQRMMCDCRKGKIDRILVKSISRFSRNTKDCLAAVRELKELGVSVLFEEQGIDTARVSSEMVTAIMASLAQKGSESISGNVQWGYQKRMESGKFNTCKAPYGFTLHEGKLSIKEDEATVVRFIFQLYLNGLNGYEIANTLSQQEIPPGREMGTWKDSSIYYILKNERYAGKAMVGKSYSTTTFPHKKVRNQGEREMYLLPDSNPPIVSSEVFDRVQTLLQSRKNAHNGSTNQPFSRKLYCANCGRSLKRKFTNDKMYWVCNTHFQNAASCPTPPYHTPDIEQAFCRLYYKLKHHGGPIFTQMLSNLQKIRYSRMLWSEDVISLNKKISDVLSQVQFLTQLQQAGGVDTDTFISSNNKLSEQLRKLKQEKARLLDTDSDDLADRTRDLMDALEDGPDFLDSFDTELFDVLVEKIIVDSNECLRFRLKNGLELTEQIERTRR

SEQ ID NO: 10967 - protein, 500 aa, synthetic construct
MVVRARETNEEIEAIGYIRQSDQRQDKEDISELTQLRKIEQFCESNNFKLVKVFKDIDYSGFRIKYTKRPGLMDALKCIEDRPKVRKMIFFNLSRLTRLKKDFQELQGILNSHQVDICSASEFVDFSTPNGRLVAGFFVDLNEYYSDNLSEIVNDSKETNAKKGRWNGGPAPFGFVKTADGMGFEEVPERAYYVREIFRMAKLGKGPYLIARWLNEQKVYSLTGKEWTARRVRYMLTNPTYAAMQRWKGECYKLLVCPVLVSWDDFNYIQSTLFGKDKAWKGKERQLLTSVLICPECGSKMHSRYMSHSKQKRKYVCSRKTSMGAISCSSPNHDQESFEAAVINLIANMAEKKYGYESLIPEMKEDSDNNNSFSKLQDELANINNAEQKIFDDYYLHNKIEEHHYELSMRRYGKRKAEILELLDKIPLPQSKSFGDYNDAIQEFSELINELPNDDKRRSIELLVEKITPGAPAVVHFKWGETREIHPRNIEKFKKKLILY

SEQ ID NO: 10968 - protein, 668 aa, synthetic construct
MAYAKAKKHLKIWTKKKAALYVRVSTRYQVDKDSLPFQRKKLKEYCKFLGLEDHVIFEDDGYSAKNTERPHFQEMMSRVRSGEFSHLIVWKVDRVSRNLLDFAAMYQELKDHKVTFISMNEQFDTSTAIGEAMLKIILIFAELERNMTSERVTGIMLDRAEQGLWNGARMPVGYRWNDETKFPEPDPEEVKIVQLIFDKYEEWKSSIKIARYLNNNNFKSKRGGQWTSKLIHDIIRNPFYIGTYRYNLRESGRGPLKPESEWIVRENNHPAIIDKAQFDRCNKIMDQNGSSRDTSDLRARKYVHTFSGHLVCGKCGANMIASKDRARANGWRPSMYRCAQRSRMLDCDNSRTINESYIGPFIFNYIANLARVQKNFKNIATPEKLERELLKGETFDGVAGILPEGLNLTFQALSFRQVGNGTYIPDIDFLGDSDGASDRDQIELLKSEIEKSKNAVTRLTDVYLFDPDSMTKEEFATKKKELAKKIEGMERQLVDLLDDSGNDDLADMSFIKKASAFLVAQRIVSKSFVDYVGMAQELDNEILKDFIDQIVDQIVVLDGRVQSITFINGLKHEFRYTAPAELPVCKKCGGRIGSTCGCRTRTFDFSGKRYQRIKVGDPRDMLRGKKNPVCPECFAQEGRWHHWNCKIETCPICGGRLAECEHGPNGKK

SEQ ID NO: 10969 - protein, 539 aa, synthetic construct
MPTSKNTARKYAAGGSSDNSCGVEPLRAVIYARYSSSGQREESIEGQLRDCYEFAKKHGIIVIGEYIDKAMTGRVDRRPDFQRMMKDSEKGRFNCVLLWKMDRFARNRYDSAMYKYKLKKNGIRIFYAKETIPDGPEGIILESVMEGYAEYYSENLAQNVKRGNYDSALELKTLGKTCLGLKTGPDGRYMIDQAEAAIVRRIFEEYAEGERAKDIYERLNSEGYRTSRGGKFNKNSLRRILSNKKYIGVYEYEDIYVENGIPAIITDRDLFEKVQKMLKINHDAPARGKAQNFLLTTKLFCGLCGSPMIGDGGTSHTGKAYAYYSCTKRKRGRSCKKESVPKDWIEDLVVGELVKIVHNDELIEQIADRVMEYQKREKDQSGLHALEIRQKENEKAISNMLAAIEAGIITPSTKTRLMELEADRADIEKGIAHELLAEPEFERDQIIYFLERFRSGDINDEAYRIMLVDTFLNSVYLYDDDHLVLVMNYSGENCKVDLKLVEGAVSGDGCKGSAFAPSSALEALTGMVSAFCVSAYYIR

SEQ ID NO: 10970 - protein, 525 aa, synthetic construct
MALLPRKPAKHPAKPKRGKKLEIEEPGVLYGRYSSHNQKDISVEQQFEKGYELAAEYGIRIIDTYADRAVSGRTDKRRDFQRMMTDAAKGKFRYVIAWKSNRMGRNMLEALINEARLQDLGVRVLYVEEDFDDTAAGRFAARSMMNVNQFYSENMAEDIKRGLYDNAANCMVANGHLPYGYKADETLHYAIDEPKAAVIREIFARVSCGEAFVDIMASLNARGIKTSYGRPWGRSSFQKILSNERYRGIYIYGDVRKEGGIPRIISDELYFKVQEVITTKKNPQGRHRVNGDYLLTGKLFCGHCKSPMTGVSGTGRSGNLHYYYVCQKRRTEKTCDKKNVRRDEIELQVAQAIKDYALKDDVIEWIADSTVAYNERKEAESKVGILEDQLAGTEHGIKNIMSAIEQGIITETTKSRLVELESERAAIKANIAAARADIVTVSRDDIISGLEMFRDGDVHDKKYQARLFDTFLVAVYAYDDDLRLVFSFSGNKNTIQIPIESAVNAVENNEVECSFKLCSAPPRTS

SEQ ID NO: 10971 - protein, 434 aa, synthetic construct
MEKTIVNIAPAAAETPRTKRVAAYARVSCGKDTMLHSLAAQIDYYRDYIIRNPEWRFAGVYADEAKTGTKDNREQFQLLLTECRSGNVDMIITKSISRLARNTVTLLETVRELKSLGVDVFFEEQNIYTLSAEGEVMLTLLASFAQAESLSCSDNCKWRIRKGFEEGRASTCTMLGYRLINGEITLIEDEAKIAKRIFDLYLAGYGLQKIANTLNEEGLYSIFGNEWHPTTLRKVLTNEKYCGDLLLQKVYCENHLTKKMVPNNGELPQYFVEDDHPAVVSRETFAAVQKELKRRAEEKTPTVGSTSVFTGKIRCSCCGKNYRRKTTPYNTVWCCSTYNSKGKNHCPESKVIPEETLKRAVAGILKTDSFSGEEFERQICAIEAHPGNLLRFIFIDGSTTDYVWKDRSRSESWTDEMKAAAAKKAKERYASHDK

SEQ ID NO: 10972 - protein, 548 aa, synthetic construct
MTNKKVKKIEATKPTLSAQYSTFTRKRKVAAYARVSTAKEEQENSFDAQVSYYTQKIQENPEWVFVEVYSDEGITGTNTKKREGFNRMIEDALAGKIDLILTKSVSRFARNTVDSLVTIRQLKEKGVEVFFEKENIYTLDAKGELLLTIMSSLAQEEARSISENTSWGRRKSFADGKVSLGYSNFLGYDKGPDGELVINEEQAKIVRRIYAEFLAGKTPGGIAKGLTADGIETPGHKKVWQASTVLNILKNEKYYGAAILQKQITVSYLTKEKRPNTGELPMYYIEKDHEPIVSPETFQMVQEEMRRRREAGSNMQCVSIFSSRVICGDCGGYYGRKIWHSNTKHASWHWHCNAKFQKRKYCETPTLKEESLEETFVEVFNGLIANRKEIEENYRLCIDTITDDSEYRRQLEDLNNGCGEVQTLIRSLLMTYSRQDTADDIHEKLKEYEDRLDTMARLKQELDLKIAACAAKRVQITGFLNELMKHDAPLAKFDPLVWQAVINYATVNRDCTITFTFRDGTEKTVPIKNGVRPYTKRNKLQEVDGNDG

SEQ ID NO: 10973 - protein, 490 aa, synthetic construct
MTDKNLLVITPHRKEPGKQRIAAYCRVSSRSDEQLNSLTNQINFYRSLFENDDTVVFVGIYAEEGLSGTQAESRPQFMKMIEDCRSGLIDCIWTKSVSRFGRNTVDTLIYTRELRSLGIDVFFEKENIHSTESSGELMLTLMAAFAESESETMSENIKWGKRRRYEQGITGSITLNGMYGFRQNKGIVTIVENEAELVRRIYKDFIDGYSYGEIADRLIAEGVPTRMPGASWAKTTVQHIIRNEKYCGDCLFQKAFIANPITHQQVRNNGELPKYLVEDCLPAIVDKETWKLAQAVAARHTPHRQAPNERYPFTGKLFCGICGKPYYYYHYTTTNKQPLAAYRCMSRKTQSAAEVPGQTYTPPHKATFNRNASPELIAYRERYCKPPKERPMLCTDVRIPIDLPQKAFCRAWNLIVSKKLRYQATLRSTVDNAEDILVRYRAEEMCLLIDEIGKITEFSYPLMLKTLDRVVVNINGKLTFIFQSGIKITV

SEQ ID NO: 10974 - protein, 541 aa, synthetic construct
MEKDKKVTALYCRLSKDDGSNSESLSIRTQKAMLMEYATRNGFGNCQYYVDDGYSGTNSDRPAFQELLDDIREGKVATVITKDQSRLGRNHIETGTYMEIFFPEHGVRYIAINDGYDSNEQSQMDIAPFRNIINEMYAKDTSRKIKSALRTRKKSGKYISSGAPFGYQKDPADHNHLVIDPNTAPVVEYIYSMAEEGLGLHRIAKRLHDEKVLKPCYYKKEMFGRFIDDEKMYDWDSAYISQVLHSPVYAGHIIYEAKPTVSMKSKKRRYIPFEERAIVPNTHEAIIPQDRWENVQRILYSRSSSFMCDKTDYDNIFKGIVRCADCGRTMLVKVEHRRKRNSVLDQTFYCCSTYRKYGAKACDSHNLEARVLHEAVFADIQAHAKAAVSNREALVKKIANQMHLRVSSDRAQHKRDLKQCKARIAEIEDLYAKLYEDVSKGLLPEKRFQMLADRYDKEQAELTEKIEQYEREGRAEHDQLDKIQDFIDEVSKYAGITELNYKILHQLIDKILVSKAEKVDGEYVQKIQIFYRFIGPLDAIE

SEQ ID NO: 10975 - protein, 513 aa, synthetic construct
MKKQPTGGNRLVAYYRYSGGSHQTEQSIEGQRRDCETYARIHGMVILHEYIDRHISGKTDDRPEFQQMIADAGKGMFDYVICWKTDRIARSRYDSIVYKKKLRDNGVELLYAAEANVEGSGGIIVEGLMEALAEYYSAELAEKVRRGMRESALKGKAIGSSRPLGLTVDKDKKYIIDPAGAAAVRYIFEQYAAGAASSAIVAHLNEQGLCTSRGNPFNKSSVVRIIQNEVYRGVYVSPKFDVRIEGAVPAIIDDDLWERAQKMFIRNRQSRSPRNDRADYILSGKLFCGECGTAMKGVSGHSSNGEVYFYYNCPCKDCHRRNIPKDELEGLVIRTVCNDVLQPDVMDRIADSVIAAQTAELNQPNPEKEALQHELADVQRKAKNLLSALENGTAGAMLTNRLAELEQQADTLSYQLSSLESEPKYPVFSKEEVLYLLEQFLIAPSEKTKAYRRRLIDTFVSKIEVSNTELTIYFNIAEEDCGKMKKAPQSNQPEGCSTEEQMVRVARIELTAS

SEQ ID NO: 10976 - protein, 516 aa, synthetic construct
MARKKKVSPGNRLVAYYRYSGGSQQTEQSIEGQRRDCEAYARQHGLTIVHEYIDRHISGRGVESRLAFQQMIADSSKHLFDLVICWKTDRFARNRYDSAVYKKKLRDNGVRILYAAESSVEGPEGIILEGLMESLAEYYSAELAQKMRRGMRESALKGKAINPNRPLGLTTDEHKRFIIDEKNAPTIRFIFEHYAAGESSASIVEQLNAAGLRTSKGNAFNKCSIPRIIQNEAYHGVYICKAYDVRIDGAIPAIIDDDLWKRAQKMLTLNKQHRAPHSSHADYLLSGKLFCGCCHSLMRGISGHNCRNDVYYYYACGNKVDGGTCKKKNIPKDVAENLVVNAICENVLRPDTLEDLADAIAAAQQADVNQPDPERAMLEQGLADVRRKINNIIESIENGTASSRLSARLADLEQQESTLNYQLESLKEIHPPVLDRERILFLLEQFLISPNERTEDYNRRIIDTFVNRIEITDTEILIYFNLSEASASEKQKNSQPNNCSTGNHLVRVARIELTAS

SEQ ID NO: 10977 - protein, 573 aa, synthetic construct
MAYNAQNKTGARVAIYVRVSTLHQIDRDSLPMQKQDLLAYAKLMLNTDDCVIFEDAGYSGKNTDRPKFQEMMSQMRAGAFTHLLVWKIDRISRNLLDFATMYNELKALGVTFVSKNEQFDTSTAMGEAMLKIILVFAELERNMTSERVTATMISRANNGLWNGGRIPYGYNYDYETHEFSVNEEESKVVILMHDMYEQERSLVRVVRELNERGYRSRAGNLWSPVSLLIILRNVFYCGDYRYNMLKEGDRQKVKDESEWVTVQNHHVGIIPREQKERIMATLDSNSKLCKQRNLYKSAKHTHVFGGLIYCGSCGKPLGSTPGNLTRDGWHYSKYTCPTRRKSVTLCTGKSTSDPIIGEFVFNYILNMLNAQSGFDKISSPEELERLLLIGDTFAYIDHIEPNGLNDLFNVLSSGAVKGAVFGKGASLPTKKATVEPEVARLRNEKQKTERALDRLRSLYLYADEAMSEAEYMIQKNKLEETLEDINDQIGMMNTDSWQQSVSDEEFIQRASEFIIAQKLSGRKYVNYKRLAMSVDSEVLKNFVVSIIDSITIQDGLVSNIVFKNGLCHTFIFR

SEQ ID NO: 10978 - protein, 523 aa, synthetic construct
MRFFSYGRKSVFSDKSDSIDNQFRMNREYCESKFSGQVDSWQQFSDEDFTGANTSRPDLQRMLSFIKGGFCDVLVVYQLDRLSRDVRDFANIYALLEEHGVMFISIKENIDTTTPIGRAMMYVTVVFAQMERETIAARVTDNMLGLAKKGYWTGGNPPVGYVRKHIVVNGKKHCSIEVDPDGARYVTQIFDTFLAYNCSLQGMETRFKNQGIRTQSGKFFSTTQLHKMLTMPYCVEATPEVYDFYAAKGCIMDPGSPREMWDGSVGVIIYGRSTEKNKKHQAQPPEKWTVCLGKHKPFMPAEKWLAVQSRFTQNKCIKDAKWPVPLLKGVLRCKCGNLMQVSRKKKVDGTCSSWYYCRKRMRQGVDACDMGQIKCDLLDEEVLELFRGITADPALIQKFVKAEAPADVPDLKAAQARVSACERKIGRLAASLALAEDSAASKYIIAEMERLDVELGALKREASLAEMESHRAAASAKDAKATATEIAKLIHGLDGFDDKEKNAIARAVIQECTWDGERLFITL

SEQ ID NO: 10979 - protein, 700 aa, synthetic construct
MDSNAFLNDLMSKMKLPEAKGKKKAEQSESVAQILAVMQKVKTEKKKPPVTSYAPVKEMPMNEPESMEEFSQLASDVMQECRPAMPTVSAASQEKAVRVAAYIRVSSTNPAQEDSYEMQERYFMSLLAGNAGWTSAGIYSDHGISATSREGRTGFNRLLRHCKQGKIDRVICKSISRFARNTQDFLVALRTLKENNVTILFEREAMDTADAYSEFILTTLAAIAQEESRSISANIAWSNQKRFPAGNVCNKDIYGYEFRKGEYTVNENGYRYRTVFIIPEEAEIVRMVFRLFTKEELSFTQIAQKLDALHIPPPNSGCRQRQKRKPTVLPAGALKEEDKRGWTATDVRYMIANVRYCGSVLCQKTYTDHRNGHKQKVNKGEKPKYLIRNHHPAIISEELWQEAQEVWKAYTAKYRGIEKGRNERNYSKLLLCGECGRYFQGHSTTRTTIWRCATKLAQQGQKRCRMEPIYEEQIQTLLCKAFAEKFKLGEKMDAEVHEVMQMISKAPIDNARNQALKNLTEKLREIHDFDQMEQEGDFLKRQLSAVNYSIRDVHQHIRDIQAEKEALKVRCEVLGEPRDKEAVTELENRLLNEEEQLEKLEHEAQQQAEQVRYMEDYWKKLEQTHEIREKTLQWLDSLAGGTQMFLDEAVGTYVKAFVLSVTIFSPKHFRIHWFDDTCTEVECDSVFEGYQQPGMIRRKY

SEQ ID NO: 10980 - protein, 546 aa, synthetic construct
MKAAIYSRKSKFTGKGDSIENQIQLCMDYSKSIGIKEFLVYEDEGFSGGNIDRPQFKKMMQDAKDKKFDCLVCYRLDRISRNVSDFSTLIEKLNKLEISFISIKEQFDTSTPMGRAMMFISSVFAQLERETIAERIKDNMYELARSGRWLGGKTPHGFTSKKISFLDENLKERSMYQLEVNDEQMEIVKLIFNKYLELRSLSQLYKYVYHNGIKGPRGGKFDPSSLSGILRNPAYVKANEDILDYLRSLGMEVVGVPDGQCGILTYAKNTSNSIAAIAKHHGVIEPDVWLEVQSILNENKDKIPRISTGKTALLSGLLKCGKCGSNMRIMYKGKRNDEDLKYYYVCGTKRSLGVEGCNCKNLNGPLVENLVIDKIKNCNIESVINAFNSNKAKVDTVFSDVRSEINLLKNSISEKEKLISNLVMELAKNTGSVASEYIISQIESLNGEIDALKSKVSELESSSVDINSASLNLDIIVSNLKKFNYEVDDASLDDKRLLLSTIVDSIVWDDASGNLSIVYMGAKMDDLVSLSDGSHFCSDCRSYIYE

SEQ ID NO: 10981 - protein, 423 aa, synthetic construct
MRNKSLAGRANNRAERPRKVAIYIRVSTTHQIDKDSLPMQRKDLIAYCELILGIEDYEIFEDAGYSGKNTDRPAFQEMMQKIRAGSFSHLLVWKIDRISRNLLDFAEMYEELQSLRVTFVSKNEQFDTSNAMGEAMLKIILVFAELERNMTSERVTATMISRANQGLWNGGRIPYGYSYDAETSAFSIIQDEADVCQLMKTDYFEHKSIIHTARLLNDKKIPTRSGALWSPTAVWKILSSPFYAGVYRYNHYKGTENRTLNPEEEWVLVPDHHPAIFTLEEHEKLCDILDANKRTANLPGQKHRAKNVYVFSGILYCGKCGNKLVSTPGRLQADNFRTTTYSCPKKRKTHECDNPSVNDLIVGEFVINYILNMLNAKSSFSSINSPAELEERLLYGGSFKDVQHISEDGLNEFYNLLSRYGSG

SEQ ID NO: 10982 - protein, 464 aa, synthetic construct
MARSVTVIPARNRQRETGRRAVQEKKIRVAAYCRVSTDQEDQLHSFEAQVDYYAKYINDHENYEMAGIYADEGISGTNTKKREQFKRMIADCEGGKIDLVITKSISRFARNTQDCLAYSRKLKNLGIGIIFEKENINTLDSTGELLFTILSSLAQDESRNISENCKWGIRTKFKNGEMHLNTFKFLGYDKDENGKLVINKEQAKTVRRIYRDFLIGINPAQIAKELTEEKVPGCNGQTKWYPSTIVGILKQEKHMGDALLQKTYTADFLTKRQVKNNGEIAQVYVKDSHKGIIDKETWNAVQEEFERRERFMKDHGTDRYSYGADCMPFCEKVFCGECKSLFTRHSWKSRGIVQWQCKNHRTDGRVTCSNAYVDNSDIEKGFVKAFNKLVADREKFMERWNQMKTDGSPLEKIRAEQMMEATGNEPLGRFVSEIAQLVLAEVTVLGAKKYEFFFLEGSRIKVSV

SEQ ID NO: 10983 - protein, 533 aa, synthetic construct
MEKDPMKKFKFPIDLSMLTEEEIDQFKEDPFTLFHGETDVCLYLRFSSERQKEQSIEGQLRDCIAYCKRKNYRIVAIYVDRATTARKDVEKRIHFQEMITASVHQTWKLVIVWKLDRFARNREDSAVFKMRLRRNGVKVESATEGISKNPEGIILEAVLEGMAEYYSADLSQKITRGMRESALKCHSIGGHVPLGYKIEDHKLVINPNTAHIVQEAFELYANGETVADICRMFNNKGYRTAKGAEFNRNSFKSMFRNKRYIGVYTYKEIEKEGGVPAIIDKELFETVQRRLSANAEAPARGKAKVDYLLAGKLFCGHCGGSMNGESGTSKTGTVHNYYTCYTRKRQHSCDKKPLRKEWIEQVVAQDAMNLLTDDAIQEMADMAISQTERDLRENTRIPELSEKMKETENGIANITKAVEKGIASDALMSRLVELEKEKKNLLRLLAEEEKYICKIDRDQIIYWLTKFKDGNIEDEKFKRIIIDLMVNSVTVWDEPDGVRITTAYNLTSCKNKTFRIPSSSDKGFGFEGLESTK

SEQ ID NO: 10984 - protein, 541 aa, synthetic construct
MKAAIYSRKSKFTGKGDSIENQIQLCMDYSKSIGIKEFLVYEDEGFSGGNIDRPQFKKMMQDAKDKKFDCLVCYRLDRISRNVSDFSTLIEKLNKLEISFISIKEQFDTSTPMGRAMMFISSVFAQLERETIAERIKDNMYELARSGRWLGGKTPHGFTSKKISFLDENLKERSMYQLEVNDEQMEIVKLIFNKYLELRSLSQLYKYVYHNGIKGPRGGKFDPSSLSGILRNPAYVKANEDILDYLRSLGMEVVGVPDGQCGILTYAKNTSNSIAAIAKHHGVIEPDVWLEVQSILNENKDKIPRISTGKTALLSGLLKCGKCGSNMRIMYKGKRNDEDLKYYYVCGTKRSLGVEGCNCKNLNGPLVENLVIDKIKNCNIESVINAFNSNKAKVDTVFSDVRSKINLLKNSISEKEKLISNLVMELAKNTGSVASEYIISQIESLNGEIDALKSKVSELESSSVDINSASLNLDIIVSNLKKFNYEVDDASLDDKRLLLSTIVDSIVWDDASGNLSIVYMGAKMDDLVSLSDGSHFCSDCR

SEQ ID NO: 10985 - protein, 506 aa, synthetic construct
MDESIDAQIRAIEEYADKNDIKIVNKFIDRAKSATSDKRPAFQEMIKYCEADNTGISMVIVHKLDRFSRDKYDSAMYKQKLKVKGIRVVSVLENLDNSPESLILESVIEGMAQYYSANLAREVAKGQKENALKALHNGGDAPLGYDVAFDKTYLVNEEEAQAVKIIFDMYVNGYSYSNIIDKLNDLGYKTKRGNKFGKNSLHGILSNEKYTGVYVFNKTQRKGVNGKRNGHKQKSDDEIIKVEGGMPQIIDREVFLQAQEMMQKRKKAPGSHKATTLYLLTGLIRCGECGHAMQGNRRKDKYGNDYISYRCGCRKQKRDCKNKEIKRDYLEEFVLTELEKHVLNDEAIPVLSKALNERLKTKSNDNHEMLTNLRNKLEKVNKEIENILNAIMSGIVNNVLKNKLDELEKVKLNLELKINELSVESDDVVSVDITEDQIRSMFGKFKDFVLTRNLPECKKFIGDYIKEVIVYKDHIEVVFNVVFSFDDDNIIYDLKAIELRDVLSNR

SEQ ID NO: 10986 - protein, 537 aa, synthetic construct
MAKRKFNKGGEVRPVAYYRYSGGSGQTEQSIEGQRRDCEAYARLHNMTIQKEYVDRHISGKTDDRAAFQQMIADSDKGAFDMVICWKTDRFARNRYDSAVYKKRLRDNGVEIVYAAESNISGAEGIIIEGVMEALAEYYSAELAEKMRRGMRESALKGQAISRCRALGLKTDEHKRFVIDEKTAPTVRFIFEHYAAGESAMSIVEQLNAKGLRTSQGNPFNKSSIPRIIQNEAYRGVYISKSYDVRIEGAIPAIIDDELWERAQTMLKLNRQLKAKNEPKADYILSGKLYCSCGSLMRGMSGHSATGEVYRYYTCPNKDCHLRNIPKDDLEGKVMQSIVDHLLQPESMEALAEAMVEVQKADVEKPNAERVAIEQSLSDVRRRSKNILDAIENGTANAQLCARLDDLTEQEQTLSFQLSSLEKEKPVVFTKEQYLFLLEQFLMEPSERTPEYGRRLVNTFVTSMVVSGRELVINFNVSDETVNKNKKTSQTNLQKESSSGMRLVYLAHQQANYSLYAASGYFSLVEHQFSARLWRTA

SEQ ID NO: 10987 - protein, 527 aa, synthetic construct
MAYCLYLRKSRADIEAEAHGEGETLARHEKLLLEVAKRGHYNITQIYREIVSGETIAARPVVQKLLQEVEDGKWEGVLVVEVERLARGDTIDQGVMAQAFKYSGTKIITPLKVYDPANEFDEEYFEFGLFMSRREYKTIKRRLVRGRNASAKEGKWVSGLAPYGYERVRIKGDKGWTLRPVEEQADIVRFIFKLYTSGEEGDNGEVRRLGTYTISKRLDSLGVAPPSSAQYWNDRTVQCILQNPAYIGKVRWGVNKSKKRIVNNSIEVERYKAPADEVIYVDGLHSAIVDEAIFQKAQDLLKRSGPPPVPKRNSVVNPLAGILVCGKCGRSIVLRRGRIDILICHNRICDNVGSKYEYVEERLLQALSSWLNGYRLEWSDKLPADEQAILDLKQKALRKTVAELETLHKQLDRTHDLLEQGVYDTDTFLVRSRSLTERIAAAEEDISTLTAEVQADKERAASRLNVIPKVEKLLEVYPVLPSAQAKNEMLKEVLEKVEYTKNERSGRNGPFDNFELVLYPKLPPKIE

SEQ ID NO: 10988 - protein, 574 aa, synthetic construct
MRKKKIDAPKEKPQRAAIYLRVSTAYQVDRDSLPMQRKDLVGYCEYALNISDYTIFEDAGYSGKNTDRPAFQKMMMQIRNGMYSHLLVWKIDRISRNLLDFAQMYEELKMLGVTFISRNEQFDTSTAMGEAMLKMVLIFAELERKTTAERVTATMISRANDGTWNGGRVPFGYDYNKETQTFSVNGDESFIVLEMYDLYEKTDSLVHTARELNDRGYVSRQHNPFSPVSVWTILRNPWYIGTYRYNYYKIPGRKAIKDESEWVVIQDHHTPLVSKERFDRVQKMLDSNARYRNTPGRSATQKNVNIFSGLIWCACCGAAFTASPGKLHASGYRSAKYGCPNVRKTKTCNAKYTSDTVLGEFLLNFILNVINAQKSFDQIKSPADLEARLLRGDTFKNVAGIDSASVAALYEMLAEYSPADSVLLKKPTVKKNLDPELRKLRADKRKTERALTRLDHIYLYSNKQMSDKEYLIKKNDLMNDLKEQDKSIGLLTSESWAQSLSDDDFLEQASSFIMSQRLQEREYIYFQGLAECTEPSVLRSFFLSIVDSVRMRNGHVEMLTFKNGISHKFTYKAI

SEQ ID NO: 10989 - protein, 462 aa, synthetic construct
MSNTPKTITRAALYIRVSTEEQALHGYSLEAQEAALKQYAIDHDYKVVHIYHDEGFSARKPVMRRKVMQELLADVQAGKIDLILFTKLDRWFRNVHDYHQVQAVLDKYGVAWKTILEDYQTTTADGRLKVNIMLSVAENEADRTSERIKFVFDNKVRNGEYCFGGPMAPYGYKAEVINGVRKLVKDPETESATAAFWDKMIKYHNTRRAARETNLEYGISRDHQSWRKVVRNKIYTGELRGIKDFCPAYISAADWQDIQYPERRIKSTQGDRHYLFVGLLRCPVCGCTLKATFKTYPSDRSKEYYGYRCSAKSLGRCTYSRQLSERNLEKYLVAHLRESLESYIAKLQLSAAAPKKKRKKADTTKLRDQLRRLNVIYLGGNISDDDYNAQATILRDAIIKAEQEEKQLAQVIDFTALRQLLDSNFELSYKSMDREEKQRFWHSIIAEIQLDDNQVKEIIFKS

SEQ ID NO: 10990 - protein, 489 aa, synthetic construct
MDRHYLMRSTDDQETDCRAWCAQQTWNVGRVITDANRSASKWRTREREGFEEALHLIASKKYDAFVTWEPSRAGRELLAYVQLRAACQEAGVLYLTKGRVYDFSRHDDSFMMGLEFLTAEKDAAVIRDRQLRTVRLNAQKGRPHGRLPYGYRRVYDEQTRALVRQEIDPGKASIIITAVDEILDGVSINNIVTRLNRAGVPTPMKPTSDQSRGWMSSTLRQLIKSPTIAGLRMYQGEVIGEADWPAIVPVEKWEKVNQILADRARRTRYVEEGNHSHPRWLLSFIARCGFCSHPLVRIHGAVDRKRTGMPRDNYICGKVGCRKVSIDIPYTDAYVTGALLGWLSKPESLAVILGPDDNWNERVREAQDHVAALRRRLADAAGEYAQGRISMTMLADVEERLKPEIERAAKAAVPPVADRQLLALIQTKDLDAAWEALDLVEKRRMLKMLLDIRIEKAKTMGGRFDPARIKITPRFSVPETYQWRRPESS

SEQ ID NO: 10991 - protein, 486 aa, synthetic construct
MKTAIYIRVSTQEQAKEGYSIPHQKEKLFKYCQAMNWQVVEIYADEGISGSTIEKRPAAIKMLQDAKKRLFENILILRVDRLCRNTKDLLEIVETLKKYDVSLNAVDQQIDYKTSIGKMTLTILGTFAEFEHSTIHERTMEGRKQKAKQGIKSLGRRVPFGYNYINGCFVANSDAKIVKLIFEKVADGYGFNQTATFLRNNNIPTIDKLDWNRLHIKRIINNKIYMGHCVLKLNMTEVVDTIATNVEPIIDEKLFIQAQKTISYRTKGVFSKYAYDDFIFSDVLYCSCCGWKMSPKKTKRTDPKINEAKLEDRIYRYYKCIYNMSHPTKQTCLNTKILNAEKFEKHFLLYMDYFIIELKKPLKLQKKITSSPTNKDFLEKQIKELTQKKSKLLDKYLAGIIDDSSYIAKNDELIEEIKSLENKLNFKEELLDKENKEINVDFLNGLKFVFSDLWSIMSNHEKRNFITQTFEKIEVNQGKIVKIILR

SEQ ID NO: 10992 - protein, 488 aa, synthetic construct
MEKARAVAYIRVSTERDAQLHSYEFQEHYWQSAFEDDPDTELIGIYADKGISGHSVQKRPKFLVMMQDAREHKFDKIYTKSVSRFARNTTQLLEAVRELRDLGIEVVFENENIHTFQPTSEIFLTIAATIAENDLEVDSARQRWSIQRRCENGWISVGSGLFGLKLTADNELEIVPEEAAVIRYIYESYVDGGIGSKRIADALNAAGVPSRNGYPWDAKHIIGLLRNEKYKGDVIMGKSVRHFGEYHKNPNAEYAPRYYMEGTHEAIVDKDMWEAAQRILEDRSRNHCRTRIAHSFTGMIECGCCGKNYLHKVNNSQCKWQTDIWACRTYLRDGKKACGNSRIKDTVLKEKFISAYNEFIERRPQGDSMVALQEVLEDLRQQEQELAELMMQRLITKAAYEEERKSVKMQITDISEKISERRANRVPESEYVPITEFSEEKTKRFLSKVVVTMFTVTFVFYNGAKITRTYDNGQPGNKVGWNKKKEES

SEQ ID NO: 10993 - protein, 540 aa, synthetic construct
MATATRRVVRTMPQMFIDVAENQSERLQVAAYARVSTEKEEQEDSFERQVEHYKQLIYSKPDWQFVDVYADPGISGTRAEKRPDFLRMIEDCRAGKIKKVLVKSISRFARNTVDALQYIRELKDLGISVYFESENIDTLTPGGEVLLTILAAMAEQESRTISSNIKWAWQRKFQKGDIILNTGLMLGYRKIGKDDEGHDVYEINEEEAEIVRRIYREFIAGYSITQIAKRLQADGVKTKLGRESWRHNVIESILTNEKYTGNALLGKTFKPDVLTKYRQKNDGKKAPIYYVEGSHPAIIEKGLFDLAQQEMQRRRDANDNKVGGGRYSSRYPFSGMLVCGICGSKLRRQVRTMGSGKRTASWGCCNRINNGRAVCDSHHVNEDVLEAAYLTAMRRLVDSAEEVVEAVRDGAELALEPENKAAMDRIDEETIQLQEAALALHKAKQRMEIGSVEYASRVKEYSERMKELEAERNELQGTAAKYAEVRLWLDTFIEQTMQSDTLTTVDGTTMKMLVDRIHVRNDGIVVEFKCGVAIEQEYVK

SEQ ID NO: 10994 - protein, 469 aa, synthetic construct
MARTIVHIPAQPRATTVSATDNTRLRTAAYCRVSTEQEEQLNSYEAQVDYYTHYIKTNPKYIFVGIYADRGITGTNTRHRDDFNRMIEDCEAGKIDFIIAKSVSRFARNTEDCLFYTRKLKDLGIGIYFEKENINTLDGGGELLLTILSSLAQEESRNISENCKWGIRKKFRDGKLHLNANRFLGYDKDEKGKLVINKEQAAIVRRVFYEYIWEGLNPDAIARRLQAEGVPGCMGQPRWAVSTIQAMLQNEKYMGDALLQKTYTPDFLNKRAIKNKGEVEQVRVKGDHEPIIEPEIWDAVQLELQRRHRYTEKHNIRFRGRNSDVQPFSCKVICGVCGTPFWRRTWYRNHRSIKVWQCGKRYQEKGVATCSSENLKEETLYNAFVVAWNALVDNRQELLPELEETMQKGNALERLRAQQMIELTAGARLTAIDLSLVGKCLDYVVVNNGGILAFHFLDGSQICVETDAD

SEQ ID NO: 10995 - protein, 579 aa, synthetic construct
MLLRKIFEKMEVFNLEKNLKCALYIRVSTFHQIDKDSLPLQREDLINYAKYILGIDDYVIFEDAGYSGKDTDRPSYQNMMTRIRMGEFSHLLVWKIDRISRNLRDFSDMYDELKKYNVTFISKNEQFDTSTAMGEAMLKIILVFAELERKLTAERVFAVMMSRAEKGLWNGATVPLGFIWDEEIKFPKIYEPEAKIVQYIFDLYEKKRSTTKVAEQLNQENVKTKRDGTWTPRTVGAILTNPFYIGTYRYNTKTQKTRRWKDKSEWIVIEDHHPAIISKEQFERVAKILKDNYRGDYNRQRASKNVHILSSIIKCFKCGSNMNAGNDRARKNGFTPSRYTCYQIHKTYTCNNYASDLTVLPFIINYIGNYMTLQDRITKNHSYRDMESILLRGKYFTDIEHINKDDIKCTYKLLVNNLPVINYKLQENQEDKKTTFKDRYDIYKNEKEKQENALKRLDDLFLYAEDSMPKKDFILKRQEITNKIEEINSKIQELRAEENNFVDNKEFSLNAKASFYLITQLIGNSKNIDVRYLLENVDKSIIKDFLSTILNEVSVDHQKVQYITFKNGLTHHFEYKENQ

SEQ ID NO: 10996 - protein, 561 aa, synthetic construct
MDKKKKSALYVRVSTTHQIDKDSLPLQRSDLTNYTKYVLGIEDFEIFEDAGYSGGTTDRPAYQDMMNRIKKGEFTHLIVWKIDRISRNLRDFSEMYDELKKYNVTFISKNEQFDTSTAMGEAMLKIILVFAELERKLTGERVFSVMISRAQKGLWNGATVPLGYEWDAETKFPRPCDSEAKVVQYIYDQYEIIKSTTKLAKKLNIEKIPTKRNGTWTPRTVGSILTNPFYIGTYRYNTKTRKTRRWKNKSEWVVVEDNHQAIINKEQFERVVNIIQSNYKGDKNYQRTNNKVHILSGIASCHKCGKKMHSGLDRARKEGFTPSRYTCYAFNVNYTCANYSSDLAILPGLINYIANYITLQERITPKHSLRDMESILLRGKYFEDIDHIEKQDLKNTYNLLINNTLVTYNSLEDEKKEAIVSQNAIYEAEKEKYIKALKRLDDLYLYDINSMSQKDFVIKRKEISDKIESVNKKIQEVKLNDTPFINNDDFGVLSKASFYLLTKNLSSVKNIDVISLLNNLDKQTVKDFINAIITDVSVERGKIYNITFKNGIVHHFNYKNQ

SEQ ID NO: 10997 - protein, 464 aa, synthetic construct
MARSVTVIPARSQKVRTGHKAVQEKKIRVAAYCRVSTDQEDQLHSFEAQVEYYTKYINEHENYEMAGIYADEGISGTNTKKREQFKKMIADCEDGKIDLVITKSISRFARNTQDCLAYSRKLKNLGIGIIFEKENINTLDSTGELLFTILSSLAQDESRNISENCKWGIRTKFKNGEMHLNTFKFLGYDKDENGKLVINKEQAKTVRRIYRDFLIGINPAQIAKELTEEKVPGCLGQTKWYPSTVTGILKQEKHMGDALLQKTYTADFLTKRQVRNNGEIAQVYVKDSHKGIIDKQTWNAVQEEFNRREKFMESHGTDRYSYGADCMPFCEKVFCGECKSLFTRHSWSSRGIVQWQCKNHRKDGKVACTNAYVDNADLEKGFVKAFNRLVTDRDKHMERWQQMKSDGTPLEKIRAGQMMEAVGNEPLTRFVLEIAQLVLCEVTVLGAKKYEFFFLEGSRVKVSV

SEQ ID NO: 10998 - protein, 502 aa, synthetic construct
MEIQIREGNSRQKQKPKVCAYCRVSTDADEQENSLENQIRHYKEVITSNPDYEYAGVYSDFAISGFKEKRPGLQKMLADARKGKIDLILTKSVSRFARNTSIVLEATRKLKELNVGVFFELQNINTLSGEGELMLTILAAFAQAESESGSVGAKMVYQRKYEAGIPVQYLERSFGFKKDERGVYIADEEEAVWVRKIYDMAAQGYTLAAIKRYLNENNVKTVGGAKWLDSTVLRILENEIYKGDYIMHKYFVNEERKLVRNRGEVDAWYIEDDHEAIVSPKLWQRAQDALEAKRDYLAEGSVIEEFTEENYPYMNRIYCARCGHPLYKRIYSNGNRLNWGCSGTKRYGKSFCEGINIPDGVLRGAWHFDENMYIGEKQTDKGKKEFTYLKEASWKRRHKKKEPEPIPENTETEYPYREKIFCGLCGSRLVRHVNTKNHKVIWVCNGRKRKGKDFCDGTRVPDTIIKGWGEIKKDIYIQRKDDKNGKKRYSYTSKKPKGADRA

SEQ ID NO: 10999 - protein, 524 aa, synthetic construct
MAGAKNITVIPAKKRVGNTVTVEDKPKLKVAAYCRVSTDSEEQATSYDAQVEHYTEYIRKNPEWEFAGIYADDGISGTNTKKREEFNRMIEDTMAGKIDMIITKSISRFARNTLDCLKYIRQLKEKNVPVFFEKENINTLDAKGEVLLTIMASLAQQESESLSKNVKMGLQFRYQNGEVQINHNWFLGYTKDENGHLIIDEEQAVVVRRIFREYLQGASLKNIADGLMADGIPTATGNMKWRSDGIRKILTNEKYMGDALLQKTYTVDVLTKKRVANNGIVPQYYVENNHEAIIPRQLFMQVQEELQRRAHLRTENGKTKRVYSSKYALSSIIYCGKCGDLFRRVAWKARGASYNKWRCASRIEKGPKNGCDAEAISESEIQKAVMRAINKTLGGREEFLVQLQHNIEDVLNGDSTATLEYIDQRMAELQEKLVMCVNKNAEYDAIAKEIDALREKKAAVVTKDAEQEMLRKRINEMRHFLQTQTSRITEYDEQLVRRLIEKITVYDDKLIFEFKSGMTVELKR

SEQ ID NO: 11000 - protein, 520 aa, synthetic construct
MKNVTKINQVDFSIFKKTRVAAYCRVSTDSDEQELSLETQKNHYESYIKANSEWEYAGIYYDDGVSGTKTAKRDGLLRLMEDCEKGLIDLVITKSISRFSRNTTDCLTLVRKLLNYEVYVIFEKENINTGSMESELMLAVLASMAESESRSISENEKWSIKKRFQNGTYVISYPPYGYANVDGEMVIVPEQAEVVKEIFAGCLAGKSTHIIAKELNEKGVPTKRGAKWTGATINGILTNEKYIGDALFQKTITDASFKRKRNYGEEEQYYCENHHEPIIDKDTFEKAKEAIRQRGLEKGNCSENTAKYQNRYAMSGKIKCGECGRSFKRRYHYTSHGRSYNAWCCGGHIEDSSSCSMKFIRDDDLKRVFLTMMNKLRFGNDLILKPLLISITTSNSKKNIHSMEDIEKDMQSNEEQRKQLNTLLTRGYLERPVFAEAHNKLIMEYEQLAAKRDLLYRMDNAGYTMEQALSDMVSFLNGAEPFTEWDDSLFERFVEKVKVLSREEVEFELKFGLRLKERID

SEQ ID NO: 11001 - protein, 668 aa, synthetic construct
MAYAKTKKHLKIWTKKKAALYVRVSTRYQVDKDSLPFQRKKLKEYCKFLGLEDYVIFEDDGYSAKNTERPHFQEMMSRVRSGEFSHLIVWKVDRVSRNLLDFAAMYQELKDHKVTFISMNEQFDTSTAIGEAMLKIILIFAELERNMTSERVTGIMLDRAEQGLWNGARMPVGYRWNNETKFPEPDPEEVKIVQLIFDKYEEWKSSIKIARYLNNNNFKSKRGGQWTSKLIHDIIRNPFYIGTYRYNLRESGRGPLKPESEWIVRENNHPTIIDKAQFDRCNKIMDQNGSGRDTSDLRARKYVHTFSGHLVCGKCGANMIASKDRARANGWRPSMYRCAQRSRMLDCDNSRTINESYIGPFIFNYIANLARVQKNFKNIATPEKLERELLKGETFDGVAGILPEGLNLTFQALSFRQVGNGTYIPDIDFLGDSDGVSDRDQIELLKSEIEKSKNAVTRLTDVYLFDPDSMTKEEFATKKKELAKKIEGMERQLADLLDDSGNDDLADMSFIKKASAFLVAQRIVSKSFVDYVGMAQELDNEILKDFIDQIVDQIVVLDGRVQSITFINGLKHEFRYTAPAELPVCKKCGGRIGSTCGCRTRTFDFSGKRYQRIKVGDPRDMLHGKKNPVCPECFAQEGRWHHWNCKIEACPICGERLAECEHGPNGKN

SEQ ID NO: 11002 - protein, 468 aa, synthetic construct
MNKIIRVGIYIRVSTEEQAKHGYSIDSQKTRLITWAKEHNYQIVDVYADEGKSARTKIFNRKELLRLLDDVKDDKIDRIIIWRLDRWFRNVADYYRIQDILDKHNVDWECSDEDFNTSTSNGRLYLNIKLSIAQNESDQTSDRIKFNFENMVRNKRPISGALPVGYMVAGEKQNKRVVKDPALSQMAIDMFEKFEETLSLRATTQYLNETYPHRPIGYERVKKMLQNSMYHGVYRDVEDYCEPYITKERQDNIIKLIKKNHRPNKPSGHVFIFSGLIRCYDCGRRMGGSRASRKHTKRGVVTEIIRYGTYKCCNHFLDCRCSNNHTINEDKLERWMIDNFLAKLNEHVISIETAEEKKTKTNNINKITNLKDKLERLNELYLDGRISREKYDNDYLDTKNKIKELKIDDELDSNRNLYKYKEIIKDANVVDIYNKLDRKHKRLFWYEYIDHIEQDFDNINDNWLVFFK

SEQ ID NO: 11003 - protein, 486 aa, synthetic construct
MKTAIYIRVSTQEQAKEGYSIPHQKEKLFKYCQAMNWQVVEIYADEGISGSTIEKRPAAIKMLQDAKKRLFENILILRVDRLCRNTKDLLEIVETLKKYDVSLNAVDQQIDYKTSIGKMTLTILGTFAEFEHSTIHERTMEGRKQKAKQGIKSLGRRVPFGYNYINGCFVANSDAKIVKLIFEKVADGYGFNQTATFLRNNNIPTIDKLDWNRLHIKRIINNKIYMGHCVLKLNMTEVIDTIATNVEPIIDEKLFIQAQKTISYRTKGVFSKYAYDDFIFSDVLYCSCCGWKMSPKKTKRTDPKINEAKLEDRIYRYYKCIYNMSHPTKQTCLNTKILNADKFEKHFLLYMDYFIIELKKPLKLQKKITSSPTNKDFLEKQIKELTQKKSKLLDKYLAGIIDDSSYIAKNDELIEEIKSLENKLNFKEELLDKENKEINVDFLNGLKFVFSDLWSIMSNHEKRNFITQTFEKIEVNQGKIVKIILR

SEQ ID NO: 11004 - protein, 520 aa, synthetic construct
MKRITKIEENMPLEKRKLRVAAYCRVSTARDEQLVSLAAQKAHYESYIKSNDEWEFAGLYYDKGISGTKKEKRDGLLAMVAACERGTIDFVITKSISRFARNTTDCLELVRKLLDLKIYIYFEKENLNTGSMESELMLSILSSLAESESVSISENEKWGIKRRFQNGTFIISYPPYGYDNVDGEMVIVPEQAEIVKQIFADTLAGKSTHEIAEELNERGVATKKGGHWTPGTVNAIIGNEKYTGDVLFQKTYTDSSFNRHQNRGELDQYLMQDHHEAIISKEEFELANAVLKQRGREKGNGHDTGRYQNRYGFSGRICCGECGGKYKRRMHYKPSGQYVAWACANHLKDKESCSQKYITDDALKLAFVTMMNKLVFGHQMVLRPLLQSLRGLNDQSRLLKIEELETAIEKNREQKQVLTNLMASGYLEPALFNKESNELAAEAEALRQEKDGLMRSVNGDMVKIEELQRLLRFTSKGTMMTEFDDEIFLSFVERITVLSRKEVVFEWKCGLSLKERLVEP

SEQ ID NO: 11005 - protein, 523 aa, synthetic construct
MELSRNITVIPARKRVGNTAAVGQRPKLKVAAYCRVSTDSEEQASSYEVQVAHYTQFIQKNPEWELAGIYADDGITGTNTKKREEFNRMIRDCMDGNIDMIITKSISRFARNTLDCLKYIRELKEKNIPVFFEKENINTMDSKGEVLLTIMASLAQQESQSLSQNIKLGLQYRFQNGEVRVNHSRFLGYTKDEEGNLIIEPAEAEVVKRIYREYLEGASLLQIGRGLEADGILTGAGKTKWRPETLKKILQNEKYIGDALLQKTYTVDFLNKKRVQNKGIVPQYYVENSHEPIIPRDLYMQVQEEMIRRANLHSGANRKKRVYSSKYALSSIVYCSKCGEIYRRIAWNNRGKHSTVWRCCNRVEHGPTACDAPTIQEVDLQAAVVQAINLALGNRESMMSTLQENIEAVIRQEDETSLEGIEAKLLDLQKELLKLANSKKDYNSVADEIDRLRELKQNALVESAEREGLKQRIRKMREFLEQQSIEVTEYDELLVRRLIEKVTVYNERFEVEFKSGAKVDVGR

SEQ ID NO: 11006 - protein, 584 aa, synthetic construct
MAYRKITDIRDTIGMRAVFYARVSTAEEEQLNAIELQIEENRGCIKDHGWKLVGEYIDRSKSGTMVKGRDDYQRLYEDLYEDLFDIVVIKDQERLQRNTLDWYLFINRVVQTGKLLFMYMDGKFYSPDDALITGVRAIIAEEFSRNLSKKLHNYHDHRIEKARQGQEIALQGSGNVYGWDKKDGKYYINPEQAKVRRLMCEGIMARKGSTLIAKELNDAGYRNTVGKPWKPMDIPKFVYDCKNVGTMIINKERHDFESKQTIKLPKEEWVYVENALPPIVTQEEWDLICKIHEERVIATGSDRRGKKTSGYSFSGKLVCGICGAPYWRKQRVSKDEYWVCSTKQTKGRRTRKRDSTMGKAGEINPLGCDNENISYNSLMEIMGVVSERLQANTDTIKHDMINWLTKLRKQLLEANGGHTEADLQRELSRKSKLLDAYLDGILNKQEYQKKAEELDERIIQLKAETEKNKANSGDIAEIDKVLANIDEEVSRYVDGNEKLKVEYLLEHLEQVQIFPDKVIVIVPILSEGIVVEKAQYVSREKRCWQDYLYENDRWSGKADKRRDIHVWIRWKGFVKGTLKSGLPD

SEQ ID NO: 11007 - protein, 493 aa, synthetic construct
MKAALYTRVSTEDQVEHGYSLDAQKKRLIEYCNKNNIEIYKIYTDEGISGHSITKRKALQEMLKDAKEHNFDYIVAYKTDRLARNLLDLLTIKNALDDADVELLLSDEPINTKDDTGMTMFSIMGAFAELERKKITERMMTGKRQKILTERKKIKVSNIAYGYLYDDTTKSYVIDETRKSTVEKIYELALQGWSYSKINRYVVNNIVPITNDPKKNWYISDIRNILKNPLYKGYSGISYCSNYFVARKNKNDAILLKMDNIEPYFAEEYWDRVYSVVSKKVQYFKRKHPAEDYIFSDVLFCASCGLKILTYQSSNGYKPYKYYLCNSKNRLYKINQPTCNYQININKVNEFFINFINNIKESSAEISTSTPKNYQHELDSIRAQIALKEKNRETLLDKLVNDVITDSEYRIASNMIISSINQFKEQEKEILMKMSALQEHEKIKQYNRLKIKTLKKLVSSWDTLSNEAKRQIVNSCISKLYINKDGIKKIEFL

SEQ ID NO: 11008 - protein, 509 aa, synthetic construct
MPEALNAVIYARYSSDRQTEQSIEGQLRECYAFAKANDIAVIDTYIDRAISGKTDNRPAFQKMIEDSAKRQFQAVIVYRLDRFTRNRYDSAIYKARLKKNGVKVLSAMENLNGSPESIIMESLLEGMAEYYSVELSQKITRGMRENALKGKALGGQRVLGYKVNSDCYFEIDETTAPVVVDIFKLYSSGKTVKEICDILNARGVKTARGGAFNKNSLHTILTNKKYIGIYKTKYGEIVGGIPAIIDKELFEMVALRMEQNKKAPARAKAEINYLLSTKLFCGKCRSAMVGESGTSKTGKKYYYYACVKKKREKACDKSNVKKDWIEDLVIQRTVTDILKDDVIEKIADRLVELQKAEAAESGTMLYLENSLAEIQVSIKNIMTAIEKGIITESTKTRLTELEDEKRNVEIEIAKESIARRIISREQIIYWISSFKDGDITSEKYCQQLIDTFVHAVFVYDDKIVITYNYSGENNTATISDLDLSSPPLQSNPNIFVTLDVFGLVVQIER

SEQ ID NO: 11009 - protein, 517 aa, synthetic construct
MNVVIYARYSSHNQNEQSIEGQLEVCRNYAKQYNYTIVGEYIDRAQSGTSDNRPQFKKMIEDSNKKTFEGVLVYQLDRFARNRYDSATYKAKLKKNGIRVFSARENINDDASGILMESVLEGMAEYFSAELGQKVKRGMKINADNCYYNGGTIPLGFKLVEVDSDITDATGRIVKKKKFAIDDETVPVVKKIFEMYTNGYLMADIIRYLNNRNVKTATGGEFNKNSIRNILLNKRYIGIYTYNGKDTIGGIPRIIDDDTFNKVQEIMFKNKKAPARARAKTEYLLTTKLFCGHCKDLMTGYSGTSKTGKLHNYYMCNNARKKLCDKKAVQKDYIEDLVVNQAREILTDDNIKRISTKVVELANKEKDNGNLRRLNKLLKENETQKKNLFDSLKICNIDAVKQSIFEEINKMEIEHQRIINEIAIEESQHIKLTVNEVKFFLVQLRKGNINDIKYRRLLINTLIHQVFLYDDSITIVFNTQGKPYEKKIPRPEVLESSLLGNDALPVWWFELLVHKID

SEQ ID NO: 11010 - protein, 579 aa, synthetic construct
MRNKSLAGRANNRAERPRKVAIYIRVSTTHQIDKDSLPMQRKDLIAYCELILGIEDYEIFEDAGYSGKNTDRPAFQEMMQKIRSGSFSHLLVWKIDRISRNLLDFAEMYEELQSLRVTFVSKNEQFDTSNAMGEAMLKIILVFAELERNMTSERVTATMISRANQGLWNGGRVPYGYSYDAETSVFSIIQDEADVCQLMKTDYFEHKSIIHTAKLLNDRKVPTRSGALWSPTAVWKILSSPFYAGIYRYNHYKGTENRTINPEEEWVLVPDHHPAIFTLEEHEKICDIMDTNKRMSNLPGQKHRAKNVYAFSGILYCGKCGSKLVSTPGRLQADGFRTTTYSCPKKRKTHECDNPSINDLIVGEFVINYILNMLNAKSSFSSISSPAELEVHLLYGGSFKDVQHISEDGLNEFYNLLSRYGSDSSYVFAVKRPRKKKAAVNPEVEALRKDKEKQERALKRLQDLYLYSERAMTEKDFIIQKNEISSRIQDINTRLGMVTHDANSTLSDEDFVRQASHLLITKKLIGREYIYYKSLAQTVSPDVLKIYMETILDSVYVIDGRVSSIIFKNGLTHTFIYKK

SEQ ID NO: 11011 - protein, 523 aa, synthetic construct
MRFFSYGRKSVFSDKSDSIDNQFRMNREYCESKFSGQVDSWQQFSDEDFTGANTSRPDLQRMLSFIKGGFCDVLVVYQLDRLSRDVRDFANIYALLEEHGVMFISIKENIDTTTPIGRAMMYVTVVFAQMERETIAARVTDNMLGLAKKGYWTGGNPPVGYVRKHIVVDGKKHCSIEVDPDGARYVTQIFDTFLAYNCSLQGMETRFKNQGIRTQSGKFFSTTQLHKMLTMPYCVEATPEVYDFYAAKGCIMDPGSPREMWDGSVGVIIYGRSTEKNKKHQAQPPEKWTVCLGKHKPFMPAEKWLAVQSRFTQNKCIKDAKWPVPLLKGVLRCKCGNLMQVSRKKKVDGTCSSWYYCRKRMRQGVDACDMGQIKCDLLDEKVLDLFRGITADPGLIQKFVKTKAPDDIPNLKAAQARVAACERKIGRLAASLALAEDSTASKYIIAEMERLDVELGALKREASLAEMENHRATANAKDAKATAVEIAKLIHGLEGFDDKERNAIARAVIQECTWDGERLFITL

SEQ ID NO: 11012 - protein, 532 aa, synthetic construct
MRLSLRSTRERWQDTVRLYPALVLYHLKEVEIMEEKTAVIYARYSSDRQREESIEGQIRVCEDFAKRNGYKVLRTYTDSAMTGRTDQRPQFQLMIHDASSRAFSSVIVYKLNRFSRNRYDSAKYKHKLKKFGVKVVSAMENIADDPSGILLESVIEGMAEYYSAELAENVKRGMTENVLEGKWPGGVVPLGYKLDAAHHLVIDEKTAPVVQYIFRAFTHGVMKKKIAETLNERAFLTRSGKKFTSSSFNVLLKNELYTGTYTWGGIKRENSIPALIDEETFRLAQYINESRKKNIIRAPDFYGLSGKVFCGLCGARMDGKSGRSRSGGIYYYYSCAEHLKKHCPARPIRADLVDDMVVNTTTSLLDAPGVIDLIARQAMKLQARQKKSAAVAALEAEIAENRKKVENCIKAIEQGLMSESLTNHIQEAEGRIRDLTDRLQREKLLHSRRPLTEDEIRFFFYSIRSQAQTKEAKEYRRILFSSLVRSVIVKEKTVEIRYNYKSELPVLQNPLELESSHNVFLVDHQGFEPRTP

SEQ ID NO: 11013 - protein, 552 aa, synthetic construct
MHVMNNTGVQVRTKTVTKIAANPALSKRNDPNRILRVAAYCRVSTDDEDQLNSYRTQKSYYTELIKKNPKWRFAGIYADEGITGTMVKKRDDFLRMIEDCEKGKIDLILIKSVSRYARNIVDCISYVRKLKALEIGIYFEEQNINSLTEDSEVYIGIYGVMAQSESENISANVKWGINKRMQNGTYACRFTLLGYRRNKDTKEIYIVPEEAENVKKIFQMYLQGRSLDQIKRYLEENNILTVRGNPIWDKGVIKSMLTNEKYVGDIMFQKTYREDCISKRTKINRGEMDRYLVTDNHPAIIDRETFRMAKKEMVKRSSKRRTSSNAVTELGKYSGKYALSELLFCDICGSPFRRKTWTRKGVKRVYWRCLNHVENGDKACPQSRGIEESVLHEAICRGMSKCIPETGDVKNLVRTMLAYATSEDQGLLECQTLENAIRELQEKANEAEEMCIRTEGNKEPYMEQIKKYYSSIAELRARITEITKQLEESDEFQTEMQQIDSWLENEEILFAEYDDDIVRYLIDSIRVTDDLKLIINVKGGVSLTEELDQKED

SEQ ID NO: 11014 - protein, 524 aa, synthetic construct
MRKGVMSMTTNKKVQIIRGSKSYAEDILRVAAYCRVSTDSEDQVNSFIAQMHYYYSFIKQAENMELVDVYADEGITGTSVAKRDDFNRMIKDCKAGKIDRIYVKSVSRFARNALECLEYLRILKECEVSVFFENDGIDTGALNSELILYIKAAFAEAESTSNSKRVQTANRMRAENGEYVFVSAPFGYRIENNELVPIPEEIKVVERIFKEYLAGLGAGKIAAQLNAEADMIGKPWGKERIRYILSNEKYIGDSLFQKTFTPNVLPLKNRPNRGEVEMYYISNTHAPAIDRELFGAVQEMLKRNMQKKAKCAKSGKYSLSGKLYCGDCGWRYKRKVQNGTAYWICSGDGIAGRHCKTKPLSEEVFFKTFVNFYNRLRVHENLILRNSVTRLSEIKKMITCMDSEISDLDKQLGLLTERHNLYVTLMQGCQMDEISFAEQCAKAEREINKLRSRRNKLLSEDEDEKSIDDIRMLRNKLSSAPKAILKFDFELFDAVVEKVIVDDDSKVSFVLCCGLKLREAIAWN

SEQ ID NO: 11015 - protein, 507 aa, synthetic construct
MDIYLIYLRKSRADSDMTVEEVLKKHESMLQDYAERELGHRIPEEFIYREVVSGETIDDRPMVQQVLRLMELNSVKGVLVADPQRLTRGDLVDCGRIINAFRYSDTLVITPRFTFNLAQEYDRKFFEMELSRGNDYLEYSKRIMNSGRIESIKHGNFIGSIAPYGYERVTTREGKIESHTLRVVEEEADGVRIMYDLYVNKHYGFANIAHELDSLGIHPRNSEHWNPAAIKDMLENPVYIGKVRWNYRKTVKKMVNGQVIKVRPKNKYEGYQVYDGKHEAIISESLFNASLERRGRNIIYRPANTCSNPFAGLIKCQCGRAMSYKPYYNRQRTKPILVCDDQVHCHTRAVSFDAVKDEVVKTLESSIENFRTLLKNDDGGTLLREHRIASLKAELEKLDQKDIRQKDAFDEGIYSKEEYIMQNSKLQKRRAEVTAALAKAADSEPAADYKNKLVQFTDALNAMTDDSVSAGDKNIYLKQVIDKIVYSSKGRGNRWTKNEFEVKVYIR

SEQ ID NO: 11016 - protein, 650 aa, synthetic construct
MKKQQKCYIYTRVSISMQVDGYSLDAQKDKLRKYAEYQEMSIVGEYSDEGKSGKSVEGRPQFKQMLADVESGKDNVDYVLVFKLSRFGRNAADVLSSLQKMQDYGVNLICVEDGIDSSKDARKLMISVLSAVAEIERENILVQTMEGRRQKAREGRWNGGFAPYGYQLVNGELIIAEDEAEIIRIIYDKFVNTTMGMAAIATFLNNSGYKKKLRQNNTIEDFSTSFVKGVLDNPIYCGKLAFGRRKNEKISGTRNEYHIVKQKEYMLSDGIHEAIISEEMWNQAHRKRQETGVLQVKTHSLEHEHILSGIIKCPVCGSGIYGNVNRKKHPYGGYYKDYFYYACKHRKLVDGHRCTYKRQWNEDRINAAVEEIIRKFVKNPKFEQEIRKQIGSSIDTSELDKEYDGLKDRLSQTTGAKNRLADQMDHLSVSDKNYDKKYNDMQERLDKLYDEITDIEDAMEEVETRLYNIRQDKISEDNVYQFLLFFDKLYDKFTDLEKKTFLRSFLSDVFIYEEEQKDGRILKGLQFKFPIYMNGRNVLGVDWDNESTDETVVKLSLKKDTPRIEVTMKPDEESNYTPKEKATYPKIKEYVKNKYGVNVHTSYIAQIKRMCGLDMGENYNKSKKENPEVKQCPQEKVEYIKDALKHFKLI

SEQ ID NO: 11017 - protein, 510 aa, synthetic construct
MSYFIYARKSRKDAELEALGIDVLERHITTLLELAKTHSLPIGAIYREVVSGDSIDARPVMTQVLSEVEACMWDGALVMDVDRLARGDTIDQGRVQRAFFYSNTRIVTPNKTYDPANEYDNEYFEFSLFMSRREYATIKRRMQRGRERSSSDGYYVGNVAPYGWERVVAQDGKHYSLAPSQTEAPVLDLMYDLCGNKQYGYQKACTYMTNMGILARSGKPFTPSTLKGIISNPANIGKVRWGHRKTVRAVKDGRVVKSRPKATDYILSDAAWAPRISADLFKRANQPKGCFSAPVRSDRPIQNLFAGLVRCSQCGRLMVRKKAQTKTPYDMLICQYAECSTVGIRIDELEEALLGWLKDYIAKYEFADTHEEDTAAIAAKELIVTNFETEHQTLLKQRESLFDFLEQGIYTKEIFIERSNALEQRIRDCMNNITAAREDLHTTIARQANRKNFVPKCKNLLSEWDSLAISEKNSALRQLIDRIILTKTKRNKKNQKNSEFTIDVYPKVPK

SEQ ID NO: 11018 - protein, 526 aa, synthetic construct
MPKVTMIPATVNSLTHLPKASVQKRRVAGYARVSTDSDEQFTSYEAQVDYYTRYIQSKPEWDFVRVYTDEGISGTNTKRREGFKEMIADALAGKIDLIVTKSVSRFARNTVDSLVTIRKLKENGVECYFEKEGIYTFDGKGELLITIMSSLAQEESRSISENITWGQRKSFADGKIHLAYKHFLGYKKGEDGRHAIVEEEAVVVRLIYRLFLDGKTQAGICRYLEDLEIPSPSGKAKWSKTTVTSILTNEKYKGDALLQKSFTVDFLQKKTKLNEGEVPQYYVEGSHPAIIEPDEWNHVQAEFARRKALGNAYSGKSVLSAKLVCEDCGGFFGSKVWHSTDRYRRTVWQCNNKFKGGERCLTPTVDTETVQQLFIKAYNQMMGNRKQIIEDCELMRKKLTDFKSLDADIERHLEETQIVAELVKAAVKDNAVTAQSQEAYLKKYESLTKRYETAAAELARLQNLRTLRSQKDKAVALYIRTLKKQPTVLSEWNDTLWTVMVEKAIVHRNSEITFVFYNGTKVKVRQ

SEQ ID NO: 11019 - protein, 492 aa, synthetic construct
MNVAMYLRKSRADENNPLETLERHKEILLSYAKDNNLTVIDIFEEVISGGMLYNRTEMLKLLDAIPSHIYDAVLCIDLDRLGRGSAADSEKIFDVLKENDVKIITLKKIYDLNNEYDEDYSEFEMFMARKELKFITRRMNRGRIKSINDGCFVSGAPFGYRNAVINKKHTLEVYEPEAKYVRMIFDMYVNQSMGITSISRQLANLGVLSKKNTPLHPTTIARMLRNHTYIGKIVWNKSKSVKGKNTQEKTSKDDWLYVPGLHEPIIDEDTFNKAQDIINLKYKPPMRTGTLQNPFAGLLKCANCGRAIVINTSNETVEKYRLCCRTLGCNKASALSIVEDKVFEVLTKEFKDIELSLKNIRQSHNKDKLSCLDTIATLETELKKLDKQQLRLYDLLEQEVYTKELFIERNNAISDRRKKINATIAQEREKFKLVDTSSIEERLPLLRELLTNYNSLSATEKNSILKNFVKKIEYKREKSAPEGDIFLKIYYK

SEQ ID NO: 11020 - protein, 503 aa, synthetic construct
MLRVALYGRFSSDNQREESIMAQFRDSEEYCRKKNYCIVARYADEAKSGTTTVGRDRYNQMLEDARRGLFDVIVFHKVDRNARNEFDYYMTKHKLQQVGVRYEYSKQDINATTPEGQMMESMLVGMAAYYSRNLSNEIKKGLRENVLQGKHAGGPVPYGFLTDENKKYIINEKEAPAVRMIFNLYVAGVHYGTIRKELFNAGYRNRAGREFTTAGIYEILRNRKYAGDLYLGRTLFRKGKRNSHRTSDDVQYYENVIPAIIPRSLFMEVQSKMDRNKRRTGAGNAKAVYALSGLIFCGRCGSAMVAHSTKNSRGVKNYYYRCPKGRLVGEEKCPQKFVNRDKIESAVYNLIRDTFTSPNAHDRIKEVISKNKIKINPEDYAEQIKRLKQQEAADVRSLDRLYDIYMAEQEDEFTISKMKKLKEGILRLRSQIEELETRQKIVQEEKFDIDRVIDTFQKQLKQKQSPEFIQTLFQLAVKSVTIYPDKIKVALLVTQERFELPTP

SEQ ID NO: 11021 - protein, 502 aa, synthetic construct
MEIQIREGNSIQKRKLKVCAYCRVSTDADEQENSLENQIRHYEEAITSNPDYEYAGVYSDFAISGFKEKRPGLQKMLADARKGKIDLILTKSVSRFARNTSIVLEATRKLKELNVGVFFELQNINTLSGEGELMLTILAAFAQAESESGSVGAKMVYQRKYEAGIPVQYLERSFGFKKDERGVYIADEEEAAWVRKIYEMAADGYTPAAIKRYLNENGVKTVGGAEWIDSTVFRLIENEIYKGDYIMHKHFVNEERKLVRNRGEVDAWYIEDDHEAIVSPELWQKAQDALEAKRDYLAESSVIEEFTEENYPYMNKIFCARCGHPLYKRIYSNGNRLNWGCSGTKRYGKSFCEGINIPDGVLRGAWNFDENMYIGEKPTDKGKKEFTYLKEASWKRRHKKKEPEPISENTETEYPYREKIFCGLCGSRLVRHVNTKSHKVIWVCNGRKRKGKDFCDGTRVPDTIIKGWGEIKKDIYIQRKDDKNGKKRYSYTSKKPKGADRA

SEQ ID NO: 11022 - protein, 464 aa, synthetic construct
MARSVTVIPARSQKVQTGHKAVQEKKIRVAAYCRVSTDQEDQLHSFEAQVEYYTKYINEHENYEMAGIYADEGISGTNTKKREQFKKMIADCEGGKIDLVITKSISRFARNTQDCLAYSRKLKNLGIGIIFEKENINTLDSTGELLFTILSSLAQDESRNISENCKWGIRTKFKNGEMHLNTFKFLGYDKDENGKLVINKEQAKTVRRIYRDFLIGINPAQIAKELTEEKVPGCLGQTKWYPSTVTGILKQEKHMGDALLQKTYTADFLTKRQVRNNGEIAQVYVKDSHKGIIDKQTWNAVQEEFDRRERFMESHGTDRYSYGADCMPFCEKVFCGECKSLFTRHSWRSRGIVQWQCKNHRKDGKVACTNAYVDNADLEKGFVKAFNRLVTDRDKHMERWQQMKSDGTPLEKIRAEQMMEAVGNEPLTRFVPEIAQLVLCEVTVLGAKKYEFFFLEGSRVKVSV

SEQ ID NO: 11023 - protein, 523 aa, synthetic construct
MRFFSYGRKSVFSDKSDSIDNQFRMNREYCESKFSGQVDSWQQFSDEDFTGANTSRPDLQRMLSFIKGGFCDVLVVYQLDRLSRDVRDFANIYALLEEHGVMFISIKENIDTTTPIGRAMMYVTVVFAQMERETIAARVTDNMLGLAKKGYWTGGNPPVGYVRKHIVVDGKKHCSIEVDPDGARYVTQIFDTFLAYNCSLQGMETRFKNQGIRTQSGKFFSTTQLHKMLTMPYCVEATPEVYDFYAAKGCIMDPGSPREMWDGSVGVIIYGRSTEKNKKHQAQPPEKWTVCLGKHKPFMPAEKWLAVQSRFTQNKCIKDAKWPVPLLKGVLRCKCGNLMQVSRKKKVDGTCSSWYYCRKRMRQGVDACDMGQIKCDLLDEKVLELFRGITADPGLIQKFVKTKAPDDIPNLKAAQARVAACERKIGRLAASLALAEDSTASKYIIAEMERLDVELGALKREASLAEMESHQATANAKDAKATAVEIAKLIHGLKGFDDKEKNAIARAVIQECTWDGERLFITL

SEQ ID NO: 11024 - protein, 559 aa, synthetic construct
MSKTVAIYVRVSTGKQADRDSIPFQIQECSNYVKHFLKTENFEVFKDAGRSGKNTHRPEYQRMIEKVKSGMISHVVVYKIDRISRNLVDFSIMYNDFKEHKVAFISLNEQFDTSSAIGEAVLKIILVFAELERKLTGERVRDIMMNRALEGKWNGARVPYGWDWDTKKQCPVHSDTEAEYARMMYRLYDECHSTCVVRDYCNAHDIPTKRGGEWTSKTVADFLRNPMNVGDYRYNYRKSARGKRNDPSEVIYVKDVFPPLIDRELYERVTHQMDLNTFGLGKDGRKVVSKKTHVFGGLVVCGLCGAFYHSDADVVRADGFRPSNYRCGAHNKKIHCKAKGTSDVKLGPFIFNYISNLVKASKSKKLLHSVSDLEQILLTGPEFEQVAGIADIGLDVTFDTIMHGFKPKRYTAAPYTVIRSGDSDALTAKRDKTIRALERLKKLFLFEDDAMSEKEYLMSKRELEGTLSDIENELSALEADTADTKYDDMSFISTASGFLIAHQIASGEHINYRELACAVDAKVLKDFVNSVIERIVLLDGRVASIEFKNGLVHEFLYRE

SEQ ID NO: 11025 - protein, 502 aa, synthetic construct
MEIQIREGNSRQKQKLKVCAYCRVSTDADEQENSLENQIRHYKEVITSNPDYEYAGVYSDFAISGFKEKRPGLQKMLADARKGKIDLILTKSVSRFARNTSIVLEATRKLKELNVGVFFELQNINTLSGEGELMLTILAAFAQAESESGSVGAKMVYQRKYEEGIPVQYLERSFGFKKDERGVYIADEEEAVWVRKIYDMVAQGYTLAAIKRYLNENNVKTVGGAKWLDSTVLRILENEIYKGDYIMHKYFVNEERKLVRNRGEVDAWYIEDDHEAIVSPKLWQRAQDALEAKRDYLAEGSVIEEFTEENYPYMNRIYCARCGHPLYKRIYSNGNRLNWGCSGTKRYGKSFCEGINIPDGVLRGAWHFDENMYIGEKQTDKGKKEFTYLKEASWKRRHKKKEPEPIPENTETEYPYREKIFCGLCGSRLVRHVNTKNHKVIWVCNGRKRKGKDFCDGTRVPDTIIKGWGEIKKDIYIQRKDDKNGKKRYSYTSKKPKGADRA

SEQ ID NO: 11026 - protein, 579 aa, synthetic construct
MLLRKIFEKMEVFNLEKNLKCALYIRVSTFHQIDKDSLPLQREDLINYAKYILGIDDYVIFEDAGYSGKDTDRPSYQNMMTRIRMGEFSHLLVWKIDRISRNLRDFSDMYDELKKYNVTFISKNEQFDTSTAMGEAMLKIILVFAELERKLTAERVFAVMMSRAEKGLWNGATVPLGFIWDEEIKFPKIYEPEAKIVQYIFDLYEKKRSTTKVAEQLNQENVKTKRDGTWTPRTVGAILTNPFYIGTYRYNTKTQKTRRWKDKSEWIVIEDHHPAIISKEQFERVSKILKDNYRGDYNRQRASKNVHILSSIIKCFKCGSNMNAGNDRARKNGFTPSRYTCYQIHKTYTCNNYASDLTVLPFIINYIGNYMTLQDIITKNHSYRDMESILLRGKYFTDIEHINKDDIKCTYKLLVNNLPVINYKLQENQEDKKTTFKDRYDIYKNEKEKQENALKRLDDLFLYAEDSMPKKDFILKRQEITNKIEEINSKIQELRAEENNFVDNKEFSLNAKASFYLITQLIGNSKNIDVRYLLENVDKSIIKDFLSTILNEVSVDHQKVQYITFKNGLTHHFEYKENQ

SEQ ID NO: 11027 - protein, 499 aa, synthetic construct
MIAIYARQSLDKKDSISIETQIELCKKEIGDEPYKEYVDRGYSGKNTNRPQFKAMMQDVENGVISKIIVYKLDRLSRSTLDFGELMDALSKHNVEFSSTREKFDTSTPIGKAMLNIIMVFAQLERETIQVRVQDNFRMRSARGAYDAKAPYGYAKTKVMVHGKAVSTLKPDKAYSLMVKKIFEQYAYTSTSLGYLARTLNQQGIKSANGAAWDSCKLSKLLCNPIYVKADAEVYKYYRAKGMEITNDIDDFRGQYGCVTYGQWDRAKNKFAQLSGLTLSIGLHEGIIDAKTFLACQYKLADNTQINNTGRGKHSWLTGLLKCGCCGKAMKVMTYKDTATFRCSGAMNTGLCSDSPSVCVHEMEEAVEREIFAHVARHQELVVQKRKEEDNKAHNYKIAIAKLDDQIANLITALADGTELTMKYINGRISELQKQRDILAAELQQHKNATKQQDDIKQFHDIINLWPGMTIPQKHEIAMMLIRRVEIQEDTTRIYWKYDL

SEQ ID NO: 11028 - protein, 504 aa, synthetic construct
MNYNDSKGIYLMYLRKSRADEYNQDVENILKRHEEELQSLAKREFGELIPEKYIFREVVSGGTIKDRPLMKEILKMMESGIIAGVLVVDPQRLSRGDLLDQGHIINAFKYTNTLIITPYKTYDLNDTTGTDMKLLKMELNHGADYLDYYKMVQARGKLASVRAGNFIQPIPPFGYRKVRYGKVTTLEPIEDEARIVRIIFQKYAEGKTICGVTNELNAEGYIPPSKQIWTKGSVKRILSNPVYDGKIRWGFTPNKTVMEDGKLKKYRPERHDYLLFDGKHDAIVNHVLFMSVQERLSKNKSFTNDRSLKNPLYGIMYCKRCGRKISRLNVAESRGGHRYACPNKLCDVQSSRYDLVIEAVIDTIQCAIDDFDITFHDCNSSGSDEKIRELRQELTRLNNKEDTLFELLETKVYSTSVFTQRHAELEKKRQEIIGKINTLSLIPPPESCNDKKMRFKDALLALKDESMPPKEKNHLLKKCIERIDYDIEGVRYHSKVKLDVYFKF

SEQ ID NO: 11029 - protein, 518 aa, synthetic construct
MQENETYVIYLRKSRADSEKSSLEEVFAKHESELQSLAERTLGNRIPEDKIFREVVSGETITDRPVISQILKVMESKKIKGVFVVDPQRLTRGDLLDKGHLINVFKYTNTKIITPYKTFDLNNDFDLKLFKMELDKGSDYLEYYKMIQARGRIASVRSGQYIGSTAPYGYDKYSYKENKHTVNTLKPNSDEATVVQLIYHLYVNESLSYAAIANKLNTMNIKPRKSTSWSPYSLKEILHNPVYIGKVRWNRRKTVMKYKNESLLKTRPIALNDSIISDGIHEAIIDEALFDSAQECNGKTPRNHSSSKLINPLAGLIFCGNCGRAMSYKTYKNNAGSEKQSPRYLCNNQSNCHTKSAKATDVINQIISALECYIEDFKVKLENDDGNSFNVRSQIISVLNKQLQDLEVREETQYEMLENKIYTPELFKKRRQKLLEEREVLLDKLQEAKVQEPVKIDYQEKIISFTDTVEALKNPDIDILQKNMLLKKCIKKITYTTDKEKGNRWRESTFEIDITPLI

SEQ ID NO: 11030 - protein, 525 aa, synthetic construct
MAKRVTTIQPTLTRFTAVPITEQRRRKVAAYARVSTDHEEQQSSYEAQLDYYTNFIRNHDGWEFVNVYADEGITGTSTKHREGFKQMVADALAGKIDLIVTKSVSRFARNTVDSLTTIRQLKEHGTECYFEKENIWTFDSKGELLITIMSSLAQEESRSISENCTWGQRKRMADGKVSVPFSRFLGYDRGENGELVVNPEQAEIVKRIYTEFLQGATPHTIAAGLTADGIRSPGGKDRWNPKTVQSILQNEKYKGDALLQKCFTEDFLTKKQVKNQGQVPQYYVTGDHEAIIPEDVFDMVQREISMRKPGPNRHSGVRVFSSTIYCGECGGMYGSKVWHSNDKYRRVVWRCNRKYDGDQPCGTPHFDEETLKQLFLSALNKLVGKRNEIRDSFDAIRSTVFSTDALEAELAQVEAEMSIAAEQVARSIRENAMVALDQSAYRARHDALCDRYENLKARCAELKETISDKQTRLAAIDDFLRTLMKQEALPTTFDPMTYHILVERMTVYGKDKVIVRFKNGMEIQA

SEQ ID NO: 11031 - protein, 587 aa, synthetic construct
MAKSITRIDVKKLDLLQRKRVAAYARVSMDTERLMHSLSVQVSYYSELIQNTPGWEYAGVYADEGISGTKMDSRPEFIRMLADCEAGKIDIILTKSLSRFARNTVDTLNVVRRLKELGIEVRFEKERINSLADEGELLITIMASFAQEEVRSLSENVKWGLRKRFEQGMPNGRFHVYGYRWEGDHLVIQPDEAAIVRRIFQNFLQGKSRLETEREFAAEGITTAKGCRWVDSNIKVVLTNVTYTGNLLLQKEYITDPITKKRKKNRGELTQYYVEGTHEAIIDKETFDYVQQEMARRKALGPRANKSLNLTCFSGKIRCPHCGINYGHLRPRRGSLISYWVCGSKRKKKVGDGCPVKGAMSEVAIRKCCAEALGLDEFDETVFTERVDHLEVPEKDRLTFFMKDGRTFTRDCRNTGHQDCWTPEYRAAVSAYRREHGTNPRGKSCFTSKIKCACGSNYQTSYQKLKDGAIRYWRCPEKCCEKGMREDRLRAVCAEVLETDGFDEAAFTAQVEYISVLADGVLEFHLANGRAVQHSIDLRRSGTKWSEEQRRRFDESIKGLYTPERRQAMSEHMKQLRKERRENWRKE

SEQ ID NO: 11032 - protein, 480 aa, synthetic construct
MATHKVAIYVRVSTTSQVDEGYSIDEQKAKLTSYCDIKDWNIYDIYTDGGFSGSNTERPALERLIRDAKRKLFDTVLVYKLDRLSRSQKDTLYLIEDVFLENDIEFVSLLENFDTSTPFGKAMIGLLSVFAQLEREQIKERMQLGKLGRAKSGKSMQWAKTSYGYDYIKETGTLSVNPYQALIVRKMFEWYLSGMSITKLRDALNEQYGQDKEWSYRTVRVILSNPVYCGYNQFKGQIFPGTHEPIISEDDFNKTQEEIKTRQRTAAQRFNPRPFQAKYMLSGIAQCGYCSAPLAIKLGMKRKDGTRLVKYECKQRHPRKTKGVTVYNNNEKCDSGFYFKDDIEHFVLTEISKLQTDSDYIDKLFSNTDKETIDRASYQKQIDNLTAKISRLNDLYIDDRISLEELQKRSSDFMAERSALEKELDADSSLKAVERKKDIRRVLDTKDIFTLDYEQQKTIARALISKVRVTSESIVILWKL

SEQ ID NO: 11033 - protein, 513 aa, synthetic construct
MKKQPTGGKRLVAYYRYSGGSHQTEQSIEGQRRDCETYARIHGMVILHEYIDRHISGKTDDRPEFQQMIADAGKGMFDYVICWKTDRIARSRYDSIVYKKKLRDNGVELLYAAEANVEGSGGIIVEGLMEALAEYYSAELAEKVRRGMRESALKGKAIGSSRPLGLTVDKDKKYIIDPAGAAAVRYIFEQYAAGAASSSIVAHLNEQGLCTSRGNPFNKSSVVRIIQNEVYRGVYVSPKFDVRIEGAVPAIIDDDLWERAQKMFIRNRQSRSPRNDRADYILSGKLFCGECGTAMKGVSGHSSNGEVYFYYNCPCKDCHRRNIPKDELEGLVIRTVCNDVLQPDVMDRIADSVIEAQTAELNQPNPEKEALQHELADVQRKAKNLLAALENGTAGSMLTNRLAELEQQANTLSYQLSSLESEPKFPVFSKEEVLYLLEQFLIAPSEKTKAYRRRLIDTFVSKIEVSNTELTIYFNIAEEDCGKMKKAPQSNQPEGCSTEKQMVRVARIELTAS

SEQ ID NO: 11034 - protein, 581 aa, synthetic construct
MARKRTNLIGNTPSVRETKVAIYIRVSTIHQVDKDSIPMQKKDLIAYCQLILGTDNYEIFEDAGYSGKNTDRPAFQNMMGRIRKGEFTHVLVWKIDRVSRNLLDFAEMYEELRSLRVTFVSKNEQFDTSTAIGEAMLKIILVFAELERNMTSERVTATMISRANSGQWNGGRIPFGYSYDPKEKVFSIREDEASICRELKDLYLLNRSLAYVSRALNEKGYKTRAGVSWSPHSVWIIASSPFYAGIYRYNRYKGVESRTINPEEEWVMIQNHHPAIFTLEEHQAMRSIMKSNKRNMDNLPGRVHLSTKTHIFQGIMYCDKCGSKMVSTPGRLHVDGYRTSNYGCPLRRNTKKCNNPTVNDIVIGEFVINYILNMLNAKKTFSTINTPDELNVALLSGSVFSEVSSVEENGLNSFFNLLSRYGSDRSYIFSVKSPRKKRAAVDPELSKLRKEKEKQERALQRLQNLYLYSETSMSEKDFIIRKSEISSHLDNINRQLGLMTQDQASFLSDEEFIKQASHLLIQKELKNKKYIYFKKLVSTVDPDILKAYMETILDSIYTADGKITAITFKNGLTHRFIYKDK

SEQ ID NO: 11035 - protein, 497 aa, synthetic construct
MSNAIIYTRVSTKNQAEEGYSLAGQEKDCKFFAEMNNYSVLKVFVEKGESAKTQDRTELQNLMKFCIANKKNIDAIIIWKIDRLTRDVKDFYNLQDFFAKLNIKVLFARENNGDSAGDKLTRNLMGVLAQYENDQKAERVTNGMKIAFLQGHWMWRAPIGYIMKNGNIEPDPKTAHHVKKIFKLFSTGMYEQTQLIKIIEADGIKINTNRMCRLLRNPLYMGYMHKNTWAEEPIRGIFEPLISEVEFKKVQDILNGKKPVITAYKRNNPEFPLRQFITCSNCNQPLTGSKSKGRKERYAYYHCHHKDCCINFRIRKEKLEKIFVDYLKFIKPERNLLNLFEATVKDVYNEKLSVRLNSQKQVQDKLVELKNRKSKLIDFRIDGTISEDDYKFKTEQLAEEIQEHEFRLREIDEIDNDLCKCLKYACKIIENIDTLWINGDLDLKQRLQKLIFPKGLMYYSNDFRTAEISSLFIKKDASLTSYNNMVPPSEFESLSTP

SEQ ID NO: 11036 - protein, 534 aa, synthetic construct
MARKKNIAAGQNAVIYARYSSHNQREVSIEQQVRECMKHAAELGLHVVGTYEDRAISGKTDKRPNFQRMMRDAEKGKFQAVVAWKSNRIGRNMLQAMVNEAKLEDCGVKVFYAEEDFDDTAAGRFALRNMMNVNQFYSENMAEDITRGLYDNASKCMANGRQPLGYKRGEDGRVVLDEANAAVVREIFTRVAAGDLFVDIARDLNAQGIKTSKGANWNKGSFQSICQNERYRGIYIYGDVRVADGIPRIVSDDLWYRVQEAMRMKKNPVGTRHRVGAEDYLLTGKLRCGHCGSYMTGVSGTSRNGELHYYYTCQKRRTEHACDKKNIRRDVIEPAVAQAIKMYCLTDDVIAWIADRTVEYWEKHDNDLQIEALEQQLEENKKATSNMLKAIEMGIITEATRTRMVELETEQSRLSVQLNVAKEDVVKIDREQIISYLELLQQGDIHDRDFQMELFKNFLVAVYVYDDNRMKLVFSCMGDQNSVEIPLETGEDPPDGGLSPDAKMFVLTPDSSTRSERHHTLCGAFFVVAKRVRA

SEQ ID NO: 11037 - protein, 526 aa, synthetic construct
MINMVSFDNIIIYLRKSRSDDPAQTVEEVLAKHERILQDYCIKEYGKVIPEKRIYREVVSGETIQDRPVMQKLLKELETNNIYGVLIVEPQRLSRGDLQDCGQIINSFRYTNTAVITPGKTYNLQDEYDRKFFEMELTRGNDYLEYTKKILNRGRVASVKQGNYICSVRPYGYKKVVIGTGKDKCHTLEIIPEEAEAIKLMYHLYLDENMGFTNIARTLDSMHIKPLKSSNWSAATIRDMIDNPIYIGKIVWNNRKVVKKWENEQIIKVRPRNKGDDVICVDGKHEAIIDEETFNAARQKRGLTPKVRKFKELRNPLAGILFCSTCGHSMSMKKYVDKRSHTGKVTTIMLCNKQAVCHTKSAQYEQIVAKIKESLADAIANFEIKMKEQENNNIDIHKQRITSLKDELNRLYNKDVRQKDAFEDDIYTKEEYIERNSKLQSQILNIKAEIENEKNNTPVIIDYQNKITTFTECLTSLDDDSISAADKNSLLKNCIDKIIYHNDMPSLPGIGRYIENSFRLEIFLKM

SEQ ID NO: 11038 - protein, 510 aa, synthetic construct
MSYFIYARKSRKDAELEALGIDVLERHITTLLELAKTLSLPIGAIYREVVSGDSIDARPVMTQVLSEVEACMWDGALVMDVDRLARGDTIDQGRVQRAFFYSNTRIVTPNKTYDPANEYDNEYFEFSLFMSRREYATIKRRMQRGRERSSSDGYYVGNVAPYGWERVIAPDGKHYSLAPHQTEAPVLDLMYDLCGNKQYGYQKACTYMSNMGILARSGKPFAPSTLKGIISNPANIGKVRWGYRKTVRAVKDGRVVKSRPNATDYILADAAWAPRINIDLFERANQPKGCFSAPIRSDRPIQNLFAGLVRCSQCGRLMVRKKAQTKTPYDFLICQYAECSTVGIRIDELEEALLGWLKDYIAKYEFSDTHEEDTAAIAAKELIVTNFETEHQTLLKQRESLFDFLEQGIYTKEIFIERSNALEQRIRDCMNNITAAREDLYVTIARQANRKNFVPKCKNLLSEWGSLTVPEKNSALKQLIDRIVLTKTKRNKKNQKNSEFTIDVYPKVPK

SEQ ID NO: 11039 - protein, 558 aa, synthetic construct
MAKKKKPAGGIAVIYARYSSHNQRDVSIEQQIEACRKHAAELGLTIIATYEDRAISGRTDNRPAFQRLMHDAEKGKFRYVLAWKSNRMGRNMMQAMVNESRLMDCGIKVYYAEEDFDDSAAGRFALRSMMNVNQFYSDNLAEDVRRGLMDNANKCMVNGRQPLGYKRGKDGKVVVDEPAAAIVREVYARVASGELFTDIARDLNRRGIKTADKGEWNKNSFHRLCSNEKYRGIYIYGDVRIEGGIPTIIDDTLWYKVQEALRVKKLKRNGRHRPGDEDYLLTGKLRCGKCGGYMIGMSGRSKTGDIHYYYACQNRRVGRTCDKKNIRRDVIEPAVAQAIKEYCLTDDAIEWIADKTVEYWEKADRNLQLDSIEGDLAAVQSSISNVMKAIEMGVVTETTRDRLIELEKQRTDLKSKLALAKEEVVHVDRKKLISSLLLFRNGDIHDRQYQEDLFKTFLISVYVYDDDDNGHLKIVFNAFGDNNTVDLPIDFGETDNQSAFSDGAEKFDYSLHRSTKSHPVYAGWLFSFYIVIQKQRTVFATVRPFLCSYYRMLMRPAP

SEQ ID NO: 11040 - protein, 514 aa, synthetic construct
MRRKKVEGGNRLVAYYRYSGGSGQTEQSIEGQRRDCENYARLHGLTIVHEYIDRHISGKTDDRAAFQQMMNDGDKGAFDMVICWKTDRFARNRYDSAVYKKRLRDNGIEIFYAAESNVDGAEGIIIEGLMEALAEYYSAELAEKMRRGMRESALKGQAINRCRSLGLTTDENKKYVIDEKTAPTVRFIFEHYAAGESSASIVEQLNAKGLRTSQGNPFNKCSIPRIIQNEMYRGVYTSKAYNVRIEGAIPAIIDDDLWKRAQAMMKTNRQLKAKYEPKAEYLLSGKLFCAKCGCTMKGVSGHSGGNDEVYRYYACSNPQCRKRNIPKDDLEGKVIRSICDHLLQPETMELLAETMVEVQKADMEKPNAERDVLEQELRDVRRRSKNIMDAIETGSANPQLVARLDDLTQQENTLTYQLSTMEAEKPLLFTKEQYLFLLQQFYAQPTEQDDAYKRRLINTFVTNIEVSDSELLIYFNISEETENKNKNAPQLNFDKSSSTEKRLVRVARIELTAS

SEQ ID NO: 11041 - protein, 523 aa, synthetic construct
MYYPNPKGSETMKRITKIEAAGTKQKKLRVAAYARVSTDSDKQLVSLETQKNHYEKYIKARPDWEFAGLYFDEGISGTKMDRRDGLKRLLVDCDKGLIDYIIVKSISRLARNTVDSIEIVRKLFQQGIFIYFEKENISTKKMDGELLLTILASLAESESRSISDNETWSVQKRFMNGTFKIGYPPYGYRNENGKMVVEPDQAETVRFIFSSVLAGKSSVSVAQELNQRGIPSKRGGRWGSGVVKSMIRNEKYTGDVIFQKTYTDDQFNRHINRGEKSKYMAKDHHEAIISHEDFDAANAILDRNAMEKGIEKDMEKYNNRYAMSGKIICGECGGKWKRVKLGDQFGFACVTHVKDKNKCSMKSIKEEPVKAAFVNMMNKLTFARSKILVPYEQMYVKGSDQAALDRLDEIEVLLEKNTERRAQILQFFSKSLLDPAVYAEENDALLENEKRLQAEKDALSSRMAGGYDQQEALTNLLHYTAKGNRLEAFNSELFTEHVEHIIIYSRTEIGFAMKCGPVFRERI

SEQ ID NO: 11042 - protein, 523 aa, synthetic construct
MPLAQNITVIPAIRKVGTQKPEAKVQKTRVAAYCRVSTEYEEQESSYDVQVEHYTTYIKSKPEWEFVAVYADDGISGTNTKKRDEFNRMIEDCKTGKIDMILTKSISRFSRNTVDCLKYTRELKALNIAVFFEKENINTLDAKGEVLMTIMAALAQQESESLSANVRLGIQFRNQQGKVQVNHNRFLGYTKDENGKLIIVPEQAEVVKRIYAEYMDGASFLQIKRGLEADGILNGAGNKKWEVSNIRQILTNEKYIGDALLQKTYTVSVLEKKRVKNDGQVPKYYVEGSHEAIIDRDVFLRVQAEIDRRANIIKGGKKRVYSSKYALSSVIICGHCGDIFRRIKWNNHGCKSTVWRCVSRVNKKKSGIDCPARTVHEEVIQEAVVTAVNDVWSRKDEILPQLKENIRAVLQEDTDAKIAEIDVTVKEKQEELLNVGKDENKIAEIGEAIMKLREERQQVMTDAAMRKDVKDRIEDLSNFLDEHTGAITEYSDALVRRLIEKITVYDEVLLIKFKSDLEITVDA

SEQ ID NO: 11043 - protein, 529 aa, synthetic construct
MNRTAARSVTVIPPTINPLTHLSRVAVQKRRVAGYARVSTDSDEQFTSYEAQVDYYTQYIKRNPEWEFVKVYTDEGISGTNTKHRIGFNEMIADAMSGKIDLIVTKSVSRFARNTVDSLVTIRKLKEKGVEVYFEKENIYTFDGKGELLLTIMSSLAQEESRSISENVTWGQRKRFADGKVNLPYKQFLGYRKGADGFPEVVPEEAIVVHRIYTRFMEGLTPGAIAKELTADGIPTPSRKQRWQTSTVESILQNEKYKGAALLQKCFTVDFLTKKRKVNEGEVPQYYVEHSHEPIITPEEFDKVQTELARRKQISRQYSGKSIFSSRIVCGDCGSYFGSKVWNSTSKYRRVIWQCNGKFKGEHKCETPHLNEETIKVRFVTALNAIIYSKDGILEDCRLMQATLTDCTGIDKEIQTLLEEIEVVTELTKRCIAENSQTAQNQEEYAARYNGFVERYEKAKARLEQLRTTKAAREAQAEAIGAFMFEVQELDALTEFDEKLWLTIIDTITVHADGRMTFKFQGGKTLTSY

SEQ ID NO: 11044 - protein, 434 aa, synthetic construct
MERVVERVDALIPAQPRALRVCAYARVSTGKDAMLHSLSAQVSYYSKMIQSHNGWMYCGVYSDEAVTGTKRERAGFQHMIEECRQGNIDLVITKSISRFARNTVTLLQTVRELKNLGVDVFFEEQHIHTMSADGELMMTILASYAQEESLSASENQKWRVRKAFESGEIINLRFLFGYDITPDGIQVNEKDAAIVREIFARFNGGESMSSICRDLDARGHKGVLGGTWCAERMRNTLSNEKYLGNALLQKRYRNNHIEKKLLPNRGELPMYYAEGTHEPIIDQATFDKAQERLRMLAQQAANRKKPTRSVFSGLIHCGLCGNTYKRVTYRKKHYWNCTTFQTKGKSECAAKRIPEETLEALTCEVLGAVSFDPDMVRSKITAIRAEKNNVVVYCMDDGSEIVKRWKDRSRAESWTPEMKEKARQRALQARRKKE

SEQ ID NO: 11045 - protein, 502 aa, synthetic construct
MEIQIREGNSRQKRKLKVCAYCRVSTDADEQENSLENQIRHYEEAITSNPDYEYAGVYSDFAISGFKEKRPGLQKMLADARKGKIDLILTKSVSRFARNTSIVLEATRKLKELNVGVFFELQNINTLSGEGELMLTILAAFAQAESESGSVGAKMVYQRKYEAGIPVQYLERSFGFKKDERGVYIADEEEAVWVRKIYEMAADGYTPASIKRHLNENGVKTVGGAEWIDSTVFRLIENEIYKGDYIMHKHFVNEERKLVRNRGEVDAWYIEDDHEAIVSPELWQKAQDALEAKRDYLAESSVIEEFTEENYPYMNKIFCARCGHPLYKRIYSNGNRLNWGCSGTKRYGKSFCEGINIPDGVLRGAWHFDENMYIGEKPTDKGKKEFTYLKEASWKRRHKKKEPEPIPENTETEYPYREKIFCGLCGSRLVRHVNTKSHKVIWVCNGRKRKGKDFCDGTRVPDTIIKGWGEIKKDIYIQRKDDKNGKKRYSYTSKKPKGADRA

SEQ ID NO: 11046 - protein, 519 aa, synthetic construct
MADFEHVIIYLRKSRSDDPATTVEEVLSRHENILQEYAVREWGARIPEDRIYREVVSGETIKDRPVMQHVMKILETGLVSGVLVVEPQRLSRGDLQDCGHIINSLRYTNTAVITPPKTYDLSDEYDRKFFEMELTRGNDYLEYTKKILNRGRIVSVKAGNFIGNSAPYGYRKICVGTGKEKYYTLEIVPEEAEAIRLMFDLYVNKDYGFRNIAHALDMAGYKPRRSVEWSPAAISCMIANETYIGRVVWNRRKTIKKWENDTIVRTRPRQSEYISVPGKHPAIISDELFYAAKAKRNRTPRIKRYVQLLNPLAGLLYCGTCGHAMSRKRTVDKKYGSVSVSFLCNNQSNCHTKSVMYDAVIDRVKETLRQSIEDFEVKVNNKDETDIAYHRAMIANLKSELRKLKEKDMRQKDAYEDGIYTKEEFVVRNAKLAEQISIAQLKLDEAESSTTQLVDYQERLVRFRECLEALDDDTISAADKNTLLKSCIDKIMYYNDSPSLPGIGRYVDNPFRLEIFLKL

SEQ ID NO: 11047 - protein, 534 aa, synthetic construct
MKTAVIYARYSSDKQTEQSIEGQLYDCYNYAKQHGITVVQEYIDRAMTGKNDDRPAFQQMLHESAMHKWDSVIVWKLDRFARNTIDSAVNRQILAKNGVKLLSVMESFGDDASGQMMTHIIEAINEYYSADLREKTIRGMRQSAMKAQTTGHIPLGYKVVDKKLVIDDETRIIPETVFRMYAEGERLTDIAEHLNAQGYRNRRGRPFTTNSFYNMLANEKYIGIYKYDDIVIEGGIPQMIPNEVFEAVREKLITNRKRAAKNTAKADYYLSGKLYCGHCGEPMSGLSGTGRNGVKHYYYRCNGVQKKSGCHKKLENKYLIEDEVCRAARSAFERMDKAETAETIYQMYLQTVKNEYAPDELKKELTECTKQAENVVNAIAQTGGNQLLFDKVRELEERKEQLGSALRLSQAMTDNVPSVEQITVFIDDILATDINTIEGKKAIADIMISKVYVYDDKLTVIFKDKDGKSVDIPLSAVSDSSSADCAPSALGSQSSFNLNLLKGKESNVCTYLLLLNRSIFFIDLLRINNFLCEK

SEQ ID NO: 11048 - protein, 463 aa, synthetic construct
MRRKTTAPVEKILLRVAIYIRVSTDKQVKDGDSMRDQLATEQKYIDSHENMILVDTYIDDGISGQKLKRDDFQRLIDDVRAGRIDLIIFTRLDRWFRNLRHYLNTQDILDKHGVSWTAIEQPYFDTSTPHGRAFVNNSMIWAELEAQNDSDRILGVFDDKVDNGEVLSGSTPLGYKIVNKHLVPDDDAPTAVAIFQYYRKTGNLSMTLRYMESEFGLVRSAASLKNMLTNTKYIGEFRDNKNYCPAIIDRDLFFDVQRLLKINIKSGKKHDYIFSGLVVCDDCDHIMSGCQQRARGRVRADGTRIIYKYSVYRCRQGVNLHRCPNRKLVFETTLEKMLLERIRPELENYIAEYEVANLPALRTDAKRRSVEGKMQKLKDLYLNDLITMDEFKLDREKLLMQLEKINAEDSRPVKDLSYLKNFLKMDFESVYDSLSIPERRELWRSIVKEIRVDHDKNIHIIFL

SEQ ID NO: 11049 - protein, 526 aa, synthetic construct
MQYCLYLRKSRADSEAEARGEGETLARHEKALLDLAKKLNLNITAIYREIVSGETIAARPVMQQLLQEVEQGIWDGVLVMEVERLARGDTIDQGIVAQTFKFSDTKIITPIKTYNPNNEFDEEYFEFGLFMSRREYKTINRRLQRGRMASVKDGKYVANKAPYGYNRIRIENDKGWTLEINKEEADVIRLIFELYTVGEKQSDNTFNRLGTGFIAKRLNAMKVPPKRGKVWVVASIRDILINPVYIGMIRWNWRPQQKKMIDGQLHISRPRATDYMLCKGLHPPIISKETFDIAQDLMRHNPARPIGEKNTVKNSLSGIVVCGDCGRHMVRRPHTKYPDMLICSEPTCNNVGSQLRVVEERILQSLKEWLGEYKISWDITSPPVERISQVSIKKKALQKEQHELDTLNKQISKTHDLLEQGIYTTDVFLERSRALSLRIDEVKEHIAILDKELKTEITREDSAVNIIPKVEKLLEVYHDLPSPKAKNDMLKDVLEKVVYTKKERSKKGNLDNFNITIYPKIPKYIT

SEQ ID NO: 11050 - protein, 503 aa, synthetic construct
MSKIHKIEAMIPKQIEKKKVAAYARVSALTEMTQYSFSAQVNYYSALIQKNPNWKYVGVYADKGITGRSIKKRKEFNRLIDDCNNGEIDLILTKSVSRFARDTVDTLNTIRHLKNIGVDVYFEKENIHSISQEGELLLTFLAAYAQAESENTSENIKWGIRKGFKVGKPNGYKAPYGYKWNGNSYSIVPEQGAIVKEIYKRYLDGEPAYSIAKALKKRGIKGQTGIPMDDSTIRYIVSNISYTGTLLLQKWFFTQNHVRKENKGELPMYAVENMFEPLISKEDFQKALQIKKERAEAMPNKNPRLTAFSGIVKCGNCGCSVCRRTTRYGKKWVCNAKDRKGMAACDFRDIYEIELEAAATKALAVNEFKEDLVRREVKLITIDNAYIVFNLKDGKKKQILRTYTKGYSGFSCRLFCGNCCKMLEADSRTLSINGQKKRYKIWCCRKCPGQREFDDVIRKATQSLFNEPQCEGLFAQNIEKAIIYNDRIDFYFKEGKVITWEKE

SEQ ID NO: 11051 - protein, 544 aa, synthetic construct
MAETAKKISMIPAKVQYDRNVKLSEKKMKVAAYCRVSTELEEQDSSYEAQVEYYTSKISENENWKNAGIYADDGKSGTNTKKRADFNAMIQDALAGKIDMILTKSVSRFARNTVDSLVTIRKLKEKNVAVVFEKEGINTLEGTGEILITILSSLAQEESRNISENIRWGVVRKFEKGKVIVNCTKFMGYTKNEDGDLVIVPEEAEIVKLIFRLYLEGYSTGKIAKHLEEQGIKTATGQDKWHSTVIDKMLRNEKYMGDALLQKTYTVDFMTKKKVKNTGIVPQYYVEDDHEAIIPKELFYRVQEEMMRRASLCKAAVTRKKNQRSRYSSTYALTGMLICGKCGQEYRRVTWARNGKKKVVWRCSNRLTNGVKKCGESETLEENALNRAVMEAIHRITSDDMEFMEHFRQNIIHVIGSCGTAKESGEYEEKIKEKQEEMVALIAENAKTGSYTPEFDERYRTIAEEINALKEAQKTARNEKRMADSYEQRIQDIDHYLSTSTCQIPEFDNDLVRRLISTIKVESSEKLLIQFQSGIVMEQEIRYE

SEQ ID NO: 11052 - protein, 538 aa, synthetic construct
MAKKVTVIKAAKAQKHTQEERRLKVCGYARVSTGSQAQATSYTAQVEYYTEKIESNPLWEFAGVYADEGISGTNVKHRDEFQMMIADCEDGNIDLILTKSITRFARNTVECIQTIRKLKEIGVGIYFEKENINTLSEKSELFITILASVAQGESENISSNNRWAIQKRFQDGTYIISTPAYGYGKDEDGNLVIIESEAETVRWIYESYLNGMGVYVIAKALNQKGIPTIRGAEKWQDGVIQDILKNPIYEGDMLQQRTYTETRFPFVRRVNNGQRNQYLIKDSHPSIVTHEEAEAVRNLMAYRVDVLHMNKSDYTKRYLFSGRIICGECGRTFRRQKIYIGKPYEKIIWTCSGHVEDKESCCMKAIREDVLHRAFTDMWNKLYTNQGTILEPLLKGLTELVAARQDSEEIRQLDKEIKDISGQSQILNQVMRKGYMDSALFMESSSKLGWQLTECRRKKTLLTRKLRRTKEIVRTEQLIQLIAEQDGLREEFDEQLFKMTAEKIVVSKEHDITFCLYNGLKLTERGGGQDAVAHANRL

SEQ ID NO: 11053 - protein, 464 aa, synthetic construct
MARSVTVIPARSQKVQTGHKAVQEKKIRVAAYCRVSTDQEDQLHSFEAQVEYYTKYINEHENYEMAGIYADEGISGTNTKKREQFKKMIADCEGGKIDLVITKSISRFARNTQDCLAYSRKLKNLGIGIIFEKENINTLDSTGELLFTILSSLAQDESRNISENCKWGIRTKFKNGEMHLNTFKFLGYDKDENGKLVINKEQAKTVRRIYRDFLIGINPAQIAKELTEEKVPGCLGQTKWYPSTVTGILKQEKHMGDALLQKTYTADFLTKRQVRNNGEIAQVYVKDSHKGIIDKQTWNAVQEEFDRREKFMESHGTDRYSYGADCMPFCEKVFCGECKSLFTRHSWRSRGIVQWQCKNHRKDGKVACTNAYVDNADLEKGFVKAFNRLVTDRDKHMERWQQMKSDGTPLEKIRAGQMMEAVGNEPLTRFVPEIAQLVLCEVTVLGAKKYEFFFLEGSRVKVSV

SEQ ID NO: 11054 - protein, 557 aa, synthetic construct
MFIDDNRPKRVAAYCRVSTDKTDQANSLVSQQRYFSEYINRNPLWELYDIYVDDGISGTNTKKRAAFNHMIEDAVNGKFDLIITKEISRFARNIVDSITYTRELKKHGVGVLFLSDGIYTLDSDGELRLALISTIAQEESRKTSERVKWGQRRQMEKGVVFGKDMLGYDVRNGKLFINEEGAETVRKIFHKFLDEGKGVHRIAKELREEGVKTAARMKDWSYTNILRILRNEKYCGDLVQQKTYTPDYLTHQKKRNYGEVETVTIRDHHEPIISRERFEAVQRELKRRRPSESTIKAYANRYALSGKIICGECGAGFVRRQKKRKDGTFNVKWVCAESRKNGGSHQEKDGETAGCTTNSISDRDIKQILQRVVADTMNGREELVSKLLQTVESVIKTVSGNDDLYRIEKETEKCAEKKKRLLDMCLNGYIEAKDYRAACDALETQIAELQSALVKEKEKQKMIADKEKLIEDIKKFISNISCGAEWNDAFYRNIVDKIVVYKGRKMDIHLKFIPDRWQVQILAGVKEINAYESKMRASVCSAPISVSRPFNSGSGIE

SEQ ID NO: 11055 - protein, 530 aa, synthetic construct
MEQYLIYLRKSRSDLEAEAHGEGETLSRHEHTLLELAKRQHLNVTDIYREVVSGDTIAARPMMQRVLSEVEQGVWSGVLVMEVERLARGDTIDQGIIAQTFKFSGTKIITPIKTYDPDNEFDEEYFEFGLFMSRREYKIINRRLQRGRLASAKEGKWPSGLAPFGYRRVKLKNEKGCSLEPIEEQAAIVRMIFDLYTVGLQDEDGSARPLSLGSIATRLNDMHIPSPSGSQWARITIRGIIKNPTYIGMVRWGSRETKKKVVDGKVVSVRGPADPEKECIFKGIHPPLIPKETFELANDKLTRSENTSTHKEKVVRNPLAGLLVCSECGRQMMRMINPVHPDMPVVRCPRRGCPNCSSYLPIVEERVIQGLSEWMKGYELEWSSAAASSSVSSVGVREKALASAEAELRKLQQQLERTHDFLEQGIYDTDTFLSRSRMLSDKIAAAKDSVTRCSRELTEEKLRETSRRDIIPKVKNLLDVYPLLETAEEKNALLKEVLEKVVYQKLNEKRKKSPDGFTIEIYPRIPKSEK

SEQ ID NO: 11056 - protein, 523 aa, synthetic construct
MALLPKKTAKHPAKPKRGKKLEIEEPGVLYGRYSSHNQKDISVEQQFEKGYELAAEYGIRIIDTYADRAVSGRTDKRKDFQRMMSEAAKGKFRYVIAWKSNRMGRNMLEALINEARLQELGVRVLYVEEDFDDTAAGRFAARSMMNVNQFYSENMAEDIKRGLYDNASNCMVANGHLPYGYKRDETLHYVIDEPKAAVIREIFTRVAAGEPFVDIMNSLNARGIKTSYNRPWGRSSFQKILSNERYRGIYIYGDVRKEDGIPRIISDELFFKVQEVITTKKNPQGRHRVNGDYLLTGKLFCGKCKSPMVGISGTGRSGKLHYYYVCQKHRTEKTCDKKNVRRDEIELQVAQAIKDYALKDDVIEWIADSTVAYNERKEAESKVGVLEDQLAGTERGIKNIMSAIEQGVITETTKSRLVELESERATIKAKIAAARADIVTIIRDDIISGLEMFRDGDVHDKKYQARLFDTFLVAVYVYDDDLRLVFSFSGNKNTIQIPIESAVNAVENNAAECSFKLCSAPPE

SEQ ID NO: 11057 - protein, 518 aa, synthetic construct
MQYEEYLIYLRKSRSDASLEAMGVDVLERHEQILLDLAKRMNLSIGGIYREVVSGESISARPEMQRLLSEVEAGRWKGVVVMEVERLARGDTIDQGIVQRAFQYSGTQIVTPAKTYNPNNEFDEEYFEFGLFMSRREYKTIRRRMRAGVTAAVKEGKWPFNKAPYGWQRVKLEHARGWVLAPDPEEAPVVKLIFQLYTGPDRIGITNICRYLDNRGVKPRNGDTWTECSIMGILRNIVNDQRVGIGRRKIVKQVQNGSVSKVRPHSDYDFTAPGLQPRLIDHDVFLEAQTHLGKNSHKLPESYGIKNPLAGIVVCSCCGKKMMRRPASKTPGGAPYDVLKCNTRNCPTIGSALDLVEREVIQALSDWVAGYQLDPTLEVENKVPEKEQLLSSAISNHDMLLKQNGNLYDLLEQGVYTTEIFLERSHELQKRIKESEAHIEVLKKDLEYEKEKIANVENFIPSCKELLSCYWELSAQDRNKALKMLLESVEYTKTKRNKYRDKDNPTFTLNLKPRIPRI

SEQ ID NO: 11058 - protein, 526 aa, synthetic construct
MQYCLYLRKSRADSEAEALGEGETLARHEKALLDLAKKLNLNITAIYREIVSGETIAARPVMQQLLQEVEQGIWDGVLVMEVERLARGDTIDQGIVAQTFKFSDTKIITPIKTYNPNNEFDEEYFEFGLFMSRREYKTINRRLQRGRMASVKDGKYVANKAPYGYNRIRIENDKGWTLEINKEEADVVRLIFELYTVGEKQSDNTFNRLGTGFIAKRLNTMKVSPKRGKVWVVASIRDILINPVYIGMIRWNWRPQQKKMIDGQLHISRPRATDYMLCKGLHPPIISKETFDIAQDLMQHNPARPIGEKNTVKNSLSGIVVCGDCGRHMVRRPHTKYPDMLICSEPTCNNVGSQLRVVEERILQSLKEWLGEYKISWDITSPPVERISQVSIKKKALQKEQHELDTLNKQISKTHDLLEQGIYTTDVFLERSRALSLRMDEVKEHIAILDKELKTEITREDSAVNIIPKVEKLLEVYYDLPSPKAKNDMLKDVLEKVVYTKKERSKKGNLDNFDIAIYPKIPKYIT

SEQ ID NO: 11059 - protein, 505 aa, synthetic construct
MSQAVIYARYSSGHQREESIEGQIRECTDFALHNNLTVISHYIDRAISAKTDDRPEFQKMIADSSKKAFDTIIVYTLDRFARNRYDSAVYKAKLKRNGVKVLSAKENITSDPSGIILESVLEGMAEYYSVELAQKVRRGMTENALACRWASGRIPFGYTIDSEKHLQINESLVPIVQKAFEMYAAGSKISDIVKYINSCHVMTGMGNKFGRSSLDRMLRSETYIGVFRWADIRKENAVPAIISHDLFYRCQARHNIARHKKNARPSEIYLLAGKIRCGGCGNAMVGMSGKSRNGSLYHYYSCYSNRRRTTKCDTGHLRRDKLEQTIADHAASILKTPENLNIISEQAIKANTDVKNYHLESMIKQKKDIYKNLDNCMKAVDKGLVSVTLMERIKQYEAELESLEKDISLEKIKTKPFTLTKQHIAFFLTKFSDLEGTESGERIISTLVKEVLIKKEKDGDYLVTVRYNYAPTNELPSEESYSVGQSFGSQNVELVETSGIEPLTS

SEQ ID NO: 11060 - protein, 455 aa, synthetic construct
MKTVACYCRVSTEEQVKYGFSIQAQKDALTKYCKENNYKYDFYIDEGISASSMKKRKALQEMLEKSVAYDMILFTKLDRLSRNVLDANNINKILQDNNCTMKAIDEDDVDTSTADGMFMFNLKVSLAQREIGKTSERIKFVFKNKREKGEVTSGTTKYGYKIKDKKFVVEPEEAENIRNLYKYFISVNGDHKKTYSYFVKHFPGKGQDALFNYLRETAYIGKYKLYRKNVYLDNYIPPIMDKELFDEVQNLLPRVEKVFKKENIPSIFAGMLYCYYCKSRLVRKVDYRSKNKIINYFCDKQYKYKVGINEKQCQNSRVISDKTVEEYLINNLKELCKQYISKSTIKTKPKPQKNNIKINSLKNKLSKLKDLYLDDLISKEDYKQDYITINKEILKLEEEQKEEPQKDFTYLNELINKDIPDIYNTFNIEEKRKFWLKIIDKIYIKEGKIKEVTFL

SEQ ID NO: 11061 - protein, 530 aa, synthetic construct
MKIAAYCRVSTEKEAQIDSLEKQIEFFNEFTQKNGYELYKLYADEGISGKQIKNRKQFQQMMKDAKAKKFERVIVKDVSRFARNTVDLLQSIRELKSYGIQVDFLNNGEVMEGGSEFILTILGAMAQQESANMSKRVKFGKDITAKKGRVPNLVFGYDKIPDEKYTLKINEEEAKIVKEIFENYVYKGMGTTKIAWELNDRGIRTKKTKSKWVQTSIVRMLKNPIYTGRVTNKKSEITDFITGARKDLPEEDWIVVEKPEMRIISDELFNRAQDILAQRSNEFKLNNKREKTEYVFSTLIYCKHCGYSFRRIRRKYTEDGKEYIRWVCSGRNSMGVNHCPNTTVIDEEELLNAIKEYLKSIISNKKNFMKAVEKEFEKITALRKSNERSEESLLREIEKVTVKKQKYMEMFQNEVINMQELKQYTNPLNEDISRLERELKLITSEIKEKDVLEKELTKTIRTVDDILNNDTITNAMLKTIIDVIEVDSEGNVEVRLKLLNEIGSGPMVITNFDDINSTVTKSNNGTQRFK

SEQ ID NO: 11062 - protein, 475 aa, synthetic construct
MTAADEGITGTSTKKRTEFLRMIRQCKQKKIDLILTKSIQRFARNTLDCINYTRILRQLGIGVLFEKENINSLPPDSEFMITMYGAMAQSESESISGNIRRGRQMHAKVGTLKVPCYRLYGYEKDADGKFRVIPEQAEIVRELYKRYESGASLRNLQDWLEENQIKTVLGESKWTTTSIKSILTNEKYCGDVLLQKTFRTDVISKKVIKNIGQMAQYYMPDHHEAIVSREQYNAVKAEMARRSALRSPSKSAVTGRSCYTSKYALSDRLVCGECGTLYRRCTWMSRGRKYPVWRCTSRLNYGTKYCHESPTIKEEPLQAAILAAINSAMSNKPALLDLIKNAVSLELLPVQGQTMSLADIERRLAQLDEQFQSLLAEAIDAEDKDACNAQFAEILTEQTALKKQKEEILQGSADADRVCTRMKQAAQAVESAPATITEWNENAVRQTVERVTVLSADEVLVRIKGGAEIRQRLER

SEQ ID NO: 11063 - protein, 579 aa, synthetic construct
MKKKVIALIRTSTIQQEIDSQKEEVVSLILSDGYSIDEIEVVGEKGASAIKMDEAYLKNINKVFELIENEPIEAVYAWAIDRIGRNRTMLNSFRETLISKKIQLIIKNPELRLLNPDGSENGGIGLAFSLFAEMAVQEMEQKKARFMRAKKRNSEAGKANGGARNIPFGYKKDANGYFIIDEEEAAVVRLMFELHNSGKYSLNKLALELNERGYSHRGKKFTNYFLRMFIKSTVVLGYSEFKGVVRKYPQIISKEIWEKAQQVLVSNQVGTYKGTKHYYLGAKLLRCERCNHNFSTDGNQYRCKRNHHKVSLEQQGLESCDNNSTIKTAVFDGMLWSLTKEKHLNFLLKEKDITEGRNRKQIEVNLQKIAAHRVILVKADERRAKVIDDYYSDRITEAERERYLAKFTKDKAEAENGIANLENENIALQRQLDSLAELSYTSILKLTASLSSMNDEKEMYELVHQYIKMVTLNRTTIDGKGCSILTFYFYDGTTETLYYFSKNRKCAIYKRGKMDKRLRYAFTDSEGNSYLPYNADRLERDKDGKIIEPETSSIQVTDEAAKQTMIEELLRQREERMNE

SEQ ID NO: 11064 - protein, 465 aa, synthetic construct
MKGNAGDTIVKKIDLSPELVRVALYIRVSGEEQKIKGLSLEAQQERLEAYARERGWVIVGIYIDAAKTARKNIHKRTDFQRMMDSVKRDEVDILLFCRLDRWFRSVADYYKIMEVLEAHNCDWKTTDEEYDTTTANGRLYINVKLSIAQNEADIDGERIDVVFDSKIAHGTVVSGSAPFGFRVNEGKRLEVVPEDAAIVQDAFNYFETSISQRATVRYIRETYGVNWCDATFRRMLKEKLYTGVYDRGGRFNDHFCPAIISKQQFDRVQALLERNARSVPSGKVYIFTSILTCAECGHKLVGYKSSDYYYYRCNQHFQRGRCSHNHSAREDVVEKWLFEHLAEELECCQLEWEVAAAKKKASVARTDKAALKRKLTKLKELYVNDLIDIEDYKRDYQIYTAALKQIPEPSIEPPPDFAAVRRLLDNDFKTIYENLTREEKRTLWRSVIKEIRIDNDQNITGVVFG

SEQ ID NO: 11065 - protein, 464 aa, synthetic construct
MARSVTVIPARSQKVQTGHKAVQEKKIRVAAYCRVSTDQEDQLHSFEAQVEYYTKYINEHENYEMAGIYADEGISGTNTKKREQFKKMIADCEGGKIDLVITKSISRFARNTQDCLAYSRKLKNLGIGIIFEKENINTLDSTGELLFTILSSLAQDESRNISENCKWGIRTKFKNGEMHLNTFKFLGYDKDENGKLVINKEQAKTVRRIYRDFLIGINPAQIAKELTEEKVPGCLGQTKWYPSTVTGILKQEKHMGDALLQKTYTADFLTKRQVRNNGEIAQVYVKDSHKGIIDKQTWNAVQEEFDRRERFMESHGTDRYSYGADCMPFCEKVFCGECKSLFTRHSWRSRGIVQWQCKNHRKDGKVACMNAYVDNADLEKGFVKAFNRLVTDRDKHMERWQQMKSDGTPLEKIRAGQMMEAVENEPLTRFVPEIAQLVLCEVTVLGAKKYEFFFLEGSRVKVSV

SEQ ID NO: 11066 - protein, 600 aa, synthetic construct
MIDNCVRAVFYARVSTQEEEQLKALPKQVEECKDIIASKGWRLIDDYVDEGKSGTKKDGRKAYIKLLEDMQEDKFDIVVVKSQDRLQRNTFDWYKFTDLLNKNNKRLYLYMDNKFYEPSEDALITGIKAILAEEYSRDLSKKLNNSNKRRIEKARAGEEVSAMGNGQTYGYQIVNGKWVVDESQREVVRRMYELYTELHSVRKVRDALNEQGYRNQRGNLFTDENISRIVKNVMHKGWVILNRHHRDFDSKEIIEKSEEEWVIVKNDHEPIVSEELWDAVNDEIQSHRNRGNSGSRGKRGGTDPLSGKMICNCCGRVLWKHASQGSYKSKEGRKYTYKSYTQWYCSGKMGRGELACTDPATISGVKLQKYLVEMADMFLDYSTVEYSKNLLKKRTISWLEDLRDKLTTPTDNGKIKQDLKALEGKRGKLIDLYTDELISKEEFKSRSVDLDAEIEKKKTLLVPVEENPDIKAIEDTIANIDAEIEALFDDEAMVEEKKVQFIQEHIKKIYVSKNSDVFIILDNVAGAFLFIDKEDTRIEVVPVAEYNPEELSEEGITENDFVPFDRESMPQHHGPKHLHPSGQQTAPRCCFRDRFSCDQP

SEQ ID NO: 11067 - protein, 559 aa, synthetic construct
MSEARAYTPTVTRVKTVRVIPPTIQPLTDIPAFSARPRRVAAYARVSTSSEEQLTSYEAQVKHYTEYIKSKENSDNWQFVDVYTDKGITGVSTKKREGFNRMIQDALAGRIDLIITKSVSRFARNTVDTLTAIRKLKEYGVEVYFEEQNIYTLDGKGEVLLTIMSSIAQEESRNISENVTWGMRKRFADGKVTMPYGQFMGYRRGKDGTPEVVEAEADIVRTIFRRFLEGATPAMISRELNLAGVPCPSRKSLLSENEAEIAKARKKTSRWGTSTVENILANEKYKGDAILQKTYCTDYLLKTFVVNDGSVVPKYYAENSHPAIVSPEVFDLAQQELAWRRSLNGRYSGRSCFASRVVCGDCGAFYGSKVWHSTDEYRRTIWRCNNKYAGETKCATPHVTQEALEKAFVQVMQQVLSQKEGILTACREALDEAFDTAELDKAATRLQDQALGMAERVRQLVDENARVQRDQDEFKNDYEALLAEHARLSEKIQAIAEQKRNKAERRRRIEIFLRILEEQQECAGFDPGMFVALVDKVIVQHDGRMEFCFRNGMKCEHPQ

SEQ ID NO: 11068 - protein, 464 aa, synthetic construct
MNEKTMTLTRMEAPAQLPVRKRVAAYARVSMEKDAMLHSLAAQVSYYSERIQRNPEWEYAGVFADFGLTGTKETRPEFQRMLQECREGKIDLILVKSISRFARNTLALLNTVRELKGLGIGIYFEEQKLDTLSGDGEFMLTILASFAQEESRSVSENCKWRIRKKFEQGIPTGFGMYGYEVKNGSFAIKPEEAAVVRRIFQMYLDGMGSVKIMKLLTEEGVPAPLGGLWNASVVMEMLKNEKYAGDLLLQKFYTNNHVEKKRFHNRGELPQYFVGEDHEPIIDRETFDAVQREIAWRTAQRKANKAKRTATNTELSASAVEPSMSSSGNNSRETIPLTDRIYCGVCGKKYRYKVTRLGTPYAAPVWICSTFNYRGKAYCASKQIPEDILKELITSVLGTVHTEDSVHHIEMHPGNRVLFVFQDGHTEERFWKDHSRKDSWNEEKRQKAAEKTRIQHQKRREQEQ

SEQ ID NO: 11069 - protein, 478 aa, synthetic construct
MTNQAEKTSYIENVAAYIRVSTQEQKLHGISIEAQEEKLTEYADSHGMKIVKFYKDEGVSGRKLIRKRPALQAMIQDAEKGNFRRIIFIKLDRFFRSVAEYHECMKRLAAGGVIWTATEEKYDLSTPSGEAFVNMKLTMAQFEADQVGERIRMINEYKVKSGQPLYGSQALPFCYQVKQSGDGDRRKYIAKRDEIIMEDLIDHFCKNRSVRAALHYINAKYSRAFSYSTIKNALTSELICGTYRGNPAYCEGYMTPAAFETMQKYIQHNPRTSQREHSYIFGGLIRCPCCGNMLVGSPTVLNRIGKSGQKLSYKYYGYRCYRGNLEKKCDFRTMAFEHRLEAIMLSEVEAVMRGKQMYLLRLQNAPQRVAQHDLAELQQELARLNYAWQKGRIKTAADYDRQYDDLMTRIDAANAERQELAANPDYRKISRILSDGWKQIYISLDNDHKRAFWRAFIEEIQLEWTKGVKRIRDITFFT

SEQ ID NO: 11070 - protein, 520 aa, synthetic construct
MKNVTKINQVDFSIFKKTRVAAYCRVSTDSDEQELSLDTQKNHYESYIKANSEWEYAGIYYDDGVSGTKTAKRDGLLRLMEDCEKGLIDLVITKSISRFSRNTTDCLALVRKLLNYEVYVIFEKENINTGSMESELMLAVLASMAESESRSISENEKWSIKKRFQNGTYVISYPPYGYANVDGEMVIIPEQAEVVKEIFAGCLAGKSTNIIAKELNEKGVPTKKGAKWTGGTINGILTNEKYIGDALFQKTITDANFKRKRNYGEEEQYYCENHHEPIIDKDTFEKAKESIRQRGLEKGNCSEDTAKYQNRYAMSGKIKCGECGRSFKRRYHYTSHGKSYNAWCCGGHLEDSKSCSMKFIRDDDLKRAFLTMMNKLVFGNDLVLKPLLISIATNSSKKNANSVEYIEKEMKSNEEQRKQLNTLLTNGYLERPVFAEAHNKLIMEYEHLEAKRDLLFRMDDAGYTMEQALKELVDFLNDAKPFTEWEESLFERFIENVKVLSRDKVEFEFKCGLKLKERID

SEQ ID NO: 11071 - protein, 513 aa, synthetic construct
MKKCVIYARYSSERQTEQSIEGQLRVCYEFAKNNELIVVHEYIDRAMTGTNDLRKEFQQMLSDSERTNEWDICLVYALDRFGRNSIEQAINKYRLQKTGKIVISATQRTSRNIDGSQNLDGIILENMYVGMAEYYSAELSQKVKRGLNESRIKGQFTGGVPIFGYEAYGTKAEGRRVRIKEDEAVIVRRMFEEYASGRLIKDILDDLNNEGVLCHGKPFTRTTFYNLLKNEKYIGIVRFGDQVFDNIYPPIVNEQVFDICRAKAQANKIGKHTDATYLLKNKVHCGYCGRPVSSDTGTSKNGNVMRYYKCIGRKVDKKCDNVPIRKDLLEQLVIDSTYQVLATPDLIEKIADLILSAHEKRMADNSIINILESQLQDISTSITNLIACMEKGIVSSSTAKRLEELENQKIALETKISLEKVKESTLIQKRDIVNYLKNAIKKTPRLMIELIIKDVILYKDRIEIHFNYTDLIRPDAEPRQALLFYKFTKEVVIDYHRMNCQPIKKNIEIKLYI

SEQ ID NO: 11072 - protein, 517 aa, synthetic construct
MPRKKKLQEVGGLRLVAYYRYSGGSGQTEQSIEGQRRDCEAYAKLHGMTIQHEYIDRHISGKTDDRASFQQMIRDSDKGAFDMVICWKTDRFARNRYDSAVYKKRLRDNGVEIIYAAESNISGAEGIIIEGLMESLAEYYSAELAEKMRRGMRESALKCQAINRCRPLGFTTDAGKKFIIDERTAPAVRFIFEHYAAGESAAYIVEQLNEKGYRTSQGNEFNKSSINRIIQNEMYRGVYISKAYDVRIEGGVPAIVDDELWRRAQAMAKLNKQKRAKYSSKADYFLSGKLYCGECGCLMKGISGHSSTNGEVYRYYACSNPKCKKHNIPKEELEGKVIQAIIDNLLQPEAMEALAEAMVAVQEADAGKPNAEREAIQQELADVRRRSKNILDAIENGTANPHLTARLDELTERENTLRFQLSTLTDEKPLRFTKEEYLFLLEQFLIDPAERNEDYGRRVVHTFVTSMEVSDSKLLIYFNISEENADKNKNASPSELQKESSTVKRLVRVARIELTAS

SEQ ID NO: 11073 - protein, 525 aa, synthetic construct
MAKVTIIPSKKNPITLTPINEIIKKKVAAYARVSTDSDEQFTSFDSQCKVYEDYIKSKPDWEFVKVYADDGISGTNTKNRVQFNQMIEDALAGKIDLIVTKSISRFARNTLDTISYTRKLKANGIEVYFEKENLWTFDDKAEFLLAIMSSIAQEESRSISQNVTMGKRWKMQEGKVQFAYKNFLGYKKEDGQIKIDDDQAVIVKLIYKMFLVDGKTCSYIANYLNSNNVLTPARRHNWSKQNVLSILKNEKYKGDAILQKSYIKDFLEHKAVKNNGELPKYYVENSHPAIIEKDMWEMVQAELKRRESIGASYSSSNVFSSKLICGDCGAFYGKKVWHSNDAWRKEIFQCNKKFVKGKTRCKTPSFSEKVIKDKFIKAYNLMMVNKDAVINDAKDVINKLTDTTTLDAQISKYENEMEIVSELVKKLVKDNSIHLQDQNDYETKYQELVNRHNKAKELYEKLNEEKKYKQAKAITLKSYLSTLENAETEILEWDDALWMTVLDKAIVNRDETITFKFINGKEITL

SEQ ID NO: 11074 - protein, 431 aa, synthetic construct
MMKKIVKDITPELRANDTIKRVAVYARVSCEKDTMVHSLKAQIDYYRKFIMKNPGWKFAGIYADEGKTGTKEAREQFQALLTECRNGNVDMIITKSISRFARNTVTLLSITRELKELGINVYFEDQKMDSMSSDGQLMLTLMAGIAQAESKDCSDAVKWRIRHGYEQGRASSFKILGYRWDDGNVVMVPEEAPLVKRIFDLYLSGKGANAISKILNSDGVTAAGITKWAPTTIRNVLMNEKYYGDLLLQKSFVEDHINKRKVINNGELPQYFIEDDHEAIIDRQAMSDVKNEIAIRRARFYHGQGKESCLTSKIKCPYCHANYHRKKINGISKWSCATSNRKGKSMCPKSKDIREDVLLAILAHQLGYKDFDEKLFAEQVDYIECFDDHIITHFYDGSIKNSKWSNPSRKDSWTDDMKEKARQRGLNQYGK

SEQ ID NO: 11075 - protein, 597 aa, synthetic construct
MANKVVKVIPARPQGIIIDQAGVIKRKRVAAYARVSTEKDEQTNSYEAQVNYYTNYIQANPEWVFVGIYSDAGITGTSTKKREGFKRMIDDAMNGKIDLILTKSVSRFARNTVDSLVNVRKLREKGVEVYFEKENIYTLDTKGELLLTILSSLAESESVSISQNTTWGQRKRFADGKVSFAYSNFLGYDMGQDGKLHINEEQAKVVKRIYEEYLLGYTPSYIAKRLTADNIPTPQRKKVWYQGVIDSILTNEKYIGDSILQKTFSTDVLTKKRKKNDGELPQYYIENNHPAIITDEIFEMVKEEMARRKSAGLMTNVSCFSGRILCGDCGGYFGRKVWHSNQPNRTIVWQCNKKFSNPDACGTTSIKEKAIEEAFVRAFNEMFSRKDEIIENYKLCIDVICDDSKFQERKNELDKALEEKTIVIKDFLLKCSKTEENIEESNARYDVLIKEFEALNVERQKCLDMISSLAAKRVKINSFLNILNSTEGVINSFNEVLFQKSVNHMVINHDLTIDVIWRDESKTTTYIERGVKEVKKSAPRIKPEKVLSDHTCLCCGKQLYLTPGKVQRIFCNKKCGETYRRAKAKEARLENNTISHA

SEQ ID NO: 11076 - protein, 628 aa, synthetic construct
MKAAFLIRCSTKNQDLNRQTRDLTRLAKSMGYEYDLENLVYGEKITGKDDVTKKNRDSIDRLLRAAKEQRFDVVLVSEVSRMSRDPASGRIYVRLLINMNIPVYFKDIDLWTINPETGKKVRDAELVIGAAFDAAWKYLKSMKTQIASARRNELDNNRISIGQPYFGYKRYEGTDKSKKNQIVVNEEEAEVVQAVYNEYLKEGATLKSTALAITDKYGEKLNRKFSLGTIEHILTYESYATGIKKVNLKDPDTDEVEVFDVSTPIIIDKELYEAAANKRKKNRVKDEPYPNQQVYLLSKLIKCPDCGYTLTPRRKAGEFGQTYRLVNGKPAVSWLCMSGINNITDCTNRTSIANEKLEPIIWELVKKELIGYANMNDEKREEQIRECEEKIEYQNYSIQNFTKEIDKLKKRLSTAYQFSINAAEMAGDDEDMRTMAMEEFNRTAKGVRQEMKNFEKSIEQAKGELEKLRDLKTFYSQPTLPKDYLEQIEGNFTEKRNLVKQLITKIVPYRITTFKKKERESGVKTCNKMITVKNGAVLLEVYTIGGVYNVFYNANSKFQVKTAYYVHGEYATFQNGIRKYPAYDEGEYFVISNANMVMETDDIDEVVTVNEFVDIAIANNWVIEYQYQ

SEQ ID NO: 11077 - protein, 453 aa, synthetic construct
MECVAYMRVSTEKQAVEGNGLDSQKRDIENYCRKNELVITDWYIDDGYTGANMDRPGLQRLVNDCSRKRVSCVVAFKLDRLSRNMIDGIYLIEKVFQKCNVTFKCVHDSVNYDSPMEQAYTQMMAVFAQLDKNTMMLRMRGGMLERIKQGYWMGGGNLPYCYSYSKEQGILIPIPERAEQARKALELFISGYSDVKIKEICGFKSELVTRNILTGIVNIGMIPYKGKIYQGRHEPIFDKGRFNLAQELRKTRAKSRTTCQTEPNLLTGLCYCGVCGCAMRYQKWTNGEHKIYCMSRNKSMSYLPNYNANCNNSLEWADDIEKQVEKEILKISLNLSSYKPKEKATKLEIMQSQLDKEQTKLKRLYNLYADGNDTVLEMIKESESAVKTMKTNVLSESKSTANTQKKEFVYENIKKLADVWDNIDKKKKNMILKTIIDKIVIVNGNIEIQLKNF

SEQ ID NO: 11078 - protein, 464 aa, synthetic construct
MARSVTVIPARSQKVRTGHKAVQEKKIRVAAYCRVSTDQEDQLHSFEAQVEYYTKYINEHENYEMAGIYADEGISGTNTKKREQFKKMIADCEGGKIDLVITKSISRFARNTQDCLAYSRKLKNLGIGIIFEKENINTLDSTGELLFTILSSLAQDESRNISENCKWGIRTKFKNGEMHLNTFKFLGYDKDENGKLVINKEQAKTVRRIYRDFLIGINPAQIAKELTEEKVPGCLGQTKWYPSTVTGILKQEKHMGDALLQKTYTADFLTKRQVRNNGEIAQVYVKDSHKGIIDKQTWNAVQEEFDRREKFMESHGTDRYSYGADCMPFCEKVFCGECKSLFTRHSWRSRGIVQWQCKNHRKDGKVACMNAYVDNADLEKGFVKAFNRLVTDRDKHMERWQQMKSDGTPLEKIRAGQMMEAVGNEPLTRFVPEIAQLVLCEVTVLGAKKYEFFFLEGSRVKVSV

SEQ ID NO: 11079 - protein, 502 aa, synthetic construct
MEIQIREGNSRQKRKLKVCAYCRVSTDADEQENSLENQIRHYEEAITSNPDYEYAGVYSDFAISGFKEKRPGLQKMLADVRKGKIDLILTKSVSRFARNTSIVLETTRKLKELNVGVFFELQNINTLSGEGELMLTILAAFAQAESESGSVGAKMVYQRKYEAGIPVQYLERSFGFKKDERGVYIADEEEAVWVRKIYEMAADGYTPASIKRYLNENGVKTVGGAEWIDSTVFRLIENEIYKGDYIMHKHFVNEERKLVRNRGEVDAWYIEDDHEAIVSPELWQKAQDALEAKRDYLAESSVIEEFTEENYPYMNKIFCARCGHPLYKRIYSNGNRLNWGCSGTKRYGKSFCEGINIPDGVLRGAWNFDENMYIGEKPTDKGKKEFTYLKEASWKRRHKKKEPESIPENTETEYPYREKIFCGLCGSRLVRHVNTKNHKVIWVCNGRKRKGKDFCDGTRVPDTIIKGWGEIKKDIYIQRKDDKNGKKRYSYTSKKPKGADRA

SEQ ID NO: 11080 - protein, 536 aa, synthetic construct
MFKNTKIAVYCRVSSDEQAERGTIDNQITFAQQYADLHHLDIYDVYKDDGITGTIPLQDRPEGHRLLQDAADERFTLVVFYKMDRLGRSTRVILNAVEALSQYGVGVQSMSEPFDTATPSGRFMLTMFAGVAELDRANILDRMYQGTLRHARLGKWCGGPAPFGYRLQDGYLVISEEPMPGQQLSEADIIRMLYSKTIEGWSALRLAQHLNALGVPNKYTLRGNVAAGSGKWHQSKILYILHNTLYYGERSFGKLSKNNNKNIIPQQVPAIVSKETWDAAQAAVEQHSIMPKFVKRRRYLLRGLIRCGICGHTYVGTYYKRKAGNSIYYVCNAKNTRGVTPEPCKGQTLRGEWIESLVWEDCLRYIKQPDVIAVDEDCRYLQSAGDIKKEIDAATAQLKQLDQERQTVIGLCRQGIITAADLDGQLSEITAKQNTLQQTLEGLNSQSIVTKEDAEKRIKEIADILDGFRQQLQSGGELSFDAKQGIIRTLVKQIIVHTELQPGAERDIPTVRVCIDYNFTLLSAKTAMLDPYRQGF

SEQ ID NO: 11081 - protein, 516 aa, synthetic construct
MQKTDKPSVKAVIYARYSSDRQREESIEGQLRVCEDYARRNNITIVHTYADRAMTGRSDQRPEFQMMIRDAATMSFDIVLVYKLNRFARNRYDSARYKHKLKQYGVRVVSAMENIADDPSGILLESLIEGMAEYYSAELAENVTRGMTENALEGKWAGGIVPLGYKLDEKHHLVIDEPKAAIVRQIYQLALEGHNQKYIIDELNKHHYTNSAGRPFSYNTLRVILKNERYTGTFIWRDIRKENAIPVIIDKMTFEAVQKHMQFRKKNHIRSCSKDFHLTGKLFCGRCSNKMVGVSGTSKQGVLYYYYACTSHLKKKCPSKNIRQDALENLICKITTQILSKPEAIKAIAKQAMKMQKDKKESLEIQSLQNQIADINKKLKNCIQAVENGLISETMANHIKNYENRLQGLKDEVSRQKLLEGSIQLTEQHIEFFFYSISRKLKTADKYKSILLSSLVRCVIVHENYIEIQFNYKNELPILQNPVKVESSYLNQMVTQGGFEPTTYRLEGGCSIQLSY

SEQ ID NO: 11082 - protein, 454 aa, synthetic construct
MECVAYMRVSTEKQAEEGNGLESQKRDIELYCRKNELIISDWYIDDGYTGANMNRPELQRLINDCGRKRVKCVVAFKLDRLSRSMVDGIYMIERVFQPNNVQFKCVHDSISYDSPMEQAYTQMMAVFAQLDKNTMMLRMRGGMLERVKQGYWMGGGNTPYCYTYSKEKGILIPIPERAEQANKAIDLFIAGNSDVAIQRILGYTSELVVRSILTGVVNIGMIPYKGNIYQGLHEPIFDKDKFEMAQQIRKSRRSKKSYCQNLTPNMLTGLCYCGVCGCKMRYQKWTNGVRKIYCCSRNKDLYYLPNFNNDCDNSIEWADNIENIVESEMLKISVNLSKYNPKEKENKIDIMQSQLDKEKSKLKRLYELYADGNDTVLDMIKDQESKVKNLDDSIKEEQKSGDNNTKKQFVYENIKKLADVWDDIDKPAKNKILKTIIDKIIIVNGNVEIQLKNF

SEQ ID NO: 11083 - protein, 541 aa, synthetic construct
MRIAIYSRKSKFTGKGESIGNQVEMCRDYIATNYNGEEHSIQVFEDEGFSGKNLDRPQFKKMIEIENVIPFDLIVVYRLDRISRNVGDFASLIEKLNKKNTSFVCVKEHFDTGNSMGRAMMNIAAVFAQLERETIAERIKDNMYLLAKEGHWLGGTTPLGYKSIEVTNGKRTHFELIIDESQIDLVNIIFSKYKQLGSINGVETYLFVNGYKTQKNNYWHKSNVKRILTNPIYCIADIDSLNYFTELGCNVCFTLDDCNGKKGIYPYNRFSGQKREIQSYDRWIITISEHQGILAGKEWVAIQQQLKANSKDGFGGKANERRSTSNTSLLSGVLFCSCGAYMRPKKYPSGNTFYICENKMDKKITECNNSNINADELDKIILNELFSFDIKDGVVDSQIQNLKEQVANIDNDLQKQIGRLKKQIETNKNTVNKFMNIVALSIENDTPEQVVEVYNQKINELLNQNKITQKRIDELQDTNIVQAKMNDKLNSLTDAMVYLKENFDKLTIVEKRGFVKKIVDRIVWDGNNINIFIKGISELSE

SEQ ID NO: 11084 - protein, 405 aa, synthetic construct
MRAAFLIRCSTKKQDYERQVNDLTRLAKKFGYTSSDNMIFGEHITGKDDASKRDRQSIQRLKDAAINKEFDVVLVSEVSRMSRDPMSGRLYVRQLINMDIPVYFRDIDTWTIDPVTGKKVRDAETIIGAAFDAAWKYIKSMKTQIASGRRDELDNNQMSIGQPFFGYKRYGGRDKGKKNSWVINDDAAKVVVDVFEEYVKDGATLKSTALAITAKYGEQFNKKFSIGTIEHILTFEPYCTGIKVVSLTDPDTEDVDEFEVEIPTIITRAMFDKATTKRATNRTARTPYPKQATYILSKLLKCPICEHSLTPQKRGGDKGDKYRLMNGKVAIRWSCMSGINNATDCSSRITISNEKLEAIIWGLVKQELIGFANLNDEDRVAKVEELTDKITNLEMNIANFTVSNQ

SEQ ID NO: 11085 - protein, 526 aa, synthetic construct
MPKVTMIPATVNSLTHLPKASVQKRRVAGYARVSTDSDEQFTSYEAQVDYYTRYIQSKPEWDFVRVYTDEGISGTNTKRREGFKEMIADALAGKIDLIVTKSVSRFARNTVDSLVTIRKLKENGVECYFEKEGIYTFDGKGELLITIMSSLAQEESRSISENITWGQRKSFADGKIHLAYKHFLGYKKGEDGRPAIVEEEAVVVRLIYRLFLDGKTQAGICRYLEDLEIPSPSGKAKWSKTTVTSILTNEKYKGDALLQKSFTVDFLQKKTKLNEGEVPQYYVEGSHPAIIEPDEWNHVQAEFARRKALGNAYSGKSVLSAKLVCEDCGGFFGSKVWHSTDRYRRTVWQCNNKFKGGERCLTPTVDTETVQQLFIKAYNQMMGNRKQIIEDCELMRKKLTDFKSLDADIERHLEETQIVAELVKAAVKDNAVTAQSQEAYLKKYESLTKRYETAAAELERLQNLRTLRSQKDKAVALYIRTLKKQPTVLSEWNDTLWTVMVEKAIVHRNSEITFAFYNGTKVKVRQ

SEQ ID NO: 11086 - protein, 519 aa, synthetic construct
MKKVTKIDKIQPSQTSKKKLRVAAYCRVSTDSDAQLESLDTQKEHYKNYITSRDDWAFAGLYFDEGITGTKADKRPMLLQLIEDCKAKKIDFVITKSISRLSRNTTDCLEIVRTLLSLDIPIYFEKENINTGSMESELFLSILSSMAEGESASISENNKWSIKKRFLDGTYKLGYVPYGYRWKDGEILVDPAQAKIVKRIFRELLSGKGTEAIAKELNQEQVPTKKGGRWTSTSIRDIIRNEKYTGDCIFQKTYTDNNFNRHKNDGHLDQYYVPDHHEAIISHEDFEAAAALIEQRANEKGIKKGNAKYQQRYAFSSKIICSECGNTFRRRIHSSTYGKYAAWVCNTHLEDTSSCSMLYIRDDDLKLAFITMINKLVYCHKLILKPYLKALHENTGDASLLNIQQLETLLEQNTEQRETLHKLMGQGYIDQILFTQENNALLSQANDYRNEIEALNRSQSLDATKVYETERLLHFCERGEMQMEYSEELFELFVDHIEVYSRQKIGFALHCGLILKEMI

SEQ ID NO: 11087 - protein, 453 aa, synthetic construct
MIKGACYVRVSTDNQLENYSIEEQTDRLKAYCKAKDIQIVKIYTDGGYSGGNINRPALQQMLQDIGKGLIDSVIVYKLDRLSRSQKDTLMLIEDCFLAKNVDFVSVNENFDTSTPFGRAMIGILSVFAQLEKDQITERFTMGRIGRAKNGYFHGGGNAPTGYDYIDGELIINDYEALQVKDLYNRFLKGYSIHNCWQYMHQKYGGWSNEVSVRNVLKNELYIGKVKFKGVAYQGNHQPIISEEIFRQVQDLFNSSRRTSDTFKRSPFKANTLLSSLVYCGKCGARFHGEHGNYSCYSRTKGDKKYIVDPNCKNKKWKIEELNKLVLDYITRLDFSKLQNSHPAPVPVTDYSLRLTEIDKQIEKLIDLYQVSGIPLESIQKKMDALTKEKEALLNVSKPKNVPITTLTEMITARDTLMSLADTGSLDEKRACLTMIIDRITIDDDNVNIKLKHL

SEQ ID NO: 11088 - protein, 463 aa, synthetic construct
MTTKIERCAIYIRVSTTEQMMHGKSLEAQKEYLTNYAREHNMAVVGIYADEGKTARKELKKRKAIHSLLQDVEAGKIDVIIFWRIDRWFRNLSDFYKVQDILDSHNVRWISTSEPGINMETRDGRLQLNVVLSIGQNEVDTTSERIKFVNESSIRSGKLIFGDANMGYGYKSGIVDGQKRMVKDPDREHVVDAFYKYFFKHQNKCATLRYIQETYDPDFSFGIMRTLLSSEFYKGTYRGFPYCPAYLTEDEWNKLQKIQKRNVKATPSGRIYLFAGLIRCPVCGQLLCGTGCSSIINRKTGAKRTYCYYRCNRAMIDHICSYRHRLSQNLVENYLLDNLEDEYKNYKVKCEKIEKEKEKQKKKQSPEKLRKELDRLNFLFQKGRIEWDYYNEEYSRVESELNDLQNSLPEPAPNYSYLEELLNTDFRTMYDQLSQENRRAFWRSIIQEIHVNEDHAITSVDFL

SEQ ID NO: 11089 - protein, 581 aa, synthetic construct
MARKRTNLIGNTPSVRETKVAIYIRVSTIHQVDKDSIPMQKKDLIAYCQLILGTDNYEIFEDAGYSGKNTDRPAFQNMMGRIRKGEFTHVLVWKIDRVSRNLLDFAEMYEELRSLRVTFVSKNEQFDTSTAIGEAMLKIILVFAELERNMTSERVTATMISRANSGQWNGGRIPFGYSYDPKEKIFSIREDEASICRELKDLYLLNRSLAYVSRALNEKGYKTRAGVSWSPHSVWIIASSPFYAGIYRYNRYKGVESRTINPEEEWVMIQNHHPAIFTLEEHQAMRSIMKSNQRNMDNLPGRVHLSTKTHIFQGIMYCDKCGSKMVSTPGRLHVDGYRTSNYGCPLRRNTKKCNNPTVNDIVIGEFVINYILNMLNAKKTFSTINTPDELNAALLSGSVFSEVSSVEENGLNSFFNLLSRYGSDRSYIFSVKNPRKKKAAVDPELSKLRKEKEKQERALQRLQDLYLYSETSMSEKDFIIRKSEISSHLDNINRQLGLMTQDQASFLSDEEFIKQASHLLIQKELKNKKYIYFKKLVSTVDPDILKAYMETILDSIYTADGKITAITFKNGLTHRFIYKDK

SEQ ID NO: 11090 - protein, 508 aa, synthetic construct
MINVVGYARYSSDNQREESIVAQERAIREFCQKNNYNLIKLYKDEAISGTSIKDRTEFLELIEDSKKKEFQCVVVHKFDRFARNRYDHAIYEKKLNDNGVKLLSVLEQLNDSPESVILKSVLTGMNEYYSLNLSREVKKGLNENALNCIHNGGIPPLGYNLDEDRRYIINEIEAETVRIIYKLYIEGIGYASIAEQLNQMGRLNKLGKPFRKTSIRDILLNEKYTGIFVYGKKDGHGKLTGNEVKIEGGIPQIISKEDFEKIQIKMKNRKTGSRATAHETYYLTGVCTCGECGGRYSGGYRSKQRDGSITYGYTCINRKTKVNDCRNKPIRKEILEEFVFKTIKKEIFTEKRIKSIASKVEKSVNEKILKKAQEVKKLESEIQKIKDKIDRLLEIFLDNKISKEVFEKKNNELERELFLLTQEKNKISASKKINRESIEAFIRNFKANFNKENIKKAIIETFVKEIKVYETYVEIVLRLFPMYIDRNGGDDESRTRVRNYNDYKPLQV

SEQ ID NO: 11091 - protein, 504 aa, synthetic construct
MKRIAIYSRKSKETDTGESIKNQINICKEYFLRQYDQCTFEIFEDEGFSGGNTNRPAFKRMMQLADYKQFDIIAAYKIDRISRNTLDFLTMFEKLKLNDIELISVTEGFDANTPAGRMMMSMISSIAEMERANIAQRVKDNMFELAKLGRWSGGTPPTGYKSVKITDGGKSIVYLEIIEEYIPIIKNIFHMAGKGYTSYQIANEMNMSSKTINNILKNPTYMISDEKGSLFLKSIGYNIFGIENGNGYLAYNRRPRKNGKKLTKSSNMIASVSLHKGIVTSNEWIEAYIKVNSRFTEAKPRVSQLTFLSHLVKCTCGSGMFVSPGRRRKDGTRTLYFRCSNKKNGGNCNSGFLKILDVEESLLNTFYDISLDKSLINNYIKVNDQFKYDTEINILKKTIENNTKSINSLTEKLILIEGAAINIISEKINLLHFENEDLNKQLFDLERKKLLSLNTSNIDSIYDSIIFILSKWDKLNITDKQIYMQKIIDCIVWDGADGLNINLK

SEQ ID NO: 11092 - protein, 451 aa, synthetic construct
MKKVLKIGGYVRVSHEEQKKFGYSTKAQIEEIEKWCNENNHNLIDLYIDEGYSASNMKRPNLQRMINDLPKLDAILFTRIDRLSRNVLEANKLLQLLKQNNTDMIAIKEENVDTTTSNGMFLFNLKLSLAQHELDRGSERIKAVFEYKVREGEAVTGSLPFGYKIGEKDGKKVIIKDKETEAIVNDIFDHFSTYRSIRSTCIYINKKYNLTKDYRTYARILKRDLYTGKYKDNYNYAPAYITEKEYLLNQEYIKGNVKVRKNKNVYLFVGMIKCPECKSSFVGKYYDGKKRYYSYVCGKHKSTKLCSFKKGITEEKIEKFLIENVEDLLNKHIASVRTDVEILPKPEKEKLKKQIKDIKTELDNLNYMFRKGRISASDYDIEYDDLEKELKKIEALTTSNKEIKDINKFFVNDWKTIYNNLEKEKKRALWNSVIKNITIDEDLNITLVFRS

SEQ ID NO: 11093 - protein, 546 aa, synthetic construct
MEETIKAVGYARFSSSMQREESITAQKRYMMMYAKRNNMEVIDWYCDEAKSAKTVNRPAFQKMINDAKNNPEFKAVLVHKTDRFSRNLSDSIQYKKLLEEYGVQVIFVNERFENNPESHLLYHIMGSVNQFYNENLAREVMKGLKENAYQCKFTGGRPPLGYDVDKDLKLVINEKEAEAVRLIFEMSAEGYGYGETIDKLNILGYKTKKGLPFVKNSLYEILRNEKYKGTYIFNRSCSANSLNKRNNHRRKPEEEIIRIENGCPAIVSSGLWHRANAVKKATRSSYTNAKNTYLLTGLIHCGECGGKFHGNVRYNKNNTNLVYRCSSKKNKRKCESKEIRCEYLDSFVIDKFVEFFFNDDNIKVITKQLNEQYNKSCISDLEYNEAKSTLKILEKSRNNLVEAIAKTGINDIMSDKIKEYEEQIKKTAEFIQKYEKQKIDRVITEDEIREQINHLKDYFYNPKNLIRTKYVLSQYIDKIDISNENVQVQFKVSMSPSDNTDGDCFCVHTEMIKRKYLFDYVCEKVDFEQWNIEKLNKSESEHRKGA

SEQ ID NO: 11094 - protein, 503 aa, synthetic construct
MLRAALYARFSSENQREESILAQFRDSTEYCKKHNYAIVAKYADEAKSGTTTIGREQYKLMLKDAQKGKFDIVVFHKIDRNARNELDYYITKHKLEEAGVKYAYSRQDIDSTSPEGQMMESMLVGMAAYYSRNLSNEIKKGLRENAIQGKCTGGRPPYGFSIDANKKLIINENEAPAVRVIFDWYSAGVHYGVIRKRLFNAGYRNRAGKEFTIASIYEILRNRKYVGDLYLGKTLFRKGKRNTHQTSANVQYFENVIPAIVSREIFEEVQVKLDRNKRRSGAGKAKAIYALSGLIYCGKCGSAMVAHSTKNSRGIKNYYYRCPKGRLIGEEKCPQKFINRDDIESTVYQLIRKLFTAPDAHEQIKRIIAKNNMGVKVPDYTDRVKRLKKQESDASKRLDKLYDLYMADQEDEFTSAKMAQIKEEILRLRAQIQETEDRQAIAQSTSFDIDKIIDTFQKQLKQKQSPEFIKTLFELAVKNVTVYPDKIKVVLLVTQERFELPTP

SEQ ID NO: 11095 - protein, 463 aa, synthetic construct
MTNKIERCAIYIRVSTTEQMMHGKSLEAQKEYLTNYAREHNMAVVGVYADEGKTARKEFKKRKAIHSLLRDVEAGKIDVIIFWRIDRWFRNLSDFYKVQDILDNHNVRWISTSEPGINMETRDGRLQLNVVLSIGQNEVDTTSERIKFVNEASIRSGKLIFGDVNMGYGYKSGIVDGQKRMIKDPDREHVVDAFYKYFFKHQNKCATLRYIQETYDPDFSFGIMRTLLSSEFYKGTYRGFPYCPAYLSEDEWSRLQKIQKRNVKATPSGRIYLFAGLIRCPVCGQLLCGTGCSSIINRKTGAKRTYCYYRCNRAMIDHICSYRHRLSQNLVENYLLDNLEDEYKNYKVKCEKIEKEKEKQKKKQSPEKLRKELDRLNFLFQKGRIEWDYYNEEYSRVESELNDLQNSLPEPAPNYSYLEELLNTDFRTMYDQLSQENRRAFWRSIIQEIHVNEDHAITSVDFL

SEQ ID NO: 11096 - protein, 581 aa, synthetic construct
MARKRTNLIGNTPSVRETKVAIYIRVSTIHQVDKDSIPMQKKDLIAYCQLILGTDNYEIFEDAGYSGKNTDRPAFQNMMGRIRKGEFTHVLVWKIDRVSRNLLDFAEMYEELRSLRVTFVSKNEQFDTSTAIGEAMLKIILVFAELERNMTSERVTATMISRANSGQWNGGRIPFGYSYDPKEKVFSIREDEASICRELKDLYLLNRSLVYVSRALNEKGYKTRAGANWSPHSVWIIASSPFYAGIYRYNRYKGVENRTINPEKEWVMIQNHHPAIFTLEEHHTMQSLLKSNQRNMDNLPGRIHTSEKTHIFQGLMYCDKCGSKMVSTPGRLHVDGYRASNYSCPLRRNTKKCNNPTINDIIVGEFVINYILNMLNAKKTFSTINTPDELNTALLSGSVFSEVSSIEENGLNSFFNLLSRYGSDRSYVFSVKSPRRKKAAVNPELSRLRKEKEKQERALQRLQDLYLYSETSMPEKDFIIRQSEISSHLNNINRQLGLMTQDQASFLSDEEFIKQASHLLIQKELKNKKYIYFKKLVSTVDPDILKAYMETILDSIYTADGKITAITFKNGLTHRFIYKDK

SEQ ID NO: 11097 - protein, 434 aa, synthetic construct
MKKTIVNIAPAVAETPRTKRVAAYARVSCGKDTMLHSLAAQIDYYRDYIMMNPEWWFAGVYADESKTGTKDNREQFQLLLTECRSGNIDMVITKSISRFARNTVTLLETVRELKSLGIDVFFEEQNIYTMSAEGEVMLTLLASFAQAESLSCSDNCKWRIRKGFEEGRASTCTMLGYRLVNGEITLIEEEAEIAKRIFDLYLAGYGLQKIANTLNEEGMYSIFGNEWHPTTVRKVLTNEKYCGDLLLQKVYRENHLTKRKCHNTGELPQYFVEDDHPAVVTRQIFMAVQDELKRRAKEKTQPVGSKSSFTGKIRCSCCGKNYRRKTTPYNIVWCCSTYNSKGKKYCPDSKVIPEETLKRVAAEILKTDGFSDEAFETQICTIEAHPGNLLRFIFTDDSTTDYVWKDRSRSESWTDEMKAAAGRKTKERNANHGK

SEQ ID NO: 11098 - protein, 548 aa, synthetic construct
MANKTVKKIEATKPTLSAQYSTFTRKRKVAAYARVSTAKEEQENSFEAQVSYYTQKIQANPEWVFVEVYSDEGITGTNTKKRDGFNRMIEDALAGKIDLILTKSVSRFARNTVDSLVTIRQLKEKGVEVFFEKENIYTLDAKGELLLTIMSSLAQEEARSISENTSWGRRKSFADGKVSLGYSNFLGYDKGPDGELVINEEQAKIVRRIYSEFLAGKTPGGIAKGLTADGIETPGHKKVWQASTVLNILKNEKYYGAAILQKEITVSYLTKEKRPNTGELPMYYIEKDHEPIVSPETYQMVQEEMRRRKEAGSNMQCVSIFSSRIICGDCGGYYGRKIWHSSTKYTAWHWHCNAKFQKRKYCETPTLKEESLEETFVEVFNGLIADRDEIMENYRLCIDTVTDDSEYRRQLEDLNNGCGEVQTLIRSLLMTYSRQDTADDIHEKLKEYEDRLDTMARLKQELDLKIAACAAKRVQITGFLNELMKHDAPLAKFDPLVWQAVINYATVNRDCTITFTFRDGTEKTVPIKNGVRPYTKRNKPQEVDGNDG

SEQ ID NO: 11099 - protein, 490 aa, synthetic construct
MTDKNLLVITPHRKEPGKQRIAAYCRVSSRSDEQLNSLTNQINFYRSLFENDDTVIFVGIYAEEGLSGTQAESRPQFMKMIEDCRSGLIDCIWTKSVSRFGRNTVDTLIYTRELRSLGIDVFFEKENIHSTESSGELMLTLMAAFAESESETMSENIKWGKRRRYEQGITGSITLNGMYGFRQNKGIVTIVENEAELVRQIYKDFIDGYSYGEIADRLIAEGVPTRMPGASWAKTTVQHIIRNEKYCGDCLFQKAFIANPITHQQVRNNGELPKYLVEDCLPAIVDKETWKLAQAVAARHTSHRQAPNERYPFTGKLFCGVCGKPYYYYHYTTTNKQPLAAYRCMSRKTQSAVEVPGQTYTPPHKATFNLNASPELIAYRERYCKPPKERPMLCTDIRISIDLPQKAFCRAWNLIVAKKLRYQATLRSTVDNAEDILVRYRAEEMCLLIDEIGKINEFSYPLMLKTLDRVVVNANGKLTFIFQSGIKITV

SEQ ID NO: 11100 - protein, 519 aa, synthetic construct
MKKVTKIAETASSKVKLKKIRVAAYCRVSTDSDAQLESLEAQKTHYENYITSRDDWEFAGLYYDEGITGTKKDKRPELLRLIDDCKAGKVDFVITKSISRFSRNTTDCLELVRKLLALHIPIYFEKENINTGSMESELFLAILSSMAEGESVSISENNKWSIQKRFESGTYKVSYPPYGYDWDGEQMIINPEQAAVVKEIFAALLSGKGTHAIADDLNRRGIPTKRNGRWTATTIRGMLSNEKYVGDCLFQKTYSDSRFVRHNNHGEQTQYMVKDHHEAIISREDFEAAHAFIHQRATEKGVVKGSDKYQNRYTFSGKIICGECGDTFKHRIHSCTGYKYTAWCCSTHIKDKDKCHMLFVKDDDLKQAFITMMNKLVYAHRIILKPYVEALKNTSSDDSLRRIQEIQTLLAQNTEKRETLTKLMTQGIIDPILFNKETNELLSQADSFRDEINALKNAVSGDVTKVTAATALLHFTEKGGILQEFDDDLFNEYVNRIIVRSRNEVRFELKCGLTLRERM

SEQ ID NO: 11101 - protein, 522 aa, synthetic construct
MGNVMVIPARRQVGNTVKQSAQKKLRVAAYCRVSTDSEEQETSYEAQVTHYTEYIQKNPEWELAGIFADDGISGTNTKKRDEFNRMIDECMAGNIDMVITKSISRFARNTLDCLQYIRQLKDKNIPVYFEKEAINTLDAKGEVLITIMASLAQQESQSMSQNIKLGLQYRYQQGKVQVNHNRFLGYTKDDSGHLIIDPEQAEIVKRIYREYLEGSSMDKIADGLMTDGILTGAGKTKWHTSTINKILRNEKYMRDALLQKTYTTDFLTKKRIKNNGTVPQYYVEGDHEAIIPKELFMQVQAELVRRRVVHVSPTGKKRSFSCNHCFAQMVFCGNCGELYRRVHWNNHGCKSIVWRCISRLEPTSAEKDCTNRTVNELLLQEVTVKAFHQILTERDFFLKTLQQNIAKAVVNADTLSPDGIQARLEELQKELIKKANNKQDYDAIADEIFRLRDQKEQSELDSHHREEAMNRIKELQDFISGQETDITEFDETLVKKLIEKITVFADHFTVEFKSGITIDIEA

SEQ ID NO: 11102 - protein, 524 aa, synthetic construct
MIFCCYGRKSVYSDRSDSVDNQFRMCRDYVNVKYSGQVDDFRAYSDEDFTGANTNRPDLQRLLEDIRSGGADVLIVYQLDRLSRDVRDFANIYAILEEHRVKFVSIKENIDTSTPIGRAMMYVTVVFAQMERETIAARVTDNMIGLAKKGYWVGGNPPVGYVRDQIIVDGKKHCAITPDPEGARYVTWIFDSFVQFGGSIQKMETQFKHKGVRTQRGGFFSASQLHKILTMPYCAEATPEVYDFYQAKGCIMDPGSPREKWDGSVGVMVYGRTTEKNKKHELQPPDQWRVCLGVHKPFMPADKWLAVQARFAQNQRFKSARWPSPLLKGVIRCKCGALMSIGRKQKVDGSVSSAYYCPKRTRQGADACDMRQIKCEILDAKVINILRTVEQDNTAILRYVQKDQDTAARPDPKKISGQIKSCEAKIEKLAASLALASGSAAAKYIIAEMERLDLEIQALNREYTIAASEERKRSAAQVSTQERAKIISEKMRNFDGFTAAERNAIAREVIKKCVWDGETLYVEL

SEQ ID NO: 11103 - protein, 523 aa, synthetic construct
MAKSVTTIPATLSRFTAAPINSTKKRRVAAYARVSTDNEEQLTSYEAQIDYYTNYINGRDDWEFVGVYPDEGITDTNTKKREQFRQMVADALDGKIDLIITKSVSRFARNTVDSLTTIRKLKEHNVEVYFEKENIWTFDSKGELLLTIMSSLAQEESRSISENCTWGQRKRFADGKVTVPFKRFLGYDMGPDHNLVVNPEQAKLVKRIYGMFLQGQSPFQISRTLTEEGIPSPGGKDHWNPSNIKSILTNEKYKGDALLQKSFTVDFLTKKKKTNEGEIPQYYVKDNHEAIIDPETFEMVQTLMTTRTKGRNRKSSVSIFSSKVKCGDCGSWYGPKVWHSNDAYRKVIWQCNHKFDGQKCATPTLTEDEIKELFLRAANQVIDQKEQFIAIYDQVLSRSLNTTALESELSDLEAEINIAAELIEDCIKENAHVALDQDEYQKRYDALVARFDKAKARHTEVTDLITERMARKHQIEAYLKNLRSREPLTEFRETDWLAMVDYITVHSKKDIRVTFKDGTEIKA

SEQ ID NO: 11104 - protein, 453 aa, synthetic construct
MECVAYMRVSTEKQVEEGNGLESQKRDILDYCSKNELIVTDWYVDDGYTGANMNRPELQRLISDCGKKKVKCVVAFKLDRISRSMIDGLYMIERIFQPNNVIFKCVHDSVSYNSPMEQAYTQMMAVFAQLDKNTMMLRMRGGMLERVKQGYWPGGGNTPYCYSYSKDQGILIPIPERAEQARKGLELYIKGYSDIKICKICGYKGEKVVRQILTSPVNIGMIPYKGKIYQGLHEPIFDKELFELAQQLRKSRSLNKASCITEPNLLTGLCYCGVCGCAMRYQKWTHGKHKIYCMSRNKSMSYLPNHNPDCNNSLEWADDIEEQVEREMLKISLDLSSYKPKEKETKLDIMQSQLDKEQTKLKRLYGLYADGNDAVLSMIKELEGNISAIKENIAEERKNFSARQKNAIVYDEIKKLADVWDSIDKKQKNLILKTIIDKIVIVNGNIEIQLKNF

SEQ ID NO: 11105 - protein, 561 aa, synthetic construct
MKKTKVYIYTRVSTSMQIDGYSLDAQKERLTKYAEGNDMVIAGEYSDEGKSGKNIAGRVDFQRMLNDIACKKDGVEYVLVFKLSRFGRNAADTLTSLQFMQDYGVNLISVEDGIDSSKEAGKLMVHVLSAVAEIERENILVQTMEGRKQKAREGKWNGGFAPYGYKLVDGELIIEEDEAEAIRIIFDKFVHTNLGYNGVVTYLNNNGIKKKARQNGYLTQFTTSTVKAILDNPVYYGKIAYGRRKTTKIEGTRNEYHVVAQKEFDVYDGRHKAIVDEQLWKDAQAKRRATASKLEKKHDLDHEHVLSGLVKCPVCGAGLYGNVKRAKRKDGTYYKTYFSYACKHRLNKDGHKCDYHKQWSEEKVDNAVSEIIGKLVNNPRFSEVMKTKINTSVDTSEAEKELANAKKVLKQLVGTKDKIILQIDTLDILDKNYDRKYDDLQKRLDTIYDKIGDAEDLVSETEDKLSNIQKDKITGDNIYNYLLMFDSVYDVLSDMEKKQFYNALLTDIQIYEEEQDKQIIKSIGFKFPVFYDGEFTKRIIRDKEKTVETVVLMQYCGKKEK

SEQ ID NO: 11106 - protein, 571 aa, synthetic construct
MICVDSNGQAIEISVADQMWLDDAYFKGKQMHLEADAPRVALAYRVSTKGQVDHDDIPMQKIDCRKFAQKQGWRVVKEVAEKGVSGSKVSASKRDAIQQLKEEAANGEFDILLVYMFDRLGRIESETPFVLEWFVQHGIEMWSTHEGQQKIETHGDKLMNYIRFWQAAGESEKTSIRTRDRIRQIVSSGHYTGGFVCYGYKLEDQGRRNKRDKPVMDLVINEEEATWVRELFYKVIQEGASGYALAEMLNNRGLRTRAGAKFQSSNIIRIIRHEGYTGYIITKNARSEYIPELQIIDRETFDKANDIINRRKAKSEQERKIAHTSQNPTLLAGIVYCAHCGAKMSGFMHTDRYKLADGSIREKVQPKYNCFQRGQKNKGGRDCDGQALYLAERVDAIVLQAVSKIFEQIRDTPYSRMAENRIRQESNLQKSKRASVEKKIKTAQHALERFEGEILKCLDGTSNFTEDMIAKQIRRYQQELDDAKAEYAELQNARLNEAAEIRKLRTYYDEFRGWAEEFETAPLEIKRMILSQLIERVEVGRKYQVTIKLNIEYQQFLEITEEQKLIPLISA

SEQ ID NO: 11107 - protein, 505 aa, synthetic construct
MTMESKRAVIYARYSSSHQREESIERQIEICNDYATAHNMLVIGSYVDRKKTGKTDTRPDFQRMIYESSKHLFDIVLVWRYDRFARNLDDHGAYERLLHQNSVDLISATEEIPEGSHSAIIKAVILGGNESYSVELAAKVSDGMHRAAMQGQTSGGPRVFGYRVVDKHYVLDEGEAQVIRQIFTWYDQGKSMTEIVNQLNAQGAVNAAGKPFIISVMRRILTNKMYIGIRLYKGEDIGIRVPAIIDKELFDRVQIQVGKNKCAPARNKPLNDQYLLTTKLFCAQCGSTMSGISGISKNGSKYQYYSCTNRSNKKGCTKRYIGKEVLETAVVDTVKKVLLANNIPELAKAVVKCCNDAQDNGNLLKLESELREVNKGINNLLDLIEAGRNSQAMADRLEQREQQKKLLEQNIAKEKVLHRIPTEDEVIFFFNNFIQGNIDSLEYNRYLIDILVNSIYLSDEEDGTQKMTVLLNTQNGQETVTLNDLTQCSSNVHMVHHRGLEPRTH

SEQ ID NO: 11108 - protein, 507 aa, synthetic construct
MNVVLYMRYSSDRQTEQSIEGQKRVCMDFCERQGYNVVGEYIDRATSAYKETAKRTNFCRMIRDSSNGLWQGVVVYKLDRFARNRYDSATYKVRLKKNGVKVISATENISDSPEGVILESVLEGMAEFYSKELSQKVSRGLNESAHKCNSTGGAIPLGYKTVNKKLTVDEPNAQIVKEAFDLYAGGATISEICEKFNSQGYRTKKGTEFNKNSFKSMFRNEKYIGTYTYKDIRIEGGIPAIIDKETFETVQKRLSANAQAPARGKARVNYLLSQKLFCGHCGANMIGESGRSKTGETYYYYSCSTRKRFHSCKKRTIRKDLIERIVAENAMRLITPEMINTIADMAIKCNREDIESDAIIPALTADLKEINTSIKNLLKMVERGVESETLDLRLKELEKRKKDTESRLDVAKSEYLTLDKTVIVGWLSQFLSGDIEDEDFRRHLIDTLINSVTVWDEPDGGYKITTVYNLKGNTQTYRVNADGSSDMKRNSPPTKVSGFSRYLFSVY

SEQ ID NO: 11109 - protein, 597 aa, synthetic construct
MAVKKIKYTALYERLSRDDEMQGESNSIVNQKRYLEEYAQAQGFKNIRHFTDDGYSGTNFKRPGFQEMIAAIEAGEIDVVCVKDLSRFGRDYLKVGFYTEIMFPEKGVRFIAINNSVDSANPMENDFTPFLNIMNEWYAKDTSNKIRAIFRSRMQDGKRCSGAIPYGYKRDPEDKNHLLIDEEAAKVVRRIYQMVIDGMGSQAIANQLTADNVLIPSAYLEQSEHGESRNHSYHDPCRWNCTAVSYILDKQEYMGHTVLGKTICENFKTKKRRKARPDELIIFENTHEPIIDAETWHLVQKLRRRTRRKLANGSYSHRLSGLVYCADCGKRLSYSSPQSQHRPDGKTYDADSSFRCPTYKSMYGECTMHYIKSSTLDKLVDEAVRKIARYILRNEQAFLEQVRVLTSADQKQTQSEDKKELVNIKKRIAELDNYIKRLYEGNASGKIPDRQFEKLMAQYDSEQQELEERVKEIEASIHEIQQESENGQQFVRLVQKYRDLTEIDQTALNEFIDKVVVHEATGGRTADRSQQIDIYFNFIGQFMVEDTEEELLMQEQEAQRLADLKERERKDRRNETVRRYRQRKKEREAKQAESVSG

SEQ ID NO: 11110 - protein, 540 aa, synthetic construct
MENFDLKGFAKGKKQQKEQIGGNAIIYTRVSSSEQVDGQSLEVQIDKCREYAKVRSYTIVGEFGGTYESAKSDKERKEFNRMLAFIKQSNKKGSSQPVKTVIVFSTSRFSRTGSTTIIEEVEARGAYVVSATSNYDPRTPVGKYMQLMELANARFQNDEKRATTIENSVKALLKGRWIGKAPRGYDQKTTKKEQIITINEEGKLIRKAFLWKANNKLSNEEIRHRLEAEGLHICKQKLSELFKNPFYCGYMAHKFLQGDIVQGNHPPLISKEIFLKVNGELSKNHSGYEQKIDKEYAPLLGSIKCPCCGKNLSASISTKMRKKFGRTDIGYYVCSRKGCKYNSSIKKVHEAFEEEVNRYSLSDKVSELLKMQLTITFEYMNQENRERAKSIKANIKAKEKELEQVETNYALCTDAKKQSICEKVMTKLEKEVRDLKTEFSKVNTEILNLDKFIDFAFKMRSNLFGLWELQGLEGRRRLQKLVFPDGFIYDKNNEHIEPKRVNQFFLIKYSYPAGNGDKKKGTNREKHDSSLRVLEAGLEP

SEQ ID NO: 11111 - protein, 501 aa, synthetic construct
MEIQIREGSREQKRKLKVCAYCRVSTDADEQENSLENQVRHYEMVIKANPDYEYAGVYSDFAISGFKEKRPGLQKMLADAEKGKIDLILTKSVSRFARNTSIVLEATRKLKELNVGVFFELQNINTLSGEGELMLTILAAFAQAESESGSAGAKMVYQRKYEAGIPVQYLERSFGYTKDERGVFVADEAEAVWVRKIYKMAAEGYTPASIKRYLNENGIKTVGGVQWVDSTVFRLLENEIYKGDYIMHKHFVNEERKLVRNRGEVDAWYIEDDHEAIVSPELWQKAQDALEAKRDYLAEGSVIKEFTEENYPYMNKIYCAKCGYPLYKRIYSKGNRLNWGCSGMKRYGKSFCDGINIPDGVLRSAWHFEENTYIDEKASDKGVKEFSYLKERSWKRRHKKKQPPSFPENTEAEYPYRDKIFCALCGSRLVRYVETKNHKVTWICNGRKRKGKDFCDGTRIPDHILKGWGEIKKDIYIQRKDDKNGKKHYSYTSKKPSGIGA

SEQ ID NO: 11112 - protein, 463 aa, synthetic construct
MARSITVIPARNRQASGHRAAPQKKIRVAAYCRVSTDQEDQLHSFEAQVDYYTKYINDHENYEMAGIYADEGISGTNTKKREQFKRMIADCEKGKIDLVITKSISRFARNTQDCLMYSRKLKNLRIGIIFEKENINTLDSTGELLFTILSSLAQDESRNISENCKWGIRTKFKNGEMHLNTFKFLGYDKDENGKLIINREQAKTVRRIYRDFLWGLNPAQIAKELEEEQVSGCLGQTKWYASTVVGILKQEKHMGDALLQKTYTADFLTKRQVRNNGEVAQVYVKDSHKGIIDKETWNAVQEEFDRREKFMQRHGTDRYSYGSECYPFCEKIFCGECGSLFTRHSWKSRGIVQWQCKNHRKDGKVACTNAYVDNADLEKGFVKAFNRLAGEREKHMERWNAMKADGTPIEKIRAVQMMEATENGQLQKYVPEAAQLVLEEITIIGAKKYEFAFLEGSRVKVSV

SEQ ID NO: 11113 - protein, 463 aa, synthetic construct
MRRKTTAPVEKILLRVAIYIRVSTDKQVKDGDSMRDQLATGQKYIDSHENMILVDTYIDDGISGQKLKRDDFQRLIDDVRAGRIDLIIFTRLDRWFRNLRHYLNTQDILDKHGVSWTAIEQPYFDTSTPHGRAFVNNSMIWAELEAQNDSDRILGVFDDKVDNGEVLSGSTPLGYKIVNKHLVPDDDAPTAVAIFQYYRKTGNLSMTLRYMESEFGLVRSAASLKNMLTNTKYIGEFRDNKNYCPATIDRDLFFDVQRLLKINIKSGKKHDYIFSGLVVCDDCDHIMSGCQQRAGGRVRADGTRIVYKYSVYRCRQGVNLHRCPNRKLVFETTLEKMLLERIRPELENYIAEYEVANLPALRTDAKRRSVEGKMQKLKDLYLNDLITMDEFKLDREKLLMQLEKINAEDSRPVKDLSYLKNFLKMDFESVYDSLSIPERRELWRSIVKEIRVDHDKNIHIIFL

SEQ ID NO: 11114 - protein, 650 aa, synthetic construct
MTDYIGNYKNRPRRVVFYGRVSTEHEEQLSALGNQMEWYTDLALRNSNWTVVAQYIDEGITGTQMKKRPSFMRMIEHAKEHRFDLIVTRELSRFARNTVDALNATRELKQYGVEVYFVNDGIWTMDGDGEVRLTIMASIAQDESRKTSERVKAGQKMSREKGVLYGSGNIIGYDRVDGTYVINKEQAETVRRIFNLYAEGHGETTVAKMLIEENRKDGGGGLSWTASKVSRVLRKPTYKGYMTYNKSHIDDFLSHNRINHSEEDFVLVKGDFEPIVSEELWETCNQIRSKRAAFVKGKDGRAHKFGVSFPQNKWTKILFCDCGMRFQIEGYDKTANGGENMRLICARSKMFKKKDAARALNGIPCPAPYASEWKLELMAREVFCTVWKENAEDILGLLRMLDANLNTTGTPNDGNQLENKLSALNEELDDLVSQRASRGITMDDFLSRSTEINNEIINAEGLLQSSIQEQRPKARLDMHSIEAALGDDASFPDVKIELGFLDRYANRIVKSNNRYIWMLQLMNVQQIMPIQSERQPIAMVTYKSGVPYDIEQEQIGKQDKESAGPDCATICRPQDFFLNMSRTKRKRKLVEWLESCQENQVSVLDEKIPLLSFAVDFVTAYEYQKARGIKIHPGLWKDMRVDIFLVKKEN

SEQ ID NO: 11115 - protein, 488 aa, synthetic construct
MPEALNAVIYARYSSDRQTEQSIEGQLRECYAFAKANDIAVIDTYIDRAISGKTDNRPAFQKMIEDSAKRQFQAVIVYRLDRFTRNRYDSAIYKARLKKNGVKVLSAMENLNGSPESIIMESLLEGMAEYYSVELSQKITRGMRENALKGKALGGQRVLGYKVNSDCYFEIDETTAPVVVDIFKLYSSGKTVKEICDILNARGVKTARGGAFNKNSLHTILTNKKYIGIYKTKYGEIVGGIPAIIDKELFEMVALRMEQNKKAPARAKAEINYLLSTKLFCGKCRSAMVGESGTSKTGKKYYYYACVKKKREKACDKSNVKKDWIEDLVIQRTVTDILKDDVIEKIADRLVELQKAEAAESGTMLYLQNSLAEIQVSIKNIMTAIEKGIITESTKTRLTELEDEKRNVEIEIAKESIARRIISREQIIYWISSFKDGDITSEKYRQQLIDTFVHAVFVYDDKIVITYNYSGENNTATISDLDLSSPPK

SEQ ID NO: 11116 - protein, 580 aa, synthetic construct
MPEKIINCAIYTRKSTEEGLEQGFNSLDNQYEFCTNYLKSLNDPALQLLPARYDDGGYSGGSLNRPALQRLLADIQCGLVNRVIIYKIDRLTREIRDFFKLLDIFEKYNVEFVSVKENQYYNTPTAIGRLMVNMFLVFAQFERENAGDRIRDKIATSKAKGMWMGGCPPYGYDIGDRCLVINETEAQNVRFIYQTFCNTHSLADTTDALNSGGIRTKRYTTRQGRTFGGRKFSVKTVQRILQNPLYKGMVAHRGKQYPGQHAAIIDAVQFDMVQAVFAAHKEKRETRRPKMPSSSGERETAALTGLIFCGCCGSAMTPSYCCKGDIRYHYYRCYRRASKLEDKCPINQIRTSEIDRVVMEQVLAILKSRDFFVQYISHHHEFDVSTAFALFNSLDDVWNSLFETEKRRILRELLAKVTIYKDKIVLDVKKAGLAGVFAELSQNNRLAEVEYKENETFQISVAYRATRLANGAKIIVPTTAKEESRFNGSLRLARQIAKGFAWRKMMESGLSLQELTASAKTNERDIRFAMRLSMIDPAIVESVLSGKSPEFLTYAFMKKHPIPLLWSDQRKLYGFEERKQ

SEQ ID NO: 11117 - protein, 628 aa, synthetic construct
MKAAFLIRCSTKNQDLNRQTRDLTRLAKSMGYEYDLENLVYGEKITGKDDVTKKNRDSIDRLLRAAKEQRFNVVLVSEVSRMSRDPASGRIYVRLLINMNIPVYFKDIDLWTINPETGKKVRDAELVIGAAFDAAWKYLKSMKTQIASARRNELDNNRISIGQPYFGYKRYEGIDKSKKNQIVVNEEEAEVVQAVYNEYLKEGATLKSTALAITDKYGEQLNRKFSLGTIEHILTYESYATGIKKVNLKDPDTDEVEVFDVSTPIIIDKELYEAATNKRKKNRVKDEPYPNQQVYLLSKLIKCPDCGYTLTPRRKAGEFGQTYRLVNGKPAVSWLCMSGINNITDCTNRTSIANEKLEPIIWELVKKELIGYANMNDEKREEQIRECEEKIEYQNYSIQNFTKEIEKLKKRLSTAYQFSINAAEMAGDDEDMRTMAMEEFNRTAKGVRQEMKNFEKSIEQAKGELEKLRDLKTFYSQPTLPKDYLEQIEGNFTEKRNLVKQLITKIVPYRITTFKKKERESGVKTCNKMITVKNGAVLLEVYTIGGVYNVFYNANSKFQVKTAYYVHGEYATFQNGIRKYPAYDEGEYFVISNANMVMETDNIDEVVTVNEFVDIAIANNWVIEYQYQ

SEQ ID NO: 11118 - protein, 454 aa, synthetic construct
MECVAYMRVSTEKQAEEGNGLESQKRDIELYCRKNELIISDWYIDDGYTGANMNRPELQRLINDCDRKRVKCVVAFKLDRLSRSMVDGIYMIERVFQPNNVQFKCVHDSISYDSPMEQAYTQMMAVFAQLDKNTMMLRMRGGMLERVKQGYWMGGGNTPYCYTYSKEKGILIPIPERAEQANKAIDLFIAGNSDVAIQRILGYTSELVVRSILTGVVNIGMIPYKGNIYQGLHEPIFDKDKFEMAQQIRKSRRSKKSYCQNLTPNMLTGLCYCGVCGCKMRYQKWTNGVRKIYCCSRNKDLYYLPNFNNDCDNSIEWADNIENIVESEMLKISVNLSKYKPKEKENKIDIMQSQLDKEKSKLKRLYELYADGNDTVLDMIKDQESKVKNLDDSIKEEQKSGDNNPKKQFVYENIKKLADVWDDIDKPAKNKILKTIIDKIIIVNGNVEIQLKNF

SEQ ID NO: 11119 - protein, 612 aa, synthetic construct
MRAAFLIRCSTKKQDYERQVNDLTRLAKKFGYTSSDNMIFGEHITGKDDASKRDRQSIQRLKDAAINKEFDVVLVSEVSRMSRDPMSGRLYVRQLINMDIPVYFRDIDTWTIDPVTGKKVRDAETIIGAAFDAAWKYIKSMKTQIASGRRDELDNNQMSIGQPFFGYKRYGGRDKGKKNSWVINDDAAKVVVDVFEEYVKDGATLKSTALAITAKYGEQFNKKFSIGTIEHILTFEPYCTGIKVVSLTDPDTEDVDEFEVEIPTIITRAMFDKATTKRATNRTARTPYPKQATYILSKLLKCPICEHSLTPQKRGGDKGDKYRLMNGKVAIRWSCMSGINNATDCSSRITISNEKLEAIIWGLVKQELIGFANLNDEDRVAKVEELTDKITNLEMNIANFTSHISNMDRLIERAYSAYMDAPDSVMDIAKDKYYKTLTKCENERAECKGKIEALSAEKLRLENMRTFFNQPTLPKDAIEKAESDPIKMRNLVMELIDKIYPYRITTYVSPATNRIMRNGIVLLEVYTINGIYNVLYDGNQRNNKVAYYISSVYATFQNGRNKFDAYDTGEYFVISHATLVTETEDVDMLVTFNELIKICMQNGWEIDYTYKM

SEQ ID NO: 11120 - protein, 520 aa, synthetic construct
MARKKNIAAGQNAVIYARYSSHNQREVSIEQQVRECMKHAAELGLHVVGTYEDRAISGKTDKRPNFQRMMRDAEKGKFQAVVAWKSNRIGRNMLQAMVNEAKLEDCGVKVFYAEEDFDDTAAGRFALRNMMNVNQFYSENMAEDITRGLYDNASKCMANGRQPLGYKRGEDGRVVLDEANAAVVREIFTRVAAGDLFVDIARDLNAQGIRTSKGANWNKGSFQSICQNERYRGIYIYGDVRVADGIPRIVSDDLWYRVQEAMRMKKNPVGTRHRVGAEDYLLTGKLRCGHCGSYMTGVSGTSRNGELHYYYTCQKRRTEHACDKKNIRRDVIEPAVAQAIKMYCLTDDVIAWIADRTVEYWEKHDNDLQIEALEQQLEENKKATSNMLKAIEMGIITEATRTRMVELETEQSRLSVQLNAAKEDVVKIDREQIISYLELLQQGDIHDRDFQMELFKNFLVAVYVYDDNRMKLVFSCMGDQNSVEIPLETGEDPPDGGLSPDAKMFVLTPDSSTKKALYFA

SEQ ID NO: 11121 - protein, 462 aa, synthetic construct
MKRQTAKLNDKLLLRVAIYIRVSTDQQAQDGDSVRDQLATGQKYIENHENMILADTYVDDGISGQKVKRDDFQRLMNDVRAGSIDLIIFTRLDRWFRNLRHYLNTQDVLDKNGVSWTATEQPYFDTSTPHGRAFVNNSMIWAELEAQNDSDRILSVFDDKVDNSEVLSGSTPLGYRIENKHLVPDNDAPTAAAIFEYYRSNGNLAMTLRYMETEFGLIRSSASLKNMLTNTKYIGEFRTNKNYCPVIIDRDLFDDVQRLLKINIKSGKTHDYIFSGLVVCEECEHTMSGCQQRNSRILADGTRVVYKYNSYRCRQGITLHRCPNHKVMLESTLEKILLARIRPELENYIAEYEVANRPAMRTDSKRRNLEHKMQKLKELYLNDLITMDEFKVDREKLMQQLDKIKSDDSQPMKDLSYLKNFLKTDFENIYVSLSIPEKRELWRSIIREIRVDHERNVRIIFL

SEQ ID NO: 11122 - protein, 523 aa, synthetic construct
MRFFSYGRKSVFSDKSDSIDNQFRMNREYCESKFSGQVDSWQQFSDEDFTGANTSRPDLQRMLSFIKGGFCDVLVVYQLDRLSRDVRDFANIYALLEEHGVMFISIKENIDTTTPIGRAMMYVTVVFAQMERETIAARVTDNMLGLAKKGYWTGGNPPVGYVRKHIVVNGKKHCSIEVDPDGARYVTQIFDTFLAYNCSLQGMETRFKNQGIRTQSGKFFSTTQLHKMLTMPYCVEATPEVYDFYAAKGCIMDPGSPREMWDGSVGVIIYGRSTEKNKKHQAQPPEKWTVCLGKHKPFMPAEKWLAVQSRFTQNKCIKDAKWPVPLLKGVLRCKCGNLMQVSRKKKVDGTCSSWYYCRKRMRQGVDACDMGQIKCDLLDEEVLELFRGITADPALIQKFVKAEAPADVPDLKAAQARVSACERKIARLAASLALAEDSAASKYIIAEMERLDVELGALKREASLAEMESHRAAASAKDAKATAAEIAKLIHGLDGFDDKEKNAIARAVIQECTWDGERLFITL

SEQ ID NO: 11123 - protein, 525 aa, synthetic construct
MAKRVTTIPATLNRFDSRPLQSVRKRRVAGYARVSTDSEEQATSYEAQVDYYTRYIKSNPDWEFVGIYTDDGITATNTSHRDGFKQMVEDALAGKIDLIITKSISRFARNTVDSLVTVRELKEKGIEIYFEKENIWTLDAKGELLITIMSSLAQEESRSISENTTWGKRKSFADGKASVSFSRFLGYDGGPNGEFIINEDQAVTIRYIYKRFLEGLSTYQIAKELTKMGVKTAAGKDKWYTSSVLSILKNEKYKGDALLQKSFTKDFLTHKRVDNKGEVPQYYVEGHHEGIVTADQFEQVQAELYRRQNMDRYSGVGCFSSIIKCGECGSWYGAKVWHSNDKYRRVIYRCNKKYGKGCKCKTPHITEDEIKEMFIKAANELFSEKAEIIENTKTMMDMVCNTDDLDKELGDKVAELNIIAEQMQTAIAENSRTALDQNEYERRYADLTERYNNIKSVYDKISEQIESKKAQRELFKGFIRALEKQGTLVEEFDEGLWSSLVQEVVVNAKDDIRFIFKNGFEIKTR

SEQ ID NO: 11124 - protein, 503 aa, synthetic construct
MANIRRIEPVLPRLKARKRVAAYARVSMETEQLHHSLSAQVSHYSALIQSNPEWEYAGVYADEGITGTATKHRDEFKRLMVDCDAGKIDLVLVKSVSRFARDTVDTLKATRHLKDLGIDVYFERENIHSISKEGELLLTLLAAFAQAESRSISENIKWSIRKKFKLGIPNGIKAPYGYEWNGDSFSIIPEQGEVVKEIYDRYLAGEPAYSIAKGLAEKGVKGQSGVPMDDSTIKNILSSLSYTGTMLLQKNFFTEGHKRRRNKGELPMYAVEEMFEPLVSEAAFEKAQQIMKDRAESMPNRNLKLTAFSGIVKCANCGCSISRRTSKYGKKWVCNTKERKGKTVCDFRDVYESELEDAATKALSLDGFDAEEVKSRIALITIDNAYITFRMKNGTSRQVLRKYKKGYSGFSTRLFCGCCGGMLEADTWNMGPAGKKTKYKVWVCRNCSAPREFDSTFRKATQELFHEEQCDGLFAQNIEKAINYDEKIEFYYKKGEVVTWQKE

SEQ ID NO: 11125 - protein, 527 aa, synthetic construct
MNTAVRTVTVIPPSINPMTHLTDTPLYKLRVAAYARVSTDSDEQFTSYEAQIDYYTQYIQRNQEWTFVKVYTDEGISGTNTKHRAGFNEMIEDALAGKIDLIVTKSVSRFARNTVDSLVTIRKLKEKGVQVYFEKENIYTFDGKGELLLTIMSSLAQEESRSISENVTWGQRKRFADGKVNLPYKQFLGYRKGADGFPEVVPEEAVIVRRIYTRFMEGLTPGAIAKELTADGIPTPSGKQRWQTSTVESILQNEKYKGAALLQKCFTVDFLTKKRKVNEGEVPQYYVEHSHEPIITPEEFDKVQAELARRKRISRQYSGKSIFSSRIVCGDCGSYFGSKVWNSTSKYRRVIWQCNGKFKGEHKCETPHLDEETIKARFVAAINAIIDSKDNILEDCRLMQTTLTDCTGIDAEIESLLEEIDVVAELTKRCIAENSQTAQNQNEYAARYNGFVERYEKAKAQLEQLRATKVAREAQAEAIGAFMFEVQELDALTNFDDKLWLTVIDTVTVHADGRMTFKFQGGTEIEA

SEQ ID NO: 11126 - protein, 486 aa, synthetic construct
MIIAAAYVRVSTDEQTDYSPAAQLADIKEYARNNGYHIPEEFIFMDEGISGKRADKRPAFQAMIRQARKKSNHIQYIIVHKFDRFARNKEDSVLYKALLKKDGVKVISVKEPIPQDDKFAVIYESMLEAMAEYYSLNLAEEVNKTMIKKAQAGEWQATAPFGYKNENKSLTIVPEEAKMVRYIFEQYIAGTSMFALSRQMNQIGYRTHRGNVFENRTIQYILNNPVYKGYSRWTPGRMHNRDYSDPASIVSKGNWEPIVSEDVWEAAASRFHAEKKTHYKHKRPDTEGIHWLSSMVKCSSCGRSLIVGTKYKNGAVQFQCGGYNHGQCHDSHAVSSNRLIPAILSELEKIAAHPDTEGCRYTVRRELPASDELDVYVPLLAKAQQRLKKAKDAYLNDIDTLEEYRSNKMNIEKEIAELKEHIAEIEERQNMPFDQAAFSTKIASVIEILRDDSRQMEDKRKAFKSICDKIIFHKHDSSLELFLIDQ

SEQ ID NO: 11127 - protein, 583 aa, synthetic construct
MKQSKNVSDKLSNQKCALYVRVSTHWQIDKDSLPVQREDLINYAKYALNIDKYEIFEDAGYSAKNTDRPAFQQMMARLRTGEFSHLVVWKIDRISRNLLDFAEMYAEIKKLGITFVSKNEQFDTSNAMGEAMLKIILVFAELERNMTSERVTAVMLSRASNGQWNGGRVPYGYNYDKETGLFSINEAEASVINMIYDTYERVHSLLVVARTLNEKGILPRSGTPWSPTTISTILKNPFYTGAYRYNYHDESKSGGNTSSKFLKPKADWISVQEHHPAIVSAERQERVCAILEDNRRSNKRSSKTYVRKNIHIFAGILYCGYCGNQMQSTIDRERADGYRPSIYACSRKRRFDDCENKYISDVVVAPFVLNYIANVIKAQNNFGKSTSIETFERKLLRGPTFSEVEHIEQVGLQEMYDMLRSGISDAVYTSRTLSDIAGAEELADERDLLLAEHRKKERALARLKSLYLYNDEAISESDYIIERKNLSDSIASIDKRLEEIEKHSSRQFTLSDDEFLAKASMFIMTHHLQDKRYVDFEKLIRKVEPIIIKEFINSVTQKIVIKQGRIISIRFKNGIEHKFLYKT

SEQ ID NO: 11128 - protein, 531 aa, synthetic construct
MLAYGYCRYSSNLQDEKSIEQQKNELEEYAKNNNISIIKYYIDEAKSGTKDTRDSFQNMISDACKSKEIQAILVWKTDRFARKAMDSLYYRNKLEKVGIKLISITQPIDTETPEGKLMSTMLAGMDEYYSQNLASNVKRALKLNAQNAQFNGGIAPLGYDVVNKKYVINEREASCIRFIYDMYIEGYSLIEIALKLNSMGFKTKKNKPFSKTSIYDIIGNEKYIGKYIFNKGTKSNHDGIRADAIILEDAIPQIISKETFEKAMNKRVKRKNAENTAKNFYLLSGLIKCECGGSYIGTTIKKQKNGNTYISGYYRCSNHNKLGNCKMPSLKQELIENKVIKILTDELLNAETRENIVKTVNVQYIEAQKDCKNDVEILKENLSSIKQEINNIVNAVAKGYATDSLLKKLEEIENTKKNIEDEIHFKDNIATHNYITSEKIEEVLKKDLSGLKDKSKEKLKILVQKYIKKIEVKTTEILIYLDFGENSPKKLVAKMWFEHMTLRVWTECSSQLSYFAIWNLYYYNKFVAFCQ

SEQ ID NO: 11129 - protein, 463 aa, synthetic construct
MARSITVIPARNRQASGHRAAPQKKIRVAAYCRVSTDQEDQLHSFEAQVDYYTKYINDHENYEMAGIYADEGISGTNTKKREQFKRMIADCEKGKIDLVITKSISRFARNTQDCLMYSRKLKNLRIGIIFEKENINTLDSTGELLFTILSSLAQDESRNISENCKWGIRTKFKNGEMHLNTFKFLGYDKDENGKLIINREQAKTVRRIYRDFLWGLNPAQIAKELEEEQVSGCLGQTKWYASTVVGILKQEKHMGDALLQKTYTADFLTKRQVRNNGEVAQVYVKDSHKGIIDKETWNAVQEEFDRREKFMQRHGTDRYSYGSECYPFCEKIFCGECGSLFTRHSWKSRGIVQWQCKNHRKDGKVACTNAYVDNADLEKGFVKAFNRLAGEREKHMERWNAMKADGTPIEKIRAVQMMEATENGQLQKYVPEAAQLVLEEITIFGAKKYEFAFLEGSRVKVSV

SEQ ID NO: 11130 - protein, 700 aa, synthetic construct
MDSNAFLNDLMSKMKLPEAKEKKKAEQSESVAQILAAMQKVRAEKKKPPVTSYEPVKEMPVNEPESMEEFSQLASDVMQECRPSMPTVKTAISEKTVRVVAYIRVSSTNPAQEDSYEMQERYFMSLLAGNAGWTSAGIYSDHGISATSREGRTGFNRLLRHCKQGKIDRVICKSISRFARNTQDFLVALRTLKENNVTILFEREAMDTADAYSEFILTTLAAIAQEESRSISANIAWSNQKRFPAGNVCNKDIYGYEFRKGEYTVNENGYRYRAVFIIPEEAEIVRMVFRLFTKEELSFTQIAQKLDALHIPPPNSGCRQRQKRKPTVLPAGALKEEDKRGWTATDVRYMIANVRYCGSVLCQKTYTDHRNGHKQKVNKGEKPKYLIRNHHPAIISEELWQEAQEVWKAYTAKYRGIEKGRNERNYSKLLLCGECGRYFQGHSTTRTTIWRCATKLAQQGQKRCRMEPIYEEQIQTLLCKAFAEKFKLGEKMDAEVHEVMQMISKAPIDNARNQALKNLTEKLREIHDFDHMEQEGDFLKRQLSAVNYSIRDVHQHIRDIQAEKEALKVRCEVLGEPRDKEAVTELENRLLNEEEQLEKLEHEAQQQAEQVRYMEDYWKKLEQTHEIREKTLQWLDSLAGGTQMFLDEAVGTYVKAFVLSVTIFSPKHFRIHWFDDTCTEVECDSVFEGYQQPGMIRRKY

SEQ ID NO: 11131 - protein, 502 aa, synthetic construct
MEFIREDCIYARQSVDRKDSISIESQIDFCKYELKGGSCRVFKDKGYSGKNTDRPEFQKLLGEIRKGKVRRVIVYKLDRISRSILDFATMMELFQEYDVEFVSSTEKFDTSTPMGRAMLNICIVFAQLERETIQKRVTDAYYSRCLKGFHMSGQAPYGYQLEPTVVEGIRTKKMVADPVAADHVRLMFEMYAEPETSFGDITRYFEEHDIKIYGKSMFRTFLSQLLRNPVYAQADLELYEFFKSQGAAIVNDASDFAGTNGCYLYQGRDVKEDKDRCLKDQILVIAPHEALISSDTWLKCRKKLMANTTFQQGRKPKNTWLAGKIKCGHCGYALKATHVPNSTGYFRCTKRTENKGCPGCGKIRKEEFEQFIFSAMQEKFKDFQILHGREEKVNPKLTAYQVELAQVEAEIEKLLDTLTGANATLLAYANKKIEELDTRRQTISKAIAELSVETISPQQIKKLSYYLDNWDSIDFDDKRKAADGLISTIKATSDRVQIEWKI

SEQ ID NO: 11132 - protein, 464 aa, synthetic construct
MARSVTVIPARSQKVRTGHKAVQEKKIRVAAYCRVSTDQEDQLHSFEAQVEYYTKYINEHENYEMAGIYADEGISGTNTKKREQFKKMIADCEKGKIDLVITKSISRFARNTQDCLAYSRKLKNLGIGIIFEKENINTLDSTGELLFTILSSLAQDESRNISENCKWGIRTKFKNGEMHLNTFKFLGYDKDENGKLVINKEQAKTVRRIYRDFLIGINPAQIAKELTEEKVPGCLGQTKWYPSTVIGILKQEKHMGDALLQKTYTADFLTKRQVKNNGEIAQVYVKDSHKGIIDKETWNAVQEEFERREKFMQKHGTDRYSYGSECYPFCEKIFCGECGSLFTRHSWKSRGIIQWQCKNHRKDGKVACTNAYVDNADLEKGFVKAFNRLVGEREKHIERWNSMKLDGTPLEKIRAGQMMEATESGQLQQYVPEAAQLVLEEITIFGAKKYEFAFLEGSRVKVSV

SEQ ID NO: 11133 - protein, 502 aa, synthetic construct
MEIQIREGSREQKRKLKVCAYCRVSTDADEQENSLENQVRHYEMVIKANPDYEYAGVYSDFAISGFKEKRPGLQKMLADAEKGKIDLILTKSVSRFARNTSIVLEATRKLKELNVGVFFELQNINTLSGEGELMLTILAAFAQAESESGSAGAKMVYQRKYEAGIPVQYLERSFGYTKDERGVFVADEAEAVWVRKIYKMAAEGYTPASIKRYLNENGIKTVGGVQWVDSTVFRLLENEIYKGDYIMHKHFVNEERKLVRNRGEVDAWYIEDDHEAIVSPELWQKAQDALAAKRDYLAEGSVIEEFTEENYPYMNKIYCAKCGYPLYKRIYSKGNRLNWGCSGTKRYGKTFCDGINIPDGVLRSAWHFKENTYIAEKASDKGVKEFTYLKEQSWKRRHKKKQPPAIPENTEAEYPYREKIFCALCGSRLVRYVNPQSHKVTWVCSRRKRKGKDACDGTRVPDTIIKGWGEIKKDIYIQRKDDKNGKKRYSYTSKKPKGADRA

SEQ ID NO: 11134 - protein, 519 aa, synthetic construct
MADFEHVIIYLRKSRSDDPATTVEEVLFRHENILQEYAVREWGARIPEDRIYREVVSGETIKDRPVMQHVMKILETGLVSGVLVVEPQRLSRGDLQDCGHIINSLRYTNTAVITPPKTYDLSDEYDRKFFEMELTRGNDYLEYTKKILNRGRIASVKAGNFIGNSAPYGYRKICVGTGKEKYYTLEIVPEEAEAIRLMFDLYVNKDYGFRNIAHALDMAGYKPRRSAEWSPAAISCMIANETYIGRVVWNRRKTIKKWENDTIVRTRPRQSEYISVPGKHPAIISDELFYAAKAKRNRTPRIKRYVQLLNPLAGLLYCGTCGHAMSRKRTVDKKYGSVSVSFLCNNQSNCHTKSVMYDAVIDRVKETLRQSIEDFEVKVNNKDETDIAYHRAMIANLKGELKKLKEKDMRQKDAYEDGIYTKEEFVVRNAKLAEQISIAQLKLDEAESSTTQLIDYQERLVRFRECLEALDDDTISAADKNTLLKSCIDKIMYYNDSPSLPGIGRYVDNPFRLEIFLKL

SEQ ID NO: 11135 - protein, 528 aa, synthetic construct
MPKTTKKITTIPATLTRFTATPITEQKKRQVAGYARVSTDHDDQFTSYEAQIDYYTNYIKSRDDWEFVDVYTDAGITGTSTKHREGFKRMVADALAGKIDLIVTKSVSRFARNTVDSLTTIRQLKENGIECYFEKENIWTFDGKGELLLTIMSSLAQEESRSISENCTWGQRKRFADGKVSVPFQRFLGYDRGPDGNLVVNREQAVIVKRIYSLFLQGMTYHGIADTLTKDGIPTPGGKKKWNISTVKSILSNEKYKGDALLQKSYTVDFLTKKTKVNEGEIPQYYVEDNHEAIIDPEVFEMVQREMAKRGKGKKYHSGVHAFSTKIKCGECGSWYGSKVWHSNSKYRKTIWQCNHKFDGDCRCQTPHLTDEEIQLHFLSAANKLLATKAAVIANGREMQALLFDTTELEAEQAQLLEETQVVSDMVQQAIQENARTALNQTEYQKRYDSLVQRFDRVKTRLEEVTAEIQERQTARANTGTFLNAFEQMPDALAEFSLESWHSMVDYATVYSADDIRFTFKNGQEIQA

SEQ ID NO: 11136 - protein, 578 aa, synthetic construct
MRKVSKIEPISPSLPPRKKVAAYARVSMETERLNHSLSAQVSYYSNLIQSNPEWEYAGVYADNAVTGTKSSSREEFQRMLEDCEAGKIDIILTKSISRFARNTVDLLEAVRHLKELGIEVRFEKEHINSLSGDGEVMLTLLASFAQEEVRSLSENVKWGTRKRFEQGIPNGRFLIYGYRWEGDHLVVEPEEAKIVRLIYDNFLKGLSAEATEKQLEEMGVKSMKGMHFPNSSIRAILKNITYTGNLLFQKEYTLDPISKKTRKNHGELPQYFVENTHEAIIPMETYQAVQAEIARRQELGALANWSINTSCFTSKIKCGLCGASFVRNTRKNWAKTSQLGERYTFYGCGTNKRKGAHCFSGTIREDVLKEECAKALGLPEFDEDTFSGRVAKVTIPATGTMVFELTDGTSFEHHWSRNAKKESWTAERRKAVSEYRRSRETGWKCYHTFTHFIKCGRCGANYRCQTHKRVDGTVVRSWYCSSPTAVDCSKVGIREDTLKALIADVMGLPEFDEELFNQQLAYATVPADNEIAFHFRDGHEVSRTFAQKRQMPRHTEERKKHMSEVMKAKWRERHAEND

SEQ ID NO: 11137 - protein, 600 aa, synthetic construct
MIDNCVRAVFYARVSTQEEEQLKALPKQVEECKDIIASKGWRLIDGYVDEGKSGTKKDGRKAYIKLLEDMQEDKFDIIVVKSQDRLQRNTFDWYKFADLLNKNNKRLYLYMDNKFYEPSEDALITGIKAILAEQYSRDLSKKLNNYHEHRIEKARAGEEVPAMGNGQTYGYQLINGKWVVDESQRELVRKMYELYTDLHSVRKVRDALNEQGYRNQRGNLFTDENIGRIVKNVMHKGWVILNRHHKEFDSKETIKKLEDEWVIVKNDHEAIVSEELWDAVNDEIQSHRNKGNSGTRGKRGGTDPLSGKMVCNCCGRVLWKHASQGSYKSKEGRKYTYKRYTQWYCSGKMGRGELACTDPATISGVKLQKYLVEMADMFLDYSTVEYSKNLLKRRTISWLEDLKDKLTTPNDNGKIEQDLKALEGKRGKLIDLYTDELISKEEFKSRSVDLDAEIEKKKTLLVPVEENPDIKAIEDTIANIDAEIEVLFEDEAMVEEKKVQFIQEHIKKIYVSKNSDVFIVLDNVAGAFLFIDKEDTRIEVVPVAEYNPEELSEEGITENDFVPFDRESMPQHHGPKHLHPSGPQTAPRCCFRDRFSCDQP

SEQ ID NO: 11138 - protein, 415 aa, synthetic construct
MFFGIYGRKSVYSDKSDSVDNQHRMCNDYIKAHFKADDITLVTSYSDEDYTGANTKRPDLQRLLEDVKSGAINVLVVYQLDRISRDVRDFSNIYAMLEEYHVMFISIKENIDTTTPIGRAMMYVTVVFAQMERETIATRVRDNMIGLAKKGFWTGGNPPYGYVRKNILINGKKHVTIEPDPDGVAYNIWIYDSFLKNHCSLQSMETYFRKEGIKTRNGAFFSTTQLYKILTMPYCVEATPEIYDYFAAKGCQMDPDSPREKWDGSVGVMIYGRSTGVNKKHQLQPPEKWLVCLGLHKPFMPAAKWLAVQNQFSENKFDKTQKYDIPLLKGILRCSCGSIMAVSRKKKINSEVSSWYYCLRRMKNGVEACDRKQIKVDIIDQKLLNTLHSIEIDPSMIYRFVQKKRASSSGYQNNQ

SEQ ID NO: 11139 - protein, 592 aa, synthetic construct
MRKISKIEPTMPAVAAKKKVAGYARISMESERMHHSLSAQISYYNALIQKKPEWEFAGVYADDGISGTGTAKRSEFLRMIADCEAGKIDIILTKSIQRFARNTVDLLETVRHLKDIGVEVRFEKENINSMSGDGELMLSILASFAQEESRSISENVKWGTRKRFEQGIPNGRFQIYGYRWEGDHLVVEPEEAKIVKMIFDDFLNGLSAESTEKKLEQMGVKSYKGQHFSNTSIRQILSNVTYTGNLLFQKEYVSDPITGKSKINRGELPQYWVENTHEAIIPLETYRTVQEERKRRRELGVFANWSINTSCFTSKIKCGNCGVSYRRSGKRQRKDKNEVYYVWVCQTYDRKGKAACPSKTIPEIKLKAVCAEILGLKEFDETVFSEKVEQITVIGDDTLEFHFTDGAMQQKKWSSSAKIDWWTAERRKEWGERHKNKSTNPNRSRYKAFTGFIKCGNCGENYRSQGTTYADGTKNRYWRCCKSCGNIGIKQSTMEMLVSEVLGLDTFSEEQMDAQIEKAVIKDGTVTFYFKDGHTEYQNYEEKKRGVPHTEEYKQHMRQLMKERWTPEVKQQMSESMKNLRKERGKAWQKEK

SEQ ID NO: 11140 - protein, 527 aa, synthetic construct
MAKRKVTTIPATINKFTAKPVDSKKKRRVAGYARVSTDHEDQQTSYEAQVDYYTNYIKGRDDWEFAGLYSDEGISATNTKHRDGFNQMIADALAGKIDLIITKSVSRFARNTVDSLSTIRKLKEHNIECYFEKENIWTFDSKGELLLTIMSSLAQEESRSISENVTWGHRKRFADGKVSFAYSRFLGYEKGPDGTIVVVPEQAKTVRLIYKLFLDGMTMHTIAGELTKRGIKTPGGKDKWNQSTVRSILTNEKYKGDALLQKSYTVDFLTKKTKTNEGEVPQYYVENNHEAIIDPQIFELVQAEIAKRNKGKERYSGVSIFSTKVQCAECGGWYGSKVWHSNDKYRRIIYQCNNKFRNKTGCTTPHLTEYEIKEYFIKALNRLITEKDEIIANTEMIRKMLCDNSELEAKRDALQEEIAVTVELTQNAVAENARVAQDQDDYNKRYNALVERYDRLKAQYDEVSTAISDNEARYEQMGRFITVLKDQEDVITEFDDALWSSLVEKMVVKSKEDVTVVFKDGTEMKAE

SEQ ID NO: 11141 - protein, 435 aa, synthetic construct
MIDDCKAGNIDMIITKSISRFARNTLDCLKYIRQLKDMNIPVLFEKESINTMDAKGEVLITIMASLAQQESQSLSQNVKMGLQYRYQQGKVQINHNRFLGYTKDADGNLVIDPEQAETVKRIYREYLEGLSMDKIAAGLERDCILTGAGGKRWHTSTINKILRNEKYIGDALLQKTYTTDFLNKTRVKNNGLVPQYYVEGDHEAIIPKNIYQQIQEELVRRRVVKTSDNGKKRSYSCNHCFSQIVIFGECGEMFRRLHWNNRGVKSIVWRCISRLESTGLECHARTINELVLQDAVVNAINQLLGDKNNYQAQLQLNIAAVIRASQVTAIDSIDKKLMALQQELIQKANSKEDYDEIADEIFRFRELRQKTTVDTAARDEQIKRINDLQDYISQQTALLTEFDESLVRRWIKQITIWDDRIIVELKSGVSIDVDA

SEQ ID NO: 11142 - protein, 558 aa, synthetic construct
MNRYGKRCVLYPRVSTEMQVDGYSLEGQKNMLTRFADREEMIVVDTYEDAGKSGKSIEGRPAFQKMLRDIEDGLDIDYILVYKLSRFGRNAADILNSLELVQSYGVNLICIEEGIDSSQTSGKLLISVLSAVAEIERENIIEQTMNGRREKARQGGWNGGFAPYGYTLEDNKLMIEETEAVAIRKIFELYTSSEIGLGGIANQLNLQGIRKIPRQNGTLEDWTGHFIKLILDNPVYCGKIAYGRRTKEKVKGTKNDYQMKRNDDYILTEGQHKGIVSEEVWEKAHAKRLRTGVKQPSKIGRDRVHLLSGLLKCPVCGSPMYTNKHAWTNKDGTYKEIYYYVCSRNRMVRGKHCEYKAMLKKTDIEPMVIEAIREIVRNEEYAQAIKKRIGVQIDTKAVDKELEGYQAKLKEVDLNKTRLEREIDSLPADAKYRERKLHDMTLRLDSLYDVIVELEEKIEDARLRRDAIKQQAITLENIYKIMVNFDCVYNIINDEEKRNVVTALIKEIEIYRNDESEYPLKRIGLNFPVFKDGGEVTELLWDKGNTVETVCLLSRKDK

SEQ ID NO: 11143 - protein, 524 aa, synthetic construct
MTAVIYARYSSDNQREESIEGQIRECTAYAEKNGITIVKHYIDRAISAKTDNRPQFQQMIKDSDKKLFDIVLVWKLDRFARNRYDSARYKTQLKKNGVKLMSATEIISEGPEGIILESVLEGYAEYYSADLAEKVVRGQTENILKGRCNGGRGTFGYTLDSERKFHIDPLASPFVLESFTKYRDGLTMKEIRDWLNENGIKNPVGGEFTYNSVEHMLKNRRYIGELKFRDVVVPDAIPPIVPLELFDDVQEKIAKNKKAPARRKAEDDYLLTTKLHCGCCGALMFGESGTSRTGEVHRYYKCATAKKKKGCKKKTVRKQWLEDLVVNQTMQLVRDDAAMESIIAKVMELQDRENTNLPLYEKQLRDAESGIQNMLNAIQAGILTSSTKERLEQLEETKRELEARIAEEKLAKPKIKEEFIRFWLMRFRKLDMSLKDQRQALVDTFINSIYLYDDKVLITFNYKEGTQTITFEEAAQAASKENGSDLDCFTAPKDTREVTLKIRSFAGFSFLAVVRYCQILPNTA

SEQ ID NO: 11144 - protein, 505 aa, synthetic construct
MIAALYARYSSDSQRAESIVAQIRAGREYCRRKGYHIIKEYADEAYTGTNDNRPAYREMLRDAAAGLFEVVIFHKVDRNGRNEFDYYKNKQELARHNVRVEYSGQAFDSTSPEGALMENQLVGLAAYYSRNLSREVKKGLKENVLAGKITGGRPLFGYSVDKNKKYVINEEEAVAVRYIFERYAAGASYIDILREVNARGYRTRRGAEFGKATLHDMLNNRRYIGTCILGKNQPYLDGRRNSHRPDHDGMIIVPNGCPAIISPDLFQAVHERMQENRRRGGRRTAKYPYLLSGLVYCGECGASMSGTRTRTRKKEIREYYRCCQKSNHGDAKCPNRYIYAPALENFIIERLAAVIDNENLLFRLAQKVQEKYDALVGNARVQIAALQEQEAKASKSLERLYEVIADGDTFDDFDRAQMKHLKQKILDIRAQREKLEQQPGKTISSAEIVHYIRDRFLPAIRQRTASGLTELLQYFVHTVTVFRDKIRVEYWFASCRYSSERTNMI

SEQ ID NO: 11145 - protein, 497 aa, synthetic construct
MPKTEEKQAIKAVIYARYSSERQREESIEGQLRVCEDYASRNNMTILHTYADRAMTGRSDQRPEFQMMIRDAATMAFDVVLVYKLNRFARNRYDSAKYKHKLKKYGIKVVSAMENIADDPSGILLESVIEGMAEYYSAELAENVMRGMTENALEGKWPGGVVPLGYKLDEQHHLVIDGPKAEVVRLIYQLALEGHNQKYIIDELNRRHYTNSAGGPFSYNTLRTILRNEKYIGVFTWGTVRRENACPAILDKATFEAVQEHLNFRTKHHIRSCNEDFLLTGKLFCGCCRSKMIGVSGTSKTGAIYYYYACAAHLKKKCKTRNIRKDAIEDLVCEVTTRILSSKEAVEAIARQAIEMQKNKKDSLELQTIKNQIADINKKLQNCVKAVENGLISETITNHINEYEKELTRLKDDAARVKLLDGDIELTQQHIEFFFWSIAQKIKAADKYKSILLSSIVRSVIVYKDYIEIQYNYKNELPILQNPVKVESSYLNQMVTR

SEQ ID NO: 11146 - protein, 521 aa, synthetic construct
MRAFIYCRFSSHKQQELSIEGQRDICQEYADKHNITVVGQYADRARSGKTENRADFRRLMRDAATGVVDCVLVWRYDRFFRNRAESALYRKQLESAGVHLISVTEYIPEGSAGIITQGMIETVAEYFSAKLSEDVSRGMNKAAQHCQIVGRAPLGYRAGPNKRWQIDPVGAELVRRIFEWYASGKAMGQLAAQLNEEGHRTTNGTLYTRSSFNSILRNEKYIGVYSYGGEVRIEGGCPRIIEDELFFTVQRRLSANRHRPGAYKAEVPYLLSGKLFCGLCGAPMTGTAGTSHTGARHYYYICNNRRAKTCKKKNVRLDLIEEAVLQSALDILTDENIAYISTEVERRCAENSESAALLASLNAQLEEVQRRLKNIGNAIAQGIITETTKELLEEAEADRTALRQQIDRAKVQAALVVKAEAVACWLDGFRRGDRTDPDFRRQVFGALVHSVFVYDDYLKIIFNVDSAGAAVVPYEAAQAAAPSEAPPGSYLDTLGAPYQANPNVLLFEGAFGFVFYLTFVG

SEQ ID NO: 11147 - protein, 569 aa, synthetic construct
MVYWDEQGNTVEISKADQLWLDDGYFKTQQAHLPPDAPRAALSYRVSTKGQVDHNDIPMQKIKCRKFAQQQGWRVVMEKAEKGISGSKVSASKRDVIQELRQEAGNGSFDILLVYMFDRLGRIESETPFVLEWFVQHGIQMWSVHEGQQRIESHGDKLMNYIRFWQAAGESEKTSIRTRDRIRQIVSSGHFAGGFVPYGYRAVDKGRVNKRDQPVKDLEIDPEEAAWVREVFEKVANEGASGYAMARMLNDRGLCTRQGARFQSVNIRRMIRHEGYTGYLITKAARSEFIQELQIVDEKLFARANEVIDCRSKKLAQEKNIAAKTNNPTLLAGIVVCAHCGAKMSAFLHTDRYKLADGTIREKVQAKYNCYQRGQKLRACDGQSLYLAERVDAVVLEVVHDIFRRIQQEPYDRSIEQKLRQENGERERQKQAAEKKIKAAQYKQKRYEDEVIRCLDGQSRFSEEMLARLIAEAETEVRQAKEEYAELLRNDTTRATIQQIRSYYDEFLGWANEFDLATIPRKRAILGQLIEKVEVGKGYKVTVHLRMSYAQFLGIEGNGEIQVRKDVCA

SEQ ID NO: 11148 - protein, 673 aa, synthetic construct
MTAVIYARYSSDNQREESIEGQIRECTAYAEKNGITIVKHYIDRAISAKTDNRPEFQQMIKDSDKKLFDIVLVWKLDRFARNRYDSARYKTQLKKNGVKLMSATEIISEGPEGIILESVLEGYAEYYSADLSEKVVRGMTENALKGIYNGGTIPFGYMIDETRHYQPDPLLAPYVEQTFQKYADGATMTDLRDWLKAHNIKNSMGGEMSYNTIQRMLSNRRYIGELRLRDVVQPNAIPALVSEDLFNKVQEKLAKNKKAPARHKAEESYLLTTKLYCGKCGALMFGESGVSHTGKMYTYYKCAAAKKKKTCDKKAVRKQWLEDLVVNETMKLVEDDASMNAIIAKVMELQNQESTDLPIYEKQLKETEVGITNMLNAIQMGILTSSTKERLEALEEQRKELQARIAEERLAKPKMKEEFVRFWLLRFRKLDMTQPEQRQALVDTFINAIYLYDDKVLITFNYKEGTETVAFGEAVKAEKSSDMSARGAPDFERQIVRFGVLFCYVTPKNRGLHGQCTVFARSAFSWESSAWAGIALKSVVNFASSQQSQTELRLYFGVCMVIASALYSGAFRQQVHPVSAPTEGDFPQCGEIFQREKINCCPLRLIFPVHISTCQSFQQLRRLNIHQFYLICLIKGGIRNALPHKNSGDRGHCIVETLDMLDIYSRIDINSSI

SEQ ID NO: 11149 - protein, 516 aa, synthetic construct
MARKKKVSPGNRLVAYYRYSGGSQQTEQSIEGQRRDCEAYARQHGLTIVHEYIDRHISGRGVESRLAFQQMIADSSKHLFDLVICWKTDRFARNRYDSAVYKKKLRDNGVRILYAAESSVEGPEGIILEGLMESLAEYYSAELAQKMRRGMRESALKGKAINPNRPLGLTTDEHKRFIIDEKNAPTIRFIFEHYAAGESSASIVDQLNAAGLRTSKGNSFNKCSIPRIIQNEAYHGVYICKAYDVRIDGAIPAIIDDDLWKRAQKMLTLNKQHRAPHSSHADYLLSGKLFCGCCHSLMRGISGHNCRNDVYYYYACGNKADGGTCKKKNIPKDVAENLVVNAICENILRPDTLEDLADAIAAAQQADVNQPDPERAMLEQNLADVHRKINNIIESIENGTASSRLSARLADLEQQESTLNYQLESLKEVHPPVLDRERILFLLEQFLISPNERTEDYNRRIIDTFVNRIEITDTEMLIYFNLSEASASEKQKSSQPNSCSTGNHLVRVARIELTAS

SEQ ID NO: 11150 - protein, 522 aa, synthetic construct
MELLNVCIYLRKSRADREAEARGEGETLARHERILLDLAKKRGYNVGTIYKEIVSGETISARPVMQQLLREVESGIWDGVLVVEVERLARGDTIDQGVVARSFQYSNTLIITPLKTYDPNNEYDEEYFEFGLFMSRREYKTIRRRLTAGRESSAKEGKYCGSKPPYGYSRVKLVGEKGWTLQPVPDQAEIVKLIFNLYVHGVSGERIGMAKICRKLNDSGIKTMDGGLWTISRVQAILRNPVYEGMIRWNSRKAVKHIKDGQITISRPFAQDYILVKGRHPAIVSRELFQQAQDIVNKNPARPLNSLHVLRNPLAGIVRCGKCDHVMTRKSPNGRQGDLIRCPYSSCSNISSKLPLVEKALLDGIQELVDGYRLNNSVSNQEYSLSISEREKMIQGKLKEIDILKKRKQRQYDLLEQGIYSTEEFLERSRATAAELSACDAVILSLKQEIEHEQELQFQRSSFIPKCEDLLANYWTWDTSTKNRFLRELIEKAVYTKNAKNTWKNGDDISFTLDIYPKIQQK

SEQ ID NO: 11151 - protein, 480 aa, synthetic construct
MLRDARKKKFDLIVTREVSRFARNTVDTLVTTRELKQYGVEVYFVNDDIWTMHGDGEVRLTITASLAQDESRKMSERTKAGIQTSQKKGTYVAGPTPFGYKRDKKAHTLVVQESQAETVRKIFAWYADGINGTEIAQTLTQEGAPNKSGMPQWSARQVLSITKNTIYKGYLTYNKSHIDDFLSHKSIKNSEQDYILVKGSFEPIISEELWDKCQRRRHAWQSYKDGNITQAYLYGKSEHADKWACRLFCGCGARMRAFRAEKGIVRYICYQRSLRNVASKCSAPNVQAWKLELMAREIYKNVWQDHRQDILEEYQQKQENGAANSEKVEEALSWQESFPNDEISREFLDRFVPRIFSIDGQKFIWELNLFQESCTVQCNVRGTYNYHSISAEKIMPGKTKAKKGDGAVNRILEDANSTRFWVHTYDDDPISRQPSSRLAADLPASITIKLNYEQARAYRNSRGYVLWPGNWKDLTVKVLL

SEQ ID NO: 11152 - protein, 617 aa, synthetic construct
MTDYIGNYKNRPRRVVFYGRVSTEHEEQLSALGNQMEWYTDLALHNPNWTVVAQYIDEGITGTQMKKRPSFMRMIEHAKEHRFDLIVTRELSRFARNTVDALNATRELKQYGVEVYFVNDGIWTMDGDGEVRLTIMASIAQDESRKTSERVKAGQKMSREKGVLYGSGNIIGYDRVDGTYVINKEQAATVRRIFNLYAEGHGETTVAKMLIEENRKDGGGGLSWTASKVSRVLRKPTYKSYMTYNKSHIDDFLSHNRINHSEEDFVLVKGDFEPIVSEELWETCNQIRSKRAAFVKGKDGRAHKFGVSFPQNKWTKILFCDCGMRFQIEGYDKTANGGKNMRLICARSKMFKKKDAVRALNGVPCPAPYASEWKLELMAREVFRTVWKENAEDILGLLRMLDANLNTTGTPNDGNQLENKLSALNEELDDLVSQRASRSITMDDFLSRSTEINNEIINVEGLLQSSIQEQRSKARLDMHSIEAALSDDASFPDGKIEPGFLDRYTNRIVKSNNRYIWMLQLMNVQQIMPIQSERQPIAMVTYKSGVPYDIEQEQISKQDKESAGPDCATICRPQDFFLNMGRTTRKRKLVEWLESCQENQVSVLDEKIPLLSLRLTL

SEQ ID NO: 11153 - protein, 536 aa, synthetic construct
MTAVIYARYSSDNQREESIEGQIRECTAYAEKNGITVVKHYIDRAISAKMDNRPEFQQMIKDSDKKLFDIVLVWKLDRFARNRYDSARYKTQLKKNGVKLMSATEIISEGPEGIILESVLEGYAEYYSADLAEKVVCGQTENILKGCCNGGRGTFGYTLDSERKFHIDPLASPFVLEAFRKYRDGLTMKEIRDWLNENGIKNPVDGAFTYNSVEHMLKNRRYIGELKFRDVVVPDAISPIVPLELFDDVQEKIAKNKKAPARRKAEDDYLLTTKLHCGYCGALMFGESGTSRTGEVHRYYKCATAKKHKGCKKKTVRKQWLEDLVVNQTMQLVKDDAAMESIIAKVMELQNKENTNIPLYEKQLRDAESGIQNMLNAIQAGILTSSTKERLEQLEETKRELEARIAEEKLAKPKVTEEFIRFWLLRFRKLDMSLKDQRQALVDTFINAIYLYDDKVLITFNYKEGTQTVTFGEAAQAASKGNGSDLDCFAAPRKTSTHCVLVFLFCLRDGRGSNRAAAHSAASNQPSATTTTAACG

SEQ ID NO: 11154 - protein, 539 aa, synthetic construct
MTAVIYARYSSDNQREESIEGQIRECTAYAEKNDLTVVKHYIDRAISAKTDNRPEFQQMIKDSDKKLFDIVLVWKLDRFARNRYDSARYKTQLKKNSVKLVSATEIISEGPEGIILESVLEGYAEYYSADLSEKVIRGMTENALKGKFTGGAIPFGYTINADRHFEIDPMTAPFVAETFQRYNDGQTMREIRDWLNEKGIKNKRGGPMTFNTIQHMLSNRRYIGELKYRDILIPDAIPPIVSVELFDDVQKKMLKNKKAPARRKAEDDYLLTTKLHCGYCGALMFGESGTSRTGEVHRYYKCATAKKHKGCKKKTVRKQWLEDLVVNQTMQLVRDDAAMESIIAKVMELQDRENTNLPLYEKQLRDAESGIQNMLNAIQAGILTSSTKERLEQLEETKRELEARIAEEKLAKPKVTEEFIRFWLLRFRKLDMRLKDQRQALVDTFINAIYLYDDKVLITFNYKEGTQTITFENVAEATSKRNGSDLDCIPAPKRPQNGKRFGVFCCYRKCFYCGKTQENRERQKKRKSVEKVVDKCHFR

SEQ ID NO: 11155 - protein, 435 aa, synthetic construct
MIEACKTGEIDMIITKSISRFARNTLDCLKYIRMLKDKNIPVFFEKESINTMDAKGEVLLTIMASLAQQESQSLSQNVKMGLQFRYQNGQVQVNHNHFLGYTKDREGNLVIDPEQAEVVKRIYREYLEGSSMDKIAKGLEKDGILTGAGKKKWWTSTINKILRNEKYIGDALLQKTYTTDFLNKTRVKNNGIVPQYYVENNHEAIIPKDIFLRVQEELVRRRVVKTSANGKKRSYSCNHCFAQIVICGECGEMFRRLHWNNRGVKSIVWRCISRLESTGLECHARTINELVLQDAVVKAINQMLGDKSNYQAQLQLNIAAVIRASQATSVENIDEKLMALQQELIQKAQSKEAYDEIADEIFRLRELRQQTTIDTAARDEQIKRINDLQDYIAQQTTHLTEFDESLVRRWIKQITIWDDHITVELKSGVSIDVDV

SEQ ID NO: 11156 - protein, 504 aa, synthetic construct
MREHGRISIKKKKFNHKDLYPELNEENYPYYKRLYCARCGSRLGRYISHGTVRWICSSYKRKGQAKCPGVRIPDEIIKGWNLPDGKIYIMGKEDKNGEKHYSYTSESAYRVGGRTQQKTRNLRVAAYCRVSTDQEEQLNSFENQVEYYTKYIQDNPLYQMAGIYADEGISGTNTKKREEFKRMIRDCEEGKIDLVITKSISRFARNTQDCLEYSRRLKNLGIGIFFEKEHINTLDASGELLFTILSSLAQDESRNISENCKWGIRSKFKKGIPQVDCTKFLGYDKGDDGKLIVNKEQAKIVKRIYREFLNGYNPAAIAKMLMEDHIKTGTGREEWRSASVRAILKNEKYMGDALCKNLYSRFLTKKVKKNHGEVEQFYVKESHEAIIPKEQWEAAQLELERRDSYMQKLGLTFYGYGSEINPFSCRVVCGKCGAVCGKKSWKSRGVEFWQCNNRSKNHGVKGCASENLPHETCLRGLLRRGTRLLWKENNIFQNGRKRRRKEIR

SEQ ID NO: 11157 - protein, 454 aa, synthetic construct
MQMTVFQVPTLKRREEFNRMIEACKTGEIDMIITKSISRFARNTLDCLKYIRMLKDKNIPVFFEKESINTMDAKGEVLLTIMASLAQQESQSLSQNVKMGLQFRYQNGQVQVNHNHFLGYTKDREGNLVIDPEQAEVVKRIYREYLEGSSMDKIAKGLEKDGILTGAGKKKWWTSTINKILRNEKYIGDALLQKTYTTDFLNKTRVKNNGIVPQYYVENNHEAIIPKDIFLRVQEELVRRRVVKTSANGKKRSYSCNHCFAQIVICGECGEMFRRLHWNNRGVKSIVWRCISRLESTGLECHARTINELVLQDAVVKAINQMLGDKSNYQAQLQLNIAAVIRASQATSVENIDEKLMALQQELIQKAQSKEAYDEIADEIFRLRELRQQTTIDTAARDEQIKRINDLQDYIAQQTTHLTEFDESLVRRWIKQITIWDDHITVELKSGVSIDVDV

SEQ ID NO: 11158 - protein, 464 aa, synthetic construct
MARSVTVIPARNRQRETGRRAVQEKKIRVAAYCRVSTDQEDQLHSFEAQVDYYTKYINDHENYEMAGIYADEGISGTNTKKREQFKRMIADCEGGKIDLVITKSISRFARNTQDCLAYSRKLKNLGIGIIFEKENINTLDSTGELLFTILSSLAQDESRNISENCKWGIRTKFKNGEMHLNTFKFLGYDKDENGKLVINKEQAKTVRRIYRDFLIGINPAQIAKELTEEKVPGCNGQTKWYPSTIVGILKQEKHMGDALLQKTYTADFLTKRQVKNNGEIAQVYVKDSHKGIIDKETWNAVQEEFERRERFMKNHGTDRYSYGADCMPFCEKVFCGECKSLFTRHSWKSRGIVQWQCKNHRTDGRVTCRNAYVDNSDLEKGFVKAFNKLVADREKFMERWNQMKTDGSPLEKIRAEQMMEATENEPLGRFVPEIAQLVLAEVTVLGAKKYEFFFLEGSRIKVSV

SEQ ID NO: 11159 - protein, 498 aa, synthetic construct
MEIQIREGNREQKKKLRVCAYCRVSTDADEQENSLENQIRHYETVIKANPSYEYAGVYSDFAISGFKEKRPGLQKMLADAQKGKIDLILTKSVSRFARNTSIVLEATRKLKELNVGVFFELQNINTLSGEGELMLTILAAFAQAESESGSVGAKMVYQRKYEAGIPVQYLERSFGYTKDERGVYIADESEAVWVRKIYEMAADGYTPAAIKRYLNENGVKTVGGTKWIDSTVFRLIENEIYKGDYIMHKHFVNEERKLVRNRGEVDAWYIEDDHEAIVSPELWQKAQDAIEAKRDYLAEGSVIEEFTEDNYPYMNRIFCAKCGHPLYKRIYSNGNRLNWGCSGTKRYGKSFCEGINIPDGVLRKAWHFDGNMYIDEKPSVKGTKEFTYLKESSWKRRHKKKVPEAIPENTEDAYPYRKKIFCGLCGSRLVRHVNPKSHKVIWICNGAKRKGVAFCRGTRIPDSVIRGWGEIKKDIYIQRKDDKNGKKRYSYTSKKPTA

SEQ ID NO: 11160 - protein, 419 aa, synthetic construct
MRFLQQKRKKRVCAYARVSTDSRRQEESLENQTATYERLIRSNPEYEFAGVYADQGISGYCENRPQFQKMLERVRAGEIDLIITKSISRFARNTVTVLKVARELKELGVGIFFEEQKINTLSGDGEMMLAVLASFAQEESRSMSENNKWSIKKKFERGEVMITTSRFCGYDKNEYGDLVVNGKEAEIVRLSFDLYLMAIGSSRIASLLDYLGVPTVTGGTWEGGTIGGMIANEKYKGDFLLQKYYTPPDKRNFTRKNRGEVQSYYISENHEPIVTPEVWQQAQEMRDYRKKIRNIGQDGTRKFQNRYPLSGMLICPHCGRTLRRRQVYKKKIQWLCSTYIEQGKQACKGIRIDDAELAGLHITEQTVVEEVLKGGKKHYRYTSKAEFDFTGEFQPERPENTDGSVLPGVNRPRRTVIKL

SEQ ID NO: 11161 - protein, 458 aa, synthetic construct
MPNLRKIEAAVPTIREKKKVAAYARVSMQSERMLHSLSAQVSYYSGLIQKNPDWEYAGVYADDFISGTNTVKRDEFKRMLADCEAGKIDIILTKSISRFARNTVDLLETVRHLKDLGIEVRFEKENIRSMDGDGELMLTILASFAQEESRSISDNVKWGIRKRMQSGIPNGRFRIYGYRWEGDELVIVPEEAEIVKRIFQNFLDGKSRLETEREFAAEGITTRDGHRWTDSNLKVVLTNVTYTGNLLLQKEFVADPITKQKKKNRGELPQYYVEDTHPAIIDKATFDFVQEEMARRRELGALANKSLNTSCFTGKIKCPYCGQSYMHNKRVKNGNIQEYWNCGSKKKKKIGDGCPVGGTINHKNMVRVCTEVLGLTEFDESVFLEQVDHIDVPERYTLEFHMADGHVITKGCPNTGHQDCWTPERRAAKAEFMKKEMARRKELRMHGAKKSDSDSGDH

SEQ ID NO: 11162 - protein, 523 aa, synthetic construct
MAQRKVTAIPATIKKYTAVPIGSKRKRRVAGYARVSTDHEDQVTSYEAQVDYYTNYIKGRDDWEFVAIYTDEGISATNTRRREGFKAMVADALAGKIDLIVTKSVSRFARNTVDSLTTVRMLKEKGVEIYFEKENIWTLDAKGELLITIMSSLAQEESRSISENTTWGQRKRFADGKASVAYKRFLGYDRGPNGGFVVNPEQAKTVKLIYKLFLDGLTCHAIAKELTGRKLPTPGGKAVWSQTTVRSILTNEKYKGDALLQKEFTVDFLQKKTKKNEGEVPQYYVEGNHEAIIDPVTFDYVQAEMARRTKDKHRYSGVSMFSSKIKCGECGCWYGSKVWHSTDKYRRVIYQCNHKYKGGKPCSTPHVTEEQVKDAFVRAVNILLSEKAELGANVRAVIAMLCGSAELEKQQAELKEELEVVVGLVERCVAENARTALDQDEYSERYNGLVSRYEAVKAQFDEVTQAIADKNDRKKLLEQFLRMVETQEPVTEFDERLWSSLVDFVTVYREKDIRVTFKDGTEI

SEQ ID NO: 11163 - protein, 569 aa, synthetic construct
MKQSSNKKSREATAFLYERLSRDDNLEGESYSIGNQKKLLTKVAKEKGYTNLVHFLDDGISGVTMNRPGFVEMMQQLEQGKASAVFVKDLSRLGRNYIEVGRLTEEFFPDHDIRLVAVSDNIDTAEGENELAPIRNLFNEWYARDISKKRRISNKIKGNSGEPMGLPPYGYIKDPNNPKHWVIDEEAAQVVRRIFDMTLEGFGTEQIATQFEKEGVLTPQAYWIQKGIGRPGKTKMRPATKWNGSTITHLLYQQEYCGDVLNFKTYSKSYKNKKRIHNDPENWVVFQNVHEPIIERAVFEQVQQKRGKMRKRRTSNGEHNMFSGLLVCADCGCNLHFHFNQGNPEIKYFNCSNYKGNRGTCQSTHYIRVDFLEEVVLGEIRRLTKFASLYEDDFLKAVIGHSQQADEADRKLKEKELKALLARDEELDGLFERIYEDNVSGKISDERFSRMSRRYEDEQQELTEKIKQLRSEIEKQSSRTMTTDMFISLVRKYTRAKKLTPRMLNELVEKIEVFNAEKVNGVWEQRLRIHYNCVGTIEIPSALPLPTPDVSVNTRKGVVVNYAPCDVAI

SEQ ID NO: 11164 - protein, 499 aa, synthetic construct
MNVVLYMRYSSDRQTEQSIEGQKRVCMDFCERQGYNVVGEYIDRATSAYKETAKRTNFCRMIRDSSNGLWQGVVVYKLDRFARNRYDSATYKVRLKKNGVKVISATENISDSPEGVILESVLEGMAEFYSKELSQKVSRGLNESAHKCNSTGGAIPLGYKTVNKKLTVDEPNAQIVKEAFDLYAGGATISEICEKFNSQGYRTKKGTEFNKNSFKTMFRNEKYIGTYTYKDIRIEGGIPAIIDKETFKAVQKRLSANAQAPARGKARVNYLLSQKLFCGHCGANMIGESGRSKTGETYYYYSCSTRKRFHSCKKRTIRKDLIERIVAENAMRLITPEMINTIADMAIKCNREDIESDAIIPALTADLKEINTSIKNLLKMVERGVESETLDSRLQELEKRKKDTESRLDAAKSEYLTLDKTVIVGWLSQFLSGDIEDEDFRRHLIDTLINSVTVWDEPDGGYKITTVYNLKGNTQTYRVNADGSSDMKRNSPPKKRQFS

SEQ ID NO: 11165 - protein, 462 aa, synthetic construct
MAQRKVTAIPATITKYTAIPIGSKQKRRVAGYARVSTDHEDQVTSYEAQVDYYTNYIKGRDDWEFVAIYTDEGISATNTRRREGFKAMVADALAGKIDLIVTKSVSRFARNTVDSLTTVRMLKEKGVEIYFEKENIWTLDAKGELLITIMSSLAQEESRSISENTTWGQRKRFADGKASVAYKRFLGYDRGPNGGFVVNPEQAKTVKLIYKLFLDGLTCHAIAKELTGRKLPTPGGKAVWSQSTVRSILTNEKYKGDALLQKEFTVDFLQKKTKKNEGEVPQYYVEGNHEAIIDPVTFDYVQAEMARRTKDKHRYSGVSMFSSKIKCGECGCWYGSKVWHSTDKYRRVIYQCNHKYKGGKPCGTPHVTEEQVKDAFVRAVNILLSEKEELSANVQMVIAMLCDSAELEKRQTELKEELEVVVGLVERCVTENARVALDQDEYTERYNGLVSRYEAVKAQLMR

SEQ ID NO: 11166 - protein, 593 aa, synthetic construct
MPNLRRIEAAVPAIREKKKVAAYARVSMQSERMLHSLSAQVSYYSGLIQKNPDWEYAGVYADDFISGTNTVKRDEFKRMLADCEAGKIDIILTKSISRFARNTVDLLETVRHLKDLGVEVRFEKERIRSMDGDGELMLTILASFAQEESRSISDNVKWGIRKRMQNGIPNGHFRIYGYRWEGDELVIVPEEAEIVKRIFQNFLDGKSRLETERELAAEGITTRDGCRWVDSNIKVVLTNVTYTGNLLLQKEFISDPISKQRKKNRGELPRYYVEDTHPAIIDKATFDFVQEEMARRRELGALANKSLNTSCFTGKIKCPYCGQSYMHNKRVKNGNVQEYWNCGSKKKKKVGDGCPVGGTINHKNMVKVCTEVLGLDEFDETAFLEKVDRIEVPQKYTLDFHMIDGSVVTRDCPNTGHQDCWTPERRAEVSAKRRKNGTNPIGASCFTGQIKCVSCGCNFRKATRNCKDGSKVSHWRCAEHNGCDAPSLREDLLEQMATGVLGLDAFDAAVFREQIDRVEVLSSSELRFCFKDGRTVSRNWQPPERVGRPWTEEQRAKFKESIKGAYTPERRRQMSEHMKQLRKERGDKWRKEK

SEQ ID NO: 11167 - protein, 465 aa, synthetic construct
MSITNVAIYVRVSTDRQAKKGDSIDEQLSTCKNYIDSKENMVLVGTYIDDGISGRKINRGDFEQLLDDVRLGRIDLIIFTKLDRWFRSLRHYLNTQAILEANHCDWLAVDQPYFDTTTPHGRAFVAQSMTFAELEAENDSVRIRDVFDYKYRQGEVLSGKVPLGYSIENKHLVLNQDADKVLHIFQFYAECGSLNQTISHLERDMGIIMSQDNLKKSVLKNKKYIGVFRDNDHYCPALVSADLFERVQELLAINIKVSQKYSYVFSGLLRCAHCGQAFSGAMRKIKKRNGDGYYKYPFYRCHGAYPNKRCINRKIVFESYIERYLLSNIKDLLQKYIADYEIATAKVIDYDSRRASILKKIDKLKDLYVNDIITMDELKQDKERYIKELESLPRNQPQKDMAPIRKLLKMDLNSVYETLDPAERRQLWRSVIKEIQIDDRRNLKVIFYDFFVVVTMSSLWVHLPE

SEQ ID NO: 11168 - protein, 525 aa, synthetic construct
MAQRKVTAIPATITKYTAIPIGSKQKRRVAGYARVSTDHEDQVTSYEAQVDYYTNYIKGRDDWEFVAIYTDEGISATNTRRREGFKAMVADALAGKIDLIVTKSVSRFARNTVDSLTTVRMLKEKGVEIYFEKENIWTLDAKGELLITIMSSLAQEESRSISENTTWGQRKRFADGKASVAYKRFLGYDRGPNGGFVVNPEQAKTVKLIYKLFLDGLTCHAIAKELTGRKLPTPGGKAVWSQSTVRSILTNEKYKGDALLQKEFTVDFLQKKTKKNEGEVPQYYVEGNHEAIIDPVTFDYVQAEMARRTKDKHRYSGVSMFSSKIKCGECGCWYGSKVWHSTDKYRRVIYQCNHKYKGGKPCGTPHVTEEQVKDAFVRAVNILLSEKEELSANVQMVIAMLCDSAELEKRQTELKEELEVVVGLVERCVTENARVALDQDEYTERYNGLVSRYEAVKAQFDEVTQTVSDKADRKKLLEQFLHTVETQKPIAEFDERLWSSLVDFVMLYSEKDIRVTFKDGTEIQA

SEQ ID NO: 11169 - protein, 550 aa, synthetic construct
MTTTKNYPDNITALYARLSQEDALDGDSNSIVNQKKILLKYAEDNGFPNPTFFIDDGVSGVTFDRPGWNEMIGLAEAGKVKTVIVKDMSRMGRDYLKVGYYTESFFAERDIRYIAINDGVDSDKGDNDFTPFRNLFNDFYARDTSKKIRAVMRAKGNAGEHLCSNPPYGYVKDPNDKKKWIVDEEAAEVVKRIFDLCVAGKGPMQIAKTLTAGKVLTVKAYYAKRDGKPMPDNPYRWSVETVRGILERPEYTGCTVNFKTYSKSHKLKKRLQNAPENYRIFPDTQPAIINEKVWERVQELRANKRRPAKQAERQGLFSGLLYCADCGSKLHFATGKNMTPEQDCYRCARYKSNTGDCTMHFIREETLKRFVLRRIFDVTAMFFEDIMSFQKAVYEQRFEEAEKAAKKRKREIAQAEKRITELDRIFKRIYEDDISGAISHERFLKLSAEYEAEQKELTEKVKADREMVNAYEQDKADFDSFATVIRKYVGITELTPTIVNEFVKKIIVYAPDKSSGHRRQKIQIIWNFVGELKQDEDKQTIERERKSRTA

SEQ ID NO: 11170 - protein, 523 aa, synthetic construct
MARKKNIAAGLDAVIYARYSSHNQREVSIEQQIAECTKHAAALGLRIVGTYEDRAISGKTDKRPNFQRMMRDAEKGKFQAVVAWKSNRIGRNMLQAMVNEAKLEDCGVKVFYAEEDFDDTAAGRFALRNMMNVNQFYSENMAEDITRGLYDNASKCMANGRQPLGYKRGEDGRVVLDEANAAVVREIFTRVAAGDLFVDIARDLNAQGIKTSKGANWNKGSFQSICQNERYRGIYIYGDVRVADGIPRIVSDDLWYRVQEAMRMKKNPVGTRHRVGAEDYLLTGKLRCGHCGSYMTGVSGTSRNGELHYYYTCQKRRTEHACDKKNIRRDVIEPAVAQAIKMYCLTDDVIEWMADRTVEYWEKHDNDLQIEALEQQLEENKKATSNMLKAIEMGIITEATRTRMVELETEQSRLSVQLNVAKEDVVKIDREQIISYLELLQQGDIHDRDFQMELFKNFLVAVYVYDDNRMKLVFSCMGDQNSVEIPLETGEDPPDGGLSPDAKMFVLTPDSSTIGSNKSYKHR

SEQ ID NO: 11171 - protein, 537 aa, synthetic construct
MTENKNRVCCLYRVSTDKQVDFNSNHEADLPMQRKACHKFAEAKGWVIVHEEQEEGVSGHKVRAEARDKLQIIKEYARKGKFDILLVFMFDRIGRIADETPFVVEWFVRNGIRVWSTQEGEQRFDNHTDKLLNYIRFWQADGESEKTSVRTRTSLRQLVEEGHFKGGSAPYGYDLVKSGRINKRKHELYELHINEQEAEIVRLIFDKYVYEGYGAQRIATYLNNAGYRARSGKCWHPGSLRGMVGNLTYMGVLRCGDARSELMPELQIIPQEEFEAAQRIREDRSAHAAEEAEHHVPLRTRGQALLSNNVYCGHCGARLALTTSRKWRKLSDGTLDDTLRIRYTCYGKLRKQTDCTGQTGYTMHILDEIIDKMVRQIFSRLRGIPKEQLITSRYAKETAERKNHLQALQAERDKAEKDLLALKTEILAVIKGESAFPKDTLAEMIAAQEKKHTELDTLCEEASAELERNAELMANVSQLYEELISYADLYDSASFEAKKMIVSQLIRRVEVYRGYQIHVDFNFDLAQYLENSDELAC

SEQ ID NO: 11172 - protein, 499 aa, synthetic construct
MRCNHDRCDLRPLFFRQPARSSIEGQLRDCKDYAEKNGITVVGTYIDRAYSAKTDDRPDFQRMIKDSGKKIFDVVLVWKPDRFARNRFDAVNYKYQLEKNGVHLVSAMEPISQGPEGIMVESMLIGMAEYYSAELALKVARGERENALQCKYNGGVVPLGFTIGKEDRLYHIDPETAPIVQEIFTRYADGEPAEKIAASLNERGLRTRTGKPFVKNSFFQIFRNRRYIGEYRYKDIVTPGGIPAIVDQDLFDRVQQRFEQNRIAHGRPAKEDVSYLLTTKLFCGKCGTLMGGESGTSHMGNTYYYYKCGNAKRHGKAHCDLKAIRKEPLERFVVDTAIKVIFSDEIIERLIDLVMEAQQQENTRLPVLKEQLRDTEKRLANLLEAIEQGILTPTTKQRLDELEARKEALNTSILEEELKKPVLTREWIRFWLEKFRKGDVGSTEHQRQIIDTFVNSVYVFDDRVVLNFNFTDDAKTVTREEVLGSSAVDNAPPNVRPFT

SEQ ID NO: 11173 - protein, 577 aa, synthetic construct
METLKIDRSKPLAIAYVRWSSTVQGGDDKDSYDRQTSPLEFFTSSTGVPVVETIIDPGQSAFTGENSKKGKLKGILDRIESGEIRKGDFLVVESIDRITRMRVLDGVALIQDGILKKGVKLYTTTDNKIYSYEDPDKDFENLLMISLIAKRANEESEIKSKRRRSAWNKAKTKATDGVPFNAHNLPYGLRHNLETNSFEIVEDEAQEIKEIFEGLKYEGVSNTLKKVNLTSKRKWSRKTVHLMLTSRYPIGTLMSQKRDGKKKVFERYIENYYPAILSHKEFQDALQAMKLRGKVKDYGRNTEGYLNIFKHCVKCAACGQSLMFEKSINQKGVKYGYFHCYTRKETLSHCDVPRFRFDFAFGTLLQLVRKLTCEDDDFDVHPWAREMPADYKSTMADDEIDMENFENQFLSLLSKSTATEAIKTEFYEAENELAKSKSLYENMTASFSQYKDGRIPSFFIQQMADAELAYENAKANIDALSAQIDNAESSLEIYSYRDIIELYSTDEGRLKLNHFFKSNGLKFVFNYEAKTRTVFMVVRDKKDAEIYRIGKKFTLHNPLKEFGIDNLNEHMNAVVKI

SEQ ID NO: 11174 - protein, 580 aa, synthetic construct
MQYETRKAYSYIRFSTPDQAKGDSYRRQTEAAKRYCQLNGLQWANTSEYLFFDKGRSAFKGKNLDDNSELSRFLSYINNGTILPGSVLIVESLDRLSRDRITEALPRFLDILKSGVDIYTSIDEKLYTQDVHDFDLLFSIIHMSRAHSESSIKGERVSKAWKQKQTEAREHKKPLGKACPYWLTFDGNAYEPIVERAEIVQRIFKLAVEGYGQGAIAKILNEYKVPVFGSDKRNKNGLWASSSTGKILVNRALLGEYQPTGLVNGIRRAIGEPVVNFYPAIISDDEFYQAQAARNTRKISKATKTTQNFNIWQGIAKCSSCNESMHLVNKGTPPKGGKYLRCYGAAKGACKSKLVPLGPSERIYMEILAKVDSLSLVQDSQSKIAKEIAVIDVRFASVKGRLAEIERQLISLDLDIPQAVVLSIAKLEREAKELTAKSAELKQQAQREKIINKKEFFSKLDMVTYEARARANYLLKTLDVTVTIGREDGCTLYAVASNDHLNFFVVQTGDAVDFIPLGEKALETIYDQGDGAGHSAIRETMKARLSEIGKALARDSVLVELLRSIKATEVSNVEQCPKQN

SEQ ID NO: 11175 - protein, 464 aa, synthetic construct
MNSTYFRPQPELFGLRVVKYIRCSHDGQVLHGDTLEAQDALLDEFIKVNHMILVDTFVDEALTARKKFTRRKEFVRLLDGVRAHNFDMILFTKLDRWFRNIGDYHKIQEILEANGVQWKAITESYDTTTTNGRLHINIRLSVAQDECDRDSDRIKDVFSYKLKNKTYLSGSLPRGLKLDAEKHVVIDPEWHQFALDMFDHFESTCSKRGTQLFLQEKYGIRVCYDTVVRYLRNPLFMGQYRDDPEFCEKTISRERFEHIQNLAIRNVRIRHTQQFYIFSGLLICSSCNHYMTGTVTYRTLADGKEKTYKSYRCNFKAQSKLCDRSKHYREEYVEEYMLQHIRPALSSYVADFEVTAAAAAKKDPAVEIAKVERKMKKLYDLFMDDLIDKASYRKEYEKFQTQIDKLRSCPAAPVRNLDSVKKMLSDDWETVYHTFSDQEKNVFWKSFVQSITVHEDGEMDIVFL

SEQ ID NO: 11176 - protein, 464 aa, synthetic construct
MARSVTVIPARNRQRETGRRAVQEKKIRVAAYCRVSTDQEDQLHSFEAQVDYYTKYINDHENYEMAGIYADEGISGTNTKKREQFKRMIADCEGGKIDLVITKSISRFARNTQDCLAYSRKLKNLGIGIIFEKENINTLDSTGELLFTILSSLAQDESRNISENCKWGIRTKFKNGEMHLNTFKFLGYDKDENGKLVINKEQAKTVRRIYRDFLIGINPAQIAKELTEEKVPGCNGQTKWYPSTIVGILKQEKHMGDALLQKTYTADFLTKRQVKNNGEVAQVYVKDSHKGIIDKQTWNAVQEEFERRERFMEAHGTDRYSYGADCMPFCEKVFCGECGSLFTRHSWRSRGIVQWQCKNHRKDGKVACRNAYVDNSDLEKGFVKAFNKLVADREKFMERWDQMKTDGSPLEKIRAEQMMEATENEPLGRFVPEIAQLVLAEVTVLGAKKYEFFFQEGSRVKVSV

SEQ ID NO: 11177 - protein, 498 aa, synthetic construct
MEIQIREGNREQKRKLRVCAYCRVSTDADEQENSLENQIRHYETVIKANPAYEYAGVYSDFAISGFKEKRPGLQKMLADAQKGKIDLILTKSVSRFARNTSIVLEATRKLKELNVGVFFELQNINTLSGEGELMLTILAAFAQAESESGSAGAKMVYQRKYEAGIPVQYLERSFGYTKDERGVYIADESEAVWVRKIYEMAADGYTPAAIKRYLNENGVKTVGGTKWIDSTVFRLIENEIYKGDYIMHKHFVNEERKLVRNRGEVDAWYIEDDHEAIVSPELWQKAQDAIEAKRDYLAEGSVIEEFTEDNYPYMNRIFCAKCGHPLYKRIYSNGNRLNWGCSGTKRYGKSFCEGINIPDGVLRKAWHFDGNMYIDEKPSVKGTKEFSYLKESSWKRRHKKKVPEAIPENTEDAYPYRKKIFCGLCGSRLVRHVNPKSHKVIWICNGAKRKGVAFCRGTRIPDSVIRGWGEIKKDIYIQRKDDKNGKKRYSYTSKKPTA

SEQ ID NO: 11178 - protein, 516 aa, synthetic construct
MSYCIYLRKSRKDLEAEQHGEGETLARHERALLSLAKKNNLIISNIYREVVSGETIAARPVMQQLLHEVEQNLWDGVLVMEVERLARGDTIDQGVVQRAFQYSNTLIITPSKTYDPANEFDEEYFEFGLFMSRREYKTIKRRMQNGRYAAISEGKWPYNSAPYGFRRVKLEKEKGWTLAFDENEAPVVRLIFSMFTGPERVGIRSITRTLNNYGTKPRNSKLWSESTVRGILSNVVYDQCVKIGERKVVRTVENGVLTTTRPRTSDYTIVSGRHPRLIDHDVFAEAQSYLGCGSPKPAGSNIIKNPLAGIIVCSECKKKMIRRPPSGTASRVPYDLMLCSTYDCPTIGSPLDLVEREVYNALSDWVEGYRLSGQMPSKSLIPEKEVLLESAQQTLDQLLRQKGTMYDLLEQGVYSTEVFLERSDSLQNRISEAESNVAQLKLELDKERQREANIEQFLPACEDLLSCYWDLSIPERNRLLKLLIESIEYKKLTKNKRGHLNEPNFELTIKPRIPRK

SEQ ID NO: 11179 - protein, 526 aa, synthetic construct
MIQTGKITALYARFSHDEGNSGHDSNSIANQKELLAEYANTHGFINHQFYTDDGYSGTNFERPAFQKMMTDVENGLIGTIIVKDMSRLGRNYLMVGQYTEIIFPEYNVRFVAISDNVDSAEGLSDLIPFSNLINEWYAKDISKKMRAMITQKGNSGRRLCSRAIYGYMKSPEDKEKWIIDEYAASVVRRIYELYISGNGVSRIANILRDEKIQRPFVYLYQKESDTPYEWTGATITVIITNREYCGDTVNFKTHKPSYKSKKIIKNPPELQRVFLDTHPAIIDRVIFEKAQNRYAKRCRKKKSKTKDALFTGYVYCKDCKSRFHVFRHKARGNMIVSYECSGYRKQQKKCTYHRIDEDALKQCVLQKIKLMWYEAKSDIRSFKAKVRKRLNADETASRSKIQSEIGAAQTRIAEIDKYVQGLFEAKVRNEIDSDIFGSLSKTYTEEKAELNAKIADLILQENSAKDAYQKINRLYEAIEKYDSITELTPEVLSDFVDRIEVGEHLKGTKEQKIDVFFVGVGLMDTL

SEQ ID NO: 11180 - protein, 441 aa, synthetic construct
MRLLVDCKAKKIDFVITKSISRFSRNTMDCLEIVRTLLNLNIPVYFEKENINTGSMESELFLSVLSTMAEGESASISSNNRWSIKKRFENGTYRLSSAPYGYKLESGGLQVVSEQADIVKRIFRELLSGKGMYSIAKELNAEQVPTQKGGRWTSTSVHNILTNEKYTGDCIFQKTYADSNFNRHINNGELNRYLIQNHHEAIISHEDFNATAALIEQRAAEKGIESGSDKYQKRYAFSEKLICGECGNTFRRRIHKGKYNSYVAWVCNTHLSDTNRCSMLFVRDDALKLAFATMLNKLIFSYRLLLKPYLAVMQSNTADEALLRIQYLENQFDQNAEQRSTLHKLMAQGYIDQILYTQESNELLLQARDFRSEIEVLNNTVAGDTTKVYETERLINYCKRGEMLTDFNESLFELFVDHILIYSRQKIGFVLRCGLTFEEMI

SEQ ID NO: 11181 - protein, 435 aa, synthetic construct
MIEACKAGEIDMIITKSISRFARNTIDCLKYIRMLKDKNIPVFFEKESINTMDAKGEVLLTIMASLAQQESQSLSQNVKMGLQFRYQNGQVQVNHNHFLGYTKDREGNLVIDPEQAEVVKRIYREYLEGSSMDKIAKGLEKDGILTGAGKKKWWTSTINKILRNEKYIGDALLQKTYTTDSLNKTRVKNNGIVPQYYVENNHEAIIPKDIFLRVQEELVRRRVVKTSANGKKRSYSCNHCFAQLVICGECGEMFRRIHWNNRGCKSIVWRCLSRLEATGLECHARTVNEKVLEGVVLEAINRLLGDKSFYQTQLQQNIAQVIRDANKSTAEKIDEQLMTLQKELLQKANNKEAYDEIAEQIFTLREQRRQNTVDTAARDEQIKRINDLQDYISQQTVRLTEFDESLVRRWIKQITIWDDHITVELKSGVSIDVDA

SEQ ID NO: 11182 - protein, 687 aa, synthetic construct
MQSAFFFIPFFGSWRKGLFMAYVRNKKKILKFWSKKKAALYVRVSTRYQVDKDSLPFQRKKLKEYCKFLGIEDFVIFEDDGYSAKNTDRPHFQEMMSRVRDGEFSHLIVWKVDRVSRNLLDFAAMYQELKDHKVTFISMNEQFDTSTAIGEAMLKIILIFAELERNMTSERVTGIMLDRAEQGLWNGARMPVGYRWNPEIKFPEPDPEEAKIVQFIFDEYERVRSTTKIARYLNHNQIASKRGGQWTSKLIRDIVRSPFYIGTYRYNLRESGRGPLKPESEWIVRENNHPAIITKEQFDRCNAIMDENGTSRDTSELRARKYVHTFSGRLVCGKCGANMIASKDRARANGWRPSMYRCAQRSRMMDCDNSKTVNESYIGPFIFNYAANLARIQKNFKNIKTLEQLEKELLKGPEFENMKVSKESLRRTFDALAFQEVGKGAYLPDIDLSDGDDDYTAAEQLSILKRELDKCKTAIDRLTDLYLYDPDSMTKEEFAKKKRDLVNKIAGYEKQIEASQATGDKDDLADLEFIRKASAFLVAQRIVSKKHVDYIQMALDLDNEILKDFVDQVIDRIEILEGRVQSIRFVNGLVHEFTYSTPADLPVCQKCGGRIGSTCGCRTRTFDFAGKSYRRIKVGDPGDKFQGVSGAVCPECSAQAGRWHHWKCGIERCPICGEQLIACEHGPNGKN

SEQ ID NO: 11183 - protein, 498 aa, synthetic construct
MEIQIREGNREQKKKLRVCAYCRVSTDADEQENSLENQIRHYETVIKANPSYEYAGVYSDFAISGFKEKRPGLQKMLADAQKGKIDLILTKSVSRFARNTSIVLEATRKLKELNVGVFFELQNINTLSGEGELMLTILAAFAQAESESGSTGAKMVYQRKYEAGIPVQYLERSLGYTKDERGVYIADESEAVWVRKIYEMAADGYTPAAIKRYLNENGVKTVGGTKWIDSTVFRLIENEIYKGDYIMHKHFVNEERKLVRNRGEVDAWYIEDDHEAIVSPELWQKAQDAIEAKRDYLAEGSVIEEFTEDNYPYMNRIFCAKCGHPLYKRIYSNGNRLNWGCSGTKRYGKSFCEGINIPDGVLRKAWHFDGNMYIDEKPSVKGTKEFTYLKESSWKRRHKKKVPEAIPENTEEAYPYRKKIFCGLCGSRLVRHVNPKSHKVIWICNGAKRKGVAFCGGTRIPDSVIRGWGEIKKDIYIQRKDDKNGKKRYSYTSKKPTA

SEQ ID NO: 11184 - protein, 472 aa, synthetic construct
MNTKRKVAIYSRVSTLHQAEEGYSIGQQIEALTKYCQAMGWVIYDNYSDGGFSGGKLERPAMQKMIQDAESGKFDTVVVYKLDRLSRNVRDTLYLVKDVFNANNVDFVSLQENIDTKSAMGNLFITLLSAIAEFEREQIKERMQLGVKGRAKSGKTTSWHTPPYGYIYNQETQMLNIEPFAAETVKNIFDKLNSGWSIMEITTFLRKNHPDNWRPTKVTRILSNISYTGKVKYKGEIFDGLHEPIISDETYTRAQQMLRERSEKATNTRAFQGKYLLSRIVKCGYCGAPLQIDSYRPKKDGTKTRTYSCPNRFTGRAKATIYNNGKFCEKSRRHKADDIEKYVLTEISKLQLNPKIIESLYKGKPEANLDTYYNQLKKVNDKLSKLNDLYINGLIDLDNLKEKSDKILKEKNSIEEIIAKNKNRPNNKPAFEKVIKMEDISTMTYEEQKKIVRMLVSRVEVTPDEIRLIFKL

SEQ ID NO: 11185 - protein, 421 aa, synthetic construct
MKKVTKIAETASSKVKLKKIRVAAYCRVSTDSDAQLESLEAQKTHYENYITSRDDWEFAGLYYDEGITGTKKDKRPELLRLIDDCKAGKVDFVITKSISRFSRNTTDCLELVRKLLALHIPIYFEKENINTGSMESELFLAILSSMAEGESVSISENSKWSIQKRFESGTYKVSYPPYGYDWDGEQMVINPEQAAVVKEIFAALLSGKGTHAIADDLNRRGIPTKRNGRWTATTIRGMLSNEKYVGDCLFQKTYSDSRFVRHNNHGEQTQYMVKDHHEAIISREDFEAAHAFIHQRATEKGVVKGSDKYQNRYTFSGKIICGECGDTFKRRIHSCTGYKYTAWCCSTHIKDKDKCHMLFVKDDDLKQAFVTMMNKLVYAHRIILKPYVDALEKTLRLMTRFGAFKEIHDPTGAEHKKSARR

SEQ ID NO: 11186 - protein, 516 aa, synthetic construct
MARKKKVSPGNRLVAYYRYSGGSQQTEQSIEGQRRDCEAYARQHGLTIVHEYIDRHISGRGVESRLAFQQMIADSSKHLFDLVICWKTDRFARNRYDSAVYKKKLRDNGVRILYAAESSVEGPEGIILEGLMESLAEYYSAELAQKMRRGMRESALKGKAINPNRPLGLTTDEHKRFIIDEKNAPTIRFIFEHYAAGESSASIVDQLNAAGLRTSKGNSFNKCSIPRIIQNEAYHGVYICKAYDVRIDGAIPAIIDDDLWKRAQKMLTLNKQHRAPHSSHADYLLSGKLFCGCCHSLMRGISGHNCRNDVYYYYACGNKADGGTCKKKNIPKDVAENLVVNAICENILRPDTLEDLADAIAAAQQADVNQPDPERAMLEQNLADVRRKINNIIESIENGTASSRLSARLADLEQQESTLNYQLESLKEVHPPVLDRERILFLLEQFLISPNERTEDYNRRIIDTFVNRIEITDTEMLIYFNLSEASASEKQKNSQPNSCSTGNHLVRVARIELTAS

SEQ ID NO: 11187 - protein, 504 aa, synthetic construct
MYKASNGSGELMENKVIRVGGYIRVSTQEQAKEGYSIPAQTKCLKSYCSARNWILHELYIDPGYSGAKMERPALQKMLSDIKKGLVDLVLVYKLDRLSRSQKDTLYLIEDVFLKNEVAFVSINENFDTSSAFGRAMIGILSVFAQLEREQIKERTQMGLAERAKNGMWHGSGITPIGYDYDPASNQLVVNEYEAMQIREAFDLFVNQNYAFTKIVKTFRNKGYSHKHGVWAHSSKLRYILSNKTYIGRINWNGEDYPGKHDPIIPSSLFEAAQKKLAEKDWKLTDKPAKSPFDATQLLSGVLFCGNCGGRYYGAGCYRGSHDPNSPKRRYEHIYSCYSRTKTKLEMIKDPSCKNKNWKTETLDNYVITRIKNLRLEGEIENLIAKERPRNPGIDQRKALEKQIDDIDRQISRLLTLYQLEDVPTAEIGLRLSDLTRKKKTVEEAIENIPLYEPELSVAKAKSLLADAEEIFNCGTTEEKRSLIHALIRKIILTGNDVVIEWAFI

SEQ ID NO: 11188 - protein, 528 aa, synthetic construct
MYHDPAQRTRSNHGKKKEVSPGNRLVAYYRYSGGSQQTEQSIEGQRRDCEAYARQHGLTIVHEYIDRHISGRGVESRLAFQQMIADSSKHLFDLVICWKTDRFARNRYDSAVYKKKLRDNGVRILYAAESSVEGPEGIILEGLMESLAEYYSAELAQKMRRGMRESALKGKAINPNRPLGLTTDEHKRFIIDEKNAPTIRFIFEHYAAGESSASIVDQLNAAGLRTSKGNSFNKCSIPRIIQNEAYHGVYICKAYDVRIDGAIPAIIDDDLWKRAQKMLTLNKQHRAPHSSHADYLLSGKLFCGCCHSLMRGISGHNCRNDVYYYYACGNKADGGTCKKKNIPKDVAENLVVNAICENILRPDTLEDLADAIAAAQQADVNQPDPERAMLEQNLADVRRKINNIIESIENGTASSRLSARLADLEQQESTLNYQLESLKEVHPPVLDRERILFLLEQFLISPNERTEDYNRRIIDTFVNRIEITDTEMLIYFNLSEASASEKQKNSQPNSCSTGNHLVRVARIELTAS

SEQ ID NO: 11189 - protein, 520 aa, synthetic construct
MKRITKIGVNETLVQKKKLKVAAYCRVSTASDEQLISLEAQKAHYENYIRSNDEWEYVGLYYDEGITGTKKDVRAGLLSMIDACEDGKIEFIITKSISRFARNTTDCLAMVRRLLELGIFIYFEKENINTGSMESELMLSILSSLAESESVSISENSKWSVQKRFQNGTFIISYPPYGYDNDNGTMVIVPEQAEVVKEIFASCLAGKGTHAIAKELNARGIKTKKNGKWGAGAVKAILTNEKYTGDVIFQKTYSDSSFNRHVNYGERDRFFCENHHEPIISHEDFDRVRAVLDQRAMEKGNGTDTYRYQNRYGFSGKIKCGECGGTFKRRQHYKPSGDYVAWTCTTHLESKADCSMLYISDEGIKLAFLTMMNKLVYGHNVILKPLLRNLRGMDDKDRLLRIQELEIQIESNIDRKQILTNLMATGVLEPAVFNKENNALVTEEQRLRAEKEKLVSFVGGDKVRMKELQKLMAFTSKGEMLTVFSDEMFLEFVDSITVESREKIVFHLNCGLNLAERLVM

SEQ ID NO: 11190 - protein, 523 aa, synthetic construct
MQQTKNITVIPARRRVGNTAKESEVPKLRVAAYCRVSTDSDEQATSYEAQVEHYTDYIRKNPEWEFAGIFADDGITGTNTKKREEFNRMIDEAMAGKIDMIVTKSISRFARNTLDCLKYIRQLKEKNIPVYFEKENINTMDAKGEVLLTIMASLAQQESQSLSQNVKLGFQYRYQQGQITVNHNRFLGFTKDENGQLIVEPKEAEVVKRIFREYLEGASLQQIARGLEADGILTGAGKTKWRAETLQKILKNEKYIGDALLQKTYTVDFLEKKRVPNNGLVPQYYVENSHEAIIPRDLYMQVQEEMIRRSNLHSGKDRKKRVYSSKYALSSIVYCSKCGEIYRRVVWNNRGNKSIVWRCCTRMENGPGTCDADAIHESELQSLVIRAINRVLARKDTMNETLQKNVEAVLTGADGIPLAEIDSRLEELQKELLKIANSKGNYDSIADEIYRLREARQSALVDNAEREGVKQRISEMQQFLAEQTQDITEYDERLVRRLIEKITVYEEKVTVEFKSGTSLDVRR

SEQ ID NO: 11191 - protein, 534 aa, synthetic construct
MARKKNIAAGLDAVIYARYSSHNQREVSIEQQIAECTKHAAALGLRIVGTYEDRAISGKTDNRPRFQQMMRDAEKGKFQAVVAWKSNRIGRNMLQAMVNEAKLDDYGVKVFYAEEDFDDTAAGRFALRNMMNVNQFYSENMAEDITRGLYDNASKCMANGRQPLGYKRGEDGRVVLDEANAAVVREIFTRVAAGDLFVDIARDLNAQGIKTSKGANWNKGSFQSICQNERYRGIYIYGDVRVADGIPRIVSDDLWYRVQEAMRMKKNPVGTRHRVGAEDYLLTGKLRCGHCGSYMTGVSGTSRNGELHYYYTCQKRRTEHACDKKNIRRDVIEPAVAQAIKMYCLTDDVIEWMADRTVEYWEKHDNDLQIEALEQQLEENKKATSNMLKAIEMGIITEATRTRMVELETEQSRLSVQLNAAKEDVVKIDREQIISYLELLQQGDIHDRDFQMELFKNFLVAVYVYDDNRMKLVFSCMGDQNSVEIPLETGEDPPDGGLSPDAKMFVLTPDSSTKKALYFVGSMVLFFLLSWRSH

SEQ ID NO: 11192 - protein, 527 aa, synthetic construct
MAYCLYLRKSRADIEAEAHGEGETLARHEKLLLEVAKRGHYNITQIYREIVSGETIAARPVVQKLLQEVEDGKWEGVLVVEVERLARGDTIDQGVMAQAFKYSGTKIITPLKVYDPANEFDEEYFEFGLFMSRREYKTIKRRLVRGRNASAKEGKWVSGLAPYGYERVRIKGDKGWTLRPVEEQADIVRFIFKLYTSGEEDDNGEVRRLGTYTISKRLDSLGVTPPSSAQYWNDRTVQCILQNPAYIGKVRWGVNKSKKRIVNNSIEVERYKAPADEVIYVDGLHSAIVDEAIFQKAQDLLKRSGPPPVPKRNSVVNPLAGILVCGKCGRSIVLRRGRIDILICHNRICDNVGSKYEYVEERLLQALSSWLDGYRLEWSDKLPADEQAILDLKQKALRKTVAELETLHKQLDRTHDLLEQGVYDTDTFLVRSRSLTERIAAAEEDISTLTAEVQADKDRAASRLNVIPKVEKLLEVYPVLPSAQAKNEMLKEVLEKVEYTKNERSGRNGPFDNFELVLYPKLPPKIE

SEQ ID NO: 11193 - protein, 562 aa, synthetic construct
MKKKKKCYIYIRVSTAMQVEGYSLEAQKERLTKFAAFQEMEVVREYCDAGKSGKSITGRPEFTRMLQDIAESGEDIDFILVFKLSRFGRNAADVLNSLQYIQDYGVNLICVEDGIDSSKDSGKLTITVLSAVAEIERENILVQTMEGRKQKAREGKWNGGQAPFGYTLDSKNSTLIVNPEEAEMVRLIFDKFVHTDMGADTICDYLNQHGYSKKRVRDQEVSHFTRSFIMRVLDNPVYTGKIAYGKSMTEKVKGSRDEYKRVKTDDYLLTDGLHDAIIDEETWEAARQKRKRTGQRWVKTHSLEHEHILSGIIKCPLCGAGMTGTVYRRHNKKTDEYKDTFYYRCHHRKRADGKLCDFAPKLNQDKFNSEVEDVIRYMVREGRFREYMKNKLDEQVDVSYLEDEKKQLHGQMQQVQGAKKKLLQMIDRLDSGDRHYDQKYQDMSDRLDNLYDRISELDEEIAGVDARIQAAYEKQITGKNVYQFLLDFDTLYERMTDLEKKQFMRTFIESIELYPEKKDNGRIISKIELRFPVYYDGQEGNEIRMPDKNTVETVCCLHRVNS

SEQ ID NO: 11194 - protein, 501 aa, synthetic construct
MPRIRQITPGVTQLKRKMRVAAYARVSEDCEVLLHSLSAQVSYYSTLIQNNPEWEYAGVYVDHGITGTSTAHSDGFNRLVADCDAGKIDMVLVKSISRFARDTVDCLNTTRHLKDLGISVYFEREKINSLSEDGELMLTLLASFAQEESRSISENIKWATRKRFEQGIPNGHKAPYGYEWDGEMFRIIPEQGEVVKEIYRRYLAGESAYGIAKTLAERGVTGQMGMPIEQTTIKEILSSQSYTGTMVLQKNFFTEGHIRRRNKGELPMYLVDEMFEPLVSEEDYQKALEIRQQRAEQFPNNQDNLTPFSGKVKCGYCGCGVSRRTSGGRKRWVCNTRERKGMKQCECRPIWETELTAAAETVLGGSFDESAFSKEIQQVTLYSDRIEFSLLNGNRKSIIRQFSGRRSQNAFTNKVWCASCGCKCERDNYGKKKTKIWCCSQPRTQCQMKRLTESELFEAAESLLGENFQAKVSADIDRVIISDTQVGFEYKDGTVKTWQRK

SEQ ID NO: 11195 - protein, 454 aa, synthetic construct
MAKKVRKIPATLNQFTSEPVAVRRKKKVAGYARVSTDREEQATSYEAQMTYYKTYIEGHEDWEFVGMYSDEGITATNTKKRDGFNQMVEDALDGKIDLIITKSVSRFARNTVDSLTTIRKLKDKGIEVYFEKENIWTLDAKGELMITIMSSLAQEESRGIKSPSGKDRWHISTVKSILTNEKYRGDALLQKQYTTDFLQKKRKTNNGEIPQYYVEEHHEAIIPPAQFDFVQAELARREQNGRYSGVSIFSNKIKCGCCGGWYGSKVWHSTDKYRKVIYRCNRKYGKDTPPCNTPHLSEEEIKKLFLKALNALVEAKEETIENLQELIETVCQIDSLGAEQERLKQELRIIAENLANLIQKNASVALDQTEQAENEKKLRTIYGEKHSRFQELEALIQEKNDTREILTNFINKLEDLTGEQTEFREELWGGLVDHIRIDEKSSTVVFRGGIEITI

SEQ ID NO: 11196 - protein, 558 aa, synthetic construct
MNRYGKRCVLYPRVSTEMQVDGYSLEGQKNMLTRFADREEMIVVDTYEDAGKSGKSIEGRPAFQKMLRDIEDGLDIDYILVYKLSRFGRNAADILNSLELVQSYGVNLICIEEGIDSSQTSGKLLISVLSAVAEIERENIIEQTMNGRREKARQGGWNGGFAPYGYTLEDNKLMIEETEAVAIRKIFELYTSSEIGLGGIANQLNLQGIRKIPRQNGTLEDWTGHFIKLILDNPVYCGKIAYGRRTKEKVKGTKNDYQMKRNDDYILTEGQHKGIVSEEVWEKAHAKRLRTGVKQPSKIGRDRVHLLSGLLKCPVCGSPMYTNKHAWTNKDGTYKEIYYYVCSRNRMVRGKHCEYKAMLKKTDIEPMVIEAIREIVRNEEYAQAIKKRIGVQIDTKAVDKELEGYQAKLKEVDLNKTRLEREIDSLPADAKYRERKLHDMTLRLDSLYDVIVELEEKIEDARLRRDAIKQQAITLENIYKIMVNFDCVYNIINDEEKRNVVTALIKEIEIYRNDESEYPLKRIGLNFPVFKDGGEVTELLWDKGNTVETVCLLSKKDK

SEQ ID NO: 11197 - protein, 438 aa, synthetic construct
MSTDQGEQLLSYENQVNYYTNYISENPLYEYAGTYADEGISGTNTKKRDEFNRMIADCRAGKIDMIITKSISRFARNTLDCLNYVLELKDLGIGIIFEKENINTLDAKGEVLLTILSSLAQDESRSISENCTWGIRRRFETGKHKMSTKRFLGYDTDETGKLVINRTQEPIVVRLYQEFLDGKTTDYIKRIFEREGVKNWDGGTKWQSTTLMSMLENEKYKGDALLQKSYTVDFLTKKRTQNKGEIQMFYVEDDHDAIISKRIWECVQLEIKRRKKYLEEHGTNSYSHRPESNPFASKIICGDCNKVFARKGWRSSTGVDRKVWQCSERYKVKGVMGCANRHVEEETLIKAYLMAWNALVENREDFMEQWTEQLQSENLLEGYRAEKFIEYTDGAEPLTEMDTDFMLKTLDHIKVFEDGTLLVVFLDGTEIECKNEEE

SEQ ID NO: 11198 - protein, 541 aa, synthetic construct
MARKKESTQPRLVAYYRYSGGSRQTEQSIEGQRRDCEAYARAHGMTILREYVDRHISGKTDDRAQFRQMIDDSAKRTFDLVICWKTDRFARNRYDSAVYKKQLRDNGVSVIYAAESNIEGAEGIIIEGLMEALAEYYSAELAEKARRGMRESALKGQTLGRTPPLGLTVDSTKHYVIDPAGADTVRLIFELYASGLSIASIIRRLNGMGLRTVRGNPFDKSSISRIIRDERYRGVYVSKKFDVRIEGAIPPIIDDDLWERTQKMIRLNRQSRAPHSAKADYILSGKLYCGECGCLMKGICGHNPSGRVYHYYSCPGRSLGRPCTRKNMPKDVLEKLVVESTSNLLLRPENIQQLADAIVSLQQAEASRPDPERAALEQTLAEIRRKIGNILSAIENGTASAALTSRLSDLEQQESALDHQLASLSTPEPFTLSRDEVIFLLEQFRVSPSERTSAYCRRLVDTFVDKVELTNRELIIHFNISKSTENKNSQSNNGCSTGKRLVGDERIELPQVESESTALPLCKSPISCCVSRHRAGQRVLL

SEQ ID NO: 11199 - protein, 668 aa, synthetic construct
MAYVRNKKKILKFWSKKKAALYVRVSTRYQVDKDSLPFQRKKLKEYCKFLGIEDFVIFEDDGYSAKNTDRPHFQEMMSRVRDGEFSHLVVWKVDRVSRNLLDFAAMYQELKDHKVTFISMNEQFDTSTAIGEAMLKIILIFAELERNMTSERVTGIMLDRAEQGLWNGARMPVGYRWNPEIKFPEPDPEETKIVQFIFDEYERVRSTTKIARYLNHNQIASKRGGQWTSKLIRDIIRSPFYIGTYRYNLRESGRGPLKPESEWIVRENNHPAIITKEQFDRCNAIMDENGTSRDTSELRARKYVHTFSGRLVCGKCGANMIASKDRARANGWRPSMYRCAQRSRMMDCDNSKTVNESYIGPFIFNYAANLARIQKNFKNIKTLEQLEKELLKGPEFENMKVSKESLRRTFDALAFQEVGKGAYLPDINLSDGDDDYTAAEQLSILKRELDKCKTAIDRLTDLYLYDPDSMTKEEFAKKKRDLVNKIAGYEKQIEASQATGDKDDLADLEFIRKASAFLVAQRIVSKKHVDYIQMALDLDNEILKDFVDQVIDRIEILEGRVRSIRFVNGLVHEFTYSTPADLPACQKCGGRIGSTCGCRTRTFDFAGKPYRRIKVGDPGDKFQGVSGAVCPECSAQAGRWHHWKCGIERCPICGEQLIACEHGPNGKD

SEQ ID NO: 11200 - protein, 503 aa, synthetic construct
MAGRITQVTFGSPQLPRDKNVAAYCRVSSGKDAMRHSLAAQVSYYSELIQNHAGWEYAGVYADEAVTGTRDSRKNFRRLLSECRAGKIDMVITKSISRFARNTVTLLETVRELKTLGVDVYFEEQNIHSLSADGELMLTILASYAQEESRSASENQKWRIKKNFEEGKPWSSTLLGYRNVNGRYEIVPEEAETVRMIFAWYLEGAGATAIRNRLNAMGIKTRLGNSWSRSPILKLLRNYAYTGNLILQTTYREDYITKRSVKNNGEKPMYHAQGTHEAIIDMDTFNRVQEEIQRRAEHFASPDGNKSTARYPFTSMVKCSRCGKSYVRSGSPKYRTWTCHTRRKDGLNCCGAEIIPEEELFRLTAEVIGGEVTEDAVRDKITVIRAEKDRTLVFCLKDGKETVKQWREHEIKYICTEEQKRQISLKNSGRKRTDEQKRQQSERMKEYWRTHEFPEERRRLISEKKKAYWSDGEASAEHREMLRQRMKEVRAMRKNGGKEENDG

SEQ ID NO: 11201 - protein, 525 aa, synthetic construct
MANVTVIPATRNIHTGIRKDAVTKRKTAGYARVSTDSEEQLTSYEAQVDYYTSYIQSRPEWEFVKVYTDEGISATDTRHRDGFNEMIRDALDGKIDLIVTKSVSRFARNTVDSLSTVRKLKERGVEVYFQKENIFTFDSKGELLITIMSSLAQEESRSISENVTWGKRKRFADGKVSLAYSTFLGYKKGEDGQMEIVPEEAETVRLIYRMFMQGKTPYAIAKYLTEQEIPTPTGKSEWRHRTVENILTNEKYKGDARLQKCYTVDFLSKKRKTNEGEVPQYYVEGSHDAIISPSEWQLVQLEMERRRAAGRSNCCSPFSAKLKCGDCGAYFGSKVWHSNSKYKRTVWQCNAKFKGEHKCTTPHLYEQRIQELFLEALSSLMENRDSLIDDCRAVMHVLGDCKAIDREMEEVRSEMEVTTGLIQKLIDENATRKMDQNDYRKRYDGYVSRYAALESRMDSLEKERKEREFKYDIFSGFLFELGEIHELPLAFDDRLFYQLIDYATVYSDGRVVFTFRNGTEITTEM

SEQ ID NO: 11202 - protein, 525 aa, synthetic construct
MKLDSIGNYCMYLRKSRKDIEAEKHGEGETLKRHFEMLMSLANRLKIIIREDAIYKEIVSGDTIASRPVMQQLLADIEMGKWDGVLVVEVERLARGDTIDQGIVAQTFKYSNTKIITPMKIYNPNDEGDEEYFEFGLFMARREYKKIRQRMENGRVASVQEGKFVGNIAPYGFSRKKIKGDKGFILVENPEEADTLRLIFNLYANQNYSYNRIADHLNDLGIKPRHAKNWNVATIRDILHNETYRGVLHWGARKNVKVIKKGIITMTRPRNKGDYTVSQGLHTPLISEELWEKALERHRVTAPKCPHPTSLQNPLAGLVICGKCGAKMQRRPYKDRQPSLICTNRKCDNISSDLEIIERKIIEALKEWLGDVAINFEKVEEENTLQVKALERALTKTKVELEKAELKLKRVCECYEEKTYTREVYLQRSQAVSEEIRKLREDVENQEIELDETRVKYKSEEDFVPQAQYVLDTYYMTNDPEERNRMLKNILEKAVYTKTERAIRKDSDPTNFTIELYPKISKIDS

SEQ ID NO: 11203 - protein, 650 aa, synthetic construct
MTDYIGNYKNRPRRVVFYGRVSTEHEEQLSALGNQMEWYTDLALRNLNWTVVAQYIDEGITGTQMKKRPSFMRMIEHAKEHRFDLIVTRELSRFARNTVDALNATRELKQYGVEVYFVNDGIWTMDGDGEVRLTIMASIAQDESRKTSERVKAGQKMSREKGVLYGSGNIIGYDRVDGTYVINEEQAATVRRIFNLYAEGHGETTVAKMLIEENRKDGGGGLSWTASKVSRVLRKPTYKGYMTYNKSHIDDFLSHNRINHSEEDFVLVKGNFEPIVSEELWETCNQIRSKRAAFVKGKDGRAHKFGMSFPQNKWTKILFCDCGMRFQIEGYDKTANGGKNMRLICARSKMFKKKDAARALNGIPCPAPYASEWKLELMAREVFRTVWKENAEDILGLLRMLDANLNTTGTPNDGNQLENKLSALNEELDDLVSQRASRSITMDAFLSRSTEINNEIINVEGLLQSSIQEQRPKARLDMHSIEAALSDDASFPDGKIEPGFLDRYANQIVKSNNRYIWMLQLMNVQQIMPIQSERQPIAMVTYKSGVPYDIEQEQIGKQDKESAGPDCATICRPQDFFLNMSRTKRKRKLVEWLESCQENQVSVLDEKIPLLSFAVDFVTAYEYQKARGIKIHPGLWKDMRVDIFLVKKEN

SEQ ID NO: 11204 - protein, 553 aa, synthetic construct
MQYDKADQQNCPRRVVFYGRVSTELEAQISALKNQMNWYLELAEHHPNWTVVGQYADEGISGTGMKTRPSFMKMLRDARKKKFDLIVTREVSRFARNTVDTLVTTRELKQYGVEVYFVNDDIWTMRGDGEVRLTIMASLAQDESRKMSERTKAGIQTSQKKGTYVAGPTPFGYKRDKKAHTLVVQESQAETVRKIFAWYADGINGTEIAQTLTQEGAPNKSGMPQWSARQVLSITKNTIYKGYLTYNKSHIDDFLSHKSIKNSEQDYILVKGSFEPIISEELWDKCQRRRHAWQSYKDGNITQAYLYGKNEHADKWACRLFCGCGARMRAFRAEKGIVRYICYQRSLRNVAPKCSAPNVQAWKLELMAREIYKNVWQDHRQDILEEYQQEQENRAANSEKVEEALSWQESFPNDEISREFLDRFVPRIFSIDGQKFIWELNLFQESCTVQCNVRGTYNYHSISAEKIMPGKTKAKKGDGAVNRILEDANSTRFWVHTYDDDPISRQPSSRLAADLPASITIKLNYEQARAYRNSRGYVLWPGSWKDLTVKVLL

SEQ ID NO: 11205 - protein, 638 aa, synthetic construct
MKRKKCYIYTRVSTAAQTEGYSLDAQQKRLKDFAEYKGLEIAGEYCDAGKSGHSIKGRPAFMEMMDDITSGKDDISFVLVFKLSRFGRNAADVLKSMQTLMDYDIDLICVEDSIDSSTQGGRLTLAILSAVAEIERENIRIQFMSGKMQKVLQGGWAGGPIPYGYRSREGELVIEPSEAEVIRLIYEKYLEPPMKLNGVVRWLNSHGYQRISQETIRPFNSDFVSRILNNPFYCGKIVYYRRANKGSSDPKQEIVVQGKHEAIVTEKIWEQAQEKRGQLARVKGKRDEEDRISLLSGLVKCPVCGGGLISKKNKSLNHNYGGYYKTVYSYGCRNYRTSEGRVCSFCHTYNQERLDAAVMEVIQKVTGTEEFRTAFARTVGNQMSEEAVETQLKMLRKEMHHQEHVKYKLGMELDHLDVLAESYDQQYEKLQAEVDAAYDRIGRIEDKIEKLKHKLLRMKQGIHSSDNICLILNHFDRLYEKMNYEERRTLCRQFIQRIEVFPEKGDDKRILKSITFRFPVYFDLGGNQEEDDEDTPDEMVVFTLDCSRLPVTAAESKATYAEIKAHVLRIHGLKVSSLYIAQVKRKYGIEMGTAYNKPEKNKNHIPRCPKEKELAILDALKTYRMIPESTEYFEEAAE

SEQ ID NO: 11206 - protein, 652 aa, synthetic construct
MRKQKCYIYMRVSTAMQVEGYSLEAQKDRLTKFAQFQDMEIVREYCDAGKSGKNITGRPEFSRMLQDVAEEKDGVSYILVFKLSRFGRNAADVLNSLQYIQDYGVNLICAEDGIDSSKDSGKLTITVLSAVAEIERENILVQTMEGRKQKAREGKWNGGQAPFGYELDSKNSTLIVNPEEAEIVRIIFDQFTRTEAGADSICKYLNQHGYTKKRLRDQEVSYFSRSTILKILDNPVYVGKIAYGKNKTEKVKGTRDQYCRVKQDEYLLADGLHDAIIDEETWEAAKEKRKRTGVRWVKTHSLDHEHILSGLIKCPLCGGGMSGTVQRRKNKKTGEYKDTFYYRCHHRKRVDGHICDYKPMLNQKVFNAEIEEFIRYMAGGEKFREFLMEKLEEKVDVSSLEEEKKQLAGQLQQAQGSRKKLVQMLERLDPGDKHYDRKYQDMQERMDNLYDRIAELEEAITDVETKIGASYGKQVTGKKIYQFLLDFDILYGKMTDLEKKEFMRTFIESIELDPDEKDMGRIIKHIDLTFPVYYDGQEGDRIRMPKENTVETVVLLSKGEVDSKKIRVEFSLEDMDMSEFQDGATYTQIKDYVLEHSGLKVSNLYISQIKRKCGIEVGKNYNLPKSEDSRQPLCPPEKEKAIREAFKYFGMI

SEQ ID NO: 11207 - protein, 609 aa, synthetic construct
MIRAVIYCRCSTEEENQKNALEKQVAEAESSVRQYGWVLVDRYVESRSGTTAKGRNEYKRLFNDLLTDKFDVIVIKSQDRLMRNTKDWYLFVDRLCTEQKKLYMYIENKFYSTDDALITGIKAILAEEYSRELSKKINNAHRNRQRDGGNVMLPGNAYGFKRMPDKSVALVEKEAEIKREMYRLCAAGYGTRTISTIMRNRGIVNRDGKPFTSSYILRMLRNPINKGTAVMGKYHFDFDSKRTIKNPKEKIYIHEDKVPRTVSDELWNAANEQIDKRSVKTKDGEDDIGKNPGKYQLSGKIVCGMCGQPYWRKVHRKHSNHELIYTWACSSYLELGRSDNLRARPNLRKVFLENEKGCDNINIAENEFYAVLEEICSNQYQKNKKKIIEKIMKLLSKSLNNQDGTKEIEKLEREQEDIERKMKFLVDKLIDGVLTDQMYKTKQEELEKKRDQNKKKILELTERTSNTQNIKDRLQEIETRLNDDDLFKKATIDDMLEEVDKIVVYPRYMEIYFSLSSVTGCMDLKIFDGDKKCFRVDYGNRLDYKGRQCDAREVVVDLIRENPRITGKMIAKEIGCSLSGANYKLKVLKKEGRIRFNGAGGKGCWEILE

SEQ ID NO: 11208 - protein, 506 aa, synthetic construct
MPKKETTAPVKAVLYARYSSDRQREESIEGQIRVCEDYARRNNMVIVHTYADRAMTGRSDQRPEFQMMIQAAATQAFDVVLVYKLNRFARNRYDSAKYKHKLKKYGVHVVSAMENIANDPSGILLESVIEGMAEYYSAELAENVMRGMTENALECKWSGGLVPLGYKLDADHHLVIDEAGAQIVRRIYQMVLDGRTPTGIINELNAANCRTSTGRPFGKSSLTTILRNEKYIGTYTWNHIRKENAIPAIIDRKTFEAVQKTLQYRKNNHVKVCSENFLLTGKLFCGQCGSNMVGTSGTSKYKNTYYYYACTKHLKKDGCTARNIRADKLEELVCSVTTRILSSKEAVHAISRQAVEAQKKQKESLTVQSLKNQAAEINKKLKNCVQAVESGLISVTITNHIKEYEKRLTGLNEAISREELLSGKSKLTEKHIEFFFYSIAQKIKTADKYKSILLSSLVRCVIVYDDYIEIQYNYKNELPLLQNPVRVKSSNLNGMVIHPGFEPGTP

SEQ ID NO: 11209 - protein, 530 aa, synthetic construct
MSDKEKTSGSLAMAPRVITIPAANQETARKLRVAAYTRVSSNSKDQEHSFAAQNAYFSKLITDNPDWELADIYADQGITGTSIDKRDDFLRMMEDCRKGRIDRILVKSSSRFARNTKESLAAVRELKSLNISVYFEEQNIDTAQVSGEVLIAMFAALAQRESEAISERVRWSYKVRMSKGRFSTCKAPYGYRLVKDHLEIQEDEASIIRHIFDRYLAGVSMENIAKEITALGCPTRDGTQYWQLTSIQYILQNEKYAGDSLSQKKYTTRSFPRQQKINHGERKQYLVIDSHPAIISREIFQKVQELLTQRSAAIHPRSDVPHAFARKVVCGHCGTLCKRKNCGGSVNWACRRHDKSITACPNTQVPEEQMKNAFLHVYYNLKHYGTSILTQLISDLYAARTGSLLWSENIVEINKQISDIASQERLLAQLKQQGVVDPDIFISRSNQLAERLRELKLQKERILRSEEDHTIQQTQDLLDVLESGPDWLDDFDEQLFSDMIEKIVVVDNETLRFRLLNGLEVTEKIERTRR

SEQ ID NO: 11210 - protein, 550 aa, synthetic construct
MTQTRPEPKVIIIPAKEESLQDQEKKKNLRVAAYCRVSTKKDEQLGSYENQKAYYTEKIMANPNWTMADIFADEGITGTSACKRKDFLRMVRQCRKGKIDMILAKSVSRFARNTVDTLNYTRELRGMGIPVIFEEQNINSIYPESEFLITIHGAFAQSESEGISSRVKWGKHQAMRTGKANIQYKTLLGYEKNPDGEMVVNAEQAETVRRIYEMYLSGQTLRSIKEALESGGFKNSAGTMEWTTSNLRTILSDEKYCGDVLLQKTFILDCISKKVIKNTGQLPMYLIQNHHEAIIPRDRFDAVQVELARRKTLTNSTKKSAPTGMSRYSGKYALSGLLFCGECGTAYRRVVWTQHGEKRAVWRCSSRLDYGKKYCKESPTLDESPLQQAVLAAINASMSGCKVLADQLVDAMEQELAPIPGESMSLGDIDRAVTELGKQFDTLLAEAANGDADEYAERFRTISTTMEELKRRKAAILGIRQEQEQISRRIHAAASAMTAATVGITEWDDGVVYQMLEKVTVLTGNRIKVTFCNGVEIEQTVDQPKRRKFI

SEQ ID NO: 11211 - protein, 559 aa, synthetic construct
MNRYERMNQERKIVDVRKRVAAYCRVSTDHEDQANSFESQQRYFRQYIERNPDWELYEIFADEGISGTNTKKRSEFKRMIACAKEGDFDLIITKEISRFARNTLDSIYYTRDLKKHGVGVIFMNDNINTLDGDAELRLAIMSSIAQEESRKTSERVKWGQKRQMEQGVVFGRSMLGYDVKDGKMTINEEGAKIVRLIFHKFANENKGTHVIARELREAGITPMRVKEWSNTVILRVIRNEKYCGDLVQKKTFTPDFLSHEKKYNRGEEEFVIIKDHHEPIVSRELFEKANRILDEKSLTQEGKAKHSNRYPFSGKIKCGCCGSSYVARYKNRKNGTRYKAWRCYKSATQGSPHTDKAGNPLGCSNPSIRNEDAVHIMYLVTRSLQLEEKKITANLLSVIQSVLSVNTDYSHIEKLKEQIQSVEDKRTQLIDLCISGAITKQEFITKREACDKEISELQNTISGIDQQHLLADQQESVMKEITAAIHEIVSGVEYEDAFYSQILERMVVQSKDTVDVYLNLLPIKWSYAVAKASKGVLDPKSGISETEIPISVNIARSSG

SEQ ID NO: 11212 - protein, 510 aa, synthetic construct
MSSVDKIAVVYARYSSHGQTEQSIEGQIAAAQKYAEQHGYTIIHIYADRAMTGRNDDREEFQRMLSDTATHQFGVILLWKIDRFGRNREEIAFNRYRCKKNGVRVERVAEDVPDGPEGVILDSVLEGMAEYYSLQLAQNVRRGQRESAKKSQTVGGCKIIGYNVNPDTKRYEVDPKTAPFVTEVFKRYANGETISEIVAWLNAQGVRTTRGGEFTVNSLHRLLKNEKYTGVYIFHDIRNEGGMPALIDRATFDKAQEMLKVNRRAPARVWSKTEYLLTDKLFCGHCGTMMVGESGHGRNGTKHNYYTCWNRKKKKTCDKKPIRQDVIEPLVLRTIGKLLENPATLENIADQVWAAYERSDTSGDTIKALDKQIADVDRALSNVMKAIEMGIINEMTKARMDELTDQKQALSAARAEAGLAGGFKLTRDMILFFLQDMAALDRSNRDSQKRLIKTFVNAIYLYDDHFNIAFNYTDNGKMTVPMQEIDDAASGDVFGRCAQSPAKSRLSRLR

SEQ ID NO: 11213 - protein, 577 aa, synthetic construct
MRNKSLAGRANNRAERPRKVAIYIRVSTTHQIDKDSLPMQRKDLIAYCELILGIEDYEIFEDAGYSGKNTDRPAFQEMMQKIRSGSFSHLLVWKIDRISRNLLDFAEMYEELQSLRVTFVSKNEQFDTSNAMGEAMLKIILVFAELERNMTSERVTATMISRANQGLWNGGRVPYGYAYDAETSVFSIIQDEADICQLMKTDYFEHKSIIHAAKLLNDKKVPTRSGALWSPTAVWKILSSPFYAGIYRYNHYRGTENRTINPEDEWVLVPDHHPAIFTLEEHEKICDIMDTNKRTSNLPGQKHRAKNVYAFSGILYCGKCGSKLVSTPGRLQADGFRTTTYSCPKKRKTHECDNPSINDLIVGEFVINYILNMLNAKSSFSSINSPAELEERLLYGGSFKDVQHISEDGLNEFYNLLSRYGSDSSYVFAVKRPRKKKAAVNPEVEALRKDKEKQERALKRLQDLYLYSERAMTEKDFIIQKNEISSRIQDINTRLGMVTHDANSTLSDEDFVRQASHLLITKKLIGREYIYYKSLAQTVSPDVLKIYMETILDSVYVVDGRVSSIIFKNGLAHTFVY

SEQ ID NO: 11214 - protein, 523 aa, synthetic construct
MRFFSYGRKSVFSDKSDSIDNQFRMNREYCESKFSGQVDSWQQFSDEDFTGANTSRPDLQRMLSFIKGGFCDVLVVYQLDRLSRDVRDFANIYALLEEHGVMFISIKENIDTTTPIGRAMMYVTVVFAQMERETIAARVTDNMLGLAKKGYWTGGNPPVGYVRKHIVVNGKKHCSIEVDPDGARYVTQIFDTFLAYNCSLQGMETRFKKQGIRTQSGKFFSTTQLHKMLTMPYCVEATPEVYDFYAAKGCIMDPGSPREMWDGSVGVIIYGRSTEKNKKHQAQPPEKWTVCLGKHKPFMPAEKWLAVQSRFTQNKCIKDAKWPVPLLKGVLRCKCGNLMQVSRKKKVDGTCSSWYYCRKRMRQGVDACDMGQIKCDLLDEKVLELFRGITADPALIQKFVKAEAPADVPDLKAAQARVSACERKIGRLAASLALAEDSTASKYIIAEMERLDVELGALKREASLAEMESHRAAASAKDAKATAAEIAKLIHGLDGFDDKEKNAIARAVIQECTWDGERLFITL

SEQ ID NO: 11215 - protein, 529 aa, synthetic construct
MSNMKIIDIPAYLRDEAGQKGTARKLRVAAYCRVSTEEEEQQGSFEIQKLYYTEKINSTPEWEVAGIYADDGISGVHTKKRDGFNQMIQDCKKHRIDLILTKSISRFARNTLDSIQYVRMLKQMGIAVVFEKENINTATMNSEMILTVLSAFAQAESESISQNVARGKRMVYKHGKFAFPYGRIIGYRKGADGKPEIIPEQAEVIRLIFNSYLQGDSLQSIKTKLETAGALTARGNIAWSAQSIQRILQNEKYCGDVLLQKTFTEDVLTGVHKKNTGQLPQYYIENYHEGIVSKQMFREVQTEIARRNSKSAANQRKRRRGRYNSKYALSERLFCGDCGSPYKRVTWNIHGRKQIVWRCVNRIEYGTKFCGNSPSIPEEELHRAILKAIQGLAANFTDEVAAQINGILHNIQTGESTKPNLQEQLEQTQQEFDRLLEMSLDFDEDTPFLDNRLKKLNNKIKSLKKAIEDSAARQEKVSRPEMLLSAKDLQIQEYDDALTARIIEKITVRSRNEIEIRLIGGYEKAMLLL

SEQ ID NO: 11216 - protein, 536 aa, synthetic construct
MTAVIYARYSTDSQREESIEGQIRECTAYAEKNDLTVVKHYIDRAISAKTDNRPQFQQMIKDSERGIFDVIIVWKLDRFARNRYDSARYKTQLKRNGVKLVSATEVVSAGPEGIILESVLEGYAEYYSADLSEKVVRGMTENALKGIYNGGTIPFGYMIDETRHYQPDPLLAPYVEQTFQKYADGATMTDLRDWLKAHNIKNSMGGEMSYNTIQRMLSNRRYIGELRLRDVVQPNAIPALVSEELFNKVQEKLAKNKKAPARHKAEESYLLTTKLYCGKCGALMFGESGVSHTGKMYTYYKCAAAKKKKTCDKKAVRKQWLEDLVVNETMKLVEDDASMNAIIAKVMELQNQESTDLPIYEKQLKETEVGITNMLNAIQMGILTSSTKERLEALEEQRKELQARIAEERLAKPKMKEEFVRFWLLRFRKLDMTQPEQRQALVDTFINAIYLYDDKVLITFNYKEGTETVAFGEAVKAEKSSDMCARGAPDIERQIVRFGVLSLCRKAAAHFLHTVCTFARIRGFSAQGLHSLLSFA

SEQ ID NO: 11217 - protein, 526 aa, synthetic construct
MELSRNITVIPARKRVGNTAAAEQRPKLKVAAYCRVSTDSEEQASSYEVQVAHYTQFIQKNPEWELAGIYADDGITGTNTKKREEFNRMIQDCMDGNIDMIITKSISRFARNTLDCLKYIRELKEKNIPVFFEKENINTMDSKGEVLLTIMASLAQQESQSLSQNIKLGLQYRFQNGEVRVNHSRFLGYTKDEEGNLVIEPAEAEVVKRIYREYLEGASLLQIGRGLEADGILTGAGKTKWRPETLKKILQNEKYIGDALLQKTYTVDFLNKKRVQNKGIVPQYYVENNHEPIIPRDLYMQVQEEMIRRTNLHSGANRKKRVYSSKYALSSIVYCSKCGEIYRRIAWNNRGKHSTVWRCCTRVEHGPTACDAPTIQEPDLQAAVVQAINLALGNRESMMATLRENVEAVIRQEDETSLEGIEAKLLELQKELLKLANSKKDYNSVADEIDRLREVKQNALVESAEREGLKQQIKEMREFLEQQSTEITEYDELLVRRLIEKVMVYDERFEVEFKSGAKVDVERRQE

SEQ ID NO: 11218 - protein, 520 aa, synthetic construct
MKRITKIEENMLLEKRKLRVAAYCRVSTARDEQLVSLAAQKAHYENYIKSNDEWEFAGLYYDEGISGTKKEKRDGLLAMVAACERGTIDFVITKSISRFARNTTDCLELVRKLLDLKIYIYFEKENLNTGSMESELMLSILSSLAESESVSISENEKWGIKRRFQNGTFIISYPPYGYDNVDGEMVIVPEQAEIVKQIFADTLAGKSTHEIAEELNERGVATKKGGHWTPGTVNAIIGNEKYTGDVLFQKTYTDSSFNRHQNRGELDQYLMQDHHEAIISKEEFELANAVLKQRGREKGNGHDTGRYQNRYSFSGRICCEECGGKYKRRMHYKPSGQYVAWACANHLKDKESCSQKYITDDALKLAFVTMMNKLVFGHQMVLRPLLQSLRGLNDQSRLLKIEELETAIEKNREQKQVLTNLMASGYLEPALFNKESNELAAEAEALRQEKEGLMRSVNGDMVKVEELQRLLRFTSKGTMMTEFDDEIFSSFVERITVLSRKEVVFEWKCGLSLKERLVEP

SEQ ID NO: 11219 - protein, 588 aa, synthetic construct
MRIVNKIEAKTPQIPRRKRVAAYARVSMESERLQHSLSAQVSFYSSLIQSNPAWEYVGVYADNGITGTKAEAREEFNRMIADCEAGKIDIVLTKSISRFARNTVDLLNTVRRLKELGVSVQFEKERIDSLTEDGELMLTLLASFAQEEIRSLSDNVKWGTRKRFEKGIPNGRFQIYGYRWEGDHLVVHEEEAKIVRLIYDNYMNGLSAETTEKQLAEMGVKSYKGQHFGNTSIRQILGNITYTGNLLFQKEYVQDPISKKSKINRGELPQYFVKNTHEAIIPMEVYQAVQTEKARRRELGALANWSINTSCFTSKIKCGRCGKSYQRSNRKGRKDPDANYTIWVCGTRRKTGNAKCQNKDIPEQILKEACAVVMGLDTFDEIIFSEQIDRIEIPAPNEMIFYFKDGHIVPHHWESTMRKDCWTDERRAAKGRYVQEHQLGPNTSCFTSRIRCDSCGENYRRQRSRHKDGSFDSVWRCASGGKCQSPSIKEDALKNLCADAMGLEEFSETVFREQIVCIHITAPYQLSIRFFDGHTFETAWENKRKMPRHTEERKQHMREVMIQRWREKRGESNDNTGDDKPIHGNADQ

SEQ ID NO: 11220 - protein, 463 aa, synthetic construct
MSEKIKRCALYIRVSTAEQLMHGKSLEAQKEYLASYANDHGMIPVGVYADEGKTARKELKKRKAIHALLEDVKAGKIDVILFWRLDRWFRNMSDFYKVQDILDEYGVYWISASEPGLNMETRDGRLQLNVVLSIGQNEVDTTSERIKFVNEASIRQGKVIFGDSNMPRGYKVGIVDGKKCMIKNPDEEEMVNAFFDYFERHQSKQGTLRYMQRNYDPEFSYSILRTMLSSEFYKGTYRGIPYCPAYLSEERWMRLQKINGRNVKHTPSGRVYLFSGLIRCPVCSQKLSGTGCSSIINRKTKEKRTYCYYRCNHALLDRICTNTHRVSQNLIEAYLLDNLEAEYEKFHIRCEKIEEQKAKIRETRTPEKLQKELERLNLLFQKGRIEWDYYSEEYDRIENELHELQQIRPEPQRDFSYLEEILQADFRTIYAQLTLENRRSFWRSTIKEIHLDEDFSVKSVDFL

SEQ ID NO: 11221 - protein, 504 aa, synthetic construct
MTAVIYARYSSDNQREESIEGQIRECTAYAEKNGITIVKHYIDRAISAKTDNRPEFQQMIKDSDKKLFDIVLVWKLDRFARNRYDSARYKTQLKKNGVKLMSATEIISEGPEGIILESVLEGYAEYYSADLAEKVVRGQTENILKGRCNGGRGTFGYTLDSERKFHIDPLASPFVLESFRKYRDGLTMKEIRDWLNENGIKNPVGGAFTYNSVEHMLKNRRYIGELKFRDVVVPDAISPIIPLELFDDVQEKIAKNKKAPARRKAEDDYLLTTKLFCGYCGALMFGESGTSRTGEVHRYYKCATAKKKKGCKKKTVRKQWLEDLVVNQTMQLVRDDAAMESIIAKVMELQDKENTNIPLYEKQLRDAESGIQNMLNAIQAGILTSSTKERLEQLEETKRELEARIAEEKLAKPKIKEEFIRFWLLRFRKLNMNQKDQRQALVDTFINSIYLYDDKVLITFNYKEGTQTVTFGEATEVASEGNGSDLDCFTAPSKIPRLTVENTV

SEQ ID NO: 11222 - protein, 541 aa, synthetic construct
MQRKDLIAYCELILGIEDYEIFEDAGYSGKNTDRPAFQEMMQKIRAGSFSHLLVWKIDRISRNLLDFAEMYEELQSLRVTFVSKNEQFDTSNAMGEAMLKIILVFAELERNMTSERVTATMISRANQGLWNGGRIPYGYSYDAETSAFSIIQDEADVCQLMKTDYFEHKSIIHTARLLNDKKIPTRSGALWSPTAVWKILSSPFYAGVYRYNHYKGTENRTLNPEEEWVLVPDHHPAIFTLEEHEKLCDILDANKRTANLPGQKHRAKNVYVFSGILYCGKCGNKLVSTPGRLQADNFRTTTYSCPKKRKTHECDNPSVNDLIVGEFVINYILNMLNAKSSFSSINSPAELEERLLYGGSFKDVQHISEDGLNEFYNLLSRYGSDSSYVFAVKHPRKKKAAVNPEVEALRKDKEKQERALKRLQDLYLYSERAMTEKDFIIQKNEISSRIQDINTRLGMVTHDANSTLSDEDFVRQASHLLITKKLIGRDYIYYKALAQTVSPDVLKIYMETILDSVYVIDGRVSSIVFRNGLTHTFIYQK

SEQ ID NO: 11223 - protein, 472 aa, synthetic construct
MNTKRKVAIYSRVSTLHQAEEGYSIGQQIEALTKYCQAMGWVIYDNYSDGGFSGGKLERPAMQKMIQDAKSGKFDTVVVYKLDRLSRNVRDTLYLVKDVFNANNVDFVSLQENIDTKSAMGNLFITLLSAIAEFEREQIKERMQLGVKGRAKSGKTTSWTTPPFGYEYDTNTQLMTINHYQAEIVRDMFNKIISGWSIMGITTYMRENYDGKWTHVKVKRILENITYIGKVKYRNEIFEGEHTPILPEELFYKAQKALEERTNKKDNTRPFQGLYMLSHIAKCGYCGTPLKIDTYKPRKDGTRKRTYTCINKNPKRIKTAIYNDGKQCKESGRYDVKDVERYVLNEISELQLNPKSIESLYKDKPEENITAHQEQLKKLENKLSKLNDLYINELISMEALKQKSAELLKEKSSLETFINNNKRKINNKPAFEKVAKMDDVFKMSYDDQKKIVKTLIKRVEVKRDEINVIFKL

SEQ ID NO: 11224 - protein, 419 aa, synthetic construct
MADIKRGLIKRVVVYKLDRISRSILDFATMMETFQAYNVEFVSSTEKFDTSTPMGRAMLNICIVFAQLERETIQKRVTDAYYSRCQRGFHMSGAAPFGFQLEPTTIQGIRTKMMKPDPETADIARLMFEMYAQPSTSFGDIARYFADEGILIYDKELTRGFISQMLRNPIYAQADLEMYEFFKSQGTVVINEAADFAGTNGCYLYQDRDVQARKNKHLKDQFLVVAPSEGMVSADVWLRCRKKLMANTTFQNGRKAKNIWLAGKVKCGRCGYALMSVGNPSGVQYLRCSKRADNKSCPGCGTLRTREFEQFIYDEMVKKMAQFHSLTGKRETVNPKLTALKVELAHVEDEIEKLLNTLTGASAVLISYANTKIEELDAQRQTLSKEIAALSVESMSPEQIERLSVYLNRWEEIDFDDRR

SEQ ID NO: 11225 - protein, 438 aa, synthetic construct
MQRAALYIRVSSEEQAIHGLSIAAQTETLDAWAQENKIYVFDHYIDAGISARKKASKRPELQRLLEDVKSGHINLIVFTKLDRWFRNIAEYYKVQEVLETYHVDWKTVQEDYDTSTASGRLKINIMLSVAQDEADRTGERIKAVFESKTLRNEPISGKVPLGYKIENKHIVINEETAPIAIDLFNKYIAIRSISSLRKYLMDTYGIAHSHTAIRVMLKNERYIGRAHDQENYCPALISQKTFDHVQEILNIRAQRSSLECTGRVYLFTGIVYCAECGNRLSGHVVAQKYIYYRCTRYEKLHLCQHKKRTSELVLEKWLLENLLTEFMKYNERLEAEAQRAKPLVDTARIRRKMEKLKDLYLNDLIERDIYEKDYTALSAELNAATKKPVIGKPVNIDKLSDSLATYSTLSREGQKEFWSRTVRRIDITNEDVFSVTPI

SEQ ID NO: 11226 - protein, 573 aa, synthetic construct
MAEQNEKIVALYVRVSTGYQVDKDSLPFQKKELKAYCEHVLHIDKNRIEIFEDAGKSGKNTKRPAFERMMGKVKSGQISHVIVYKIDRISRNLVDFSLMYDDFKYNNVTFISLNEQFDTSSAIGEAILKIILVFAELERKLTSERVTDVMIGRAQNGQWNGARVPYGWDWDEEKQCPVHSKKEAQYAIAMYEMYLKAKSTGKIRDYNNSHNIPTKRGGEWTSKTVTDFLRNPINKGAYRYNYRESARGRKKPNEEVVFIENAFPPLVAPEIWEKVNKILDINRDKRNMGGLHPIEKNCNVFAGLIQCGICGTGYIVDKKDRRRKNGFTPSMYHCGAKTKAIHCQNPNVSDVKIGPFIINYIAAMVRVSKSKRKIKTPEALEEMLLTDKVVFGDIAGLSTDSLNYTFEMITGKYTTDNAVWRANPVSTSNKESNPEEIEKLKNEIKKYSRAKERLEDAYYFSDDGMSEKEYLEKKNKFDSMRVSAENKIKELTEASISSGIDEDSFIKSATSFLLAHKIYNESHIVYSDLAGAIEEETLKEFFNLILDYIVVVDRRIVEIVFSNGLSHQFIYRK

SEQ ID NO: 11227 - protein, 528 aa, synthetic construct
MPYCLYLRKSRTDLDAEANGETETLARHEKILLDLAKRMHLDVTEIYREVVSGETISSRPVVQRVLNEVENGLWDGVLVVEVERLARGDTIDQGIVSRAFKFSNTKIITPLKTYDPNNEYDEEYFEFGLFMSRREYKTIRRRLTQGRISSAKEGKHTASTPPYGYDRVHVESGKGYTLIPNEKEAPVVEMMFDWFVNGELLEDGSCKNLGTMAIANRLTSLQLPTPRGGNVWSQRTVYWILHNPVYTGRIRWGYKKDKKMIVDGVVKRKRVISSEKDQVLVEGLHPAIISEDLFEQAQSIFAEGGTPSVTANRELKNPLSGIVVCGICGAPLRYKIGYNRCSNMLHCRTRGCECKGSYFDLVEKRLLEALQEWVDHYKMSWDDMPEETHSLLTLKKQAYDTSIKELNTLTKQLDKTHDLLEQGVYDTDTFLSRSKSLSEKIATAEKNIQKLSADIQNERLRENNRKNLIPMAENLIDVYWQLPTATAKNEMLKEVLERVEYTKLQAGNRSGKGKDDFELILYPKLPKS

SEQ ID NO: 11228 - protein, 532 aa, synthetic construct
MTRNNNRVCCLYRVSTDKQVDFNSNHEADLPMQRKACHKFAESKGWVIVHEEQEEGVSGHKVRAAARDKLQIIKDYARKGKFDILLVFMFDRIGRIADETPFVVEWFVRNGIRVWSTQEGEQRFDNHTDKLLNYIRFWQADGESEKTSVRTRTSLRQLVEEGHFKGGNAPYGYDLVRSGRINKRKHELYELHINEQEAAVVRIVFDKYVYEGYGPQHIATYLNNSGYRARSGKCWHPSSIRGMVQNLTYTGVLRCGDARSELMPDLQIVPQEQFENAQRIRNERSVRSTAEAENRLPLNIHGKSLLAGNAYCGHCGAKLELTSSRKWRKMADGSLDDTLRIRYTCYGKLRKQTNCTGQTGYTVHILDEIIDKAVRQIFSKMRGIPKEQIVTKRYEKENAERKNHLQDLQTQRNKAEKDLFALKTEVLACIKGESVLPRETLAEMITAQEEKLTELENLCEAASEELEKTAELMDKVSRLYDELISYADLYDSANFEAKKMIVNQLIRRVDVYRGYQINISFNFDLTPYIEGE

SEQ ID NO: 11229 - protein, 409 aa, synthetic construct
MRNKSLAGRANNRAERPRKVAIYIRVSTTHQIDKDSLPMQRKDLIAYCELILGIEDYEIFEDAGYSGKNTDRPAFQEMMQKIRAGSFSHLLVWKIDRISRNLLDFAEMYEELQSLRVTFVSKNEQFDTSNAMGEAMLKIILVFAELERNMTSERVTATMISRANQGLWNGGRIPYGYSYDAETSAFSIIQDEADVCQLMKTDYFEHKSIIHTARLLNDKKIPTRSGALWSPTAVWKILSSPFYAGVYRYNHYKGTENRTLNPEEEWVLVPDHHPAIFTLEEHEKLCDILDANKRTANLPGQKHRAKNVYVFSGILYCGKCGNKLVSTPGRLQADNFRTTTYSCPKKRKTHECDNPSVNDLIVGEFVINYILNMLNAKSSFPPSTPLRNLKSVCFMVAHSRTCSISRKMV

SEQ ID NO: 11230 - protein, 571 aa, synthetic construct
MSGEIDYSKDWTMYYIRIEVRAAMDTRETIAAYVRVSTKSTDQLTSFEGQRAFFEQEYGDKYRVLIYADRGLSGTSLRRREQFEQMLYDAGLRRKYADTDEWEPDPSREPLFRRILVRNTSRFARNVLVVGILRALRANGVYVHFLDKGIDTKDEDWEFVFNLFMNFDQQESIDKSKKVRAGLKMSAQRGQIYTADRLFGYKYYPGENRLEIIPEEAAIVRELFDLYERGEGIRRILNIFREKGYRTREGREFQKSTISRMLGNEKYAGILVRNKYDSGIVFQKHRTHRLRPREEWVIHEGVIPAIIDREQFERVQAIRDGKVHTGLQRGVHKGRSLYAGKIRCGKCGANYRRNVDNGRFYYNCATKKARGLAACDSPNVNEARLNEIVSEVTAELPGIIERNKTSTLERLAVLREELAASIDQDKSALVAELNKQADDLRQKKTRLLDLYLDGSFDKEMLAEKTTEIDRQLTALTARIAEASRTNDEIMMEIARIDQYIERVRTLKARDYTEEEVREMVRFDVMFNRGEVFVSINALDEVTATRQTLVDALPKYAAAIKATRFGVVKSIR

SEQ ID NO: 11231 - protein, 635 aa, synthetic construct
MPKITRIEPGIKSLPAKKKVAAYARVSKDTERLMHSVSAQVSYYSDLIQKNPEWEYAGVYADSGITGTLVAGRGEFGRMLDDCEAGKIDIILCKSISRFARNTVDLLNTVRHLKDIGIEVRFEKEQINSMSGDGELMLSILASFAQEESRSISENVKWGIHKRFKNGEIGAANKHILGYRYDDEQKKYVIIPEEAESVRWMFQMYIDGVTLRDIADRMNNAGIHTTLGNDFQEASVRQLIFNEVYAGDIRRQKCYVEDPITKRKVPNQGELPQYYMTDCHEAIIDRETYAKVKAEMERRASLLNPTYCFTGKIKCGNCGMNFTRRKSTVKGKEYVAWFCRAKKEPGMACTSHNYSEDTLTKACAEMMGTDGFDEEAFSESVRCLTSLADGSLEMQLYGGEVRRWQMPPKPVKPKAPKPERKRPRNLLDGKIFCGKCGRRFGRAISETADGGHLYWYCRAKSKHGVTCDSVNYPDTEIKDIFCRVMGRETFDEDYFTKAVERMVVQGSGTIDFYLKDGTVRTYETLKLRSNRHETTSTDEFTGKIVCASCGNTYLRYCCSGKYVYWRCSGKHKVRTECTEQDLADFNIRKVSAYILGMEEFDGAVFAEQIDRIIAYEDGSLEYIFKDGRAKKWQRT

SEQ ID NO: 11232 - protein, 597 aa, synthetic construct
MGKITKIESKIPQLPARKKVAAYARVSMETERLHHSLAAQVSYYSALIQNNPEWEYAGVYADEGITGTAASKRSEFMRMLADCEAGKIDIILTKSISRFARNTVDLLETVRHLKDIGIEVRFEKEGINSLSGDGEVMLTLLASFAQEETRSISENEKWSVKKRFEQGIPTARPRILGYRWEGDTMVVIPEEAAVVKRIYQNFLDGKSRLETERELAAEGIVSVNGKRMCDSQLKNILTNISYTGNLLLQKEYVEDPISKKRKKNRGELPQYFVENSHEAIIPMETWQYVQDEMARRRELGCFANKSLTLNCFSAKIKCGKCGRSFVRSTRTNRAKISQLGEHYIFWGCTSKKKTNCPSCRNGTIREAVLMEECAKVLGIPEFDEDIFSEKVAQITVPETGTLIFDFTDGTQLTHHWSRNSKKESWTDECRKRASDYRREHAVTRDDITCFTTKIKCEHCGCNFRKSVSTMSDGEKRGYWRCAEKNGCTVKGLRDDFLRDMTAEVLGLDEFDENIFLKRIDRITVRDGTHLTFHLADGSTGERDYTFKKEGKPWSEERRQKFMETRHSRPMSEEQKKAISERMKQIRKERGKAWHKEK

SEQ ID NO: 11233 - protein, 525 aa, synthetic construct
MAQRKVTTIPASISRFTASPIDKPKKRRVAGYARVSTDHDEQFTSYEAQIDYYTNYINSRDDWEFVSVYKDEGISGTGIKKRIGFQTMIDDALAGKIDLIVTKSVSRFARNTVDSLTTIRKLKENGIECYFEKENIWTFDGKGELLITIMSSLAQEESRSISENCTWGQRKRFSDGKVSVAYSRFLGYDKGPDGRMIINPAEAETVKKIYRLFLEGMTPYGISRQLEADGDLSPSHKPKWNATTVKRILSNEKYKGDALLQKTYTVDYFTKKTKVNEGEIPQYYVEGDHEAIIDPAVFDRVQIELEKRCSGKNRHSGVHDFSGKIKCGQCGSWYGSKVWHSTDKYRKVIWRCNHKYGGEKCSTPHLTEDEIKTAFITAANKALADKDTVIETFRLIQDSVFDTSTLEQEKAELTDELNIVAGLIQDGIYQNAHVAQNQADYNREYESLTARYEKAKSRLDEVEAEIHDKHSRRKSIEHYLEILQKRNESVTEYDVFLWHGMVEFVTVYGKDDIRFTMKDGTEIKV

SEQ ID NO: 11234 - protein, 546 aa, synthetic construct
MRVSVNLNAQKPDTTTNAVIYARYSSHGQTEQSIEGQLAKGHEYAAAQGYTVVHEYIDRAMTGRNDNREAFQKMLSDTGKHQFQVVIVWKVDRFGRNREEIAFNKHTCKKNGVRVEYVAESLPNSPEAVILESVLEGMAEYYSIQLSQNIRRGQLESAKKCQCVGGSVPLGYTLDSDKHFVIDPQTAPVVKKIFDLYAEGATISEITGQLNEQGIRTARKQLFTKNSLTKLLKNEKYIGVYTYKDIVRVEGGVPAIVDESTFDRVQELLKINRRAPSHTWTKVEYLLTDKLFCGHCGSPMVGESGFSHTGAKYSYYGCIKRRREKACDKKPVRQDWIEALVLDETVKLLHDDELMEYIIDRTWEYYQVTDKVQEEKAVLEAQLAEVDKAINNLVRAIEAGIFNAATKSRMDELDAQKAALTASLADLELTSGIRITRDHIEYFLLRLRDLDVKDRECQKRLVQTFVNAVFIYDDGRVKITYNYSGQSSTITLNQIASAEKGKGFVCCLPCSTSSPRFPRGVAAFFCFGVLGKIGCKYTTNFSCIVL

SEQ ID NO: 11235 - protein, 507 aa, synthetic construct
MTKNAVIYARYSSDRQREESIEGQLRECKAFAAQNGYEIIGTYIDRALSARTDQRPEFLRMISDSDRRLFQFVIVYSLDRFSRSRYDSAIYKNRLKKNGVRVLSAKENIRDDPTGVILESLLEGYAEYYSLELAQKVKRGMVDNLLEKKWVGTAIPFGYRKGGDARLYVDESKRNAVIDIFQMYADRCRIADIIRYLNDRHFITSQGKPFGRNSLSHILRNPIYIGTLHWGGEDYKDYAPRIISDELFASVQKIRDGMKRSATRGRYPDYQLTGKIFCGRCGRPMVGVSGTNSGGSSYYYYKCAGRTHGKKDCDSRTIRRDIIENAVYKAIASVLLQPQAIKIITEQAILAQKRSLDDSEVLRLKKEKDALDAQIRNISKAVAAGLTADEIIAQANEYSRRSKELEALIRTEELKEKAFTLTPEAVTFFLEKLLEKAKSGQATIATFWDFIRKIKINGSIAEIQFNYTAVPATLDNPIQIEFDPGEECSNNSFLVGPPGFEPGTNRL

SEQ ID NO: 11236 - protein, 558 aa, synthetic construct
MLQQSNSTITSIYPMGNQTEELTALYCRLSQDDKQEGDSNSIINQKKILKRYAIEHGYQPYVFFVDDGFSGTNFNRPDFQRMIAEVEAGRIKRVIVKDMSRLGRDYLQVGMYTEIMFPNMDVHFIAVNDGVDSHVGENEFTPFRNIINEWYAKDTSKKIRAVKRSKGMAGEHIGSHAPYGYMKNPDNKKEWLIDEEAAEVVREIFRLCVNGYGPTRIANILTERKILCPTYYALEHGEKPRTVLPPDKYLWSATVVSHILERMDYLGHTVNFKTHVKSYKNRKKIDNSPEQWRIFENTHEAIIDKETFEIVQKIRSGKRRPTKMGDMPMFSGLLYCADCGSKMTFHRQMAQSAEKHNFVCSNYRHNSKSCTMHYIRNVVVEQIVLENLKEVIRYVSDYEDEFVQMVMDTDMRQRNKELSQKKKRLTEIHSRIQELDKIFQRIYEDNISGKLSDERFMKLSKGYEEEQHTLQEEQTSLEKELQKEEKQSVDVKQFLSVVRKYTNLTELTPEIVHEFIDKIIVHAPDKSSGKRLQEIEIIYNHIGVFDHSKVTLWKGKAV

SEQ ID NO: 11237 - protein, 486 aa, synthetic construct
MSRRRALAPVPDTPPRAVAYLRQSTYREESISLELQETACRDYAARHGYQIVAVEKDPGISGRTWNRPAVQRVMEMIESRDADVIVLWRWSRLSRNRKDWAIAADRVDVAGGRIESATEPNDTATAAGRFARGVMTELAAFESERISEQWKEVHTSRVARGLPPGGKLPWGWRWVDGAVRPDPETAPYIVEAYRRYLAGAGNRDLADWFNGSGVRPMHAKEWYFSTITQCLDSPIHAGLIAYHGQTLPGAHDGIIDVATWEAYRRERERRAGERQVKRRYLLSGIAHCPCGEPMLGFTQDKEGRPRTGRTRSPWSCYRCSSLGKPEGHGPWNISLRFVEPVVMDWLHQVAADVENKVPRAAARRDDAHRESQRIAREITALDAQLTALTGHLASGLVPEAAYVTTRDEILARRAELERGLAEAERLVLHVPDDPSAIAREALADWDTLPIETKRATLRQLIRTVLVDYEHRTAHVVPVWEPMHNEG

SEQ ID NO: 11238 - protein, 559 aa, synthetic construct
MSKTVAIYVRVSTGKQADRDSIPFQIQECSNYVKHFLKTENFEVFKDAGRSGKNTHRPEYQRMIEKVKAGMISHVVVYKIDRISRNLVDFSIMYNDFKEHKVAFISLNEQFDTSSAIGEAVLKIILVFAELERKLTGERVRDIMMNRALDGKWNGARVPYGWDWDTKKQCPVHSDTEAEYARMMYRLYDECHSTCVVRDYCNAHDIPTKRGGEWTSKTVADFLRNPMNVGDYRYNYRKSARGKRNDPSEVIYVKDVFPPLIDRELYERVTHQMDLNTFGLGKDGRKVVSKKTHVFGGLVVCGLCGAFYHSDADVVRADGFRPSNYRCGAHNKKIHCKAKGTSDVKLGPFIFNYISNLVKASKSKKLLHSVSDLEQILLTGPEFEQVAGIADIGLDVTFDTIMHGFKPKRYTAAPYTVIRSGDSDALTAKRDKTIRALERLKKLFLFEDDAMSEKEYLMSKRELEGTLSDIENELSALEADTADTKYDDMSFISTASGFLIAHQIASGEHINYRELSCAVDAKVLKDFVNSVIERIVLLDGRVASIEFKNGLVHEFLYRE

SEQ ID NO: 11239 - protein, 539 aa, synthetic construct
MPTGKNTARKYAAGGSSDNSCGVEPLRAVIYARYSSSGQREESIEGQLRDCYEFAKKHGIIVIGEYIDKAMTGRVDRRPDFQRMMKDSEKGRFNCVLLWKMDRFARNRYDSAMYKYKLKKNGIRIFYAKETIPDGPEGIILESVMEGYAEYYSENLAQNVKRGNYDSALELKTLGKTCLGLKTGPDGRYMIDQAEATIVRRIFEEYAEGERAKDIYERLNSEGYRTSRGGKFNKNSLRRILSNKKYIGVYEYEDIYVENGIPAIITDRDLFERVQKMLKINHDAPARGKAQNFLLTTKLFCGLCGSPMIGDGGTSHTGKAYAYYSCTKRKRGRSCKKESVPKDWIEDLVVGELVKIVHNDELIEQIADRVMEYQKREKDQSGLHALEIRQKENEKAISNMLAAIEAGIITPSTKTRLMELEADRADIEKGIAHELLAEPEFERDQIIYFLERFRSGDINDEAYRIMLVDTFLNSVYLYDDDHLVLVMNYSGENCKVDLKLVEGAVSGDGCKGSAFAPSSALIEEKEVLALRLLFFCIQV

SEQ ID NO: 11240 - protein, 558 aa, synthetic construct
MLQQSNSTITSIYPIGNQTEELTALYCRLSQDDKQEGDSNSIINQKKILKRYAIEHGYQPYVFFVDDGFSGTNFNRPDFQRMIAEVEAGRIKRVIVKDMSRLGRDYLQVGMYTEIMFPNMDVHFIAVNDGVDSHVGENEFTPFRNIINEWYAKDTSKKIRAVKRSKGMAGEHIGSHAPYGYMKNPDNKKEWLIDEEAAEVVREIFRLCVNGYGPTRIANILTERKILCPTYYALEHGEKPRTVLPPDKYLWSATVVSHILERMDYLGHTVNFKTHVKSYKNRKKIDNSPEQWRIFENTHEAIIDKETFEIVQKIRSGKRRPTKMGDMPMFSGLLYCADCGSKMTFHRQMAQSAEKHNFVCSNYRHNSKSCTMHYIRNVVVEQIVLENLKEVIRYVSDYEDEFVQMVMDTDMRQRNKELSQKKKRLTEIHSRIQELDKIFQRIYEDNISGKLSDERFMKLSKGYEEEQHTLQEEQTSLEKELQKEEKQSVDVKQFLSVVRKYTNLTELTPEIVHEFIDKIIVHAPDKSSGKRLQEIEIIYNHIGVFDHSKVTLWKGKAV

SEQ ID NO: 11241 - protein, 464 aa, synthetic construct
MNSTYFRPQPELFGLRVVKYIRCSHDGQVLHGDTLEAQDALLDEFIKVNRMVLIDTFIDEALTARKKFTRRKEFVRLLDGVRAHSFDMILFTKLDRWFRNIGDYHKIQEILEANGVQWKAITESYDTTTTNGRLHINIRLSVAQDECDRDSDRIKDVFAYKLKNKTYLSGSLPRGLKLDAEKHVVIDPEWHQFALDMFDRFESTCSKRGTQLFLQEKYGIRVCYDTVVRYLRNPLFMGQYRDDPDFCEKTISRERFERIQNLAIRNVRIRHTQQFYIFSGLLICSSCNHYMTGTVTYRTLADGKEKTYKSYRCNFKAQSKLCDRSKHYREEYVEEYMLQHIRPALSSYVADFEVTAAAAAKKDPAIEIAKVERKMKKLYDLFMDDLIDKASYRNEYEKFQSQIDKLRSCPAAPVRNLDSIKKMLSDDWETVYHTFSDQEKNVFWKSFVQSITVHEDGEMDIVFL

SEQ ID NO: 11242 - protein, 553 aa, synthetic construct
MEKSKRVVGYARVSTEAQDITRQIELITAYCSDRNYHLIKIIQEKISGARKDRKSLNELLDVDDAVADMIIVSELSRLSREDDILSVLSTINELLKQGVDILFLDKQDRIYKAGTILSLYDIITLSVEAKASADERYKIAGRMQTGLRSKLAEFSNMFAGGTVPFGYKVIHNPDYKLNQTPKNLLVVDAKEAEAVKYLFQQLIDGNTIRQTVRVYNKLYPYKLSYSGICRIIRNPKYKGEIYRRGKLYGQIPELQIITPEDFDKANKQMRENSLFQSNAPKYYNPLKGLLFCPCGCGLYMKPNHNSYLIYRCSSAYNDKQKCENYGVKCAYILSSVWTCVKETLHTEEYKRFNTQRANELQGINKQIRETITRKVNSVDELKTQSASLIAKIKKLNNDDLINELETDYNVLCKQIKQTEQEISELNGQIAENDAEIKRNVEQKDFSKMEQSALYKEKLQKAVYHSLSAMRGILEIIFKNGMTRYVLIKKHRNGGTYLLPDTFKGDMERKQIIVPSLRTDKDNPYSAQPMNLRYTFDEFFKAMPVEEYEIPITE

SEQ ID NO: 11243 - protein, 500 aa, synthetic construct
MRMCGYARVSTDEERQLDSLEHQMEFFSDFAKQNGHHLVNVYTDEGITGRQLKKRDAFNKMLSDSKLGLFDLLVVKDVSRFARNTVDLLTSIRQLKSRGIDVIFVNNSQKVLGESEFVITLLGAVAQEESSNLSKRVKFGKNITSKKGRVPPRIFGYDRIDNFTMEINEREAEVVREIYHLYIDEGLGCRLIAITLGEKQMKTKYGNDWNQRNIRRILENPIYSGHYINHRYTVVDFLEGTTKALPKEQHYHHDRPEWAIITPERFQQAQEILEQRRKQYATEYTHFTGRYSNRHLFSTLIRCKECGRAFSRRVTHYPNSDYIYWRCPTNNQYTAKRCSNNTIVREDDLIETLSTYLREVVSNKESIAQEIARKFKEANAVEGSKPDAQTLEAKKVKLKAKLEKYMEMYANDIITMEALKSKTAEINESINVIDDQLILLEGQHTQERTIESITNEAMTEIERFLSLQSATNMDLRRIIDSIIVDDKKQVKINLKITGNL

SEQ ID NO: 11244 - protein, 579 aa, synthetic construct
MRNKSLAGRANNRAERPRKVAIYIRVSTTHQIDKDSLPMQRKDLIAYCELILGIEDYEIFEDAGYSGKNTDRPAFQEMMQKIRAGSFSHLLVWKIDRISRNLLDFAEMYEELQSLRVTFVSKNEQFDTSNAMGEAMLKIILVFAELERNMTSERVTATMISRANQGLWNGGRIPYGYSYDAETSAFSIIQDEADVCQLMKTDYFEHKSIIHTARLLNDKKIPTRSGALWSPTAVWKILSSPFYAGVYRYNHYKGTENRTLNPEEEWVLVPDHHPAIFTLEEHEKLCDILDANKRTANLPGQKHRAKNVYVFSGILYCGKCGNKLVSTPGRLQADNFRTTTYSCPKKRKTHECDNPSVNDLIVGEFVINYILNMLNAKSSFSSINSPAELEERLLYGGSFKDVQHISEDGLNEFYNLLSRYGSDSSYVFAVKHPRKKKAAVNPEVEALRKDKEKQERALKRLQDLYLYSERAMTEKDFIIQKNEISSRIQDINTRLGMVTHDANSTLSDEDFVRQASHLLITKKLIGRDYIYYKALAQTVSPDVLKIYMETILDSVYVIDGRVSSIVFRNGLTHTFIYQK

SEQ ID NO: 11245 - protein, 525 aa, synthetic construct
MARAVTVIPPTIQPITHLARNAVVRRRVAAYARVSTSSEEQLTSYEAQVDYYTRFIQSKPEWEFVRVYTDEGISAVNTKKREGFNQMVRDALDGKIDLIVTKSVSRFARNTVDSLVTVRKLKEKGVEVYFEKENIYTLDSKGELLITIMSSLAQEESRSISENVTWGQRKRFADGKVSLPYSHFLGYRKGADGLPEIVPEEAETVRWIYSLFLTGKTTGSIASLLTREGIPTPAGKAKWQASTVESILKNEKYKGDALLQKAFTVDFLTKKQKKNEGEVPQYYVENSHPAIIDPAEWKLVQRELERRKSIGRSYSGNSIFSSRLVCGDCGGFFGSKVWHSTDKYRRTIWRCNSKFTGEETCQTPHLTEEEIKARFLDAFNALVADKDRLLDECRTMQAALTDTGSLDSEIAALLSEMEVVAELTKRCIEENSTTAQSQDTYLEKYNALVARYETAKAKLEKLQAAKAQREAKAEDIGGFMFELAEYGESLTEFDDRLWLTVIDTVTVHRDGQLTFKFQTGHEIMV

SEQ ID NO: 11246 - protein, 528 aa, synthetic construct
MARTVTAIPATRALHTGAPLGQTTLRRVAGYARVSTDHDDQVTSYEAQVNYYTRYISDHAGWQFVKVYTDEGITGTSTKHRAGFQQMVTDALDGKIDLIITKSVSRFARNTVDSLTTVRALKDKGVEVFFEKEGIWTFDAKGELLITIMSSLAQEEARSISENVTWGHRKRFADGKVTVPYSRFLGYDKGEDGNLLVNPEQAKLVRRIYGMYLEGHSIRHIAHTLTDEPATYTAAGNKTWHYQSVRSILTNEKYKGDALLQKSYTADFLTKKQVINEGEVPQYYVTGNHEAIISPAVWDFVQAEIAKGARDQRTQHRTRPFSSTLICGQCGHFFGSKTWHASSKYEKVIWRCGHKYSGQEKCATGHISDQRLKDMLLKAIRLRFGSPTDTGVNQAVLDALDTSDLEVEAAGLLAQIDQVSKKLQSMIARNARVAQDQQVYEKAFNASHEQHQTLLAEHAAVVAEIQNKNNRLAAYHYYRQETANLDLEQLAFSPYLCVALLDKGVVDVDGNVTFQFRDGSTQVVAIKQ

SEQ ID NO: 11247 - protein, 496 aa, synthetic construct
MYGYNLKPCLTRRNTLKRMEQITPPPISASPLVKVAAYARISMETERTPLSLSTQVSYYQQLIHDTPGWTFAGVFADSGISGTTTHRPQFQEMLALARKGAIDLILTKSISRFARNTVDLLETVRELKDLGVEVRFEKENISSTSADGELMLTLLASFAQAESEQISQNVKWRIWKGFEEGKANGFHLYGYTDSADGTDVQIIEEEAAVVRWIFAQYMKETSCEKMAAQLIADGRVPHLADNKLPGEWVRHILKNPHYTGDLLLGRWSTPEGRPGRAVRNTGQLPQYLVENAIPAIIDRDTFVAVQTEIARRRELGARANWSIETVALTSKIKCVSCNCSFVRNVRNPKTQNSISTEHWICTERKKGRKTGCDTCEISDTALKGFIAQVLDIETFDQEVFNERIDHIDVQGKDHYTFHYTDGTNSSHTWRPNLKKNSWTPARKAAWSELVRARWAEAKRLGLDNPRQAPTPPEALAKYRAVAKAEAERLRAERGER

SEQ ID NO: 11248 - protein, 514 aa, synthetic construct
MAKRKFNKGGEVRLVAYYRYSGGSGQTEQSIEGQRRDCEAYARLHNMTIQKEYVDRHISGKTDDRAAFQQMIADSDKGAFDMVICWKTDRFARNRYDSAVYKKRLRDNGVEIVYAAESNISGAEGIIIEGVMEALAEYYSAELAEKMRRGMRESALKGQAISRCRALGLKTDEHKRFVIDEKTAPTVRFIFEHYAAGESAMSIVEQLNAKGLRTSQGNPFNKSSIPRIIQNEAYRGVYVSKSYDVRIEGAIPAIIDDELWERAQTMLKLNRQLKAKNEPKADYILSGKLYCSCGSLMRGMSGHSATGEVYRYYTCPNKDCHLRNIPKDDLEGKVMQSIVDHLLQPESMEALAEAMVEVQKADVEKPNAERVAIEQSLADVRRRSKNILDAIENGTANAQLCARLDDLTEQEQTLSFQLSSLEKEKPVVFTKEQYLFLLEQFLMEPSERTPEYGRRLVNTFVTSMVVSGHELVINFNVSDETVNKNKKISQTNLQKESSSGMRLVRVARIELTAS

SEQ ID NO: 11249 - protein, 527 aa, synthetic construct
MPRKPAKHPAKPKRGKKLEIEEPGVLYGRYSSHNQKDISIEQQFEKCYELAAEYGIRIIDTYADRAVSGRTDKRVDFQRMMADAAKGKFRYVLAWKSNRIGRNMLEALVNEARFQELGVRVLYVEEDFDDTAAGRFAARSMMNVNQFYSENMAEDIKRGLYDNAANCMVTNGHLPYGYKADETLHYAIDEPRAAVIREIFTRVSCGEAFVDIMSSLNARGITTSYGRPWGRSSFQKILSNERYRGIYIYGDVRIEGGIPRIVSDELYFKVQEAITTKKNPQGRHRVNGDYLLTGKLFCGHCKSPMTGISGTGRAGKLHFYYVCQKRRTEKTCHKKNVRRDVIELKIAQAIRDYALKDDIIEWIADSCVEDHDRRVSESHLSVFEDQLAEVNRSIKNVMSAIEKGIITETTKGRLMELEAERTAIEGKICAAKAAIVPTNRERLVEWLRSLREGDVHDKKYQAGLFDTFLVAAYLYDDNRVKIVFSFAGDKNTIEIPLEDIIDSIDDEASCVRLSSTLSHQFNRRSNP

SEQ ID NO: 11250 - protein, 464 aa, synthetic construct
MARSVTVIPARSQKVRTGHKAVQEKKIRVAAYCRVSTDQEDQLHSFETQVEYYTKYINEHENYEMAGIYADEGISGTNTKKREQFKKMIADCEGGKIDLVITKSISRFARNTQDCLAYSRKLKNLGIGIIFEKENINTLDSTGELLFTILSSLAQDESRNISENCKWGIRTKFKNGEMHLNTFKFLGYDKDENGKLVINKEQAKTVRRIYRDFLIGINPAQIAKELAEEKVPGCLGQTKWYPSTVTGILKQEKHMGDALLQKTYTADFLTKRQVRNNGEIAQVYVKDSHKGIIDKQTWNAVQEEFDRREKFMQTHGTDRYSYGADCMPFCEKVFCGECKSLFTRHSWRSRGIVQWQCKNHRKDGKVACTNAYVDNADLEKGFVKAFNRLVTDRDKHMERWQQMKSDGTPLEKIRAGQMMEAVGNEPLTRFVPEIAQLVLCEVTVLGAKKYEFFFLEGSRVKVSV

SEQ ID NO: 11251 - protein, 502 aa, synthetic construct
MEIQIREGSREQKRKLKVCAYCRVSTDADEQENSLENQIRHYETVIKANPDYEYAGVYSDFAISGFKEKRPGLQKMLADAEKGKIDLILTKSVSRFARNTSIVLEATRKLKELNVGVFFELQNINTLSGEGELMLTILAAFAQAESESGSTGAKMVYQRKYEAGIPVQYLERSFGYTKDERGVFVADEAEAVWVRKIYEMAAEGYTPAAIKRYLNENGVKTVGGVQWVDSTVFRLLENEIYKGDYIMHKYFVNEERKLVRNRGEVDAWYIEDDHEAIVSPELWQKAQEALAAKRDYLAEGSVIEEFTEENYPYMNKIYCAKCGYPLYKRIYSKGNRLNWGCSGTKRYGKTFCDGINIPDGVLRSAWHFKENTYIAEKALDKGVKEFTYLKEQSWKRRHKKKQPPAIPENTEAEYPYREKIFCALCGSRLVRYVNPQSHKVTWVCSRRKRKGKDACDGTRVPDTIIKGWGEIKKDIYIQRKDDKNGKKRYSYTSKKPEGADRA

SEQ ID NO: 11252 - protein, 515 aa, synthetic construct
MNRTAARSVTVIPPTINPLTHLSKVAVQKRRVAGYARVSTDSDEQFTSYEAQVDYYTQYIKRNPEWEFVKVYTDEGISGTNTKHRIGFNEMIADAMSGKIDLIVTKSVSRFARNTVDSLVTIRKLKEKGVEVYFEKENIYTFDGKGELLLTIMSSLAQEESRSISENVTWGQRKRFADGKVNLPYKQFLGYRKGADGFPEVVQEEAVIVRRIYTRFMEGLTPGAIAKELTAEGIPTPSRKQSWQTSTVESILQNEKYKGAALLQKCFTVDFLTKKRKVNEGEVPQYYVEHSHEPIITPEEFGKVQTELARRKQISRQYSAKSIFSSRIICGDCGSYFGSKVWNSTSKYRRVIWQCNSKFKGEHKCETPHLDEETIKARFVTALNAIIESKDNILEDCRLMQATLTDCTGIDTEIESLLEEIDVVTELTKRCIAENSQTAQNQEEYTARYNGFVERYEKAKAQLEQLRTTKAAREAQAEAIGALMFEVQEVEALTEFDEKLWVTTIHTIPVHASRP

SEQ ID NO: 11253 - protein, 434 aa, synthetic construct
MERVVERVDALIPAQPKALRVCAYARVSTGKDAMLHSLSAQVSYYSKMIQSHNGWMYCGVYSDEAVTGTKRERAGFQHMIEECRQGNIDLVITKSISRFARNTVTLLQTVRELKSLGVDVFFEEQHIHTMSTDGELMMTILASYAQEESLSASENQKWRVRKAFENGEIINLRFLFGYDITPGGIQVNEKDAAIVREIFARFNGGESMSSICRDLDARGHKGVLGGTWCAERMRNTLSNEKYLGNALLQKQYRNNHIEKKLLPNRGELPMYYAEGTHEPIIDQATFDKAQERLRMLAQQTANRKKPTRSVFSGLIHCGLCGNTYKRVTYRKKHYWNCTTFQTKGKSECAAKRIPEETLETLTCEVLGEGSIDSDMVRSKITAIRAEKNNVVVYCMDDGSEIVKRWKDRSRAESWTPEMKEKARQRALQARRKKE

SEQ ID NO: 11254 - protein, 501 aa, synthetic construct
MNAVYARQSLDKKDSLSIETQIELCKQELGIDVPTKVYIDKGFSGKNTNRPQFQEMMKDIHSGVINKVTVYKLDRLSRSLLDFAEMIEVFKQHNVEFQSTREKFDTSTPIGNAMLSIIMVFAQLERETIQLRVRDNYYMRSANGAYDSTAPYGFIKTKVALQGKSVSSLVCDPETTQILRGIFDAYAYTSTSLGALARQLNKRRVPSPGGAAWDSCKLSRIMSNPVYVKANADIYNYYRLTGINITNPIEAFAGVNGCVTYGQWDHKRRKFDQLKSLTLSIGLHEGLVDAQTFLLCQNRLSNNTQVYNGGQGKHSWLTGLIKCGYCGKAMKADVMKKGVPKFRCSGHANYGTCDDNARVSIAQVEEAVETQIMQHIQRHSDLQAQQIAECDVKEQQYKIQINKINEQIDNLVNAIAQGSATVIGYLNDKIAELETQRHEIEVALQKHILERPSPENTRQLYDTLDMWPYMDIAQRHEVAAMLIKEVRIFTDEIRIFWKYDL

SEQ ID NO: 11255 - protein, 544 aa, synthetic construct
MRVSVNLNAQKPDTTTNAVIYARYSSHGQTEQSIEGQLAKGHEYAAAQGYTVVHEYIDRAMTGRNDNREAFQKMLSDTGKHQFQVVIVWKVDRFGRNREEIAFNKHTCKKNGVRVEYVAESLPNSPEAVILESVLEGMAEYYSIQLSQNIRRGQLESAKKCQCVGGSVPLGYTLDSDKHFVIDPQTAPVVKKIFDLYAEGATISEITGQLNEQGIRTARKQLFTKNSLTKLLKNEKYIGVYTYKDIVRVEGGVPAIVDESTFDRVQELLKINRRAPSHTWTKVEYLLTDKLFCGHCGSPMVGESGFSHTGAKYSYYGCIKRRREKACDKKPVRQDWIEALVLDETVKLLHDDELMEYIIDRTWEYYQVTDKVQEEKAVLEAQLAEVDKAINNLVRAIEAGIFNAATKSRMDELDAQKAALTASLADLELTSGIRITRDHIEYFLLRLRDLDVKDRECQKRLVQTFVNAVFIYDDGRVKITYNYSGQSSTITLNQIASAEKGKGFVCCLPCSTSSPRFPRGVAALFLFLGKNGCESTTNFSCFVL

SEQ ID NO: 11256 - protein, 507 aa, synthetic construct
MTKNAVIYARYSSDRQREESIEGQIRECRAFASTNGYEIIGIYTDRALSARTDQRPDFLRMIADSDRHIFQFVIVYSLDRFSRSRYDSAIYKNRLKKNGVRVLSAKENIRDDPTGVILESLLEGYAEYYSLELAQKVKRGMIDNLLEGKWVGTAIPFGYRKGDDAKLHVDEAKRNAVIDIFQMYADHSRIVDIIRYLNNRHFTTSQDRPFSRNSLNHILSNPIYTGTFRWGGESYKDYAPRIISDELFECVQKIKAGRKHSRTRGKSPDYELTGKIFCGRCGLPMVGVSGTSKSGSSYYYYKCSGRTHGKKNCDSRSIRRDIIENAVYEATVSMLKQPQAVKIITDQAILAQKRSMDDSEVLRLKKEKDALEAKIRNISKAVAAGLTADEIIAQANEYSRRSKELETLIQVEELKEKTFTLTPEAVTFFLEKLLEKAKSGQATLSTFWDFIRCIKINGSIAEIQFNYTAVPATLDNPIQIELDLDEECSNETVLVGPPGFEPGTNRL

SEQ ID NO: 11257 - protein, 528 aa, synthetic construct
MRTVIYARFSSDNQNPRSTADQIELCRKRAAEEGWTVVGAFEDAAISGAAGIGADQRPGLNAMMRMVEAGGVDQVLAESTDRISRHVADAHILRERIEFAGARLFTLFDGAVTPMIGLIKGFTDAQFRTDLAKRVRRGQLGTLKQGRIPGSIAYGYRQANRLDDRGQVVRGLREIDPEKADIIRRIFREYAAGRSPNAIAAGLNADGIPGSRGGIWHETAISGDTRHKRGILRNETYVGVVTYGRSRTVVNPQTRQRLMRPNGDDVVERQEIAHLRIIEDDLWQQVQARLASNQGVRPERLRRPKHILSGLGMCEVCGARWVLRSSKFWGCSNYRYGKACSNNRLVGTHIFERMVLADLKEGMLSPDVVNAYVREYHRDFARQSADMGRDRAKLERKLEEAERRMKRMLQAFTDGGSEFEEIRDMLTSARADKDALQRQLASMEAVPNVLALHPHVEEVYRRQVEELEAALADPEAQLEAIPRLRSIIASIIVSPRLDRERGVVVQVIRQMDEILSIATGGQQFSQLR

SEQ ID NO: 11258 - protein, 545 aa, synthetic construct
MRTIIYARYSTDLQNSRSIADQIALCRERATAEGWQIIDTFTDAEISGAAGIGEDQRPGMNALLGRVEQGGVDQVLAESTSRIARHQGDGFAIRERLSYYGARLFTLSQGEIDEIKGWVQGFLDSQARKDIAFNVKRGQRGTVRSGRSPAGLAYGYKKANRLDDRGDLVRGLRAIDADQAEIVRRIFGEYASHRSARQIAAGLNAEGIPGPTGGTWRSSTITGDRQRKNGMLQNRIYVGKIVHERTSKVADPRTRKERIRPNPEADWIEADAPDLRIIDDATWDTVQQLRNTYSTVRPEMARRPKRLLSGIGRCGICGGGWNVIGRDQWACGKHRDGGGCSNNRTIKTHVYEQKVLDGLRDDMLHPDVVSAYVREYHESRRRRTQEVAQQRAKLERRHREATTKMERLVNAVADGGEEFVEIRAILSKARNDRDAIAHQLADLEACPVITLHPGIADDYRAQIVVLTEALSGNGHAQLEAIPKLRALIGSVTVYPAEGRRGVEVEATGRIANMLALATGQALNASMYVSGGAGSGDRTRITSLEG

SEQ ID NO: 11259 - protein, 507 aa, synthetic construct
MRVAAYLRYSSDKQSDASIDDQLRNIRTWCTRNSMPAPATYCDAAISGSRDDRPEYARLIADATGGRLDLILVDDLSRFSRDNVTIGRIVKRLTFAGIRLVGVSDGVDTARRGHKIDVGLRGLMSELYLDDLAEKTHRGLSGRALSGASAGGLPYGYRVTTVGERIIDEDQAAVVRRIYTLAADGFTARKIAAALNDDGIPTARGQTWSMSSIYGDRKRGIGILANPIYIGRQIWNRSEWVKHPETGRRVRRERPESEWIITEHPDLAILTQDEWDAAQQAMAKRRQGTKLARPSAHLLSGVLRCDRCGGPLVMVDYRYGCARAKDKGPAVCSSRLRVPRKKIEDAVLARIRNDLLSPAAFREFEREARKLLASEGPNTKALERDLRRAEQTRDNVMAAIRAGVITESTKAELIQAEQAVAEILADIEAIEAYQPAQMLPRAKEIWRRCVDELSEVRSIPEARQAIHDLVGGSIVIREDQPGVLIAETKVKREMVAGAGFEPATFGL

SEQ ID NO: 11260 - protein, 523 aa, synthetic construct
MRFFSYGRKSVFSDKSDSIDNQFRMNREYCESKFSGQVDSWQQFSDEDFTGANTSRPDLQRMLSFIKGGFCDVLVVYQLDRLSRDVRDFANIYALLEEHGVMFISIKENIDTTTPIGRAMMYVTVVFAQMERETIAARVTDNMLGLAKKGYWTGGNPPVGYVRKHIIVNGKKHCSIEVDPDGARYVTQIFDTFLAYNCSLQGMETRFKNQGIRTQSGKFFSTTQLHKMLTMPYCVEATPEVYDFYAAKGCIMDPGSPREMWDGSVGVIIYGRSTEKNKKHQAQPPEKWTVCLGKHKPFMPAEKWLAVQSRFTQNKCIKDAKWPVPLLKGVLRCKCGNLMQVSRKKKVDGTCSSWYYCRKRMRQGVDACDMGQIKCDLLDEKVLELFRGITADPALIQKFVKAEAPTDVPDLKAAQARVSACERKIGRLAASLALAEDSAASKYIIAEMERLDVELGALKREASLAEMESHRAAASAKDAKATAAEIAKLIHGLDGFDDKEKNAIARAVIQECTWDGERLFIKL

SEQ ID NO: 11261 - protein, 522 aa, synthetic construct
MNENVTLIPARRRAGNRIIKDEKPKLRVAAYCRVSTDSDEQAGSYETQVNHYTEYIGRNKEWELAGIYTDDGISGTNTKKREGFNEMIDDCMAGKIDMVITKSISRFARNTIDCLKYVRQLKEKNIAIIFEKENINTLEASGELLLTIMASLAQQESASLSQNVKLGLQFRYQEGKVQVNHEHFLGYTKDEDGNLIIDEDEAKIVRRIFREYLEGASFRDIAEGLERDKIKTGGKKYKWHLSTVQGILRNEKYIGDALLQKTITTDFIEKVRIKNDGTVPQYYVKGSQEAIIKKDVYTAVQEEMVRRANLTSGIEGKKKRIYSSKYALSSICTCSKCGDIYRRIAWNNRGKKSTVWRCCTRVEQGPKACDAPTVTEEELQQATIKAINQIVQCSESMMQVLKGNIEEALVDDNSGEMEKLNAIMVEKQKELVKLAHAKKDYGSLADEIDILRDKKQELLVRRAKTEGVKKRITELVDFLQGAPQKLGEYDEALVRKYIEQIKIFEDHFIVCFKAKVEIDIQR

SEQ ID NO: 11262 - protein, 521 aa, synthetic construct
MARITKIEATKDFIEKKKTRVAAYARVSTRSDEQLLSLETQKEHYDNFISANSKWEYAGLYYDEGVSGTKVEKRDGLLALLKDCEDGKIDRVITKSISRFSRNTTDCLEMVRRLASLNIYLYFEKENIDTEHMSSELMLSILSSIAESESRSISQNNKWTIKHRFEEGTFIISYPPYGYDNVDGKMVIVPEEAEIVKEIFAMAINGMGSYVIAKELNKRGIRTKKNGKWGSSTVKGLLHNEKYTGDVIFQKTYTDDNFNRHNNYGEKNMYLCKNHHEAIVSHEIFEQAAAVMEQRAKEKSIEAGHEKYQNRYAFSGKIICGDCGSTFKRRQHYKPSGNYVAWTCNLHLENKDACSMLYIHDEAIKNAFVRMMRKLQTADNRMLKPFVAGLQGTNNKDRLHQVMDLEAAIEKNTEQQAVLINLMSAGYLEPEVFHLEKNQLSIEADELAKEKELISKSINGDLTHLEEGKKLLRFASRKSVIKSFDDDMFLEYVDTITVKSREDIVFNLKCGLHLIERLVEE

SEQ ID NO: 11263 - protein, 525 aa, synthetic construct
MYLEISNPMDYHVALYIRLSKEDENEGPSQSVQNQESLLREFVQQHRLSVFDTYVDDGWSGTSFDRPSFQRMIGDIESKKVNMVITKDLSRLGRDYIMTGHYMERYFPEHRVRYISLLDGIDTGVDSTANDITPFRAIMNDMYAKDISKKIKSVKRDKQRKGQFIGGKPMYGYKMHPTEKNKIVIDEEVAPVVRRIFALALSGMSCRKIATTLNEEGVPTPATYCGWKVGNPGPYTGLWSSERISEMLKNETYIGNMVQGRSVKISYKSQKCLRQSPENWVVVEGTHEPIIDPETFQKVQLLVNSRKHTRSRTYDFLLKGLIFCHECGYPMAVLNRKNAAGEDRLFFVCRTYQRFTKAGVCTCHSIKEETVNEAVLTKVREVCQAYLNPDRLRPIAEEAVENASKAASCEAEMQALQSKITAFTTNLDQMYMDRLNGLLSEEDFQRIYQKVKMDRTVLEERLKSLQEQAKQPLNTEEKAKALVKQFLDSALTSRELLVSLIERVELTEEKEIIIKFRFHELEAIS

SEQ ID NO: 11264 - protein, 543 aa, synthetic construct
MMKFPIDLSMLTEEEIDQFREDPSTLFEGDTDVSLYLRFSSERQREQSIEGQLRDCRAFCKMNRYRIVAIYVDRATTARKDVEKRTHFQEMIRDSDKQPWEAVVVWKLDRFARNRTDSALFKFRLRKNGVRVISATEAISEKPEGIILEAVLEGMAEFYSADLSQKITRGMRESALKCHSIGGHVPLGYKIENHKLVIDPNTAHIVQEAFQLYANGETVADICRLFNFKGYRTAKGVEFNRNSFKSMFRNKRYIGIYTYKDIEIEGGVPAIIDKELFETVHHRLSVNAEAPARGKAKVDYLLAGKLFCGHCGGSMNGESGTSKTGAIHNYYTCYTRKRQHSCDKKPLKKDWIEYIVAQDAMALMTDEVIEELADMAMAQTEQDLKENTRIPELSDRLKEIESSISNITRAIEKGIASDTLMERLVELEKDKKKVLRLLADEEKYICRIDREQIIFWLNKFKGGSIKDEGFRRVMIDLIVNSVTVWDEPDGFRITTAYNLTSCKNKTYRVSPSSGKEFGFEGPESTIKITTPKGVVIFMDALRN

SEQ ID NO: 11265 - protein, 453 aa, synthetic construct
MECVAYMRVSTEKQAVEGNGLDSQKRDIENYCRKNELIISDWYIDDGYTGTNMDRPELQRLVNDCSRKRVSCVVAFKLDRLSRNMIDGIYLIEKVFQKYNVMFKCVHDSVSYNSPMEQAYTQMMAVFAQLDKNTMMLRMRGGMLERVKQGYWFGGGNLPYCYSYSKEQGILIPIPERAEQARKALELFISGYSDAKIKEICGFKSEIVTRSILTSVVNVGMIPYKGKVYRGRHEAVFDKDRFELALELRRSRRSAKVSCITEPNLLTGLCYCGVCGCKMRYQKWGSEKHKIYCCSRDKKLSYLPNYNANCDNSLEWADEIEKQIEEEILKISLDLSSYKPKEKATKLEIMQSQLEKEQIKLKRLYNLYADGNNTVLEMIKELETQIKEMKSNIATESKNAINTQKKEFVYENIKKLADIWDNIDKKQKNMILKTIIDKIIIVNGNIEIQLKNF

SEQ ID NO: 11266 - protein, 445 aa, synthetic construct
MKKEQKQQPMQIRQVKPDAPTPRRKRVAAYCRVSTGKDAMLHSLSRQISHYSAYIQRQPGWEYAGVYADEAYTGTKGDRPRFRQMLSDCRAGKIDLILTKSISRFARNTVTMLETVRELKALGIDVYFEEQNIHSMSGDGELMLTILASFAQEESKSVSDNCKWRIRKDFSEGKPMNLMLLYGYRSVDGQIVIDEDEAAVVRDVFKAYLDGAGSSRIAARLRETNTPRRFGGTWTGNHVVEMLTNEKYTGDALLQKTFVEDHLTKKQRRNTGQLDQYYAENTHPAIIDRETFERAQAILAQRREMINIRKPTTVRYPLSGKVVCGNCGAHYNRRTRSTGRNSIPRYTWQCVTYSSKGKRYCPASQIPEETLIALTCEVLGVENLTEEAVDALDEIRVTGKGCLRFALRDGRVEERQWAWESRAKAWTPEMRRKASEQMKRRWRHD

SEQ ID NO: 11267 - protein, 537 aa, synthetic construct
MTETATGGTRVRMIPATVRRCAVARPLTERLRVAAYARVSTDDEEQQTSYEAQVDYYTKKIRENPEWIFVEVYADEGITGTSTKRRKNFNRMIDDAMAGMIDRIITKSVSRFARNTVDTLTTVRKLKEKGVGVTFEKENIDTLDSKGELFITIMSSLAQEESRSISENVTWGWRKRIADGKVSVAYSHFLGYEKGPDGNMQIVEEEAKVVREIYAMFLDGKTPSGIAAALTKRGVPTPAGKAKWQASTVKSILSNEKYRGDALLQKTFTVDFLTKKAKVNEGEAPQYYVENSHPAIVSAEVFELVQAELTKRRQRGGRTSAVTPFSGRLICGECGAYFGSKVWHSTDAYRSVIYRCNRKYEKKGAPCPSPHVREEELRAAFEKALGMLLERRCEIFSAYETIIANLTDTAQLDRELERAQARLDEAHQEMERMARRNAEIAQDQEEYNRAFDALSAKCSALKEKIGALKAQLAAKAGRRRKLEAFMAQLREKEALAPFDERTFAAMVDHIVVYPGEAKGAKKLIFRFRDGTEIPVDL

SEQ ID NO: 11268 - protein, 519 aa, synthetic construct
MRKVTKIEQATSAKVKLKKIKVAAYCRVSTDSDAQLESLEAQKTHYENYITSRDDWEFAGLYYDEGITGTKKDKRPELLRLIDDCKAGKVDFIITKSISRFSRNTTDCLELVRKLLALHIPIFFEKENINTGSMESELFLAILSSMAEGESVSISENSKWSIQKRFENGTFKCSYPPYGYDWNGEQMVINPEQAAVVKEIFTALLSGKGTHAIADDLNQRGVPSKRGGRWTATTIRGMLSNEKYVGDCLFQKTYSDSQFVRHSNHGEQTQYMVRDHHEPIISREDFEAAQAFVKQRASEKGVVKGTEKYQNRYVFSGKIICGECGDTFKRRIHSCTGYKYAAWCCNTHIEDKSKCHMLFVKDEALKLAFITMMNKLIFSHRLILKPYLEAIKNVSTDDSLRRIQQIQTLLVQNTEKRETLTKLMTQGIIDPVLYSQETNELLSQADTFRDEIDSLKNTVSGDVTKVTEATALMHFAEKSAMLHEFDDDLFERFVKRIIIHSRNDIRFELKCGLTLRERK

SEQ ID NO: 11269 - protein, 538 aa, synthetic construct
MSTAPNVTIIPAKVQTAESRSKYHQLRVAAYCRVSTAQEEQQNSYQVQIAYYTDLINRKKEWTLAGIFADEGISGTQTKKRTEFNRMIRMCKNKKIDLVITKSISRFARNTVDCLEYVRQLKDLGIGVIFEKENINTLTMTSEFMIALYGSFAQAESESISKNVSWGKEKAYREGKVQFQYKYLLGYKKGEDGKPEIVPEEAETVRLIYTLFLDGYSMSRIKKLLENKGILTSQGNKVWNESLIRSILKNEKYAGDALLQKTFTSDCITHKIVKNHGERPMYLVTDHHDPIIDRDTYNRVQQELARRSSKRKISDKTKTEQGKYSSKYALTELLICGKCGTPYRRTTWTSRGKKLIVWRCISRLEHGKRYCTDSPTIKEDQLHKAIVRAINNYYSCGNDVEKILKANIGNVLECHGQEEITAIKKRLKEIDKARNDLISLIATGGCDEDKLDSEFEKLYEEEQSLSERLAMLKSKNQTSAETQAKLDKIIDMIEHEKFELEAFDNVLIRKLIECVKVLSKTEILVIFKGGYEVRTEIE

SEQ ID NO: 11270 - protein, 513 aa, synthetic construct
MPTVTVIQPTIAEEQNKKIRCAAYCRVSSDSEDQLNSFMAQTRYYEKAFEKSDREQLVDIYADEGITGTREDKRDEFQRMIKDCRRGKIDRIYTKSISRFARNTKDCLKNIRELKSLGITVFFEKENIDTAKLTDEMMITIMGGLAQEESTSISQNMRWSVQKRMENGTFNPPSLPYGYMRRKQDIVTIENEAKIVRDIFTQYINGIGMETIAKELNKKHIDKGSKGFIWCKNTIRYILMNEKYTGRSVFRKFYTTDNFPFKQKENKGEFDQYLVQETMPVIISEDIFEKAQHLISIRKSMGCRKTAKYPLSGKIKCGNCGSSFRRKKINNTVCWTCSKHNINAADCELKAIPQDLIYSIFIGLCNKLFCNYKTILKPLQTSLQDLKLKEFTGKTQVMDIHKEIAKFREQTHILARLNTKGFLDEAKYIEQTTALTAKINKLQAELKKLTRFDDEDETLDQIDMLIDFFEKRDSPMTEFEETAFESMVEKIVVKSQNELEFHLIGGLQLGEYC

SEQ ID NO: 11271 - protein, 573 aa, synthetic construct
MKAVIYSRKSKFKEEGESIENQINMCKEYAERVLGIEEFDIYQDEGFSGGNTNRPQYKIMMKKIKEKKYTHLICYRLDRISRNVADFATTLEVLNKYNVSFISIKEQFDTSNAMGRAMMNISATFAQLERETIAERIKDNLRELSKTGRWLGGPAPLGYKSIEVENNDKAGKSRKKHILEINKDEEHIVKTVFSLFEEYKSFQKVSRMLEARKIYSRSNKVFSRELVKQMIINPTYAIADKNILNYLKQQGAEVYGYENINNFNGIMAYNRRKENGSFAPVDNWIISVGAHEGIIKSSSWIKCNELVKSIRINSSNRKGTGEKALLSGLVVCGKCNCGMAPRTNSSGKYMYRYYSCNLRNKASGRCKNDALNAYDAEEFVVNALKNLTKEEMIENYSYIKNKNLIKINNKISINNYKKEIENNKKIIKGLVVKMALLENDIEILDIFKNNIKAITEKNKELEQKILKLKQENDEIIDINETVDEMLLRLDNFKKFFDYTEDFEEKKNMIKNLIKFIIWNSDTRKLELVLIGSDKERPLPYYLPLSKVNRGNGTCRNNSHNGTSAYGKRFNKRT

SEQ ID NO: 11272 - protein, 529 aa, synthetic construct
MKKIAIYSRKSVFTGKGESVENQIALCKDYCEKFLRYDNADYIVYEDEGFSGKNINRPQFKLLLDDIKKHKIDILVCYRLDRISRSVADFASTLEILNKYNVDFLSIREKFDTTSANGRAMLNISATFAQLERETIAERVKDNMLQMAKNGYWTGGQLPLGYDSIRYSTIDGTGKERSYSKLKENIKELDVVRLIYSEFLKNNSILDITKLLNENNLKGKNRCDFDRTQVKRILRNPLYVKSSDLTNLYLSNNYSVYGIANGNGYLTYNKSKAKDKWIVSVANHKGIIEDTNWLLVQKILDNNATKVSNRTGTGTGDNTSLFSGILKCSECGENMVIKYNNKNKYGNPNLYYICSSKTRKFTSKCKTKNLNVKATDIKILEDIKSYNKEVLIKKYEEYINELIANNNTGLKENLKEQIKHKEKQINNLVIKLSNIDTPEISDIILNQLATLTNEVKDLKTKLSNSDIQAANVEKAIGEFKNIKNLLLEFDSSIDSTEDIKVKRQLIRNIVKSVKYNEVDKTFFIEFYHP

SEQ ID NO: 11273 - protein, 477 aa, synthetic construct
MYTPERTVNMNKTITMGMKTVSRIAAPVQMPKLKRVAAYARVSMGKDTMLHSLAAQVSYYSDLIQRNPEWEYAGVYADEGLTGTKENRPEFQRMLSDCRAGKIDMILVKSISRFARNTVTLLETVRVLKEMGISVYFEEQKIDTMSGDGELMLSILASFFQEESRNASENCKWRVRKKFEQGIPTGFQMYGYEVRNGVFTIIPEEAEVVRRIFRMYLDGMGSVRIMKTLIAEGIPAPEGGLWNASVIMMMLRNEKYAGDLLLQKFFTNNHIEKKQFFNRGELPQYFVAGDHEPIIDRETFEAVQAEIARRKAIYTANGGRKAAEEAEDYLPELEEKKLSDLLLGDRIHCGICGKKYRRKITRLGTPYAAPIWICGTFSYRGKAYCASKQIPEKILIDLIAGALGISPMLDDQEALEHINHIEMHPNNRVLFVFQDGHTEEHFWKDHSRKDSWDAEKRKKAAEKTREQRRRRKEQTEQ

SEQ ID NO: 11274 - protein, 561 aa, synthetic construct
MSEARAYEPTVTRVKTVTMIPPRLQAMPGMPAFAVRPKRVAAYARVSTNSEEQLTSYEAQVKHYTEYIKGKEHTDNWQFVDVYTDKGITGTSRKKREGFNRMVEDALAGKIDLIITKSVSRFARNTVDTLTTIRELKEHGVEVYFEEQNIYTLDGKGEVLLTIMSSIAQEESRNISENVTWGMRKRFAEGKVTMPYKQFMGYRRGKDGTPEIVEAEARIVRTIFRRFLEGATPAIIARELNLAGIPCPSRKSLLGENEIEAAKSRKKTARWSPSTIESILTNEKYKGDAILQKTYCTDYIKKTFVVNDGSEIPKYYAQNSHPAIVSAEVFDLTQIELEWRSNLKGSYSGKSCFASRIVCGDCGAFYGSKVWHSTDEYRRTIWRCNNKYEGDKKCSTPHVTQEELEKAFVDVMQKVIAEKDAIFAVCREVLDEVLDTSELDRIATRLQDQALGMAERVRKLVEENARVRRNQEEYQQEYDALVAEHEKLSEKIRSIEEQKKDKADRKRKVEVFLRMLEEQEECVGFEPYTFVALVDKVVVGQDRKLEIIFRNGMKYEYTTVG

SEQ ID NO: 11275 - protein, 512 aa, synthetic construct
MLADYLEKIRTKTNVLVLKAVIYARYSSDMQRSESIAAQIRFIREFAKNNNIIIVSEYIDEAQSAKRDDREAFQQMMKDSKSAEWQIVLVHKLDRFARNRFDSATYRIHLRKNRKYLISAVEQFDDSPESAMLEAVIEAMSEYYSKNLAREVMKGLTENALKGKNCGGTPPLGYDLDEHKFYKINAFEAQGVKLIFKLFLDGKTYSEIISILNAAGYRTKCNRLFSRNSLYEILRNEKYKGIFVYNKTQSRDEITGKRSGHRYKSEDEVIRINGVVPQLISPEDWDVAQSILDNRKKAYGNNAKETYLLSGKIKCGKCGGSYVGRRVFNSCGVKYIYYACNEKRNPNFKCDNSSVRRDWIEDIVVQATKEFVKRFNATYFEDIQSEYIKEVENCNHKEIKTLQDKLNSVESEIQRLVDAISKASLESLISRLELLEQQKKEIQAEVRKIEIRNDNFSAEPIKKLLSKAEKMLEEESAPLKELINLVVKEIVVNESDIQIYMNCFDKTITHKR

SEQ ID NO: 11276 - protein, 510 aa, synthetic construct
MIENYLDKIKQRLNVVVLHAVVYTRYSSDMQRGESIDAQIRLIRKWSDEHSIVIDKIYADEAQSAKSDERKQFQQMIADSKKQKDWQLVLVHKLDRFARNRMDSAAYRVELRKNKKYLISTTEQFDDTPESCMLEGIIESMAEFYSKNLAREVMKGLTENALKGKTCGGTPPLGYDLDERKYYKINEFEAQAVKLIFQLFLEGKTYGEIISKLNTSGYRTKCNRLFSRNSLYEILRNEKYKGILVYNKTQSRDEITGKRSGHRYKSDEEVIRVDGVIPQIVSPEDWDDVQLILNSRKKAFRNNAKETYLLSGKIRCGKCGGSYDGRRSFNSCGTKYIYYACNGKRNPNYKCNNNSIQRDWIESYMINIIDNYIHHLSKAQKQNIYQLCFDSVQSSKKADISILNQRLNSLNKELSRIVDVITITNSPTLIEKLTDLEQQKAEIQLRIKALSQEKGKILSKQKINLLLTKIKKMLKEKSVPQLKELMDLIVNEIIVNEEDVIVYLNIPITK

SEQ ID NO: 11277 - protein, 523 aa, synthetic construct
MNDTAKTTDINEEPMMKNVCAYCRVSTNIPHQKGSYESQLEYYENMIRSKAGWSFIGIYADYGKSGTKKKGRTDFMRMLEDCEAGEIDIICTKSISRFARNTVECIKIVRELKKKQIDVYFEKENIHTLSEKSEFLISIYSSVAQAESESISSNQKWSIQKRFMNGTYILPNPAYGYCTNANGLLELDQKQAAIVRFIFDEYLEGNGIWRIAKSLNEQRIPTKTGKAAWLGGAIYIILKNSVYTGDLLLQKTYSEDIVPFVRRKNNGEYRQVLIENDHEPIVTHEEYEAVQRMLKQKAKVKKAGKEEQLEEHSEFKGKVICGICCSSYNRQVKKGRTGKSNITWSCARRIQTKDLCENDIIKESQLEQAFVIMWNKLSNHCDEILIPLMHELEHLKATPMIQKQLEQLDKRIQEHKKQREILNHLASGEMIDSAFYMEQQNMISKNLKEYQRAKEQYLQKSRQRKELTQTKELIKWIKKGPQYLEAYDKTLFQAIVKQIIINPNELVFQLKNGLQLTERSEKE

SEQ ID NO: 11278 - protein, 539 aa, synthetic construct
MNSTATDRKIKIIPPKANMNTEKKKKVKKINVAAYCRVSTAQEDQETSYEAQVAYFTKLITENPSWQLAGIYADDGISGTDMKKRDNFNAMMERCLQNDREIDLILTKSISRFARNTVDCLSCIRKLKERNIAIYFEKEHINTLESTGELLITILSSQAQEESRNISENVKWGLKRKYEKGEVLVRRMFGYGKGADGQLHIIPEEAETVRLIYGKYLEGKSLNSIARILQEKGIKTIRGNTQWNVNSIRTILINEKYIGDAMAQKTFTTDYLTKARKENQGELKKYYVENAHEAIIPREVFYKVQEELHQRANIYKRSSKQETESKGKHSGKYALSKITICKECGCEYRRQIWSKYGEKKAVWRCENRLRNGTRYCKDSPTIEESVLHRAVLHAINQVLENKGDFIQAFRKNVVTALTHGTENSEYAKEKKKLQKAMAELIQQQAQQNGDKTAFEERCQVITAQIEALEMKQIKAARRGEKGRKMENIENFLDKTSCVLTEYDDKLVRLLIQNINVVNASKIEVVFKSGITVGEMLPAY

SEQ ID NO: 11279 - protein, 503 aa, synthetic construct
MAGRITQVAFGSTQLPRDKNVAAYCRVSSGKDAMRHSLAAQVSYYSELIQNHAGWEYAGVYADEAVTGTKDSRKNFRRLLSECRAGKIDMVITKSISRFARNTVTLLETVRELKTLGVDVYFEEQNIHSLSADGELMLTILASYAQEESRSASENQKWRIKKNFEEGKPWSSTLLGYRNVNGRYEIVPEEAETVRMIFAWYLEGAGATTIRNRLNAMGIKTRLGNSWSRSPILKLLRNYAYTGNLILQTTYREDYITKRSVKNNGEKPMYHAQGTHEAIIDMDTFNRVQEEIQRRAEHFASPDGNKSTARYPFTGMVKCSRCGKSYVRSGSPKYRTWTCHTRRKDGLNCCGAEIIPEEELFRLTAEVIGGKVTEDAVRDKITVIRAEKDRTLVFCLKDGKETVKQWREHEIKYICTEEQKRQISLKNSGRKRTDEQKRQQSERMKEYWRTHEFPEERRRLISEKKKAYWSDGEASAEHREMLRQRMKEVRTMRKNGGKEENDG

SEQ ID NO: 11280 - protein, 525 aa, synthetic construct
MANVTVIPATRNIHTGIRKDAVTKRKTAGYARVSTDSEEQLTSYEAQVDYYTSYIQSRPEWEFVKVYTDEGISATDTRHRDGFNEMIRDALDGKIDLIVTKSVSRFARNTVDSLSTVRKLKERGVEVYFQKENIFTFDSKGELLITIMSSLAQEESRSISENVTWGKRKRFADGKVSLAYSTFLGYKKGEDGQMEIVPEEAETVRLIYRMFMQGKTPYAIAKYLTEQEIPTPTGKSEWRHRTVENILTNEKYKGDARLQKCYTVDFLSKKRKTNEGEVPQYYVEGSHDAIISPSEWQLVQLEMERRRAAGRSNCCSPFSAKLKCGDCGAYFGSKVWHSNSKYKRTVWQCNAKFKGEHKCTTPHLYEQRIQELFLEALSSLMENRDSLIDDCRAVMHVLGDCKAIDREMDEARNEMEVITGLIQKLIDENATRKMDQNDYRKRYDGYVSRYAALESRMNGLEKERKEREFKYDIFSGFLFELGEIHELPLAFDDRLFYQLVDYATVYSDGRVVFTFRNGTEITTEM

SEQ ID NO: 11281 - protein, 590 aa, synthetic construct
MRVSVNLNAQKPDTTTNAVIYARYSSHGQTEQSIEGQLAKGHEYAAAQGYTVVHEYIDRAMTGRNDNREAFQKMLSDTGKHQFQVIIVWKVDRFGRNREEIAFNKHTCKKNGVRVEYVAESLPNSPEAVILESVLEGMAEYYSIQLSQNIRRGQLESAKKCQCVGGSVPLGYTLDSDKHFVIDPQTAPVVKKIFDLYAEGATISEITGQLNEQGIRTIRKQLFTKNSLTKLLKNEKYIGVYTYKDIVRVEGGVPAIVDKSTFDRVQELLKINRRAPSHTWTKVEYLLTDKLFCGHCGSPMVGESGFSHTGAKYSYYGCIKRRREKACDKKPVRQDWIEALVLDETVKLLHDDELMEYIIDRTWEYYQVTDKVQEEKAVLEAQLAEVDKAINNLVRAIEAGIFNAATKSRMDELDAQKAALTASLADLELTSGIRITRDHIEYFLLRLRDLDIKDRECQKRLVQTFVNAVFVYDDGRVKITYNYSGKSSTITLNQIDGAEKGKGFVCCLPCSTSSPRFPRGVAALFLFWGKPGVNRLPISAVLCYNGSENGGGGTENEKAACCVPDGARLLGLCGVRGRNAGRRYGHVRTI

SEQ ID NO: 11282 - protein, 572 aa, synthetic construct
MASRIAEKLAAKKAAIYIRVSTHWQVDKDSLKVQRRELIAYVTLVLGITDYVVFEDPGYSAKNTDRPEYQAMMDRIRTGEFTHLVVWKIDRISRNLIDFAAMHDELQSLGVTFVSKNEQFDTSSAIGEAMMRIILIFAELERKTTAERVTAVMLSRASDGQWNGGRVPFGYSWSKETKTFSIVPEEAKAIRRMAELYEQYQSLLYVAKYLNDAGIVTKTGGQWTPTTVRTILTNPWYIGQYVYNVHSDGKGIEKRDSDEWITVENHHEPILSEDVFYRMKFLLTRNKRGGVPSHKTYVRKNIHVFAGLLRCGQCGSNMTANLDRRRANGFRPSQYACGSRRRKGTSCTNKYISDTTLGPFVLNYVANIIRASKNSSEATTPDVLERKLLRGEAFEDVASVSTDALGQLLDAFRSAGDAVEYRPQIAFSGDDNSIREIDTLRARRRKLDNALARLNALYLYDDEAMPEKDFVMQRGQITKQLEEVNARIEELQNQESSEELGDDFIGKASYYIMANKLIEDRYIDYEKYIRAIDPSIPRSFLQQIIDHIVVNDGRVISITFKNGSTHTFTYKT

SEQ ID NO: 11283 - protein, 516 aa, synthetic construct
MQQAVIYARYSPGPNQTEQSIEGQVRECTKYAELHDLRIVGTYIDRKISGKTDNRREFQRMIDDSEKHIFDVIILYHTDRFARNRYDSAIYKHKLKENGVELRYATTDIPKGPEGIILESIMEGWAEYYSAELSRKIKRGMRESALKCHSTGAGRCLGYRTAEDKSLVIEPEGAKAVQTVFDMYIKGKSHADICRYLNDCGFRTAQGKLFNKNSVTHIIRNKRYIGVYTYDDITIEDGIPAIISKDTFHLAQLEAARRKTAKRPKEPKAEYLLSGKAFCGHCQKPLVGVSGTGKSGNKWYYYYCQESRAKRGCTKKPVKRDWLEREVVKRTVAEVLQPEVIQHIAKKCYDLQMEYRQDNSDVLFYELKLKDVRKAIKNTMHAIESGVKTKTLPARLQELENEEEALEAELAIAKASDFVITADQIEFLLTQFAEPWECESEEEYHRRIIKCFVHKVFLFDDKLLIYYNVSRDGKTREQSEAELLEEALGEGFDKRSSGSTMQKRHPIWDGVFAWLR

SEQ ID NO: 11284 - protein, 507 aa, synthetic construct
MNTVIYARYSAGPRQTDQSIEGQLRVCADFCKQRGLTVIDTYCDRHISGRTDERPEFQRLIADAKRKKFEAVVVYKTDRFARNKYDSAVYKRELKRNGIQIFYAAEAIPDGPEGIILESLMEGLAEYYSAELAQKIKRGMHESALKCQSTGSGRPLGYRVDEQKHFQIDPESAQTVQTIFEQYIKGESNAAICELLNSRGLRTAQGKPFNKNSINRIIKNRKYIGEYRYHDIVVEGGMPAIISKDTFNLAQAEMERRRTRKAPKSPKAEYLLAGRLFCGHCKGPMQGVSGTGKSGNKWYYYYCGNTRGKNKTCDKKQVSRDRLERAVVDFTVRYILQEEVLEELARKVHAAQERQNDTASEIAFYEKKLADNKKSIANVLRAIESGAATQTLPARLQELENEQAVILGELSFLKGKRLAFTEDQILFALMKHLEPYPGESEQDYRRRIISDFVSEVYLYDDRLLIYFNISSEDGKLKSVDLSNIEGGEFDEGLTSSTIQFVLEPDSL

SEQ ID NO: 11285 - protein, 535 aa, synthetic construct
MTAVIYARYSSDSQREASIEGQLRDCKDYAEKNGITVVGTYIDRAYSAKTDDRPDFQRMIKDSGKKIFDVVLVWKLDRFARNRFDAVNYKYQLEKNGVHLVSAMEPISQGPEGIMVESMLIGMAEYYSAELALKVARGERENALQCKYNGGVVPLGFTIGKEDRLYHIDPETAPIVQEIFTRYADGEPAEKIAASLNERGLRTRTGKPFVKNSFFQIFRNRRYIGEYRYKDIVTPGGIPAIVDQDLFDRVQQRFEQNRIAHGRPAKEDVSYLLTTKLFCGKCGTLMGGESGTSHMGNTYYYYKCGNAKRHGKAHCDLKAIRKEPLERFVVETAIKVIFSDEIIERLIDLVMDAQQQENTRLPVLKDQLRDTEKRLANLLEAIEQGILTPTTKQRLDELEARKEALNTSILEEELKKPVLTREWIRFWLEKFRKGDVGSTEHQRQIIDTFVNSVYVFDDRVVLNFNFTDDAKTVTREEVLGSSAVDNAPPKQEPLTLVRGFFVASSTNPRRSRTVQDSNSTATPQAGQQTPQWGVC

SEQ ID NO: 11286 - protein, 578 aa, synthetic construct
MKGAIYSRVSTEQQDYSKQTNELEDYAKRNGIEVVYVFEEKESGFNNNRPEFEKLRKLTKQDIDIILVWEISRISRRAIYLQQQVQEFTDKGICIYAKKDGFSTLNDDGSVNASTKMLIGFASIIAEQEAATLKERTISSKRNKILREGKSYTYYAPYGYDYNKETKMLSINEKQAQVVKRIFQLSIDGYSTERIAILLNAEKIPTKGKKENWTAGTVCNMLTNPVYKGEANYTLKKEKKAGSTYCKPMEVVTISTPAIIEKEQFELSLQKLAERTKRSNSFGTKYNPLLRGLIHCPHCDVKYVYNFGTNQYLCVNKYKKASNKNVHCTAKCISNKLDSIVWNVVKTFFYKELAAGKAQEQIEPLQAEIESYKRQILLLDGKQSELTARANIIVDAAIEIKIQFPNMPDLYANKMKEVEEINKEASKYQKEKERLEKLIHSNDARIKNINRASKESALVESITDETEKYDLVHKAIDKIMIFGEGKTSIIIVTFSTGQTIYLGYSSKSNSKYYTIFYPSSDIYFDIQTSKGYINHLKEKATINSDGSIYLGDLTGEVKEYSIIDFVNYLDIEENRRYY

SEQ ID NO: 11287 - protein, 464 aa, synthetic construct
MARSVTVIPARSQKVQTGHKAVQEKKIRVAAYCRVSTDQEDQLHSFEAQVEYYTKYINEHENYEMAGIYADEGISGTNTKKREQFKKMIADCEGGKIDLVITKSISRFARNTQDCLAYSRKLKNLGIGIIFEKENINTLDSTGELLFTILSSLAQDESRNISENCKWGIRTKFKNGEMHLNTFKFLGYDKDENGKLVINKEQAKTVRRIYRDFLIGINPAQIAKELTEEKVPGCLGQTKWYPSTVIGILKQEKHMGDALLQKTYTADFLTKRQVKNNGEIAQVYVKDSHKGIIDKETWNAVQEEFERREKFMQKHGTDRYSYGSECYPFCEKIFCGECGSLFTRHSWKSRGIIQWQCKNHRKDGKVACTNAYVDNADLEKGFVKAFNRLVGEREKHIERWNSMKLDGTPLEKIRAGQMMEATESGQLQQYVPEAAQLVLEEITIFGAKKYEFAFLEGSRVKVSV

SEQ ID NO: 11288 - protein, 519 aa, synthetic construct
MKRITKIEQDNANALMPKLRVAAYCRVSTASDDQLVSLEAQKTHYESYIKANPEWEFAGVYYDKGVTGTKTEGRDELLRLISDCENGLVDFIVTKSISRFSRNTLDCLELVRRLLDIGVFVYFEKENLNTQSMEGELMLSILSSLAESESVSISENNKWSAQKRFQNGTFKVAYPPYGYDNVDGQMVVNEEQAEVVCWMFEQALAGKGTHKIASELNERGVPTRKGGSWTATTVRGLLANEKFTGDILFQKTYTDSQFNRHHNYGERDRYFMEDHHPAIVSRETFEAVAAVIGQRGKEKGVTRGSKYQNRYPFSGRIVCSECGSTFKRRIHYSTHQKYIAWCCSRHIEMIKACSMQFIRNDAIEAAFITMMNKLLYGHRTILRPLLDALRSANDTGAFHKVAELESRMEEALERSRVLTGLMTKGYLEPALFNKEKNALETELENLQRQKDSLSRVLNGNLMKTEEVSRLLKFASKAEMSSDFDGDLFEEYVDRVVVYSRTEIGFELKCGLTLKERLVR

SEQ ID NO: 11289 - protein, 525 aa, synthetic construct
MAVNKNANVTIIPARQRVGNRKKDEERPKLRVAAYCRVSTDSDEQATSYEAQIEHYTAYIQKNPEWELAGIFADDGLSGTDTRKREQFNLLIEECMAGKIDMVITKSISRFARNTLDCLKYIRQLKDKNIPVFFEKENINTMDSKGEILLTIMASLAQQESQSLSQNVKLGLQFRYQQGLVQVNHNRFLGYTKDEEGMLVIEPEEAEIVKRIYREYLEGASLLQIGKGLESDGILTAAGKAQWRPTTLHKILRNEKYIGDALLQKTYTVDFLSKKRVKNNGIVPQYYVEGSHEAIIPRDLYMQVQEEMARRANLHSGSDRKKRVYSSKYALSSIVYCSRCGDIYRRIAWNNRGKHSTVWRCCTRVEHGPKACDAPTIQESDLQDAVARAINGVLGGREVFLPLLEENIEAVIGGGADDEIAEIDRRLAEQQKELLNLANAKKDYSKVADEIDRLREERQDILMREADRDGRRQRIEEMKTFLQEQADTPLEYDEQLVRRLIEKVTLHADKAVVEFKSGLETDVGL

SEQ ID NO: 11290 - protein, 514 aa, synthetic construct
MPKKNPSGGKRLVAYYRYSGGSHQTEQSIEGQRRDCETYARIHGMVILHEYIDRHISGKTDDRPEFQQMIADAGKGMFDYVICWKTDRIARSRYDSIIYKKKLRDNGVELLYAAEANVEGSGGIIVEGLMEALAEYYSAELAEKVRRGMRESALKGKAIGSSRPLGLTVDKDKKYIIDPAGAAAVRYIFEQYAAGAASSAIVAHLNEQGLCTSRGNPFNKSSVVRIIQNEVYRGVYVSPKFDVRIEGAVPAIIDDDLWERAQKMFVRNRQSRSPRNDRADYILSGKLFCGECGTAMKGVSGHSSNGEVYFYYNCPCKDCHRRNIPKDELEGLVIRTVCNDVLQPDVMNRIADSVIEAQTAELNQPNPEKEALQHELADVQRKAKNLLSALENGTAGAMLTNRLAELEQQANTLSYQLSSLESEPKFPVFSKEEVLYLLEQFLIAPSEKTKAYRRRLIDTFVSKIEVSNTELTIYFNIAEEDCGKMKKAPQSNQPEGCSTEKQMVRVARIELTAS

SEQ ID NO: 11291 - protein, 544 aa, synthetic construct
MRVSVNLNAQKPDTTTNAVIYARYSSHGQTEQSIEGQLAKGHEYAAAQGYTVVHEYIDRAMTGRNDNREAFQKMLSDTGKHQFQVIIVWKVDRFGRNREEIAFNKHTCKKNGVRVEYVAESLPNSPEAVILESVLEGMAEYYSIQLSQNIRRGQLESAKKCQCVGGSVPLGYTLDSDKHFVIDPQTAPVVKKIFDLYAEGATISEITGQLNEQGIRTIRKQLFTKNSLTKLLKNEKYIGVYTYKDIVRVEGGVPAIVDKSTFDRVQELLKINRRAPSHTWTKVEYLLTDKLFCGHCGSPMVGESGFSHTGAKYSYYGCIKRRREKACDKKPVRQDWIEALVLDETVKLLHDDELMEYIIDRTWEYYQVTDKVQEEKAVLEAQLAEVDKAINNLVRAIEAGIFNAATKSRMDELDAQKAALTASLADLELTSGIRITRDHIEYFLLRLRDLDIKDRECQKRLVQTFVNAVFVYDDGRVKITYNYSGKSSTITLNQIDGAEKGKGFVCCLPCSTFSPRFPRGVAALFLFWGKNGCESATNFSCIVL

SEQ ID NO: 11292 - protein, 540 aa, synthetic construct
MKRPCTMTNNNAALYMRLSRDDESYGDSVSIETQRTLLRSYAKEHGLNVVDEYIDDGWSGTNFDRPSFQRMMRDVENGIVNCIVTKDLSRFGREHVMMGYYLDFLFPEKHVRYIAIAEGEDTEKGLSDFVPFKNLFNEWYAKDTSRKVKAAFRAKFAAGQCVSSCAPIGYKKDPTNKNRLIPDEDTRWIIEKIFDLATHGNGAFSIAKRLKEENVPTSGWLNYQKSGAFANIYANAPEEKRYMWTPGQVKKILTDEVYIGNSVHNRQSTVSFKNKKRILNPKEKWYRVENTHEAVIPKDVFFQAQEQIASRRRRQKTGDTQIFAGLIKCADCGCSLAYGSKPQGNERYGYYRCGKYAQGSHQCTMHYIRYDVLYAYVLSRLQYWSSLARCDEAKFATRISLAAEFGKNAKTKRQSEELNRLKKRNEELDILFAKLYEDRVCGRITERNFDMISAKYQAEQASLDEKIIHLQDAIRAKEQSASNAQNWFDLIKKYRSPTELTAELLNALIEKIVVHEAVKQNDGTREQEVEIFYRFIGKID

SEQ ID NO: 11293 - protein, 526 aa, synthetic construct
MQYCLYLRKSRADSEAEALGEGETLARHEKALLDLAKKLNLNITAIYREIVSGETIAARPVMQQLLQEVEQGIWDGVLVMEVERLARGDTIDQGIVAQTFKFSDTKIITPIKTYNPNNEFDEEYFEFGLFMSRREYKTINRRLQRGRMASVKDGKYVANKAPYGYNRIRIENDKGWTLEINKEEADVVRLIFELYTVGEKQSDNTFNRLGTGFIAKRLNAMKVPPKRGKVWVVASIRDILINPVYIGMIRWNWRPQQKKMIDGQLHISRPRATDYLLCKGLHPPIISKETFNIAQDLMRHNPARPIGEKNTVKNSLSGIVVCGDCGRHMVRRPHTKYPDMLICSEPTCNNVGSQLRVVEERILQSLKEWLGEYKISWDITSPPVERISQVSIKKKALQKEQHELDTLNKQISKTHDLLEQGIYTTDVFLERSRALSLRMDEVKEHIAILDKELKTEITREDSAVNIIPKVEKLLEVYYDLPSPKAKNDMLKDVLEKVVYTKKERSKKGNLDNFDIAIYPKIPKYIT

SEQ ID NO: 11294 - protein, 583 aa, synthetic construct
MPRKNKSAGSDQRLVAYYRYSGGSGQTEQSIEGQRRDCMAWAKAHGLTICHEYIDRHISGKTDNRAQFQRMMQDSDKGAFDSLICWKTDRLARNRYDSAIYKSRLRKNGVKIYYAAESSVDGPEGIILEGLMESLAEYYSAELSQKLRRGIRESALKCKCLGGYRALGLTSDKDHNYVIDESQAPAVRYIFEQYAAGRTAAEIVADLNAKGVRTATGGAFNKNSILRIVTNEQYIGTYISRAHNVRVENAIPAIIDRELWDKAQAMVQRNKAGRGVKSKAANYMLSGKLYCQMCGGTMKGICGTGKHGDKHYYYACSNHTAHSCAKRNVEKSFLEDLIVSATAEHILAPGKLEQIADRVVQVQEAEQHIENPEKEMLEAELLECTKKQDNILRAIEDGTGSARLSSRLRELEEQEAALRYRIESIEEPLAAPIYSRDQLLFMLEQFRRAADEQDETYKQRLVNTFVHDIYLSDDSAFVQFNISAQENEKSTTLESVVLSLNGGGPDGENPDKSRLPAGFDRVSLGGDDGNRTRVRKEVHASISGCSSPTGFPHRQAGKRAAASVASSVHGSKQSLMLLTCTAK

SEQ ID NO: 11295 - protein, 668 aa, synthetic construct
MAYAKAKKHLKIWTKKKAALYVRVSTRYQVDKDSLPFQRKKLKEYCKFLGLEDYVIFEDDGYSAKNTERPHFQEMMSRVRSGEFSHLIVWKVDRVSRNLLDFAAMYQELKDHKVTFISMNEQFDTSTAIGEAMLKIILIFAELERNMTSERVTGIMLDRAEQGLWNGARMPVGYRWNNETKFPEPDPEEVKIVQLIFDKYEEWKSSIKIARYLNNNNFKSKRGGQWTSKLIHDIIRNPFYIGTYRYNLRESGRGPLKPESEWIVRENNHPAIIDKAQFDRCNKIMDQNGSSRDTSDLRARKYVHTFSGHLVCGKCGANMIASKDRARANGWRPSMYRCAQRSRMLDCDNSRTINESYIGPFIFNYIANLARVQKNFKNITTVEKLERELLKGETFDGVAGILPEGLNLTFQALSFRQVGNGTYIPDIDFLGDSDGASDHNQIELLKSEIEKSKNAVTRLTDVYLFDPDSMTKEEFATKKKELAKKIEGMERQLADLLDDSGNDDLADMSFIKKASAFLVAQRIVSKSFVDYVGMAQELDNEILKDFIDQIVDQIVVLDGRVQSITFINGLKHEFRYATPAELPVCQKCGGHIGSTCGCRTRTFDFSGKRYQRIKVGDPRDMLHGKKNPVCPECFAQEGRWHHWNCKVETCPICGGRLAECEHGPNGKN

SEQ ID NO: 11296 - protein, 570 aa, synthetic construct
MKTVAIYSRKSRFTGKGDSIENQIEMCKEHIKKFVSPNVEFLIYEDEGFSGGNTNRPAFQRLINDIKYGNINLLICYRLDRISRNVADFSSVLDVLQEYKVDFISIKEQFDTSSPMGRAMIYIASVFAQLERETIAERIKDNMLEMAKKGKWTGGKLPLGFTSKKIAYIDEEGKKRFKVTLEHDSKDLEFVKFLYEKYLELGSLHKLETYTHENNIRSASGKIFEKSTLKIILQNPIYVKADENVFNYFENKGWSVYGEPDGLHSLLSYNKTETAKKDGKLTKRNKDEAESLVAVSDVKGFIDSSLWLKVQYQFKKNKNTFPRLGKTHNALLVGKLFCGNCGTRMIIQHGRTSTKTGIKTFYYVCSLKKTSKKKLCSAHNVKTDFLENLVLDSLEKLYYKKDFINDSLKINLKENKDNIKEINTTKKLIELNKNKINSLIEKLSLDFDNILSDILIPQIKKIKIENDVLESKLEELKLKKQESEMNRIEIDLITSLLNKCKNIKELTRTEQKQIIDCLVDSIYYYSNDNGNDKIKIKFINDIDSINTLLSDEEKRQFEKLSFYSHSMSSI

SEQ ID NO: 11297 - protein, 493 aa, synthetic construct
MKTCIYLRKSRADIEAEKEGEYETLHRHKTTLLKVAKERKLNIVEIKEELVSGEYVEHRPRMMELLEEVKNKKYDAVLVMDLDRLGRGNMQDQGLILDTFKTSKTKIITPRKIYNLDDEFDEEYSEFEAFMARKELKLINRRLQRGRAKSIEEGKYISPDAPYGYEFKYDDRGKKYLAINEEQAAAVKLVFSMYLENKGATKIANKLNALGYETNNHIEFKAKAVRDILSNITYCGYVKWKTIDRKNHSRLRPDGEQIIAKGHHKPIIDEFTFNKVQEIRKGKYISPSKNKVSNPLAGIVICKKCGHNIIQKISRGKTYLWCRHCDNKSSSLDYVEDAIIDSLQGWLENYKIKIDLKDDTEEIDQIKFELKKLQRELKEAEKQKGKLYDFLERGIYDDKTFLERSNVLGSRIDDLKNQISECNLSIISYKDNLQAKKQIIPSLEKVLYNYSRSNDAKEQNLLLKSVLDKVLYEKAKDASKDEFILEVHPKLPK

SEQ ID NO: 11298 - protein, 516 aa, synthetic construct
MSFTQTYIRKGDDFIKVAIYSRKSVYIEGSMSIETQVNMCKEYMTNKYNGCTFEVFEDEGFSGKNTNRPAFQRLLKKAELKQIDIVVCYKVDRIARNTLDFLQTLDLLTSNNISLISISEGFDPTTQIGKMMLTLLASFAEMERANTQDRVRDNMLSLAKKGKWTGGSAPTGYKIAPSGGLALANEGLILDTYEMKYKKHPNAEIISYVYNKYKHKFQNETLSSFLKKPIYVKSSQDVSSFLKNNGYTVLGNEDNIHGYLTYSDKNTKYAVVSNDIVGIVNSDIWVVVNKDIANKNSRGTNRFNKNYWLTKTLVCPICGKTYAGHTKNWSKTYTRKDGSIYKNSNTYHYYMCRDMLRGKLKECTNNKRVNQEYLENKVETYIYMLKDRAEFDSLYSVNVKSNISEIKKLNKILASKEKNIENLIEKLSLLSTDASALVIKKIEEMTNEISNIKNIINELKLEDLNNVKSKNKDSIFNAICCFDKKMSVDEKRQCAMIIFNRIIYEPISDTFEVHFN

SEQ ID NO: 11299 - protein, 515 aa, synthetic construct
MKRITKLNKPIAATKNIGLLRVAAYARVSTDSNAQEESLKVQKEHYESYIATHSNWQFAGLYYDEGITGTKKDIRPALTRMMGDCRTGKIDRILTKSISRFSRNTTDCLEMIRELQSLGISIYFEKEQIDTGAMENELFLTLLSSFAEDESYSISQNSKWSIKRRFENGKYKLSYPPYGYQWNGEEIIIDPEQAEIVKEIFAMALDGKSTTAIAKELSLRGVPTKRGGQWASSTISEILTNEKYTGDVLFQKTYTDDHFKRHRNDGEKAQYFVAEHHEAIVSKEDFEKAGALLSLRSKKRKPANYQARYAFSGKIICGTCGCTFKRQTRYLFHTTIISWCCQGHIEDKARCNIKAISDESLKAAFVILLNKLIFSGTSILKPYMESLKNDATDASLSSIQRLETEIAACHDQEKTLQGLLTERLIDYAFFQKEAQGILREKNHLQAQIAKLEKNVEGNVSTFEQTKALLRFVLKDQMQEAFDESLFSSFVKQIRILSRDECLFEMKCGLNLKERI

SEQ ID NO: 11300 - protein, 470 aa, synthetic construct
MAKNITVIPAKANRTSLAENLELQKKRVAAYCRVSTDQEEQLSSYEAQVNYYTNYIEKHPDYEFAGIYADEGISGTTTKKREQFNRMIEDCKAGKIDMIITKSISRFARNTLDCLNFVRQLKDLGIGVAFEKENIFTLDSKGEVLLSILSSLAQDESRSISENSTWGIRRRFEQGKLHVNHTKFLGYDKDKNGNLVVNEKQAKIVRRIYTEFLDGKGANRIARDLEFGGVANWNGKAKWYEGSIRKMLTNEKYKGDALLQKTYTVDFLSKKRADNNGQVPQYYVEDSHPAIIDKEMWEAVQLEMERRRNFALQYGIQKLEYATTDNPFAGRVICGSCGQAFGRKVWNSTDDRFRRIIWRCNGKYPAKGEKGCKSRHIDNGVLYQAFVDVFNALVENKDYFLDKWKGLRESDNPLRRYKAKQFSKIIAEAGRNSGFDIDLYFALTEKIEVFGEGRLVVSLLDGTEVECVSE

SEQ ID NO: 11301 - protein, 565 aa, synthetic construct
MVLKKLLNNIEDENVRKRLALYTRVSTIEQSEEGYSIDEQERLLRSWAEKNNYEVYKCYSDRGISGKDIKNRPALKELLKDAEEKKFDMVISWKINRISRKLADVLKIVDILEKNDITFKSYSEPFETDTPAGKMQFQMMALIGEFERGTIAQNVKMGMCAKAKSGEWCGGRVLGYDLVPVENQEGAKRKKNRLTINEKEAEAVRFIFNEYVNGKGYKAITNQLNKLGYKTKKGNDFSVGSIREILTNPVYIGKVRYNVRQNWSEKRRRNINANPIITDGIHEPIIDEGLWDKVQAIMESKKGKPSRIYDGEYPLTGILRCPKCGAGMVISRTTNKLADGTKKRIAYYCCGAWKNKGTSVCNSNTIRVDKANEYVFTKISELLSNEKMVETIVNNINKERHKKINPAKKELERIDKELEKIDRKKTKLFEAYEEDLISKEEFKERKDELNKRAKSLQEEKEPLLVTLSDDVSEEIPYGFIKSILENFSKVLTESATREQQKKLLHMIISEITINETREIDSIKLKINDSLVDYISKEEGVSIKDTPSSFMLRNIGMSVLNLDIAI

SEQ ID NO: 11302 - protein, 525 aa, synthetic construct
MKKVAIYSRKSKFTGKGESIENQILKCKQFIQFKFDIDTKNTEIFIDEGFSGKNENRPRYQDMIKKVKNKEIDHIIIYQLNRLGRNARDIHNTMQMCEDLGCVIYSATEGFDSSTSFGRALIGILASLAQLEREQLAERVKDNMYTLAKMGRWLGGQSPLGFDGTREYYIDESGKERSVTRLKANNEELKIVKLIYEKYLEEKSISQVSKWTLTNNFKGKNGGNIDKSAINVILKNPVYVKSDTDVFKFLENNGYEVYGEANGNGLLRYGKNNKDNSTGIIATGNHKGVIDSSNWLKIQEILQENTEKAPALGKSKACLLTGLLKCSCGSNMQMRYGPKRKDGTRPYYYVCTMKINSGGTRCNSKNLNGQLFEEKLINHFKKYSEERLIKQLESTLNASKNLEKNINIESIDRDIESAEKSVKSLLNNLKQTTDTNIVNIIFSEISELQNTIKDLKYKKDTLLEDQSEIVLSQSEIISMINTFNDFISLYDTLSIDEKQKRLKTLFKEILYDGNKIHVKFNLKKN

SEQ ID NO: 11303 - protein, 525 aa, synthetic construct
MSRTVTAIPATKKVRSAAASSGVPARRRVAAYARVSTEMEEQTSSYEAQIDYYTTYIRSRNDWQFAGMYCDEGISGTSMKRREGFQTMIDDALAGKIDLILTKSVSRFARNTVDSLTTVRKLKEVGVEVYFEKENIYTFDAKGELLITIMSSLAQEESRSISENVTWGHRKRFADGKVMVPYKSLLGYKKGEDGSLVIDETQAPTVRLIYQLFLDGMAISEIKTELAARKILTPRGKEVWSTSTVRSILSNEKYKGDALLQKTFTTDFLTKKMKVNEGEVPQYYVTGNHEPIIAPRIWDQVQYELATRHANISSAKVGLFSTRLKCAQCGSWYGRKTWASNTKYKYTVWQCNHKYAGEHPCSSATMKDEDTKNAFVQALNQLIARQPRQSHLLQIFDSMFDTSRMEEQAAACQTKIVELTEQIEALIAENQQRALDQDAYQNKYTELDTAYRKTLARKTSLEADIAANTAKHAAVTTALGDLAGEPVSEFRPAQWSALIDHAIVDEDTIRFVFRVGEQVSMALKG

SEQ ID NO: 11304 - protein, 416 aa, synthetic construct
MAQVSVVTPVRTLAPKLVNVAAYARVSTNGAEQLASLSAQVSYYSRLIQSTPGWAYAGVFTDEGVTGTSMKSRQGLADLMNAARAGKIDLVLCKSISRLARNTVDLLATVRELKDLGVAVRFERERIDTLSADGELLLTLLASFAQEESRSLSQNVKWAIRNRYKNGGTNSFVVYGYSWADGEFTIIDDEAKIVRLLFANYLEGISPEKTAAILNGQGVRSRGGGRFYGSVFRRMLENERYKGCQMLQKMYRPAIQAPNRALNDGELPRYWVEQALPPIIDKSVFDAVQAEIAYRREIGPAATPSKNTGVFTGRICCGACGKNYQRKTRTYKSGTSYKFWRCWSACTGNGNPCRGHNLRETLLEQACADMLGTQGFDPVQVGEQIVMIEVFPHQLTFHLADGTMTPVGLTSEGRLA

SEQ ID NO: 11305 - protein, 534 aa, synthetic construct
MKAAIYSRKSKFTGKGESIENQIEMCKKYASDNEYDEIFIYEDEGFSGGNINRPEFKQMMKDAKSHKFDVIICYRLDRISRNVSDFSTLIDKLKLLNIGFISIKEQFDTTSPMGTAMMFISSVFAQLERETIAERIKDNMYELAKTGRWLGGTPPFGFISEQSLYSDANGKQKKMFQLAPVESECELIKYMYEKYLALGSLGKLKKHLSSKEIKTRNNATWDIKALQLILRNPVYVKSDEVVLSYLESKGAKVFGEVNGNGILSYNKKDSKDKYKDISEWILSVAKHNGLIDSSLWLLVQKKLDKNKSLAPRLVSNDSSGLLSRVLYCKKCGGKMIQKKGHASVKTKEPFRYYVCLNKINFKSCDSKNIRADILEKHVADKIIEETSDTGSLIKAIDDYKNKLQLDSSKSNNLNSIKKQIALKQSQINNLMENISKNPKLFDLFNSKIEELNSELKSLKFKKFEAESVKENTSNALKEIDASTQMLLNFKKLWLHADFSTKKLLIENIVDSVYYNANDKTADVKLICFKKKGAL

SEQ ID NO: 11306 - protein, 559 aa, synthetic construct
MKNKKAYVYTRVSTSMQIDGYSLDAQEERIKQYAKAYGIEIIETYKDAGKSGTSISGRNEFIAMLNDIEAEKDKVDYVMVFKLSRFGRNAADVLQSLQVMENHNVNLICVDDSLDSSKDSGKLVITILSAVAEMERENILSQTMEGRKQKAREGKWNGGFAPIGYSLDNGELVVNEDEAKAVRMIFDLYANSDMGANGVSKYLVSLGINKPIRQNGKNPYFSASLIRQILDNPVYNGKIAYGRRKTIKDKTTGKIKLEKSDHYIIAQGNHEALIDDELWNTVQEKRKSQAKKYEKINRGKDERVHILSNLIKCPYCGAGLYGNKSRKRNKNKEGEHYKDYYYYGCKHRQMMNGHKCTFNKQIRAELIEKEVETIITQVVSNPTFAKKIEEKINIQIDTKEIDEVINKHLAKIRQLTGTKASLINQIDSLNFEDKHYDRKYTDLNLRLDAIYDQLEYAEMQLNDSRKRKEAILEEKITSDNIYKILVNFNSLYTVLSDIDKKRLLNEMIEEIQIYDEKTEKDTWIKSVVFKLPLIDNEIDFGLDNKDNVETVVLMSRKEK

SEQ ID NO: 11307 - protein, 521 aa, synthetic construct
MKKVITIEPAKQVTHKVELPRFTKRRVAGYARVSTDHEDQTTSYEAQMTYYTDYINSRSDWEFVKMYSDEGISGTNAKKRLGFQEMVEDALDGKIDLILTKSVSRFARNTVDSLSTVRKLKEAGVEIYFEKENIWTFDSKGELLITIMSSLAQEESRSISENVTWGRRRQLAEGQVTFSYSQVLGFKKSDTGGFEIDHEEAKIVRYIFHQVLLGNNPNKIARELTAQGIPTPQGKRQWSYGTVKRMLRNEKYKGDALLQKSFTTDFLTKSTKLNEGELPQYYVENNHEAIIKREVFDLVQVELDKLERKRQTSNIFTGRLFCGDCGSAFGSKVWHSTSKYKRTIYQCNAKYKGEHKCQTPHVTEEEIKGWFLSAINQLLSNRDEIIANTELLIDMAKDTSSLEARLDDLEHHLETIRQDIEDLVDRNARKAQNQDLYQEQYNTLVTAYQEKQKELQETRSVLEEQKSKQLSLDGFIQNFKEQDDLITDFNQELWQTSVERLDIKEDKKIFLTFKNGLRIDL

SEQ ID NO: 11308 - protein, 525 aa, synthetic construct
MNRTVTAIPATKKLGNLTASSGAPARRRVAAYARVSTEMEEQTSSYEAQIDYYTTYIRSRNDWQFAGMYCDEGISGTSMKRREGFQTMIDDALAGKIDLILTKSVSRFARNTVDSLTTVRKLKDAGVEVYFQKENIYTFDAKGELLITIMSSLAQEESRSISENVTWGHRKRFADGKVMVPYKSLLGYKKGADGSLVIDETQAPAVRLIYQLFLDGMAISEIKTELAARKILTPRGKEVWSTSTVRSILSNEKYKGDALLQKTFTTDFLTKKMKVNEGEVPQYYVTGNHEPIIEPRIWDQVQYELATRHGNISSAKVGLFSTRLKCSQCGAWYGRKTWASNTKYKYTVWQCNHKYTDEHPCSSATVKDEQIKDSFVQALNQLIACRPQQSQLPQVLGDMFDTSRLEEQAAACQAKIVELTEQIEALIAENQQRALDQDAYQNKYTELDTAYRKTLARKTSLEADITAKTAKHAAVTTALDDLTGEPVSEFRPSQWSALIDHAIVDEDGIRFVFRTGEQVRIALKG

SEQ ID NO: 11309 - protein, 507 aa, synthetic construct
MSRIAIYSRKSKDTDTGESIKNQIQMCKDYFLRKDANHTFEIFQDEGFSGGNTNRPEFKRMMLLAKNGQFDIIACYKVDRIGRNIVDFMNTFSELEKNNITLVSVTEGFDPSTPAGRMMMTMIAGFAEMERMNIAQRIKDNMESLAKMGRWSGGTCPTGYRSIKISNSGKYAMYLELIPEWKEKLLDIFKYAADGKTCSSIGKLVSMSSKSIANIISNPVYCKSDLPSKKFLESLGYDVYGDCNGNGYIAYNRRPKAKNGKKLFNSKNMFVAVSTHEAPIHSSEWIKANLNIKSRAQEKRPRISQYSWLAHLVKCKCGSGMYLTPGRFRKDGSRYYYFCCSARKYNKSCSAKRINANHLEEDILEILEAVSKNKTLLKSYISPPSNNEIKSKIIKIKNEIKKNNKIMESLASKLALLEDYAASVIIEKMNSISLSIENLNTELLQLQREDLLNNLDELNEDVLFNSIQEMLTNWDFLDMEEKQDCVKNIINEIHLLDNSKFKIKFNL

SEQ ID NO: 11310 - protein, 404 aa, synthetic construct
MLALAREGAIDLILTKSISRFARNTVDLLETVRELKDLEVEVRFDKENISSTSADGELMLTLLASFAQAESEQISQNVKWRIWKGFEEGKANGFHLYGYTDSADGTDVQIIEEEAAVVCWIFDQYMKKISCEKMAAQLIADGRVPHLADNKLPGEWVRHILKNPHYTGDLLLGRWSTPEGKPGRAVRNTGQLPQYLVENAIPAIIDRDTFVAVQTEIARRRELGARANWSIETVALTSKIKCVSCNCSFVRNVRNPKTQNSISTEHWICTERKKGRKTGCGTCEISDTALKGFIARVLGIEAFDEDVFTERIDHIDVQGKDRYTFHDTDGTSSSHTWRPNLKKSSWTPVRKAAWGELVRARWAEAKRLGLDNPRQAPTPPEALAKYRAVAKAEAERLRAERGER

SEQ ID NO: 11311 - protein, 528 aa, synthetic construct [sequence omitted]

SEQ ID NO: 11312 - protein, 545 aa, synthetic construct
MKIAIYSRKSKYTGKGDSIGNQIQMCKDYIETNYRNKDHEYIIYEDEGFSGGNINRPKFQKLLNDIKKEKFDILICYRLDRISRNVSDFSTTLDEIQSYGVDFISVKEQFDTTTPMGRAMIYIASVFAQLERETIAERVRDNMVELAKSGKWSGGRTPLGFNSEGSSYIDEEGNERRLVKLVKNDEELKLVNLIYDTYLKEGSLHKTEAYFASHNIKSNRNILLEKTSLKVILNNPVYAISSLSLKEWLENDGWNVYGEPDGKHSYLSYNKTKHVTRNGKSMKIPNDKENWIAAISNCPGVIEADKWIQVQEQFTGNRGSFPKKARTHDAKLVGKIYCSHCNNYMQVVHGNIKKDTGKRQHYYSCSLKKKSKSELCQNKNVKTDDIENLLLQELERLGKNKKNYIQSLKKKNETVKKKKDVKQKQIEIQKKIDAKQKILNNLVDKLAVADDIDDIIIQRIKTTKNEMQELQQELEKFSQEIEDSNYKKLDLDFIESLLEKCADITKLNSNEQRLLIGVLIDKILWDGNTQNVTIYFIGSGDEKKK

SEQ ID NO: 11313 - protein, 499 aa, synthetic construct
MKVAIYSRKSILTDVGNSIGNQINMIKNYFKNEQCTFEIFEDEGFSGGNTNRPSFNLMMKKVKDNCFDVVAVYRIDRISRNIVDFVNIYEDLQNHNVNLISITENFDPSTPYGKLVMIILATFAEMEREGISQRVKDNKIENAKLGKWGGGAAPFGYEINRTIENGKSVSYLVAKSDIDFVKDIFNSYLKFKSLHKVQMWLYETYDIKWSLSTVRYILSNPIYCCSNSKVIDYLSSKNITVYGTPNGKGFISYGSRPRKKGMKEWNSKDMFIAVSKHYAPIDSDLWIKTQVLLEEKAIAPRPKSSKVSFLTGLLRCGVCGSPLTVNYNHTNKDGTKNYYYVCTGKRKYGVSYCNNKNINNWILDDYVLKKLLDRKIEKIEVKSDNSNQIATIEKKINKNSTKIEKLVNNLMEVGNEAALVINKKLKELSIENENLKSSLWKLNNENINNSLSKEEYDEVLTVIENADHEAKRELLGMIIDKIEWNGHLPHGEDIKIFPK

SEQ ID NO: 11314 - protein, 590 aa, synthetic construct
MKVIQKIEPTKPKIAKRKRVAAYARVSVDKGRTMHSLSAQVSYYSKLIQKNPDWEYVGVYSDGGISGRTTESRNEFKRLIKDCKDGKVDIILTKSISRFARNTVDLLETVRDLRAINVEVRFEKENIHSLSGDGELMLSILASFAQEESRSISNNIKWSIQKRFKEGKHNGRFNIYGYRWVGQELIVEPSEAENIKLMYANYMNGLSAEFTAKQLTKMGVTAMKGGPFKATSVRQILKNITYTGNLLLQKEYTPDPITGKSRYNNGEMPQYFVENHHEAIIPMEEWQAVQDERLKRRKLGARANKSINTTCFTSKIKCGNCGKNFRRSGKRQGKNKELYHIWTCRNKSEKGVKVCNARNIPEPALKKYATEVLGLEVFDEQIFIDSIEEIVASEGNMLQFKFYGGREVEVKWTSTARKDYWTPEVRRAWSERNKRKESRTWNGRTTEFTGFVVCGRCGANYRRQAVTSKTDGTVRRKWHCSNSAVACNEGKSRNCIYEEDLKVMVAEILGIPTFNEPTMDEKLSRISIIDTEVTFHFKDGHDEVRTFEIPKKKARTFSEEERARRRLVMKKRWEEKKRDEESNNDTSDNH

SEQ ID NO: 11315 - protein, 524 aa, synthetic construct
MTKKVTTIPATITKFSQTPINRVTKRRVAAYARVSTEQEEQQTSYEAQIDYYTNYISGREDWEFAGMYSDEGISATNTKKRVGFQTMVTDALDGKIDLIVTKSVSRFARNTVDSLTTVRQLKEKGVEIYFEKENIWTLDSKGELLITIMSSLAQEESRSISENVVWGQRKRFADGKVTVPFKRFLGYDMGEDRNLVVNPEQAKLVKRIYGMFLQGKAPHTIAKILTEEPETLTPAGKQKWNPSTIKSILTNEKYKGDALLQKSYTVDFLTKEKKANEGEIPQYYVKGNHEAIIQPEIFDMVQKQMALRTKGNNRRRSTSIFSSKLICGDCGNFYGSKVWHSNTKYRRTVWRCNHKYGNDEKCQTPHLTEDEIKEIFIKATNQLVDMKDEVISNYDEMKEMLFGTVDLESEQGKLEDELNEVASLIEDCINENARVALDQSEYEKRYNSFVERFDKANGRLEEVKVQITERQARGQQIEIFLKDLEEVGVLEEFEDDLFLALVENIEVGRYKVVVRFKDGTEVEG

SEQ ID NO: 11316 - protein, 523 aa, synthetic construct
MAIARKVTVIPAVEVFIPTNIESNSRLKRVAAYARVSTENEEQLSSYEAQVDHYTRYIKANAEWKFVEVYADEGISATSTKKRDGFNRMITDALEGKIDLIITKSVSRFARNTVDTLTTVRKLKDKSVEVYFEKENIYTLDSKGELLITIMSSLAQEESRSISENVTWGQRKRFADGKVSLPYKQFLGYEKGEDGLPKIIESEAKTVRLIYKLFLEGKATSWIAKYLTEYKISSPAGKDKWQETTVRSILKNEKYKGDAILQKSFTVDFLTKKKKVNEGEVPQYYVENSHPAIISSEVFDLVQAEFERRRSDRGLRRSNSCFSGKIICGECGGFYGNKTWHSNSKYRKVIWRCNHKYDNNEKCKTPHIYEDKLKELFVKAFNEMIENKGEILRDYKEIIEVLGDTSKLEKEKLQLENEAEVLIELLKKHVERNAHAALNQEEYESKYNELGNKYEQVKERIEEIEKKIFSQKIKLNNMKDFIERLEEQEGLITEFDEELWLGTIGKVIINKEKKISFEFKDKM

SEQ ID NO: 11317 - protein, 406 aa, synthetic construct
MERTIKVIQPGTIKIPTKKRVAAYARVSSGKDAMLHSLSAQVSYYSNMIQRKNEWSYVGIYADEAITGTKDRRLEFNRLIQDCTDGKIDMIITKSISRFARNTLTMLEVVRKLKSINVDVYFEKENIHSISGDGELMLTILASFAQEESRSVSENCKWRIRKGFEQGELINLRFLYGYRINKGKIEIYEKEAEIVRMIFDDYLNGEGCTRIANKLRKMNVDKLRGGMWNSERVVDIIKNEKYTGNALLQKKYVKDHLSKKLVRNKGILTQYYAEGTHPAIIDIKTFETAQKIMEANRTKFIGKCGSKGYLFTSKIECGICGKNYRHKDREGKSTWVCANHIKYGNRRCIAKPLNEEKLKKLINEALEVKAFNEEIFIRNIERIKVTGNKTIEFILKDGKVIEKGMI

SEQ ID NO: 11318 - protein, 504 aa, synthetic construct
MKIAIYSRKSKETDTGESIQNQINICKDYFNRQYNNCVFEIFYDEGFSGGNINRPDFQRFMQSIKLKKFDILGVYKIDRVSRNTLEFLTVFEELKQYNIKLVSVTEGFDPSTPGGKMMMDVLASMAEMERANIAQRVKDNMLGLAKMGRWSGGTPPTGYKPKAYINEFGKKEMYLELDEVESDIIYKIFNLSAAGCTTYAIGKEVNKNPKTILNILRNPVYCESNETSKKFLENMGYTIMGELNGNGYMTYNKRPRSNGKKIVSDYMLAVVSKHKAIVTAEMFIKANKNLTDRAPTKRPRKSQGTFLSHLVKCGKCGGGMFVASGNKLKDGSKKLYFRCTNQKYNKTCDAKWIRVDEIERFVLSELYKFSLDKNKLNEYINSNINLDCYDNDIKKLKSQVNKLNIDINNLTEKLLLLDGAAVKIVNDKINQISNERELKKEMLFELESKKIELTVNSINVDELYNNIKKLLVIFDLIPIDEQQILINQLITSIEISDNDKTLIF

SEQ ID NO: 11319 - protein, 449 aa, synthetic construct
MLKRAALYIRVSTDQQAKHGDSLDAQIATLKDYVSTQDNLTIIDTYIDDGISGQKLYRDEFQRLLEDIKKNRIDIILFTKLDRWFRNLRHYLNIQEILDNSGVTWLAVSQPFFNTDTAYGRSFVNQSMSFAELEAQMASERIKAVFENKIRKGEVVTGSVPFGYKICDKKLIPNENAPIAKDIFKHYSIHNSIRLTVEYLFNEYDITRSSRTIKHMLRNRKYIGEVSGNKNYCPPIVDKETFEKVQNLLDKNISSIAKRTYIFSGLVVCSCCGKKMTGRYRKRKYIKKDGTVMYYTKKVYRCNGNTYKRNKCPNKINIPEEILEEYLLNNIKADAENFEAKQKKIAVSAPEKNNNSKVLKKIERLKKAYLNEVISLDEYKKDRKELEQMIVQVKPKETIVFKSNWFKKNIESTYRDFDEEEKRFVWRSVLKNLIVDPHGKITINFLTKN

SEQ ID NO: 11320 - protein, 464 aa, synthetic construct
MKRAALYIRVSTMEQAKEGYSIPAQTDKLKAFAKAKDMAVTKIYTDPGFSGAKMERPALQEMISDIQNKKIDVVLVYKLDRLSRSQKNTLYLIEDVFLKNNVDFISMQESFDTSTPFGRATIGMLSVFAQLERDTITERMHMGRTERAKQGYYHGSGIVPLGYDYVDGELIINDYEAQIIQEIYDLYVNQGKGQQYITKRMVAKYPDKVKTLTIVKYALTNPLYIGKISWDGKVYDGHHTPIIDKSMYDKAQEIIARKAQKGGEQHGNQLGLLLGITYCGKCGAKVFRYVSGGKKYRYNYYMCRSVKKMLPSLVKDWNCKQPSLRQEVVEKKVIDSLKSLDFKKIERELKQVENKTKSKITTINNQISKKHNEKQKILDLYQYGTFDVTMLNERMKKIDNEINALTANIANLEGTKSESLINKLETLKTFNWETETTENKILIIKEFVERIELFDDEVIIKYKF

SEQ ID NO: 11321 - protein, 565 aa, synthetic construct
MGFKKLVNDIKVEKRRKLIAIYCRVSTEEQSENGYSIDEQERLLEEWCKKMGYVIYKCYSDRGISGKNIKDRPALKELLSDAKAGKFDMVISWKINRVSRKLEDVLKIVNLLEKNNITFKSYSEPFETDTPAGRMQFQMMALIGEFERGTIAQNVKMGMIAKAKSGNWCGGRVLGYDLVPNNSPEEEKKGKNKLKINEKEAEIVRFIFNEYSKGKGYKAITNQINKLGYKTKKGNDFSVGSIRDILTNPVYIGEIRYNVRQNWSEKRRRNINPNPIRVKGKHEAIIDRELWDKVQLILESKKGKPSRIYDGEYPLTGILRCPKCGAGMVISRTTNTLADGSKKRIAYYCCGNWKNKGTSVCNSNTIRVDKANEYVFKKIEELVSNEAMIKAVVKNINKERKDKVKPAKRLLGDIDKELEKLDKRKRKIFEAYEDDILTKEEFQTRKNELNEKIRILEEEKKPLLNTISEEVSEEIPYEFIKDILMNFSKILNSSVSREQQKKLLHMIISEITMNESREIESIKLNINDKLVEYLVKEGGVPIKGIPSSFMLINVGLKVLNLDVVI

SEQ ID NO: 11322 - protein, 484 aa, synthetic construct
MQKEKVIPIDSLDLVDLYIRVSTTEQALEGYSVAEQEHRLRQYCAAMGHRIHKVHIDAGFSGASLDRPGIKETIKDVQKHLVRRVIVWKLDRLSRSQKDTLIMLEDVFLENGCDFISMMESFDTSTSFGRAIVGILAAFAQLERENIKERTMMGRQARLAKGHYNGSRPPLGYSFIPGSNDLQVDPYQAAIVREIFKLFLSGISINAIARKMEEKYPTVRTWNNTMIRRTLKNPVYIGKVNDNGILRDGIHEPLISEIDFQMANAILVHNSKIKKQSCRSRSLLTGLLYCGDCGARMHPRRIARGYPLRRYVCYSVSRTSKSMIKSDHCTNRLHPYTQEELEQIIIDEIKKLAADEDYISEVIRNSSAEVPADDTELFQERIEELNRQTDKLLNLYQIGAIELDQIQERLAALKQERESLTAALKESQTKTDINMDHLKIMSYASAFQVALESGDPEYTNSIIRLLIDKIIVLNEDIEIHWTFC

SEQ ID NO: 11323 - protein, 489 aa, synthetic construct
MKGVIYARYSEGPGQTDKSIDGQVADCKAFAERNGISVVGLYADRHISGKSTAGRVEFLKMIEDAKKGRFDCVIVWKVDRFGRDRRDIAVYKHELKKAGVKLLYAEETVPEGPEGIILESVLEGLAEYYSADLKQKVSRGIRETAKKGEWTFCLPIGYTRDENRHIIIDEPKAEVVRAAFKLHIAGATTKELQKLFSDHGITGQRGAKVISAGSIYRMLRNDAYLGHFEVQGVKVPAEPIIDPVTFEEAAKHFKTSRNNAAAKSKVNYMLSCKCFCGYCGKMLVADAGTGKSGKVYNYYKCKHTKGCELKPVAKDRLEKAVLDATITHILNDEMIDRLTVKVLEVQEADEALDPAENYRRQLDGIKKKIKNTVTAIEDGAGRAMIARLTELEGQEEELELEIAALELKKPRLTEKTIKAWLNSFRIGDVEDPSFQSRLLDTFVARVEVKNDEARVFFNVSGEGSDTITKVENTRVELVTSCLQGRRSPN

SEQ ID NO: 11324 - protein, 537 aa, synthetic construct
MQIKVIHPSVERELERKKVCAYVRVSTDSDEQEDSYENQIRYYKDKIESNPDWKFVGIYSDLGISGYKEKRPGFMNMIKDARNGRIDLILVKSVSRFARNTETVLKYSRELKRLGVGIYFELQKINTLSGEGELLLTILAAFAQAESESNSGNVSMSIRRKFEKGELNFPISKIYGYTEDADGNPIIDEEKAKIVRLIFDLAEKGIWVTKIAEYLNKKQIPGIAAEKWNFGQIGKMLRQEAYMGDRILQKTYRDSRRRTRKNKGQADQWYVKDTHPAIVTREQWYQVQDILLERNKELYDATPISEEKNLSTHSTYPLSGKLYCPYCGRVLMHRWEGKKRYENWVCGLHRKVSKDACPGICIPNRIASSWGELKEPMTVLKYTDEYGMERFTAIPKVEYEASEDCPYEVVKPEPKPERPKKPSYKKTPKPDKPRYTRTVYPLSGKLFCPNCGKVLTHKWNKGVEYWVCSTNRNKHRTENFEKCKGMYFPAEAAKDWGEINEPLTVIAYKNEYGHRLYTAMPKEEYERSSDCPYRKED

SEQ ID NO: 11325 - protein, 524 aa, synthetic construct
MGKRVTTIPATLNLYDSVSLKNPQKRKVAGYARVSKDIEEQATSYAAQVDYYTAYIKKNPEWEFAGIYTDEGITATTTKKRNGFKQMIADALAGKIDLIITKSVSRFARNTVDSLTTVRELKENGIEIYFEKENIWTFDSKGELLITIMSSLAQEESRSISENVKWGKRRAFANGKGSLSFNTFLGYDRGPNGEFVINEEQAATVRYIYEKFLEGFSAYRIAKDLTEMGIKTPGGKEKWANSSVLKILKNEKYKGNLLFQKTYIKDFLSHKSVRNNGEIPQYYIEDHHEGIITAEQFDQVQLELYRRKKIKKYSGISIFSSILKCGNCGGWYGSKVWNSNTKYKKTIYQCNKKYKNRCKTPNLSEYEIKQLFVQVVNQLISEKEEIIKNTEEMKKTICDMNSLTMELKDKTAEINTVVEQINNIVIQNSKVSLNQDEYNKEYFRLKRKYDTIASEIDRLSKQIKEKDLQGKLFDNFISTFKKQNETISEFDEFLWSGLVYEIVVYTKQDVRFFLKNGLEIDTGL

SEQ ID NO: 11326 - protein, 578 aa, synthetic construct
MNTLSALNITPSPPRMCRVAIYIRVSTLQQVDKDSLPMQRKDLIAYSKLILNTDDYVIFEDAGYSGKNTIRPRYQDMMDQIRTGAFTHLLVWKIDRISRNLLDFAQMYQELKELNVTFVSKNEQFNTSTAMGEAMLKIILVFAELERNMTSERVTATMISRANTGKWNGGRVPYGYKYDQEEEDFLIIASESNVVKLIHDKYEELQSLVYLARYMNEHGYRTRSGNEWSPPSLAIILKSWWYCGCYEYNKRKAGNRQKLKDESEWIMIEDHHIAIISYDQKERVLAILKGNKRFATEHNLYVKGIHVHVFGGLCWCRNCGKKMTSTSSNKNRSWQYSKYLCSTRRRSLTKCRGRSTSDPVLGEFIFNYILNMLNAQKGFDSIHSPADLQAALLTGDAFSDIKSIDREELNDLYNTLSSNVSGNIYGRSFNVNKEKKNDEVQSSLTILKSEKKKLDRALDRLTNLYLYDDMAISEKDYMIKKTEIETRIAEIDEKIGIVNKNSVDDSITDEEFVDKASTFIITQKLTDRNYISYKRLATSIDPKILYMFTHDVIDYIDIYNGKVQRIVFRNGLSQTFIR

SEQ ID NO: 11327 - protein, 518 aa, synthetic construct
MSIMSFSNIIIYLRKSRADDPTMTVEEVLAKHESILQDYCVNEFGQPIPESRIYREVVSGETIQDRPVMQRVLRLLESGNIDGVLVVEPQRLSRGDLEDCGHIINSFRYTNTAVITPTKTYNLQDEYDRKFFEMELTRGNDYLEYTKKILARGRLAAVMSGQYIGSVRPYGYNKVVYGSGKNKIRTLEKFKKENDILVLMKRLYLDNDYTPEEIARTFDSMGIESPRGKHWTASAVRRLLASPINNGKIVWNKRQTVVEWKNGKQVKSRAKSNKDDVIIVQGKHPATYDDETYTAIMAKLSIHSVKVTNQRGLRNPFAGILFCQCGRAMSLRSTHNGHSVILICNDHFYCHTRSVAFNPVLDKVKEALSEAITDFSVKISNKEHTESELYALNISTLENKLEQLYKKDLVQKDAYEDGVYSKAEYIQRNTQLQEQISAIANSLKEMRAKAPEVINYKDCIIRFQDCLNALEDNNVSIEVKNALLKACISKIVYHSVNSNSEYSGRTKNPFNLEVFFKL

SEQ ID NO: 11328 - protein, 519 aa, synthetic construct
MDDKPIYRAAFYGRYSPGPDQTEASITGQRRECYAKAKSQNAVIIKEYVDRHLTGKNDKRPAFLELIKDVKKGLYDIVYVYTIDRFSRNKFDIARYKNELKKAGARLISAKEYIPAGPEGIILESVLEGMAEYYSEELSRKVGRGMYDAALQYHHTGGVTPFGLQVVDKKYVPHPVNAPIVREIFERYAAGEAAIDICNDLNNRGVVTSLGGKFKRTSLTKLLTNPKYIGTYTFNHTYLDEVTQQKQVEVLEYKNVIEPIITEELFLKAGKRMELNKRASKPRKNKENVEFLLSGKLLCGLCDSLMTGDSGTSKSGQIYYYYTCSNKKNRKSAKPCRAKSYPKEKLEHFITKVTKEDVLTEKVIEFLTKNAAILQEDRKDNVFILTLQQNKKDIESKIENILKAIESGIFTESTKERLETLEQSKRELDFRIRAEKFKNDAPDLTKEAIIYYLEDLKNGNMLDPNFQRQIIDTFVNCIIINEETDKILIGYNYFGENDTHELSIKNTLDMFESDYNGGG

SEQ ID NO: 11329 - protein, 558 aa, synthetic construct
MLQQSNNTITSIYPIGNQTEELTALYCRLSQDDKQEGDSNSIINQKKILKRYAIEHGYQPYVFFVDDGFSGTNFNRPDFQRMIAEVEAGRIKRVIVKDMSRLGRDYLQVGMYTEIMFPNMDVHFIAVNDGVDSHVGENEFTPFRNIINEWYAKDTSKKIRAVKRSKGMAGEHIGSHAPYGYMKNPDNKKEWLIDEEAAEVVREIFRLCVNGYGPTRIANILTERKILCPTYYALEHGEKPRTVLPPDKYLWSATVVSHILERMDYLGHTVNFKTHVKSYKNRKKIDNSPEQWRIFENTHEAIIDKETFEIVQKIRSGKRRPTKMGDMPMFSGLLYCADCGSKMTFHRQMAQSAEKHNFVCSNYRHNSKSCTMHYIRNVVVEQIVLENLKEVIRYVSDYEDEFVQMVMDTDMRQRNKELSQKKKRLTEIHSRIQELDKIFQRIYEDNISGKLSDERFMKLSKGYEEEQHTLQEEQTSLEKELQKEEKQSVDVKQFLSVVRKYTNLTELTPEIVHEFIDKIIVHAPDKSSGKRLQEIEIIYNHIGVFDHSKVTLWKGKAV

SEQ ID NO: 11330 - protein, 578 aa, synthetic construct
MRKVSKIEPISPSLPTRKKVSAYARVSMESERLNHSLSAQVSYYSKLIQRNPEWEYAGVYADNAVTGTKSSSREEFQRMLEDCESGKIDIILTKSISRFARNTVDLLETVRHLKELGIEVRFEKEHINSLSGDGEVMLTLLASFAQEEVRSLSENVKWGTRKRFEQGIPNGRFLIYGYRWEGDHLVVEPEEAKIVRLIYDNFLKGLSAEATEKQLEEMGVKSMKGMHFPNSSIRAILKNITYTGNLLFQKEYTLDPISKKTRKNHGELPQYFVENTHEAIIPMKTYQAVQAEIARRRELGALANWGINTSCFTSKIKCGLCGASFVRNTRKNRAKTSQLGERYTFYGCGTNKRKGEHCSSGTIREDVLKEECAKVLGLPEFDEETFSERVEKITIPATGTMLFEFTDGTSIEHHWSRNAKKESWTAERRKAVSEYRRDRDTGWKCYHTFTHFIKCGRCGANYRCQTHKRVDGTVVRSWYCSSPTAVGCSKVGIREDTLKALIADVMGLPEFDEELFNQQLAYATVPADNQIVFHFRDGHEASRTFVQKRQMPRQTEERKKHMSEVMKAKWRERHAEND

SEQ ID NO: 11331 - protein, 501 aa, synthetic construct
MAKRVTTIPATLNRFDSRPLQSVSKRRVAGYARVSTDSEEQATSYEAQVDYYTRYIKSNPDWEFVGIYTDDGITATNTSHRYGFKQMVEDALAGKIDLIVTKSISRFARNTVDSLVTVRELKEKGIEIYFEKENIWTLDAKGELLITIMSSLAQEESRSISENTTWGKRKSFADGKASVSFSRFLGYDRGPNGEFVINEAQAVTVRYIYKRFLEGLSTYQIAKELTQMGVKTAAGKDKWYTSSVLSILKNEKYKGDALLQKSFTKDFLTHKRVDNNGEVPQYYVEGHHEGIVTADQFEQVQAELYRRKNTDRYSGVGCFSSIIKCGECGSWYGAKVWHSNDKYRRVIYRCNKKYGKGCKCKTPHITEDEIKEMFIKAANELFSEKDEIIENTKTMMDMVCNTGYLDKELGDKVAELNIIAEQMQTAIAENSRRALDQNEYERGYAGLTERYNTIKAVYDKISEQIESKKVQRELFKGFIHALEKQGALVEEFDEGLWSSLV

SEQ ID NO: 11332 - protein, 503 aa, synthetic construct
MANIRRIEPVLPRLKARKRVAAYARVSMETEQLHHSLSAQVSHYSALIQSNPEWAYAGVYADEGITGTATKNRDEFKRLMADCDAGKIDIVLVKSVSRFARDTVDTLKATRHLKELGIDVYFERENIHSISKEGEILLTLLAAFAQAESRSISENIKWSIRKKFKLGIPNGIKAPYGYEWNGDSFSIIPEQGEVAREIYDRYLVGEPAYSIAKRLAEKGVKGKSGVPMDDSTIKNILSSLSYTGTMLLQKNFFTEGHKRRKNKGELPMYAVEEMFEPLVSKTDFEKAQQIMKDRAEAMPNRNPKLTAFSGIVKCANCGCSISRRTSKYGKKWICNTKERKGKAVCDFRDIYESELEDAATKALNLDGFNGDVVKSQIALITIDNAYITFQMKNGTSRQVIRKYKKGYSGFSTRLFCGGCGGMLEADTWNMGPVGKKTKYKVWVCRNCSAPREFDSTFRKATQKLFHEEQCDGLFAQNIEKAINYDKKIEFYYKKGEVVTWQKE

SEQ ID NO: 11333 - protein, 602 aa, synthetic construct
MKKKFSSVPDPDIQDAVIYARYSSHSQRDCSIEQQVADCELFAQQNGLRVVKIYADRHLSGTTDNRPQFQQMLKDASHGHWPFVICWKIDRFARNRYDSATYKYKLKKAGVRVLYAKESIPDGPEGILLESVLEGSAEYYSASLAQNIRRGMRFNAENCKVNSGSIPFGYCKGPDGRFAIHETNAEIVRDIFRKAAAGVPFVDIATELNNKGLKTSRGGRWNKNSFVLLKNESYIGVYHFSDIRIEGGMPAIIDLGTFLAANERMNANRRVRGRHHDGGDYLLTGKLKCAHCGSYMVGFSGTAKNGESHYYYGCQKRRRERACKKANVPREWIEKVVVKAALDYVLRPDVMEWITDSVMEYQEREAASSQLAALTAELEENQKATDNVMKAIEAGIITATTKQRLLDLETKAKDLKRAIELEKLSHVRLEREQILYWLEQFQGGSLQSQEFRRKVIDTFVSVVYLSDDHLRIAFNYSGQNRSEADFNLIMDAETASADYPINSLSLPLCPPHKKNPNLFPLGKRFGFFICCISYSVIFISSLSSAAFFSMPPAYPVRLPFVPTTRWQGMMIEITLCPTAPPTACADIRERPRSAASCFASAP

SEQ ID NO: 11334 - protein, 523 aa, synthetic construct
MAKTVTTIPATLSRFTSAPINSKKKRRVAAYARVSTDNEEQLTSYEAQVDYYTNYIQGRDDWEFVSVYTDEGITGTNTKKREGFKSMVADALSGKIDLIITKSVSRFARNTVDSLTTIRSLKEHNVECYFEKENIWTFDGKGELLLTIMSSLAQEESRSISENCTWGQRKRFSDGKVTVPFKRFLGYDMGPDHNLVVNPEQAKLVKRIYGMFLQGQSPFQIARILTKEGIPSPGGKDHWNPSNIKSILTNEKYKGDALLQKSFTVDFLTKKKKANEGEIPQYYVKDNHEAIIDPETFEIVQTLMATRKKGRNRKSSVSIFSSKIKCGDCGSWYGPKVWHSNDAYRKVIWQCNHKFEGQKCTTPTLTEEEIKELFLRAANQVIDQKEQFIAIYEQVLSKSLDTTAFEGELTELEAEINIAAELIEECIKENSHVALDQADYQKRYDGLVARFDKAKARHTEVTELIAERTARRHQIETYLQELRSREPLTEFRDSDWLAMVDYITVHSKKDIGVTFKDGTEIKA

SEQ ID NO: 11335 - protein, 590 aa, synthetic construct
MKTVEKIERKLPVLKKRKRVAAYARVSIESERMQHSLSAQVSYYSALIQKNSEWEYAGVFADYGISGTDTKKREEFNRMLAECEAGNIDIILTKSIQRFARNTVDLLNTVRHLKDLGIEVRFEKENINSLSGDGELMLSILASFAQEESRSISENVKWGMIKRFKQGIPNGKFSIFGYEWQDDKLVIIPEEAEIVRWMYAEYMKGASRIEIGRALMQRGIYTRQGKPWVDSNVKVILTNITYTGNMLFQKEYCEDPITKHRRKNYGELPQYFVEDTHEAIIPMDEWQAVQAEFKRRRDLGPFGNKSLNLSAFSTKITCGCCGKHYRHSGKRNTAGEVYYIWTCQTKSQKGASACPSKNIPEKMLQNTAAKVLGLDEFDEDAFSKQIEEIIVIGDDTLTFRFYDGHEVTTKWQSTAKTDWWTDERRKLWGERHKRKDTNPNKHLFYEFTGFIKCGCCGANYRCQSGKRKDGTPTRSWYCIGPKDQCHNPGIRDETMKRLVIDVLGLDEFDEAAMDAQIESAAILDHTVTFHFRDGHTESRDFLDKRHGTPWTEERREKARESMKAAWTDKRRKAMSERIKKIRSEKKWPKP

SEQ ID NO: 11336 - protein, 498 aa, synthetic construct
MKKAVIYARYSSDMQREESIDAQVRACTYYAHQYQFEILRTYADRAQTGKRTKNREQFLQMIADAESHEFEVILVHKLNRFGRNTLEVLEYKDSLEDMGIELISVTERLESTPEGKLMLIIIAGMNEFYSDNLSQEVMKGLKENAYQCKFTGGTPPLGYKVDPESRKLVIDENEAMIVRLIFQRYASGYGYNSIINELTHLGYHTKSGKLFGKNSLYELLRNEKYIGVYTYNRAAKRKKDGTRNYHSYKDSSDIIRIPGGCPALVDQKTWHCVQKIMEQNKKVHLQQHGHRVYILSGKVFCGLCGGKMYGNCKTTRGKIHYYYVCSNGWRKHTCSSRHIPAEELEEEVIETLEKKIFTSEFSKEVSEQLQNNIQKNQEITQKQRGSISAQLQNVNSKIKNLLNLLARGIDFDELEETLSSLKQEKENLIRSLEVLDQQPKALLHQDFTQNLSKLRDLRPREQSTFLQQYIDKITVFAPKGSNEKVEVEIYIQSNIIQK

SEQ ID NO: 11337 - protein, 580 aa, synthetic construct
MARRKTALRGISASVRETKVAIYIRVSTIHQVDKDSIPMQKKDLIAYCQLILGTDNYEIFEDAGYSGKNTDRPAFQDMMKKIRKGEFTHMLVWKIDRISRNLLDFAEMYEELQALRITFVSKNEQFDTSTAIGEAMLKIVLVFAELERNMTSERVTATMISRANNGQWNGGRIPFGYSYDPDTSQFSIREDEAVVCRRLKDLYLDNKSLVYTARTLNADGYKTRAGVDWTPTAVWIIASSPFYAGIYRYNRYKGTENRTLNPEEEWVMIPNHHPAIFTLDEHEAMKSSLKSNARYVDNPVGKPHATANIHIFQGIAYCDKCGSKMVSTPGKKRADGYRPSNYSCPLHRRSKKCDNSTVNDMIIGEFTINYILNMLNAKKIFSGIDTPEELQRHLLTGSTFSDISSIEEDGLHEFFNLLSRYGSDNSYVFAVQKPRKKKASVNPEIAALRKEKEKQERALQRLQDLYLYSDKSMSEKDFIIRKSEISDHLKSINAQLGLITQDPDALLSDEEFIKQASHLLIQKELKDKKYIYYKNLATSVDPEILRTYMKTILDSVYLTDSHVSAIVFKNGLTQKFIYKK

SEQ ID NO: 11338 - protein, 529 aa, synthetic construct
MKFTSTWRISDPLAQYIVYLRKSRKDMEAEALGQTDTLKRHRAALLSLSESRGLNVVEICEEVVTGDSIAVRPEVQKVLQLVETGSYAGVLVMEVERLARGDTIDQGIIAQTFKYSNTKIVTPNKVYDPNNEMDEEYFEFGLFMSRREYNTIKRRLSRGKEASLREGKWISGKTPFGWLREKLPNDKGYKLIPHPEQAPILRQIYDWYTGEGCARIGSSAIATRLNNLGVKTNSGNAWTASAVLDTLRNPANAGWIKSGGRPETKRIVDGSVVVSRPRTRQEDLNLYKGLHDGLISQEQYDKAVALSYSSSSPRGKGAWQTTTSLAGLVRCDQCGRVMVRRPSSGGRRDAFMCPSPDCPTVSAWYEDVEDAVLDALRGWLHELEVGEAERSDEHSLLDALSASISADQKQLAKLEAQEARAYEFVETGVYTPEIFLQRSQALAADKQVIISRIEDNQLAQDEITRAKQARTRLAPAVRHVLETYPLAATPQDKNDLLKTVLQKVLYHKQSKSYSKAGSDMRVTLYPLTD

SEQ ID NO: 11339 - protein, 529 aa, synthetic construct
MYENLSFPYGSGTYAIYLRKSRKDLDAEALGEGETLARHLSILKALAQRMELNVVRVYAEVVSGESIDARPQMQELLRDVESGIYDGILVVEVERLARGDTSDQGRVAKTFKFSDTLIITPSKTYDPNNEYDEEYFEFGLFMSRREYKTIRRRLTAGHAASCREGKYTGNVPPYGYARKKLPKEKGWTLEIIPEQARAVRLIFDWYQNGLSGLPVGYTMIAEELNHLSIKSPAGGLWNRNSVQNVLRNPVYAGYIKAGYRKEVKKLVDGKMNRSRPLNTDYTLYPGRHEAIISQETWDAVHNRMLKRTAPSARKTRPQQNPLSGMIYCSQCHRIMQRRPYQNGRTAMLICTTAHCSTVSSDLPMVEQRILDALDSWLLSGTLPDPDQLPDHSGRIELLQHAATGCQEELHEADQQLQKQYDLLEKGIYDEETFFERSAIMKKKKSELTSRLKDLQAELQHEISQDASARNLLPTLQTIHDTYHTITDPAVQNSLLKEVIDHIEYTKSESGRWGRPDNFSLKIYPRVPPA

SEQ ID NO: 11340 - protein, 596 aa, synthetic construct
MAKIRKIEPVMPTLPIRKKVAAYARVSMETERLHHSLSAQVSYYSDLIQSNPEWEYAGVYADDGITGTKANSREEFQRMLEDCEAGKIDIILTKSISRFARNTVDLLETVRHLKELGVSVRFEKENIDSLSGDGEVMLTLLASFAQEEITSLSNNVKWGIRKRFEKGIPNFRNKILGYEWEDDHLVVVPEEAAIVKRIFQNFLDGKSRLETERELNGEGITTKAGCKWCDSNIKVVLSNITYTGNLLLQKEYIEDPITKKRRKNKGELPQYFVENTHEAIIDMETFQFVQDEMARRRKLGALANKSLNTCCFTGKIKCPYCGFSYMHHIRKRENGTENYWKCGTTKKKDGRCPVKGGIRDDKLRIACADALGLDEFDETAFLAQVDHIEVPKRYQIEIHLKDGRVIPKDCTPTGHQDCWTQEYRDKVSEQRRKNGTNPKGASCFTAKIKCAECGNNYRRQTRKRSTGEKYYLFACATTKDCSNNCIHEDVLKELAAEALGLSAFDDDAFTDRVDHVDIAPGGHITFFLKDGTSKAMTYSTKRRMPKWTEERRKKQGDAIRASFTEERRQRMSETMKKVRRERYWHSTGKSKRSQQP

SEQ ID NO: 11341 - protein, 527 aa, synthetic construct
MAQHRKVKTIPATLTRFTSAPITEQKKRRVAGYARVSTDHDDQFTSYEAQIDYYTKYIKSRDDWEFVQVYTDEGITGTSTKRREGFRTMVANALDGKIDLIVTKSVSRFARNTVDSLTTIRQLKEKGIEVYFEKENIWTFDGKGELLLTIMSSLAQEESRSISENCTWGQRKRFADGKVTVPFNRFLGYDRGADGNLVINPEQAVTIRRIYQLFLQGMTYNSIAQELTKDGVLTPGGKTKWSISTVRSILSNEKYKGDALLQKSYTVDFLTKKTKINEGEIPQYYVEGNHEAIIDPDVFEMVQREIERRGKGKKYHSGVHPFSSRIKCGECGCWYGSKVWHSNSKYRKVIWRCNHKYDGDKTCRTPHLTDEEIQAAFLKAVNKLLETKDEVIANGYAMIPVLFDTTALEAEHDELLQETQVVSDMVQQCIYENAHVALDQAEYQKRYDALTQRFDKAKARLEQVAEEISQKQTQRVNYEAFLKAFEKLPDQLPEFTLETWHGLVDYATVYAENDIRFTFKNGQEVKA

SEQ ID NO: 11342 - protein, 519 aa, synthetic construct
MKKVTKIKGNSHQQLSKKKLRVAAYCRVSTDSDAQLESLEAQKSHYENYISSREDWLFAGLYYDEGVSGTKKEKRPALLQMIADCRAGKIDFIITKSISRFARNTTDCLEMVRKLLELNIPVYFEKENLNTGSMESELFLAILSSIAEGESTSISENNKWSIQKRFQNGTFKLSYPPYGYEWDGKQMIINPDQARIVRWIFTQVLSGKGTQAIANELNSNNIPSKKGGRWTATTIRGMLANEKYTGDVIFQKTYTDSSFNRHTNNGERDRYALSDHHEAIITREEFEAVSALVAQRGIEKGIEKGCGKYQNRYCFSGKILCGECGDVFKRRIHTCSTHKYIAWCCCTHIDDKSRCSMKYIRDDDLKAAFVTMINKLVFGHRMILIPYVNALKDNNKDVSLHRIQELQSLLLENAGQRETLTKLMAQGYIDQILYNEENNALLSQAEQYRTEINVLSERLSGDTSELKAAMVLLKYAEKAVMLDAFDENLFDQTVNRILVLSRHAVAFELKCGLTLKERM

SEQ ID NO: 11343 - protein, 581 aa, synthetic construct
MARKRTNLIGNTPSVRETKVAIYIRVSTIHQVDKDSIPMQKKDLIAYCQLILGTDNYEIFEDAGYSGKNTDRPAFQNMMGRIRKGEFTHVLVWKIDRVSRNLLDFAEMYEELRSLRVTFVSKNEQFDTSTAIGEAMLKIILVFAELERNMTSERVTATMISRANGGQWNGGRIPFGYSYDSKEKVFSIREDEASICRELKDLYLLNRSLAYVSRALNEKGYKTRAGVSWSPHSVWIIASSPFYAGIYRYNRYKGVESRTINPEEEWVMIQNHHPAIFTLEEHQAMRSIMKSNQRNMDNLPGRVHLSTKTHIFQGIMYCDKCGSKMVSTPGRLHVDGYRTSNYGCPLRRNTKKCNNPTVNDIVIGEFVINYILNMLNAKKTFSTINTPDELNAALLSGSVFSEVSSVEENGLNSFFNLLSRYGSDRSYIFSVKSPRKKKAAVDPELSKLRKEKEKQERALQRLQDLYLYSETSMSEKDFIIRKSEISSHLDNINRQLGLMTQDQASFLSDEEFIKQASHLLIQKELKNKKYIYFKKLVSTVDPDILKAYMETILDSIYTADGKITAITFKNGLTHRFIYKDK

SEQ ID NO: 11344 - protein, 552 aa, synthetic construct
MRILARTATKHPAKPKRGKKLEAEEPGVLYGRYSSHNQKDISVEQQFEKGYGLAGEYGIRIVETYADRAVSGRTDKRKDFQRMMADAAKGKFRYVIAWKSNRMGRNMLEALVNEAKLQELGVRVLYVEEDFDDTAAGRFAARSMMNVNQFYSENMAEDIKRGLYDNASNCMVANGHLPYGYKRDDTLHYVIDEAKAAVIREIFVRVSCGEPLVDIYDSLNARGIKTSYGRPWGRSSFQKILSNERYREIYIYGDVRKEGGIPRIVSDELYFKVQEVLKTKKNPQGRHRVNGDYLLTGKLFCGNCKSPMIGISGTGRTGKLHYYYVCQKKRSEKTCDKKNVRRDEVEYQIAKAIFDNALQDQVIEWIADSTIAYNDRKEAEGHIGILEDQFADVQRSLKNIMSAIEQGIVTETTKSRLLELESERSEIEGKIAAAKADIVPVNREQLIEWLLSLREGDIHDKKYQARLFDTFLIAAYLYDDGTAKLVFSFAGDKNTVTVPLAEAVDSVEENTAEGSFKLCLAPPIPNTKVFGIFVYSQKNLYISNGKVLNPNG

SEQ ID NO: 11345 - protein, 550 aa, synthetic construct
MKIAIYCRVSTHHQIDKDSLPFQEQDLKNYCEYVLGSNNYVVFTDPGYSGKNTERPGFKKMFDRIRKNEFTHVLVWKIDRISRNLLDFCSMYNELKEHNCTFISKNEQFDTSSAMGEAMLKIILVFAELERNLTSERVSAIMINRAQEGRWNGANVPLGYYWDDSANFPLIDASESETIQLIFDVYEKEQSANKVLDCLVENNIKTKRGGDWNTKTICDIIRNPFYVGTYRYNYRESGRGKIKDSSEWIIKEDNHQAIISKKQWQKCNDIMDENARTNHSKNRRYDQVHIFRGLLRCNLCGGNMYGAKDRPRKDGFRPSRYRCANSHKETCNAKIVTDVTLGPFVINYLINFINLINNSKQVNTLNDIKSFLLNGNDFKNVDLTEDTLFNMYVSLNIDNKVIPLPDTESKKVKVNSEEIKLTREINKFKKALERLDDLYYFDEKGISEKDYLIRKKDFENKLNDANNKLKSISENDPTNFYDFDFLSSASEFVLQNNIKKHLNFKSFYMTIDNEKIYNFIKSLIKEIFINSDGSIYSITFKNGLIHYFVY

SEQ ID NO: 11346 - protein, 520 aa, synthetic construct
MPRKKAPAAEAPRLVAYYRYSGGSRQTEQSIEGQRRDCEAYARAHGMTILREYVDRHISGKTDDRPAFQQLVADSAAHTFDAVICWKTDRLARNRYDSAVYKKKLRDNGVEILYAAESNISGAEGIIIEGLMEALAEYYSAELAEKARRGMRESALKGKALGSSRPLGLTVDADKHYIIEPTGAEAVRYIFEQYAAGLSSSSIVERLNAMGLRTSHGGPFNKSSINRIIQNEMYRGVYVSKKFDVRIEGAIPAIIDNDLWKRAQNMFERNRQSRTPHASRADYILSGKLYCGECGCLMKGVCGRSSGNGQMYHYYACPGRSIGRACTRKNIPQDELEAMVVNAVADLLLEPALLEQIADAIVELQQAEAARPDPEKQALEKSLSDVRNKIQNILSAIENGTSSAALSARLADLEQQESTLSYQLSSLDAKKPLTFTRDQILFLLQQFRVSPSERTKAYCRRLVDTFVDHIELTNTELILYFNLSDETVDKNKKAPRSNPSEESSTEKRLVRVARIELTAS

SEQ ID NO: 11347 - protein, 537 aa, synthetic construct
MAKKKKPAGGIAVIYARYSSHNQRDVSIEQQIEACRKHAAELGLTIIATYEDRAISGRTDNRPAFQRLMHDAEKGKFSYVLAWKSNRMGRNMMQAMVNESRLMDCGIKVYYAEEDFDDSAAGRFALRSMMNVNQFYSDNLAEDVRRGLMDNANKCMVNGRQPLGYKRGKDGKVVVDEPAAAIVREVYTRVASGELFTDIARDLNRRGIKTADKGEWNKNSFHRLCSNEKYRGIYIYGDVRIEGGIPTIIDDPLWYKVQEALRVKKLKRNGRHRPGDEDYLLTGKLRCGKCGGYMIGMSGRSKTGDIHYYYACQNRRVGRTCDKKNIRRDVIEPAVAQAIKEYCLTDDAIEWIADKTVEYWEKADRNLQLDSIEGDLVAVQSSISNVMKAIEMGVVTETTRDRLIELEKQRTDLKSKLALAKEEVVHVDRKKLISSLLLFRNGDIHDRQYQEDLFKTFLISVYVYDDDNNGHLKIVFNAFGDNNTVDLPIDFGETDNQSAFSDGAEKFDYSLHRSTRTKPSDEQSGGFSVLFSADFTQ

SEQ ID NO: 11348 - protein, 568 aa, synthetic construct
MKKKFSSVPDPDIQDAVIYARYSSHSQRDCSIEQQVADCELFAQQNGLRVVKIYADRHLSGTTDNRPEFQQMLKDAAHGHWPFVICWKIDRFARNRYDSATYKYKLKKAGVRVLYAKESIPDGPEGILLESVLEGSAEYYSASLAQNIRRGMRFNAENCKVNSGSIPFGYCKGPDGRFAIHETNAEIVREIFRKAAAGVPFVDIATELNNKGLKTSRGGRWNKNSFVLLKNESYIGVYHFSDIRIEGGMPAIIDPGTFLAANERMNANRRVRGRHHDGGDYLLTGKLKCAHCGSYMVGFSGTAKNGESHYYYGCQKRRRERACKKANVPREWIEKVVVKAALDYVLQPDVMEWITDAVMEYQEREAASSQLAALTAELEENQKATDNLMKAIEAGIITATTKQRLLDLETKAKDLKRAIELEKLSHVRLEREQILYWLEQFQGGSLQSQEFRRKVIDTFVSVVYLSDDHLRIAFNYSGQNRSEADFNLIMDAETASADYPINSFSLPLSPPHKKNPNLFPSGKGSDFSFAAFLTASFSFPVSAARLFYRCRLHIRSGCRLFRQRGGRE

SEQ ID NO: 11349 - protein, 512 aa, synthetic construct
MPKTEEKQTITAVIYARYSSDRQREESIEGQIRECKAFAAANGYRIIGTYIDRAMSARTDQRPDFQRMILDSDRHLFQFVIVYALDRFSRSRYDSAIYKNRLKKNGVRVLSAKENIRDDPTGVILESLLEGYAEYYSLELAQKVRRGMADNLLEKKWVGTVIPFGYKKGTDSRLYVDESKRHAVIDIFQMYSDRYRLVDIIAYLNAHHFTTAQGRPFSRNSLNNILVNSIYTGTFRWAGTVYPGYAPRIISDELFNKVQKIKEGRKRNMIKSTSPDYELTGKIFCGRCGRPMVGVSGTGKSGNTYFYYKCSGKTHGRKDCDAKAIRRDAVESAVYNATVAMLKQPHAIKIITAQAIWAQEREQGNSEVDRLKHEKAALDAKICNISKAVAAGLTADEIIAQANEYSNRSKELESLIQVEELKEKAFTLTPEAVTFFLEKLLEKAETGSTTLSTFWDFIRCIKINGCIAEIHFNYTAVPATLDNPIRVKIETNEECSNDDVLVDHQGFEPRTP

SEQ ID NO: 11350 - protein, 589 aa, synthetic construct
MRTIRKIEQSVPNLRPRKKVAAYARVSMESERMHHSLSAQISYYSSLIQKNPEWEYAGVYADYGISGTGIKKRQEFRRMMEDAKAGKIDIILTKSIQRFARNTVDLLQTVRHLKELGIEVWFEKENIHTMSGDGELMLTILASFAQEESRSISTNVKWGTRKRFAKGIPNGRFQIYGYRWKGDQLVIEPKEAAVVKLIYGNFLKGLSAEATEKQLAEQGVKSFKGKHFGNESIRGILKNITYTGNMLFQKEYVSDPITGKTKRNRGELPQYFVENTHEAIIPMEIYKKVQAEQERRRKLGALANWSINTCCFTSKIKCGICGKSYVHYIRKKGKQKQDYWSCGSHKVKGRTCQSKGSIPQKVLIQECKDVLGIEEFDEKTFLDRVDKIVVPEQHVMVFHMKSGEKITRQWVSTARVDWWTPERRKAWGERHKLKSTNPNKKVFNEFTGFIKCGNCGGNYRSQQTTYLDGGKERYWRCVGKCGNGSIKDSTMKNLTASVLGMASFDEARMDELLEKAVIQNGEVVFYFKDGHTETRQYKEMRHRCRHSEAYRKYMHDFMKLARSKDPEAKTKLMELKKEWRRDDNRWKEQ

SEQ ID NO: 11351 - protein, 522 aa, synthetic construct
MERTVRAIPATISRYTAAPINSRKKRKVAGYARVSTDHDDQLTSYAAQVDYYTNYIKGRDDWEFVGIYTDEGISATNTRHRDGFKRMVKDALDGKIDLIITKSVSRFARNTVDSLTTVRKLKDKGIEIYFEKENIWTLDAKGELLITIMSSLAQEESRSISENVTWGHRKRFADGKVSVPFGRFLGYDRGPNGNLVVNQEQAKTVKLIYRLFLDGLTFHSIARELTASGVLTPGGKKRWSQNSVESILTNEKYKGDALLQKSFTVNFLTKEKKQNEGEVPQYYVENDHEAIISPQVFDWVQEEIKRRHEGKKRYSGVSIFSSKIKCGQCGSWYGSKVWHSTDRYRRTIFRCNDKFKNHCTTPHITEEGIKSIFVKAVNQVIERKEEILDSVNYLKEKLTNTEALEKERDKLGTDLNLLTDKVQQLIAENARVAQNQDEYARNYDELVGRYEAIKKQYDKTCEAIKYRKARSKQLEGFIDDLRNQDPIQEFDVRLWSSLVDFITVYSKDDIRVTFKDGTEVRA

SEQ ID NO: 11352 - protein, 583 aa, synthetic construct
MTRVSFYARMSTDKQSEHSVDDQLRLCRDHAIAHGWEIAKAYTDRAITGSTMILRPGVQQLMEAIRERQVDVVLAESLDRLSRDQEDIAHIYKRIRHADMRLVTLVEGEIGELHIGLKGTMGAIFLKDLAQKTHRGLEGRALAGKSAGGKCYGYDVVRKLDEKGEPIRGDRAINEEQAAVIVRIFRDFVAGKSAKRIAQDLNRDGIPAPTGDAWGHSTINGNRRRGNGILNNELYIGRQIWNRQRFLKHPDTGKREARPNPESEWVITEIPELRIVPQELWDQVKSYQRELDEKPQFWQKQRPKRLLSGLCKCGHCGGGYSKISAQHIGCSTARNKGTCDNRKSIHVGHLEERVLKALRSRLMEPERCRVFCDEYTAHMNRLRAEHNAALNGYRAEYERNEQHIDKMLDAIGNGLDPKKVKDKVNLLAARQEELEALIADSKEAPILFHPNMGRHYANEVTKLVRSLNQEEHRSEAAHILRSLIDHIELTFDSATHELVVDLHGDLAGILQIASTGNIETRKEKGSMKNTQKAKRPVSRANENALAASGSLAGGRSATGRNDHPIMQAKLVAGAGFEPATFRL

SEQ ID NO: 11353 - protein, 473 aa, synthetic construct
MKKQVAIYIRVSTQEQANEGFSIAAQKERLISYCNARDWLIYDVYIDPGFSGSNLDRPGIQSLLKNVGNFDTILVYKLDRLSRSQKDTLYLIEDVFLKNNVDFVSINESFDTSSPFGRAMIGILSVFAQLEREQIKERSLMGRIERAKAGLYHGGWNTPTGYRYIKDDDALVIDEYEAQQVKLIFNMYMNGKSMTEIRRHMHQTGYATKYGNYEHVKTVRNILGSAVYTGKIKFRDEYFDGQHEAIIDDETFAIVQKRLQKRSELSFKRRESRGLLVGSIWCGKCGARYHLKYNNGGYKYYTCYTRSGGHKRMVRADLCDNKIWHLHEIEPIVENEILKLSSSRESLNSLFDSEVNDSDNARQRKLLSGRISKIDRQISKLMDLYSLDSLPFESLTTKINALHLEKKSLEEEIRKYEIKQYSEIEISNAWNLLEGLEDKWTELEISEKRRILQSLVNRILINGEEITIEWSFL

SEQ ID NO: 11354 - protein, 544 aa, synthetic construct
MNKDNKTKYFIYARKSSESEDRQVQSIEDQVDELNKLAKNSDLNVVGIFRESKSAKAPDRPIFEEMLSKIRLGEADGILCWKLNRLARNPIDGGTISWMLQEGVVQHIQTYGRGYSPSDNVIMMSVEFGMANQFIRDLRVDTKRGLKAKAERGWSPTYQTLGYMNNPLKTKGNKETINDPERYEIVRKIFDLMLTGNITPPHILDIATNQWGLRNKRGKNISRSTMYRILSDTFYYGEFEYPKGSGDWYKGEHEPMITREEYDKIQFLLRGDRKSSKPKKYNFAFRGPIKCGECGASVTAEHKIKNQKNGNVHNYIFYHCTKRKDKNCSQKSIEEKKLSKQIEKVLNKIEIPESFNKWAIRILKSQNEVESVSRDKILDNQRKEYNEVLKKIDNLIDMRAGGELTKQEFEERKDKVTQEKERMNILMKDTDERVNDWIEKAEKYFDFAENVTERFNTGSMEVRKGILSTLGSNLYLKDGELKVELEKTWNIMEDMSCEVKKINEMFEPQKDGENKRTLGDLYSQSPMLLRLYDKIRTYFERSEK

SEQ ID NO: 11355 - protein, 513 aa, synthetic construct
MNIKDVAIYLRKSRGDDEDVLSKHRLLLTEYATKQGWNYTEYEEDLLSGERLATRPKMLVLLDDIADGKWDAVLVAAYDRLSRGSSKDFGTIIETMQYTNCYIATPERVYNVNDTNDLTMLGIQGVFANTELRIIKERFIRGKKLGAKDGKWTNGKPPYPYIYRKRIFINERGKEEIDADVLTDPEQKEIYLLMKRLYLTGEYSTEKLMIKMNKLGYPGPTGGLWRHNTIRRLLRSEFHMGYSIYGKYEYKTDKNNVKKAVRKRDREEWYIGRGDWEILKTEDEHRKILAIMKKHSKTPSRARSGSFPTSGLMYCKLCGHAMHYAGNGRVEVKTGKKFNFTKCSFTYPTGEKCPQRGVKLSEEFYDNLYNMVITSHFDTEIIEKSQLNQNDIAEKESSIADLERQLKQYSEALVRIKDAYSMGVYNLTEFGEEKKKLDDKIKNLRKNIDRIENEIASVTTYTRAELNSRIEEFKIKWQKASTPQEQNILLKTIVKRIIYNRQDDNVVLEVEYL

SEQ ID NO: 11356 - protein, 509 aa, synthetic construct
MNVVIYARFSSHSQTEQSIEGQLKVCYEYAEQNHYTVVGEYIDRAMSGKYDNRAEFQRMISDSDKHTFEGVLVYQLDRFARNRYDSAIYKAKLKKNGVRVLSARENITDDASGILVEGVLESMAEYYSAELSQKIHRGMEINAQKCLSNGSNPGLGFKVDKDRRFYVDEEEAKIVREIFERYASGETKAEIVKDLKRRKIKTSLGNDFTYNSLSRMLSNKRYIGVYMYNGQETPDRMPRILDDDLFYKVQEILDKNKKAPARTHGEGEYLLTTKLFCGHCKNMMVGYGGTSKTGKQYHYYICKEARKKRCDKTIVSKKKIEDRVIAECLKLLTDDNIKFIAQKVAEECNKSPDNLTVKQLKKAIREADTAIENLWRGIEQGQSVPMLTERLNKRQAGKDALEEQLAIEENKRICLSEAQILAFLNFVCEMPLDDVNKRRAIINILVHSVYLYDDHFTLIINASKKPVSVDNIPLEEIEEAFNTDKTCTEQCSTMTSPAPPTRSRLHMQS

SEQ ID NO: 11357 - protein, 517 aa, synthetic construct
MAQVKIIAPQTREAEHLRVAAYCRVSSDSKDQLHSYAAQIRSYTEEIAQHDGWELVDVYADEGLTGTRMDRREDFNRMMADCRKGKIDRILVKSVSRFARNTRDCLSALRELSTMGVSVRFEKENIDTKTLTTELMVSVSGSLAQQESISISANQKMSYQRRMERGKFITCTAPYGYRIVNKKDLEIVPEEAATVCWIFDAYLKGRSSGWIAEQLTAKGIPSQSGAECWRETGVRYLLTNEKYIGDALSQKSYSCGFPFVQKRNHGERLQYYTENSHPAIIDRDTFERVQALLQKKAQKEKKRREKSPLALKIVCGNCGTVFQRRSSQNGYVTWVCRTHDRHAADCPVGRIPEAEIHAAFLRMYHRLKSNADIILAPALRQLNTLDTILRQNHPQVLAINRAIAEATEESHKISTLRANGLLDADICAARMNAISARLAQLRGERRRLTENEAIDETMDALRKVEQTLLNGPERLDGFDEELFERLVEKIIAETQTRIRFRLYGGLELTEQWEVAAR

SEQ ID NO: 11358 - protein, 547 aa, synthetic construct
MEATAATLERRVRVIPATRKPEELHRDHNGKMRVAAYCRVSTDSEEQLNSYEAQKTYYTQKIQDSPDWEMAGIYADEGISGTSLKKRTQFNKMITACKRGHIDLIITKSLSRFARNTVDCLDTVRLLKANGIGVYFEKENINTLTESSEFLITLFSGFAQAESESLSKNVAWGKQKSAEAGKVTFQYKKMLGYRKGADGQPEIVPEEAEIIRRIYHRYLDGCTLGQIKRELDEDGVPTAQGVERWSPSIIHNILTNEKYIGDALLQKTYVTDCINKKVKKNRGERTMYYVENSHPAIVSRDLFNQVQQEMTRRSSKRKVLQKSGKTELGKYSGKYALTELLVCGECGSPYKRVTWARNGKKRIVWRCVSRLEFGTKYCQHSPTLDEGKLHSAILAAMNEYAAIRQEVCPNVLAMAEEARQALSQAGARLLQLKKRMDAVSREQSDVLDRLLVNMADTELNARMKALTDEKESLKAQIADAQQAEVDLEEQDARRRQMWDSVMECAAGYTEFDNELVRQVIQKITVEDAETIHIHFRDSDVVLEQEVE

SEQ ID NO: 11359 - protein, 513 aa, synthetic construct
MKKQPTGGKRLVAYYRYSGGSHQTEQSIEGQRRDCETYARIHGMVILHEYIDRHISGKTDDRPEFQQMIADAGKGMFDYVICWKTDRIARSRYDSIVYKKKLRDNGVELLYAAEANVEGSGGIIVEGLMEALAEYYSAELAEKVRRGMRESALKGKAIGSSRPLGLTVDKDKKYIIDPAGAAAVRYIFEQYAAGAASSAIVAHLNEQGLCTSRGNPFNKSSVVRIIQNEVYRGVYVSPKFDVRIEGAVPAIIDDDLWERAQKMFIRNRQSRSPRNDRADYILSGKLFCGECGTAMKGVSGHSSNGEVYFYYSCPCKDCHRRNIPKDELEGLVIRTVCNDVLQPDVMDRIADSVIEAQTAELNQPNPEKEALQHELADVQRKAKNLLSALENGTAGAMLTNRLAELEQQANTLSYQLSSLESEPKFPVFSKEEVLYLLEQFLIAPSEKTKAYRRRLIDTFVSKIEVSNTELTIYFNIAEEDCGKMKKAPQSNQPEGCSTEKQMVRVARIELTAS

SEQ ID NO: 11360 - protein, 465 aa, synthetic construct
MKGNAGDTIVKKIDLSPELVRVALYIRVSGEEQKIKGLSLEAQQERLEAYARERGWVIVGIYIDAAKTARKNIHKRTDFQRMMDSVKRDEVNILLFCRLDRWFRSVADYYKIMEVLEAHNCDWKTTDEEYDTTTANGRLYINVKLSIAQNEADIDGERIDVVFDSKIAHGTVVSGSAPFGFRVNEEKRLEVVPEDAAIVQDAFNYFETSISQRATVRYIRETYGVNWCDATFRRMLKEKLYTGVYDRGGRFNDHFCPAIISKQQFDRVQALLERNARSVPSGKVYIFTSILTCAECGHKLVGYKSSDYYYYRCNQHFQRGRCSHNHSAREDVVEKWLFEHLAEELERCQLEWEVAAAKKKASVARTDKAALKRKLTKLKELYVNDLIDIEDYKRDYQIYTAALKQIPEPSIEPPPDFAAVRRLLDNDFKTIYENLTREEKRTLWRSVIKEIRIDNDQNITGVVFG

SEQ ID NO: 11361 - protein, 608 aa, synthetic construct
MNTAVNEYNYRFKLTDYSLFDRNRARKVAIYGRVSTEHEAQLSALENQLQWYDDQVKYHPNWTVCERYIDEGITGTQAKKRPAFLKMIEDAKQGKFDLIVTREVCRFARNVVDTLVVTRELKGIGVEVFFIDDNIWTMDGDGELRLSLMATLAQEESRKTSERVKAGQKISRDNGVLYGNGNILGYDRVGDTYVINEEQAETVRMIYDLYLQGYGSMKIAKILTERKRKTASGLIKWSVSNIMRAIKNATYTGTKCYNKSRSNNFLEQKRINNLDMSTYEYVEGDFPSIISQEIWNKAQAIRESRVKPVCVSAGKNTHSKRDSRDIWVNKLRCSCGSSYRKNKWHTKLDGKTSYGYQCYNQLNNGIKRKRAEIGLDTEGYCDSRMITDWKLDFMAKALLEHLWTERKESVLIALDLIKYYYKEEKSNETQSDTVTIQAKLDKANSRLTNLIAMRADGEISKDEYQAMRSPVDEEIKKLQKALDEIPQEKSNPKGLDIEGIRSTLNSFIDFSGSTISHDVVNQFVYLITPTSDTTFDWYVNLNGTADVKATFTAEGRKKNCIIKLEEIEKISSVHREKNEDNAHFIKNPHIFTYLHRLLSQSRQNRQRF

SEQ ID NO: 11362 - protein, 544 aa, synthetic construct
MSMENCANTKPKITIIPAKTRVERLDPLSIAMGQKPKIRVAAYARVSTDHEEQESSYEAQVDHFTKLIASHDDWTMVDIYADPGLSGKNTKRVQFKRMIKDCEDGKIDLIITKSVSRFARNTLDCVQTARKLKADGIGIIFEKENLDTLQERSEFVLTIMASLAEEESRSISNNIRWSVKKKFQEGKVILNTKHFLGYTRDKKGTVLKIVPEEAITVRRIYAEFLDGKSLKEIAEGLERDGIASPSGRETWHPSTVKSILQNEKYKGDCHLQKTYLPDFLSPRRIKNEGFAQSWYVEDSHAAIISKETFDMVQQEFQNRQSLRSTGETGCGKFSGKYPFSGMIVCGECGETYRRHQQYNKYKKYYIWVCKRHENTGAEYCKSRPIKEEALEKAFVRALNELIGDKEQILEKLQSATVSEITDSCATAINEVNAEMEKLQEQMMELLMKRNNGEITDKEYEQQSQQVGMKIDQLLMRKEEILSEQGKVQLASYRIEEVTKLLQTGKILEEFDRVMFKSLVRKITVLSNKEIEIEFECGITVRETL

SEQ ID NO: 11363 - protein, 492 aa, synthetic construct
MNIQEIPTTRKEKPRVCAYVRVSTDSEAQEDSFAFQSNYWQRRFESDESVEYIGLFSDEGIGGAFMKKRDGLKRMFQKVRNGEIDRIYTKSVSRFARNKVELMEVVREFRDIGVEIIFESENIHTLDPKCGLILTVMASLAEEELLSMSQNQKWAARKRFANGSVELARILGYDMVDGKLVINEKEAVIVRRIFELYLQGNSFRTICHILENEGYTPMHGGRWSKSTITGMLRNEKYCGDSIMQKSYSTMKVQKYNYGELPKYYVQDNHEPIVSREDYQKAQEIMIARGNKYRPRGSPTALYPLSGKLICGECGTSFKRKTSAHGTPYMCIKWTCRKKDFYGVKECTSHDIKDEVVTRLLIEAYNESLDANNDVNGITEQEEVLRKLIANEQELRQLRAKGYISESKCREETDKILIKIKEQETLIKNLRTRDMVKGKYKKSDEMTEQMAEFLVKATVKDWKITFEFQNGYKTTKEYTNGRAGNVNGKLCKH

SEQ ID NO: 11364 - protein, 526 aa, synthetic construct
MPKVTMIPATINPLTHLPKVAAQKRRVAGYARVSTDSDEQFTSYEAQVDYYTKFIQSKPEWDFVKVYTDEGISGCNTKKRDGFNSMVADALDGKIDLIVTKSVSRFARNTVDSLVTIRKLKENGVECYFEKEGIFTFDGKGELLITIMSSLAQEESRSISENITWGQRKSFADGKVHLAYKRFLGYEKGEDGRPTIVESEAKIVKLIYRLFLDGKSQASICRCLEDLGIPSPGGKKKWSKTTVTSILQNEKYKGDALLQKSFTVDFLEKKMKSNEGEVPQYYVEGSHPAIVDPDEWDHVQTEFTRRKALGRAYSGKSVLSAKLVCEDCGGFFGSKVWHSTDRYRRTIWQCNSKFKGEERCHTPTVDTETVQRLFIQAYNRMMENQEQIIKDCETMRRALTDFAALDAEIERQLEETQVVAELVKVAVKENASTAQSQEAYLKKYEALTGRYEKAAAELERLQNLRTTQSQRDKAMSLYIRTLKKQPVVLREWSDTIWTVMVEKAIVHRDGEITFVFKNGTEVKVGE

SEQ ID NO: 11365 - protein, 433 aa, synthetic construct
MSGRITTVSKPPKLERKKRVAAYARVSSGKDAMLHSLSAQVSHYSELIQRNGDWLYAGVYADEAKTGTKDSRTDFQRLIADCRAGKIDMVITKSISRFARNMVTLLQTVRDFKAWKVDIFFEEQNIHTMSADGELMLTILASYAQEESRSASENQKWRIKRNFEKGTPWNGAMLGYRLKDGRYEVVPKEAELVRRIYTEYLAGDGYLSIAKRLTEEGIPSRFGRKWNQSVVSKILSNYTYTGNLLLQKTFRENHITKKTVINHGELPKYHAEETHEAIIDMETFQAVQAEKERRAKRFNKKPAPRTTYPFSGLLVCDNCGKNYRRKTTKMGIVWVCGTFNTLGKAACASKQIPEGTLQQVTADVLSVKDFTREQLHSRIQSIRVCNGNILVFCFKDGSEVTRTWKDRSRAESWTDEMREAARQKALERSKHNA

SEQ ID NO: 11366 - protein, 563 aa, synthetic construct
MCHDCHTMKIAIYARVSTEKQEKQETIQSQLTALRNFVVSQKYSLTKEYIDEGYSGELLARPALDNLRDDAKNKFFEAVLLHSPDRLSRKFIYFGLIEEEFKKYNVRLIFLNRPDSKDNPEENLLTGIQGLIAEFEKAKILERTRRGRMHKIKNGNIVGSIAPYGYHYVKGDKEKNIPGKYVIEENEAKVVKLIFDLFVNQKMFIRSIAKELTKRNIPPRQGIHWRTSSLHRIIRNETYTGITYYNKNASCEAKTHRNNQKYHRTKFTGSKLRPKDQWMSIKLPDDLKIIDNEIFSIAQQQLKKNSNLSPRNAKYPYLLRGIVKCGFCGSPFHGTPCHGKYYYRCGNRSRSFPLPRECTQASMVKAEKLETIVWDSFCQMIRNPQLILDQLESLRENAAKSSGNTEEELKALDIKLANMSQEENRLLDAYRENIITIDQLKSQMSKIKDRVAELTQKRQTILERQNKSQTTNFSKDNLYQLCALLDANLKKIGNDFKSKRNLMTLAINSISIEGKTVRIKSIIPLLPENATLHSDSCSHQNTNELESVLLRPQLPNDRPAGKR

SEQ ID NO: 11367 - protein, 545 aa, synthetic construct
MKVAIYTRVSTEDQAREGTSLEVQSEFLVSYAKREMNEIAEIYVDDGYSGYSTDRPALRKLLADAKKKKFEMVLVHKIDRFSRNLRDLLNLVEELELLDISLKSATEAYDTSNSAGKMMFQQLGSFAEFERNRIKERVFPGMIKGVQRGNWQGARYSPYGYYYNKGKKLLEVVKEEADIVKLAYTMYLAGQSTQQVAGYLYRKEYKTRSGGRFNTKLICDILKNQVYLGNLVWNRHHYDKKQKTLKGCKYVRNDPSKVIIVKGRHEAIIYQDDFDAVQKKMALARKGVVRKCNSNEYPLTGIISCARCDNNFQGCMNTATRENKKTKSKRRYYRCSARQVYDINCLNSYARAEDIEVEVYSIISVIFDQDIDDARLFNLVKNSSHSHSEDSEKQLGEAKLKLEENIIKQGRLSGIFTEGLLAIEAYKKQIIPLRDEEKEIKGKIRKLELSLIERERNDEYLRMIKDVVNHFQSINERMDLVSKKGLLRMLFRSIKIDNGGIKSFELFEPYKSLYEGARIKWEVQENQILTTERASVSTLLPSDAR

SEQ ID NO: 11368 - protein, 517 aa, synthetic construct
MRGAIYARVSTKAQAEEGSSLESQVERCLKWAQAKDFEVPPGLIFREDWSGATLDRPELNQVRTLVRDGSLNVVICYSTDRLSRNPVHTYILAEECQKHNVALAFVTEPLDTSPEGQLIQYVKGYAALIEREKIADRTTRGKQMRARQGRLPVGNGNGLYGYSYVPGKGPGEGIRRVNEAEAENVRMVFRWLVDEGATLYRICVRLTEAGIPAPKGGSRWGISTVARLLRNEAYAGVTFAFKSTYVEPKNPIKRDRKHTKTSKQLRPREDWIELPGVTPPIISRETFQAAQEQLRRNFERADRNRKEQYLLAGHLRCGKCGRAYNGRKTRGHTYYQCAGKNKTVSFVLCPARRLYGKTAEKLVWEEVKRVLSDPRAIIEELRCRQETPDLTQERAKELKKKLSALDQQGQRTVTLYSRTEVDDAWVDREMARITREREKARAELLQQEALLKQSLDRKDQLEAIEQYCATAAVNLESFGYEEKRQALETLNIHVIVDDDGLRIEGIMPVAITSLSSR

SEQ ID NO: 11369 - protein, 508 aa, synthetic construct
MQAAIYTRVSTEDQAHGYSLSTQVAECRRCATESGFQVAEDLVLIEDGQSGATLDRPKLRELRDAVAARRCDAVIVYDPDRLSRRLVDLLLLDDEFRARRVALIFVKHPIEASGEGTLFFQLRGAFAEYERSKILERTRRGILARARAGLPPGGQTPFGYAPDIVNGKRQGFVINEAEARTVRLAYQLCVDGLNITQIMSRLNELGLAPRSGKPWQRSSVHNILAYKGYLGESGYGKRQTVGKGPGKVRVRRPEKEWIPFYLPPIVDAATCEAVRRQLALNSQKAKRNANHDYLLSGRIYCGVCGHRMYGIHSKGIWFYYRCCQKGINKPGCRNSHINAVSADNAIWADVHRILQQPELVIMEIERELRTQKTIEQIETELALVAAGVKDAERQHNQLLQAYLADAIDLAILKAKGQSLMATKDNLLQRQADLGQRLASARQRVDLAVIEAFFERVRSRLYHLTIDEKKEALALLDVHVVWTGSTLDLTAAVPVDIASKTPSKDRSSK

SEQ ID NO: 11370 - protein, 443 aa, synthetic construct
MNIEIPRDLRGTQTKSGVVEQVKIKYCLYARKSTESEERQVLSIDSQTKEMLQLADKEGLEIVEIKRESHSAKATGQRPIFNELINDVKTGKFSGILTWAPDRLSRNAGDLGALVDLMDEKLLLEVRTFGQKFTNSPSEKFLLMILGSQAKLENDQKGVNVKRGLRSRCEMGLRPGVAPTGYLNEKRMDRKCHVLVDPERAPIIKKMYEKVAHEKWSGRKIYHWLKHDLNFYTRGNKNLSLSNVYIILQNTFYYGVFEYPEKSGNWYTGKHEPLITKELFDKVQEQFKRDRIQRESKEFAFTKLITCGHCGSGITADEKFKQLKDGTTARYVYYGCTRSRDLHCKGGYLREEDLIIQLLKIIDQIDINELGVQIKFEQEVVRYNKFRRNVLGTQEKSGAEDVDLKTYAKYLLKEGSVIEKRELLSSFKSKLILEHKTVSVSEA

SEQ ID NO: 11371 - protein, 507 aa, synthetic construct
MNTKQSMGVYCVRKGVYRMEQYCIYLRKSRADAEAEARGEGETLARHEHALLGLAKSQKLAIVKIYREIVSGDSIAARPQMQQMLQDVTDKKYTGVLVMEIERLARGDTIDQGVVAQAFRESNTKIVTPIKTYDPSNEFDEEYFEFSLFMSRREYKTIKRRMQAGRIASIKEGNYIGTNPPYGYKKIQPEPKVKTLEIVPDEADAVRMMFDMYLSGMGAKAIATRLNQLQIPPRKSPAWEPVSIRKILQSPIYAGKIEWHTKKDGTILADGLHPEIISWEEFQQVQERRKRKASPVPTGYTTQNYYHNILFCANCGHQMKRRPAPNGSSHMLCVRQQCRGKVVSAPTSRVDEAVLEAIRYRIQELKLSKEKIEKEDYHTKENEEKQRTRLKKALEKLQKQKEKLHTLLETDVYSVETFLERSKVLEQQKLDLETELAELNDAQKEVHLSPKQALLWLQHTLDHFETANPEQKNKMLQRVIKRIEYSKTERMCYRKQTSDLALHVEFL

SEQ ID NO: 11372 - protein, 516 aa, synthetic construct
MARKKKVSPGNRLVAYYRYSGGSQQTEQSIEGQRRDCEAYARQHGLTIVHEYIDRHISGRGVESRLAFQQMIADSSKHLFDLVICWKTDRFARNRYDSAVYKKKLRDNGVRILYAAESSVEGPEGIILEGLMESLAEYYSAELAQKMRRGMRESALKGRSINPSRPLGLTTDEHKRFIIDEKNAPTIRFIFEHYAAGESSASIVDQLNAAGLRTSKGNSFNKCSIPRIIQNEAYHGVYICKAYDVRIDGAIPAIIDDDLWKRAQKMLTLNKQHRAPHSSHADYLLSGKLFCGCCHSLMRGISGHNCRNDVYYYYACGNKADGGTCKKKNIPKDVAENLVVNAICENILRPDTLEDLADAIAAAQQADVNQPDPERAMLEQNLADVHRKINNIIESIENGTASSRLSARLADLEQQESTLNYQLESLKEVHPPVLDRERILFLLEQFLISPNERTEDYNRRIIDTFVNRIEITDTEMLIYFNLSEASASEKQKNSQPNSCSTGNHLVRVARIELTAS

SEQ ID NO: 11373 - protein, 563 aa, synthetic construct
MAEVEVIKAVEGPILRKRDYEGKPLVITRQRVAAYVRVSTDGDEQLESFQSQKQYYQDKISENRDWVMVGIYADEAITGTKVDKREQFQRMIQDCMDGKIDVIMTKSVSLFSRNTVDILQYVRLLKERGIAVIFEKENINTLTEQGEMMLTLMGTLAQNEVESTSKNVKLGIKMKMKRGELMGFNGCLGYDYHPEDKTITVNEAEAETVRLIFELYLQGYGTYTIAKRLEALGKLNKKGVAKWTDSGVRGIIKNEKYKGDLLLQKTITTDPISKRRIENFGEEEQYYVRDHHEPIVSREVWEQAKEIRLSRNHQSDKKADGKREKYTKKYAFSSMCECGFCGTKLTRRTLHSSSKYETPVWYCRNAANRGKHNCPNSKSVHESILENAFLEAYKLLAGSFDDVIDSVIGTIESIGANNDDIARLKKEQKTLDNLEQRRKKLTDIYLDDGLTKEAYDEKYEELTVKIQKSKDSIELLQNNVSNQKDVGKRMASLKKALADGDILDEFDRVVFESIVEKVIVGETNEDGTVDPYKLTFVMKGNGNSVVPNAKEWFKAEKSAIQPA

SEQ ID NO: 11374 - protein, 581 aa, synthetic construct
MSRTTNKRPGKAKSGLSRKQKVAIYIRVSTLYQVDRDSLPMQRKDLIAYASLILGIEEYEIFEDAGYSGKNTDRPAFQEMMQRIRKGEFTHVLVWKIDRISRNLLDFAEMYEELQDLRVTFVSKNEQFDTSTAIGEAMLKIILVFAELERNMTSERVTATMISRANSGLWNGGRIPFGYDYDPDKTTFSIREDEEKVCQMIKNDYMEHKSLVHTSRMLNASGYKTRSGVEWSPTAVWIIVSSPFYAGIYRYNRYKGTERRVENPEDEWIMIQNHHPAIFSLEEHEKMLAILDENSRNRRSVGQRHQTERVHIFGGIAYCGKCGSKMVSTPGRLHVNGYRPTNYSCPKHRKTKECDNPTVSDTQVGEFVINYILNMLGAKKKFSTIENPEDLERCLLYGNTFSEVEHIDSNGLNEYFNLLSRYSSDDSYTFSVKKSRKKKAEVDPEVAALRKEKEKQERAMKRLQDLYLYSDTSMSEKDFIIRKTEISKRLEEINAMLGMVARNSEPSLSDEEFVRQASHLLISRELQNRQYIYFKNLAQNVSPEILKAYMETVLDSVLLVDGRVSSIVFRNGLTHKFKYKS

SEQ ID NO: 11375 - protein, 495 aa, synthetic construct
MPEALNAVIYARYSSDRQTEQSIEGQLRECYAFAKANDIAVIDTYIDRAISGKTDNRPAFQKMIEDSAKRQFQAVIVYRLDRFTRNRYDSAIYKARLKKNGVKVLSAMENLNGSPESIIMESLLEGMAEYYSVELSQKITRGMRENALKGKALGGQRVLGYKVNSDCYFEIDETTAPVVVDIFKLYSSGKTVKEICDILNARGVKTARGGAFNKNSLHTILTNKKYIGIYKTKYGEIVGGIPAIIDKELFEMVALRMEQNKKAPARAKAEINYLLSTKLFCGKCRSAMVGESGTSKTGKKYYYYACVKKKREKACDKSNVKKDWIEDLVIQRTVTDILKDDVIEKIADRLVELQKAEAAESGTMLYLQNSLAEIQVSIKNIMTAIEKGIITESTKTRLTELEDEKRNVEIEIAKESIARRIISREQIIYWISSFKDGNITSEKYRQQLIDTFVHAVFVYDDKIVITYNYSGENNTATISDLDLSSPPVLLESKPS

SEQ ID NO: 11376 - protein, 421 aa, synthetic construct
MKLRKIEPLKPKQKKLRVCAYARVSTDSLKQGESFENQVSTYERVIKSNPEYEFVSVYADQGMTGRSENRPEFQRMIADCKAGKIDLIITKSISRFARNTTTVLKYTRELKEIGVGVLFEENNINTLSSEGELMMTVLASFAQEESRSISENNKWTLKKKFERGEGMVNTARFMGYDKDETGDLVINKEEAKVVRLIFKMYLSGIGCHRIAKALNEEGVPTIAESSWHASTIKGMLTNEKYKGDFHIQKTYIPEGTHQSVKNNGQVQSYYVIEDHPAIISAEEWQQVQELMEYHRKQRNIGKGEKYQKRYPMSGMLVCPYCGKSLRRRYVYNRKVEWLCATYIHKGKEACKGIRIRDTELTGLSFSEPMVVEEVMINGEKHYGYTSKRAYDAGERAADRIEKESSSVLPRVNGPRRTVIKL

SEQ ID NO: 11377 - protein, 523 aa, synthetic construct
MKACLYLRYSSSSQTEQSIEGQQRVCLDYCKRQGITVVATYIDRATSASKHTEKRHEFLQMIKDAEKGLFDAVIVYKLDRFARNRYDSANYKYRLKKVGVRLISATENLTDSPESIILESVLEGMAEFYSAELAQKVSRGMQESAYKCQVTGGTIPLGYKIENKHFVIDPRTAPIVQEAFRLYDEGKSISMISEIFNNKGYRTTRGYAFNKNSFKSMFRNEKYIGVYQYKEHRVEGGVPAIVDKALFDRVQEKLKLTANAPARGKAKVDYLLSGKLFCGHCGEQMNGDTGTSAQGVSYNYYSCYGHKQHRCQKKSIRKELIEDVVVQDALTLLTPDIMNLIADATMQEYYKEIQIEGKIPALEEHLQELDAALKNITAAIERGVVPETLLNRMVELEKEKKSCQKELEYEKQKKDAITKQDVLEFLTRIAQGNIKTEAAKKRIINLFVNSVTLWDEPDGWFKITTAYNVTDVPSKTYRIKSDTGKGSDLERNGGPNKNNPNLFPIGDGFGLFVFFGKLAFAKQ

SEQ ID NO: 11378 - protein, 607 aa, synthetic construct
MRKNEEKIAIYSRKSKFTGKGESIGNQIELCKDYVRNMFGERYVELCEVFEDEGFSGGNLKRPAFQRMMADVRKRKFKAIVVYRLDRISRNISDFTGLIDELTKLDVSFVSIREQFDTSTPMGRAMMFIISVFSQLERETIAERIRDNMHELAKTGRWLGGTAPLGYRSKPVSKITIDGKERKSFCLEPVPEEIDIPKLIYDLYTQSDSLTAVEAELLRRRIKTKLGKNFSRFAIKAILQNPVYMVADEDAYDFFLGRKAEVCFPKSEFDGSFGIMAYNRTDQEKGRAMILLPMEEWIIALGKHPGIVPSKQWITVQQSLERNKSKGYRKPRNNEALLTGLIYCSCGERMYPKLTERRTGSGELIYTYVCKMKERSKRTRCNKRNANGNILDAAIIEQLKTLTEKDSAFMKQMEKSRQFYTGNREQYDTQLTKLREELAQNEKIVAGLLDSLGLVGDSIARPSMLRRIEELTEANRVIDCQIRELEGLVTANHLSDGEFDLLRQILAMFRENVDQMSVEEKRAAVRTVVRKVIWDGENAHVILFGAEDGEVDYPNIDERLSKAGEDDENDVEDLVDIECEESDKNDAFIEENGTFTAPKSRWGDGSK

SEQ ID NO: 11379 - protein, 520 aa, synthetic construct
MAKKKKPAGGIAVIYARYSSHNQRDVSIEQQIEACRKHAAELGLTIIATYEDRAISGRTDNRPAFQRLMHDAEKGKFSYVLAWKSNRMGRNMMQAMVNESRLMDCGIKVYYAEEDFDDSAAGRFALRSMMNVNQFYSDNLAEDVRRGLMDNANKCMVNGRQPLGYKRGKDGKVVVDEPAAAIVREVYTRVASGELFTDIARDLNRRGIKTADKGEWNKNSFHRLCSNEKYRGIYIYGDVRIEGGIPTIIDDPLWYKVQEALRVKKLKRNGRHRPSDEDYLLTGKLRCGKCGGYMIGMSGRSKTGDIHYYYACQNRRVGRTCDKKNIRRDVIEPAVAQAIKEYCLTDDAIEWIADKTVEYWEKADRNLQLDSIEGDLVAVQSSISNVMKAIEMGVVTETTRDRLIELEKQRTDLKSKLALAKEEVVHVDRKKLISSLLLFRNGDIHDRQYQEDLFKTFLISVYVYDDDNNGHLKIVFNAFGDNNTVDLPIDFGETDNQSAFSDGAEKFDYSLHRSTSLAIR

SEQ ID NO: 11380 - protein, 604 aa, synthetic construct
MKDVEVIKARNTLSPRARTNFEKRLRVAAYCRVSTDTEDQLNSYKSQVEYYTELIKSKPEWSLAGIYADEAITGTQVKKREDFQRLINDCMNGDVDMVITKSISRFARNTLDTLKYVRMLKDKGVAVFFEEENINTLTMDGELLLVILSSVAQQEVENISANVKKGLKMKMQRGELVGFQGCLGYDYNPADKTITINEEEAAVVRYIFQRYTEGAGGSVIAKELENLGYKTKRGSPKWADSTVIGIIKNEKYKGDILLGKTFTVDPISKRRLYNFGEEDQFYIREHHEPIISEEVFEAAQEILRRRAKPRSLNVDGKREKFSRKYAFSCMIECGFCGGTLTRRSWHSSSQYNKAIWQCVVSTKKGKKFCPESKGVDERTIERAFVESYRLLCQNNKDVLDEFMKRTEEALSESNAGKRLAKAEKDIHALEVKKNKLVDMRLEDTIDKETYDRKYLDLSSQIEQLQKECESLQDAAETESTMRKRVATFRQTLEQNEVLDTFDRHIFESIVEKVIVGGYDSNGNKDPYMIVFVYKTGFKNSVDGKNFKPLRKNSKENHSPAVLCSHASNEAESMCSDSSDDTPALRKYPASHWQLYALHLDGAGR

SEQ ID NO: 11381 - protein, 494 aa, synthetic construct
MRVVGYARVSTREQADRGYSIGEQNSRLRAYCQAKDWTLLRVIEDPGFSGAKMQRPGLQQVLEMVRRRECDAVLVWKLDRLSRSQKDTLYLLEDVFLANGCGFVSMLENFDTSTAFGRAMVGILSVFAQLEREQFKERSAIGRVGRAKAGLFHGGGYAPIGYDYYTKEDGGQGLVVNEYEAMQVREVYRLYLAGWAVHKIQVYMHERYTTKNGCWASDTTVRSVLSSQIYLGRITWAGKTYEGQHEALISQNDFDQVAARRESLKWQPAEPRAACDLIKNSPFRSTHILGGITWCARCGARYFASGNYSGRGENRKYWPYYTCYSVAKSSKKMIKDPNCKNKRWAVGKLDAIILSEISRLEFDPAALAKAAGPVDVSGVEEKRRVLEARVAEVRPQMERLLDLCQTGGLPVASVSGRLAALQKELDALNGELSGLAVPETVDRLAVAQEMLAGASAVIENGTPEQKRALVHSLIGRIDIDGEDITIHWLFAPEN

SEQ ID NO: 11382 - protein, 448 aa, synthetic construct
MERIIQKVTPPARKKAPKLKRVAAYARVSSGREAPLHSLSAQISQYSGMIQKTPGWQYAGVYADEALTGTKDSRGEFQRLLADCRAGKIDMIITKSVSRFARNTVTTLRTIRELRLMGVDVFFEEQNIHTMGEDGELLLTLLAAYAEEEARSVSENQKWRIKSNYEQGLPWSITMYGYRQVNGRLEVVPEEAEIIRLAADLYLEGYGRCKLEDAFAAVNIKGRHGANMGGNSIVDLICNEKIVGDMLLQKTFVVDPITKEVRKNNGEKPQYFVEGSHEGILDRETYEKVLAERARRAAAYKPRSGSYERNRFPFSGKIHCGKCGKSFTRKVLNGNTPYEKRGWLCRTFNQKGKARCDAKQIPEEILKRVSAEAMGLPEFDEAAFAAKVEEVQVPENGVLVFVFYDGHTVTKTWDNPSRRHSWNPENRQRARELALRQAAERRLAKCQQ

SEQ ID NO: 11383 - protein, 537 aa, synthetic construct
MPAVTAARVTVIPAKKDRLPINVLSNEARKLRVAAYARVSTNNEEQLTSYEAQVDYYTRYIQSKDEWQFVEVYTDEGISATNTKKRDGFNRMVADALAGKIDLIITKSISRFARNTVDTLTTVRKLKEKGIEVFFEKENIRTLDGKGELLITIMSSLAQEESRSISENVTWGQRKRFADGKVSLPYRRFLGYEKGPDGLPVIVESEAVIIRLIYRLFLYGKSPSAIATYLTDEGIPTPGGKKVWRAKVVESILTNEKYKGDALLQKKFTVDFLTKKQKVNEGEVTQYYVTNSHPAIIEPELFDLVQYELKTRKTDGRFTSCLHPFSGRIICGECGGIYGSKVWHSNTENRSLVWQCNEKYRGQHCSTPHLTEGEIKAAFLAAFNIVLGNRDEIIEAYEEVIAALTDTADLDAEQETLENESEVVLGLIQKIISENAQTAMDQEEYNRRYDAYSERFEAARKRLAKIAELRQERNAKNTRIRLFMENMNNHQELVQSFDEELWYSTVDYVTVYEDKRLVFTFRDGRQVEITAELWRAA

SEQ ID NO: 11384 - protein, 464 aa, synthetic construct
MARSVTVIPARSQKVRTGHKAVQEKKIRVAAYCRVSTDQEDQLHSFEAQVEYYTKYINEHENYEMAGIYADEGISGTNTKKREQFKKMIADCEDGKIDLVITKSISRFARNTQDCLAYSRKLKNLGIGIIFEKENINTLDSTGELLFTILSSLAQDESRNISENCKWGIRTKFKNGEMHLNTFKFLGYDKDENGKLVINKEQAKTVRRIYRDFLIGINPAQIAKELTEEKVPGCLGQTKWYPSTVTGILKQEKHMGDALLQKTYTADFLTKRQVRNNGEIAQVYVKDSHKGIIDKQTWNAVQEEFNRREKFMESHGTDRYSYGADCMPFCEKVFCGECKSLFTRHSWSSRGIVQWQCKNHRKDGKVACTNAYVDNADLEKGFVKAFNRLVTDRDKHMERWQQMKSDGTPLEKIRAGQMMEAVGNEPLTRFVPEIAQLVLCEVTVLGAKKYEFFFLEGSRVKVSV

SEQ ID NO: 11385 - protein, 529 aa, synthetic construct
MSRTAARSVTVIPPTINPLTHLSKVAIQKRRVAGYARVSTDSDEQFTSYEAQVDYYTQYIKRNPEWEFVKVYTDEGISGTNTKHRIGFNEMIADAMSGKIDLIVTKSVSRFARNTVDSLVTIRKLKEKGVEVYFEKENIYTFDGKGELLLTIMSSLAQEESRSISENVTWGQRKRFADGKVNLPYKQFLGYRKGADGFPEVVPEEAIVVHRIYTRFMEGLTPGAIAKELTADGIPTPSRKQRWQTSTVESILQNEKYKGAALLQKCFTVDFLTKKRKVNEGEVPQYYVEHSHEPIITPEEFDKVQTELARRKQISRQYSGKSIFSSRIVCGDCGSYFGSKVWNSTSKYRRVIWQCNGKFKGEHKCETPHLDEETIKARFVAALNVIIESKDNILEDCRLMQATLTDCTGIDTEIETLFEEIEVVTELTKHCIAENSQTAQNQEEYSARYNGFVERYEKAKAQLEQLRTTKAAREAQAEAIGAFMFEVQELDTITEFDEKLWLTTIDTVTVHADGRMTFKFQGGKTLTSY

SEQ ID NO: 11386 - protein, 434 aa, synthetic construct
MERVVERVDALIPAQPKVLRVCAYARVSTGKDAMLHSLSAQVSYYSKMIQSHNGWMYCGVYSDEAVTGTKRERAGFQHMIEECRQGNIDLVITKSISRFARNTVTLLQTVRELKSLGVDVFFEEQHIHTMSADGELMMTILASYAQEESLSASENQKWRVRKAFENGEIINLRFLFGYDITPDGIRVNEKDAAIVREIFARFNGGESMSSICRDLDARGHKGVLGGTWCAERMRNTLSNEKYLGNALLQKRYRNNHIEKKLLPNRGELPMYYAEGTHEPIIDQATFYKAQERLRMLAQQAANRKKPTRSVFSGLIHCGLCGNTYKRVTYRKKHYWNCTTFQTKGKSECAAKRIPEETLEVLTCEVLGAVSFDPDMVRSKITAIRAEKSNMVVFCMDDGSEIVKRWTDRSRAESWTPEMKEKARQRALQARRKKK

SEQ ID NO: 11387 - protein, 516 aa, synthetic construct
MARKKKVSPGNRLVAYYRYSGGSQQTEQSIEGQRRDCEAYARQHGLTIVHEYIDRHISGRGVESRLAFQQMIADSSKHLFDLVICWKTDRFARNRYDSAVYKKKLRDNGVRILYAAESSVEGPEGIILEGLMESLAEYYSAELAQKMRRGMRESALKGKAINPNRPLGLTTDEHKRFIIDEKNAPTIRFIFEHYAAGESSASIVDQLNAAGLRTSKGNSFNKCSIPRIIQNEAYHGVYICKAYDVRIDGAIPAIIDDDLWKRAQKMLTLNKQHRAPHSSHADYLLSGKLFCGCCHSLMRGISGHNCRNDVYYYYACGNKADGGTCKKKNIPKDVAENLVVNAICENILRPDTLEDLADAIAAAQQADVNQPDPERAMLEQNLADVHRKINNIIESIENGTASSRLSARLADLEQQESTLNYQLESLKEIHPPVLDRERILFLLEQFLISPNERTEDYNRRIIDTFVNRIEITDTEMLIYFNLSEASASEKQKNSQPNSCSTGNHLVRVARIELTAS

SEQ ID NO: 11388 - protein, 440 aa, synthetic construct
MIADALAGKVDLIITKSVSRFARNTVDSLSTIRKLKEHNIECYFEKENIWTFDSKGELLLTIMSSLAQEESRSISENATWGHRKRFADGKVSFAYSRFLGYEKGPDGTIVVVPEQAKTVRLIYKLFLDGMTIHTIAGELTKRGIKTPGGKDKWNQSTVRSILTNEKYKGDALLQKSYTVDFLTKKTKTNEGEVPQYYVENNHEAIIDSQIFELVQAEIAKRNKGKEHYSGVSIFSTKVQCAECGGWYGSKVWHSNDKYRRIIYQCNNKFRNKTGCSTPHLTEYEIKEYFIKALNRLITEKDEIIANTEMIQKMLCDNSELEAKRDVLQEEIAVTVELTQNAVAENARVAQDQDNYNKRYNALVERYDRLKAQYDEVSTAISDNEARYEQMGRFITVLKDQEGVITEFDDALWSSLVEKIVVKSKEDVTVVFKDGTEMKAE

SEQ ID NO: 11389 - protein, 511 aa, synthetic construct
MLRAALYARYSSDNQRYESITAQLRASREYCKQRGYIVVKTYTDEAISGTSVAGRDAFQQMILDSSDDIFDVVIFHKIDRNARDEIGYYTNVDRLRKNGVRYEYSAEGIDVTTTNGKLTEGIKVAVAAWYSRNLAQEVRKGQKENALQAKFNGGRPPLGYKIVNQRYEIEPREAEAVRLIFDMYLHGSGYIDIAAELNRRGFVTRNGKPFAKNSLYEILGNERYTGTYIFNRIVTDDFGRRNNHKINDAAIKIPGAIPAIIDAETFAAVELKRQKNKHRSSSFRAVEKYLLSGKVKCGMCGTPMNGHRVKMKDRVYTYYCCNKSYLPAAVKCRQKQAGKEVLEKAVLQVVAENILSAPARQQIVKELAVQIAHIGDTTREERKTLKAALAGAEQRLANLYKIIENGIFDDFDLERLNKTKAEIMDIKNKISNLPENADCLMLNVADIENAFKRLHAALLAGDKHAQQYCIDIFVTEVTVNEETIDIRLNVNPQQKFSVKMVETSGIEPLTS

SEQ ID NO: 11390 - protein, 559 aa, synthetic construct
MSKTVAIYVRVSTGKQADRDSIPFQIQECSNYVKHFLKTENFEVFKDAGCSGKNTHRPEYQRMIEKVKSGMISHVVVYKIDRISRNLVDFSIMYNDFKEHKVAFISLNEQFDTSSAIGEAVLKIILVFAELERKLTGERVRDIMMNRALEGKWNGARVPYGWDWDAKKQCPVHSDAESEYARMMYRLYDESHSTCVVRDYCNAHDIPTKRGGEWTSKTVADFLRNPMNVGDYRYNYRKSARGKRNDPSEVIYVKDVFPPLIDRELYERVTHQMDLNTFGLGKDGRKVVSKKTHVFGGLIVCGLCGAFYHSDADVVRADGFRPSNYRCGAHNKKIHCKAKGTSDVKLGPFIFNYISNLVKASKSKKLLHSVSDLEQILLTGPEFEQVAGIADIGLDVTFDTIMHGFKPKRYTAAPYTVIRSGDSDALTAKRDKTIRALERLKKLFLFEDDAMSEKEYLMSKRELEGTLSDIENELSALEADTADTKYDDMSFISTASGFLIAHQIASGEHINYRELACAVDAKVLKDFVNSVIERIVLLDGRVASIEFKNGLVHEFLYRE

SEQ ID NO: 11391 - protein, 519 aa, synthetic construct
MADFEHVIIYLRKSRSDDPATTVEEVLFRHENILQEYAVREWGARIPEDRIYREVVSGETIKDRPVMQHVMKILETGLVSGVLVVEPQRLSRGDLQDCGHIINSLRYTNTAVITPPKTYDLSDEYDRKFFEMELTRGNDYLEYTKKILNRGRIASVKAGNFIGNSAPYGYRKICVGTGKEKYYTLEIVPEEAEAVRLMFDLYVNKDYGFRNIAHALDMAGYKPRRSAEWSPAAISCMIANETYIGRVVWNRRKTIKKWENDTIVRTRPRQSEYISVPGKHPAIISDELFYAAKAKRNRTPRIKRYVQLLNPLAGLLYCGTCGHAMSRKRTVDKKYGSVSVSFLCNNQSNCHTKSVMYDAVIDRVKETLRQSIEDFEVKVNNKDETDIAYHRAMIANLKSELKKLKEKDMRQKDAYEDGIYTKEEFVVRNAKLAEQISIAQMKLDDAESSTSQLVDYQERLVRFRECLEALDDDAISAADKNTLLKSCIDKIMYYNDSPSLPGIGRYVDNPFRLEIFLKL

SEQ ID NO: 11392 - protein, 552 aa, synthetic construct
MAYRKITDIRDTIGMRAVFYARVSTAEEEQLNAIELQIEENRGCIKDHGWKLVGEYIDRSKSGTMVKGRDDYQRLYEDLYEDLFDIVVIKDQERLQRNTLDWYLFINRVVQTGKLLFMYMDGKFYSPDDALITGVRAIIAEEFSRNLSKKLHNYHDHRIEKARQGQEIALQGSGNVYGWDKKDGKYYINPEQAKVRRLMCEGIMARKGSTLIAKELNEAGYRNTVGKPWKPMDIPKFVYDCKNVGTMIINKERHDFESKQTIKLPKEEWVYVENALPPIVTQEEWDLICKIHEERVIATGSDKRGKKTSGYSFSGKLVCGICGAPYWRKQRVSKDEYWVCSTKQTKGRKTRKRDSTMGKAGEINPLGCDNENISYNSLMEIMGVVSERLQANTDTIKQDMINWLTKLRKQLLEANGGHTEADLQRELSRKSKLLDAYLDGILNKQEYQKKAEELDERIIQLKAETEKNKANSGDIAEIDKVLANIDEEVARYVDGNEKLKVEYLLEHLEQVQIFPDKVIVIVPILSDGIVVEKTQYVSREKWFGEKYNNSFF

SEQ ID NO: 11393 - protein, 659 aa, synthetic construct
MRKKVYIYTRVSTSMQVDGYSLDAQKDKIRKYAEAFDYDIAGEYEDAGKSGKSIEGRAEFRKMLEDIETCKDDVSYVMVFKLSRFGRNAADVLNSLQLMQDYGVNLICVEDGIDSSKDAGKLMISVLSAVAEIERENILVQTMEGRKQKAREGKWNGGFAPYGYKLVNGELIINEEEAQAIRIIFDKYVNSTMGCNGIAKYLQQQGINKVERQNGKNPYFAASLIKQILKNPVYCGKIAFGRRKNEKVQGTRDTYHIVAQSEYLIADGIHEAIIDDELWQKAQDKLAAQAKKYEHVNKGKDEKIHLLSGILKCPICGAGMYGNKSTKNRNGIHYKDYFYYGCKHRGGERGHKCTYRKQLQEEKIDGAVAEIISKLISNPKFATMMQQKINMEVDTTEIDKELSNYQKMLGQFIGTKRSLEKQIDSLNVSDKHYERKLLDLQDRLDAMYDKIEEEEAKLEECKAKKRVIESDKMTADNIYKVLIYFDKLYAVMDDADKRALLYSLIDEIQVFEEEQANGQWLKSIKFKLPIIDGDMNLSLDKDSHIETVVLLSHKKPDGHINVKVEFGKGEGKVPLDNIAKRAEGYKPKERVTYKMIKEYIEAKYGFKVHTAYIAKVKRDLGLPMYDAPNAVEELKQPRKHPTAEKVEAIKDALKHFEVI

SEQ ID NO: 11394 - protein, 507 aa, synthetic construct
MKGVIYARYSPGPNQTDQSIEGQLRECKQFAEENNITIVNTYADKKQTGRNDNRVQFQKMLQDSKKKQFDYVIVWKIDRFGRNREEIAKNKAILRMSGVKVLFAKEHIPDGPEGIILESVLEGLAEYYSANLSQNIIRGMRESAMKCKCNGSGLPLGYNVDKEHNYIRNNEEATLIKMIFKMYDDGSKINDICKYLNAHNYKTKRNSKFTHTGVSRILHNRQYIGEYRWKDIITPNGMPRIIDDELFERVAKRLERTKRAPSASRGDVKFLLTGKLFCGYCKSTMIGDSGTGKSGRKFYYYNCRIKKNKHTCKKKTVRKDWLEYEVARITANIVLQDKIIDYVSDKVVEIQKKEHEDKSNLNYYTVKLKETNSAIKNIMKVIESGIFTESMRERLLKLEDERSTYETEIAKEEIMRPTITKEQVVFFLKQFKNGNIEDKDYQAKLIDIFVNKVILYDDKIIITYNYSGEHNETSAKIIEEAAEELINEQEKCSDKLLSSPPRYDKSA

SEQ ID NO: 11395 - protein, 581 aa, synthetic construct
MAYRSTITTPSAASRKVKAALYIRVSTLYQIDKDSLPFQRQELINLAKYMLGTDDYEVFEDAGYSGKNTDRPSYQRMMTRIRQKEFSHLCVWKIDRISRNLLDFAAMYDELKKYNVTFVSKNEQFDTSSAMGEAMLKIILVFAELERKLTSERVMGVMLDRAGKGLWNGARMPLGYKWDTNAKFPVIDADEAVTIRFIFDKYEEVKSTLQISRILNRNHIKTKRGGEWTSKTVNDIVRNPFYKGTYRYNYRESARGAIKNEEEWIIVPNALPAIITEEQWTRCNALMDSHHETKDTSSFRVCHTHIFAGILKCCDCGGGFSSNRDRPRLSGWRPSTYRCTRSAKMQDCPTFGISDVVLGPFIFNYIANFVRLQRKGTNYTVESIEKALLSGKPFENIAGIDSTSLEETLLALKQYNSSSNAANYSPDLLEELPNQSDNGSNIDIELLRQEENKYKTALQRLLDLYLFDPTAMPQKDYLLRKEELEGKLQEVQASIKRNSASTPEVAGATDISFIKKASAFIISQRILSKQDIDFEDLIQKCTPELLKDLVNSTIKEIGIRGRRVEYIEFQSGLRHTFIYKD

SEQ ID NO: 11396 - protein, 571 aa, synthetic construct
MMQDRTAPASTNRVAIYIRVSTTHQIDKDSLPMQRQDLIAYAKLMLNTDDYVIFEDAGYSGKNTDRPKFQEMMSQIRQGAFSHLLVWKIDRISRNLLDFATMYKELKDLGVVFVSKNEQFDTSTAMGEAMLKIILVFAELERNMTSERVTATMISRASNGQWNGGRVPYGYNYDYETKDFSINPIEAEIVRLIHDKYEEMRSLVRESRYLNEKGLRTRAGNLWNPVSLHIILHNIFYCGDYRYNVLKEGDRQKVKDESEWITVEDHHEPIISREQKERIIAMLDANKRLDRKRNTYKSEKYVHVFAGLLYCGNCGKPMGAMPAAAKKDWQYSKYTCPTRRKLASACNGKFTSDPIVGEFVFNYVLNMLNVQKNFADIHSPEELQAALLIGNTFSYIDHIDEDGLNDLFNMLSSGKIKGTVFGKSTKLKKKKVVSELSKLRNEKQKIERALDRLTKLYLYAEDAMPESEFIIQKSKLTEALDEVNEQIGFSNTDEWNQSVSDEEFVRRASEFIIAQKLTDRNYVSYKRLATSVDTAVIKTFVQGIIDSIIMDAGQVKQIIFKNGLSHTFIFK

SEQ ID NO: 11397 - protein, 525 aa, synthetic construct
MTKKVTTIPALLNKQSTNQVGIVKKRRVAAYARVSTDQEEQLTSYEAQVDYYTNYIKSRDDWEFVDVYTDEGISGTSTKHREGFNKMVKSALDGNIDLIITKSVSRFARNTVDSLTTIRKLKDIGCECYFEKENIWTFDGKGELLLTIMSSLAQEESRSISENVKWGHRKRFADGKVSVPFNNFLGYKKGEDGNLVIDEEQAMIVKRIYREFLSGSSSVAIAKGLTNDGIETPGHKQKWYATTVRSILTNEKYKGDALLQKHYTVDFLTKKQKINNGEVQQYYVENNHPAIIEPDVFEMVRLEIDRRLMLKGKYSGTDILTAKIRCGECGGSYGAKVWHSNDKYRRVMYQCNSKYSGKEKCKTPAIRSEDIESRFVNVVNILIESKDEIISNLEKVLDKICNKKELLEEKEKLENSLTEQVEKIQDLIDINSRVAQNQEKYKKEYDALIKNYDETKCKFEQLEIKLSQQAAKHQMIKDYINTLKKQEKLLTKFDGLVWGSLLESATIKDKDVIVFKFKDGTEING

SEQ ID NO: 11398 - protein, 468 aa, synthetic construct
MVKEINNNMNDFTKKVEEVALYIRVSTEEQAINGDSLRTQREALTKFALANHYHIYGIYEDDGFSATNLNRPALQRLLEDVRKNKINRILLTKLDRLSRGVRNYYKVLDVLDAHCVFWQTIFEKYDSSTASGRLHINIMLSVAENESAQTSERIRSVFNNKIHQKEIISGKIPIGYKKEEKKLVVDEDKKALVIDAFNFYLKSGSVYKTFEYLALFDPSMNYPRTARLLANPLYIGTKVCKYGSIENYCEPIISNKTFNEVQNLLKKNQRKRDNSDHEFLFSGLLRCNECGYKMSGKYCKNFPTNCTFYYLCSNARLKKKCNMLKQLNETKIEKKLLEQIVPEINKYIDNNNILEQEKVQIRDISKERDKVNKQLEKLRDLYVNDLIQIDHYEKQYKELTSKLDSLKEEEKPVEEKKTVNYDEFRSFLSRDFVTLYNSLSRTEKRLIWASVIDTIYIDDNYNLRIVFI

SEQ ID NO: 11399 - protein, 453 aa, synthetic construct
MECVAYMRVSTEKQAEEGNGLDSQKRDIELFCRKNELVVSDWYVDDGYTGANMDRPELQRLINDCIKKRVKCVVAFKLDRLSRSMIDGLYIIERVFQPNQVLFKCVHDSVSYDSPMEQAYTQMMAVFAQLDKNTMMLRMRGGMLERIKQGYWIGGANTPYCYNYSKEKGILIPIPERKEQANRALDMFIGGYSDLYIKESLGFHSEVLVRNVLTGVVNIGMIPYKGNVYQGLHEPIFDKERFELAQEIRKSRRKNKTACHTDANLLTGLCYCGVCGCKMRYQKWTHGKHKIYCCSRDKAMKYLPNFNPNCNNSLEWAADIEKQVESEILKISLNLSECKPIEKQSKLEIMQSQFEKEQVKLKRLYVLYSDGNDTVLEMIKNTEKSISDMKEKITEEEKNERNSQKKEVVYENIKKLADVWAHIDKKEKNNILKSIISRIVIVNGDVEIQLKNF

SEQ ID NO: 11400 - protein, 520 aa, synthetic construct
MPRKKAPAAEAPRLVAYYRYSGGSRQTEQSIEGQRRDCEAYARAHGMTILREYVDRHISGKTDDRPAFQQLVADSAAHTFDAVICRKTDRLARNRYDSAVYKKKLRDNGVEILYAAESNISGAEGIIIEGLMEALAEYYSAELAEKARRGMRESALKGKALGSSRPLGLTVDADKHYIIEPTGAEAVRYIFEQYAAGLSSSSIVERLNAMGLRTSHGGPFNKSSINRIIQNEMYRGVYVSKKFDVRIEGAIPAIIDNDLWKRAQNMFERNRQSRTPHASRADYILSGKLYCGECGCLMKGVCGRSSGNGQMYHYYACPGRSIGRACTRKNIPQDELEAMVVNSVADLLLEPELLEQIADAIVELQQAEAARPDPEKQALEKSLSDVRNKIQNILSAIENGTSSAALSARLADLEQQESTLSYQLSSLTAKKPLTFTRDQILFLLQQFRVSPSERTKAYCRRLVDTFVDHIELTNTELILYFNISDETIDKNKKAPRSNPSKESSTEKRLVRVARIELTAS

SEQ ID NO: 11401 - protein, 548 aa, synthetic construct
MYKEYPKFYYYESLEYGRKSRMDDPLLSVEETLQRHSEIIDEYARKYLGGSIPEENRYMEVGSGESLKDRPEITRLLKAIENPAIKAIIVVDVQRLSRGDLEDAGKLIRLLRYTNTCVITPHKIYDLRDEYDRDAFERELKRGNEYLEYFKKIQARGRLASVKAGNYVGSVAPYGYDRVERYDEVLKKNYFTLVERKDQADVVRMIFNWYCNDDIGVTTICRRLEELGVKTKTGCSTWKPSIIFGILENVHYIGCVRWNWRKTIKVIENQEIKKLRPKAKVDEYLVFEGKHDGIISEELFYKARMIKGKRHRTKQNLSLKNPFSGIMFCTKCGSKIGYNTYNRNGVEFAPPKLVCNNQVHCKTGSVDYNEVLDYMCKVLRDCIEDFKVRIENDQDDSLKLHKDLIERLTKQLKDAEQKEQDQWEAQYDPDPNKRLPQHIFEKLNKKVLAEKEEINKALDKAKGSAPKHIDYKDELIKTTEALKALEDADLDAKITNQYLKSIIDRIEYDRPQIVRINKKNAEIFETDVRKGLQYHVAPYTIRVKLKCE

SEQ ID NO: 11402 - protein, 595 aa, synthetic construct
MPKISKIEPTVPAIKQLKKVAAYARVSMQSERMMHSLSAQVSYYSKLIQKNPDWEYAGVYADDFISGTNTVKRDEFKRMLTDCEEGKIDIILTKSISRFARNTVDLLETVRDLKSKGIEVRFEKENINSMSGDGELMLSILASFAQEESRSISENIRWATKKRFEKGIPNGRFKIFGYRWEGDKLVPVPEEAEIVKRIYQNFLDGKSRLETEKEFAAEGITTANGCRWVDSNIKVVLTNITYTGNLLLQKEFIEGPITKRRKKNRGEMPQYFVENTHEPIIDMETFRYVQDEIARRKELGALANKSLNTCCFTGKIKCPHCGVSYMHNKRTDRGFMEYWNCGSKKKKKIGTGCPVGGTINHKNMVKACTEVLGLEEFDEEIFLQEVDHIDVPKRYVLEFHMTDGRVITKDCPNTGHKDCWTAEYRAKTSAKRRKNGTNCKGSSCFTGKIKCKNCECNFRRATQPSATAESGKVNYWRCSEHSNGCQTAGLREDVLMPLLADALGMAEFDDGLLRKIVDYISVLTDKDLEIHKKDGTVTAVIYAPPAPKRLPRTEKQKEHMRSLMKEKWTPERKAEMSERMKQMRKERGENWRKEK

SEQ ID NO: 11403 - protein, 527 aa, synthetic construct
MAQRKVTAIPATINKFTATPVNSRKKRRVAGYARVSTDHEDQVTSYAAQVDYYTNYIKGREDWEFAGIYTDEGISATNTKKRDGFKRMVADALAGKIDLIITKSVSRFARNTVDSLTTIRKLKEHNVECYFEKENIWTFDSKGELLLTIMSSLAQEESRSISENVTWGHRKRFADGKVSFAYSRVLGLEKGPDGNIVVNQEQAKIVKLIFRRFLEGMTPHSIAAELTEMGIKSPGGKDKWNGATVRRMLSNEKYKGDALLQKEFTVDYLQKKTKKNEGEVPQYYVEGNHEAIIEPSVYDLVQVELAKRSKKSEARYSGVSIFSNKIKCAECGSWYGSKVWHSNDKYRRVIYRCNHKFDGNRKCETPHVTEEEITAAFIKAINTLITERDEIIENIQLIRQTVCDVTALEQEQDKLRSEMEIVVELTQSCVAENARTAQNQENYQKRYDGLVERYEKVKSRYDATQEAIEEKQAHYEKLGIFIDILEKHGAPITEFDAGMWGSMVEYITVDKNKNMTVTFKDGSEVQA

SEQ ID NO: 11404 - protein, 464 aa, synthetic construct
MARSVTVIPARSQKVRTGHKAVQEKKIRVAAYCRVSTDQEDQLHSFEAQVEYYTKYINEHENYEMAGIYADEGISGTNTKKREQFKKMIADCEDGKIDLVITKSISRFARNTQDCLAYSRKLKNLGIGIIFEKENINTLDSTGELLFTILSSLAQDESRNISENCKWGIRTKFKNGEMHLNTFKFLGYDKDENGKLVINKEQAKTVRRIYRDFLIGINPAQIAKELTEEKVPGCLGQTKWYPSTVIGILKQEKHMGDALLQKTYTADFLTKRQVRNNGEIAQVYVKDSHKGIIDKQTWNAVQEEFDRREKFMESHGTDRYSYGVDCMPFCEKVFCGECKSLFTRHSWRSRGIVQWQCKNHRKDGKVACTNAYVDNADLEKGFVKAFNRLAGEREKHMERWNAMKADGTPLEKIRAVQMMEATENGQLQKYVPEAAQLVLEEITIFGAKKYEFAFLEGSRVKVSV

SEQ ID NO: 11405 - protein, 550 aa, synthetic construct
MKQSDKITALYCRLSRDDESQGDSNSIVNQKAYLSRYAKEHSFRNTEFFVDDGYTGANFQRPDWQRMMALVEEGKIGTVITKDMSRIGRNYLEVGMYTEITFPQNNVRFIAVNSGVDSANQQDNEFVPFVNIINEYYVRDGSKKVRTSLRLKGESGEHLTTIPPYGYVKDPDNSEHWLVDPEAAQVVKRIFSLCMDGNGPTQIARMLKEDHMLTPTVYQDRQKRKVRCALPDNPYNWNGSTVAAILERMEYCGHTVNFKTHRQSYKIKKTIENPPEQWKIFRNTHEAIVDEDTFQRVQELRRNKRRPARTGKSNLFSGVAYCADCGEKMYYCTSRNFEERQDHFVCSTSRKKGKDVCGTHFIRAVVLEKGVLKFLQILLWYISDCEDLFRDKLGAKRKEDFKKELAAKRRQLTQAQRRMEELDRLFKRLYEDNISGKINDSRFEKLSADYENEQTELTEKMQLLEQEIAQQEEEADSIEQFILRAKKYPNLQELTPAVLHDLVNKVYVHAPDKSSGQRVQDVHISLACIGFLPESIIAEMLTHASKSRTA

SEQ ID NO: 11406 - protein, 492 aa, synthetic construct
MAAIDFNNVVDLYIRVSTSEQAEEGYSVAEQEERLRSYCAAYNYTINAVHVDPGFSGASLDRPAIKKVMYDVEHGRCKKVIVWKLDRLSRSQKDTLILLEDVFLANDCNFISLMESFDTSTPFGRCIVGILAAFAQMERENIKIRTMMGRQARIREGHFHGSRCPLGYKFQYASDGTLLSNDLVVDPYTSKLVQEVYRLSLGGSSFSSIAAHMASIYGCSLYDWSRNTAIRRILSNPIYMGKVKVGNELYPGIHEPLVLETDWYMVAAMLKHNKEQQKRTYAYQISGGAYADNLLTGLLFCGDCGARMYARRVSQNKKKYICHSVAKTSPAMIRSDHCTNRLHPFTVHQLDEMVIDEILKLSLDRPGFDMLCDQPDASSKSEDKEIYEERLAEVNRQLDRLVKLYQTGLIDLDNISARLGDLNQEKNFLEGNLATINEVTPAEIRETAWKSIQSLQSVLNNGDMGEVHRIIHTLIDKVVVLNTDVTIYWSFC

SEQ ID NO: 11407 - protein, 499 aa, synthetic construct
MNREYCESKFSGQVDSWQQFSDEDFTGANTSRPDLQRMLSFIKGGFCDVLVVYQLDRLSRDVRDFANIYALLEEHGVMFISIKENIDTTTPIGRAMMYVTVVFAQMERETIAARVTDNMLGLAKKGYWTGGNPPVGYVRKHIVVNGKKHCSIEVDPDGARYVTQIFDTFLAYNCSLQGMETRFKNQGIRTQNGKFFSTAQLHKMLTMPYCVEATPEVYDFYAAKGCIMDPGSPREMWDGSAGVIIYGRSTEKNKKHQLQPPEKWTVCLGKHKPFMPAEKWLAVQSRFTQNKCIKDAKWPVPLLKGVLRCKCGNLMQVSRKKKVDGTCSSWYYCRKRMRQGVDACDMGHIKCDLLDEEVLELFRGITADPALIQKFVKAEAPADVTDLKAAQARVSACERKIGRLAASLALAEDSAASKYIIAEMERLDVELGALKREASLAEMESHRAAASAKDAKATAAEIAKLIHGLDGFDDKEKNAIARAVIQECTWDGERLFITL

SEQ ID NO: 11408 - protein, 485 aa, synthetic construct
MRGVIYARYSPGPHQTEQSIEGQVADCQQYAEEHGIDIIEIYADRHVSGKSVVGRDEFQRMLRDAEKGRFDCVLVWKIDRFGRDRQDIAMGKMALKRAGVKLMYARESVPEGPEGIILESVLEGLAEYYSADLRQKVIRGMKETAKKGQYCGQSLPIGYKVDAERHIVVDEREAAVVREAFKLHIAGGQIRDIVQLFADRGIMGRRGKPVSNAVVYRMLRNEKYLGEFYIQDVKLNVEPIIDQATFLEAARHFKTSRNNAAGRAKVNYLLSCKMFCGYCGSMISAEAGTGKLGKVYRYYKCGDKKRGKKCELKPFPKDHLEDAIILATVNDMLTDEMIEKLTVRILEVQEQENADDPVVGLRRRLDSNKKRQRNLLDAIEEGGARGLVSRLAALEEEEERLVLEIQRAEIKRPRLTHEVVEAWLRSFRVGDVTDDDFRARLVDTFIARVELRNDEALIFYNIREKGPHSRVRVRPEWWTWRDSNP

SEQ ID NO: 11409 - protein, 494 aa, synthetic construct
MRVVGYARVSTREQADHGYSIGEQNSRLRAYCQAKDWTLLRVIEDPGFSGAKMQRPGLQQVLEMVRRRECDAVLVWKLDRLSRSQKDTLYLLEDVFLANGCGFVSMLENFDTSTAFGRAMVGILSVFAQLEREQFKERSAIGRVGRAKAGLFHGGGYAPIGYDYYTKEDGGQGLVVNEYEAMQVREVYRLYLAGWAVHKIQVYMHERYTTKNGCWASDTTVRSVLSSQIYLGRITWAGKTYEGQHEALVSQNDFDQVAARRESLKWQPAEPRAACDLIKNSPFRSTHILGGITWCARCGARYFASGNYSGRGENRKYWPYYTCYSVAKSSKKMIKDPNCKNKRWAVGKLDAIILAEISRLEFDPAALAKAAGPVDVSGVEEKRRVLEARVAEVRPQMERLLDLCQTGGLPVASVSGRLAALQKELDALNGELSGLAVPETVDRLAVAQEMLAGASAVIENGTPEQKRALVHSLIGRIDIDGEDITIHWLFAPEN

SEQ ID NO: 11410 - protein, 584 aa, synthetic construct
MRRLPLQHSTLFGYGQAKAPALVRCSAGDNMECSTKPDKENFMLAGVSIPRSLHMGNRPEGSVIMPRKKSTAADAPRLVAYYRYSGGSRQTEQSIEGQRRDCEAYARAHGMTILREYVDRHISGKTDDRPAFQQLVADSAKHTFDAVICWKTDRLARNRYDSAVYKKKLRDNGVEILYAAESNISGAEGIIIEGLMEALAEYYSAELAEKARRGMRESALKGKALGSSRPLGLTVDADKHYIIEPTGAEAVRYIFEQYAAGLSSSSIVERLNAMGLRTSHGGPFNKSSINRIIQNEMYRGVYVSKKFDVRIEGAIPAIIDNDLWKRAQKMFERNRQSRTPHASRADYILSGKLYCGECGCLMKGVCGRSSGNGQMYHYYACPGRSIGRACTRKNIPQDELEAMVVNSVADLLLEPELLEQIADAIVELQQAEAARPDPEKQALEKSLSDVRNKIQNILSAIENGTSSAALSARLADLEQQESTLSYQLSSLTAKKPLTFTRDQILFLLQQFRVSPSERTKAYCRRLVDTFVDHIELTNTELILYFNISDETIDKNKKAPRSNPSKESSTEKRLVRVARIELTAS

SEQ ID NO: 11411 - protein, 573 aa, synthetic construct
MAKVKLPDKPRVAIYTRVSTLHQIDKDSLPMQRQDLINYARLILNTEDYVVYEDAGYSGKNTDRPKFQEMMQQVRLGMFTHILVWKIDRISRNLLDFATMYSELKQLGVVFVSKNEQFDTSSAMGEAMLKIILIFAELERNMTSERVTAAMLSRAANGQWNGGRVPLGYDYDPETKTFTINESEAAVVKIIHDKYEQERSLVSLARYLNGHGYRTRTGCTYSPSTLLIILRNVFYCGDYRYNVLKDGDRQKRKKESEWITVKDHHPAIISREQKDEIARILKENRRLECERRGIYSKKKNVHVFGGLVICGNCDHAMTSTIRPADQDGIRWSVYVCPTKRRSEYLCKGRATSEVVLGEFVFNYILNMLNVQKNFDSINSVEDMEKMLLSGSTFRDVDGIERAGLDDLYNMLASGLTEKAPFDSSVEVRKKPVVSDIELENLNTEKTRIERAAERLQNLYLYSDDSISQKDYIIQREKLMSQLAEVNEQIGMVMSNADEKDVSDEEFVHAASKFILTQKLEGRTYIYYKRLATTVSREVLRSFVMSIIENITIYDGRVQTIVFKNGLSHTFILK

SEQ ID NO: 11412 - protein, 581 aa, synthetic construct
MSRTTNKRPGKAKSGLSRKQKVAIYIRVSTLYQVDRDSLPMQRKDLIAYASLILGIEEYEIFEDAGYSGKNTDRPAFQEMMQRIRKGEFTHVLVWKIDRISRNLLDFAEMYEELQDLRVTFVSKNEQFDTSTAIGEAMLKIILVFAELERNMTSERVTATMISRANSGLWNGGRIPFGYDYDPDKTAFSIREDEEKVCQMIKNDYMEHKSLVHTSRMLNASGYKTRAGAEWSPTAVWIIISSPFYAGIYRYNRYKGTERRVENPEDEWIMIQNHHPAIFSLEEHEKMLAILDENSRNRRSVGQKHQTERVHIFGGIAYCGKCGSKMVSTPGRLHANGYRPTNYSCPKHRKTKECDNPTVSDTQVGEFVINYILNMLGAKKKFSTIENPEDLERCLLYGNTFSEVEHIDSNGLNEYFNLLSRYSSDDSYTFSVKKSRKKKAEVDPEVEALRKEKEKQERAMKRLQDLYLYSDTSMSEKDFIIRKTEISKRLEEINAMLGMVAKNSEPSLSDEEFVRQASHLLISRELQNRQYIYFKNLAQNVSPEILKAYMETVLDSVLLVDGRVSSIVFRNGLTHKFKYKS

SEQ ID NO: 11413 - protein, 541 aa, synthetic construct
MAEFPEAAMRLAVYARVSTEEQREGQNIDSQVAELERFSRDKCWPIVETYKDEGWSGGVMARPELDRLRDDAQKGVFEAVLINDVDRLARDVAHLGVIKRDLEKKGIKVIFRKLPSDTSPTSNLMVNILGSFAEFERELISDRTRRGRRHKVEVRKQYLGSNTAYGYRYTPKDRLTGKEGILEVAPEEAAVVRQMFEWVDQESLSARRVLQRLNDLKIPPQKGASEWAKSSVLRLLHNEMYAGVWYYNKFQGCEPANPATDQRYRKRVKCSVRQRPHDEWLPLQLPQSLHLVPHERWERVQEQLKRNYSFSPRNEKHAYLLKGLVKCGACGARYVGNPCHGKFYYRCIAHCKRMPSIRELTLDEAVKRSVENVILNPSTIMAPYRQLEKADATERKQREETAPMIESELKRLDTEEERVLEAYRTGIISPAQLGQQLEKIKTRRTALQVQGSELQPKQPVLAEQVERAVTDYCAEAAKNLANFSHEQWREFLRIIIKQVVFRGNEITIQGQIPLETPDNDGQGKRQWSIPAFSATEGLRPQ

SEQ ID NO: 11414 - protein, 640 aa, synthetic construct
MTTTSIRSPTARRTATRVQGPDVYCAVYLRRSTQDRQEGSIGDQLRSIITWVRHEHPDYRISTILEDSQSGQDADRPGYLKLMQLAKSPERPFSRVITYRMNRLSRANPLQALGDLIALVTAGVEVIAVADKLIVNAGNFGNIQSLIMVALQASESHEYVVRLSQDTTRGQVSGLSRKLRQGGRAPYGYRRCVVDDAGELIAGPNGKKPWILLHGVRPALRTHHIRLIPGPAHEVETVQRIFKMRIEGASTKRIALTLNRLFEESGFSELLAAPSYSWEQEAGRLSAPVPAFRWTATSIWHILHSPTYAGTLTWGRQSPKGSLRPGWDAKVKKGSRKWNDPDSWTVVRDAHPALISQADYEAAQARTRTEGAEPRHTSPTHLLVGFGRCKACGAPLWAIRKHILRRHRNDDPSKSTRIFTYLACSSRDRGIDSGCKGFLINESRAMKFLLEILRRQGRHLPSRSKLKAAVRAKIARQLSQGHEDRERRNREVAQVAEEIERLLDQVAKGLLAMSDKFVSERYEALRAKHKTLTEAPAAPVDKAEVERIAGLFADRATALFKDFGRTFVRAPLELQRAHLRQVLDRFEADPSTKTVKFYLRDLPALRLGDSPVRGPEEGARLREVTWDPAGQGERKDLDPG

SEQ ID NO: 11415 - protein, 525 aa, synthetic construct
MARAVTVIPPTIQPITHLARNAVVRRRVAAYARVSTSSEEQLTSYEAQVDYYTRFIQSKPEWEFVKVYTDEGISAVNTKKREGFNQMVRDALDGKIDLIVTKSVSRFARNTVDSLVTVRKLKEKGVEVYFEKENIYTLDSKGELLITIMSSLAQEESRSISENVTWGQRKRFADGKVSLPYSHFLGYRKGADGLPEIVPEEAKIVRWIYSLFLSGKTTSSIASLLTKEGISTPAGKKRWAASTVESILKNEKYKGDALLQKAFTVDFLTKKQKKNEGEVPQYYVENSHPAIIDPAEWKLVQRELERRKSIGRSYSGNSIFSSRLVCGDCGGYFGSKVWHSTDKYRRTIWRCNSKFTGEEKCQTPHLTEEDIKARFLDAFNTLVTDKARLLDECRAMQAALTETSSLDSEIAALLSEMEVVAELTKRCIEENSTTAQDQAAYLERYNGLAERYETAKAKLEKLRAVKAKREAKAEDIGGFMFELAEYGDPITEFDDRLWLTVIDTVTVHRDGRLTFNFQTGHEISI

SEQ ID NO: 11416 - protein, 438 aa, synthetic construct
MARTIQQITFPEPMRPGLKRVAAYARVSSGKDAMLHSLSAQVSYYSALIQKHAGWLYCGVYADEAFTGTKDSRVGFQDLLAECRAGNIDMVITKSISRFARNTVTLLETVRELKALGVDVYFEEQNIHTMSADGELMMTILASYAQEESRSASENQKWRIRHGFERGELVNLRFLFGYKIEKGQAAVDPEKAEIVREVFRRALEGESLTSLATDLNRRGFTGVLGGRWNAMRIREMLSNEKYLGNALLQKQYRNNHLEKKEIPNRGELPQYYAEGTHEAIIDRATFDAAQRLLAKLRESTPVRSPWKKSAFTSMITCAVCGRKYKRCTCGKRHFWNCPTAVQTDLPSCGTSQIPEKLLYDLAAQVLGLTQFDEPVFREKVRSIDALQDKTLVFHFYDGSTVARHWEHTSRAKSWTPEMKEKARQRALAQRRGEKWQER

SEQ ID NO: 11417 - protein, 433 aa, synthetic construct
MDRKVRKLDASFPAKPKLLNVVAYGRVSSGKDAMLHSLSAQVSYYSEMIQNHPGWNYCGVYADEAMTGTKDNRENFQRLIADCRAGKIDMIITKSISRFARNTLTLLNIVREFKKLGIDIFFEEQNIHTMSGDGELMLTILASYAQEESRSASENQKWRIRKSYEKGELVQWHIQYGYNITKDKIEINPEQAEVVRNIFDRAIAGETFGSICRDLNTRGISTYFGKKWTARRITEILSNEKYIGDAVLQKSYVNNHMEKKIVKNNGEIPMYYAEGTHEAIVEKETFEKAQSVVKAVREKYCGKNSPKRYPFTSTIKCGLCGENFKRVTANGRISWNCRSFQEQGRAFCKSKSIPETTLITVTAEVLGLDNFDEKIFYENIDHIEVPGANRLIFYFKDGSSVERQWKDRSRSESWTPEMREAARQRAIKQRRDK

SEQ ID NO: 11418 - protein, 531 aa, synthetic construct
MAVTARSVKIIPQTINPATRMPDKGIAKRRVAGYARVSTDSDEQFTSYEAQVDYYTQFIKSKPDWTFVDVYTDEGISGTNTKHRAGFNKMIQDALAGKIDLIVTKSISRFARNTVDTLTNVRTLKEHNVEVYFEKENIYTFDSKGEVLITIMSSLAQEESRSISENVTWGHRKRFSDGKVSLGYSSFLGYEKGPDKDHPLVIVEEQAAIVRRIYTMFIDGKTPFTIAKTLTEEGVPTPGGKSKWGSAVVESILTNEKYKGSALLQKKFTVDFLQHKMKENNGEVPQYYIEHSHDAIIPPEDWELVQLEMTRRKALGRRYSGNSVFGARLICEDCGGFFGAKTWNSTNKYKRTVWQCNEKFKDKEHRCTTPHLNEDDIRARFIAAYNSLIPDRENIIDDCRRMMDVLTDTTEIDGKIADLLQEAEVVTGLTRKIIEENASNAMNQAEFSRKYKGYEDRYTAIRDKVEKLREQSEQRKAQADSISAFMFELHETDEPVVEFDSKLWLSVIDCVVVRHNGTLLFRFRNGMEIEG

SEQ ID NO: 11419 - protein, 456 aa, synthetic construct
MRNKEIAPALVRVALYIRVSGEEQKIKGLSLEAQQERLEAYARERGWVIVGIYIDAAKTARKNIHKRTEFQRMMDSVKRDEVDILLFARLDRWFRSVADYYKVMEILQAHNCDWKTTDEEYDTTTANGRLYINVKLSIAQNEADIDGERIDVVFDSKIAHGTVVSGSAPFGFRVNEEKRLEVVPEDAAIVQDAFNYFENTVSQRATVRYVRETYGVNWCDATFRRMLKEKLYTGVYDRGGRYNDQFCPAIINRQQFDRVQALLTRNVRSAPSGKVYIFTSILTCAECGHKLVGYKSSDYFYYRCNQHFQRGRCSHNHSAREDVVEAWLFDHLGEELERCQLEWDVEAAKKKASVARTDKAALKRKLTKLKELYVNDLIDIEDYKKDYQIYVSALNQIPEPAQEAPPDFAAVRRLLDNSFRTIYDTLTREEKRTLWRSVIKEIRIDNDQNITGVVFG

SEQ ID NO: 11420 - protein, 526 aa, synthetic construct
MAQRKVTAIPATISRYTAAPINSTKKRRVAGYARVSTDHEDQTTSYEAQVDYYTNYIKSRDDWEFAAIYTDEGISATTTKKREGFKTMIADALAGKIDLIITKSVSRFARNTVDSLTTVRKLKDEGIEVYFEKENIWTLDSKGELLITIMSSLAQEESRSISENVTWGQRKRMADGKVSFAYSRFLGLDKDKETGKIVVNPEQAETVRLIFHLFLEGMTPHSIAAELTSRGIKTPAGKDVWNQQTVRRMLSNEKYKGDALLQKEFTVDFLQKKMKKNEGEVPQYYVEGNHEAIISPAVFDLVQAELAKRTKGGSRYSGVSIFSNKIKCADCGGWYGSKVWHSTDRYRRVIYRCNRKYNGDKCQTPHVTEDEVKAAFVSAYNQLVTEKKEIIANAEIIRKTLCVTDSLQEEKSKLEEEMAVLVEMTQNIVAENARVAQDQEEYQKRYNSLVERYDTAKARYDEVVAAISAKEAQSERLANFIKVLKAQDGTIREFDGRLWGSMVEFATVGRDKEITVTFRDGTEIRA

SEQ ID NO: 11421 - protein, 527 aa, synthetic construct
MGVQKKVKTIPATLTRFTASPITEQKKRKVAGYARVSTDHDDQFSSYEAQIDYYTNYIKGRDDWEFVEVYTDEGITGTSTKHREGFKQMIADALDGKIDLIVTKSVSRFARNTVDSLTTIRQLKEAGVEVYFEKENIWTFDGKGELLLTIMSSLAQEESRSISENCTWGQRKRFADGKVSVPFQRFLGYDRGPDGNLVVNREQAVIVKRIYSLFLQGMTYHGIADTLTKDGIPTPGGKKKWSISTVKSILSNEKYKGDALLQKSYTVDFLTKKTKVNEGEIPQYYVEDNHEAIIDPEVFEMVQREMAKRGKGKKYHSGVYAFSTKIKCGECGSWYGSKVWHSNSKYRKTIWQCNHKFDGDCRCQTPHLTDEEIQLHFLSAANKLLATKAEVIANGREMQALLFDTTELEAEQAQLLEETQVVSDMVQQAIQENARTALNQTEYQKRYDSLVQRFDRAKTRLEEVTAEIQEKQTASANMGTFLNAFEQMPDSLTEFSLESWHSMVDFATVYSIDDIRFTFKNGQEIKA

SEQ ID NO: 11422 - protein, 599 aa, synthetic construct
MRKINKIEPTLPVLPTRKKVAAYARVSVETERLHHSLSAQVSYYSELIQANPEWEYVGVYADDGITGTKASKREEFQRMLDDCEAGKIDIILTKSISRFARNTVDLLETVRHLKEQGIEVRFEKENINSLSGDGEVMMTLLASFAQEEITSLSNNVKWGVRKRMEQGIPNGHFRIYGYRWEGDQLVIEPEEAAIVRRIFQNFLDGKSRLETEREFEAEGITTANGCRWVDSNIKVVLTNITYTGNLLLQKEFIEDPITKRRKKNRGELPQYYVKDTHEAIIDMETFQYVQEEMARRKELGAFANKSLNITCFTSKLKCSKCGSSYVRNQRSNRTKYTSTYGDTIVVWVCGTTKKKGGRCSRKDIPERVLREACAEALGLAEFDEDVFLEKVDYIMVNPNCQLEFHFYDGTTKVQTWESTARKDCWTDEHKDRQRAWIKEHMATSSRFSPFTTRVVCGCCGGSCRRQTQPSKLSETGKIAYWRCSGGAKTKCGIKGIREPELMEITAQVMGTPEFDGDAFREQVDHITMVESGKLEYTFLDGHTQEAEYSTEKPSHPWSDEQRAKFMESTKDIYTPERRKAMSEHMKKVRSEKHWASKRK

SEQ ID NO: 11423 - protein, 574 aa, synthetic construct
MRKAKENPQKEKPQRAAIYLRVSTSYQADRDSLPMQRKDLVGYCEYALNISDYTVFEDAGYSGKNTDRPAFQKMMMQIRNGMYSHLLVWKIDRISRNLLDFAQMYEELKTLGVTFISRNEQFDTSTAMGEAMLKMVLIFAELERKTTAERVTATMISRANDGTWNGGRVPFGYDYNKETQTFSINGDESYIVLQMYDLYEKTDSLVRTARELNKLGYVSRQHNPFSPVSIWIILRNPWYVGTYRYNYYKIPGRRAVKEESEWVVIENHHSPLVSKERFDHVQKMLDSNARYRNTPGRSSKQKNVNIFSGLIWCSCCGAAFTASPGKLHASGYRPTKYGCPNVRKTKTCNAKYTSDPVIGEFLLNFILNVINAQKGFEKINSPADLESRLLRGDAFRDVAKIDSASVAALYEMLSSFSPADSVLLKKPTVKKDLDPELRKLRADKRKTERALARLDHIYLYSNKQMSDKEYLVKKNDLMTDLKELDKSIGLLTSESWAQSLSDDDFLEQASSFIISQRLQEREYIYFQGLAESTDPAVLRAFFVSIIDSVRMRNGLVETLTFKNGISHTFTYKAI

SEQ ID NO: 11424 - protein, 498 aa, synthetic construct
MQIEVRKADMGKEKKRLKVCAYARVSTEAFEQENSLENQVSHYTEMIQSNPAYEFAGVYADFGISGFKESRPQFQKMMQDAKNGKIDLIITKSVSRFARNTAIVLKASRELKERNVGIFFELQNINTLTEAGELLLTILAAFAQAESESASESSKMAYLHRIENGEVVAYLERSYGYEKDENGEYRAKEPEASVIREIYDLVIQGVNCTNIARVLNARNIQTVQGAEWTASTVFRIVENEIYKGDVLMQKTFIDGKRHQVQNRGEKAMYYAKDNHPPIVSEKTWEKAQRKLEDMRAERAEHSVIQEFTEENYPYMNHIFCAKCGWPLKPRVYSHGHRLSWDCSGQKRGTKKFCTGIHVLDNDLRKMEIEGNRYFSETVDKYGEVHLKHVGERTWKNKHKKKKFNHKELYPELNEENYPYYRRLYCARCGSRLGRYISHGTVRWICSSYKRKGQAKCPGVRIPDEIIKGWNLPDGKIYIMGKEDKNGEKHYSYTSESAL

SEQ ID NO: 11425 - protein, 465 aa, synthetic construct
MARSITVIPASQPYRVGGRTQQKTRNLRVAAYCRVSTDQEEQLNSFENQVEYYTKYIQDNPLYQMAGIYADEGISGTNTKKREEFKRMIRDCEEGKIDLVITKSISRFARNTQDCLEYSRRLKNLGIGIFFEKEHINTLDASGELLFTILSSLAQDESRNISENCKWGIRSKFKKGIPQVDCTKFLGYDKGEDGKLIVNQEQAKIVKRIYREFLNGYNPATIAKMLMEDHIKTGTGRAEWRSASVRAILKNEKYMGDALLQKTYTADFLTKKVKKNHGEVEQFYVKESHEAIIPKEQWEAAQLELERRDSYMQELGLTFYGYGSEVNPFSCRVVCGKCGAVCGKKSWKSRGVEFWQCNNRSKNHGVKGCASENLPHENLLKGFVTAWNQIVAEREQYLPKWEKKKKEGNPLEKLRAEQMIELTLQPPLTKMLPELGQMVLERVIVQGKEILFIRFLDGTEIKVRI

SEQ ID NO: 11426 - protein, 638 aa, synthetic construct
MKQKKCYIYTRVSTAAQTEGYSLDAQQKRLKDFAEYKGLEIAGEYCDAGKSGHSIKGRPAFMEMMDDITSGKDDISFVLVFKLSRFGRNAADVLKSMQTLMDYDIDLICVEDSIDSSTQGGRLTLAILSAVAEIERENIRIQFMSGKMQKVLQGGWAGGPIPYGYRSREGELVIEPSEAEVIRLIYEKYLEPPMKLNGVVRWLNSHGYQRISQETIRPFNSDFVSRILNNPFYCGKIVYYRRANKGSSDPKQEIVVQGKHEAIVTEKIWEQAQEKRGQLARVKGKRDEEDRISLLSGLVKCPVCGGGLISKKNKSLNHNYGGYYKTVYSYGCRNYRTSEGRVCSFCHTYNQERLDAAVMEVIQKVTGTEEFRTAFARTVGNQMSEEAVETQLKMLRKEMHHQEHVKYKLGMELDHLDVLAESYDQQYEKLQAEVDAAYDRIGRIEDKIEKLKHKLLRMKQGIHSSDNICLILNHFDRLYEKMNYEERRTLCRQFIQRIEVFPEKGDDKRILKSITFRFPVYFDLGGNQEEDDEDTPDEMVVFTLDCSRLPVTAAESKATYAEIKAHVLRIHGLKVSSLYIAQVKRKYGIEMGTAYNKPEKNKNHIPRCPKEKELAILDALKTYRMIPESTEYFEEAAE

SEQ ID NO: 11427 - protein, 568 aa, synthetic construct
MRKQKCYIYMRVSTAMQVEGYSLEAQKDRLTKFAQFQDMEIVREYCDAGKSGKNITGRPEFSRMLQDVAEEKDGVSYILVFKLSRFGRNAADVLNSLQYIQDYGVNLICVEDGIDSSKDSGKLTITVLSAVAEIERENILVQTMEGRKQKAREGKWNGGQAPFGYELDSKNSTLIVNPEEAEIVRIIFDQFTRTEAGADSICKYLNQHGYTKKRLRDQEVSYFSRSTILKILDNPVYVGKIAYGKNKTEKVKGTRDQYCRVKQDEYLLADGLHDAIIDEETWEAAKEKRKRTGVRWVKTHSLDHEHILSGLIKCPLCGGGMSGTVQRRKNKKTGEYKDTFYYRCHHRKRVDGHICDYKPMLNQKVFNAEIEEFIRYMAGGEKFKEFLMEKLEEKVDVSSLEEEKKQLAGQLQQAQGSRKKLVQMLERLDPGDKHYDRKYQDMQERMDNLYDRIAELEEAITDVETKIGASYGKQVTGKKIYQFLLDFDILYGKMTDLEKKEFMRTFIESIELDPDEKDMGRIIKHIDLTFPVYYDGQEGDRIRMPKENTVEVVALLTRCGNGEENAEE

SEQ ID NO: 11428 - protein, 501 aa, synthetic construct
MQNAIYLRKSRADQGTVEDTLRKHKETLLDYAAKHNIFVSLNDIYEEVISGESLYARPQMLRLLSDVEAGKFSSVLCMDIDRLGRGGMSDQGIILDTFKSSNTKIITPAKTYDLNDELDENNMEFAAFIARFEYKQIRKRMRAGVKKSIQDGCYLANAPYGYVNITENKRATLAIQPEEAAYVRQIFDMYVNQGIGCQTIADNMNAMGAKPHRAAQFGRTSVMTILKNPVYIGKIVWDKKTHIRKNSKGNSKHIIISNPQDKWTVTQGLHPPIIDPETFSKAQEIIQNRYHPPAFTGVVINPLSGLIVCKNCGGVMQRAANCKGGPFCLCQKRGCMPMSKLAYVEQSLLGKLQLAADELAAAAQNPRPPAASKEDYQKIIKEIDHQIKTVRQQISRLQDLLEQNVYDIPTFLERQKKHSEKLAALENKKTSILRQANAHREIDIQKTRQRITEVLAAYATAAPQQKNILLKTIVEKAVYYKEKGWAPAQFELEVALRPSFL

SEQ ID NO: 11429 - protein, 550 aa, synthetic construct
MKKFKFPIDLSMLTEEEINQFQEDPSTLLQGDTDVCLYLRFSSERQKEQSIEGQLRDCIAYCKRKNYRIVAIYVDRATTARKDVEKRVHFQEMITASVHQTWKLVIVWKLDRFARNREDSAVFKMRLRKNGVKVESATEGISKNPEGIILEAVLEGIAEYYSADLSQKITRGMRESALKCHSIGGHVPLGYKIEDHKLVINPDTAHIVQEAFELYANGETVADICRMFNAKGYRTAKGAEFNRNSFKSMFRNRRYIGVYRYKDFEKEGGVPPIIDKDLFETVQKRLSANAEAPARGKAKVDYLLAGKLFCGHCGGSMNGESGTSKTGAVHNYYACYTRKRQHSCDKKPLRKEWIEQIVAQDAMELLTDDAIQEMADMAISQTEKDLRENTRIPELSERMKETESGIANITKAVEKGIASDALMNRLVELEKEKKNLLRLIAEEEKYVCKIDRDQIVYWLTKFKDGNIEDENFKRIIIDLMVNSVTVWDEPDGFRITTAYNLTSCKNKTFRISSSSDQGFGFEGLESTRWTLHEHLLFQRRLCRKGVAVMS

SEQ ID NO: 11430 - protein, 578 aa, synthetic construct
MRKVSKIEPISPSLPTRKKVAAYARVSMEIERLNHSLSAQVSYYSNLIQSNPEWEYAGVYADNAVTGTKSSSREEFQRMLEDCEAGKIDIILTKSISRFARNTVDLLETVRHLKELGIEVRFEKEHINSLSGDGEVMLTLLASFAQEEVRSLSENVKWGTRKRFEQGIPNGRFLIYGYRWEGDHLVIEPEEAKIVRLIYDNFLKGLSAEATEKQLEEMGVKSMKGMHFPNSSIRAILKNITYTGNLLFQKEYTLDPISKKTRRNNGELPQYFVENTHEAIIPMETYQAVQAEIARRRELGALANWSINTSCFTSKIKCGLCGASFVRNTRKNLAKTSQLGERYTFYGCGTNKRKGEHCSSGTIREDVLKEECAKALGLPEFDEETFSERVEKITIPATGTMLFEFTDGSSLEHHWSRNAKKESWTAERRKAVSEYRRSRETGWKCYHTFTHFIKCGRCGANYRCQTHKRVDGTVVRSWYCSSPTAVGCSKVGIREDTLRTLIADVMGLLEFDEELFNQQLAYATVPADNQIVFHFRDGHEASRTFVQKRQMPRQTEERKKHMSEVMKAKWRERHAEND

SEQ ID NO: 11431 - protein, 528 aa, synthetic construct
MPKTTKKITTIPATLTRFTATPITEQKKRRVAGYARVSTDHDDQFTSYEAQIDYYTNYIKSRDDWEFVDVYTDAGITGTSTKHREGFKRMVADALAGKIDLIVTKSVSRFARNTVDSLTTIRQLKENGIECYFEKENIWTFDGKGELLLTIMSSLAQEESRSISENCTWGQRKRFADGKVTVPFNRFLGYDRGPDGNLVVNREQAAIVQRIYAMFLQGMTYNGIAQQLTTDGILSPGGKPKWNTSAVKSILSNEKYKGCALLQKTYTVDYLTKKKKVNEGEIPQYYVEDNHEAIIDPDTFEMVQREMEKRGKGRKYHSGVHTFSSKIRCGECGSWYGSKVWHSNSKYRKVIWQCNHKFDGDKHCSTPHLTDDIIQQAFLSAANKLLATKDTVIADGREMMALLFDTTDLEREQEELQQETQVVSDMVQQCIYENAHVALDQTEYQKRYDGLTERFEKAKARLDAVTAIIHQMQTQRASIEDFLKAFAAMPDELTEFTLESWHGLVDYGTVYSADDIRFTFKNGQEVKA

SEQ ID NO: 11432 - protein, 467 aa, synthetic construct
MTGTNDLRKEFQQMLSDSERTKEWDICLVYALDRFGRNSIEQAINKFKLQKTGKIVISATQRTSRNIDGSQNLDGIILENMYVGMAEYYSAELSQKVKRGLNESRIKGQFTGGVPIFGYEAYGTKAEGRKVRIKEDEAVIVRRIFDEYASGRLIKDIHDDLNNEGVLCHGKPFTRTVFYNLLKNEKYIGIVRFGNQIFDNIYPPIVKKQVFDICRAKAQANKIGKHTDVQYLLKNKVHCGYCGRSVSSDTGTSKNGTVMRYYKCIGRKVDKNCDNVPIRKELLEQLVIDSTYQALATPDLIEKLADLILGAHEKRMADTSIINILESQLQDISTSITNLIACMEKGIVSSSTAKRLEELENQKIALETKISLEKVKESTLIQKRDIVNYLKNAIKKTPQLMIELIIKDVILYKDRIEIHFNYTDLIRPDAEPRQAFLFFKFTKEIIFDYHWMNWKPIKKNIEINLLI

SEQ ID NO: 11433 - protein, 510 aa, synthetic construct
MKTAVIYARYSSDTQTEQSIEGQLRVCQDYAKNNDILVVGTYVDRAMTGTNDLRPDFQRMIKDSNKRQWDFVLVYKLDRFSRNKYETTIHKHTLKENGVKVLSAMENIPDSPEGIILESLLEGMNQYYSAELSQKVHRGLNESYRKGQYTGGPVIYGYDVVDKKNVINPEEAEIVKEIFTKYSQGYTAVALAKDFQARGIRTKKGYYITDKKIYKILANTKYNGKIRHGDTIYDNIYPKIIDDVTWQKVQDIHAENQHAPGRKKEIYDFILSGKLYCGDCQRPMVGESGTSRLGRIYYYYSCLAKRRKQHPCKLKSVDKQWLEDLVINSTWALLVDEGIVRYIAETLCKIHEETSRNNTVIKSLEAQRQNALKATQNLISALEQGIVTEQTKIRLKELEAQIAGLDFDIGQEKQRNYTYLSPESVEKYLNSIICGDIQEMPVRKLIVKAFVREVILDNDNVTITYNFTENYTKYRVTQEIIQKVQRQSRKKTAYNKNLCSYKFPPLPPFA

SEQ ID NO: 11434 - protein, 500 aa, synthetic construct
MRVVLYMRYSSDRQTEQSIEGQNRVCTAFCEQQGYEIVDRYIDRATSAFKDTDKRTEFQRMIRDSEKQLWEGIVVYKLDRFARNRYDSATYKARLKKNGVRVISATENISDNPEGVILEAVLEGMAEFYSKELSQKITRGMFESANKCHSIGGHIPLGYKIENKKLVIDEAGAAIVREAFDLYANGATVAEICETFNTKGYRTAKNAEFNKNSFRSMFKNERYIGIYKYKDLRIEGGVPAIIDKDTFAIVQKKLSKNAEAPSRGKAKIDYLLSQKLFCGHCGSLMTGESGTGKGGTTYFYYTCGKRKREHTCDKKPLKKDFIERAVVKDALTLLTPETIDELADIAVKESIREMEENSIIPALKDQLHETERSINNLVKMVEKGVESDTIADRLKELEKEKRAIEKRLVVAQDDYVILEKDHIVWWLSEFCNGDIEDEEFRRHIIDLLVNSVTVWDEPDGWYKITSVYNLTSNKTKTFRCSDLSAQAPPQVKKSEHYHQW

SEQ ID NO: 11435 - protein, 526 aa, synthetic construct
MAQRKVTAIPATISRYTATPINSTKKRRVAGYARVSTDHEDQTTSYETQVDYYTNYIKSRDDWEFVAIYTDEGISATNTKKREGFKTMIADALAGKIDLIVTKSVSRFARNTVDSLTTVRKLKDEGIEIYFEKENIWTLDSKGELLITIMSSLAQEESRSISENVTWGQRKRMADGKVSFAYSRFLGLEKDKETGKIVVNPEQAETVRLIFHLFLEGMTPHSIAAELTSRGIKTPAGKDVWNQQTVRRMLSNEKYKGDALLQKEFTVDFLQKKMKKNEGEVPQYYVEGNHEAIISPAVFDLVQAELAKRTKGGSRYSGVSIFSNKIKCADCGGWFGSKVWHSTDCYRKVIYRCNRKYNGEKCQTPHVTEDEVKEAFVSAYNQLVTEKKEIIANAEIIRKTLCVTDSLQEEKGRLEEEMVVLVEMTQNIVAENARVAQDQDEYQKRYDGLVQRYDTAKARYDKVVAAISAKEAQSERLADFIKVLKVQDRTISEFDGSLWGGMVEFVTVGRNKEIKVTFRDGTEILA

SEQ ID NO: 11436 - protein, 528 aa, synthetic construct
MSRTAARSVTVIPPTINPLTHLSGVAKQKRRVAGYARVSTDSDEQFTSYEAQVDYYTQYIQRNPEWEFVKVYTDEGISGTNTKHRIGFNEMIADAMSGKIDLIVTKSVSRFARNTVDSLVTIRKLKEKGVEVYFEKENIYTFDGKGELLLTIMSSLAQEESRSISENVTWGQRKRFADGKVNLPYKQFLGYRKGADGFPEVVPEEAVIVRRIYTRFMEGLTPGAIAKELTADAIPTPSGKQRWQTSTVESILQNEKYKGAALLQKCFTVDFLTKKKKVNEGEVPQYYVEHSHEPIITPDEFDKVQVEFERRKRISRQYSGKSIFSSRIICGDCGSFFGSKVWNSTSKYRRVIWQCNNKFKGEHKCETPHLDEKTIKARFIVAFNAILDSKDNILEDCRLMQATLTDCAGIDAEIESLLEEIEVVTELTKRCIAENSQTAQNQEEYAARYNGFVERYEKTKVQLEQLRTTKAAREAQAEAIGAFMFEVQELDALTDFDDKLWLTIIDTATVHADGRMTFKFQGGTEIDV

SEQ ID NO: 11437 - protein, 434 aa, synthetic construct
MERVVKRVGTLIPAQPKALRVCAYARVSTGKDAMLHSLSAQVSYYSKMIQDHSGWMYCGVYTDEAVTGTKEERAGFQRMIQECRQGRIDLVITKSISRFARNTVTLLETVRELKSLGVDVFFEEQNIHTMSADGELMLTILASYAQEESLSASENQKWRIRKAFENGELANLRFLFGYNITADGVQVNEKDAAIVREIFARFNEGESMSSIGRDLDARGYRGVLGGTWCAERMRNTLFNEKYLGNALLQKQYRNNHIEKKLLPNRGELPMYYAEGTHEPIIDQATFDKAQKRLKMLAQQTANRKKPTHSAFTGLIHCGLCGNTYKRVTYRKKHYWNCTTFQTKGKSECAAKRIPEETLDALTCEVLGVTHFDPDTVRSKITAIRAENNNVVVFCMDDGSEIVKRWADRSRAESWTPEMKEQARQRALQARRSKK

SEQ ID NO: 11438 - protein, 513 aa, synthetic construct
MQENKQNLRFTALYCRLSSDDELKGDSNSIIHQKQILQDYALKHSLTPTEIYVDDGFTGTNFDRPDFKRLLSDVENDLVKTVIVKDLSRLGRNYLKVGYYTEVLFPEKGVRFISIADNLDTSVNDELNDFIPFKNIMNEWYAKDLSRKQRAVVKSKGNSGKRLATRPLYGYKKAENGDWLIDEPTAAVVQKIFDLYLKGYGPASIANYLFANKVKIPSTIGLPKLNPEQNPYRWSKDTVAKILTYQDYCGDMINFKRSDVDSLVIFPDRQEPIISREIFAEAQKLRLDRKPVRHDYSEPVLFSDLLLCADCKSRMYAQRRYHGTTSYSCSKARKTQGCTSHYINENKLIDCVKSDINKLIKNKGIVIKLAKEKMHIDTKTAQCANSQNLKNAKKRILQIDTILKNLYEDKVLGNINLATFKKLESDYLREQAELNKVIFEQSKIKVNLENRSKSICGFLKKLESYNNPVSELSRDLLIDLIDKIEICEATKNGNERSQQVHIYYKEIGKINLE

SEQ ID NO: 11439 - protein, 513 aa, synthetic construct
MPEVRLITPITRQSTKKMQVAAYCRVSSNSADQLNSYAAQIRAYKKYIGARDDWELVDIFADEGLTGMKSETRDEFQRMIRMCELKHIDLIITKSISRFARNTKDALAYVSKLKLLGVGVQFEKEGISTLSMGDEMLLNTFSALAQEESQSISMNQRLSIVKRMELGEYVDSNAPYGYRLVDKMLTVYEPEAGIVRNIFALYLQGFSTSEIARELNKLNIPTKAGKEIWRPSRVAYILKNERYIGDSFYQKTYRETTVPFNQHPNRGQEDRFYAKGTHPGIVEKDVFDAAQTLIEKRKDVFAKATTQNIYPLTSRIQCSECGSFYRRRIVSGTVKWVCSLHKDDSMACDSNYYSEERIYDGFISMVNKLRFSEDNILGQVISRLEMTLAAMKRNNLAARDLSKSIAELNAKLLMLEQLRSKGYLAPEVYQAQANEIGAELAKLKDIRQEKFNSKAAIMLEEVKKLKMLIFELEEPLEAFDEKLFLEIVKSIQINKEDEMSVELLGGLRFRERI

SEQ ID NO: 11440 - protein, 543 aa, synthetic construct
MEVTKVPKKIITVIEPKRSMTVDKEKYRQKRVAAYCRVSTDSEEQLVSYANQKKVYTEMIASRKDWCFAGLFADEGKSGTRADKRPEFNKMINDCLAGKIDYIITKSVSRFARNTVDCLDYVRMLKSKGIGVYFEEQQIDTLKTDSELYLVIYAGFAQSESESISKNITWSVRKKFEEGTPVFMYKRFLGYKKGADGEPEIVPSEAVIVERIFNLYLAGETVDKISKMMQAENYDIPGKTISFSKGMIMNMLSNERYCGDAILQKSVTIDCIEKKRKKNTGEAPMYYVQNNHPAIIDRVTFNKVQEELARRKTKTPGSAKSSITSTGKYSRYALTDVLICGNCGTRYRRVTWSRNGVKRIVWRCISRLDYGKKYCSDSPTIMEDKLQEAIVRAVNKFNEQDNATYKALMRATISEALGLNGDPEEVDMLERKVEALNNKMLALVNESVSSGDGIEAHESEFMTLSQETELLKQRIAAIQESTAKDNGEQSRLEQIQAIISERESKCMEYDDSIVRQMVECIKVYPGGKLEIIFGGGYLVEESV

SEQ ID NO: 11441 - protein, 464 aa, synthetic construct
MARSVTVIPARSQKVRTGHKAVQEKKIRVAAYCRVSTDQEDQLHSFEAQVEYYTKYINEHENYEMAGIYADEGISGTNTKKREQFKKMIADCEGGKIDLVITKSISRFARNTQDCLAYSRKLKNLGIGIIFEKENINTLDSTGELLFTILSSLAQDESRNISENCKWGIRTKFKNGEMHLNTFKFLGYDKDENGKLVINKEQAKTVRRIYRDFLIGINPAQIAKELTEEKVPGCLGQIKWYPSTVIGILKQEKHMGDALLQKTYTADFLTKRQVRNNGEIAQVYVKDSHKGIIDKQTWNAVQEEFDRREKFMESHGTDRYSYGADCMPFCEKVFCGECKSLFTRHSWRSRGIVQWQCKNHRKDGKVACTNAYVDNADLEKGFVKAFNRLVMDRDKHMERWQQMKSDGTPLEKIRAGQMMEAVENEPLTRFVPEIAQLVLCEVTVLGAKKYEFFFLEGSRVKVSV

SEQ ID NO: 11442 - protein, 502 aa, synthetic construct
MEIQIREGNSRQKRKLKVCAYCRVSTDADEQENSLENQIRHYKEVITSNPDYEYAGVYSDFAISGFKEKRPGLQKMLADARKGKIDLILTKSVSRFARNTSIVLEATRKLKELNVGVFFELQNINTLSGEGELMLTILAAFAQAESESGSVGAKMVYQRKYEAGIPVQYLERSFGFKKDERGVYIADEEEAAWVRKIYEMAADGYTPASIKRYLNENGVKTVGGAEWIDSTVFRLIENEIYKGDYIMHKHFVNEERKLVRNRGEVDAWYIEDDHEAIVSPKLWQKAQDALEAKRDYLAEGSVIEEFTEENYPYMNKIFCARCGHPLYKRIYSNGNRLNWGCSGTKRYGKSFCEGINIPDGVLRGAWHFDENMYIGEKPTEKGKKEFTYLKEASWKRRHKKKEPEPIPENTETEYPYREKIFCGLCGSRLVRHVNTKSHKVIWVCNGRKRKGKDFCDGTRVPDTIIKGWGEIKKDIYIQRKDDKNGKKRYSYTGKKPKGADRA

SEQ ID NO: 11443 - protein, 519 aa, synthetic construct
MKKVTKIAETASSKVKLKKIRVAAYCRVSTDSDAQLESLEAQKTHYENYITSRDDWEFAGLYYDEGITGTKKDKRPELLRLIDDCKAGKVDFVITKSISRFSRNTTDCLELVRKLLALHIPIYFEKENINTGSMESELFLAILSSMAEGESVSISENSKWSIQKRFESGTYKVSYPPYGYDWDGKQMVINPEQAAVVKEIFAALLSGKGTHAIADDLNRRGIPTKRNGRWTATTIRGMLSNEKYVGDCLFQKTYSDSRFVRHNNHGEQTQYMVKDHHEAIISREDFEAAHAFIHQRATEKGVVKGSDKYQNRYTFSGKIICGECGDTFKHRIHSCTGYKYTAWCCSTHIKDKDKCHMLFVKDDDLKQAFITMMNKLVYAHRIILKPYVEALKNTSSDDSLRRIQEIQTLLAQNTEKRETLTKLMTQGIIDPILFNQETNELLSQADSFRDEINALKNAVSGDVTKVTAATALLHFTEKGGILQEFDDDLFKEYVNRIIVRSRNEVRFELKCGLTLRERM

SEQ ID NO: 11444 - protein, 497 aa, synthetic construct
MEVTKIPKQKAQKPKIGVYVRVSTKREEQEDSFAFQSQYWNKRFENDSSIEYVGLFADEGISGKSMKNRKGLNSLLKKAKRGEIDKIYTKSISRFARNYTDLLTVVHELRDLGVPIIFEKENIDTLDPKCNLVLTIMSSLAEQELISMSQNQKWAARKRFAEGSIELSRILGYEYKKGKLTIIPEEAAIVRRIYELYLQGNGVEKISVILKDEGYLTVHGSTEWKKATLATILKNEKYTGNSLLQKNVYDLKVRKKNKGEAPQYYVENSHEAIISMEDFQKVQEMMREKAEKFHPNGLDYSIRKYPLSGKIKCGICGSRYKRKTAAKGTTYECIKWVCLVKEIKGKKTCDSHEIKNVVLEKLLTEAYNECLDKNFEYSGLAEEYKKLKSLLETERELKALHVKGYISDVKYKAESTKILDEIKTREQTIQTLQSNKMVEKQFTKSAVFTKDMADFLIQATVKDWKITFEFANGIKITKSYTNGRAGNVNGKLCKRKA

SEQ ID NO: 11445 - protein, 540 aa, synthetic construct
MENSASVKPKIRLIPAKQRQELVGRATPNGELAKLRIAPYARVSTDHEEQESSYEAQVKHFKQLIESHTDWELVDIYADPGLSGKNIKRPNFQRLMNDCECGKVDMIITKSVSRFARNTLDCVKTVRKLKEMGIKVYFEKENLDTMQESSEFVLTIMASLAEEESRSISNNIRWSVKKRFENGEVILNTAHFLGYTKDENGTLKIVPEQAITVRRIYGEFLDGYSLKEIADGLMRDGILSPSGKSRWHPTTIKSILQNEKYMGDSHLQKTYLPDFLSPRRIKNEGQADSYYVEDSHAAIISKEMFDLVQQEFKGRNELRSSNRTGHGKYSGKYAFSGMIVCGECGETYRRHQQYNAYKKYYIWVCKRHENKGKDYCSAKPISESALERAFIRALNGLIENREKILDKLQKAVVGQISDSCEDDIAQIDKEIQGLQNGIVDLLMDKNKGRLTDKQYERETQLLKFQIDELNLKKEEILNEQGKIQLAEYRAEVVTDLLKTEKILDEFDKTIFKSLVHKIKVIGDKEIEIEFECGIKVTEKL

SEQ ID NO: 11446 - protein, 490 aa, synthetic construct
MKAALYTRVSTDEQAEHGFSLEAQKKRLIEYCNKNNIEIYKLYSDEGISGHSIIKRKALQEMLQDAKEHKFNYVIAYKTDRISRNLLDLLTIKNQLDEADVELLLSDEAIDTKDDAGMTMFSIMGAFAELERKKITERMMAGKRQKLMNEHIKLKNGRVPYGYLYDDENKKYIIDESRRSIVELIYKLASQGWSYNKITRHIAEETAANSSDSKKKWYISDIRAILTNPIYKGYSGISYYYNFNDRAKKPKNSAILYKATNVEPYFTEEYWDTLYSQLEKKTQYFKRKHPIDSYIFSDVLFCATCGLKIGTRQHHANYLYYVCNSKHKMYDNDHICDYAININKFNNWFIEFIRGIDENNIKLSVSKPKDLDRELQAVRSQISIKEKNREVLLDKLMNGVIDDTEYRLASNMVIASLNSLKSQEKELSDKMDSLKEKEQTKRYNRLKIKALKVLVNDWDNLTDQAKKTLINSSINKIMITKDGIQEIEFN

SEQ ID NO: 11447 - protein, 463 aa, synthetic construct
MARSVTVIPARNRQVSGYRAAPQKKIRVAAYCRVSTDQEDQLHSFEAQVDYYTKYINDHENYEMAGIYADEGISGTNTKKREQFKRMIADCEKGKINLVITKSISRFARNTQDCLMYSRKLKNLGIGIIFEKENINTLDSTGELLFTILSSLAQDESRNISENCKWGIRTKFKNGEMHLNTFKFLGYDKDENGKLIINREQAKTVRRIYRDFLWGLNPAQIAKELEDEQVPGCLGQTKWYASTVIGILKQEKHMGDALLQKTYTADFLTKRQVKNNGEVAQVYVKDSHKGIIDKETWNAVQEEFERREKFTQKHGTDRYSYGSECYPFCEKIFCGECGSLFTRHSWKSRGIIQWQCKNHRKDGKVACTNAYVDNADLEKGFVKAFNRLVGEREKHIERWNSMKLDGTPLEKIRAGQMMEAVGNEPLTRFVPEIAQLVLCEVTVLGAKKYEFFFLEGSRVKVSV

SEQ ID NO: 11448 - protein, 433 aa, synthetic construct
MERTIKRVDRKLPKQEKLIRAAAYCRVSSDKDAMLHSLSAQVSYFSTTIQNHPGWVYVGAYVDEGITGTKEDRPKFVKLMEDCRAGRIDLIITKSVTRFARNTVVLLDSIRELKSMGIDVFFEKENIHTLSADGELMISILASYAQEESRSASENQKWRVKRNFEEGKPWRYFMLGYRNVDGEMTIVPEEAEIVKGIFRDYLAGVGITTIVNNLNTSGFVTQSGYKFHNSAVERILRNYAYTGNLMLQTKYRENHLTKRTLVNNGELPKYHAFETHEPIISLEVFNAVQEEMKRRAEKYAPKAKRQQYPFSGLMVCANCGKNYRRKVTTTGPVWICPTYNSSGKASCASKAIPEGILMDTTASALGVDKFNEAFFHERVSKMVISVGNCITYHMKDGTEIQRVWKDRSRRESWTPEMKEKARQATTERWRSNG

SEQ ID NO: 11449 - protein, 529 aa, synthetic construct
MANARKVQVIEATINPKTHLSTTSPRKRRVAAYARVSTDSDEQAGSYDAQIDYYTRYICNRPDWEFVKVYPDDGISGLSTKKREQFMAMINDALAGKIDYIITKSISRFARNTVDTLTYVRMLKDHGVGVYFEKENIDTMDAKGELLITIMSSLAQEESRSISENVIWGQRKRFADGKVTLPYKRFLGYDRGASKDDPPVVNEEQAVWVRYIYSEFMLGKTACAIAKALTASGVPSPSGKPKWSPSTVESILSNEKYKGDALLQKTFTVDFLSKKKKVNEGEHPQYYVEHSHEAIIDPREWQLVQLEMERRKSLGMRYSGNCVLATRIVCGDCGSYFGPKVWNSTSKYKRTIWQCNNKFKGETKCSTPHIEEQEIKSRFISVINFLLPDKQALLEDCRLMQDALTDCTKIDEQLNALTEELEVVAALTRKCIAENAAEVIDQVEYKKRYDGLNDRYNITREKIEAMEKKKTSRIGEADKIGAFMFEMLERDEPLDTFDDRLWIAVIDHATVFHDGRIVFTFVNGMEAEG

SEQ ID NO: 11450 - protein, 524 aa, synthetic construct
MVNVAIYLRLSDEDRDKRHKSDESESIQNQKSMLRAYCFERNWNIYDIYCDEDFSGADKSRPNFNRMLRDCETGKVNVVLCKSQSRFSRDMEMVEKYIHNKFIEWGVRFIGVVDNADSANATNKKARQINGLINEWYLEDVSENIRETLKHKREKGEFTGSFAPYGYLIDPKNKNHLIVDENTAPIVKDIFNWYIQGWGYRKIVMELNDRHIPNPSSYKHQINSNYVNTKESESPSRGLWTHTTIYRMIRNETYCGTLVQGKSHNVSYKNKKRKPVSPNEWIKVENTHDAIIDKETWRKTQERLKSRARVNKSSYELSLFSFKVKCAVCGRAMKRNVYHNKSKTKTYYGLQCATYKTGAMNCTNTRTINGNVLESIVLEQLNNLLNKYCQSDNIILQETELSSIKSLEVSMQSYQNKIKALEDKILKIYDDKLEGIISLEQYIAYSKKYNDDIDYLKAECKNLNNKIKQYEENRNIHSKQKEIIKKYTHPDRLTREIVDEFIDCIYIGRLDENGNRDITINWKF

SEQ ID NO: 11451 - protein, 532 aa, synthetic construct
MIATKPTQEKTVKTVYCLYRVSTKGQVDKNDIPMQKQSCREFAEHQPGWVIKKEFQEKGVSGFKVSANDRDAVQELKTAAENKEFDILLVFMFDRIGRIDNETPFVVEWFIQHGIEVWSVNEGEQRMDSHVDKLMNYIRFWQANGESQKTSMRVKTRLHQLVEDGIYTGGCAPFGYRLVKSGVVNKRGKELLTLEIDPIEKEMVKTIFEKTVKDGYGSYVMAQYVNDRKMLTHNGAKFQSNTIKRILQNPIYCGYYNRGGVTSKRVKELQIIDDAVFDEAQKILEQRKYTNEEKTQLSRTAKSSTMLGGNIYCAHCGKKLCANSFVDRYTTKDGTTHDGGRRFRYLCSGKAMKRNECDGQSVYSAAKVDEIVLDALHKCFDKIKATPKDAAIEKKYRTQISQIKTEIKRLNKETETLKRKLGELTEEIANSLLGDSKFTPDVLSMAIETTKTKIADNVQRIAEKQNQLNDKETDMNKIDYYYEEFVSWADEFDNAPAERQRMIICKLFKEILVGRGYSVQILMDSSYEQFLI

SEQ ID NO: 11452 - protein, 525 aa, synthetic construct
MAKVTIIPSKKNPITLNPINEIIKKKVAAYARVSTDSDEQFTSFDSQCKVYEDYIKSKPDWEFVKVYADDGISGTNTKNRVQFNQMIEDALAGKIDLIVTKSISRFARNTLDTISYTRKLKANGIEVYFEKENLWTFDDKAEFLLAIMSSIAQEESRSISQNVTMGKRWKMQEGKVQFAYKNFLGYKKEDGQIKIDDDQAVIVKLIYKMFLVDGKTCSYIANYLNSNNVLTPARRHNWSKQNVLSILKNEKYKGDAILQKSYIKDFLEHKAVKNNGELPKYYVENSHPAIIEKDMWEMVQAELKRRELISASYSSCNVFSSKLICGDCEAFYGKKVWHSNDAWRKEIFQCNKKFAKGKTRCQTPSFSEQVIKDKFIKAYNLMMVDKNAVVNDAKDVINKLTDTTTLDVQISKYENEMEIVSELVKKLVKDNSIHLQDQNDYEVKYQELVDRHNKAKELYEKLSEEKKYKQAKAITLKSYLSTLENADTEILEWNDALWMTVLDKAIVNRDETITFKFINGKEITL

SEQ ID NO: 11453 - protein, 432 aa, synthetic construct
METKITKIDALPKLEKKLRVAAYARVSSEKDAMLQSLSNQVSYYNNLIRSTEGWSFVGVYADEALSGTKDTRDEFQRLIKDAVEGEIDLILVKSISRFARNTVTMLETVRKLKTIGVDVYFEEQNLHSLSGEGEMVLTFLASFAQEEARSVSENQKWKVRKTFESGVQWSATKSYGYRVINKKYVVVPEEAKIVKYIFDLYINGLGFQAISNKLQNENIKPFYAKAWNKTSVKNIISNINYTGDLLLQKGYSENFLTKKYVANKGAKDQFLVEDDHEAIISKEIFNKAMDLKRGRAKYFKTSRETQIRYELSGKIKCGICGKSFNHRTTKYSQKWICITYNEKGKSVCPSKCVPDAELKRITDKVGLDNIDWVEVFPNNELKIYLRDGTNVIEKWNDYSRKNSWTDEMKAKAREQAIKKSLVNYLKGGNING

SEQ ID NO: 11454 - protein, 504 aa, synthetic construct
MEIQVLEARSSKGYRKKVCAYCRVSTDALEQENSLENQIAYYENLIQSNPEYEYAGVYYDFAISGYKEKRPGLQKMLTDARNGKIDLIYTKSVSRFARNTAIVLKASRELKELNVGIFFELQNINTLSSQGELMLTILAAFAQAESESGSIGAKMVYQRKYEQGIPVQYLERCFGYTKNEKGEFVPDTEQAKWIVKIYEMAAEGYSLSTIADEMNAAGVKTDKGAGWVESTVKRILENEIYKGDYIMHKNYVNEERKLVRNRGEVDAWYIEDDHPPIVSRQLWDKAQEARKKKRDYLDMDCQIREVTEENYPYKGHLFCAKCGSPLTHRIYSNGNRMSWDCSGRRRHGKDFCTGIHVPDTAVRQWKFDGNIYISVKDSRKSIKEFSYTKESSWSRRHKKKEFVRDVPELTEENYPYYRSIFCAECGSRLVRHIKKHGDIVWECNGRKRKGAAYCEGVRIPDRVVQAFMPIRKAIYIKERKGRNGTKHYSYSCKKPERATREEQD

SEQ ID NO: 11455 - protein, 487 aa, synthetic construct
MPEALNAVIYARYSSDRQTEQSIEGQLRECYAFAKANDIAVIDTYIDRAISGKTDNRPAFQKMIEDSAKRQFQAVIVYRLDRFTRNRYDSAIYKARLKKNGVKVLSAMENLNGSPESIIMESLLEGMAEYYSVELSQKITRGMRENALKGKALGGQRVLGYKVNSDCYFEIDETTAPVVVDIFKLYSSGKTVKEICDILNARGVKTARGGAFNKNSLHTILTNKKYIGIYKTKYGEIVGGIPAIIDKELFEMVALRMEQNKKAPARAKAEINYLLSTKLFCGKCRSAMVGESGTSKTGKKYYYYACVKKKREKACDKSNVKKDWIEDLVIQRTVTDILKDDVIEKIADRLVELQKAEAAESGTMLYLQNSLAEIQVSIKNIMTAIEKGIITESTKTRLTELEDEKRNVEIEIAKESIARRIISREQIIYWISSFKDGDITSEKYRQQLIDTFVHAVFVYDDKIVITYNYSGENNTATISDLDLSSPP

SEQ ID NO: 11456 - protein, 520 aa, synthetic construct
MPRKKAPAAEAPRLVAYYRYSGGSRQTEQSIEGQRRDCEAYARAHGMTILREYVDRHISGKTDDRPAFQQLVADSAAHTFDAVICWKTDRLARNRYDSAVYKKKLRDNGVEILYAAESNISGAEGIIIEGLMEALAEYYSAELAEKARRGMRESALKGKALGSSRPLGLTVDADKHYIIEPTGAEAVRYIFEQYAAGLSSSSIVERLNAMGLRTSHGGPFNKSSINRIIQNEMYRGVYVSKKFDVRIEGAIPAIIDNDLWKRAQNMFERNRQSRTPHASRADYILSGKLYCGECGCLMKGVCGRSSGNGQMYHYYACPGRSIGRACTRKNIPQDELEAMVVNSVADLLLEPELLEQIADAIVELQQAEAARPDPEKQALEKSLSDVRNKIQNILSAIENGTSSAALSARLADLEQQESTLSYQLSSLTAKKPLTFTRDQILFLLQQFRVSPSERAKAYCRRLVDTFVDHIELTNTELILYFNISDETIDKNKKAPRSNPSKESSTEKRLVRVARIELTAS

SEQ ID NO: 11457 - protein, 484 aa, synthetic construct
MQKEKVIPIDSLDLVDLYIRVSTTEQALEGYSVAEQEHRLRQYCAAMGHRIHKVHIDAGFSGASLDRPGIKETIKDVQKHLVRRVIVWKLDRLSRSQKDTLIMLEDVFLENGCDFISMMESFDTSTSFGRAIVGILAAFAQLERENIKERTMMGRQARLAKGHYNGSRPPLGYSFIPGSNDLQVDPYQAAIVREIFKLFLSGISINAIARKMEEKYPTVRTWNNTMIRRTLKNPVYIGKVNDNGILRDGIHEPLISEIDFQMANAILVHNSKIKKQSCRSRSLLTGLLYCGDCGARMHPRRIARGYPLRRYVCYSVSRTSKSMIKSDHCTNRLHPYTQEELEQIIIDEIKKLAADEDYISEVIRNSSAEVPADDTELFQERIEELNRQTDKLLNLYQIGAIELDQIQERLAALKQERKSLTAALKESQTKTDINMDHLKIMSYASAFQVALESGDPEYTNSIIRLLIDKIVVLNEDIEIHWTFC

SEQ ID NO: 11458 - protein, 561 aa, synthetic construct
MPRKPAKHPAKPKRGKKLEVEEPGVLYGRYSSHNQKDISVEQQFEKGYELAAEYGIRIIDTYADRAVSGRTDKRRDFQRMMTDAAKGKFRYVIAWKSNRMGRNMLEALINEARLQDLGVRVLYVEEDFDDTAAGRFAARSMMNVNQFYSENMAEDIKRGLYDNAANCMVANGHLPYGYKADETLHYAIDEPKAAVIREIFTRVSCGEAFVDIMASLNARGIKTSYGRPWGRSSFQKILSNERYRGIYIYGDVRKEGGIPRIVSDELYFKVQEVITTKKNPQGRHRVNGDYLLTGKLFCGHCKSPMTGISGTSRSGNLHYYYVCQKRRTEKTCEKKNLRRDDIELQVAKAIKRRTLDDDTINWIADSVVEYSQHQESASGIGLLEDQLKDTQRSIKNLMAAIEQGIITPTTKARLMELEKEQSDIDRKITMAKADVIPVNRDQLVGWLKKLQAGDVHDKKYQAELFDTFLIAVYVYDNPDGQDYMKVVFNYAGSKNTVEIPLDPSVIDNVENIETGAVRLSSAQVHQKAFAQKCGGFLLITYYFFTVTLSELRFFGKVKSKK

SEQ ID NO: 11459 - protein, 518 aa, synthetic construct
MTTIPATISRYTAVPINSTKKRRVAGYARVSTDHEDQVTSYEAQVDYYTNYIKGRDDWEFVAIYTDEGISATNTRRREGFKAMVADALAGKIDLIVTKSVSRFARNTVDSLTTVRMLKEKGVEIYFEKENIWTLDAKGELLITIMSSLAQEESRSISENTTWGQRKRFADGKASVAYKRFLGYDRGPNGGFVVNPEQAKTVKLIYKLFLDGLTCHAIAKELTERKLPTPGGKAVWSQTTVRSILTNEKYKGDALLQKEFTVDFLQKKTKKNEGEVPQYYVEGNHEAIIEPVTFDYVQAEMARRTKDKHRYSGVSMFSSKIKCGECGCWYGSKVWHSTDKYRRVIYQCNHKYKGGKPCSTPHVTEEQVKDAFVRAVNILLSEKAELGANVRAVIAMLCGSAELEKQQAELKEELEVVVGLVERCVAENARTALDQDEYSERYNGLVSRYEAVKAQFDEVTQAIADKNDRKKLLEQFLRMVETQEPVTEFDERLWSSLVDFVTVYREKDIRVTFKDGTEI

SEQ ID NO: 11460 - protein, 561 aa, synthetic construct
MEKKKKSALYVRVSTTHQIDKDSLPLQRSDLTNYTKYVLGIEDFEIFEDAGYSGGTTDRPAYQDMMNRIKKGEFTHLIVWKIDRISRNLRDFSEMYDELKKYNITFISKNEQFDTSTAMGEAMLKIILVFAELERKLTGERVFSVMISRAQKGLWNGATIPLGYEWDAETKFPRPCDSEAKVVQYIYDQYETIKSTTKVAKKLNIEKIPTKRNGTWTPRTVGSILTNPFYIGTYRYNTKTRKTRRWKDKSEWVVVENNHQAIINKEQFERVEKIIQENYKGDKNYQRKSTKVHILSGIISCHKCGKKMHAGLDRARKEGFTPSRYTCYAFNVNYTCANYSSDLAILPGLINYIANYMTLQERITSKHSLRDMESILLRGKYFEDIDHIEKQDLKNTYDLLINNTLVTYNSLEEEKQEAIISQNAIYEAEKEKYEKALKRLDDLYLYDINSMSQKDFVIKRKEISDKIESVNKKIQEVKLNDTPFINNNDFNVLSKASFYLLTKNLSSVKNIDVLSLLNNLDKQIIKDFINTIIADVSVERGKIYNITFKNGITHHFNYKNQ

SEQ ID NO: 11461 - protein, 549 aa, synthetic construct
MAYRKITDIRDTIGMRAVFYARVSTAEEEQLNAIELQIEENRGCIKDHGWKLVGEYIDRSKSGTMVKGRDDYQRLYEDLYEDLFDIVVIKDQERLQRNTLDWYLFINRVVQTGKLLFMYMDGKFYSPDDALITGVRAIIAEEFSRNLSKKLHNYHDHRIEKARQGQEIALQGSGNVYGWDKKDGKYYINPEQAKVRRLMCEGIMARKGSTLIAKELNDAGYRNTVGKPWKPMDIPKFVYDCKNVGTMIINKERHDFESKQTIKLPKEEWVYVENALPPIVTQEEWDLICKIHEERVIATGSDRRGKKTSGYSFSGKLVCGICGAPYWRKQRVSKDEYWVCSTKQTKGRRTRKRDSTMGKAGEINPLGCDNENISYNSLMEIMGVVSERLQANTDTIKHDMINWLTKLRKQLLEANGGHTEADLQRELSRKSKLLDAYLDGILNKQEYQKKAEELDERIIQLKAETEKNKANSGDIAEIDKVLANIDEEVSRYVDGNEKLKVEYLLEHLEQVQIFPDKVIVIVPILSEGIVVEKTQYVSREKWCRKDNAY

SEQ ID NO: 11462 - protein, 513 aa, synthetic construct
MAKAKQKAATNDISKLAVIYARYSSHNQTEQSIEGQLAAGHRYADLKGYTVVHEYIDRAMTGRNDNRDDFQKMLSDTSKKQFGAIIVWKVDRFGRNREEITFNKYRCKKNGVRVEYVAENLPDSPEGVILESVLEGMAEYYSLQLSQNVQRGLLESAKKHQVIGGNVPLGLMMDAHKKYVPDLKTAPTVKLIFDMYAEGSTTSEIINHLNSIGMRTKAGKPFTKSSLTTVLKNEKYIGVYKYKDIIRDEGVIPPIVDKEIFYKVQELLKVNRRMPSHKWSYSDYILTDKLFCGKCGTAMVGESGFGKMGVKYSYYICAKRRKDKTCDKKPVRQEWIEEIVLQRVQGILQNEELLEFIAENTWQYYLAQDESMEKLKGLQTELDKVEKSAANLMKAIEAGIFNDMTKARMDELDDQRAVIKKAMAEIEIEKGFKLTKDHILYFLEQFKKLDYKDRDCQRRLIDVFVNSIFVYDDKLRIAFNFGGSDSTITLNEVDKADRGEGFVCCASCPIYKY

SEQ ID NO: 11463 - protein, 584 aa, synthetic construct
MGEKKRVRMLLRVSSNQQLEEDGDLGIQRQLVKEFIAQHEEWHLDSKEYFEGSNSGYSNAVENRDILQQALRDAQRNEYDILAVYKDDRIGRRMWEIGAYVMQLKSYGVDIYTVKDGCISPESDDIMGQMMLALRYGNAQKSSSDTGMRVKDTAQKLVQQGKFVGGKAPYGYKLELSGEISKHGRALHHLVIIPERAKAVKHIYELSLDKEYGSSKIARELNLDEEYKELAPSEVWRGGTVTSILTNPIYAGYTAYKRREKKENGKSKRLDSSEWILSEEPNPELQIISPDDWNLVQIKRKQRGMKYRTAPQNKGVKVIARNEGMLPLIDVIYCGYCGCKCTNGSKYNYWTIKDTGERRASRQAIYKCQDAWQGVPHYKVYQFKAEKIEKIVFQAIAEYIDKLQENEDIFEQISENGRKAKKEKAKEFSREQERLKHIQQKISVMEDKIPEAMLGEYPVPVDKLVDLIEKQRQEKEQQEKVIAEKQKELDGADVSFNEWDSLRMQIPTWKDVFLNADNPTKRVLVNKLIEKISVKEDEVVIRFKININEIRSKALKKSGSMVPENKLEDKSVILDSLKIYPNPE

SEQ ID NO: 11464 - protein, 612 aa, synthetic construct
MRAAFLIRCSTKKQDYERQVNDLTRLAKKFGYTSNDNLIFGEHITGKDDASKRDRQSIQHLKDAAINKEFDVVLVSEVSRMSRDPMSGRLYVRQLINMDIPVYFRDIDTWTIDPVTGKKVRDAETIIGAAFDAAWKYIKSMKTQIASGRRDELDNNQMSIGQPFFGYKRYGGRDKGKKNSWVINDDAAKVVVDVFEEYVKDGATLKSTALAITAKYGEQFNKKFSIGTIEHILTFEPYCTGIKVVSLTDPDTEDVDKFEVEIPTIITRAMFDKATTKRATNRTARTPYPKQATYVLSKLLKCPICEHSLTPQKRGGDKGDKYRLMNGKVAIRWSCMSGINNATDCSSRITISNEKLEAIIWGLVKQELIGFANLNDEDRVAKVEELTDKITNLEMNIANFTSHISNMDRLIERAYSAYMDAPDSVMDIAKDKYYKTLTKCENERAECKDKIEALNVEKLRLENMRTFFNQPTLPKDAIEKAESDPIKMRNLVMELVDKIYPYRITTYVSPATNRIMKNGIVLLEVYTINGIYNVLYDGNQRNNKVAYYISGNYATFQNGKNKLDAYDAGEYFVISNATLVTETEDVDLTVTFNELIKICMQNGWEIDYTYKM

SEQ ID NO: 11465 - protein, 500 aa, synthetic construct
MANGVIYARYSSNHQREESIEGQLRECKAFAKAQNIDIINTYIDRALSAKTDDRPGFLKMIADSSRRAFDYVIVYQLDRFARNRYDSAFYKMKLKKNGVKVLSAKENITNDPAGIILESVLEGMAEYYSVELAQKVKRGMTENALAARWASGRIPFGYKVDAQKHLIPDPATGQAVTTIFIRFARGEKIKSIVDYLNSLNYKTSLRNKFNRSSFQRMIVNPVYIGTFRWNDIVLKNAVPPLIDELTFETCQRRIAEKRRSKNAVNRKSDIFLLTTKLKCAECGGNMVGISGTSRNSQKYYYYGCYNTRRHNTACKIGYINRDELEDAVFEAAMDVLSSDENINIIAEQAFKISQQQEENPRLKELELQKKDTEKKIVNLTKALETGLISETVMKTVQKYEAELKLIEQAIAREKILTEPFKITKQHIAFFLSQFRHMEPTKAREAVLNTLLREAVIKKESDSNYLVTVRFNYTATPTLSDTKEVSVRIMNDWWRQAGSNR

SEQ ID NO: 11466 - protein, 654 aa, synthetic construct
MCAKKKPAMLEPDMQDAVIYTRYSSHNQRDCSIEQQVADCEIFARQNNLRVVKVYADRHLSGTTDNRPQFQQMLKDAAHGHWAYVICWKIDRFARNRYDSATYKFRLKKAGVRVLYAKESIPDGPEGILLESVLEGSAEYYSAALAQNIRRGMKYNAEQCKVNSGSIPFGYCKGPDGRFAIHEANAEVVREIFRKAAAGMSFVDIANDLNSRGLKTSRGGRWNKGSFRLLMNEAYIGVYHFSDTRIEGGMPALIDQGTFWAANERLKANSSVRGRHQDGGDYLLTGKLKCAHCGSYMIGFSGTGKSGELHYYYGCQKRRRERACKKANVPREWIERVVVKAALDYVLRPDVMEWIADAVMEYQEREAASAQLAALTAELEENQKATDNVMKAIEAGIITSTTKQRLLDLEAKAQDLKRAIELEKLSHVRLERDQVLFWLDCFRGGSLQSQEFRRKVIDTFVSVVYLSDDHLRIAFNYSGGSNAEADFDLVMDAEAAAGELSKKFVQGHVASTMKKERHFVRNWRSFLYYGNVFGNTIKFSDCSHQRIIQHLNELYRAGRTGQRIACQLLHILRVCEPCTFSCPAYSALNRFWLTSSAVGDRGIDIFLNGLQAVFLLTDQLKTLAQDTVGAQIACDAHRAQQIIDLSGQFGNDHS

SEQ ID NO: 11467 - protein, 459 aa, synthetic construct
MIQRKNDDKLVRVALYIRVSGEEQKIKGLSLESQRERLEAYAKEQGWVIVGVYIDAAKTARKKLHKRSEFQRMLESVRRNEVDMLLFTRLDRWFRSVPDYYKVMEVLEAHHCEWKTIDDGEGYDTTTASGRLYINIKLSIAQNEADLDGERIDVVFDSKVQHGTVLSGHCPFWLRVNEDKRLELIPEKTAILQDAFNYYEQSTSQRATIKYIRETYGVNWCDATFRRMLHDKLAIGVYDRNGRYNPDFCPAAISKDQFDRIQELTSRNSRSNPSGKVYIFTGVLVCEECRHRLVGYLTRDIYYYRCNQHFQRGRCCHNHSAREDKVEAWLFEHLSEEIEKYEVSWDVQAAERKKTASSVDRATLRRKLTKLKDLYMNDLIDIEDYKKDYETYTAALAKLQEPPADEKRVDLSGVRQIVSKGFREIYDTLTREEKRTLWKSVLKEIRIDNDQNITGISFF

SEQ ID NO: 11468 - protein, 544 aa, synthetic construct
MSMENCANTKPKITIIPAKTRVERLDPMSVAMGQKPKIRVAAYARVSTDHEEQESSYEAQVDHFTKLIASHDDWTMVDIYADPGLSGKNTKRVHFKRMINDCEDGKIDLIITKSVSRFARNTLDCVQTARKLKADGIGIIFEKENLDTLQERSEFVLTIMASLAEEESRSISNNIRWSVKKKFQEGKVILNTKHFLGYTRDKKGTVLKIVPEEAITVRRIYAEFLDGKSLKEIAEGLERDGIASPSGRETWHPSTVKSILQNEKYKGDCHLQKTYLPDFLSPRRIKNEGFAQSWYVEDSHAAIISKETFDMVQQEFQNRQSLRSTGETGCGKFSGKYPFSGMIVCGECGETYRRHQQYNKYKKYYIWVCKRHENNGAEYCKSRPIKEEALEKAFVRALNELIGDKERILEKLQSATVSEITDSCATAINEVNAEIEKLQEQMMELLMKRNNGEITDKEYEQQSQQVGMKIDQLLMRKEEILSEQGKVQLASYRIEEVTKLLQTGKILEEFDRVMFKSLVRKITVLSNKEIEIEFECGITVRETL

SEQ ID NO: 11469 - protein, 492 aa, synthetic construct
MNIQEIPTTRKEKPRVCAYVRVSTDSDAQEDSFAFQSNHWQRRFESDESVEYIGLFSDEGIGGAFMKKRDGLKRMFQKVRNGEIDRIYTKSVSRFARNKVELMEIVREFRDIGVEIIFESENIHTLDPKCGLILTVMASLAEEELISMSQNQKWAARKRFANGSVELTQILGYDMIDGRLVINEKEAVIVRRIFELYLQGNSFISICHILENEGYTPMHGGRWSKSTITGMLRNEKYCGDSIMQKSYSVMKVQKYNYGELPKYYIQDDHEPIVSREDYQKAQEIMMARGNKYRPRGSPTALYPLSGKLICGECGTSFKRKTSAHGTPYMCIKWTCRKKDVYGVKECASHDIKDEVVTRLLIETYNESLDANNDVNGITEQEEVLRKLIANEQELRQLRAKGYISESKCREETDKILIKIKEQETLIKNLRMRDMVKGKYKKSDELTEQMAEFLVKATVKDWTITFEFQNGYKATKEYTNGRAGNVNGKLCKH

SEQ ID NO: 11470 - protein, 523 aa, synthetic construct
MNENVCIYLRKSRADQEAELRGEGETLARHERILLDLAKSRNYSVGAIYREIVSGETISARPVMQQLLREVEAGSWDGVLVVEVERLARGDTIDQGVVSRAFQFSDTKIITPTKTYDPDNEFDEEYFEFGLFMSRREYKTIKRRLNAGRIASVKEGKYCGSKPPYGYERVKLHGEKGFTLQPVPEQAEVIKMIYSLYSGASGDRIGVSKIVRKLNDMGIKSPSGKDWVPISVQDVLANPVYAGMIRWNGRKTVRAIQDGMVTQSRPRSKDDDILLFPGRHPAIVSKEMYDSVQQIRKKNPPRPISIKNTIKNPLAGIVYCSKCGRAMVRRPYQKRGQDDTLMCSYTSCPTVSSKLSLVERAVLNGIQDLVDEYRLNDAVPGPDINNAVKSKKKLIAEKEHELEKLNVQKMKQYDLLEQGIYTTEVFLERSNSIASSINSCQDSIECLKEEIRHDKELIDQQSSFIPRCENLLEIYWSLDTAAKNKMLKELIERVNYTKDVKNAFRMGNEATFVLDIFPRIQSN

SEQ ID NO: 11471 - protein, 524 aa, synthetic construct
MKRVVCLYRVSTVGQVDHDDIPMQRIACRDYAATHPDWEIVEEISEKGVSGYKVAASDRDAIVEIKKKAIKGEFDVLLVFMFDRLGRREDETPFVVQWFVQQGIEVWSTREGQQRFDTHVDKLLNYIRFWQASGESEKTSIRVRTKHLQMIEDGQYRGGYLPYGYKLVHKGRTNKKNQPVRDLVIDEDEAVIVREIFHLLIEEGYGTNRVANYLNERGIKTKRGTTLWRATSVRALIDNRIYLGYMRMGDTYSPKQEHLQIIDEATWEKCQETVKGRATCLKHEMKVPERTDTRSLLSGLIFCADCGSRLTFSHNTTRRKLADGTVKLYERDCYRCYRKINARESCSGQSSYCADTINETVLYEIRRILSIIKQKPEAALLEKAKENHGDVYEVAYKQAEKDFFDIHKQMNALEDQAMKFLTGENTVDISIVNSMMPKYKEKLETAQRRMEEAKARMEKEKEAARDATQEVADLLSWADTFDEANAETKHMIIARLVERIEINHDYEVEIKFRISVEQYMRIAA

SEQ ID NO: 11472 - protein, 456 aa, synthetic construct
MRNKEIAPALVRVALYIRVSGEEQKIKGLSLEAQQERLEAYARERGWVIVGIYIDAAKTARKNIHKRTEFQRMMDSVKRDEVDILLFARLDRWFRSVADYYKVMEILQAHNCDWKTTDEEYDTTTANGRLYINVKLSIAQNEADIDGERIDVVFDSKIAHGTVVSGSAPFGFRVNEEKRLEVVPEDAAIVQDAFNYFENTVSQRATVRYVRETYGVNWCDATFRRMLKEKLYTGVYDRGGRYNDQFCPAIIDRQQFDRVQALLTRNVRSAPSGKVYIFTSILTCAECGHKLVGYKSSDYYYYRCNQHFQRGRCSHNHSAREDVVEQWLFEHLGEELERCQLEWGVEAAKKKVSIARTDKAALKRKLTKLKELYVNDLIDIEDYKKDYQIYVSALNQIPEPAQEAPPDFAAVRRLLDNSFRTIYDTLTREEKRTLWRSVIKEIRIDNDQNITGVVFG

SEQ ID NO: 11473 - protein, 464 aa, synthetic construct
MARSVTVIPARSQKVQTGHKAVQEKKIRVAAYCRVSTDQEDQLHSFEAQVEYYTKYINEHENYEMAGIYADEGISGTNTKKREQFKKMIADCEGGKIDLVITKSISRFARNTQDCLAYSRKLKNLGIGIIFEKENINTLDSTGELLFTILSSLAQDESRNISENCKWGIRTKFKNGEMHLNTFKFLGYDKDENGKLVINKEQAKTVRRIYRDFLIGINPAQIAKELTEEKVPGCLGQTKWYPSTVTGILKQEKHMGDALLQKTYTADFLTKRQVRNNGEIAQVYVKDSHKGIIDKQTWNAVQEEFDRRERFMESHGTDRYSYGADCMPFCEKVFCGDCKSLFTRHSWRSRGIVQWQCKNHRKDGKVACMNAYVDNADLEKGFVKAFNRLVTDRDKHMERWQQMKSDGTPLEKIRAGQMMEAVENEPLTRFVPEIAQLVLCEVTVLGAKKYEFFFLEGSRVKVSV

SEQ ID NO: 11474 - protein, 475 aa, synthetic construct
MDKQRRQQKSLKTQTNNSPVTALYVRVSTDSQFEEGYSVEAQQKKLKQWCVLRDITNYEFYIDGGWSGSNINRPEMKRLIADIINGKVKEVIVFKLDRLSRSQKDTIFLLEDVFEPNKVSFVSISENFDTNTPYGKAMVGILSVFAQLERENIRERTRMGMYERVKSGLWMGGGMKPFGYDYDPKLNTLVPNEHAEDVKKIYDLYLQGYSTTQLANMFPVSGDRQIMMILSRATYLGKINYKGEIIEGRHQAIIDEETWKRVQAEKEKRTDRKVTKSQHLLTGLVYCGKCGAKYRYQKWGNKTVLYCYSQQKSKPNLIKDPNCDNMRLNSEPLEQLVVNDLFNMSDAYLAIADKKLLKAKNISEKGYGIQVLEQKCSVIEQKIKRLYNLYAEDNNELLLETIKENQHELEKLYNILESEKATTSVTNRIEETEYLIKNLRSRWDGLSMDEKHRVLRATIKKIIVTDGKVTIDYII

SEQ ID NO: 11475 - protein, 513 aa, synthetic construct
MLKTDMTNEKSTAVIYARFSSDKQREESIEGQIRECTQFAKDQNLEIIATYIDRALSARSDNRPDFLRMIADSSKGLFQYVIVYQLDRFSRSRYDSAVYKHKLKKNGVRVLSAKERIGDDPSSIILESMLEGYAEYYSAELSQKVKRGMTENVLEHKWTGGYVPLGYSLAPDKTLQIDPSGAEAVKIIYEKWLSGYRIMDIIRYLNEHNYVTSRKSKFRYNSLNRILTNPIYTGLYRWGTIEVADYAPAIITQKQFALAQEKIHHIKAHPRAKRRSAAYALTGIIYCGVCGSPMTGQSGHSKSGALYHYYRCSTKNNYHDRGKKLNVKCTNRNISREKLEDLVLQTTINILMNPEAVRMIAKQAVAAQEKDPAATEIDRIKEDKKLIQKKLSNSIKAVEAGIISTTLAVNISQYEKEIADLDIKMEKIKLSSTPVKIDEIAVEFFLKNLLLQKKEHDKYRLDMFQTFIRRVIVYPDKVEIQYNYTATPILENPVIKMMTGNPGCSRCERLVTR

SEQ ID NO: 11476 - protein, 547 aa, synthetic construct
MRMRTIRKIEKLPSLPMMEEGKIKCKRVAVYARVSTDHEGQKTSLKAQKDYYAKLIASHSDWTLAGIYADDGITGTSYLRREAFKNMMADSKDGKIDMIITKSVSRFARNTVDALRAIRELKDYGIGVFFEKENIWTLDSKGEFLITLMTSLAQEESRSISENVTWGQRKRFADGGYSVAYRRFLGYDYGFVVNNDEARVVRRVYRMFLQGYGTTTIARKLTEEKIPSPGGQPQWHGSVVSSILQNEKYKGDALLQKTFTVDFLTHKAKVNQGELPKYYVRHGHEAIIAPWLFNYVQQRIKERDSAFYSGISLYTSKFVCGKCGAFYGPKPEHSTDKYHTVTWMCRNRFKKGNYCRNIRIDEADLDNLICQIAWVSIKCRPGVMALCRKVAEENDELLNAISKGGNRYTYADMENLAIIIKRILVFPDGHFAVELISGNYVYFSFIPKIHRNVKKTKRVGNGYCLYCGAPIEQNPKRREKKFCSDDCRMLWWNSHRDLVKHHMIRTEHCLHCGQIFQVYGNAKRKYCSHKCYVEHRFGKDTDINRNK

SEQ ID NO: 11477 - protein, 508 aa, synthetic construct
MKKAIAYMRFSSPGQMSGDSLNRQRRLIAEWLKVNSDYYLDTITYEDLGLSAFKGKHAQSGAFSEFLDAIEHGYILPGTTLLVESLDRLSREKVGEAIERLKLILNHGIDVITLCDNTVYNIDSLNEPYSLIKAILIAQRANEESEIKSSRVKLSWKKKRQDALESGTIMTASCPRWLSLDDKRTAFVPDPDRVKTIELIFKLRMERRSLNAIAKYLNDHAVKNFSGKQSAWGPSVIEKLLANKALIGICVPSYRARGKGISEIAGYYPRVISDDLFYAVQEIRLAPFGISNSSKNPMLINLLRTVMKCEACGNTMIVHAVSGSLHGYYVCPMRRLHRCDRPSIKRDLVDYNIINELLFNCSKIQPVENKKDANETLELKIIELQMKINNLIVALSVAPEVTAIAEKIRLLDKELRRASVSLKTLKSKGVNSFSDFYAIDLTSKNGRELCRTLAYKTFEKIIINTDNKTCDIYFMNGIVFKHYPLMKVISAQQAISALKYMVDGEVYF

SEQ ID NO: 11478 - protein, 453 aa, synthetic construct
MECVAYMRVSTEKQAEEGNGLDSQKRDIELFCRKNELVVADWYVDDGYTGANMDRPELQRLINDCIKKRVKCVVAFKLDRLSRSMIDGLYIIERVFQPNQVLFKCVHDSVSYDSPMEQAYTQMMAVFAQLDKNTMMLRMRGGMLERIKQGYWIGGANTPYCYNYSKEKGILIPIPERKEQANRALDMFIGGYSDLYIKESLGFHSEVLVRNVLTGVVNIGMIPYKGNVYQGLHEPIFDKERFELAQEIRKSRRKNKTACHTDANLLTGLCYCGVCGCKMRYQKWTHGKHKIYCCSRDKAMKYLPNFNPDCNNSLEWAADIEKQVESEILKISLNLSECKPIEKQSKLEIMQSQFEKEQVKLKRLYVLYSDGNDTVLEMIKNTEKSISEMKVKITEEEKNERNSQKKEVVYENIKKLADVWAHIDKKEKNNILKSIISRIVIVNGDVEIQLKNF

SEQ ID NO: 11479 - protein, 512 aa, synthetic construct
MQRAVIYARFSSDMQREESIDAQLRACKAYAKNKGYIVVDTYVDEAKSGREITKRDAYNKMMADAMEDKFDVIIFHKIDRNSRNELNYFKFKDKLERLGINYEYAAQPIDTDSPEGQVMETVMVGMAAYYSRNLSKETKKGLNENAYKALFNGGCPPLGYKIVDKKYVIDENEAAAVRLIFELYLAGKGYAEICRALDSKGFTTKSGKPFGKNSLYDILGNEKYIGTYTFNKIPKGKGKRNMHSQKRPDDYISIEDALPAIISKEDFFIVQAKRERNRCHAAKYTAKHDYLLSGKVFCGECGSAMVGHRVRQRYYYYGCTRKEQTPTSKCQQRMIRAEVLEHWVMQILERVVFTVSGMRRIADAIAKGYQEEESRHAAEQEALAKRKAAAEKKLNNIYKIFEEGEADEFDRQRLNQIKAELREINKSICEASVKSVESLDNKKIVAFLTTIKSEIFVKNNIDYARRAIDLLVTNVTVTGTVIKVTLSTQNVCAYLVPRTGIEPVRVSLPEGF

SEQ ID NO: 11480 - protein, 438 aa, synthetic construct
MSTDQGEQLLSYENQVNYYTNYISENPLYEYAGTYADEGISGTNTKKRDEFNRMIADCRAGKIDMIITKSISRFARNTLDCLNYVRELKDLGIGIIFEKENINTLDAKGEVLLTILSSLAQDESRSISENCTWGIRRRFETGKHKMSTKRFLGYDTDETGKLVINRTQEPIVVRLYQEFLDGKTTDYIKRIFEREGVKNWDGGTKWQSTTLMSMLENEKYKGDALLQKSYTVDFLTKKRTQNKGEIQMFYVEDDHDAIISKRIWECVQLEIKRRKKYLEEHGTNSYSHRPESNPFASKIICGDCNKVFARKGWRSSTGVDRKVWQCSERYKVKGVMGCANRHVEEETLIKAYLMAWNALVENREDFMEQWTEQLQSENLLEGYRAEKFIEYTDGAEPLTEMDTDFMLKTLDHIKVFEDGTLLVVFLDGTEIECKNEEE

SEQ ID NO: 11481 - protein, 501 aa, synthetic construct
MEIQIREGSREQKRKLKVCAYCRVSTDADEQENSLENQVRHYETVIKANPDYEYAGVYSDFAISGFKEKRPGLQKMLADAEKGKIDLILTKSVSRFARNTSIVLEATRKLKELNVGVFFELQNINTLSGEGELMLTILAAFAQAESESGSAGAKMVYQRKYEAGIPVQYLERSFGYTKDERGVFVADEAEAVWVRKIYEMAADGYTPASIKRYLNENGVKTVGGVQWVDSTVFRLLENEIYKGDYIMHKHFVNEERKLVRNRGEVDAWYIEDDHEAIVSPELWQKAQDALAVKRDYLAEGSVIEEFTEENYPYMNKIYCAKCGYPLYKRIYSKGNRLNWGCSGTKRYGKSFCDGINIPDGVLRSAWHFEENTYIDEKASDKGVKEFTYLKERSWKRRHKKKQPSAIPENTETEYPYREKIFCALCGSRLVRYVNPQNHKVTWVCNRRKRKGKEACDGTRVPDTVIKGWGEIKNDIYIQRKDDKNGKKRYSYTSKKPSGIRV

SEQ ID NO: 11482 - protein, 514 aa, synthetic construct
MSTEYAIYLRKSRADLEAEAHGEGDTLARHEHILMELAKSRALPIGAIYREIVSGERIANRPVMQQLLSEVEDGRWKGVLVTETSRLARGDTIDQGIVAQAFKFSGTLIVTPAKTYDPTQEADEEWMEFGLFMSRQEYRMIRRRQLAGTRASKKEGHYVPGRPPYGYERYKLDGRGWSLRPVEPQAGVIRTIYDMYLSGKGFSEIANELNAMKIRTPLDKKWVPATTRAILQNPHYAGFIPSAMKVNTKIVQKGKLITKRPVNKNCELYEGIHEAIIPRDVWYSVQQRMKDTVTPRVPRKYQQMNPLAGLVYCDQCGKLMSRHPYRREDKVRFGCENPSCSTVSSLFEDVENLVLKSLREFLHEIELSSPALLDTKSEEIALQNIEKQLTDINHRLQRTYELLEDGVYSKETFLQRQSAISQDQTALLNTKHEIERKLHNKQTDIEAQKNSAPLIRHVLDVYPTLEDPKEQNLLLKQVIRRIDYHKTVRVYGKAKSDLHLTIHPKIAIPQTSNI

SEQ ID NO: 11483 - protein, 576 aa, synthetic construct
MRRKNISKRTVDNTQRLKVAIYIRVSTTYQVDKDSLPMQRKDLIAYSSLVLGIEDYEIFEDAGYSGKNTDRPAFQSMMQRIRTGEFSHVLVWKIDRISRNLLDFAEMYEELQSLRVTFVSKNEQFDTSSAMGEAMLKIILVFAELERNMTSERVTATMISRANQGLWNGGRIPYGYNYDSDSSTFSIRDDEAAVCRIICDDYLENKSLVHTSRLLNSIGHKTRAGADWSPTTVWIIIQNPFYAGMYRYNRYKGTEYRTVNPEDEWVIINDHHPAIFTLEEHEKMLDILQSNSRTKNILGQKHRAKNVYVFSGLLYCGKCGSRLVSSPGRVQADGFRTAIYSCPKKRKTHECDNPSINDLIVGEFVINYILNMLNAKSSFSSISSPVELEQRLLSGSAFNGITHISETGLHELFNLLSRYGSDKSYSFSISAPRKKKASVDPEIASLRKDKEKQERALKRLQDLYLYSSSAMTEKDFIIQKMEISKKIEDINARLGMITHDVDSTLSDEDFIKQASHLLINKKLQSKEYIYYKNLAQTVSPEILKTYMETILDSIYVTDGRITSIVFKNGLTHKFDY

SEQ ID NO: 11484 - protein, 650 aa, synthetic construct
MTDYIGNYKNRPRRVVFYGRVSTEHEEQLSALGNQMEWYTDLALRNSNWTVVAQYIDEGITGTQMKKRPSFMRMIEHAKEHRFDLIVTRELSRFARNTVDALNATRELKQYGVEVYFVNDGIWTMDGDGEVRLTIMASIAQDESRKTSERVKAGQKMSREKGVLYGSGNIIGYDRVDGTYVINKEQAETVRRIFNLYAEGHGETTVAKMLIEENRKDGGGGLSWTASKVSRVLRKPTYKGYMTYNKSHIDDFLSHNRINHSEEDFVLVKGDFEPIVSEELWETCNQIRSKRAAFVKGKDGRAHKFGVSFPQNKWTKILFCDCGMRFQIEGYDKTANGGENMRLICARSKMFKKKDAARALNGIPCPAPYASEWKLELMAREVFCTVWKENAEDILGLLRMLDANLNTTGTPNDGNQLENKLSALNEELDDLVSQRASRGITMDDFLSRSTEINNEIINVEGLLQSSIQEQRPKARLDMHSIEAALGDDASFPDVKIELGFLDRYANRIVKSNNRYIWMLQLMNVQQIMPIQSERQPIAMVTYKSGVPYDIEQEQIGKQDKESAGPDCATICRPQDFFLNMSRTKRKRKLVEWLESCQENQVSVLDEKIPLLSFAVDFVTAYEYQKARGIKIHPGLWKDMRVDIFLVKKEN

SEQ ID NO: 11485 - protein, 610 aa, synthetic construct
MRAAFLIRCSTKKQDYERQVNDLTRLAKKFGYTSSDNMIFGEHITGKDDASKRDRQSIQRLKDAAVNKEFDVVLVSEVSRMSRDPMSGRLYVRQLINMDIPVYFRDIDTWTIDPVTGKKVRDAETIIGAAFDAAWKYIKSMKTQIASGRRDELDNNQMSIGQPFFGYKRYGGRDKGKKNSWVINDDAAKVVVDVFEEYIKDGATLKSTALTISARYGKQFNKKFSIGTMEHILTFEPYYTGIKVVSLTDPDTEDVDKFEVKIPTIITQTVFHKAAIKRATNRVTKNPYPRQTTYVLSKLLKCPICGHSLTPQKRVGDKGEKYRLINGKIAISWTCMSGINNATDCNSRISINNEKIEMIIWGLVKQELIGFANLNDENRMAKIEELTNKIASLEANIANFIVQISNMDKLIERAYSAYIDAPENVMDIAKNKYYQTLTKCENEKVECKHKIEDLKVEKQKQGNILTFYSQPTLPKDAIEKAESDPIKKRNLVVELVDKIYTYKISTYVSPVTKKIIRNGIVLLEVCTINGIYNVLYDSNQRNNKVAYYISGNYATFQNGKSKFDAYPIGEYFVISNANMVTDTDEIDLTVTFNEMIDICEQNGWEINYSF

SEQ ID NO: 11486 - protein, 578 aa, synthetic construct
MKGAIYSRVSTEQQDYSKQTNELKDYAKRNGIEVVYVFEEKESGFNNNRPEFEKLRKLTKQDIDIILVWEISRISRRAIYLQQQVQEFTDKGICIYAKKDGFSTLNDDGSVNASTKMLIGFASIIAEQEAATLKERTISSKRNKILREGKSYTYYAPYGYDYSKETKMLSINEKQAQVVKRIFQLSIDGYSTERIAILLNAEKIPTKGKKENWTAGTVCNMLTNPVYKGEANYTLKKEKKAGSTYCKPMEVVTISTPAIIEKEQFELSLQKLAERTKRSNSFGTKYNPLLRGLIHCPHCDVKYVYNFGTNQYLCVNKYKKASNKNVHCTAKCISNKLDSIVWNVVKTFFYKELAAGKAQEQIEPLQAEIESYKRQILLLDGKQSELTARANIIVDAAIEIKIQFPNMPDLYANKMKEVEEINKEASKYQKEKERLEKLIHSNESRIKNINRASKESALVESITDETEKYDLVHKAIDKIMIFGEGKISIIIVTFSTGQTIYLGYSSKSNSKYYTIFYPSSDIYFDIQTSKGYINHLKEKATINSDGSIYLGDLTGEVKEYSIIDFVNYLDIEENRRYY

SEQ ID NO: 11487 - protein, 524 aa, synthetic construct
MNKLRAAAYCRVSTDRAEQSGSLASQRSFFDDYIRNSDSMTLVGVFYDEGTSGTTTLNRYGFNKMISLAVSGGIDIILTKEVSRFARNTVDTLNITRMLRAKGVGIIFINDNIDTRDSDGELRLSIMATIAQEESRKISERVKWGQQRKMEQGVVFGRSCLGYDVKDGKITVNADSAEIVKRIFTEYTVLLKGAESIADGLNAEQIRTVNGGRWSGAFIRKVLRNVKYVGDLEQKKTCTPDFLTHKKRLNRSEHIYIRNHHEPIISRELWEQTQAEISRRKPTDTSRHSDRYVFSGKVYCGVCGSVMVSRVKTLKNGKIYHALRCSGRIGGKSCNNETLNVTALKACVKRIFTDIPIDKTAVINAVIKGLSRTDKPDIPALRRKIETLNAKKRRAVDLMLDGLITQQELIEQKSYYDSIIEKLSQEISSDRSVFETDKIRKNAERFLDFTSDPLWLLVRRADYIHSTLTVYLKGVEKGFTTCFTATGRGDSYRVITGNTVRSQGIIPGTMQVPKNRCRHDVNDK

SEQ ID NO: 11488 - protein, 482 aa, synthetic construct
MTNQTGTWQYVGGTNYIEEVAAYIRVSTQEQKLHGISLEAQVEKLTEYAENHGMKIVKFYKDEGVSGRKLIKKRPALQEMIQDAEKGKFKRIIFIKLDRFFRSVAEYHECMKRLSAGGVIWTATEEKYDLSTPSGEAFVNMKLTMAQFEADQAGERIRMVNEYKIKSGQPLFGAQCLPIGYTVTQPEDGERHKYVSKDAEMEAATSDLIEYALTHGTIRGAMSYINNKYDLHIGYNACAKTLKNEMICGEYRGNPNYCEPYIDRETFDRLQKLISRTPRSTGEKRTYYFTGLICCPKCGRRLVAGIFRSNTKWRKYTYKVYRCSAHFKEKNCEFSSVVLEQTLEDVLLEKLGSIVERKSIEAEDVAAADEKVGKYNIAELQAELDRLNYSWQKNRIKSAEEYDRKYDAIMEQIEAAHAEKEEMGNVDFDRIRDILQSDWRELYKALDDDHKRSFWRSFIEEIELDWGKGRYGKKDIKDITFF

SEQ ID NO: 11489 - protein, 425 aa, synthetic construct
MDRVVKRVPLTKTALPKLTRVAAYARVSSAKDAMHHSLSAQVSYYSSLIQRHPGWQYAGVFADEAKTGTKDSREGFQNMIAACRAGSVDAIITKSISRFARNTVTLLETVRELKGYGVDVFFEEQNIHTLSADGELMLSILASYAQEESLSASENQKWRIRKNFEEGKPWNGTMLGYRYHNGTLVIEPGEAEIVRRIFREYLSGKGVVTIANGLNTDGIVTRYGNQWHKRSVTCVLQNYAYTGNLLLQTTFRENHLTKRSLPNDGQLPQYHAKGTHKPIISMADFWAAQAEMEKRSAKHAPKGKNYTARYPFSGMIVCGNCGKHYRRKVTASGPVWICSTFNQQGKVACASKQIPEPALLALTADMDLSDLTEICAENGNRLVFRFKDGSESVKRWQERSRAESWTPEMREAARQKALERSRKNG

SEQ ID NO: 11490 - protein, 527 aa, synthetic construct
MANITVIPATKALHTQMPINTRSRRRVAGYARVSTDSEEQLTSYEAQVDYYTRFIRSNPDWEFVDVYTDEGISALNTKHRDGFNRMIEDALAGKINLIVTKSVSRFARNTVDSLSTIRLLKEHGVEVFFEKEAIWTFDGRGELLLTIMSSLAQEESRSISENVTWGQRKRFADGKVTMPYSSFLGYRKGADGLPEIVPEEAAIVRQIYTLFIQGKTLNWIAKYLTEQGIPTPRGKAKWQSSTVESILTNEKYKGCAILQKKFTVDFLSKKMKVNEGEVPQYIVEQSHPAIIDPDQWEKVQTEMEVRKSRGRHHNCLSPFSTKIVCGDCGEYYGPKVWHSTDKYRRVIWQCNGKFKGEHRCGTPHLYEEDIKRLFLQAVADLTEAREVLMETCQMLLDEYLNTEKIDAECAALETELEIVSELTRKLIAENATTVIQQDEYNRRYDALAQRYRDAEDRAQQLQSQKVTRRFQADVIESFMNEIRAFDDSLPVQYSDRLWLNLIDRVAVYEDGRLVFRFKNGTEITEIL

SEQ ID NO: 11491 - protein, 528 aa, synthetic construct
MTPREVQVIPATKNIIRRIDPTARKRRVAGYARVSTDKDEQFTSYEAQVDYYTQFIKRHADWEFVKVYTDEGISGLGTRKREGFNEMIQDALSGAIDLIITKSVSRFARNTVDSLVTIRKLKEKGVEVFFEKENIYSLDGKGELLLTIMSSLAQEESRSISENVTWGQRKRFSDGKVSLPYKQFLGYDRGAHKDDPPVINPEQAAIVRRIYRMFMEGKTVGMIARELTADGIPTPSGKKNWPASTVNSILQNEKYRGSARLQKCFTTDFLTKSRKVNEGEVPQYYIEHSHEAIIIPEEWDAVQDELARRKQIGNAYSGKSVFGAKIKCGDCGAWYGMKVWHSNDAYRSKVWRCNCKYEESKPRCQTPAVRDEDIKERFITAFNAMVADKKPYLEACEAAKTVLTDTSAIDTEMEELRREMEVVAGLTKKCIEENSTAAQDQEEYAARYNGYVDRYEKAKERYYALTALRQEKLSKAKAIDRFIATVSKRDDLLTEFDNRLWLSLVDYAEVHRDGMLTFHFFDGTEING

SEQ ID NO: 11492 - protein, 419 aa, synthetic construct
MDRIIEKVAFDVQKQPKATRVAAYARVSSEKDTMFHSLSAQISHYSDLIQHHSGWLYCGVYSDDGITGTKINRPGFLKMLEDCRAGKIDLILVKSISRFARNTVTLLETVRELRNLGVDVFFEEQNIHTLGSEGELMLTILASYAQEEALSVSENQKWRIKKNFKEGRPWNCTMLGYRNDDGTFIIVPDEAAVVQRIFSMFLNGMGTQTIANALNAEGIRSRRGKEFHHTAIRKILQNYAYTGNLLLQTTFREDAITKVMKVNTGELPMYHVLGTHEPIISLEDFNRVQAELERRNEMYAPAYQPSEAYPFTSLISCAKCGKHFRRKSRKCGAVWICPTYDRKGKAACPAKQIPDSALRKLTADMDMSRITGVTADDGNRLIFAFDDGTTEEKIWKDPSRADSWTPEMRKKAAERTKVR

SEQ ID NO: 11493 - protein, 648 aa, synthetic construct
MSTGTELRAVFYARVSTQEEQQLKALPKQIQENRDRIREKGWVLVDGYVDEGKSGTVIKRRDEYQRLLEDMELNKFDVVVVKDQERLQRNTRDWYNFIDRLVQNKLKLYFYLDNTFYSPDNALITGIKAIMAEEYSRNLSKKMNNSNKRRIEKAKAGEEVSAMGNGQTYGYQIVNGKWVVDESQREVVRRMYELYTELHSVRKVRDALNKQGYRNQRGNLFTDENISRIVKNVMHKGWVILNRHHRDFDTKEIIEKSEEEWVIVKNDHEAIVSEELWDAVNDEIQSHRNKGNSGTRGKRGGTDSLSGKMVCSCCGRVLWKHASQGSYKSKEGRKYTYKRYTQWYCSGKVGRGELACTDPATISGVKLQKYLVEMADMFLDYSTVEYSKNLLKRRTISWLEDLKDKLTTPNDNGKIEQDLKALEGKRGKLIDLYTDELISKEEFKSRSVDLDAEIEKKRSLLVPVEENPDIKAIEDTIANIDAEIEALFEDKAMVEEKKVQFIQEHIKKIYVSKNSDVFIVLDNVAGAFLFIDKEDTRIEVVPVAEYNPEELSEEGITENDFVPFDRESMPLPHVRVPPKGSGGKTKPHFPLRDRFRCHQQRRNLERHRQSDLPAGAGRAEEAWDRENSIHKFFKKTCTAGNKRRLRVL

SEQ ID NO: 11494 - protein, 501 aa, synthetic construct
MEIQIREGSREQKRKLKVCAYCRVSTDADEQENSLENQVRHYETVIKANPDYEYAGVYSDFAISGFKEKRPGLQKMLADAEKGKIDLILTKSVSRFARNTSIVLEATRKLKELNVGVFFELQNINTLSGEGELMLTILAAFAQAESESGSVGAKMVYQRKYEAGIPVQYLERSFGYTKDERGVFIADEAEAVWVRKIYEMAADGYTPAAIKRYLNENGVKTVGGAEWIDSTVFRLIENEIYKGDYIMHKNFVNEERKLVRNRGEVDAWYIEDDHEAIVSTELWQRAQDALEAKRDYLAEGSVIEEFTEENYPYMNKIYCAKCGYPLYKRIYSKGNRLNWGCSGMKRYGKSFCDGINIPDGVLRSAWHFEENTYIDEKASDKGVKEFSYLKERSWKRRHKKKQPPSIPENTEAEYPYREKIYCALCGSRLVRHVDTKSHKIIWVCNGRKRKGKDFCDGTRVPDAILKGWGEIKKDIYIQRKDDKNGKKRYSYTSKKPSGIGA

SEQ ID NO: 11495 - protein, 463 aa, synthetic construct
MARSVTVIPARNRQASGHRAAPQKKIRVAAYCRVSTDQEDQLHSFEAQVDYYTKYINDHENYEMAGIYADEGISGTNTKKREQFKRMIADCEKGKIDLVITKSISRFARNTQDCLMYSRKLKNLGIGIIFEKENINTLDSTGELLFTILSSLAQDESRNISENCKWGIRTKFKNGEMHLNTFKFLGYDKDENGKLIINREQAKTVRRIYRDFLWGLNPAQIAKELEEEQVPGCLGQTKWYASTVVGILKQEKHMGDALLQKTYTADFLTKRQVRNNGEVAQVYVKDSHKGIIDKETWNAVQEEFDRREKFMQRHGTDRYSYGSECYPFCEKIFCGECGSLFTRHSWKSRGIIQWQCKNHRKDGKVACTNAYVDNADLEKGFVKAFNRLASEREKHMERWNAMKADGTPLEKIRAVQMMEATENGQLQKYVPEAAQLVLEEITIFGAKKYEFAFLEGSRVKVSV

SEQ ID NO: 11496 - protein, 551 aa, synthetic construct
MARAAKQDSNSEIIDGVIYARYSEGPNQTEASIEGQVRECKEYAKRNGIRIINVYSDSKHTGTNDNRAEFQKMLRDSRRGGFSVVVVWKIDRFGRNRAEMAQNKALLKLQGVKVVSAKEYIPDSPEGIILESVLEGMAEYYSANLSQNIKRGMKENALHCKSNGSGKSLGYIVDKDGYFEIEPNEATIVKTIFQKYDEGMKIADIWREIVASGAKTKRGKDFTQYGISRVLSNRAYIGEYRYGDIVTPGGMPRIIDDDLFNRVQERRALRKKAPASRRSNSDVDFLLTGKVFCGHCKGTMRGMSGTSKTGRKFYYYACHDKIFKHNKCTKKNVKKEWLETEVTRITRDDILNKETIEFIADRVVEIQRQEQEDKSMLRYYEQQLRDTQSAINNIMKAIEAGIITSSTKSRLFELEEQKSIIEGEIEREKIITPVIEKEQVIFSLERFFGGDINNKEYQRNIIDMFVNKVILYDDKIIITYNISSQNEISVDVVEQAAFAALDECSSKLSLAPPAGACPCTQSALLYVRRFFIAAHGSLFINPTLLFHHGRR

SEQ ID NO: 11497 - protein, 577 aa, synthetic construct
MRVAVYARVSTEHEAQINALENQLEWYKIECSRHSDWEIVEVYVDQGITGTQAQKRPEFLRMMEDAQKGKFDLIITREVSRFARNTVDTLSYTRELKARGVDVFFINDGINTATNDGELRLTIMSSMAQDESRKISERVKAGQKISREKHVLYGSGNILGYRRENGTYVPDPDQAETVRLIFQMYSTGENGLVKIVNELYRLGRLDAGGHVSWDASKVSRVLHNATYKGCICYNKSHSDGYLTQKRVKNLDESSYIYVKGDFEPLVSEEMWDRCQQILASKSARVIDENGKKHKYMRNTPKSVWTAKLRCSCGAGFIQFKWRVNRDGAVVHGFQCYRRTRRPSISYLQEHGLDLGISCQIRAICEWKLDLMAAKVFEHLTFDKGKTVKEVYKILNRCMAEEKTVRISRKAMLENSIARQRERLDKYIDLCADGIITKQELAERRKGLDAQIAELQSQYENVEQEDERSGTLDMNLIAQKLDEWQKASRNDVDRELINSCVAQITPLTNEEYRWVLDFQLTEVQSRNSATCTLDGFMEMARFRISFEEAKAFKASRNQGIRKNEWHDLTVAVGIRTKA

SEQ ID NO: 11498 - protein, 500 aa, synthetic construct
MDKKLKVAAYGRVSTNSKQQSHSFDNQSDYWNKKLAEDPRYEYVGLYADKGISGKYMKYRPQMLAMLDACRCGKIDMIFTKSVQRFARNTIELLEVVRELRDMNIAVYFEKENINTLTAESELYLTIAAAVAEEDLNRYGQNVAWTIQDRFEKGDISVVGIRMLGYETRNKKLHIIPSEAAVVQQMFELYSTGNYSTRQMAELLNSRGYKTAKGNEWTSQTILGILTNEKYKGDALLYKRINVNGQQLMNHGLRDMLYVENSHDAIISKELWDKVRDVLDKKGNKKLRGKTIDNYPFTSLITCPICGKSYIHKVNNAGTKYACPIWRCKMQLTYGKSACSNTGIKDSVLKEKFIDVYNEFIESKRFGETNSEAEQQLKKLINDENELIALHVRGLISKINLDNDRAELRKQRIILERQINEYRQSHIKNLELKPITEFNEELVGRVLKQVTIQDWIITFEFYNGVKISRQYTNGPNGNQKGWKEKKRLKEAQEQNGNDNQ

SEQ ID NO: 11499 - protein, 539 aa, synthetic construct
METIINNQPKVVRVVRKVSSTQITAQTIREQLTDTRLPVAAYARVSTTNEEQEDSLERQRAHYTEYIGNRPEWRFVGVYDDPGVTGTRVDQRKGFQRLLNDCRAGKIKKILCKSISRFARNTVDALKYIRELKELGIGIYFETQNIDTMTAGGDILITILAAIAEQESRNMSENIKWAFQKKFKEGELMLVCSQFLGYDRDKDKNIVINEEQAKIVRRIYREFLSGYSCATIAKNLTEDGIQTVTGKKQWRASGIRNILTNEKYFGGAYLGKTCKKDVLSKERVVSDEVYYVENSHPAIIPKDTWDLVQLELERRKDYRSCTETGNGRYSSKYPFSKKLICGECGMVFRRHAQYKKGEYVRTWVCITHKIKGNEYCSQRYILEDDIERCFQRVINEFVGDMSQIKEILKENVTSTLSEKDDNRGEQILLRMQALQAEMIDINRKKRAGEIAYELYIAKAQEIADEVEKLEREQKEIQSTENDRLAETKRLKDILEVINEMHPTDEFDGEMFRRLIDNVIVKGNQLTFNFKVGIVKTATI

SEQ ID NO: 11500 - protein, 521 aa, synthetic construct
MNRSVTVIPPKRRVGNTIAKEEKPKLKVAAYCRVSTDSEEQASSYEMQVEHYKAFIQKNEEWQFAGIFADDGISGTNTKKRSEFNRMIEECMAGHIDMIITKSISRFARNTVDCLNYIRKLKDKNIPVFFEKENINTMDAKGEVLLTIMASLAQQESESLSKNVKLGLQFRYQNGEVQVNHNRFMGYTKDDDGNLVIEPREAEIVKRIYLEYLQGASLKQIGDGLERDGILTAAGKPRWRPESVKKILTNEKYIGDALLQKTYTIDVLTKKRVKNNGLVPQYYVENSHEAIIPRELYAQVQEELLRRANLHSGKDRKKRVYSSKYALSSICYCSKCGDIYRRTAWNNRGKKHNVWRCVNRIERGPDICDAPTVEEEELKAAVVRAINQVLGGKDEMLETLEENIRTVLALGDDNSLESINERMEELQKELLKTANAHKDYSDLADEIDRLREQKQNLMTKSAEREGLKQRVAEMKEFLNEQIGKIEEYDESLVRRILEKVTIYDSYFTMEFKSGVSVDIRR

SEQ ID NO: 11501 - protein, 515 aa, synthetic construct
MKRITKIEEDIIQKQKIRVAAYCRVSTASDDQIISLDTQKAHYERYITSNEDWEYAGIFYDEGITGTKKECRNGLMALIKACEDGKIDRIITKSISRFSRSTTDCLELVRKLLTLGVTVVFEKENIDTSKMESELMLSILSGLAESESRSISENNKWSIQKKFQNGTFVISYPPYGYKNVGGEMTVIPEQAIIVKQIFEDILKGESTHSIACALNEKGVKTKKGSKWSAGTVNAIIKNEKYIGDVICQKTYTDSKFNRHRNDGNLTQYLWENHHEPIIDRDTFSKANAMLLQRAKEKGNGINTERYQNRYALSSKVICAECGGVFKRRKHYKPSGDYIAWCCNNHINHTKPCSMKYITDDAIKAAILTMKNKLIFAEDILLKPLLYSLQGFDDKDRLLNIEAIENQLEKVTEERQVLASLISSGLLEPGMASSENNKLNARERQLTAEKESIMNSVLGDRDKIRELEKLMKHLPQEMTADDFFLEFVDKILVLSREEIQLELKCGLRLKERLVAK

SEQ ID NO: 11502 - protein, 464 aa, synthetic construct
MARSVTVIPARSQKVRTGHKAVQEKKIRVAAYCRVSTDQEDQLHSFEAQVEYYTKYINEHENYEMAGIYADEGISGTNTKKREQFKKMIADCEDGKIDLVITKSISRFARNTQDCLAYSRKLKNFGIGIIFEKENINTLDSTGELLFTILSSLAQDESRNISENCKWGIRTKFKNGEMHLNTFKFLGYDKDENGKLIINREQAKTVRRIYRDFLWGLNPAQIAKELEDEQVPGCLGQTKWYASTVIGILKQEKHMGDAILQKTYTADFLTKRQVKNNGEVAQVYVKDSHKGIIDKETWNAVQEEFERREKFTQKHGTDRYSYGSECYPFCEKIFCGECGSLFTRHSWKSRGIIQWQCKNHRKDGKVACTNAYVDNADLEKGFVKAFNRLVGEREKHIERWNSMKLDGTPLEKIRAGQMMEATESGQLQQYVPEAAQLVLEEITIFGAKKYEFAFLEGSRVKVSV

SEQ ID NO: 11503 - protein, 502 aa, synthetic construct
MEIQITEGNSRQKRKLKVCAYCRVSTDADEQENSLENQIRHYKEVITSNPDYEYAGVYSDFAISGFKEKRPGLQKMLADAQKGKIDLILTKSVSRFARNTSIVLEATRKLKELNVGVFFELQNINTLSGEGELMLTILAAFAQAESESGSVGAKMVYQRKYEAGIPVQYLERSFGFKKDERGVYIADEEEAAWVRKIYEMAADGYTPASIKRYLNENGVKTVGGVQWVDSTVFRLLENEIYKGDYIMHKHFVNEERKLVRNRGEVDAWYIEDDHEAIVSPELWQKAQDALAVKRDYLAEGSVIEEFTEENYPYMNKIFCARCGHPLYKRIYSNGNRLNWGCSGTKRYGKSFCEGINIPDGVLRGAWHFDENMYIGEKQTDKGKKEFTYLKEASWKRRHKKKEPEPIPENTETEYPYREKIFCGLCGSRLVRHVNTKNHKVIWVCNGRKRKGKDFCDGTRVPDTIIKGWGEIKKDIYIQRKDDKNGKKRYSYTSKKPKGADRA

SEQ ID NO: 11504 - protein, 590 aa, synthetic construct
MKTVEKIERKLPVLKTRKRVAAYARVSMESERMQHSLSAQVSYYSALIQKNPEWEYAGVFADYGISGTGTKKRDEFNRMLAECEAGNIDIILTKSIQRFARNTVDLLNTVRHLKDLGIEVRFEKENINSLSGDGELMLSILASFAQEESRSISENVKWGTIKRFKQGIPNGKFSIFGYEWQDDKLVIIPEEAEIIRWMYAEYMKGASRIEIGRALMDRGIYTRQGKPWMDSNVKVILTNITYTGNMLFQKEYCEDPITKHRRKNYGELPQYFVEDTHEAIIPMDEWQAVQAEFKRRRDLGPFGNKSLKLSAFSTKITCGCCGKHYRHSGKRNTAGEVYYIWTCQTKSQKGASACPSKNIPEKMLQNTTAEVLGLAEYDEDAFSQQIEEVIVIGDDTLTFRFYDGHEVTTKWQSTAKTDWWTDERRKLWGERHKRKDTNPNRHLFYEFTGFIKCGCCGANYRCQSGKRKDGTPTRSWYCTGPKAQCHNPGIRDETMKRLVTDVLGLDEFDEAAMDAQIENATILDHTVTFHFRDGHTESRDFLDKRHGTPWTEERREKARESMKAAWTDERREAMSERIKKIRSEKKWPNP

SEQ ID NO: 11505 - protein, 523 aa, synthetic construct
MAKSVTTIPATLSRFTAAPINSTKKRRVAAYARVSTDNEEQLTSYEAQVDYYTNYIQGRDDWEFAGVYTDEGITGTNTKKREGFKSMVADALDGKIDLIITKSVSRFARNTVDSLTTIRSLKEHNVECYFEKENIWTFDGKGELLLTIMSSLAQEESRSISENCTWGQRKRFADGKVTVPFNRFLGYDMGPDHNLVVNPEQAKLVKRIYGMFLQGQSPFQIARTLTEEGIPSPGGKDHWNPSNIKSILTNEKYKGDALLQKSFTVDFLTKKKKANEGEIPQYYVKDNHEAIIDPETFEMVQTLMATRKKGRNRKSSVSIFSSKVKCGDCDSWYGPKVWHSNDAYRKVIWQCNHKFDGQKCATPTLTEDEIKELFLRAANQVIDQKEQFIAIYEQILSRSLDTTALEGELTELEAEINIAAELIEECIKENAHVALDQAEYQKRYDGLVARFDKAKDRHTKVTDLIAERTARRHQIETYLQELRSREPLTEFRETDWLAMVDYITVHSKDDIRVTFKDGTEIKV

SEQ ID NO: 11506 - protein, 485 aa, synthetic construct
MPTSDLKIAAAYIRVSTDDQEEYSPDSQVRLIREYARKNGYLLPEEYVFQDDGISAATARKRPAFNRMIALAKEKERPFDAILVLMFSRFARNREESVLYKGLLRKQGISVISVKEPAVDGPFGTLIESIIEWFDEYYLINLSAEVKRGMSEKFLRGEAMGTAPFGYRIDSANKTFTVDPERAEIVCDVFRSYADGAGLRDIAVQLGDAGITTRRGNRPDSRFVEYMLRNPVYIGKIRWTPGHKTRYSRVHIADGVEVVDGKHPPIVSMDLWEAVQRRMDQRKAAYGRYQRQAPAAWMMRGLVRCSACGATLIMAGRSSSCPFLQCHSYAKGACHTSHSLSLRRANAAVLAGLRRSVGTLTFHMVPHLTSAPSRAADYGRLLEQERRRLARCKDAYQAGVDTLEEYRDNKARLEERIRRIEEQAASAAAAPGSFDKAAYGKKTADILRFLETSADEGAKNEVLRSVVDHITYEKASRHLAIYFYT

SEQ ID NO: 11507 - protein, 576 aa, synthetic construct
MSVDIKWQVPKAQPEASELAVVYARYSSHSQGEQSIEGQLSNARDYAAAHGYTIVHEYVDRAKSGRTDNRAEFQQMLKDTAKRQFSVIILWKVDRFGRNREEIAINKMKCRKNGVRVEYVAETIPDSPEGVILESVLEGFAEYYSLQLSQNIRRGRAESAEKCQSLGGNRPLGYKTGPDKKFVIDENTAPTVKMIFTMYADGKTVTEIVDKLNEMGLRTLRGGPFTKNSLHSILKNKKYIGIYEYQGREIKNGVPRIIEDDVFNKVQEMLKINKRAPAKTWSRADYILTDKLFCGKCGALMFGESGTSKTGAKHNYYICSNKKRFRSCDKKAVRQADIEDTVLNATHELLQDDELLDYIVDRTWEYYLAQDNSQEELRNLQRQLAQTDTAISNLIRAIEAGILTEETKKRMDELTQQKADLKASIADREIARGFHLQKSHIAFYLRSLRDADWSDKEAQKRLIQTFVNAVFVYDDHITLTYNFSGDKSTVTLRDMQRFEDGEEFGCRASRSTNNKRTALAVLLLLKKHRIIRTPSSPKGLKRFAPEETTESVQTDAQTGVQNPRRSLSYAREEIYP

SEQ ID NO: 11508 - protein, 602 aa, synthetic construct
MYITVTLDPNGIYDAYLRKSRADMELEKLKKFDTLKQHEKFLKDRANQLGIKIRKIYREVVSGESIQERPEMQEVLKNVETGTIDGILVVEVERLTRGDAKDQGTVTQAFKYSNTKIITLNKIYDPNSDEDEEYFEFGLFMSRREYKTINRRMQRARIANVLDGKYCASEPPFGYKKVRVKYGKGYTLEPVSEEAEIVKEMYQKRADGMGYDIICNWLNTLDFKPKKSDVWTPATIKGMLSNPIYIGKIRWNSNKQKKILINGQIIKKRKKGNNEDLILVEGLHPAIISNELFDIVQGIKPNKASTKHNTELQNPLATLVKCADCGRSMQRRPYYDNKKQEPKLRRKYDIDKEKLRLCLREHKGEYSLRDIATALKVRKHCVDHWFASNQSKFTMPYADKWEELKKLLNINTTEFDKAITTYESNLIEPHEDTLICPKAHCTNIGSNLALVEQETIKALQEYISSQKELLATYNPAEEDDNVMFVSLSKELDKYNKQLDKAYELVEQGIYTPQEFTKRTKTIKDKITNTEKELNKYQIKLNKDRIEKLLPKIEKVIDSYYKVTSAEKKNKLLKSVISYIEYKKEKGGRGYESNFSIVIHPKF

SEQ ID NO: 11509 - protein, 466 aa, synthetic construct
SPKDTKSKKGIAKSKLNVAAYCRVSTESDEQMNSLANQKEYFEKLIKSHEDWNFVDIYYDEGISGTSLKKRDGFNKMIADALAGKIDMIVVKSISRFSRNTVDALQTIRNLRNHDIRIFFEKESIDSNDIKSEFMLTIMSSLAQEESQSLSENVKWGKRKIAQKGLVQIPYSNVLGFQQKGKYGIEIDMEQAKTVVLIYDMYLHGKTTGEIKKKLIEDGTPTPTGLEASHWCNTAILSILRNEKYCGDAILQKTYTKDFLNHKKCINYDAFPKYYVKNNHEEIIPRVTWEYTQELLEKYSKRSVNVRYGDLIFCSACERKYRRFHRYHKYYEETILSYRCLGKYDKSTNCNNITLFEKQLNELYHETVLQLLSIYKKELLEYFKLTIPKVIKGKRKSNRIIKLLDNMISFIRSDYEYYSLHILIKNILVHPDKTLEFTTLDGNIIKTSIPKYRLVDHYGRKKTSGY

SEQ ID NO: 11510 - protein, 468 aa, synthetic construct
MLYGKPQNYSWYRARVVLYIRVSTDEQARHGYSLGAQREALREFCDTFQCQIVAEYSDDGVSARKEIQRRPGLLRVLEAVKAGGVDYVLFIKLDRWFRSVREYYRVQDVLDAAGTNWKAILEDYDTSTTNGRLNLNIRLSVAQDESDRTADRIKFVFSERVKNGGAIFGSKSLPYGLEVRGHRVQIVEDQAVIVRAFFDHYEAVHSARSTQVWLRDQCGVDLPRNAIGRMLRNGLYCGQYRDNKNYCPAIISPDQFQRVQEILARQASGHTRQSKYSYVFTGLLRCPVCGCTLKAFPQFDHKLNRLYLRYRCTQHWIEKRCSWKTTPWEPRLEGWLLDHIQPQLDAYIAQFDVQEAQRRQAVVDVGAIQRKLSRLQDLYVDGVIDRAAYDEKYRALIQQQDAAEAARAAQSAERDLGPLRQLLAGDFRSIYATLSPQERHTLWASVIDRIVVKDGRYGHFDLDVIFLP

SEQ ID NO: 11511 - protein, 553 aa, synthetic construct
MEKSKRVVGYARVSTEAQDITRQIELITAYCNDRNYHLIKIIQEKISGARKDRKSLNELLEVDDTVADMIIVSELSRLSREDDILSVLSTINELLKQGVDILFLDKQDRIYKAGTVLSLYDIITLSVEAKASADERYKIAGRMQTGLRSKLAEFTNMFAGGTVPFGYKIIHNPEYKLNQTPKNLLIVDTPKAEAVKYLFQQLIDGNTIRQTVRVYNKLFPYKLSYSGICRIIRNPKYKGEIYRRGKLYGIMNELQIITPEDFDKANKQMRENSLFQSNAPKYYNPLKGLLFCPCGCSLYMKPNHNSYLIYRCSSAYNEKQKCENYGVKCAYILSSVWICVKETLHTEEYKRFNTQRANELQGVNKQIRETIIRKVNSVDELKAQSASLIAKIKKLNNEDLISELETDYNVLCKQIKQTEQEISELNGQIVENDAEIKRNMEQKDFSKMEQSALYKEKLQKAVYHSLSAMRGFLEIIFKNGMTRYVLIKKHRNGGAYLLPDTFKGDMERKQIIVPSLRIDKNNPYSTQPINLRYTFDEFFKAMPVEEYQIPITE

SEQ ID NO: 11512 - protein, 527 aa, synthetic construct
MAQRKVTAIPATISRYTATPINSTKKRRVAGYARVSTDHEDQTTSYEAQVDYYTNYIKSRDDWEFVAIYTDEGISATNTKKREGFKAMIADALAGKIDLIVTKSVSRFARNTVDSLTTVRKLKDEGIEIYFEKENIWTLDSKGELLITIMSSLAQEESRSISENVTWGQRKRMADGKVSFAYSRFLGLDKDKETGKIVVNPEQAETVRLIFHLFLEGMTPHSIAAELTSRGIKTPAGKDVWNQQTVRRMLSNEKYKGDALLQKEFTVDFLQKKMKKNEGEVPQYYVEGNHEAIISPAVFDLVQAEFAKRTKGGTRYSGMSIFSNKIKCADCGGWYGSKVWHSTDRYRRVIYRCNRKYSGEDKCQTPHVTEDEVKAAFVSAYNQLVTEKKEIIANAEIIRKTLCVTDALQEEKGKLEEEMAVLVEMTQNIVAENARVAQDQDEYQKRYDGLVQRYDTAKARYDEVVAAISAKEAQSERLADFIKVLKAQDGTISEFDGSLWGSMVEFITVGRDKEITVTFRDGSEILA

SEQ ID NO: 11513 - protein, 505 aa, synthetic construct
MSNAAIYARYSSGHQREESIEGQIRECTDFAKRNGLTIVEHYIDRAISAKTDDRPSFQQMVADSSKKTFDTIIVYTLDRFARNRYDSAVYKAKLKRNGVRVLSAKENITSDPSGIILESVLEGMAEYYSVELAQKVKRGMTENALACRWASGRIPFGYTIDADKHLHPDPALVPIVQEAFEMYAAGAKIVDIARKINSYHVVTGMGNKFGRSSFDRMIRSETYIGVFKWNDIRKENAVPPIITPELFYKCQARYNARNKKNVARPSAIYLLSGKLRCGCCGGSMCGMSGKSRNGTMHYYYSCYSTRRRTSHCDIGNIRRDEIEHIIAAHAASILKKPINLDIIANQALKTNISVKNYRLESLIQQEKDLTQKLENCMKAIDQGLVSITLMDRIKQYEADLQSVKNDISLEKIKSNPIQVTKEHIIFFLEKFALLEGEEFKDRIISTMVRDIVIKKEKDGNYLVTVQYNYANSKELPNEESYSVPESIGSQDVELVETSGIEPLTS

SEQ ID NO: 11514 - protein, 516 aa, synthetic construct
MIKTDKPSVKAVIYARYSSDRQREESIEGQLRVCEDYARRNNITIVHTYADRAMTGRSDQRPEFQMMIRDAATMSFDIVLVYKLNRFARNRYDSARYKHKLKQYGVRVVSAMENIADDPSGILLESLIEGMAEYYSAELAENVTRGMTENALEGKWAGGIVPLGYKLDEKHHLVIDEPKAAIVRQIYHLALEGHNQKYIIDELNKHHYTNSAGRPFSYNTLRVILKNERYTGTFIWRDIRKENAIPVIIDKMTFEAVQKHMQFRKKNHIRSCSEDFHLTGKLFCGRCSSKMVGVSGTSKQGVLYYYYACTSHLKKKCPSKNIRQDALENLVCEVTTQILSKPEAIKAIAKQAMKMQKDKKESLEIQSLQNQIADINKKLKNCIQAVENGLISETMTNHIKNYENRLQGLKDEVSRQKLLEGSIQLTEQHIEFFFYSISRKLKTADKYKSILLSSLVRCVIVHENYIEIQFNYKNELPILQNPVKVESSYLNQMVTQGGFEPTTYRLEGGCSIQLSY

SEQ ID NO: 11515 - protein, 528 aa, synthetic construct
MSRTAARSVTVIPPTINPLTHLSRVAVQKRRVAGYARVSTDSDEQFTSYEAQVDYYTQYIKRNPEWEFVKVYTDEGISGTNTKHRIGFNEMIADAMSGKIDLIVTKSVSRFARNTVDSLVTIRKLKEKGVEVYFEKENIYTFDGKGELLLTIMSSLAQEESRSISENVTWGQRKRFADGKVNLPYKQFIGYRKGADGFPEVVPEEAIVVHRIYTRFMEGLTPGAIAKELTADGIPTPSRKQRWQTSTVESILQNEKYKGAALLQKCFTVDFLTKKRKVNEGEVPQYYVEHSHEPIITPEEFDKVQTELARRKQISRQYSGKSIFSSRIVCGDCGSYFGSKVWNSTSKYRRFIWQCNGKFKGEHKCETPHLDEETIKARFVTALNAIIESKDNILEDCRLMQATLTDCTGIDTEIESLLEEIDVVTELTKRCIAENSQMAQNQEEYAARYNGFVERYEKAKARLEQLRTTKAAREAQAEAIGAFMFEMQELDALTEFDEKLWLTIIDTITVHADGRMTFKFQGGTEIEA

SEQ ID NO: 11516 - protein, 434 aa, synthetic construct
MERVVERVDALIPAQPKALRVCAYARVSTGKDAMLHSLSAQVSYYSKMIQSHNGWMYCGVYSDEAVTGTKRERAGFQHMIEECRQGNIDLVITKSISRFARNTVTLLQTVRELKSLGVDVFFEEQHIHTMSADGELMMTILASYAQEESLSASENQKWRVRKAFENGEIINLRFLFGYDITPDGIRVNEVDAAIVREIFARFNGGESMSSICRDLDARGHKGVLGGTWCAERMRNTLSNEKYLGNALLQKQYRNNHIEKKLLPNRGELPMYYAEGTHEPIIDQATFDKAQERLRMLAQQAANRKKPTRSVFSGLIHCGLCGNTYKRVTYRKKHYWNCTTFQTKGKSECAAKRIPEETLEVLTCEVLGAVSFDPDMVRSKITAIRAEKNNVVVYCMDDGSEIVKRWKDRSRAESWTPEMKEQARQRALQARRHKV

SEQ ID NO: 11517 - protein, 468 aa, synthetic construct
MDKKINNNMNDFTKKVEEVALYIRVSTEEQAINGDSLRTQREALTKFALANHYHIYGIYEDDGFSATNLNRPALQRLLEDVRKNKINRILLTKLDRLSRGVRNYYKVLDVLDAHCVFWQTIFEKYDSSTASGRLHINIMLSVAENESAQTSERIRSVFNNKIHQKEIISGKIPIGYKKEEKKLVVDEDKKALVIDAFNFYLKSGSVYKTFEYLALFDPSINYPRTARLLANPLYIGTKVCKYGSIENYCEPIISKETFDEVQNLLKKNQRKRDNSDHEFLFSGLLRCNECGYKMSGKYCKNFPTNCTFYYLCSNARLKKKCNMLKQLNETKIEKKLLEQIVPEINKYIDKNNILEQEKAQIRDISKERDKVNKQLEKLRDLYVNDLIQIDHYEKQYKELTSKLDSLKEEEKPVEEKKTVNYDEFRSFLSRDFVTLYNSLSRTEKRLIWASAIDTIYIDDNYNLRIVFI

SEQ ID NO: 11518 - protein, 519 aa, synthetic construct
MKKVTKIAETASSKVKLKKIRVAAYCRVSTDSDAQLESLEAQKTHYENYITSRDDWEFAGLYYDEGITGTKKDKRPELLRLIDDCKAGKVDFVITKSISRFSRNTTDCLELVRKLLALHIPIYFEKENINTGSMESELFLAILSSMAEGESVSISENNKWSIQKRFESGTYKVSYPPYGYDWDGEQMIINPEQAAVVKEIFAALLSGKGTHAIADDLNRRGIPTKRNGRWTATTIRGMLSNEKYVGDCLFQKTYSDSRFVRHNNHGEQTQYMVKDHHEAIISREDFEAAHAFIHQRATEKGVVKGSDKYQNRYTFSGKIICGECGDTFKRRIHSCTGYKYTAWCCSTHIKDKDKCHMLFVKDDDLKQAFVTMMNKLVYAHRIILKPYVDALKNTSSDDSLRRIQEIQTLLAQNTEKRETLTKLMTQGIIDPILFNKETNELLSQADSFRDEINALKNAVSGDVTKVTAATALLHFTEKGGLLQEFDDDLFNEYVNRIIVRSRNEVRFELKCGLTLRERM

SEQ ID NO: 11519 - protein, 510 aa, synthetic construct
MQKRRTKYANSQGDNAVIYARYSSHNQKDTSIEQQIEVCTKYARDNGYRITNIYADRAISGKTDARPQFRLMMQDAREHKFDVVISWKSSRLGRDMLDAMTNDIILRNLGIKCFYTEENFDDTAAGRFALRNMMNVNQFYIENMAEDILRGMRDNAKKCRVNNGSPPLGYRRGADGKYEIVPDEAETVREIFTKVLAGMAFVDIANELNARGIKTKKGAPWGRSSFSRLLSNERYIGTYKWSDIVIENGMPAIIDREVFEMAQKKIKGERPLRRRHNENGDYLLTGKLFCGKCDSPMTGMSGTSKSGAKHHYYACYSARKDGSCDKKAVKRDWVEKTVALFIKEHVLRDEVIEWMVDQYMVYQKATFESQRIMEMRNQLKDVQSQLDNLVDAIARGMYTDSTKDKLLKLEADKKEIEQDIRLATYNLKEYDREHVRCYFLSFKEGSVESKDYLKRLFDQFVTKIYLYDDEIRIAFSGTKDDSPVSFKIIDEAEELAVSSVRLSSASSHQA

SEQ ID NO: 11520 - protein, 573 aa, synthetic construct
MAYNAQNKTGARVAIYVRVSTLHQIDRDSLPMQKQDLLAYAKLMLNTDDCVIFEDAGYSGKNTDRPKFQEMMSQMRAGAFTHLLVWKIDRISRNLLDFATMYNELKALGVTFVSKNEQFDTSTAMGEAMLKIILVFAELERNMTSERVTATMISRANNGLWNGGRIPYGYDYDYETHEFSVNEEESKVVILMHDMYEQERSLVRVVRELNERGYRSRAGNLWSPVSLLIILRNVFYCGDYRYNMLKEGDRQKVKDESEWVTVENHHVAIIPKDQKERIMATLDSNSKLCKQRNIYKSSKHTHVFGGLIYCGSCGKPLGSTPGNLTRDGWRYSKYTCPTRRKSVTLCTGKSTSDPIIGEFVFNYILNMLNAQNDFDKISSPEELEKLLLIGDTFAYIDHIESNGLNDLFNVLSSGTVKGAVFGKGASLPTKKATVEPEVARLRNEKQKTERALDRLRSLYLYADEAMSEAEYMIQKNKLEETLEDINDQIGMMNTDSWQQSVSDEEFIQRASEFIIAQKLSGRKYVNYKRLAMSVDSEVLKNFVVSIIDSITIQDGLVSNIVFKNGLCHTFIFR

SEQ ID NO: 11521 - protein, 502 aa, synthetic construct
MEIQIREGNSRQKRKLKVCAYCRVSTDADEQENSLENQIRHYKEVITSNPDYEYAGVYSDFAISGFKEKRPGLQKMLADARKGKIDLILTKSVSRFARNTSIVLEATRKLKELNVGVFFELQNINTLSGEGELMLTILAAFAQAESESGSVGAKMVYQRKYEAGIPVQYLERSFGFKKDERGVYIADEEEAVWVRKIYEMAADGYTPASIKRHLNENGVKTVGGAEWIDSTVFRLIENEIYKGDYIMHKHFVNEERKLVRNRGEVDAWYIEDDHEAIVSPELWQKAQDALEAKRDYLAESSVIEEFTEENYPYMNKIFCARCGHPLYKRIYSNGNRLNWGCSGTKRYGKSFCEGINIPDGVLRGAWNFDENMYIGEKPTDKGKKEFTYLKEASWKRRHKKKEPEPIPENIETEYPYREKIFCGLCGSRLVRHVNTKSHKVIWVCNGRKRKGKDFCDGTRVPDTIIKGWGEIKKDIYIQRKDDKNGKKRYSYTGKKPKGADRA

SEQ ID NO: 11522 - protein, 453 aa, synthetic construct
MECVAYMRVSTEKQAIEGNGLDSQKRDIENYCRKNELVITDWYIDDGYTGANMDRPGLQRLVNDCSRKRVSCVVAFKLDRLSRNMIDGIYLIEKVFQKCNVTFKCVHDSVNYDSPMEQAYTQMMAVFAQLDKNTMMLRMRGGMLERIKQGYWMGGGNLPYCYSYSKEQGILIPIPERVEQARKALELFISGYSDVKIKEICGFKSELVTRNILTGIVNIGMIPYKGKIYQGKHEPIFDKGRFNLAQELRKTRAKSRTTCQTEPNLLTGLCYCGVCGCAMRYQKWTNGEHKIYCMSRNKSMSYLPNYNANCDNSLEWADDIEKQVEKEILKISLNLSSYKPKEKATKLEIMQSQLDKEQTKLKRLYNLYADGNDTVLEMIKESETLIKTMKANVLSESKNAADTQKKEFVYENIKKLADVWDNIDKKKKNMILKTIIDKIVIVNGNIEIQLKNF

SEQ ID NO: 11523 - protein, 550 aa, synthetic construct
MYYQPKINFSPNEVIAYLRKSRSDDPLLTVEEVLSKHETMLDEWAEKNLGAAVPEENKFREVVSGETIAERPEINRVLRLIESPKYKAVAVVEPQRLTRGDLEDIGRIMKLLKHTSTLVITPQRIYDLRDEYDWDTFERELKRGNDYLEYTKKILNRGRLLSVSQGNYIGNVPPYGYSKTFVTEGKRRYPILVPNKEEADVVRMMFDLYVNKDMGCQNICNRFDEMGIKPPKGEHWSPSAMAKMLENIHYIGKVKWNYRKTLTIVEEGEFKKTRPIAKAGEYLIYDGKHEAIVSEELFNAAQAKKGKHTRQKPNTKIRNPFAGLLWCKCGRAMSLRAYKSNISAPRLLCDGQTHCKTGSCLYSEMNERVCSILTNCIHDFEIRLQNNEGDSVKQHMRLIKKLEVRQKELEEKELAQWEAQADPDPAKRMPQHVFQQLNERLLKEKEEVRQALCKAYESMPEPVNYEEKIALFTEALNALKNPKVDAATKNRLLKACIDRIEYYRDAPQRIRSQKVIYYDPEQKRTRCKSPLNVGGNWTAPEIILDVKLKV

SEQ ID NO: 11524 - protein, 513 aa, synthetic construct
MPEALNAVIYARYSSDRQTEQSIEGQLRECYAFAKANDIAVIDTYIDRAISGKTDNRPAFQKMIEDSAKRQFQAVIVYRLDRFTRNRYDSAIYKARLKKNGVKVLSAMENLNGSPESIIMESLLEGMAEYYSVELSQKITRGMRENALKGKALGGQRVLGYKVNSDCYFEIDETTAPVVVDIFKLYSSGKTVKEICDILNARGVKTARGGAFNKNSLHTILTNKKYIGIYKTKYGEIVGGIPAIIDKELFEMVALRMEQNKKAPARAKAEINYLLSTKLFCGKCRSAMVGESGTSKTGKKYYYYACVKKKREKACDKSNVKKDWIEDLVIQRTVTDILKDDVIDKIADRLVELQKAEAAESGTMLYLENSLAEIQVSIKNIMTAIEKGIITESTKTRLTELEDEKRNVEIEIAKESIARRIISREQIIYWISSFKDGDITSEKYRQQLIDTFVHAVFVYDDKIVITYNYSGENNTATISDLDLSSPPPKSPDNLGFLLICCMIDEAILCTFGL

SEQ ID NO: 11525 - protein, 526 aa, synthetic construct
MANVKYIPATKMRHSGAPIESKTKRRVAGYARVSTDSDEQLTSYEAQVDYYTQFIRKNPDWEFVGVYTDEGISALNTRHREGFNRMIADALEGKIDLIVTKSVSRFARNTVDSLTTIRKLKDYGVEVFFEKENIWTFDGKGELLLTIMSSLAQEESRSISDNITWGQRKRFADGKVNMPFSSFLGYRRGKDGKPEIDPEEAELVRLIYRLFMGGKTITGIATYLTQQGIPTPRKKARWRDSTVESILTNERYKGDALLQKQFTVDFLNKKMKNNEGEVPQYYVTDSHPAIIDRTEWELVQAEMARRKEKGNHQNSLNVFSSKIYCGQCGSYYGSKVWHSTDKYRKVVWRCNGKYERQTRCSTKHLTDDEIKRLFISAVSKLHAERETLIEDCRFMREILSDTSGLEAERARLMEELTAVGLLTQKLFDEEAAGTIKKKDFDARHASYVERYNDLQAKLKAIADSEKRKRQQIKVLDRFIKDIRGMKALPIDFSERLWNTLVEKLTIYPDGTAEFLFKNGTTVTEKL

SEQ ID NO: 11526 - protein, 424 aa, synthetic construct
MEIRIEKKNAIAPLPRLKNVAAYARVSSSKDAMQHSLAAQISYYSGLIQSHSGWRFAGVFADDGLTGTKESREGFQKLLAKCRAGEIDVVITKSISRFARNTVTLLSTVRELKSLGIDVFFEEQNIRSASSEGELMLTILASFAQEESLSASENQKWRIKRNFEQGRPWSGKLFGYRLVNGTFILLLDEAVIVRRVFDEYLSGRGTEAIAHGLNADGLTNRGGKWYPSVIAHMLRNVDYTGNLLLQKTYREDHLTKRKKKNDGVLPQYFVEEAHEAIVDSDTFEAVQKEAEGRLAKYKHENKGSEKYAFTGLIVCAVCGRKYKRKKTHAGPVWICPTFNSAGKAVCPSKQIPEETLKELTAGIDLSTVERMTAENGNVLRVRFRDGTERTLVWKDRSRSESWTDDMKRKAKDAAEKRWKKNGER

SEQ ID NO: 11527 - protein, 519 aa, synthetic construct
MRVSVNLNAQKPDTTTNAVIYARYSSHGQTEQSIEGQLAKGHEYAAAQGYTVVHEYIDRAMTGRNDNREAFQKMLSDTGKHQFQVVIVWKVDRFGRNREEIAFNKHTCKKNGVRVEYVAESLPNSPEAVILESVLEGMAEYYSIQLSQNIRRGQLESAKKCQCVGGSVPLGYTLDSDKHFVIDPQTAPVVKKIFDLYAEGATISEITGQLNEQGIRTARKQLFTKNSLTKLLKNEKYIGVYTYKDIVRVEGGVPAIVDESTFDRVQELLKINRRAPSHTWTKVEYLLTDKLFCGHCGSPMVGESGFSHTGAKYSYYGCIKRRREKACDKKPVRQDWIEALVLDETVKLLHDDELMEYIIDRTWEYYQVTDKVQEEKAVLEAQLAEVDKAINNLVRAIEAGIFNAATKSRMDELDAQKAALTASLADLELTSGIRITRDHIEYFLLRLRDLDVKDRECQKRLVQTFVNAVFIYDDGRVKITYNYSGQSSTIALNQIASAEKGKGFVCCLPCSLLCCANPC

SEQ ID NO: 11528 - protein, 540 aa, synthetic construct
MATATRRVVRTMPQMFIDVTDNQSERLQVAAYARVSTEKEEQEDSFERQVEHYKHLIYSKPEWQFVDVYADPGISGTRAEKRPDFLRMIEDCRAGKIQKVLVKSISRFARNTVDALQYIRELKDLGISVYFESENIDTLTPGGEVLLTILAAMAEQESRTISSNIKWAWQRKFQKGDVILNTGLMLGYRKIGKDDEGHDVYEINEEEAEIVRRIYREFIAGYSITQIAKRLQADGVKTKLGKENWRHNVIESILTNEKYTGNALLGKTFKPDVLTKYRQKNDGKKAPIYYVEGSHPAIIEKGLFDLAQQEMQRRRDANDNKVGGGRYSSRYPFSGMLVCGICGSKLRRQVRTMGSGKRTASWGCCNRINNGRAECDSHHVNEDVLEATYLTAMRRLVDSAEEVVEVVRDGVELALEPENKAAMERIDEETIQLQEAALALHKAKQLMEIGSVEYASRVKEYSERMKELEAERNELQGTAAKYAEVRMWLDTFIEQTMQSDTLTTVDGTTMKMLIDRIHVRNDGIVVEFKCGVAIEQEYVK

SEQ ID NO: 11529 - protein, 488 aa, synthetic construct
MEKARAVAYIRVSTERDAQLHSYEFQEHHWQSAFEDDPNTELIGIYADKGISGHSVQKRPKFLVMMQDAREHKFDKIYTKSVSRFARNTTQLLEAVRELRDLGIEVVFENENIHTFQPTSEIFLTIAATIAENDLEVDSARQRWSIQHRCENGWISVGSGLFGLKLTADNELEIVPEEAAVIRYIYESYVDGGIGSKKIADALNAAGVQSRNGYPWDAKHIIGLLRNEKYKGDVIMGKSVRHFGEYHKNPNAEYAPRYYMEGTHEAIVDRDTWEAAQRILEDRSRNHCRTRIAHSFTGMIECGCCGKNYLHKVNNSQCKWQTDIWACRTYLRDGKKACGNSRIKDTVLKEKFISAYNEFIERRPQGDSMVALQEVLEDLRQQERELAELMMQRLISKAAYEEERKSVKMQITDISEKISERRAKRVPESEYVPITEFSEEKAKRFLSKVVVTMFTVTFVFYNGAKITRTYDNGQPGNKVGWNKKKEES

SEQ ID NO: 11530 - protein, 535 aa, synthetic construct
MKKKQTGARHGRAAIYARYSSHNQREASIEQQVKACRELAVRLGLDVVETYEDKAISGKSDRRPSFQRLLRDAEKGYFDCVLAWKSNRMGRNMLQAMTNEARLKDWGVRTFYAEEDFDDTAAGRFALRNMMNVNQFYSENMAEDITRGMMDNASKCLSNGALPLGYKAGENGRIVLDKAQAAVVQEIYTRVACREPFVDIAADLNRRGIKTKRGGPWTKSSFYTICRNERYRGIYIYDDVRVEGGVPRIVSDGLFYRVQEVLKVKKTPQSARHHTGAEDYLLTGKLFCGKCGRPMTGVSGTSRSGEMHYYYTCQKRRREHACDKKNVIREQIEKSVAQAIKQYMLTDEMIQHMADATMAYNARQEKDLHLQDLQGQLAAVKTSAANLLKAIEMGVITETTKARMVELEQKQGRLNAQIENARAELVPITRDNFVSLLHIYRDGDINDSKYLASLFETFLVRVDLYDDHFLIWFNPLGQKTPADIPITSIENGDVDEFFDECRSKNVFDWGGKWSTKTKAPAVPRRVLLFWCSVSC

SEQ ID NO: 11531 - protein, 507 aa, synthetic construct
MTKNAVIYARYSSDRQREESIEGQIRECKAFASTNGYEIIGIYTDRALSARTDQRPDFLRMIADSDRHIFQFVIVYSLDRFSRSRYDSAIYKNRLKKNGVRVLSAKENIRDDPTGVILESLLEGYAEYYSLELAQKVKRGMIDNLLEGKWVGTAIPFGYRKGDDAKLHVDETKRNAVIDIFQMYADHSRIVDIIRYLNNRHFTTSQDRPFSRNSLNHILGNPIYTGTFRWGGESYKDYAPRIISDELFECVQKIKTGRKHSRTRGKSPDYELTGKIFCGRCGLPMVGVSGTSKSGSSYYYYKCSGRTHGKKNCDSRSIRRDIIENAVYEATVSMLKQPQAVKIITEQAILAQKRSMDDSEVLRLKKEKDALEAKIRNISKAVAAGLTADEIIAQANEYSRRSKELETLIQVEELKEKTFTLTPEAVTFFLEKLLEKAKSGQATLSTFWDFIRCIKINGSIAEIQFNYTAVPATLDNPIQIKLDLDEECSNETVLVGPPGFEPGTNRL

SEQ ID NO: 11532 - protein, 510 aa, synthetic construct
MLENGLKRAAAYVRVSTYHEEQEKSLADQIAMLNKIIDDDETLVNVGTYVDQGVTGKYQAKRKQFLKLVKDCLEGRIDVVYVKQMRRFGRNALETLQAIEKLRENGIPVRFVMDDIDTIADRNCTRLAMLANIAEEERDSLQETMIWSFQRRAEQGDYLFNAEQLFGYRIKNKNEMVVDNHEAIAVRYIYEHYAAGEKYKDIAAWLTEHGYQTRKGGVFSKSSITDILINEKYYGDLIIGKTRQVGGKTKKNNGEAPQYVYHNHHEPIISRELFDRCAEIRLSRRHDRRAPEASDAFSHKVFCGKCGGLYIRQTRMNCVSDFSQVAYACGKAARSQRRDCRNKLQRIGTLEDGFVAVYNFLAENRSAISDIETDNTEYNDITARLAELLQSERMYFEAEVRGLMNEQMKKNHTKLVGEVLELEERKRFLLARNFDVSVSNANLKKMLKELKSRPRLAAYDRGLFETFVAKIIVMDRNNLIYVLSSGHKIHVEVLDNYKVRDEIGRVYVSE

SEQ ID NO: 11533 - protein, 536 aa, synthetic construct
MLASNVEIIQPKKKQSGADELLRRAIRVAGYARVSTGRPEQKTSFESQQKHYHELIGRHPEWVDVGLYADEGITATSMRKRKNFLRMLQDCRDGKIDKIIVKSVSRFARNTVDCLATIEELTALNVDVYFELQNLSSLQDSKTTRLQLTMYASMAQEESETLSESVAYGIREGIKNGRYRQPRAYGYSYDKENKRLHIIDEEAEVIRRIFNYFLQGMTVGQIAYELNKQQITPPKGNGWYESTITNILRNEKYIGNLVLQKTVSTDLKLRRRVPNQGEQFRVVDNHAAIISKEMFERVQREFIYRDSLRGYGITGKAAYTSQYAFSNKMFCGHCGGKYRRHRYEKKNKKTGELEHVFTWVCINHKLNGNEACPQTQVKEKSVEAAFVAALNTLIEDKDGFIETVIENITEVLNTRLSESATEGDRAAYAALQKDLQVLLTTSLRSPTAESAREYERLAKEMEELKYKIERDEKDRLNTKMSLERIRELKEFLAGARVFREFDTMVFKKVCERVIVYEDSVTFKFTEDLERTVPLIE

SEQ ID NO: 11534 - protein, 571 aa, synthetic construct
MMQDRTAPASTNRVAIYIRVSTTHQIDKDSLPMQRQDLIAYAKLMLNTDDYVIFEDAGYSGKNTDRPKFQEMMSQIRQGAFSHLLVWKIDRISRNLLDFATMYKELKDLGVVFVSKNEQFDTSTAMGEAMLKIILVFAELERNMTSERVAATMISRASNGQWNGGRVPYGYNYDYETKDFSINPIEAEIVRLIHDKYEEMRSLVRESRYLNERGLRTRAGNLWNPVSLHIILHNIFYCGDYRYNVLKEGDRQKVKDESEWITVEDHHEPIISREQKERVIAMLDANKRLDRKRNTYKSEKYVHVFAGLLYCGNCGKPMGATPAAAKKDWQYSKYTCPTRRKLASACNGKFTSDPIVGEFVFNYVLNMLNVQKNFADIHSPEELQAALLIGNTFSYIDHIDEDGLNDLFNMLSSGKIKGTVFGKSAKLKKKKVVSELSKLRNEKQKIERALDRLTKLYLYAEDAMPESEFIIQKSKLTEALDEVNEQIGFSNTDEWNQSVSDEEFVRRASEFIIAQKLTDRNYVSYKRLATSVDTAVIKTFVQGIIDSIIMDAGQVKQIIFKNGLSHTFIFK

SEQ ID NO: 11535 - protein, 573 aa, synthetic construct
MAYNAQNKTGARVAIYVRVSTLHQIDRDSLPMQKQDLLAYAKLMLNTDDCVIFEDAGYSGKNTDRPKFQEMMLQMRAGAFTHLLVWKIDRISRNLLDFATMYNELKALGVTFVSKNEQFDTSTAMGEAMLKIILVFAELERNMTSERVTATMISRANNGLWNGGRIPFGYDYDYETHEFSVNEEESKVVILMHDMYEQERSLVRVVRELNERGYRSRAGNLWSPVSLLIILRNVFYCGDYRYNMLKEGDRQKVKDESEWVTVENHHVAIIPKDQKERIMATLDSNSKLCKQRNIYKSSKHTHVFGGLIYCGSCGKPLGSTPGNLTRDGWHYSKYTCPTRRKSVTLCTGKSTSDPIIGEFVFNYILNMLNAQNDFDKISSPEELEKLLLIGDTFAYIDHIEPNGLNDLFNVLSSGTVKGAVFGKGASLPTKKATVEPEVARLRNEKQKTERALDRLRNLYLYADEAMSEAEYMIQKNKLEETLEDINDQIGMMNTDSWQQSVSDEEFIQRASEFIIAQKLSGRKYVNYKRLAMSVDSEVLKNFVVSIIDSITIQDGLVSNIVFKNGLCHTFIFR

SEQ ID NO: 11536 - protein, 587 aa, synthetic construct
MNNTFSFQQIAAPKVLSAEVREAISNNVLQFYVRDQQQDTQDEGITALYERLSQEDKLEGESNSIANQKKILERYCREHGITAYRHYDEDDGYSGTNFNRPGFQRMLADIKAGKIKRVIVKDMSRFGRDYLQVGFYTDMLFPDFGVHFIAVNDGVDSTRGENEFTAIRNVFNEMYARDTSKKIRATWQSKGKSGEHLTTIPPYGYMKDPDNKKKWIIDEEAAAVVQQIFALCVSGMGPTQIAKWLEKHEIYNPTAYSQAKGRPVTNKPTANPYKWTNETVSRTLERIEYLGHTVNFKTRKQSYKSKKKLWNDPSEWVIFENTQPPIVEESVFLIVQNIRRSRRRPTKMGDMGIFSGLLYCAECGGKMYQCRATNFTEEQKYFICSTYRKGKDLCTTHSIKNVVLHEIVLRNLREAIEYVTQYEAEFIQEAADSRLRERDAEFSRKRETLSRAESRIAELDNLFKHLYEDNVTGKLSDERFIKMSRDYELEQENLKSMAEVLREEIKQQEKQKTNVKAFISVVKKYTDMQELDASILREFIDHIEVSHTDKKSKTREITIVYNFIGAFDFDRAKEKAQNTTQKQQRTA

SEQ ID NO: 11537 - protein, 495 aa, synthetic construct
MRGVIYARYSPGPHQTEQSIEGQVADCQQYAEEHGIDIIEIYADRHVSGKSIVGRDEFQRMLRDAEKGRFDCVLVWKIDRFGRDRQDIAMGKMALKRAGVKLMYARESVPEGPEGIILESVLEGLAEYYSADLRQKVIRGMKETAKKGQYCGQSLPIGYKVDAERHIVVDEREAAVVREAFKLHIAGSQIRDIVQLFADRGIMGRRGKPVSNAVVYRMLRNEKYLGEFYIQDVKLNVEPIIDRATFLEAARHFKTSRNNAAGRAKVNYLLSCKMFCGYCGSMISAEAGTGKLGKVYRYYKCGDKKRGKKCELKPFPKDHLEDAIILATVNDMLTDEMIEKLTVRILEVQEQENADDPVVGLRRRLDSNKKRQRNLLDAIEEGGARGLVSRLAALEEEEERLVLEIQRAEIKRPRLTHEVVEAWLRSFRVGDVTDDDFRARLVDTFIARVELRNDEALIFYNIREKGPHSRVRVRPEWWTKDGCQGQQERQIRKDL

SEQ ID NO: 11538 - protein, 523 aa, synthetic construct
MAKSVTTIPATLSRFTAAPINSTKKRRVAAYARVSTDNEEQLTSYEAQIDYYTNYINGRDDWEFVGVYPDEGITGTNTKKREQFRQMVADALDGKIDLIITKSVSRFARNTVDSLTTIRKLKEHNVEVYFEKENIWTFDSKGELLLTIMSSLAQEESRSISENCTWGQRKRFADGKVTVPFKRFLGYDMGPDHNLVVNPEQAKLVKRIYGMFLQGQSPFQISRTLTEEGIPSHGGKDHWNPSNIKSILTNEKYKGDALLQKSFTVDFLTKKKKTNEGEIPQYYVKDNHEAIIDPETFEMVQTLMTTRTKGRNRKSSVSIFSSKVKCGDCGSWYGPKVWHSNDAYRKVIWQCNHKFDGQKCATPTLTEDEIKELFLRAANQVIDQKEQFIAIYDQVLSRSLNTTALESELSDLEAEINIAAELIEDCIKENAHVALDQDEYQKRYDALVARFDKAKARHTEVTDLITERMARKHQIEAYLKNLRSREPLTEFRETDWLAMVDYITVHSKKDIRVTFKDGTEIKA

SEQ ID NO: 11539 - protein, 522 aa, synthetic construct
MAKTVRAIPATISRYTAAPINSRKKRRVAGYARVSTDHDDQISSYEAQVDYYTNYIRERDDWEFVGIYTDEGISATNTRHRDGFKRMVRDAMDGKIDLIVTKSVSRFARNTVDSLTTVRKLKDKGIEIYFEKENIWTLDAKGELLITIMSSLAQEESRSISENVTWGHRKRFADGKVCVPFGHFLGYDRGPDGNLVVNREQAKTVKLIYRLFLDGYTFHSIARELTSRGLETPARKKRWYPGTVESILTNEKYKGDALLQKRFTVNFLTKETKANEGEVPQYYVENNHEAIISPQVFDWVQEEIKRRREGRGRYSGVSIFSSKIKCGQCGGWYGAKVWHSTDKYRRTIYRCNDKFKSHCKTPHLTEDDIKEAFVRAVNQLIENKADVLDSITLLKERLTDTEDLEEERDRISTDLNLLADKIQQLIAENARVAQNQDDYDRNYNELVSRYEAAKTQYDKTCEAIQYRKARSRQMDSFIKELRNQDLIKEFDARLWGSLVDFITVYSKDDIRVTFKDGTEIRA

SEQ ID NO: 11540 - protein, 559 aa, synthetic construct
MRTIRKIERRIPNLKQRKKVAAYARVSMESERMHHSLSAQVSYYSSLIQKNPDWEYAGVYADYGISGTGMKKRQEFLRMLEDAEAGKIDIILTKSIQRFARNTVDLLRTVRHLKELGVEVWFEKENIHTMSGDGELMMTILASFAQEESRSISENVRWRVKKRFEQGNPNGRFRVYGYRWEGDTLVIVPKEAAVVRRIFQNFLDGKSRLETEREFAAEGITTRNGRRWMDSNIRVVLTNVTYTGNMLFQKEYVTDPILKKRKKNRGELPRYYVENTHEPIIDKETFDYVQQEMARRKELGALANKSLNTTCFTGKIKCGICGRSYMHNRRTDRGFEEFWDCGSHKLKGRNCGAKGSIPHAVLVKESTEVLGLDDFDEQAFLDQVEKIVVPEYHVMVFCMKNGQKLIRHWVSTAKKDCWTDEYKDRQRAWMKNYMANGKGTRFSAFTTRVRCALCGSSFRRCKTKHDRPVYWRCSKGGKCESVSIREDDLKRVAAEAMGLENFDEDRFREKVESIEAGKPDCLTVHFKSGRTKEISYTPTPSKRRSKARRKESREKWQRQ

SEQ ID NO: 11541 - protein, 590 aa, synthetic construct
MKTVEKIERKLPVLKTRKRVAAYARVSMESERMQHSLSAQVSYYSALIQKNPEWEYAGVFADYGISGTGTKKRDEFNRMLAECEAGNIDIILTKSIQRFARNTVDLLNTVRHLKDLGIEVRFEKENINSLGGDGELMLSILASFAQEESRSISENVKWGTIKRFKQGIPNGKFSIFGYEWQDDKLVIVPEEAEIIRWMYAEYMKGASRIEIGRALMDRGIYTRQGKPWVDSNVKVILTNITYTGNMLFQKEYCEDPITKHRRKNYGELPQYFVEDTHEAIIPMDEWQAVQAEFKRRRDLGPFGNKSLKLSAFSTKITCGCCGKHYRHSGKRNTAGEVYYIWTCQTKSQKGASACPSKNIPEKMLQNTTAEVLGLVEFDEAAFSQQIEEVIVIGDDTLTFRFYDGHEVTTKWQSTAKTDWWTDERRKLWGERHKRKDTNPNRHLFYEFTGFIKCGCCGANYRCQSGKRKDGTPTRSWYCTGPKDKCHNPGIRDETMKRLVTDVLGLDEFDEAAMDAQIENTTILDHTVTFHFRDGHTESRDFLDKRHGTPWTEERREKARESMKAAWTDERRETMSERIKKIRSEKKWPNP

SEQ ID NO: 11542 - protein, 650 aa, synthetic construct
MTDYIGNYKNRPRRVVFYGRVSTEHEEQLSALGNQMEWYTDLALRNSNWTVVAQYIDEGITGTQMKKRPSFMRMIEHAKEHRFDLIVTRELSRFARNTVDALNATRELKQYGVEVYFVNDGIWTMDGDGEVRLTIMASIAQDESRKTSERVKAGQKMSREKGVLYGSGNIIGYDRVDGTYVINKEQAETVRRIFNLYAEGHGETTVAKMLIEENRKDGGGGLSWTASKVSRVLRKPTYKGYMTYNKSHIDDFLSHNRINHSEEDFVLVKGDFEPIVSEELWETCNQIRSKRAAFVKGKDGRAHKFGVSFPQNKWTKILFCDCGMRFQIEGYDKTANGGENMRLICARSKMFKKKDAARALNGIPCPAPYASEWKLELMAREVFCTVWKENAEDILGLLRMLGANLNTTGTPNDGNQLENKLSALNEELDDLVSQRASRGITMDDFLSRSTEINNEIINAEGLLQSSIQEQRPKARLDMHSIEAALGDDASFPDVKIELGFLDRYANRIVKSNNRYIWMLQLMNVQQIMPIQSERQPIAMVTYKSGVPYDIEQEQIGKQDKESAGPDCATICRPQDFFLNMSRTKRKRKLVEWLESCQENQVSVLDEKIPLLSFAVDFVTAYEYQKARGIKIHPGLWKDMRVDIFLVKKEN

SEQ ID NO: 11543 - protein, 558 aa, synthetic construct
MEKKILCIIRASTEQQETESQKKELVAYCITKGFAVEEMAFIEVAGASARKLNDKYIQMLEDIKATLLSSPTINAVALWHLNRLGRVESKLHEMKEFFVTNKIQVYCKNPDFTLLDDNGNESAAGGIAFSVYASMVKYETDEMFAKMNRGRERNRANGIFAGGKIKFGYTLDATKHFIINENEAKTIRLIFELYATGKYSFYTLVEELRARGITKDGQKITYEMIQNALADEAYYKGINGKIPLIDKELFDKCAAIKANTVAVKRTKESRNINFAVGLLKCSCGNNFIASGDFYRCYSKMNNNRKKKVVECDSPTIRRDIMDDTLWLVTRLLQQRFLMDKDSVDISEQKDKINVLTAKLSTAQKGLSSIKDRKEKLEDAYYVDGEMNEAQFKKRLASLHSKEVQTESLIRNYKTEIEDIQKVIKQIELPSNDRYLQSLLLSDLDVEELEDRKKIKEMMFNHIDKVTVKKLMKGNHKCVEITITSKAKLSFVFLYDSWLNSHRKGECNVFYANKPVYYIDGHIIRQNPTVRNMLYQKIGLPELTNEEIGEAAIRYAKLP

SEQ ID NO: 11544 - protein, 581 aa, synthetic construct
MSRTTNKRPVKAKSGLSRKQKVAIYIRVSTLYQVDRDSLPMQRKDLIAYASLILGIEEYEIFEDAGYSGKNTDRPAFQEMMQRIRKGEFTHVLVWKIDRISRNLLDFAEMYEELQDLRVTFVSKNEQFDTSTAIGEAMLKIILVFAELERNMTSERVTATMISRANSGLWNGGRIPYGYDYDPDKTEFSIREDEEKVCQMIKNDYMEHKSLVHTSRMLNAAGYKTRAGVEWSPTAVWIIISSPFYAGIYRYNRYKGTERRVENPEDEWIMIQNHHPAIFSLEEHEKMLAILDENSRNHRSVGQRHQTERIHIFGGIAYCGKCGSKMVSTPGRLHVNGYRPTNYSCPKHRKTKECDNPTVSDTQVGEFVINYILNMIGAKKKFSTIENPEDLERCLLYGNTFSEVEHIDGNGLNEYFNLLSRYGSDDSYTFSVKKSRKKKAEVDPEVEALRKEKEKQERAMKRLQDLYLYSDTSMSEKDFIIRKTEISKRLEEINAMLGMVAKNSEPSLSDEEFVRQASHLLISRELQNRQYIYFKNLAQSVSPEILKVYMETVLDSVLLVDGRVSSIVFRNGLTHKFKYKS

SEQ ID NO: 11545 - protein, 536 aa, synthetic construct
MFKNTKIAVYCRVSSDEQAERGTIDNQITFAQQYADLHHLDIYDVYKDDGVTGTIPLQDRPEGHRLLQDAADERFTLVVFYKMDRLGRSTRVILNAVEALSQHGVGVQSMSEPFDTSTPSGRFMLTMFAGVAELDRANILDRMYQGTLRHARLGKWCGGPAPFGYCLQDGYLVVSEEPMPGQQLSEADVIRMLYGKTIEGWSALRLAQHLNALGIPNKYTLRGNVAAGSGKWHQSKILYILHNTLYYGERSFGKMSKNNNKNIIPQQVPAIVSKETWDAAQAAVEQHSIMPKFIKRRSYLLRGLIRCGLCGHTYVGTYYKRKAGNSIYYVCNAKNTRGVTPEPCKGQTLRGEWIESLVWEDCLRYIKQPDVIAVDEDCRYLQSAGDIKKEIDAATAQLKQLDQERQTVIGLCRQGIITAADLDGQLSDITEKQNTLQQTLEGLNSQSLVTKEDAEKRVKEIADILGGFRQQLQSGGELTFDAKQGIIRTLVKQITVHTELQPGAERDIPTVRVCIDYNFTLLPSKSGMLDPYRQGF

SEQ ID NO: 11546 - protein, 573 aa, synthetic construct
MAYNAQNKTGARVAIYVRVSTLHQIDRDSLPMQKQDLLAYAKLMLNTDDCVIFEDAGYSGKNTDRPKFQEMMSQMRAGAFTHLLVWKIDRISRNLLDFATMYNELKTLGVTFVSKNEQFDTSTAMGEAMLKIILVFAELERNMTSERVTATMISRANNGLWNGGRIPYGYDYDYETHEFSVNEEESKVVILMHDMYEQERSLVRVVRELNERGYRSRAGNLWSPVSLLIILRNVFYCGDYRYNMLKEGDRQKVKDESEWVTVENHHVAIIPKDQKERIMATLDSNSKLCKQRNIYKSSKHTHVFGGLIYCGSCGKPLGSTPGNLTRDGWHYSKYTCPTRRKSVTLCTGKSTSDPIIGEFVFNYILNMLNAQNDFDKISSPEELEKLLLIGDTFAYIDHIESNGLNDLFNVLSSGTVKGAVFGKGASLPTKKATVEPEVARLRNEKQKTERALDRLRSLYLYADEAMSEAEYMIQKNKLEETLEDINDQIGMMNTDSWQQSVSDEEFIQRASEFIIAQKLSGRKYVNYKRLAMSVDSEVLKNFVVSIIDSITIQDGLVSNIVFKNGLCHTFIFR

SEQ ID NO: 11547 - protein, 429 aa, synthetic construct
MISDCRKGKIDRIYTKSISRFARNTKDCLKNIRELKSLGITVLFEKENIDTADMTDEMMITIMGGLAQEESVSISKNLKWSYQKRFEKGIVNVFSAPFGFKLNNGALIIDKIQAQIVEEIFDMFLNGIGYQRISEICQSKYKVYKDKFSYYGIRYILSNEKYIGDSVYQKTFTTNNLPYRKIQNNGQLNKYCIQNTHEAIISIEIFEKAQKLIESRKHKNIVSESPFRGKLICANCGTKYKRKDSRNKIYWVCRKHDNLAELCMNKRVEEKFIKQSFIRLHNKLWHDYKQILVPLQTALQDLKFRKFSGKTQVMDISKEIAKLREQTHVLARLKTKGFLDEAKYIEQTTELMAKINKLQAELKKFTRSDDEDETLDQIEMLIDFFERRDKPITEFEELAFESIVEKIIVINQHELEFHLIGGLKFKEKI

SEQ ID NO: 11548 - protein, 538 aa, synthetic construct
MSTAPNVTVIPAKVQTAENRDKHHQLRVAAYCRVSTEQEEQQNSFAVQVAYYTDLINKKKEWTLAGIFADEGISGTQTKKRTEFNRMIRMCKKKKIDLIITKSISRFSRNTVDCLQYIRQLKELGIGVIFEKENINTLTMTSEFMIALYGSFAQAESESISKNVSWGKEKAYREGKVQFQYKYLLGYKKGEDGKPEIVPEEAETVRLIYTLFLDGYSMSRIKKLLENKGILTSQGKKVWNESLIRSILKNEKYAGDALLQKTFTSDCITHKIVKNHGERPMYLVTDHHEPIIDRDTYNRVQQELARRSSKRKVSDKTTTEQGKYSSKYALTELLICGKCGTPYRRTTWTSRGKKQIVWRCISRLEHGRRYCSDSPTIKEEQFHKAIIRAINNYYSCGNDVEKILKANIGNVLECHGQEEITAIKKRLKEIDKARSDLISLIATGGCDEDKLDSEFEKLYEEEQSLSERLAMLKSKNQTSAETQAKLDKIIDMIEHEKFELETFDNVLVRKLIECVKVLSKTEILVIFKGGYEVRTEIE

SEQ ID NO: 11549 - protein, 434 aa, synthetic construct
MERVVERVDALIPAQPRALRVCAYARVSTGKDAMLHSLSAQVSYYSKMIQSHNGWMYCGVYSDEAVTGTKRERAGFQHMIEECRQGNIDLVITKSISRFARNTVTLLQTVRELKSLGVDVFFEEQHIHTMSADGELMMTILASYAQEESLSASENQKWRVRKAFENGEIINLRFLFGYDITPDGIRVNEVDAAIVREIFARFNGGESMSSICRDLDARGHKGVLGGTWCAERMRNTLSNEKYLGNALLQKRYRNNHIEKKLLPNRGELPMYYAEGTHEPIIDQATFDKAQERLRMLAQQTANRKKPTRSVFSGLIHCGLCGNTYKRVTYRKKHYWNCTTFQTKGKSECAAKRIPEETLEVLTCEVLGAVSFDPDMVRSKITAIRAEKSNMVVFCMDDGSEIVKRWTDRSRAESWTPEMKEKARQRALQARRKKE

SEQ ID NO: 11550 - protein, 513 aa, synthetic construct
MQENKQNLRFTALYCRLSSDDELKGDSNSIIHQKQILQDYALKHSLTPTEIYVDDGFTGTNFDRPDFKRLLSDVENDLVKTVIVKDLSRLGRNYLKVGYYTEVLFPEKGVRFISIADNLDTSVNDELNDFIPFKNIMNEWYAKDLSRKQRAVVKSKGNSGIRLATRPLYGYKKAENGDWLIDEPTAAVVQKIFDLYLKGYGPVSIANYLFANKVKIPSTIGLPKLNPEQNPYRWSKDTVAKILTCQDYCGDMINFKRSDVDSLVIFHDRQEPIISREIFAEAQKLRLDRKPVRHDYSEPVLFSDLLLCADCKSRMYAQRRYHGTTSYSCSKARKTQGCTSHYINENKLIDCVKSDINKLIKNKGIVIKLAKEKMHIDTKTAQCANSQNLKNAKKRILQIDTILKNLYEDKVLGNINLATFKKLESDYLREQAELNKVIFEQSKIKVNLENRSKSICGFLKKLESYNNPVSELSRDLLIDLIDKIEICEATKNGNERSQQVHIYYKEIGKINLE

SEQ ID NO: 11551 - protein, 505 aa, synthetic construct
MCPIDALYARQSLDKKDSISIENQLEFCKYETRGAEYETYIDKGFSGKNTNRPAFAKMMEDIRAGKIKRVIVYKLDRISRSILDFSNMMEIFQQYHVEFVSSTEKFDTSTPIGNAMLNISIVFAQLERETIQKRIADAYATKSQKGYYMGGRVPYGFQLEKTIINGIHTSVFVPEPNEMKQIRLIYQLYSEPDMTLGAVMRELLRQGFTEKRGAPWSTARISEILRNPVYAKADIDIYNFFESQGANMINPASDYVGTNGIFLYKGINGDKTKKKQYDLVDRDVVIAPHLGVIESDVWLKCRLKIMKNRQSARTNKGKRTWLAGKVKCKKCGYAYTVTRSNTKAGRYFQCSGSRYSIKCKGAGHTIYADVFEDYVLEEMKKQLAKFQYLSDELETVTQPSSQAEKVRIAEIEQEIGNLLAKVPEANKTVMEYINRRIEELDKEKQSLQQKLVEQSTNQTSGKMDKITNYVAKWDELDNDDKQRVADILIDRIDIDEDIIEITWNI

SEQ ID NO: 11552 - protein, 488 aa, synthetic construct
MPEALNAVIYARYSSDRQTEQSIEGQLRECYAFAKANDIAVVDTYIDRAISGKTDNRPAFQKMIEDSAKRQFQAVIVYRLDRFTRNRYDSAIYKARLKKNGVKVLSAMENLNGSPESIIMESLLEGMAEYYSVELSQKITRGMRENALKGKALGGQRVLGYKVNSDCYFEIDETAAPVVVDIFKLYSSGKTVKEICDILNARGVKTARGGAFNKNSLHTILTNKKYIGIYKTKYGEIVGGIPAIIDKELFEMVALRMEQNKKAPARAKAEINYLLSTKLFCGKCRSAMVGESGTSKTGKKYYYYACVKKKREKACDKSNVKKDWIEDLVIQRTVTDILKDDVIEKIADRLVELQKAEAAESGTMLYLQNSLAEIQVSIKNIMTAIEKGIITESTKTRLTELEDEKRNVEIEIAKESIARRIISREQIIYWISSFKDGDITSEKYRQQLIDTFVHAVFVYDDKIVITYNYSGENNTATISDLDLSSPPK

SEQ ID NO: 11553 - protein, 694 aa, synthetic construct
MTRQKVDVIPASVRSVQNGGQLKSQTNIRVAAYCRVSTGDESQQTSYTTQKAFYKDLITRKPGWIFAGIYADEAKSGTNREHREEFNRMIKDAMDGKLDYIVTKSISRFARNTIDSLTCTRELRQLKPPVGIYFEKENIDTLDAKGELILTILSALAQDESRSISDNIRWSIQKKFQSGVPHINLKRMLGYELGENKQWVIVPEQAEIIRYIFDRFVKGQTANKIAQELNQMEKFTVNGKKWSASSILIVLRNEKYVGDIEMQKTITKDFLTHRSSINKGEAPRYYVKNHHVGIIDRVTWDKVQTMLFEKPRADMTKGPGKKKVKSIKGSPFGNLRCGAILENGPDAGKPCGEGFFRTTYTGVANGYSDERSLKATGEDTGEYLEKYTYSYPVWRCKRKVGERDGEPPKTGSPDQKAYCRSKKGCMSDEEKEAANKRCPSERYHECALEQSFMELLYSMKRDFEQHGDASMIVTMFDNAYEQAVRLANNNSISVQRMATVENQIKEMEERLQDAISHQVAALREAALEQNVELNEALSNGEVTIDDIDLDIRSGLTPGSIGVSFYGTETEEGSEAQIYTELVNDLQERLKTLQQERQTIEEEQGVLAIMKKNFEYFLACLKELPDTNAGGMPLRVNGLDVQGTLLRDVDGNAIEGRKRAITSGKLKLTPERIAEAPDMFAMPYKAVVLRLFESG

SEQ ID NO: 11554 - protein, 502 aa, synthetic construct
MEIQIREGNSRQKRKLKVCAYCRVSTDADEQENSLENQIRHYEEAITSNPDYEYAGVYSDFAISGFKEKRPGLQKMLADARKGKIDLILTKSVSRFARNTSIVLEATRKLKELNVGVFFELQNINTLSGEGELMLTILAAFAQAESENGSVGAKMVYQRKYEAGIPVQYLERSFGFKKDERGVYIADEEEAAWVRKIYEMAADGYTPAAIKRYLNENGVKTVGGAEWIDSTVFRLIENEIYKGDYIMHKHFVNEERKLVRNRGEVDAWYIEDDHEAIVSPKLWQKAQDALEAKRDYLAGGSVIEEFTEENYPYMNRIYCTRCGHPLYKRIYSNGNRLNWGCSGTKRYGKSFCEGINIPDGVLRRAWHFDENMYIGEKQTDKGKKEFTYLKEASWKRRHKKKEPEPIPENTETEYPYREKIFCGLCGSRLVRHVNTKNHKVIWVCNGRKRKGKDFCDGTRVPDTIIKGWGEIKKDIYIQRKDDKNGKKRYSYTSKKPKGADRV

SEQ ID NO: 11555 - protein, 538 aa, synthetic construct
MQENYIVGIYARLSRDDERAGESVSIENQKEMLSRYVREQGWTLYDYYCDDGVSGTTFDRPGLNRLVQDATDHKINLVLCKDLSRLGRDYIEAGKYTDFVFPSLGCRFIALNDGVDTLRKNNEMLVILKNVMNDLYARDTSSKIKAVKLSTFKSGKYVGCYAPLGYKKSEADKHVLEIDPVTAPVVRHIFDLRLQGYGFRKIALQLNAEKVPAPRSFYYMAEGRENLRGETPFWNDVTVKTILRNEVYIGHMVQNKTGTVSYKNHKQVSKPESEWIKVENTHEPLISQETWDAVQRMDNHLARGRSGKSGTIALFGGLLRCMDCGSSMRYMRDYRKKVSEKEPEYKAYVCNRYASGGKNACSSHYINQKVLTQIVMTDIRCKAMWAQNSRETLRTQLLAREQNASVERTRTLQAELNAIGKRLPELDKLIQSAYEDKVLGRIPESVCVNLLNQYEAERREKQERRKELTEQLAASRETESSVDAWLDMMQDYAQLEELDRPTLVRLIQKIEISERYTVDDHEERDIHIYYNFVGYIEA

SEQ ID NO: 11556 - protein, 555 aa, synthetic construct
MARKRINTPEATGVIYARFSSHNQREESIEQQVAECNTFALASGIKIVGVYSDSAKTGRTDRRPQFQKLQREAQKGEFDYIIAYKSNRIARNILNALMFENEMEKLGIKVVYAKEEFGNNAAGRFALRTMMNVNQFFSENMAEDIKRNQADNALNCRANGPAPYGYKTGADGKFVIDEMRAPIVQEIFNRTANAEKFVEISEDLNRRGIKTKNGNEWGKSSFFTILHNERYTGVYIFNDVRIEGGMPVIIERSLFDRVQKIMKTKKNPQGRKRADDGIYLLTGKLFCGKCKSHMIGMSGTSKNGDSHYYYICNEKRTNGTCDKKAVRRNFLENEIAKAIRRYILQPNVMEWIVQQVLSFQKGDVRQVEIANMQERHKEVKKAIANVMIAIDQGIITASTKEHLQDLESERAQLDARILVAQSEAGKAVTRESLLAYLEHFRAANVEDKECQKELFDTFVKAVYLYDDHITLIFDINDGTTEDVEISMDEVEQSLCENVRLNSVVGHQIEQDEHVFMCLSYFFCLLQGHSKLLITTFSYDIILSEVLSVYIDNEYL

SEQ ID NO: 11557 - protein, 516 aa, synthetic construct
MPKTEEKQPAKAVIYARYSSDRQREESIEGQLRVCEDYARRNNMTILHTYADRAMTGRSDQRPEFQMMIRDAATMAFNVILVYKLNRFARNRYDSAKYKHKLKKYGVKVVSAMENIADDPSGILLESVIEGMAEYYSAELSENVLRGMTQNALEGKCPGGVIPLGYKLDKGGRLIINEEKAPIVRMIYQMFLDGMSVARIERELNDKKYTTDAGKVFSRSRVYYILHNERYIGTFQWKDIKKEGIIPPIISKEAFHAVQERINAMKSSSYRTNNNYLLAGKAFCASCGAKVSGTSGKSQNGNKYCYYGCSHHHRSARYEYCETKNIRADVLEKLVCDKTHEILSSKKAIKEIARQAVKLRPRDESELEIRAIKNHISSCQKKIDNCIKAIENGVMSNALVESLSENEQTLDVLKEKLAKASLMQGRGLLTEEKIQFFFETIREKAKETEKYNDILLTSLVRAVYICNEYVEIQYNYAEQLPILTNPVRIESCSYKCTNGGTIWIRTKDLFDVNEAL

SEQ ID NO: 11558 - protein, 572 aa, synthetic construct
MASRIAEKLAAKKAAIYIRVSTHWQVDKDSLKVQRRELIAYVTLVLGITDYVVFEDPGYSAKNTDRPEYQAMMDRIRTGEFTHLVVWKIDRISRNLIDFAAMHDELQSLGVTFVSKNEQFDTSSAIGEAMMRIILIFAELERKTTAERVTAVMLSRASDGQWNGGRVPFGYSWSKEAKTFSIVPEEAKAIRRMAELYEQYQSLLYVAKYLNDAGIVTKTGGQWTPTTVRTILTNPWYIGQYVYNVHSDGKGIEKRDSDEWITVENHHEPILNEDVFCRMKFLLTRNKRGGVPSHKTYVRKNIHVFAGLLRCGQCGSNMTANLDRRRANGFRPSQYACGSRRRKGTSCTNKYISDTTLGPFVLNYVANIIRASKNSSEATTPEVLERKLLRGEAFEDVASVSTDALGQLLDAFRAAGDAVEYRPQIAFSGDDNSIREIDTLRARRRKLDNALARLNALYLYDDEAMPEKDFVMQRGQITKQLEEVNARIEELQNQESSEELGDGFIGKASYYIMANKLIEDRYIDYEKYIRAIDPSIPHSFLQQIIDHIVVNDGRVTSITFKNGATHTFTYKT

SEQ ID NO: 11559 - protein, 555 aa, synthetic construct
MRSAEIYGNQRGENVIGTTAQNDMRIVVIPAKSRDEIQRTTRLNVAAYCRVSTDQEEQENSYEAQISYYTEKIGKNNDWQMAGIFADEGITGTQAKKRPEFLKMIRLCRQRKIDMVLTKSLSRFARNTVDSLNYIRELKALGIAVIFEKENINTLETDTEMMLTIMSCFAQAESESISKNVSWGIRQSFKNGNVPMQYARLLGYKKGDGGNAEIIPDEAEVVREIYRCYLDGMSMNLIADRLNAKGLTTKGSGSPYRKAVVQRILTNEKYTGDALLQKTYVTDCITKKTRKNNGELPMYLVKNHHEPIISRSDFNRVQEEMARRSAKRTIADKLTKTGQGKYSAKYALSELLICGECGEHYRRVTWTANGFKEVKWRCVSRIQYGKKKCHSSPTVDEQALHRAIVSAINDLCTVKDDVAKALRESITEVLDPNQNGSIQAAQQRIDELARNIDELIRLATVPETAENAMSDIAKFSEEMKMLREFIETEKAKQTEVQHGSNELSNVLQSLEKEDFALTEYDDIVTRQLIEQITVDTKNTITVRFKGGFEMRANLN

SEQ ID NO: 11560 - protein, 500 aa, synthetic construct
MAEITIIPAKNHADEIVRTAAYVRVSSDSEDQLNSFAAQIRYYTELLQNSTDAVFVDMYADEGISGTSTAKRTEFQRLMSDCRKGKIDRILTKSISRFARNTKDSLEAVRELKTLGVLVYFEKENIDTDEISSEMMLAIYSQFAQEESMSISRNVRMGFQKRMADGSYVPSAVPFGYIRENGKFVIDKEKAEIVRGIFSDYLNGVSAERLAEKYGVKLATVKYVLTNEKYTGDSIFHKWYTTDTLPFDCCENRGERDKYYVSETHPAIISREVFQSVQQLIERKGASRIGKFTVSYPLRKKIYCGECGTLYKRKSRSNRVYWVCRKHDESADKCSAKQIAEEIVYMAFVRMFNKIQAHHKALLAPMLRQLEALYEREKSGNAQLAELRKEISEIKRQAYLLTMLNSQGTLDAGYFMERTKELDRKLMTAQKQLHANLDDKDGERLDNLRKLIGIFDKAEQIDEFDEIKFGQIVEKITVLSETEIRFDLIGGIGFTERIER

SEQ ID NO: 11561 - protein, 513 aa, synthetic construct
MQENKQNLRFTALYCRLSSDDELKGDSNSIIHQKQILQDYALKHSLTPTEIYVDDGFTGTNFDRPDFKRLLSDVENDLVKTVIVKDLSRLGRNYLKVGYYTEVLFPEKGVRFISIADNLDTSVNDELNDFIPFKNIMNEWYAKDLARKQRAVVKSKGNSGIRLATRPLYGYKKAENGDWLIDEPTAAVVQKIFDLYLKGYGPASIANYLFANKVKIPSTIGLPKLNPEQNPYRWSKDTVAKILTYQDYCGDMINFKRSEVDSLVIFPDRQEPIISREIFAEAQKLRLDRKPVRHDYSEPVLFSDLLLCADCKSRMYAQRRYHGTTSYSCSKARKTQGCTSHYINENKLIDCVKSDINKLIKNKGIVIKLAKEKMHIDTKTAQCANSQNLKNAKKRILQIDTILKNLYEDKVLGNINLATFKKLESDYLREQAELNKVIFEQSKIKVNLENRSKSICGFLKKLESYNNPVSELSRDLLIDLIDKIEICEATKNGNERSQQVHIYYKEIGKINLE

SEQ ID NO: 11562 - protein, 520 aa, synthetic construct
MVKCMKSVAERAVPAVIYARYSSSHQREESIEGQVRECREYAEREGYSVLQVYADRAITGRTDERPEFQRMLADASKGVFQAILIYKYDRFSRNRYSFAVWETKLKKHGVKVISARENVAEGAAGIVLKSVLQGMAEWYSVDLSEKVTRGMKENALKAKWTSGTVPFGYTRDAEQRLIIDPERGEYVRQIFEKVLAGEKYVDIASWLNMLGVRTARGAAWNKSSFTWMLKNVVYTGLFRWKDIEIKNAVPPIVSKELFEAVQRKLKTYGRRGINVQKSDKYLLTPNIICGECGGPMHGMSGKSRSGELYYYYACANKRAKRTSCSISPLNRDELEQAVYNCAREVLLHEENIKLIAEQAEAVAEAQVDNELAEMKAERSRVKKSIANYAAAIANGATSGTIIELINAAEAKAAALDEAIAERELVAAPPKVSKEAIEYFLRNIAAAPDDKMKEKVISTMVNSVVVERVPDEGTKKDSDEKYSITVRFNFTDTPQLSALQSFDVREKSKMVTSAGLEPATF

SEQ ID NO: 11563 - protein, 526 aa, synthetic construct
MINMVSFDNIIIYLRKSRSDDPAQTVEEVLAKHEHILQDYCLKEYNKVIPEKRIYREVVSGETIQDRPVMQKLLKELETDNISGVLIVEPQRLSRGDLQDCGQIINSFRYTNTAVITPTKTYNLSDEYDRKFFEMELTRGNDYLEYTKKILNRGRVASVKQGNYICPVRPYGYKKIVKGTGKDKCHTLEIIPEEAEAIKLMYHLYLDENMGFTNIARTLDSLHIKPLKSNNWSAATIRDMIDNPIYIGKVVWNNRKVVKKWENEQIIKVRPRNKGDDVICVDGKHEAIIDEETFNAARQKRGLTPKVRKFKELRNPLAGILFCSTCGHSMSMKKYVDKRSHTGKVTTIMLCNKQAICHTKSAQYEQIVAKIKESLADAIADFEIKMKEQENNNIDIHKQRITSLKDELNKLYNKDVRQKDAYEDGVYTKEEYIERNAKLQSQILTIKSEIEDEQNNTPVRIDYQNKITTFTECLTSLDDDSISAADKNSLLKNCIDKIIYHNDMPSLPGIGRYIENSFRLEIFLKM

SEQ ID NO: 11564 - protein, 474 aa, synthetic construct
MKVGIYSRVSTQEQAREGYSIGEQVERLKNYCAAKGWILYKTYTDAGFSGANTDRPGMQQLISDVADGKIDMVLVYKLDRLSRSQKDTLFLIEDVFIKNNVNFASITENFDTSTPFGRAMIGILSVFAQLEREQFRERSIMGKDARAKEGLHHGGGAPTGYDYIDGQLIINKEEAELIKEAYRLFLEDDMTMMGIAAKLSVFSEKFKYDHRIRKMLSNPLYAGWTHCRDELYKGQHEAIISQEVFDKVQTKLKIRAENNPHYRNAFNRTSLLAGILWCKKCGARYFKRVRRYEKGSKVYYYNKYQCYSRSSYKNMVRDKSCKNKIWTMDVLDKAVIDEIKALVANPAEVDNIIKLNQSNNNITEKKEFYKKRIKEIEKQMNKLTDLYSIDGIDIDFVAKKITALNTDKKRIESEMNAINEHKPLISAEDAKKRLSGISNILDNGEFTEKVKVITSLINRIEVDDDDIYIYWNFV

SEQ ID NO: 11565 - protein, 483 aa, synthetic construct
MRMAAYCRVSTEKEEQLSSLENQREFFEQYADKEDDTLVKIYADEGISGKSMNKREAFTQLLEDSKTGAFDYVAVKDISRFARNTSDFLYGIRTLRSNGVDVRFLSNNQTVIGESEFVLTVFAALAQEESSNLSKRVIFGKRQNAKKGRVPNVVYGYNKIDTYTLEINEQESYIVQLMFKWYIEGEGTRRIAIKLNEMAIPTKKQAKWVPKTIRRILQNPIYIGKIINNKSVTKDFLSGTREAIPPEEWYIHERPELRIISDDDFELVQQKIKERQEQYKNDNPGNRFSNRHLFSNLIKCGECGKSFTAKVYQWKNRYVRYRCCVHNNNGNAHCTNSVTVDEQELLNEVKAYLLTAIEDKKAFADKLMKQYQAQTTNVDVSKLTDTRQSLEKRRSKFKEMFAADIITMDELKKEMSAIDEGMRSIDEELKAYDEIQKKATHIDDIHKDIEQILMQNEYTNDDMRRIIEKIVVYPDKSVEIFMK

SEQ ID NO: 11566 - protein, 523 aa, synthetic construct
MRFFSYGRKSVFSDKSDSIDNQFRMNREYCESKFSSQVDSWQQFSDEDFTGANTSRPDLQRMLSFIKGGFCDVLVVYQLDRLSRDVRDFANIYALLEEHGVMFISIKENIDTTTPIGRAMMYVTVVFAQMERETIAARVTDNMLGLAKKGYWTGGNPPVGYVRKHIVVNGKKHCSIEVDPDGARYVTQIFDTFLAYNCSLQGMETRFKNQGIRTQSGKFFSTTQLHKMLTMPYCVEATPEVYDFYAAKGCIMDPGSPREMWDGSVGVIIYGRSTEKNKKHQAQPPEKWTVCLGKHKPFMPAEKWLAVQSRFTQNKCIKDAKWPVPLLKGVLRCKCGNLMQVSRKKKVDGTCSSWYYCRKRMRQGVDACDMGQIKCDLLDEEVLELFRGITADPALIQKFVKAEAPADVPDLKAAQARVSACERKIGRLAASLALAEDSAASKYIIAEMERLDVELGALKREASLAEMESHQAAASAKDAKATAAEIAKLIHGLDGFDDKEKNAIARAVIQECTWDGERLFITL

SEQ ID NO: 11567 - protein, 488 aa, synthetic construct
MEKTRAVAYIRVSTERDAQLHSYEFQEHYWQSAFEDDPNTDLIGIYADKGISGHSVQKRPKFLVMMQDAREHKFDKIYTKSVSRFARNTTQLLEAVRELRDLGIEVVFENENIHTFQPTSEIFLTIAATIAENDLEVDSARQRWSIQHRCENGWISVGSGLFGLKLTADNELEIVPEEAAVIRYIYESYVDGGIGSKKIADALNAAGVQSRNGYPWDAKHIIGLLRNEKYKGDVIMGKSVRHFGEYHKNPNAEYAPRYYMEGTHEAIVDRDTWEAAQRILEDRSRNHCRTRIAHSFTGMIECGCCGKNYLHKVNNSQCKWQTDIWACRTYLRDGKKACGNSRIKDTVLKEKFISAYNEFIERRPQGDSMVALQEVLEDLRQQEQELAELMMQRLIPKAAYEEERKSVKMQITDISEKISERRAKRVPESEYVPITEFSEEKAKRFLSKVVVTMFTVTFVFYNGAKITRTYDNGQPGNKVGWNKKKEES

SEQ ID NO: 11568 - protein, 561 aa, synthetic construct
MNVVIYARFSSHSQTEQSIEGQLKECYAYAQRNDYTVVGEYIDRALSGTTDHRPEFQKMIADSSKKTFQGVLVYQLDRFARNRYDSATYKSKLKKNGVRVLSARENISDDASGVLMEAVLEGMAEYYSVELAQKIKRGMDINAEKCLSTGGNLALGFKTEDKRIVIDPLTAPIVVNIFEMYVTGSTMADIIRYLNANQIKTSYGNEFNKNSINRILRNKRYIGVYTYRDKEIPDGLPCIVDEDLFWEAQRIMEKNKKAPARAKAKVDYLLTTKLFCGRCKAAMTGISGTSKTERKYHYYQCVTNRRDKSCDKKTVGKEYIEDLVVNRLRDFLTPDNISTIAREVVDLCERESNNGNTRRLKKLLAENEQATENLLKALESGQAVDIIADRIAQKKKEHEKLSLQLLVETSQHPTPSVKEIRFFLNQFRKGDINDPKYRQGLVDMLVNKIYLYDDKMTVLCNTQDGHFDVDLKEVSSLKGQLVEAGGVEPNNRFLNQLWCNRLLIRRSICVAFCVISVAHQYGAVGLPKHDASNRQRKDDRRARILFHVQAKEIRPGDRHIL

SEQ ID NO: 11569 - protein, 523 aa, synthetic construct
MFFGIYGRKSVYSDKSDSVDNQHRMCNDYIKAHFKADDITLVTSYSDEDYTGANTKRPDLQRLLEDVKSGAINVLVVYQLDRISRDVRDFSNIYAMLEEYHVMFISIKENIDTTTPIGRAMMYVTVVFAQMERETIATRVRDNMIGLAKKGFWTGGNPPYGYVRKNILINGKKHVTIEPDPDGVAYNIWIYDSFLKNHCSLQSMETCFRKEGIKTRNGAFFSTTQLYKILTMPYCVEATPEIYDYFAAKGCQMDPDSPREKWDGSVGVMIYGRSTGVNKKHQLQPPEKWLVCLGLHKPFMPAAKWLAVQNQFSENKFDKTQKYDIPLLKGILRCSCGSIMAVSRKKKINGEVSSWYYCLRRMKNGVEACDRKQIKVDIIDQKLLNTLHSIEIDPSMIYRFVQKSELPLPDIKTINNKISSIELRIGRLASSLALADGSAASKYIVAEIERLDSDLQFLKRERAVINVEIKKRGELNESAEGKAQHIQNVMKGLNGFTAEEKNRIMRDILKECVWDGSELSIVL

SEQ ID NO: 11570 - protein, 468 aa, synthetic construct
MQETNISINEIIMYLRKSRSDDPSMTVEEVLARHERQLQEYALSSFGFIIPEERIFREVVSGETIADRPVMQSVMKYLESGQIKGVLVIEPQRLSRGDLEDCGRIINAFRYTNTLVLTPPKTYDLSDEYDRKFFEMELTRGNDYLEYTKKILNRGRLASVKQGNYIGSIAPYGYRKIKTGSGKDTAHTLEIVPEQADAVRMMAQLYLAGNGFTRIAAHLDSLGIKPLKSDHWSPAAISDILSNPVYIGMIRWNHFKTIKTMQNGQIVKSRPTNRGTDYILVPGKHPAILDQVTFDAIAQRRGKSPKIKRGHELRNPFAGLVFCGTTGCGRSMTFKQFTNYRSKVPRRSESMICPNQRICHTKSVQYSAFVERVKEILSKTVDDFEIKLQNDDGNIVRNLEQDLVKLKDKDLRQKDAYEDGIYTKEEYASRNAKLQEQICEVQLSIQRAKDTMPPEVDYQERVSRFSDC

SEQ ID NO: 11571 - protein, 520 aa, synthetic construct
MKKITKIGTNEPLAEKKKLKVAAYCRVSTASDEQLISLEAQKAHYESHIRANDEWEYVGLYYDEGITGTKKDVRAGLLSMIADCEDGKIEFIITKSISRFARNTTDCLEMVRKLTDLGISIFFEKENINTGSMESELMLSILSSLAESESVSISENSKWSVQKRFQNGTFIISYPPYGYENDNGTMVIVPEQAEVVKEIFAACLAGKSTHAIAKELNARGVKTKKDGKWGAGAVNAILTNEKYTGDVIFQKTYSDSNFNRHANHGERDRFLCQNHHEPIISHEDFDKVRAVLDQRAMEKGNGTDTYRYQNRYCFSGKIKCGECGGTFKRRQHYKPSGDYVAWTCKTHLENKKECSMLYISDESIKLAFLTMMNKLTYGHQVILKPLLRTLRGMDDKDRLLRIQELDICIEGNTDRKQILTSLMATGVLEPTVFNKENAALVMEEQKLRAEKEKLVNFVGGDKTRIKELQKLMAFTSKGMMLTAFEDETFLAFVESITVESRTKIVFHLKCGLNLTERLVN

SEQ ID NO: 11572 - protein, 507 aa, synthetic construct
MDKYDAIYGRQSVDREDSISIESQIEYCQYETRGGAYKVFQDKGYSGKNTDRPQFQEMLAAIRRGEVKRVICYKLDRISRSILDFATMMAEFQEYGVEFVSCTEKFDTASPMGRAMLSICIVFAQLERETIQMRVTDAYISRSRKGFYMGGRIPYGYRKEPFMLDGKKTSRYVIDPEEAEVVKLIYSLYAEPQTSYGDIVKYLMEQGITNSRTKDGVWDRCRIADMIKNPVYVKADLNLYRFYKDQGTNLHNSPEDYIGVFGCYLYSDRDAGRKQCHLEGQHIVLAPHEGIVPSDIWLKARLKCLNNKQVAKPLKAGNTWLAGKVKCGKCGYALTIRKCKLKTRTRRYFICSRRMQTEKCEGVGGIDADVFEPFILEQMKDHVKEIESLSSQKTVRENPKVFELNAKIEALSAEIGKLLDKVADANDVLMDYINKRVKELDAQINVYRQQISELSPLQNVEKLNTKQLRNYMDHWEELSFDDKRNVVDQLIVVIKATMDSCEITWKF

SEQ ID NO: 11573 - protein, 485 aa, synthetic construct
MPTSDLKIAAAYIRVSTDDQEEYSPDSQVRLIREYARKNGYLLPEEYVFQDDGISAATARKRPAFNRMIALAKEKERPFDAILVLMFSRFARNREESVLYKGLLRKQGISVISVKEPAVDGPFGTLIESIIEWFDEYYLINLSAEVKRGMSEKFLRGEAMGTAPFGYRIDSANKTFTVDPERAEIVCDVFRSYADGAGLRDIAVQLGDAGITTRRGNRPDSRFVEYMLRNPVYIGKIRWTPGHKTRYSRVHIADGVEVVDGKHPPIVSMDLWEAVQRRMDQRKAAYGRYQRQAPAAWMMRGLVRCSACGATLIMAGRSSSCPFLQCHSYAKGACHTSHSLSLRRANAAVLAGLRRSVGTLIFHMVPHLTSAPSRAADYGRLLEQERRRLARCKDAYQAGVDTLEEYRDNKARLEERIRRIEEQAASAAAAAESFDKAAYGKKAADILRFLETSADEGAKNEVLRSVVDHITYEKASRHLAIYFYT

SEQ ID NO: 11574 - protein, 499 aa, synthetic construct
MNVVLYMRYSSDRQTEQSIEGQKRVCMDFCERQGYNVVGEYIDRATSAYKETAKRTNFCRMIRDSSNGLWQGVVVYKLDRFARNRYDSATYKVRLKKNGVKVISATENISDSPEGVILESVLEGMAEFYSKELSQKVSRGLNESAHKCNSTGGAIPLGYKTVNKKLTVDEPNAQIVKEAFDLYAGGATISEICEKFNSQGYRTKKGTEFNKNSFKSMFRNEKYIGTYTYKDIRIEGGIPAIIDKETFETVQKRLSANAQAPARGKARVNYLLSQKLFCGHCGANMTGDSGRSKTGETYYYYSCSTRKRFHSCKKRTIRKDLIERIVAENAMRLITPEMINTIADMAIKCNREDIESDAIIPALTADLKEINTSIKNLLKMVERGVESETLDLRLKELEKRKKDTESRLDAAKSEYLTLDKTVIVGWLSQFLSGDIEDEDFRRHLIDTLINSVTVWDEPDGGYKITTVYNLKGNTQTYRVNADGSSDMKRNSPPKKRQFS

SEQ ID NO: 11575 - protein, 700 aa, synthetic construct
MDSNAFLNDLMSKMKLPEAKGKKKAEQSESVAQILAAMQKVRAEKKKPPVTSYAPVKEMPVNEPESMEEFSQLASDVMQECRPSMPTVKTSISEKTVRVAAYIRVSSTNPAQEDSYEMQERYFMSLLAGNAGWTSAGIYSDHGISATSREGRTGFNRLLRHCKQRKIDRVICKSISRFARNTQDFLVALRTLKENNVTILFEREAMDTADAYSEFILTTLAAIAQEESRSISANIAWSNQKRFPAGNVCNKDIYGYEFRKGEYTVNENGYRYRAVFIIPEEAEIVRMVFRLFTKEELGFTQIAQKLDALHIQPPNSGCRQRQKRKPTVLPAGALKEEDKRGWTATDVRYIIANVRYCGSVLCQKTYTDHRNGHKQKVNKGEKPKYLIRNHHPAIISEELWQEAQEVWKAYTAKYRGIEKGRNERNYSKLLLCGECGRYFQGHSTTRTTIWRCATKLAQQGQKRCRMESIYEEQIQALLRKAFAEKFKLGEKMDAEVHEVMQMVSKVPIDSARNQALKNLTEKLREIHDFDQMEQEGDFLKRQLSAVNYSIRDVHQHIRDIQAEKEALKVRCEVLGEPIDKEAVTELENRLLNEEEQLEKLEHEAQQQAEQVRYMEDYWKKLEQTYEIREKTLQWLDSLAGGTQMFLDEAAGTYVKAFVLSVTVFSPKHFRIHWFDDTCTDVECDSVFEGYQQPGMIRRKY

SEQ ID NO: 11576 - protein, 507 aa, synthetic construct
MQEQQETSYEAQVNYYTEKINSNPEWVFAGIYADDGKSATMTRKRNDFQAMIDDCMAGKIDMVITKSISRFARNTVDSLTHIRKLKAKNIAVYFEKENINTLGDGGEMLITILSSQAQEESRNLSENVHWGYVRQFENGVVYVNHNKFLGYTKDEEGNLVIVPDEAKLVRRIFRLYLEGNSINKIAETLTKEGIRTVTGNTVWHATVISKMLMNEKYMGDALLQKTYTVDFLEKKRAVNKGIVPQFYIEGNHEAIIPRELFYQVQEERARRANVYRPANKKGTTIRGKYSSKYVLADIMYCKECGQPYRRQVWVNGETKKPVWRCYSRLKSGTKKCKHSPSLEEKALHEAIMEAVNSVVKDEGEFIDAFRDNVIRILGSYSDNVEPTEYDEKIDALQKQMLALIEDSAKTESADEEFDRAYREIADQIRAFKKKRTELIREKQLAEAYDQRVEGMGQYIQKTNYLKRQFDDELVRRLIKAIKVISEDKIEIQFHSGIVMTQRIDDYD

SEQ ID NO: 11577 - protein, 535 aa, synthetic construct
MAKKVVKKITKIEPVSNGFTANAVEVKRVCAYCRVSTNLADQKNSFEAQVDYYTRLIGEKEGWVLAGIYADEGRTGTKLYRRDDFQQMIEDCRQGKIDLILTKSVTRFARNTLDSIKAIRELKALGIGVYFEKERLNTLMEKSEQMITILSSIAQGESESISTNNKWSVVRRFRKGTFIISSPPYGYENNEYGELVIKKEEAEIVRWIFDEYLGGKGSYTIAAELETAGIPTIRGAKEWQDSVVKGILRNCAYEGDLLLQKTYTTDGVPFIRKNNRGELPQYLIADDHEAIITREEAVAIRQIYEYRRERQCVEDTSVYQNRYAFSSRILCGECGTKFRRQKIYIGKPYEKIQWCCYQHIKDSKKCSQKAVREDVIQAAFLTLWNRLASNYEEILIPMLAALKAIQGNPEQDREMQEIEQNIQELKRQGYRLGRVLTEGSISSAIFIERQNQIEAQLEAHRRRLRQLQGQKAFEWEISQTEYLISVFRNRPAILEAYDEELFLLLVDHITVLPGRRLVFWLKNGLELEENEQEVS

SEQ ID NO: 11578 - protein, 472 aa, synthetic construct
MLLAACSFCVSAKYFKKLQLFLRPYLTLSDEGVSGTAKKRRDGFLQMIQDCEDGKIDLILTKSISRFARNTVDLLTTIRNLKSRNIAVYFEKEQINTLDGAGEILLTILSSQAQEESRNTSENIRWSIRQKFEKGELMVNHNHFMGYTKDTNGQLLIVPEEAEIVRNVFHLYLIGHSCAFIARYLEQHGMKTVMGKNKWCATVIEKMLSNEKYLGAALLQKTYTVDYLTKQRSKNNGELSKYFIKNNHSPIVSEEIFYDVQNEKLSRSYYRRKDAGRPSQYPITMKLICDCCGDHYLRVRRKGDRKEHIVWRCKSRILHGDRYCTKLSTIPETDLHKAIWGAYSRILHIKHCSDQVELGQIADQMADRKKMIFRAIQENVQGFWVWNDLMAYYANVKNEYDELSELLLRKFLEREESMFIRCPFKHMKAYSNYNKYEDELVNLYVERIWTVASNEVIILFKNGSMVREKWDY

SEQ ID NO: 11579 - protein, 523 aa, synthetic construct
MAERSVTILPPRLNRKAKEVKAEEKAKLRVAAYCRVSTDSDEQATSYEAQIEHYTLFIQNNPEWKLAGIFADDGISGTNTKKRDEFNRMIEECKAGNIDMIITKSISRFARNTIDCLKYIRQLKALNISVFFEKENINTMDSKGEVLLTIMASLAQQESESLSQNVKMGIQFRYQQGIVQVNHNRFLGYTKDAEKNLVIVPEEAEIIKRIYREYLEGANYKEISAGLEADGVLTAAGNPRWHASTLKKILTNEKYMGDALLQKTYTVDCLTKKRVANDGTVPQYYVNNDHEAIIPRELFARVQEEMKRRANIRQGMNGKRRVYSSKYALSSIVFCGHCGDMYRRTHWNNHGKKLIVWRCVTRLNAPGVECPARTLSEIQLQNLVLEAINKVLGGKQRAIKVLETNISEVVGNAHIEELERIKQQIEKQQTLLVKMTAASEDYSKVVDKIYALQREQEEAMAANVNYKAGKERIQEMIEYLKSQPKRVTAYDEHLVRKLIEKITVYDDHLDFLFKSGIQIEIKG

SEQ ID NO: 11580 - protein, 520 aa, synthetic construct
MAKVTKIFNKEEEENKKLKVAAYCRVSTDSDEQLESLEAQKKHYQTYIKSNPAWQYVGLYYDEGISGTKMEKRKQLLAMLDACKRKEIDLVITKSISRFSRNTVDCLEMVRFLIEHGVYVYFEKENLNTMTMESELILSILSSMAEEESHSISKNNKWSIQKRFEQGTYVISYPPYGYINDGGEMRIVPEEAEVVRRIFNDTINGKGSAQIARELTEEGIKSKKGGKWHSTTIRGMLKNEKYTGDAIFQKTYTDDRFTRHTNNGEEQQYYCRNHHEPIISHEMFELAEQETRRRADEKNIKKSTQKYNKRYAFSGIIKCGECGAIMKRRTHYTGRREYIAWTCGTHLEDKTKCPMLYVRDDAIKAAFTTMMNKLVFGYKEVLTPLLEGLDENMNYMNTEKQSEFENQQKAIKEREKLLREHFHKNLLSQEIFSRSMEDIEQELRTLAQVREDYLHNQQRGTTYLAAARDLYAYCCKAEMHTVYDEEVFKRFVNGVIIFSRDEAGFRLNCGITLRERMVVP

SEQ ID NO: 11581 - protein, 580 aa, synthetic construct
MSEKIINCAIYTRKSTEEGLEQDFNSLDNQYEFCTNYLKSLNDPTLHLLPTRYDDGGYSGGSLNRPALQCLLADIRCGLVNRVIIYKIDRLTREIRDFFKLLDVFEKYNVEFVSVKENQYYNTTTAIGRLMVNMFLVFAQFERENAGDRIRDKIATSKAKGMWMGGCPPYGYDIGDRCLVINETEAQNIRFIYQTFCNTHSLADTTEALNSGGIRTKCYTTRQGRTFGGRKFSVKTVQRILQNPLYKGMVTHRDKQYPGQHAAIIDAAQFDLVQAIFAAHKDKREARRCPPKASGGERETAALTGLIFCGCCGSAMTPSYCCKGDIRYHYYRCYRRASKLEDKCPINQIRTSEIDRVVMEQVLAILKSREFFVQYISHHHEFDVSTAFALFNNLDDVWNSLFETEKRRILRELLAKVTIFKDKIVLDVKKAGLAGVFAELSRNNRLAEVEYKENETFQISIAYRATRLANGAKIIVPATAKEESRFNGSLRLARQIAKGFAWRKMMESGLSLQELTASAKTNERDIRFAMRLSMIDPAIVESVLSGKSPEFLTYAFMKKHPIPLLWSDQRKLYGFEERKQ

SEQ ID NO: 11582 - protein, 612 aa, synthetic construct
MRAAFLIRCSTKKQDYERQVNDLTRLAKKFGYTSSDNLIFGEHITGKDDASKRDRQSILRLKDAAVNREFDVVLVSEVSRMSRDPMSGRLYVRQLINMDIPVYFRDIDTWTIDPVTGKKVRDAETIIGAAFDAAWKYIKSMKTQIASGRRDELDNNQMSIAQPYFGYKRYGGRDKGKKNRWVINDDAAKVVVDVFEEYVKDGATLKSTALAITAKYGEQFNKKFSIGTIEHILTFEPYCTGIKVVHLTDPDTEDVDEFRVEIPTIITRAMFDKATTKRATNRTARTPYPKQATYVLSRLLKCPICEHSLTPQKRGGDKGDKYRLMNGKVAIRWSCMSGINNATDCSSRITISNEKLEAIIWGLVKQELIGFANLNDEDRVAKVEELTDKITNLEMNIANFTSHISNMDRLIERAYSAYIDAPDSVMDIAKDKYYKTLTKCENERAECKDKIEALNVEKLRLENMRTFFNQPTLPKDVIEKAESDPIKMRNLVMELIDKIYPYRITTYVSPATNRVMRNGIVLLEVYTINGIYNVLYDGNQRNNKVAYYISGVYATYQNGRNKFDAYDTGEYFVISHATLVTKTEDVDLTVTFNELIKICMQNGWEIDYTYKT

SEQ ID NO: 11583 - protein, 500 aa, synthetic construct
MDNNRKTALYVRVSTDSQFEEGYSVEAQTEKLEAWCKVKNYKNTELYIDGGWSGSNIDRPELRRLMGDIAMGKVAVVVVYKLDRLSRSQKDTLFLLEDVFAPNDCDFISINENFDTTSPYGKAMIGILSVFAQLERESIQMRVQDAFYSRCTKGYYMRGRTPYGFDTEPIVMDGIKTKKLVENAEMDFAELMYQMYAEPSSSYGDITRYFVKNSIDVYGKALQRAFISKLLRNPVYVQADMDIYEYFKAQGVKIESPPEMFTGDNSCYLYQGREGEEQILVIAPHQGRIPSSLWLTVQRKLSQNTSFQNGRKCHNTWLAGKIKCGRCGYALVGLRAQNGVTYLRCKQRADNGSCEGAGTLTAQSMESFVYGEMVEKMRKYHTLKGGKEPGYNPKLTAARVALAKTESEIEKLLDTLSGANPLLLQYANNRIEELDAERQKQLKLVADLTANSVSDTQIDCITNYLNDWESVSFDDKRKVVDILISHIDATSESVTIHWKI

SEQ ID NO: 11584 - protein, 509 aa, synthetic construct
MQEKDGNSLQNQLEILTEYCQKKGLTIIKDAELVESSTRGVRKKFLEVIKFCQQQKGGVALVCLKTDRLFRSFTNLPEVYNMCQTGQLEIHLTQENLIINKNSKAGDITLLGLNVVMAQNYVLSLRDNVIYGMDYSVAQGRCMSKAPAGYLNVRTPEGKAAVIIDKERAPIIQKLFNEYATGLYSVKDMMKKCKEWGLVSRFSGKPFDTSTIHRILNNKFYIGEMLYKDQWHKHNYETLIAPALFKTCQDIMHGRKPEEPKHFKTTEKPFIFRGLITCGECGCMISSDRKIKPSGKKYVYLKCSHFKGNCKNPQVNENIVLQQIEDELKNLSLPQEIMSYLRSDMEKIINQQNKALNLEIKDIRQKYDELQKQIQYTDTLLVTQKITPERSNEIVSRLKQEQYELNNKLELLTKADEKFSIAVATILSLGNNAYQIFQSSKVETKREILHLLLSNLKLQDRKISYTLRKPYDYIRSLNKKTPSKKEGVAIGDAVSSHREQVYPTANFCV

SEQ ID NO: 11585 - protein, 580 aa, synthetic construct
MPEKIINCAIYTRKSTEEGLEQDFNSLDNQYEFCTNYLKSINDPALQLLPARYDDGGYSGGSLNRPALQRLLADIQCGLVNRVIIYKIDRLTREIRDFFKLLDIFEKYNVEFVSVKENQYYNTTTAIGRLMVNMFLVFAQFERENAGDRIRDKIATSKAKGMWMGGCPPYGYDIGDRCLVINETEAQNVRFIYQTFCNTHSLADTTDALNSGGIRTKRYTTRQGRTFGGRKFSVKTVQRILQNPLYKGMVAHRGKQYPGQHAAIIDAVQFDMVQAVFAAHKEKRETRRPKMPSSGGERETAALTGLIFCGCCGSAMTPSYCCKGDIRYHYYRCYRRASKLEDKCPINQIRTSEIDRVVMEQVLAILKSRDFFVQYISHHHEFDVSTAFALFNSLDDVWNSLFETEKRRILRELLAKVTIYKDKIVLDVKKAGLAGVFAELSQNNRLAEVEYKENETFQISVAYRATRLANGAKIIVPATAKEESRFNGSLRLARQIAKGFAWRKMMESGLSLQELTASAKTNERDIRFAMRLSMIDPAIVESVLSGKSPEFLTYAFMKKHPIPLLWSDQRKLYGFEERKQ

SEQ ID NO: 11586 - protein, 522 aa, synthetic construct
MGNVMLIPARRQVGSNARKKEEEKPKLRVAAYCRVSTDSDEQATSYEAQVEHYTEYIQKNPDWEFTGIYADDGISGTNTKKREEFNRMIDDCKAGKIDMIITKSISRFARNTLDCLKYIRELKDMNIPVIFEKESINTMDAKGEILITIMASLAQQESQSLSQNVKMGIQFRYQQGKVQINHNRFLGYTKDADGNLVIDPEQAEIVKRIYREYLEGLSMDKIAAGLERDGILTGAGKAKWHTSTINKILRNEKYIGDALLQKTYTTDFLNKTRVKNNGLMPQYYVEGNHEAIIPKEIYLQVQEELVRRRVVKTSANGKKRSYSCNHCFSQIVICGECGEMFRRLHWNNRGVKSIVWRCISRLESTGLECHARTINELVLQDAVVKAINQMLGDKSSYQAQLQLNIASVIRASQATSVENIDEKLMALQQELIQKAQSKEVYDEIADEIFRLRELRQQTTVDTAARDEQIKRINDLQDYISQQTAHLTEFDESLVRRWVKQITVWDDHFTVELKSGLSIDIQA

SEQ ID NO: 11587 - protein, 521 aa, synthetic construct
MKKVTKIEGVQNNSTQKKKLRVAAYCRVSTGSDAQLESLEAQKTHYERYINSREDWQFAGLYFDEGITGTKAEKRPELLRLISDCEAKKIDFVITKSISRFSRNTTDCLALVRKLQSLDIPLFFEKENINTGSMESELFLAILSSMAEGESTSISENAKWSIKRRFQNGTFKLSYTPYGYDWDGENMVVNPAQAEIVKKIFADVLSGKGTQAIADELNADGIVSKKNSKWTATTIRAILANEKYTGDVIFQKTYTDENFNRHINYGEVDQYMAPDHHEAIISHEDFDAANALVAQRASEKGIEKGNGKYQQRYAFSGKIICGECGDTFKRRIHTCTTYKYVAWACNTHLKDKATCGMKYARDDEIKAAFITMLNKLIYGHRLVLAPYLKALENSSGDEAVQRIQHLELLLAQNSEQRETLTKLMAQGYIDQILYNQETNALLLQAETYHSDIEAITICMTGDSAKVTETNLLLHFVSHTEMLTAYSEELFESYADHIEVISRNEIRFVMKCGLTFTERIGD

SEQ ID NO: 11588 - protein, 492 aa, synthetic construct
MAAIDFNNVVDLYIRVSTSEQAEEGYSVAEQEERLRSYCAAYNYTINAVHVDPGFSGASLDRPGIKKVMYDVEHGRCKKVIVWKLDRLSRSQKDTLILLEDVFLANDCNFISLMESFDTSTPFGRCIVGILAAFAQMERENIKIRTMMGRQARIRDGHFHGSRCPLGYKFQYAPDGTLLSNDLVVDPYTSKLVQEVFRLFLSGSSLSSISAHMASTYGCSMYDWSNSTAIRRILSNPIYMGKVRVGNELYPGIHEPLVSETDWYMVAAMLKHNKEQQKRTYAYQISGGAYADNLLTGLLFCGDCGARMYARRVSQNKKKYICHSVAKTSPAMIKSDHCTNRLHPFTVHQLDEMVINEILKLSLDRPGFDMLCDQPDESSKSEDKEIYEERLAEVNRQLDRLVKLYQTGLIDLDNISARLGDLNQEKNFLEGNIATINEITPADLRETAWKSIQSLQSVLDNGDMDEVHRIIHTLTDKVVVLNANVTIYWSFC

SEQ ID NO: 11589 - protein, 523 aa, synthetic construct
MNICCYGRKSIYSDHSDSIDNQFRMCRDYVEMKFSGQVDSFLEYQDEAFTGANIKRPDLQRLLVDIAAGNCDVLIVYQLDRLSRDVRDFANIYAILEEHHVKFISIKENIDTSTPIGRAMMYVTVVFAQMERETIAARVADNMIGLAKKGYWTGGNPPEGYVRTRIEANGKKHCSIVPDPEGVKYVTWIFDTFLQNGYSLQSMETAFKKQGIRTRTGAFFSTTQLHKILTMPYCAQATPEVYDYYAAKGCQMDIESPREQWDGTCGVMIYGRTTQKNKKHQMQPPEKWLVCLGAHEPFMPADKWLSVQARFAQNKFDKTMKYDVPLLKGVLRCSCGSIMCVARKKKKEGVSSWYYCLKRMRQGKEVCDSHHIKCELLDQKVLELLQSIKRDPGVIQKFAEQNTEVLSGPDPKVFASKINTCQTRIDRLVSSLSLAAESSAQKYILAELERLDLEIQALRREHNLALTAERNRTRQQQDTFSKVSEINRLIADLDSFSASEKNAIVKDVIKKCVWDGESLSIML

SEQ ID NO: 11590 - protein, 501 aa, synthetic construct
MEIQIREGSREQKRKLKVCAYCRVSTDADEQENSLENQVRHYEMVIKANPDYEYAGVYSDFAISGFKEKRPGLQKMLADAEKGKIDLILTKSVSRFARNTSIVLEATRKLKELNVGVFFELQNINTLSGEGELMLTILAAFAQAESENGSAGAKMVYQRKYEAGIPVQYLERSFGYTKDERGVFVADEAESVWVRKIYEMAADGYTPASIKRYLNENGVKTVGGVQWVDSTVFRLLENEIYKGDYIMHKHFVNEERKLVRNRGEVDAWYIEDDHEAIVSPELWQKAQDALAVKRDYLAEGSVIEEFTEENYPYMNKIYCAKCGYPLYKRIYSKGNRLNWGCSGTKRYGKSFCEGINIPDGVLRSAWHFEENTYIDEKASDKGVKEFTYLKERSWKRRHKKKQPSAIPENTETEYPYREKIFCALCGSRLVRYVNPQNHKVTWVCNRRKRKGKEACDGTRVPDTVIKGWGEIKNDIYIQRKDDKNGKKRYSYTSKKPSGIRV

SEQ ID NO: 11591 - protein, 543 aa, synthetic construct
MPVAVYCRVSSEEQAERGTIEIQKEFAAKYVDLYQLEVFDYYCDDGISGTIPVEARPEGSRLFRDAREKKFDTILFYKIDRLGRKVRVILNAVHDLEELGVSIRSMTEPLETETPTGRFMLTSLAGISELERDTILSRMWAGSQRAARLGNWLGGIVPFGYHVVDKQLQISDDIMPGCNLSEGDVIQLIFDLSGNQKMSAIKISDYLNALNIPTRYDLNGINGKRKKNVSSIWYPSRVLSIIKSTTYKGTHKYGKRATNKNSKIILRPVPAIVSDELWEKANEALKTNQITAMRNAVREYLLRGIIKCGNCGRTYMGTAYSGSGREKIPYYVCNAKNSYLAHNTEKCISKNVRADWLEHLVLEDCIKILKSPNKILNMDPEKEQQSLADEVKKEHDQIKASLKKLSEERASIIELYRKKIISETDLSCQLEKLSTEEATLQERLKMKIDSRKSAATKQNKEKAISLLKKFTDKCQNLDPEKLSFETKRAIIELIVEKITVTTESAPEKYYPEISVDIEYRFATTPNHIAYVEDCTVTGSALCT

SEQ ID NO: 11592 - protein, 520 aa, synthetic construct
MKRITKIEENNALSVKTKTRVAAYCRVSTASDEQLISLDTQKAHYEDYIKSNSEWEYAGVFFDEGITGTKKECRDGLNSLIDSCEKGLVDLVITKSISRFSRNTTDCLELVRKLMALNVTVIFEKENINTDTMESELMLSILSSLAESESVSISENNKWSIQKRFQNGTYIISYPPYGYENAGGEMIVVPEQAEVVKKIFEDTLAGKSTHAVAKELNDSGVRSKKGGKWTPGAINAIIRNEKFTGDVIFQKTYTDSQFSRHTNDGELNQYLCENHHEPIVSHEIFDKANEVLNQRGKEKGNGERTERYQNRYGFSGRIKCGECGGVFKRRIHYKPSGSYIAWCCTHHIEDRHSCSMKYITDDGIKTAFLTMMNKLIFAHQSILKPLLYSLQGFDDKNRLLQIQEYETKLEKNMEERQVLTSVMASGLLEPALFSKKITALTLEEKRLQEEKKHMINTVSGDRTKIEALEKLMKFALGSGMLTEYSDEIFLSHAEGAIVFSRKEIVFELKCGLKLKERLVG

SEQ ID NO: 11593 - protein, 521 aa, synthetic construct
MKKVTKIDGVQKNTAINSKLRVAAYCRVSTGSDAQLESLEAQKSHYEQYINSREDWQFAGLYFDEGITGTKAEKRPELLRLITDCEAKKIDFVITKSISRFSRNTTDCLALVRKLQNLDIPLYFEKENINTGSMESELFLAILSSMAEGESASISENAKWSVKRRFQNGTYKLGYTPYGYDWDGKNMIINPEQAAVVKRIFADILSGKSTNAIADELNAEKVPSKKNNHWTASTIRGILANEKYTGDVIFQKTYTDENFNRHTNYGEVDQYMAPDHHEAIISHSDFDAANALVNQRAAEKGIEKGSDKYQQRYAFSGKIICGECGDTFKRRIHTCNTYKYVAWACNTHLKDKKSCHMKYVRDDEIKVAFMTMLNKLIYGYRLVLIPYLKVLENSSGDEAIQRIQHLELLISQNSEQREALTKLMAQGYIDQILYNQETNALLLQAETYRSDIEAITIGMTGDAAKVTETNLLLHFVSPTDMLTAYSEELFENYADHIEVISRNEIKFAMKCGLTFTERIGD

SEQ ID NO: 11594 - protein, 522 aa, synthetic construct
MGNVMLIPARRQVGSNARKQEEEKPKLRVAAYCRVSTDSDEQATSYEAQVEHYTEYIQKNPDWEFAGIYADDGISGTNTKKREEFNRMIDDCKAGNIDMIITKSISRFARNTLDCLKYIRQLKDMNIPVLFEKESINTMDAKGEVLITIMASLAQQESQSLSQNVKMGLQYRYQQGKVQINHNRFLGYTKDADGNLVIDPEQAETVKRIYREYLEGLSMDKIAAGLERDGILTGAGGKKWHTSTINKILRNEKYIGDALLQKTYTTDFLNKTRVKNNGLVPQYYVEGDHEAIIPKDIYLQVQEELVRRRVGKTSANGKKRNYSCNHCFSQIVICGECGEMFRRLHWNNRGVKSIVWRCISRLESTGLECHARTINELVLQDAVVKAINQMLGDKSNYQAQLQLNIAAVIRASQATAIDSIDEKLMALQQELIQKANSKEDYDEIADEIFRLRELRQKTTVDTATRDEQIKRINDLQDYISQQTSYLTEFDEALVRRWIKQITIWDDRITVELKSGVSIDVDA

SEQ ID NO: 11595 - protein, 518 aa, synthetic construct
MQENETYVIYLRKSRADSEKFSLEEVFAKHESELQSLAERTLGNRIPVDKIFREVVSGETITDRPVISHILKLMESKKIKGVFVVDPQRLTRGDLLDKGHLINVFKYTNTKIITPYKTFDLNNDFDLKLFKMELDKGSDYLEYYKMIQARGRIASVRSGQYIGSTAPYGYDKYSYKENKHTVNTLKPNSDEATVVQLIYHLYVNESLSYAAIANKLNAMNIKPRKSTSWSPYSLKEILHNPVYIGKVRWNRRKTVMKYKNESLLKTRPIALNNSIISDGIHKAIIDETLFDSAQNRSGKSPRNHSSSKLKNPLAGLMFCGNCGRAMSYKTYKNNVGSEKQPPRYLCNNQSNCHTKSVKATDVINQIIGALECYIEDFKVELENDDGNSFNVRSQIISVLNKQLQDLEIREETQYEMLENKIYTPELFKKRRQKLLEEREILLDKLQEAKVQEPVKIDYQEKIISFTDTVEALKNPDIDILQKNMLLKKCIKKITCTTDEEKGNRWRESTFEIDITPLI

SEQ ID NO: 11596 - protein, 527 aa, synthetic construct
MDAIDSTKSYAMYLRKSRKDDYNEDISEVLARHKTTLTALAKNMHLHVTKIYQEVVSGENISNRPEVQNLLRDVEKGLYAGVLVMEVERLARGDAIDQGIIQRTFFVTGTKIVTPMKTYDPLNEFDEEYFEYGLYRSRSEYKTIRRRINAGRMHSVKEGKWIASTAPYGYERKKLEKERGYTLIKVPEEAEIVELIFDLYINGMNGEIFGAGKISNYLDAMGIKPRISKHWSSATIRDMLKNPAYIGKVAWGREKDVKFVENGKIITKRIKQDDYMLYDAVWDDIISCESFEKAQQIMKSHVKPAVKKTDKLANPLSGIVYCEKCGRLMTRLGPNKHCKFDTLRCMTKGCDNISAPIYAIEDEIVSFLKSWITEQAITFQGNESISDKKNTELLTKQLALANQELFELNKQLEKTYDLLEREIYTEELFTQRNKTISENIKTIQKQVRHYESELKQLSENEKKRTLWLPKSIKLINAYDVTDSAELRNNLLKQLIYRVTYLKTERNHRGTVDNRNFKLSITPKIPQV

SEQ ID NO: 11597 - protein, 528 aa, synthetic construct
MNKTAARSVTVIPPTINPLTHLSRVAIQKRRVAGYARVSTDSDEQFTSYEAQVDYYTQYIKRNPEWEFVKVYTDEGISGTNTKHRIGFNEMIADAMSGKIDLVVTKSVSRFARNTVDSLVTIRKLKEKGVEVYFEKENIYTFDGKGELLLTIMSSLAQEESRSISENVTWGQRKRFADGKVNLPYKQFLGYRKGADGFPEVVPEEAVIVRRIYTRFMEGLTPGAIANELTADGIPTPSGKQRWQTSTVESILQNEKYKGAALLQKCFTVDFLTKKKKLNEGEVPQYYVEHSHEPIITPEEFDRVQTEFARRKRISRQYSGKSIFSSRIVCGDCGSYFGSKVWNSTSKYRRVIWQCNGKFKGEHKCATPHMDEETIKARFVTAINAIIDSKDNILEDCRLMQTTLTDCTGIDVEIESLLEEIDVVTELTKRCIAENSQTAQNQEEYAARYNGFVERYEKAKAQLEQLRATKTAREAQAEAIGAFMFEVQEMDVLTEFDEKLWLAVIDKVTVHTDGRMTFRFRSGTEIDA

SEQ ID NO: 11598 - protein, 492 aa, synthetic construct
MMYLRKSRAEEGQSTEEVLAKHRAALEELADRLGLPVDGVYEEVASGEKLYARPEMLKLLERIRAGEVEAVLCMDIDRLGRGGMADQGTILDAFRESGTLIITPEKTYDLTNDVDIEMTEFKAFFARAEWRAIRKRMRRGLMQTIEAGGYTANAPYGYRRCRIGKLPSLEVIPEEARFVRYIYERYLAGIGAQTIAQELNAMGSTPRRGAEWNRNTVRHVLRNPTFAGKVAWNRVKHYRPGAHGKDKHHVVYTPEGEWLMVDGVHEAIIPWDTWLEAQERRKQRYIPPSNTGQRANPFAGIIRCSKCGNNMQRMGSSSGEPYLLCTTKGCTAGAKFEYVEERMVELLYDELARLRLLIDSGAAPNVDALEAALAAAQREQERVQARIPRLYEFLEDGTYDRSTFRSRLDAAAKELAELASKRAGLERQIDERRRIDPRKAAAALENLVQLYPTMSPADKNSALKALGVEVTYTKEKKTKPRDFTLELQLRDF

SEQ ID NO: 11599 - protein, 441 aa, synthetic construct
MIVNEIVPQELANKRLRVCAYARVSADNEDMMHSLSAQVSHYNDMIASNPKWIFAGIYADGGLSGTKTNRPEFQRMIQDCKNGKIDLIVTKSISRFSRNTIVMLETIRMLDEMGIDVYFEEQQMNIKSGKGELMLTIIGSFAQEEARQVSENMKWRIKKDFEKGILWGGNNPYGYIIDRKEKRLVINPEQAKVVRLIFEEYLDGKGASLIAKKLNKMGFKTMMNSEWNNNVVMAILKNEVYTGDLLLQKTYRENYLTKKTLKNKGELQQYYVEDDHEPIITHEMFEETQRIRNERIKKFKNKISYSNKAYPFTGIIKCSCCGSTFNHKTTKYNKLWICKTFNMKGKEYCQESKQIDESKLYEAINKYFGWDCFKENDFKTKVEYLIAKPNNEIEMHFKDGNVAIIKWEDRSRSESWTSEMKEKARQKKIEQYKKRGGGLNG

SEQ ID NO: 11600 - protein, 522 aa, synthetic construct
MGKVRIIPQTINPLTQVKIGTIKKKKVAAYARVSTDQEEQESSFDAQVQHFTEYIKSRDDWEFIKVYSDEGISGTSLKKRDGFNQMVADALDGKIDLILMKSISRFARNTLDLLTTVRKLTAKGVEVFFEEQNISTLDGGGELFLTIMSSIAQEESRTISENVKWGKKESYKKGNVSFAYSRFLGYKKEDGKIVIDKEQAVVVKQIYQWYLRDGLTLTAIAQRLNENSVKTPGGKNNWTVNNITSILTNEKYKGHAILQKTYCDNFLTHQMKKNTGQMPKYHVEDSHPAIIDEDTWNEVQLEIQRRREIGSCYSSTDVFSGKLICADCGSFYGAKLWHSTSKYARTVYQCNHKFKHKCRTPHLEVKFIKEKFIEAYNMVMIDKESLIEDTKEGITVLCDFVGLDGRLVELQNEMDIVSELSNKMIIENMHKLQSQEEYTKKYEELLKRYEKANVEYGRIQDEKLHKIGLSQKLESFIKDLENRPVSIDYFDETTFRFMVESVKVSRDKKLTFKFRNGKEIEV

SEQ ID NO: 11601 - protein, 628 aa, synthetic construct
MKAAFLIRCSTKNQDLNRQTRDLTRLAKSMGYEYDLENLVYGEKITGKDDVTKKNRDSIDRLLRAAKEQRFDVVLVSEVSRMSRDPASGRIYVRLLINMNIPVYFKDIDLWTINPETGKKVRDAELVIGAAFDAAWKYLKSMKTQIASARRNELDNNRISIGQPYFGYKRYEGTDKSKKNQIVVNEEEAEVVQAVYNEYLKEGATLKSTALAITDKYGEKLNRKFSLGTIEHILTYESYATGIKKVNLKDPDTDEVEVFDVSTPIIIDKELYEAATNKRKKNRVKDEPYPNQQVYLLSKLIKCPDCGYTLTPRRKAGEFGQTYRLVNGKPAVSWLCMSGINNITDCTNRTSIANEKLEPIIWELVKKELIGYANMNDEKREEQIRECEEKIEYQNYSIQNFTKEIDKLKKRLSTAYQFSINAAEMAGDDEDMRTMAMEEFNRTAKGVRQEMKNFEKSIEQAKGELEKLRDLKTFYSQPTLPKDYLEQIEGNFTEKRNLVKQLITKIVPYRITTFKKKERESGVKTCNKMITVKNGAVLLEVYTIGGVYNVFYNANSKFQVKTAYYVHGEYATFQNGIRKYPAYDEGEYFVISNANMVMETDDIDEVVTVNEFVDIAIANNWVIEYQYQ

SEQ ID NO: 11602 - protein, 538 aa, synthetic construct
MLRQATYTTPVTALYARLSKDDEQQGPSLSIENQKRILETFARDNGFLNCRFFVDDGWSGANFQRPGFMEMMDCVESGEVKCVITKDLSRMGRNYLQVGMFTEITFPKKGVRFIAINDGVDSAQGENDLTPLKNLFNEWMVRDTSKKIKAVKRAKGMSGKPTTTQPVYGYLMGEDERFIVDEEAAPVVKQIYDLCLAGNGPSKIARVLTEQGVPTPGTLEYRRTGSTRRYHPGYECKWATNTIVHILERKEYLGHLVNFKTEKVSYKVKSSVENPEEKQVIFENAHEPIIDPDTWERVQELRKQRKRPNRYDEVGLFSGLLFCADCGSVLYQQRYENKTRKQDCYICGNYKKRTHDCTAHFIRTDLLTAGVTANLKKITAYAAKHEKQFMKLLVQQNEDGGKRRNAAKKRELEAAEKRIGELSAIFKRLYEDSVAGRITDERFSALSADYEAEQRQVREHAAELQAELSKAQEASVNAERFMNIVRRHISFEELTPTLLREFIEKIVVHECSYDENKHRRQEIEIYYSFVGKVDLPDE

SEQ ID NO: 11603 - protein, 570 aa, synthetic construct
MSTGTELRAVFYARVSTEEEKQLNALEKQIQENKDVIRDHGWRLVGEYIDEGKTGTTTKRRNDYKRLLKDMTENKFDIVVCKDQDRLQRNTLDWYLFVDNLVTNNLKLFMYLDNKFFKPSEDALITGVKAIIAEEYSRNLSKKLNNSNKRRIERALNGEEVSAMGNGKSLAFKIVNGKWVKDEEEAKLGKKIFELYLEYDSIRKVRDWVNEHGYTNSVGKPFTSESISRILKNEKAKGVIVMGKYHHDFDKKKIVRRSEEELVRIPAPELAYVSEEVFDKVQERLRAKTGNGRGVNAYSDPLSGKIYCGSCGRKLWKHASNGYVNWMCASQVAKGDVECNGTRITTVAIRNIYKKITDNLEVNKGVVKQDIVKWLNELKATLSDTSVNEKIQKDLDKLERKRTKLLEAYLEDFISKDDYKAKYEAIEGQIEEKKKLLVPVEENEDIKVIESVLQNIDDEIDAYVKTLDMEESKVDFLIEHTKRITVLENRDIIIELDLVAGAIIAGKDFLLYVHDTMPLPHGRIRNERSGKKIQSLRPVPHLIRCHIHGRDRQSGPSWNTGEACSGGNSL

SEQ ID NO: 11604 - protein, 468 aa, synthetic construct
MLYGKPQNYSWYRARVVLYIRVSTDEQARHGYSLGAQREALREFCDTFQCQIVAEYSDDGVSARKEIRRRPGLLRVLEAVKAGGVDYVLFIKLDRWFRSVREYYRVQDVLEAAGTNWKAILEDYDTSTTNGRLNLNIRLSVAQDESDRTADRIKFVFAERVKNGGAIFGSKSLPYGLEVADHRVQIVESQADAVRGMFDHYEATNSTRETHAWLRDQYGVDLPYNTIRNMLRNSLYCGEYRGNVNYCPAIISREQFENIQKIVSRQGANRTRQSKYSYVFTGLLRCPVCGCTLKAFPQTDYKFHRVYLRYRCTQHWIDKRCTWKTTPWEPRLEDWLLDHIQPQLDAYIAQFDVQEAQRRRAVVDVGAIQRKLSRLQDLYVDGMIDRAAYDEKYQALIRQQETAQAAQHGQSAGRDLEPLRQLLAGDFRSIYATLSPQERHTLWASVIDHIVVKDGRYGHFDLDVIFLP

SEQ ID NO: 11605 - protein, 445 aa, synthetic construct
MKKMNVGYLRVSTENQTEKYGLDLQKNKIIEKAEKEGDKWYIDGGYSGSTLDRPDIQRLLEDSKNGYIEKVYIYKLDRVSRDTIDTLVILYRTLPKYNVKIVSATEELSFDTPMDKMKIGIDALMGQYEREIISMRTKAGMLERVKSGLWMGGGRVPFGYYYDRNDGILHPKEDEAEKVRTMYRLYNDGYSCQKISDMLGMKGERIVIQILKRKSNVGYIEYKGNIYKGKHEAIIDEETFYKTQRFMEKRANNSYICNKFLLSGLCFCGKCGARMRYKKWANRHVLECYSRDGYKEYMVKNPNCDNKRPDAKDVEKEVSDCFKRFAVNITGRREKQISKKELIEKEMKSTVDKLKKLYELYATNESETLLEVIGKSEKRVKELRRELSKETRKKSLTTPERIEKIKKISDVWDKLDVKEQNKVLKECIDKIVITDGNIDIYFNLL

SEQ ID NO: 11606 - protein, 512 aa, synthetic construct
MQRAVIYARFSSDMQREESIDAQVRACKAYAKNKGYIVVDTYADEAKSGRDVTKRDAYNQMLADAMEDKFDVIIFHKIDRNSRNELNYFTFKDKLEKLGIRYEYAAQPIDALSPEGQMMETMMVGMAAYYSRNLAKETKKGLNENAYKALFNGGCPPLGYKIVDKKYVIDEQEAAAVRLIFELYLNGYGYAAICRELSAKGYTTKAGKAFAKNSLHDILCNEKYIGTYTFNKIPRKKGGRNSHAAERPEDFISIENAFPAIISKDDWALVRAKMDRNRHRAASYTAKEKYLLSGKVFCGHCGSAMVGHRIRKRYCYYGCTRKEQTPTSKCPQKMIRAEVLEHWVLQILERVVFTVGGMRRIADAIVDAYEAEQKEQAGSQATLLQRKAVAEKKLNNLYKIFEEGNADEFDRQRLNQIKAELREINKSICETSVKPAKLLSKQKIAAILAAMKDEIFVKKNSYYVQQAVDLLVDHVTITDKVLKITLSTQNVCAYLVPRTGIEPVRVSLPEGF

SEQ ID NO: 11607 - protein, 516 aa, synthetic construct
MARRKKVSPGNRLVAYYRYSGGSQQTEQSIEGQRRDCEAYARQHGLTIVHEYIDRHISGRGVESRLAFQQMIADSSKHLFDLVICWKTDRFARNRYDSAVYKKKLRDNGVRILYAAESSVEGPEGIILEGLMESLAEYYSAELAQKMRRGMRESALKGKAINPNRPLGLTTDEHKRFIIDEKNAPTIRFIFEHYAAGESSASIVDQLNAAGLRTSKGNSFNKCSIPRIIQNEAYHGVYICKAYDVRIDGAIPAIIDDDLWKRAQKMLTLNKQHRAPHSSHADYLLSGKLFCGCCHSLMRGISGHNCRNDVYYYYACGNKADGGTCKKKNIPKDVAENLVVNAICENILRPDTLEDLADAIAAAQQADVNQPDSERAMLEQNLADVHRKINNIIESIENGTASSRLSARLADLEQQESTLNYQLESLKEIHPPVLDRERILFLLEQFLISPNERTEDYNRRIIDTFVNHIEITDTEMLIYFNLSEASASEKQKNSQSNSCSTGNHLVRVARIELTAS

SEQ ID NO: 11608 - protein, 627 aa, synthetic construct
MTEKQGFMTALYERLSRDDELNGESNSISNQKKLLEQYAKEHGFTNLVHFTDDGISGTRFDRPGFLAMMKEVESGKVGTILIKDMSRMGRDYLKVGQYMELLRQKNVRLIAVNENVDSFREDDDFTPFRNIMNEWYARDTSKKIKSTFKAKGKSGKHVASTTPYGYLKDKDDPNVWIVDEEAAVVVRRIFHMTMDGYGPYQIAKALKEDKVEIPAVHMAKKDAGLWKGRVEEIKDPYGWGSSTVAGILKKREYLGHTVNFKTRKHFKDKKSHYVSEDNWTVFENTQEAIIDQETFDNVQRIRSNVRRYPDGWGEAHPLTGLMYCADCGSKMYVHRVNNGKRVPQYTCSAYSKVPVGTLCQTQHRINADVVMELIKELLKAVAEYSQLNREEFLETVKKAQTSQQSSEITRLKSRLAEAKKRVQELEKLICRIYEDNILGKLPDERYAILDGQYSKEQKDLSAEIADMEAELSGYEEGRRSAEKFIALVDKYQNFEELTTYMLNEFVEKIVVHERDRKGSVETTQEVEIYFNFIGRYLPPHFGEVKMTPEEIEEMEKREARKDRLHQNYLRRKANGKQQEYYERTKAKKKAELDAKKEEIRQEDIAKGVFIPLSLLPPAEPKKGVASA

SEQ ID NO: 11609 - protein, 571 aa, synthetic construct
MMQDRTAPASTNRVAIYIRVSTTHQIDKDSLPMQRQDLIAYAKLMLNTDDYVIFEDAGYSGKNTDRPKFQEMMSQIRQGAFSHLLVWKIDRISRNLLDFATMYKELKDLGVVFVSKNEQFDTSTAMGEAMLKIILVFAELERNMTSERVTATMISRASNGQWNGGRVPYGYNYDYETKDFSINPIEAEIVRLIHDKYEEMRSLVRESRYLNEKGLRTRAGNLWNSVSLHIILHNIFYCGDYRYNVLKEGDRQKVKDESEWITVEDHHEPIISREQKERVIAMLDANKRLDRKRNTYKSEKYVHVFAGLLYCGNCGKPMGATPAAAKKDWQYSKYTCPTRRKLASACNGKFTSDPIVGEFVFNYVLNMLNVQKNFADIHSPEELQAALLIGNTFSYIDHIDEDGLNDLFNMLSSGKIKGTVFGKSAKLKKKKVVSELSKLRNEKQKIERALDRLTKLYLYAEDAMPESEFIIQKSKLTETLDEVNEQIGFSNTDEWNQSVSDEEFVRRASEFIIAQKLTDRNYVSYKRLATSVDTAVIKTFVQGIIDSIIMDAGQVKQIIFKNGLSHTFIFK

SEQ ID NO: 11610 - protein, 500 aa, synthetic construct
MNTVIYARYSAGPRQTDQSIEGQLRVCTDFCKQRGLTVIDTYCDRHISGRTDERPEFQRLIADAKRKKFEAVVVYKTDRFARNKYDSAVYKRELKRNGIQIFYAAEAIPDGPEGIILESLMEGLAEYYSAELAQKIKRGMHESALKCQSTGSGRPLGYRVDEQKHFQIDPESAQTVQTIFEQYIKGESNAAICELLNSRGLRTTQGKPFNKNSINRIIKNRKYIGEYRYHDIVVEGGMPAIISKDTFNLAQAEMERRRTRKAPKSPKAEYLLAGRLFCGHCKGPMQGVSGTGKSGNKWYYYYCGNTRGKNKTCDKKQVSRDRLERAVVDFTVRYILQEEVLEELARKVHAAQERQNDTASEIAFYEKKLADNKKSIANVLRAIESGAATQTLPARLQELENEQAVILGELSFLKGKRLAFTEDQILFALMKHLEPYPGESEQDYRRRIISDFVSEVYLYDDRLLIYFNISSEDGKLKSADLSNIEGGEFDEGLVSSIQKP

SEQ ID NO: 11611 - protein, 559 aa, synthetic construct
MKTRRCYIYTRVSTSMQVDGYSLDAQKDKLKKYAEFQDMVVAGEYSDEGKSGKNIEGRPQFLQMLKDIESGKDKVEFVLVFKLSRFGRNAADVLSSLQRMQDFGVNLICVEDGIDSSKDSGKLMISVLSAVAEIERENILVQTMEGRRQKAREGKWNGGFAPYGYKLVDGYLYIADDEVDVIRIIFDKYVNTTMGASAVATYLNEHGYVKKKRQNNTLDMFSAHFIKSILDNPVYCGKLAYGRRKNEKIAGTRNQYHIVKQDDYPVYDGVHEAIVSEEVWQMAQRKRQETGVKSEKIYNQEHENILSSILRCPVCGAAMYGNVNRKKKKDGTLYKDYYYYHCKHRTTVNGHKCGYRRQWKQEMVDAAVEEVIRKLVTNPKFEQAIRQKIGSRIDTEELETELEQLRKKLHQLNGAKAKLGQQMDSLDVTDKHYDRKYQDMEERLYKLYDDIDSVEEEIEEVETRIYNVRQQKISGDNIYQFLLYFDKLYDKFTDAEKKEFLNSFIERVDIYEQEQPDGRFLKHIKFRFPVYFNGKEIEEMSWDNETTVESVVLMQYCGK

SEQ ID NO: 11612 - protein, 463 aa, synthetic construct
MARSVTVIPARNRQASGHRAVPQKKIRVAAYCRVSTDQEDQLHSFEAQVDYYTKYINDHENYEMAGIYADEGISGTNTKKREQFKRMIADCEKGKIELVITKSISRFARNTQDCLMYSRKLKNLGIGIIFEKENINTLDSTGELLFTILSSLAQDESRNISENCKWGIRTKFKNGEMHLNTFKFLGYDKDENGKLIINREQAKTVRRIYRDFLWGLNPAQIAKELEEEQVPGCLGQTKWYASTVIGILKQEKHMGDALLQKTYTADFLTKRQVKNNGEVAQVYVKDSHKGIIDKETWNAVQEEFDRREKFMQRHGTDRYSYGSECYPFCEKTFCGECGSLFTRHSWKSRGIVQWQCKNHRKDGKVACTNAYVDNANLENGFVKAFNRLVSEREKHMERWNAMKADGTPLEKIRAVQMMEATENGQLQKYVPEAAQLVLEEITIFGAKKYEFAFLEGSRVKVSV

SEQ ID NO: 11613 - protein, 529 aa, synthetic construct
MVDVVAYCRFSSDNQRVESIEAQERAIKEYCLKNNFNLIAIYKDEAISGTSIKDRESFIKMINDSKKKIFKYVIVHKFDRFARNRYDHAIYEKKLEDNGVKLLSVLEQLNDNPESVILKSVLTGMNEYYSLNLSREVKKGQKENALKCIHNGGAMPLGYDLGEDRRYVLNEKEAEIVKKIYKLYLNGVGYTKIAEILNEEGYKNKAGREFRKTSIRDFLLNEKYTGVFVYGKKDANGRLTGKEIKIENGCPQIISKEDFQKVQNMMGKRKTGARMTAITPYYLSGYCYCGECGGSYTGGYRTRRRNGTIDYGYLCINRKTKVNQCKNKPIIKEKLEEIVFDTIKKEIFTGKRIDGIANGIYKKIMESQSGVEKELITLEKEIEKVTNKAVNLLNKNLEGNISDEVFNVMNEKINLELTTLKNKKNSLKSPVKIEKEKIFNYLKNLKDNFKNPQIKKSIVEAFIDSVIIYPNHVEIRVRDIPADMDRSGGDDGNRTRVRNYQRHRLLQCLVYYFISQQSLPQTGLTEAIL

SEQ ID NO: 11614 - protein, 537 aa, synthetic construct
MQIKVIQPLVERKQERKKVCAYVRVSTDSAEQEDSYDNQMRYYKDKIESNPDWEFVGIYSDLGISGYKEKRPGFLNMIKDARNGGIDLILVKSVSRFARNTETVLKYSRELKRIGVGIYFELQDVNTISGEGELLLTILAAFAQAESESNSGNVSMSIRRKFEKGELNFPISKIYGYTADVDGNPIIDEEKAKVVRLIFDLAEKGIWVTKISEYLNKQHIPGIACDTWHYSQVSKMLRQEAYMGDRILQKTYRDSRRRTRKNKGQVDQWYVKDTHPAIVTREQWYRVQDILLERNEELYDDTPISEEKNLSTHSTYPLSGKLYCPYCGRVLMHRWEGKKRYENWVCGLHRKISKDACPGICIPNRIASSWGEIKEPMTVLKYTDEYGMDRFTAIPKVEYEASEDCPYEVVKPEPKPERPKKPSYKKAPKPEKPRYTRNVYPLSGKLFCPNCGKVLTHKWNKGVEYWVCSTNRNKHRTENFEKCKGMYFPAEAAKDWGEITEPVTIIAYKNEYGHRLYTAMPKEEYERSPDCPYRKED

SEQ ID NO: 11615 - protein, 465 aa, synthetic construct
MAREVVHIPARPQVVGTRTTPEKKIRLAAYCRVSSEQDEQLNSFENQVTYYKEYISSHPDYELAGIYADEGISGTSTKRREEFNRMIADCEAGLIDMVITKSISRFARNTQDCLMYSRRLKDLGIGIRFEKENINTMDSTGELLFTILSSLAQDESRSISENCQWGIRSLFKRGIHHLNTNRFYGYDSDENGKLIINPEQAKVVKWIYESFMEGINPDVIVKILNEKEIPTCMGKSKWTCNQIKSILRNEKHMGDAVLQKTYTPDYLTHKSVKNEGQLPQYYIKEDHPPIVSQQIWEAVQLELDRRESFMKKHFLKSMGQYTDENPLSHRIICGICGHTFSRRTITRMEGRIKVWQCGQHYAKKGEHLCDGRMIRETELYKAFQLAWDHLVEERDNKEKDWEKKMAEGNALEAYRAEQFLRLTANGGRIKEGKPLVSAVLDHIVFEKNGDLSICFLDGSHVCVEP

SEQ ID NO: 11616 - protein, 559 aa, synthetic construct
MPLKAALYIRVSTHHQIDKDSLPLQRNDLINYSNYILNIQDYEIFEDAGYSAKNTDRPAYQEMMRRAYQGKFSHILVWKIDRISRNLLDFAAMYAAMKKLNIIFVSKNEQFDTSTAIGEAMLKIILVFAELERNMTSERVSAIMKARAEKGLWNGANIPFGYDWSPAAKFPVINDYEANIVNTIFKHYAETKSLIRVSEYLRNNKIKTKRGGKWESTTVMQMLRNPFYKGTMRYNYRSTARGKKNAESEWILIHENHPPVVTADLWQQCNDILDHNSRLYNKAGSPRSQKHTHVFSSILRCVECEGGTSSCRDRVRKSGWRPSKYQCTSLLKHSGCTNHGSVGDINLGPFIFNYINNLLQLKKQIHKYNTVQEIEKTLLNGEAFSDIIGIENADQIFLAMKAAVPKVTYKSAIPSDPINVPDDMDKIILDIAQKERALERLKKLFLYGDDAMSEKEYITTKNTLIQEINSKKAAMEQLSQPPQQLSDEVSFLKTASSFILLRQLSDNIFINYRELAEHTDPVILKDFVLAIINKIYFLNRRVTAIEFKNGITHKFIYQK

SEQ ID NO: 11617 - protein, 546 aa, synthetic construct
MRVSVNLNAQKPDTTTNAVIYARYSSHGQTEQSIEGQLAKGHEYAAAQGYTVVHEYIDRAMTGRNDNREAFQKMLSDTGKHQFQVVIVWKVDRFGRNREEIAFNKHTCKKNGVRVEYVAESLPNSPEAVILESVLEGMAEYYSIQLSQNIRRGQLESAKKCQCVGGSVPLGYTLDSDKHFVIDPQTAPVVKKIFDLYAEGATISEITGQLNEQGIRTARKQLFTKNSLTKLLKNEKYIGVYTYKDIVRVEGGVPAIVDESTFDRVQELLKINRRAPSHTWTKVEYLLTDKLFCGHCGSPMVGESGFSHTGAKYSYYGCIKRRREKACDKKPVRQDWIEALVLDETVKLLHDDELMEYIIDRTWEYYQVTDKVQEEKAVLEAQLAEVDKAINNLVRAIEAGIFNAATKSRMDELDAQKAALTASLADLELPSGIRITRDHIEYFLLRLRDLDVKDRECQKRLVQTFVNAVFIYDDGRVKITYNYSGQSSTITLNQIASAEKGKGFVCCLPCSTSSPRFPRGVAAFFCFGVLGKIGCKYTTNFSCIVL

SEQ ID NO: 11618 - protein, 576 aa, synthetic construct
MKRKIAIYARVSTEHEAQISALENQIQYYDEILKKHPEWELYERYIDEGITGTSIGKRDSFLRMMSDAKDKCFDLIVTREVSRFARNIVDTLQQTRTLKQYGVEVYFTDDNIWTMNDEDGELRLSIMATLAQNESKKTSMRVKAGQMISFKNGVFYGNGNILGYDREGKNLVINPTQALTVKRIFELYLQGNGIRKIQFIMEQEKRKTSLGKTKWSASNIARILKNPFYCGRIEYRKQYVPDYLTQKKINNHGEIERVITKGTHDPIVSEEDFDKVQEIFKTKTTKKDNKKYGKPLADNVWVRKLKCKCGHGMNRKINYVSKITGVKTYSFQCHDQIHTGTIKTRLKKGLSIDGICDNKSFPEWKLEVQADFIFRKLLSNKQEIYETAIEMLESSVAVDTHIQDKKQKIENHIQSIDKLRARNDMLLDMCTDGDISRETFKKKTELNNQNIHELEEKIKLIRKQIKENDTQEDLNKRIECLSAFLKMKCFSKKEKIPESIIEKYVEKIIFYKDDFEWYLRPTIGNVDFLSIDAKNMKKGTHELEKTMCYVPSSTGSDCGKEEIGIDYYRAKAFIHF

SEQ ID NO: 11619 - protein, 573 aa, synthetic construct
MAKVKLPDKPRVAIYTRVSTLHQIDKDSLPMQRQDLINYARLILNTEDYVVYEDAGYSGKNTDRPKFQEMMQQVRLGMFTHILVWKIDRISRNLLDFATMYSELKQLGVVFVSKNEQFDTSSAMGEAMLKIILIFAELERNMTSERVTAAMLSRAANGQWNGGRVPLGYDYDPETKTFTVNESEAAVVKIIHDKYEQERSLVSLARYLNGHGYRTRTGCTYSPSTLLIILRNVFYCGDYRYNVLKDGDRQKRKKESEWITVKDHHPAIISREQKEEIARILKENRRLECERRGIYSKKKNVHVFGGLVICGNCGHAMTSTIRPADQDGIRWSVYVCPTKRRSEYLCKGRATSEVVLGEFVFNYILNMLNVQKNFDSINSVEDMEKMLLSGSTFRDVDGIERAGLDDLYNMLASGLTEKAPFDSSVEVRKKPVVSDIELENLNTEKTRIERAAERLQNLYLYSDDSISQKDYIVQREKLMSQLAEVNEQIGMVMSNADEKDVSDEEFVHAASKFILTQKLEGRTYIYYKRLATTVSREVLRSFVMSIIENITIYDGRVQTIVFKNGLSHTFILK

SEQ ID NO: 11620 - protein, 576 aa, synthetic construct
MKKNFKMPGSGSETPIRVAIYVRVSTVYQIDKDSLPMMKQDLTSYCKYILNTDDFVIFEDAGYSGKNTDRPAYQKMMSQIRQGLFTHLLVWKIDRISRNLLDFANMYAELKDLGVTFVSKNEQFDTSTAIGEAMLKIILVFAELERNMTSERVTATMINRASNGVWNGGRIPFGYSYDKPNQVFSIDPEENKIYNFMVETYEDTQSIVHTSRRLNEAGYRSRNGNMWSPVAVWTILRNPWYKGVYRYNYYKIPGRKAIKDESEWVIVENHHPASIDPDRFDRIQATLDKNARYRNTPGRKTAQKNVHVFSGLVWCAECGSAFTASPGKLHVSGYRPSKYGCPNVRKTKTCHAKYTSDVVLGEFLLNYILNILNAQKQFAYIHSTDDLQKRLLHGSTFSNVDHVDPDGLASLLNMLEKCSGSDPVLLKRPRSKPKMDPELKRMMADQKKQQRALDRLNDLYLYSDDSISEREYLVRKQQITDRLQEINEAIGMMSQEPWMRTMNDEEFIRQASSFILTQKLADKQYIYYESLAESLDPEILKNFFVSILDSIILRDGRPETVVFRNGLSHTFTYKDS

SEQ ID NO: 11621 - protein, 578 aa, synthetic construct
MRKVSKIEPISPSLPTRKKVAAYARVSMETERLNHSLSAQVSYYSNLIQSNPEWEYAGVYADNAVTGTKSSSREEFQRMLEDCEAGKIDIILTKSISRFARNTVDLLETVRHLKELGIEVRFEKEHINSLSGDGEVMLTLLASFAQEEVRSLSENVKWGTRKRFEQGIPNGRFLIYGYRWEGDHLVVEPEEAKIVRLIYDNFLKGLSAEATEKQLEEMGVKSMKGMHFPNSSIRAILKNITYTGNLLFQKEYTLDPISKKTRKNHGELPQYFVENTHEAIIPMETYQAVQAEIARRQELGALANWSINTSCFTSKIKCGLCGASFVRNTRKNRAKTSQLGERYTFYGCGTNKRKGAHCFSGTIREDVLKEECAKALGLPEFDEDTFSGRVAKVTIPATGTMVFELTDGTSFEHHWSRNAKKESWTAERRKAVSEYRRSRETGWKCYHTFTHFIKCGRCGANYRCQTHKRVDGTVVRSWYCSSPTAVDCSKVGIREDTLKALIADVMGLPEFDEELFNQQLAYATVPADNEIAFHFRDGHEVSKTFAQKRQMPRHTEERKKHMSEVMKAKWRERHAEND

SEQ ID NO: 11622 - protein, 528 aa, synthetic construct
MPKTTKKITTIPATLTRFTATPITEQKKRQVAGYARVSTDHDDQFTSYEAQIDYYTNYIKSRDDWEFVDVYTDAGITGTSTKHREGFKRMVADALAGKIDLIVTKSVSRFARNTVDSLTTIRQLKENGIECYFEKENIWTFDGKGELLLTIMSSLAQEESRSISENCTWGQRKRFADGKVSVPFQRFLGYDRGPDGNLVVNREQTVIVKRIYSLFLQGMTYHGIADTLTKDGIPTPGGKKKWSISTVKSILSNEKYKGDALLQKSYTVDFLTKKTKVNEGEIPQYYVEDNHEAIIDPEVFEMVQREMAKRGKGKKYHSGVHAFSTKIKCGECGSWYGSKVWHSNSKYRKTIWQCNHKFDGDCRCQTPHLTDEEIQLHFLSAANKLLATKAAVIANGREMQALLFDTTELEAEQAQLLEETQVVSDMVQQAIQENARTALNQTEYQKRYDSLVQRFDRAKTRLEEVTAEIQEKQTASANMGTFLNAFEQMPDALAEFSLESWHSMVDYATVYSADDIRFTFKNGQEIQA

SEQ ID NO: 11623 - protein, 521 aa, synthetic construct
MANVTMIPARVNRRAKREEKETEIPKTRVAAYCRVSTDSDEQATSYEMQVEHYTEYISKNPGWELAGIYADDGISGTNTKKREDFNRMIEDCMAGKIDFVISKSISRFARNTLDCLQYIRQLKDKGIAVFFEKENINTMDTKGELLLTIMASLAQQESESLSQNVKLGLQFRYQAGKVQVNHNRFLGYTKDDDGNLIIEPTEAAVIKRIYREYLEGASYRDICNGLMADGILTGAGKKKWIPSTIHKILSNEKYIGDALLQKTITTNLLEKKREINNGLAPQYYVEDSHEAIIPRDLFMRVQEEMVRRANLRSGEDGKKKRIYSSKYALSSLCTCEKCGDIYRRIAWNNRGKHSTVWRCCTRVEHGPGECDAPTIQETDLQAAVMKAINKVVGQKSTVIANLETILEQTVICADEELAELDEKIKAVQLELVDRATSSEGYEDLARESDRLNEEKQKILVTLAEDKGRQEKKAELIDFLHEQTTEFEKFDDGLVRRLIEQITVHESGTFTVEFKSGTMVEV

SEQ ID NO: 11624 - protein, 514 aa, synthetic construct
MAIITKIEENKAVIGKKKVAAYCRVSTDQDDQLLSLETQKAHYESWIQGHSDWEYAGLYYDEGLSGTKMDTRPSLLRMMEDCKHGLIDYVVTKSVSRLARNTADFLTIVRTLLDLGIPIYFEKENIDTGSMENELMLSIMSSIAESESVSISENNKWSIQRKFKNGTYKCSYPPYGYDWDKKNGEMVVNPEQAEIVRYIFAQTLAGVGTHDIAKDLMAKGVPTKKGGKWTGHTVNGIIRNEKYTGDCLFQKTYTDSSFVRRRNLGELDQYYVEDHHEAIISREDYEAANDVIDRRRQEKGIELDNGKYQNRYPLSGKVICGECGGTFKRKTYTHKVVLACTQHIDDKEKCSMKYVDLEAVEVAFATMMNRLVYGRNKVLRPFYEALQQSNQTEALLKIHDIQEQLDALVEKKQTIKGLFAKGVIEPAVYTQSLNGVTAEVERLTTEKDALSYIASSEISHIEETRKLLSFADKEEFLDGFDGEIFETYVDRIVVKSQTELEFQMKCGLNLIERI

SEQ ID NO: 11625 - protein, 561 aa, synthetic construct
MKAKIVRMLLRVSSDQQLEADGDLSVQRDILKEYINRHPDWILDEKEYFEGSNSAYKNTAEERDTLQEILQDAKNNEFDILVPYKDDRVGRLMMNTPEYILELKKNNVDVYSAKDGCISPKSADDIEGMMMLVFRYFNAQKSSKDTGMRVKDTMKKLVERGRFVGGKAPYGYSLEPSGEISKHGRVLKCLVVIPEKAKVVQYIYDLSLNKEYGSSKIASILNENDYWKSLAPNDYWKGGTITSILTNPIYTGRVAYNRRERIDGHYRTTDSKNWLISPVVNEKIIIIDEATWNMVQLKRSKRNFKYSKSLEERGINVIKRNDGMLSLVDVLHCGYCGSKMVNGSKYNYWEIKGTGEKRASKTPVYRCQAAKEGIPHDSTKQFRADKIEPIIFESLTTYIEFLQKNTTVLDVIQNKQIGEKKAKEKELLQAKRELQKIQHKISSMEDKMPDAIVGDYDLTPKQLNLYIQKEKDKERDQKNIIKFKQEALDKFSITNEEWSKLCENIPTWKEVFMNGDNFSKRVLVNSLVERIDIKSDSIKIRFKINLDDYLPESRMTNNDMV

SEQ ID NO: 11626 - protein, 513 aa, synthetic construct
MARITKIEATKDNSKRKLRVAAYARVSTDSNEQLVSLETQKNHYERYIKARPDWEYVGLYYDEGVSGTSMDKRDGLLHMLDDCDRGLIDYIIVKSISRFSRNTVDSIETVRRLCEKGIYIFFEKENIDTGKMEGELLLSILSSLAESESHSIAENNKWSIQKRFQNGTFKIGYTPYGYDNVDGQMVVNEEQAKTVRWIFEAILSGMSPGTIARKLNEKGIRTKRDGRWTGHTVNGMIRNEKYTGDVIMQKTYTDDRFNRHINRGERTQYLARDHHEPIISHEAFEAANAIINANGLEKGIHKDEDKYKNRYAMSGKIICGECGGTWKRVKLANHFGFSCNTHVRNKTACSMKTIAKEPVKAAFITLMNKLTYGRSLILIPYAEMLKSSQRSGNIDRLTELDEMLEKNTERRSQITQFFTKGLLDPAVYAEESDDLTEEADRLSEERDFLTTQMNGNRDQTEALDRLLKYTAKGTMITEFDPSLFTEHVDRIVVYERTEIGFAMKCGPMFRERI

SEQ ID NO: 11627 - protein, 464 aa, synthetic construct
MARSVTVIPARSQKVRTGHKAVQEKKIRVAAYCRVSTDQEDQLHSFEAQVEYYTKYINEHENYEMAGIYADEGISGTNTKKREQFKKMIADCEDGKIDLVITKSISRFARNTQDCLAYSRKLKNLGIGIIFEKENINTLDSTGELLFTILSSLAQDESRNISENCKWGIRTKFKNGEMHLNTFKFLGYDKDENGKLVINKEQAKTVRRIYRDFLIGINPAQIAKELTEEKVPGCLGQTKWYPSTVTGILKQEKHMGDALLQKTYTADFLTKRQVRNNGEIAQVYVKDSHKGIIDKQTWNAVQEEFDRREKFMESHGTDRYSYGADCMPFCEKVFCGECKSLFTRHSWRSRGIVQWQCKNHRKDGKVACTNAYVDNADLEKGFVKAFNRLVMDRDKHMERWQQMKSDGTPLEKIRAGQMMEAVENEPLTRFVPEIAQLVLCEVTVLGAKKYELFFLEGSRVKVSV

SEQ ID NO: 11628 - protein, 700 aa, synthetic construct
MDSNAFLNDLMSKMKLPEAKGKKKAEQSESVAQILAAMQKVKTEKKKPPVTSYAPTKEMPVNELESMEEFSQLASDVMQECRPAIPAVKTSISEKTVRVAAYIRVSSTNPAQEDSYEMQERYFMSLLAGNAGWTSAGIYSDHGISATSREGRTGFNRLLRHCKQGKIDRVICKSISRFARNTQDFLVALRTLKENNVTILFEREAMDTADAYSEFILTTLAAIAQEESRSISANIAWSNQKRFPAGNVCNKDIYGYEFRKGEYTVNENGYRYRAVFIIPEEAEIVRMVFRLFTKEELGFTQIAQKLDAMHIQPPNSGCRQRQKRKPTVLPAGALKEEAKRGWTATDVRYMIANVRYCGSVLCQKTYTDHRNGHKQKVNKGEKPKYLIRNHHPAIISEELWQEAQEVWKAYTAKYRGIEKGRNERNYSKLLLCGECGRYFQGHSTTRTTIWQCATKLAQQGQKRCRMEPIYEEQIQTLLCKAFAEKFKLGEKMDAEVHEVMQMISKAPIDSARNQALKNLTEKLREIHDFDHMEQEGDFLKRQLSAVNYSIRDAHQRIRDIQAEKEALKVRCEVLGEPRDKEAVTELENRLLNEEEQLEKLEHEAQQQAEQVRYMEDYWKKLEQTHEIREKTLQWLDSLEGGTQMFLDEAVGTYVKAFVLSVTIFSPKHFRIHWFDDTCTDVECDSVFEGYQQPGMIRRKY

SEQ ID NO: 11629 - protein, 527 aa, synthetic construct
MSHTGKEGEWMKRITKIDMAEPLITKKLRVAAYCRVSTGSDEQLVSLEAQKSHYESFIKANPEWEFAGVYYDEGITGTKKEKRTQLLRLISDCEAHKVDFIVVKSISRFARNTTDCLELVRKLTDLGVFIYFEKENINTQSMESELMLSILSSLAESESVSISENSKWGVKRRFQNGTFKISYPPYGYDYVDGGMEINQEQAETVKYIFAQVLAGVGTHQIADELNARKVPTKKGGKWTASTVRGMIYNEKYVGDVIFQKTYTDEHFNRHTNYGEKDQYLMECHHEPIISREDFEAAGAVLNQRRLEKGITKGGGKYLNRYPFSGKIICSECGGKFKRRIHSKNGGKYVAWCCGKHIDDVTACSMKFIRNADVEKAFVTMMNKLVYGRRFVLRPLLESLREMDRSDSFGIIQELELKMEKNAEQRQILTGLMAKGYLEPALFNKENNELLQEAAELEMQKNGLSYSVNGEMVKTGEVEALLKFAEKDEMLTAFDGELFGRFVEQITVYSRTEVGFQMKCGLTLRERM

SEQ ID NO: 11630 - protein, 526 aa, synthetic construct
MGQMVGNPKVTVIPARPRMGIGRNNEERQKIRVAAYCRVSTDSDEQATSYEAQIEHYTAFIKKNPDWEFAGIFADDGISGTDTRKREEFNRMIEECMEGKIQMVITKSISRFARNTLDCLKYIRQLKDRGIPVFFEKENINTMDAKGEVMLTIMASLAQQESESLSQNVKIGLQYRYQQGLVQVNHNRFLGYTKDAEGHLVIEPEEAEVVKRIYREYLEGASLLQIGKGLEADGILTGAGKKKWRPETIKKILQNEKYIGDALLAKTYTVDFLTKKRVKNNGIVPQYYVENSHEPIIPRDLYMQVQEEMVRRANLHSGGNRKKRVYSSKYALSSIVYCPKCGEIYRRIAWNNRGKRSTVWRCCTRVEHGPEGCDASTIQESELQEAVARAINDLLGGRDTFLPILQANILQVLENNSSGKIAEIDRRLVEQQQKLLKLANGKKDYNAVADEIHSLREQRQKVLAQDAERDGQRKHIEEMKAFLEEQKNIPVGYDEQLVRRLVEKVTVFDEKIAVEFKSGVEIEVDR

SEQ ID NO: 11631 - protein, 508 aa, synthetic construct
MSVQVIKSKNTRKGRIRVAAYCRVSTETEIQEGSIENQIEHYEELIKSNPDYEFVNVYYDFGISGYKEKRPGFQEMMKDARSGKIDLIITKSITRFARNTNTLLKATRELKSLGIGVFFELQNMNTLNEGGELLLTVYAAFAQGESETYRELAQMTFKRKFSEGRPEYQLRKTLGFDMTENNEIQIVPKEAEGVKQIFQWVKENYSTQTIVKMAAAKGITLKSGKPFTAQWVYKTVRNVAYKGDYIMQRTYTDSERKVHVNQTLVPSFYIENDHDAIVSKRLWNAANKVIDDRAKERTTHLEMKPLTEENYPYIHKLHCAKCGGVLHGQKTKSGAQYSFSCGRRNRQGKGFCSGVSVPQKVIESWGEIDGNIYISFDPDKPLHKQHSYVKESTWKKNHTKKKLPPLPAYNVENYPYYRRVYCAECGHLLTRSRRYDGLVEFICNGMASRGKSYCKGVRVPVEVLNRLPEWDGFYWIKEDKENGEKHYSYTCKEEKPQRKEYSAGGRED

SEQ ID NO: 11632 - protein, 542 aa, synthetic construct
MAPALRRVVRTMPQIAVVQIDDTPQVKKTKVAAYARVSTEKEEQEDSFERQVEHYTHLIESNPEWTMVEVYKDPGITGTKAEKRPDFLRMIDDCRAGKIDKILVKSVSRFARNTVDALNYIRELRDMNISVQFESENIDTLTPGGEVLLTILAAMAEQESRTMSNNIKWAYQKKFEKGEVTINTGLMLGYTKNGKDEDGRAVYAIVEEEAEIIRRIYREYLNGSTVTQIIHGLEEDGVKTKRGTEKWYHTAVTSILTNEKYTGNAYLGKTYKPDVLSKKRYRNDGEKAPMYYAENSHPAIVTMEMFNMVKLEMERRKTEKEKAVGNTRYTSKYPFSGILICGTCGSRLRRHVRKTGSGKLVPSWGCSNRILNGREVCDSYHVNEDVLYATYHAAVQAMVEDAGSILSTLESATEKELQPSNKAALDEVEQKIIDLQEKVLALHRQKRAQAVNDAYYNAQVNDYSQQLAALEDRQQALQTADARYATVRMWLADFQQHMQEGDATDDRDGKMMKSLVESIIIWPDRMEIHFKCGVNIEQKYVK

SEQ ID NO: 11633 - protein, 491 aa, synthetic construct
MENTRKCKRAVAYVRVSSGSDAQIHSFEFQSAYWHQELDGNPDVEMVGIYADKGISGRSMYKRPQFLTMMQDARDGKFDVIYTKSISRFGRNTVHLLEAVRELRDLGIAVIFQNENINTLSSTSEVFMTIAAALAEGELEEDSKRQRWSYQDRFQNGWISIGTGMYGYRMVKDNQLEIVEDEAAVVREIYAMYLSGMGTIAISNVLNDRGLKTSRGNPWGTNSILEIISNEKYTGDSLMGKHVRVNGVHMDNTGGRYSKQYMVENTHEAIVSHETFDKAQAERARRKNPKMVGVQHDPHDFTGLIECGVCGMRFNHKVNSSGLKWQNPIWACHNQLKHTKKACDNTRIKEDVLCDKFVEAYNRFVIERPCGHSVRAMEIRVKTLQDEERDLAGLALKHLIPDAAFRAEQKKLKAEIAALTERICEQTSKEVTEADYTVISEYDPEKVKKFVTKVIVLKGTVTFVFYNGVEITLEYSNGAPGNKPGWNVKEA

SEQ ID NO: 11634 - protein, 572 aa, synthetic construct
MASRIAEKLAAKKAAIYIRVSTHWQVDKDSLKVQRRELIAYVTLVLGITDYVVFEDPGYSAKNTDRPEYQAMMDRVRTGEFTHLVVWKIDRISRNLIDFAAMHDELQSLGVTFVSKNEQFDTSSAIGEAMMRIILIFAELERKTTAERVTAVMLSRASDGQWNGGRVPFGYSWSKEAKTFSIVPEEAKAIRRMAELYEQYQSLLYVAKYLNDAGIVTKTGGQWTPTTVRTILTNPWYIGQYVYNVHSDGKGIEKRDSDEWITVENHHEPILNEDVFCRMKFLLTRNKRGGVPSHKTYVRKNIHIFAGLLRCGQCGSNMTANLDRRRANGFRPSQYACGSRRHKGTSCTNKYISDTTLGPFVLNYVANIIRASKNSSEATTPEVLERKLLRGEAFEDVASVSTDALGQLLDAFRSAGDAVEYRPQIAFSGDDNSIREIDTLRARRRKLDNALARLNALYLYDDEAMPEKDFVMQRGQITKQLEEVNARIEELQNQESSEELGDDFIGKASYYIMANKLIEDRYIDYEKYIRAIDPSIPRSFLQQIIDHIVVNDGRVISITFKNGSTHTFTYKT

SEQ ID NO: 11635 - protein, 453 aa, synthetic construct
MECVAYMRVSTEKQAEEGNGLESQKRDILDYCTKNELIVTDWYVDDGYTGANMNRPELQRLVADCKHKRISCVVAFKLDRLSRNMIDGLYMIEKIFQPNGVQFKCVHDSVSYDSPMEQAYTQMMAVFAQLDKNTMMLRMRGGMLERVKQGYWMGGGNLPYCYSYDKDSGILIPIPERKVQANKALELYIKGYSDIKICKICGYKGEKVVRQILTTPVNIGMIPYKGKIYQGLHEPIFNKEQFELAQQLRKSRSCNKASCITEPNLLTGLCYCGVCGCAMRYQKWTHGKHKIYCMSRNKAMSYLPNHNPACNNSLEWADDIEEQVEKEMLKISLDLSSYKPKEKETKLDIMQSQLDKEQAKLKRLYGLYADGNDTVLSMIKELEANISAIKENISEERKNFSVKQKNTIVYDEIKKLADVWDSIDKKQKNMILKTIIDKIIIVNGNIEIQLKNF

SEQ ID NO: 11636 - protein, 700 aa, synthetic construct
MDSNAFLNDLMSKMKLPEAKGKKKAEQSESVAQILAAMQKVRAEKKKPPVTSYAPVKEMPVNEPESMEDFSQLASDVMQECRPAMPTVPAASQEKAVRVAAYIRVSSTNPAQEDSYEMQERYFMSLLAGNAGWTSAGIYSDHGISATSREGRTGFNRLLRHCKQGKIDRVICKSISRFARNTQDFLVALRTLKENNVTILFEREAMDTADAYSEFILTTLAAIAQEESRSISANIAWSNQKRFPAGNVCNKDIYGYEFRKGEYTVNENGYRYRAVFIIPEEAEIVRMVFRLFTKEELSFTQIAQKLDALHIPPPNSGCRQRQKRKPTVLPAGALKEEDKRGWTATDVRYMIANVRYCGSVLCQKTYTDHRNGHKQKVNKGEKPKYLIRNHHPAIISEEMWQEAQEVWKAYTAKYRGIEKGRNERNYSKLLLCGECGRYFQGHSTTRTTIWRCATKLAQQGQKRCRMEPIYEEQIQMLLRKAFAEKFKLGEKMDAEVHEVMQMISKAPIDNARNQALKNLTEKLREIHDFDQMEQEGDFLKRQLSAVNYSIRDVHQHIRDIQAEKEALKVRCEVLGEPRDKEAVTELENRLLNEEEQLEKLEHEAQQQAEQVRYMEDYWKKLEQTHEIREKTLQWLDSLAGGTQMFLDEAVGTYVKAFVLSVTIFSPKHFRIHWFDDTCTEVECDSVFEGYQQPGMIRRKY

SEQ ID NO: 11637 - protein, 559 aa, synthetic construct
MRTIRKIERRIPNLKQRKKVAAYARVSMESERMHHSLSAQVSYYSSLIQKNPDWEYAGVYADYGISGTGMKKRQEFLRMLEDAEAGKIDIILTKSIQRFARNTVDLLRTVRHLKELGVEVWFEKENIHTMSGDGELMMTILASFAQEESRSISENVRWRVKKRFEQGNPNGRFRVYGYRWEGDTLVIVPKEAAVVRRIFQNFLDGKSRLETEREFAAEGITTRNGRRWMDSNIRVVLTNVTYTGNMLFQKEYVTDPILKKRKKNRGELPRYYVENTHEPIIDKETFDYVQQEMARRKELGALANKSLNTTCFTGKIKCGICGRSYMHNRRTDRGFEEFWDCGSHKLKGRNCGAKGSIPHAVLVKESTEVLGLDDFDEQAFLDQVEKIVVPEYHVMVFCMKNGQKLIRHWVSTAKKDCWTDEYKDRQRAWMKNYMANGKGTRFSAFTTRVRCALCGSSFRRCKTKHDRPVYWRCSKGGKCESVSIREDDLKRVAAEAMGLEDFDEDRFRGKVESIEAGKPDCLTVHFKSGRTEEISYTPTPSKRRPKARRKESGEKWQRQ

SEQ ID NO: 11638 - protein, 571 aa, synthetic construct
MSIRDKLSALKVAIYIRVSTHWQVDKDSLKVQERELIAYCQMVLGINDYVVFTDPGYSAKNTDRPDYQAMMDRIRTGEFSHLLVWKIDRISRNIIDFATMSEELKHLGVAFVSKNEQFDTSTAMGEAMLQIIMVFAQFERKQTSERVTAVMLSRAGNGQWNGGRVPYGYLWDKETASFQLCATEAGYVRRMAQLYEEHQSLLHVVKWLNDAGVKTRRGFAWTPTSIHVILTNPWYIGQYVYNVHSDGKGVERRDESEWVCVEHHHEPILSEDQFYRIKFLLTRNRRGTPTPGKSYARKHTHIFSGLMRCGICGSNMSASADRRRANGFRPSQYACASRRRKGTTCTNKYISDLTVGSFVLNYAANIIRAARNSAADIQPDVLERKLLRGETFKDVEGINSEAIQQLLSSFAEAGEAVEYRPRYAFTSASGEGRDMDNLRARKRKLETAFSRLNALFLYDDEAMPEKDFIVERTNIERQLAEADKRIAELAATGLSSSEDSSDFLKKASYFIMVNKLIEDASVDYEKLVRTLDPTAIRDFVLNIVQEVEATDGRITAITFRNGTAHRFKYKT

SEQ ID NO: 11639 - protein, 426 aa, synthetic construct
MRVKVINKRPTSVLQKKRVCAYARVSTDSRRQEDSLENQMETYERLITGNPEYEFIGVFADQGIYGYCENRPQFQRMMEKARAGEIDLIITKSISRFARNTVTVLKFARELKELGVGIFFEEQNINTLSGDGEMMIAVLASFAQEESRSMSENNKWSIRKKFERGEVMITTSRFHGYDKNEYGDLIVNRKEAEIVSLTFDLYLLNVGSSRIGKLLDYMGVKTVTGTTWESGTINGMLCNEKYKGNFHLQKYYTSENKRNHTRKNNGEVQSYYISENHEPIVSPEIWEKAQEVGEQRKRDRNIGQDSTMKFPNRYPLSGMLICPHCGKTLRRRQVYKKKIQWLCSTYIEKGVKACKGIRIDDAKLQGLNIAEQTVIEEVVKNGKKHYCYTSKADFDCGIRNSTVSAEIKDGSVLPSVNRPRRTVIKL

SEQ ID NO: 11640 - protein, 514 aa, synthetic construct
MKQCVIYARYSSERQTEQSIEGQLRVCYEFAKNNDLIVVHEYIDRAMTGTNDLRKEFQQMLSDSEKTKEWDICLVYALDRFGRNSIEQAINKFKLQKTGKIVISATQRTSRNIDGSQNLDGIILENMYVGMAEYYSAELSQKVKRGMNESRQKGNFTGGYIPFGYCVTGDRKTGRKVQINEDQAVIVRKIFEDYAAGRLVTDIIDELHEKGIENRGQPFARNTVYFLLKNEKYAGIFRHGDEVFTNIYPPIISQTTYDIVRARIENNKYGKHKPNVEYLLKFKVTCGYCGSPINSDSGTSKSGVIMRYYKCSGRRKGKNCQSTPIRKEVLEKVVIDATYKALATPDLIEDIAERIMGAHQKRMDDQSILHILEERLAEKKSSIDNLIAAMEQGIISQTTKERLNALEAEKAELINKIAVEKLKSNLIIQKHDIVKYLQSAVKKRPLQMIQLLIKQVVLYNDKIEIHFNYIDGKRPDDELHQAFSFYSFNQRITIDQHKIGKEPIVTDYEIILLI

SEQ ID NO: 11641 - protein, 545 aa, synthetic construct
MNIAIYPRKSKFSPTSESIANQVAMCREYCDRCFDDPHYFVYDEDEGFSGKSTNRPAYTQMIEDMRAGKFQVLCCYRLDRISRNVRDFAELLDDLQRHNIAFVSVRNNFDTSTPFGRAMVYISSALAQMERETLAERVKDNLYEMARSGRWLGGVTPLGFVAKAQEVHRDDKKRKLLMLSPVEEELAQVRDLFDHFLRLGSVTKLLQYCLEHRIVSRNGNDYSRTTLRLLLTNPVYCTADAEAWAYFSSGDYQLCAQREDFDGVRGIQPFARTRKDDGGTVSRPTSDWIIAPGLHRGVLPGAIWVRAQQILQGNRDLGSTYKAPRTENALLSGVIRCAGCGAYMRPKAYGKPLPDGKRRFSYVCLTKIDSCGARCAMPNAPGRDVDALVIKELTSLTSDGGAISTLRSEARLAQGEARRTHAEAVATHEKAIASMQKKVDKLVDALASGAPEGARQRILCEIDRYEQEIEQHRDALSELNASVLLDADPSALLDAAFSALESFRTSFASLTHDEQRRAIRALVDRVTWDGKNVSIEVFGEKTLPK

SEQ ID NO: 11642 - protein, 510 aa, synthetic construct
MSYFIYARKSRKDAELEALGIDVLERHITTLLELAKTLSLPIGAIYREVVSGDSIDARPVMTQVLSEVEACMWDGALVMDVDRLARGDTIDQGRVQRAFFYSNTRIVTPSKTYDPANEYDNEYFEFSLFMSRREYATIKRRMQRGRERSSSDGYYVGNVAPYGWERVIAPDGKHYSLAPHQTEAPVLDLMYDLCGNKQYGYQKACTYMTNMGILARSGKPFSPSTLKGIISNPANIGKVRWGYRKTVRAVKDGRVVKSRPNATDYILADAEWAPRISADLFKRANQPKGCFSSPVRNDRPIQNLFAGLVRCSQCGRLMVRKKAQTKTPYDVLICQYTECSTVGIRIDELEEALLEWLKDYIVKYEFTDTHEEDAAAIAAKEMIVTNFETEHQTLLKQRESLFDFLEQGIYTKEIFIERSNALEQRIRDCMNNIATAQEDLHTTIARQANRKNFVPKCKNLLSEWDSLTISEKNSALRQLIDRIVLTKTKRNKKNQKNSEFTIDVYPKVPK

SEQ ID NO: 11643 - protein, 463 aa, synthetic construct
MSFFTPNPQLFGLRVVKYIRCSHDDQVLHGDTLEAQDLILENFIKVNRMILVDTFIDEALTARKKFNKRKEFVRLLSGVKAHSFDLIIFTKLDRWFRNIGDYHKIQEILEANGVQWKAVTENYDTTTTNGRLHINIRLSVAQDECDRDSDRIKDVFAYKLKNKTYVSGSLPRGLKLDAEKHVIIDPEWNCFALDMFDRFEATCSKRDTQLFLQEKYNIRVCYDTVARYLKNPLFKGQYRDDPDFCPATISPERFERIQKLAIRNVRIRHTQQFYIFSGLLICSSCNHYMCGTVTYRRMADGSEKMYKNYRCNFKAQSKLCDRGKTYREADLEEYMLAHIRPALSDYIAKYEVTAASTVQKNPVTEIAKIERKMKKLYDLFMDDLIDKEAYRSEYDKFKAQIEELRKCSTAAPMRSLDSVKKLLSEDWEAVYHTFSDQEKNTFWKSFVESVLVYEDGSMDIRFF

SEQ ID NO: 11644 - protein, 468 aa, synthetic construct
MAREIVHIPARQELRNRSVSIGQLIRVAAYCRVSTEQDEQLNSFENQVAYYTEFITRNPQYELAGIYADEGISGTSTKRRDEFNRMIRDCEAGKIDLIITKSISRFARNTQDCLNYSRKLKELGIGVIFEKENINTMDSTGELLFTILSSLAQDESRSISENCQWGIRSLFKQGVLHLNANRFYGYDKDEDGKLVINPEQAKIVRWIFQSYMDGTNPDVIARKLNERGVPGCSGEPKWSTSTIMGILQNEKHMGDAILQKTFTADFLTKKMVKNEGQLEQYYVKDDHEAIIDKDFWTAVQMEIARRREYLQRHCLRTMGRYTDTQPFSNKVFCGTCGNVFWRRTLSRLNGPVKVWMCGKRYQEKGKKGCSSGTIYEKDLHRAFLMAWNAILENREDFLTGWQEQLRGEDVLAAFRAKQFIQLTKNTEPLREIDFSLVGRTLDHCVIEPMSVINFYFLDGTELGIEIED

SEQ ID NO: 11645 - protein, 408 aa, synthetic construct
MRVKVIKPQKALELNKKRVCGYVRVSTDSLEQEDSLDNQTVYFRDFIQSNPDWEFAGIYSDQGISGFKEERPGFQRMIADARAGKIDLIVVKSVSRFARNTETVLKFSRELKSMGVGIFFQLQNINTLSGAGELMLTILAAFAQAESEGASDNARLTYRRKFAAGIPASGLERTFGFTADDDGVIRIVESEAETVRLIFSLAHKGLWTGKIKAYLNKNGITNCTGKTWNDTGVSRILHNPAYKGDLVLQKTYLDSKRVRHKNEGQMDQWYITDNHPAIVSPEVWDEVQEILQSRSEHLLREKKKPAVPHNSHSTYPLSGKLFCPLCGEKLLHKWSKDEREYWACKTNIKVGASTCKGVWLPASVANSWGEITEPTTVVCYTDEYGMKHFTGYPKEEYEASPDCPYSIL

SEQ ID NO: 11646 - protein, 529 aa, synthetic construct
MTYQEGGEAMKRITKIEGNQDYIFKPKTRVVAYCRVSTDSDEQLVSLQAQKAHYETYIKANPEWEYAGLYYDEGISGTKKENRSGLLRMLSDCETRSIDLIITKSISRFARNTTDCLEMVRKLIDIGVHIYFEKENINTGSMESELMLSILSGLAESESISISENTKWAIQRRFQNGTFKISYPPYGYQNIDGRMIVNPKQAEIVKYIFAEVLSGKGTQKIADDLNRKGIPSKRGGRWTATTIRGILTNEKYTGDVILQKTYTDSRFNRHTNYGEKNMYLVENHHEAIISHEDFEAVEAILNQRAKEKGIEKRNSKYLNRYSFSGKIICSECGSTFKRRIHSSGRRKYIAWCCSKHISQITECSMQFIRDEDIKTAFVTMMNKLIFGHKFILRPLLNGLRSQNNAESFRRIEELETKIENNIEQSQMLTGLMAKEYLEPALFNKEKNSLEAERESLFAEKEQLTHSVNGNFTKEEEVERLLKFTTKSKMLTVYEDELFENYVEKIIVFSREVVGFVLKCGITPKERLVN

SEQ ID NO: 11647 - protein, 534 aa, synthetic construct
MKNRVCTLYRVSTDKQVDHNDKNQADIPMQRKACHAFCEKMGWVIVHEEQEEGVSGHKVRAENRDKLQIIKELAKQKKFDILLVFMFDRIGRIADETPFVVEWFVKNGIEVWSTQEGEQRFDSHTDKLTNYIRFWQADGESEKTSIRTKTALGQLVEGGGFKGGLAPYGYDLVKSGRFNKRKHELYDLVVNETEAAVVRIIFDKYVHEGFGAQRIATYLNKQGYRARTGKMWHHASIRGIVCNLTYTGVLRCGESRSQTLPHLQIIPPELFEAAQHIRTNRANSAEQERHVPMNTRGNSLLAGNVYCGHCGSRLSLTTNGKAYPCKEDPNRVVKRVRYVCYGKTRKQTDCDGQTGYTAHILDGIIDKLVRQIFERMKAIPKSDIVNIRYREKMEERKSLLHSVQVEYTKAAADLETLKGEVIKTIRGESTFSKELLGSLIAEAEAKCRELQENLETAQAAYDEGKAVLASLNAQYDDIISWAEMYDTASMEAKKMIVNCLIKRVKVYRDYKLHIDFNIDFEQFTGGLDIVTIAA

SEQ ID NO: 11648 - protein, 506 aa, synthetic construct
MYGMYLRKSRSDDPNEDINDTLAKHEKILFDLADSLNINRKEIMQFKEVVSGENIQNRPEMKKLLEYVMEGVLEGVLVVDSQRLARGDTVDQGTIIRAFSINNTKIITPMKTIDPQNEYDQEYFEFDLFMGRREYKMITRRMQRGRHIAAQEGYYVGSIAPYSYSRIKLEKGYSLEIYEEENIVFNIMKKKALEDEGSTNISNHLNELGYKPRKGEYWTKSAVEAILLNETNLGLIKWNSRKEVKVFKDGKIVKTRPRNPNYELYPGKHPAIMTQDEYDRIKFLMKKRSHPVKKDKTLQNPLAGLIVCGFCNHKMARRPYKNGRVETILCTTSRCKNVASDIHVVEQRIIDTLKDTLKNYTNYVNNYSVSVNKTYDDNKKLQLEECDKELERLNKQIIKACEMLELGAYTVELFKERKNTLENKINTVNKRKDILAKETEAMKIEQYKKAIPQLQNAIDLYWKSSTEEKNKILKSIIDKCIYKKEKGGRWDPDAIKQFKLEIYLKV

SEQ ID NO: 11649 - protein, 526 aa, synthetic construct
MNTVIYARYSAGPRQTDQSIEGQLRVCTDFCKQRGLTVIDTYCDRHISGRTDERPEFQRLIADAKRKKFEAVVVYKTDRFARNKYDSAVYKRELKRNGIQIFYAAEAIPDGPEGIILESLMEGLAEYYSAELAQKIKRGMHESALKCQSTGSGRPLGYRVDEQKHFQIDPESAQTVQTIFEQYIKGESNAAICELLNSRGLRTAQGKPFNKNSINRIIKNRKYIGEYRYHDIVVEGGMPAIISKDTFNLAQAEMERRRTRKAPKSLKAEYLLAGRLFCGHCKGPMQGVSGTGKSGNKWYYYYCGNTRGKNKTCDKKQVSRDRLERAVVDFTVRYILQEEVLEELARKVHAAQERQNDTASEIAFYEKKLADNKKSIANVLRAIESGTATQTLPARLQELENEQAVILGEISFLKGKRLAFTEDQIFFALMKHLEPYPGESEQDYRRRIISDFVSEVYLYDGRLLIYFNISSEDGKLKSADLSNIEGGEFDEGLVGSTNKGIGFFPVPFFCILKRQRGPNSSPLPPL

SEQ ID NO: 11650 - protein, 518 aa, synthetic construct
MPRKKAPAAEAPRLVAYYRYSGGSRQTEQSIEGQRRDCEAYARAHGMTILREYVDRHISGKTDDRPAFQQLVADSAAHTFDAVICWKTDRLARNRYDSAVYKKKLRDNGVEILYAAESNISGAEGIIIEGLMEALAEYYSAELAEKARRGMRESALKGKALGSSRPLGLTVDAGKHYIIEPTGAEAVRYIFEQYAAGLSSSSIVERLNAMGLRTSHGGPFNKSSINRIIQNEMYRGVYVSKKFDVRIEGAIPAIIDNDLWERAQKMFERNRQSRTPHASRADYILSGKLYCGECGCLMKGVCGRSSGNGQMYHYYACPGRSIGRACTRKNIPQDELEAMVVNSVADLLLEPELLEQIADAIVELQQAEAARPDPEKQALEKSLSDVRSKIQNILTAIENGTSSAALSARLADLEQQESTLSYQLSSLTAKKPLTFTRDQILFLLQQFRVSPSERTKAYCRRLVDTFVDHIELTNTELILYFNLSDETVDKNKKAPRSNPSKESSTEKRLVRVARIELT

SEQ ID NO: 11651 - protein, 546 aa, synthetic construct
MKKFPIDLSCLTEEEISQFQEDPYTLYNGDQNVAIYLRYSSTGQSDQSIEGQLRDCRTFCKANHYRIVAIYVDRATTARKDVEKRVHLMEMISDSAKQNWEYVIVWKLDRFARNRNDSAIMKMRLRKNGVKVLSATEHLTDSPESIILESVLEGMAEFFSAELSQKVTRGMRESALKCHSVGGHIPLGYKVENHKLVVDPDTAHIVQEAFSLYANGESVAAICRKFNSAGYKTAKNTEFNRSSFKAMFRNTRYIGTYTYKDIVIENGIPAIIDKELFETIQRRLSKTATAPARGKAKVDYLLSGKLFCGHCGASMNGESGAGRHGKVYHYYSCYTKKRKLGCDKRPLKKDYIEGIVARDALNLLTDQLIDEIADMAIRQSEQDLINDTHIPQLTAQLSEVEKSITNITAAIEKGIASETLMNRLVQLEHEKKTLNKEIKAEEKFVYRIDRDQIVFWLSQFKYGNIEDEDFRRRLIDLLVNSVTVWDEPDGYKITTAYNLTSCKTKTFRVEKNPAAEEATGFDFGESECAKKTRNLTVSGLFVCISY

SEQ ID NO: 11652 - protein, 564 aa, synthetic construct
MPRAQKAAIYCRVSTLHQVDKDSLPMQRQDMINYAKYVLSIKDYEVFEDAGYSGKNTDRPAFQEMMERIERGEFSHVLVWKIDRISRNLLDFATMYAKCKKLGVTFISKNEQFDTSTAMGEAMLKIILVFAELERNMTSERVASTMNARAAEGKWNGGRVPFAYAYDRETDSFSIRDDEAKVALELKDTYLRTHSLTYTARLLNEAGRRTRRGYAWTPATVAIILRSPFYRGTYRYNYRDESEVTFSFKAQKEWILCAKHHPPLFSEADCRQVDYWLDKNRRHHGKATHVQRKHVHIFAGLIRCGVCGSNYAASVDRARPSGYQPSMYNCGGRRQKGTCRNRYVTDIRIGGFVFNYISNVIRLRDAFRLQWSKARIQRFLLHGDAFHGALLSDDTLRHVRAALLGSHAGTAEYHPADEQRDGSAEQARKSNLQAELEKNRRALSRLMHLFLYAEDELPQADFLREKRYLQDNISRLQGELEKEQQPSVFASSLTDEDFLRKAAHLLFQSAMTRGGIDFPELAMHVGNLELKNFINTIIKQIVVLDGHVTQITFANDEIHTFLYH

SEQ ID NO: 11653 - protein, 581 aa, synthetic construct
MARKRTNLIGNTPSVRETKVAIYIRVSTIHQVDKDSIPMQKKDLIAYCQLILGTDNYEIFEDAGYSGKNTDRPAFQNMMGRIRKGEFTHVLVWKIDRVSRNLLDFAEMYEELRSLRVTFVSKNEQFDTSTAIGEAMLKIILVFAELERNMTSERVTATMISRANSGQWNGGRIPFGYSYDPKEKVFSIREDEASICRELKDLYLLNRSLVYVSRALNEKGYKTRAGVSWSPHSVWIIASSPFYAGIYRYNRYKGVESRTINPEEEWVMIQNHHPAIFTLEEHQAMRSIMKSNQRNMDNLPGRVHLSTKTHIFQGIMYCDKCSSKMVSTPGRLHVDGYRTSNYGCPLRRNTKKCNNPTVNDIVIGEFVINYILNMLNAKKTFSTINTPDELNAALLSGSVFSEVSSVEENGLNSFFNLLSRYGSDRSYIFSVKSPRKKKAAVDPELSKLRKEKEKQERALQRLQDLYLYSETSMSEKDFIIRKSEISSHLDNINRQLGLMTQDQASFLSDEEFIKQASHLLIQKELKNKKYIYFKKLVSTVDPDILKAYMETILDSIYTADGKITAITFKNGLTHRFIYKDK

SEQ ID NO: 11654 - protein, 523 aa, synthetic construct
MRFFSYGRKSVFSDKSDSIDNQFRMNREYCESKFSGQVDSWQQFSDEDFTGANTSRPDLQRMLSFIKGGFCDVLVVYQLDRLSRDVRDFANIYALLEEHGVMFISIKENIDTTTPIGRAMMYVTVVFAQMERETIAARVTDNMLGLAKKGYWTGGNPPVGYVRKHIVVNGKKHCSIEVEPDGARYVTQIFDTFLAYNCSLQGMETRFKNQGIRTQSGKFFSTTQLHKMLTMPYCVEATPEVYDFYAAKGCIMDPGSPREMWDGSVGVIIYGRSTEKNKKHQAQPPEKWTVCLGKHKPFMPAEKWLAVQSRFTQNKCIKDAKWPVPLLKGVLRCKCGNLMQVSRKKKVDGTCSSWYYCRKRMRQGVDACDMGQIKCDLLDEEVLELFRGITADPALIQKFVKAEAPADVPDLKAAQARVSACERKIGRLAASLALAEESSASKYIIAEMERLDVELGALKREASLAEMESHRAAASAKDAKATAAEIAKLIHGLDGFDDKEKNAIARAVIQECTWDGERLFITL

SEQ ID NO: 11655 - protein, 527 aa, synthetic construct
MAYCLYLRKSRADIEAEAHGEGETLARHEKLLLEVAKRGHYNITQIYREIVSGETIAARPVVQKLLQEVEDGKWEGVLVVEVERLARGDTIDQGVMAQAFKYSGTKIITPLKVYDPANEFDEEYFEFGLFMSRREYKTINRRLVRGRNASAKEGKWVSGLAPYGYERVRIKGDKGWTLRPVEEQADIVRFIFKLYTSGEEDENGEVRRLGTYTISKRLDSLGVAPPSSAQYWNDRTVQCILQNPAYIGKVRWGVNKSKKKIVNNSIEIERYKAPADEVIYVDGLHPAIVDEAVFQKAQDLLQRSGPPPVPKRNSVVNPLAGILVCGKCGRSIVLRRGRLDMLICHNRLCDNVGSKYEYVEERLLQALSSWLEGYRLEWSDKLPADEQALLDLKQKALRKTVTELETLHKQLDRTHDLLEQGVYDTDTFLVRSRSLTERIAAAKEDISALTAEVQADKERAASRLNVIPKVEKLLEVYPVLPSAQAKNEMLKEVLEKVEYTKNERSGRNGPFDNFELVLYPKLPPKIE

SEQ ID NO: 11656 - protein, 578 aa, synthetic construct
MAYPMKNTTADNRIIAIYVRVSTGYQVDKDSLPFQKKELKAYCKHILHVDLSQVEIFEDAGRSGKNTKRPAYERMMEKVRAGLVSHVLVYKIDRISRNLVDFSLMYDDFKYNRVTFISLNEQFDTSSAIGEAVLKIILVFAELERKLTSERVKDIMIGRATEGKWNGARVPYGWDWDPDAEQPVHSKVEAPYARSMYEMYLEVRSTSKIRDYNNSHNIPTKRGGEWTSKTVSDFLRNPMNKGDYRYNYRESARGRKKPEDEVIYQEGVFEPLVDPEVWERVNRIMDDNASKRNTGGLHPIMKNCNVFAGLIQCAECGSGFQVVKKDRRRKNGFAPSMYGCTSRFRKIHCPAPNVSEVQIGPFVINYISAMVHATNERFKIHSPAALESMLLSDPIFANIAGIESQGLNETFALLTGVSVSGSALWRTDPVKQSDTAATSSEIENLKKQIQKYNRAKERLEDAYYFSDDAMSEKEYLEKKNKFDAARVAAENKLKELTEVQIASHVDDSGFMKSASAFLLAHQLHAGVHIEYRDFAVTVEEESLKEFMNLVLDHISVKDRCVVEIVFSNGLSHRFIYRE

SEQ ID NO: 11657 - protein, 559 aa, synthetic construct
MNAINFESMYSCRNVLALDAMTALYCRLSVDDANDGDSNSIQNQKKILLNYAQENGYTNYQFFVDDGYSGTTFERPDFKRMIEGIRAGIIKRVIIKDMSRFGRDYLQVGMYTEIMFAEYDIHFIAVNDGVDSQKGENDLTPFRNLFNEWYARDCSKKQRAVKRMKGMAGERISTHAPYGYLKGEDGKLVVDEETAPVVKLIFDLCVQGLGIGKIASELTRRKIPTPGTVEFYRTGHKRNYRPDSECQWISTTIAHILSQKEYLGHTVNFKTYSKSYKFKKRHATPEDQQVVFENTHEAIITQEVWDTVQRIRQHRRRNQKQDEPGLFSGMLYCADCGSLLYLSRGVTISREQERYCCSNYRKRTNSCTIHYIRAVVLEELILENLKQTVKFATEHENEFAQCIMKRTLAKQQEGVKTLQKMLAAKEHRIKELDGIIKKLYEDNFSGKLSDERYMIFSREYEDEQHTLKAEVEELKSQIEEQTSKVVNINSFLTVAKKYTSFETLTPGMLHELIEKIVVHEGDKSSGHRIQKIDIYYSFVGDLESSHVVAQRTLKDRKAA

SEQ ID NO: 11658 - protein, 502 aa, synthetic construct
MEIQIREGSREQKRKLKVCAYCRVSTDADEQENSLENQVRHYETVIKANPDYEYAGVYSDFAISGFKEKRPGLQKMLADAEKGKIDLILTKSVSRFARNTSIVLEATRKLKELNVGVFFELQNINTLSGEGELMLTILAAFAQAESESGSAGAKMVYQRKYEAGIPVQYLERSFGYTKDERGVFVADEAEAVWVRKIYKMAAEGYTPASIKRYLNENGIKTVGGVQWVDSTVFRLLENEIYKGDYIMHKHFVNEERKLVRNRGEVDAWYIEDDHEAIVSPELWQKAQDALAAKRDYLAEGSVIEKFTEENYPYMNKIYCAKCGYPLYKRVYSKGNRLNWGCSGTKRYGKTFCDGINIPDGVLRSAWHFKENTYIAEKASDKGVKEFTYLKEQSWKRRHKKKQPPAIPENTEAEYPYREKIFCALCGSRLVRYVNPQSHKVTWVCSRRKRKGKDACDGTRVPDTIIKGWGEIKKDIYIQRKDDKNGKKRYSYTSKKPEGADRA

SEQ ID NO: 11659 - protein, 561 aa, synthetic construct
MDKKKKSALYVRVSTTHQIDKDSLPLQRSDLTNYTKYVLGIEDFEIFEDAGYSGGTTDRPAYQDMMNRIKKGEFTHLIVWKIDRISRNLRDFSEMYDELKKYNVTFISKNEQFDTSTAMGEAMLKIILVFAELERKLTGERVFSVMISRAQKGLWNGATVPLGYEWDAETKFPRPYDSEAKVVQYIYDQYEIIKSTTKLAKKLNIEKIPTKRNGTWTPRTVGSILTNPFYIGTYRYNTKTRKTRRWKNKSEWVVVEDNHQAIINKEQFERVVNIIQSNYKGDKNYQRTNNKVHILSGIASCHKCGKKMHSGLDRARKEGFTPSRYTCYAFNVNYTCANYSSDLAILPGLINYIANYITLQERITPKHSLRDMESILLRGKYFEDIDHIEKQDLKNTYNLLINNTLVTYNSLEDEKKEAIVSQNAIYEAEKEKYIKALKRLDDLYLYDINSMSQKDFVIKRKEISDKIESVNKKIQEVKLNDTPFINNDDFGVLSKASFYLLTKNLSSVKNIDVISLLNNLDKQTVKDFINAIITDVSVERGKIYNITFKNGIVHHFIYKNQ

SEQ ID NO: 11660 - protein, 464 aa, synthetic construct
MARSVTVIPARSQKVQTGHKAVQEKKIRVAAYCRVSTDQEDQLHSFEAQVEYYTKYINEHENYEMAGIYADEGISGTNTKKREQFKKMIADCEKGKIDLVITKSISRFARNTQDCLAYSRKLKNLGIGIIFEKENINTLDSTGELLFTILSSLAQDESRNISENCKWGIRTKFKNGEMHLNTFKFLGYDKDENGKLVINKEQAKTVRRIYRDFLIGINPAQIAKELTEEKVPGCLGQTKWYPSTVIGILKQEKHMGDALLQKTYTADFLTKRQVKNNGEIAQVYVKDSHKGIIDKQTWNAVQEEFDRREKFMQRHGTDRYSYGADCMPFCEKVFCGECKSLFTRHSWKSRGIIQWQCKNHRKDGKVVCTNAYVDNADLEKGFVKAFNKLVTDREKYMEIWQQMKSDGTPLEKIRAGQMMEAVGNEPLTRFVPEIAQLVLCEVTVLGAKKYEFFFLEGSRVKVSV

SEQ ID NO: 11661 - protein, 502 aa, synthetic construct
MEIQIREGSREQKRKLKVCAYCRVSTDADEQENSLENQVRHYETVIKANPDYEYAGVYSDFAISGFKEKRPGLQKMLADAEKGKIDLILTKSVSRFARNTSIVLEATRKLKELNVGVFFELQNINTLSGEGELMLTILAAFAQAESESGSTGAKMVYQRKYEAGIPVQYLERSFGYTKDERGVFVADEAEAVWVRKIYEMAAEGYTPASIKRYLNENGIKTVGGVQWVDSTVFRLLENEIYKGDYIMHKHFVNEERKLVRNRGEVDAWYIEDDHEAIVSPELWQKAQDALAAKRDYLAEGSVIEEFTEENYPYMNKIYCAKCGYPLYKRIYSKGNRLNWGCSGTKRYGKTFCDGINIPDGVLRSAWHFKENTYIAEKASDKGVKEFTYLKEQSWKRRHKKKQPPAIPENTEAEYPYREKIFCALCGSRLVRYVNPQSHKVTWVCSRRKRKGKDACDGTRVPDTIIKGWGEIKKDIYIQRKDDKNGKKRYSYTSKKPKGADRA

SEQ ID NO: 11662 - protein, 517 aa, synthetic construct
MTTNKKVQIIRGSKSYAEDILRVAAYCRVSTDSEDQVNSFIAQMHYYYSFIKQAENMELVDVYADEGITGTSVAKRDDFNRMIKDCKAGKIDRIYVKSVSRFARNALECLEYLRILKECEVSVFFENDGIDTGALNSELILYIKAAFAEAESTSNSKRVQTANRMRAENGEYVFVSAPFGYRIENNELVPIPEEIKVVERIFKEYLAGLGAGKIAAQLNAEADMIGKPWGKERIRYILSNEKYIGDSLFQKTFTPNVLPLKNRPNRGEVEMYYISNTHAPAIDRELFDAVQEMLKRNMQKKAKCAKSGKYSLSGKLYCGDCGWRYKRKVQNGTAYWICSGDGIAGRHCKTKPLSEEVFFKTFVNFYNRLRAHENLILRNSVTRLSEIKKMITCMDSEISDLDKQLGLLTERHNLYVTLMQGCQMDEISFAEQCAKAEREINKLRSRRNKLLSEDEDEKSIDDIRMLRNKLSSAPKAILKFDFELFDAVVEKVIVEDDSKVSFVLCCGLKLREAIAWN

SEQ ID NO: 11663 - protein, 549 aa, synthetic construct
MNNTGVQVRTKTVTKIAANPALSKRNDPNRILRVAAYCRVSTDDEDQLNSYRTQKSYYTELIKKNPKWRFAGIYADEGITGTMVKKRDDFLRMIEDCEKGKIDLILIKSVSRYARNIVDCISYVRKLKALGIGIYFEEQNINSLTEDSEVYIGIYGVMAQSESENISANVKWGINKRMQNGTYACRFTLLGYRRNKDTKEIYIVPEEAETVKKIFQMYLQGRSLDQIKRYLEENNILTVRGNPIWDKGVIKSMLTNEKYVGDIMFQKTYREDCISKRTKINRGEMDRYLVTDNHPAIIDRETFRMAKKEMVKRSSKRRTSSNAVTELGKYSGKYALSELLFCDICGSPFRRKTWTRKGVKRVYWRCLNHVENGDKACPQSRGIEESVLHEAICRGMSKCIPETGDVKNLVRTMLAYATSEDQGLLECQTLENAIRELQEKANEAEEMCIRTEGNKEPYMEQIKKYYSSIAELRARITEITKQLEESDEFQTEMQQIDSWLENEEILFAEYDDDIVRYLIDSIRVTDDLKLIINVKGGVSVTEELDQKED

SEQ ID NO: 11664 - protein, 528 aa, synthetic construct
MKKVIELIRVSTEAQAENDRASIPAQRAINRRTAQAYGLEITHSVEMADVSGAAVLLAPEMQQLLKLIQSPEIHGVVAREFSRLMRPENFSDYALLQAFVDSKTILYLPEGPIDFNSKTGRLMGAIRAAIAGLERSELLERSWTAKEEKRRAGACPSGHITWPYGVGFSKETGWHYKPEAEKVREAFRLFLSGVTCYSELSRKAGIPRSALPIILRNPIYTGWRVYDKRRDMSPGALRVKTDGRQGDRRKALRSPDEIIRVRVIEEPLISQADFNRVQKMVEAKRERGSRARVETRRKFTYGGFLRCATCQLLIYSQSSHRGKLFDYYVCKGRQYLRTCQTLYMRREKLEDKLDFLLAVRLTDNGFLQEIVSEQERRRQQGGSQVRMARLQAQITGLREKQQRVLDAYFEGVINVEERNRRLEAVERDLKLAQTALMREAPTPEVTAEELSQLFQPFSDWRFLALEDKRRILAAVVPEIHVADYTVKAICMILPHGGKVVRPVGFSRLESRRKRALYLKTCSRNEALD

SEQ ID NO: 11665 - protein, 524 aa, synthetic construct
MKKAQPRATLPVVRCAVYTRKSTDEGLEQEFNSLDAQREAGDAFVRSQAGEGWTLLPDRYDDGGFTGGNMERPALQRLLADIEAGRIDCVVVYKVDRLSRSLLDFARMMETFEKYHVSFVSVTQQFNTATSMGRLVLNVLLSFAQFEREIISERTRDKIAATRRKGKWAGGHPLLGYDVDPRGFRLVVNEAEAERVRAIFALYLEHESLLPVVQELERRGWRNKRWQTRKGRERGGKPFTRTNLHRLLTNVAYVGKIRYKHEVHNGEHPAIVDPAVFARVQALLHRNGRTRGAPVRNKFGALLKGLLRCVPCGCAMTPTHTTKDGNKRYRYYVCSSAQKRGWNTCPSKSIPAAQIEQLVVEQIRCIGKDPDLLQATITQARAQDEARLAELEAERRGLDRELARWHAELQKIPPNPVDDPTIARLADLQERIRLAEDRTGRVREEAAAIRRRRIDDDEVALALSVFDPVWESLTPAEQARVVQLLVERVDYDGARGKVSITFQPAGIKTLADELADQGGREKIA

SEQ ID NO: 11666 - protein, 539 aa, synthetic construct
MESTKMAAIYARVSSDRQDVDLSISAQLKALREYATRNGYAVIKEFVDEAESGRSTARPAFREMISMARMKNPPFQLILVWKLSRFARNREDSIIYKSLLRKQGIQIISINEHIEDSPTGRLMEGIIEVIDEFYSSNLAQDIIRGLRENASRGFFNASHPPYGYLKIKVKDGDKARNTLDINPAQAPIAQRIFRECSEGKGLKEITKGLNKDGIPAPNGGTWGKQRVHKILTNEAYIGCLVYGKNHSKSNLPPVRKENAWPALVDKETFDNIQTGLNGRAPKIVHPRVTSSQYLLSGLIKCKKCGAAYIGYAAKSGRNHYYVCGTTYAKGKEICPSKHLPREKLEKYVVEKIKGYLLTDENLTDLVRIINEELDGSLKKYNERLEAIDREANQWEDRLDRLYDFVETKAIEPVRMAKRIADVQDKVNEMRRARFEIEEDIRRRRLEPLDPGAVVAYVADLKRFLESSNIFERRAFLATFIDSLEVDDGEITFNYGLPPDGVKQETVSVLGIVPPGPLGVSIGRTPTVSAFLPSGGTGSL

SEQ ID NO: 11667 - protein, 429 aa, synthetic construct
MRTITKIIFPPAPLPSLTRVAAYARVSSAKDEMLHSLAAQVSYYSGYIQQQPGWFYVGVYADEAITGTKDNRPEFQRMLAECRSQKIDRIITKSISRFARNTVTLLETVRELKSLGVDVYFEEQNIHSLSNDGELMLTILASYAQEESLSVSENCKWRIRQDFSKGKPGNIRIFGYDLVDGQLVINDHEAAIVRTIYFDYLSGMGKNAIVKKLIELGIQTKTNRRWQVNTIYTILRDEKYTGQLLMQKTFRSDHLTKAKKMNTGELPLYCIDDAHEAIISSYIFEKVQKEIARREKRYMPQPRTPVFSEFTGRIQCGICGANFRRKIVNAGTPYATAKWVCTNYNAHGVAACSMKPIPEDVLKRLTAEVMGMDAYDPNAIASNVLRIIIPKFGEVEFHIMDGSRVTKTWQYQARKGRNSDGCRNGNPAN

SEQ ID NO: 11668 - protein, 524 aa, synthetic construct
MGVVTVIQPTKSKYANLNLIRPDNQRRVAAYARVSTDSEEQLTSYEAQVDYYTKLIHDRPDWEFAGLYSDEGISAVSTKKRDGFKRMVNDALAGKIDLIVTKSVSRFARNTVDSLSTVRKLKEHGTEVYFEKENIFTFDGKGELLITIMSSLAQEESRSISENVTWGHRKRFADGKLILPYKRFLGYERGEDGMPQIVEQEAEIVRSIFRLFINGKTFSAIAKYLTDNGIPTPGHRKVWQSATIRSILTNEKYKGEALLQKGYTVDFLTKQRKVNEGEIPQYYVKNSHPAIIAPDEFDAVQIEIERRMKLGRPSSCKSPFSAKIVCGECGGYYGAKVWGSNTKYRRVIWRCNEKYKGGHKCSTPHMTEDEIKEQFLIAINELLGTREEVIANCQIARDVLCDSSEIDTKLDELRHEIDVIAGLSRKAIVENAHKAQDQNVFNELTDGYQKRHRVLTEQVAELEVIKRDRLSRGLVIGGFIRELRTRPLVIDEFDERLWMAAVERVTVGVDGGILCQFFTLHSHI

SEQ ID NO: 11669 - protein, 674 aa, synthetic construct
MAKVRIIPAKKIITNNRSNPHSTKRRVAGYARVSTDSDEQFTSYEAQIEYYTEFIKSRPDWEFIKVYTDEGVSGTSTNRREGFKQMINDALLGEIDLIVTKSVSRFARNTVDSLTTIRMLKEKNVECYFEKENIWTFDGKGELLITIMSSIAQEESRSISENTTWGKRKQAKDGKVSVPYSNFLGYDKGPDGNMVVNEEQAELVRLIYALFLQGKSPNGIAEILTEKNIPSPGRGKQWVSSCIKSILQNEKYIGDALLQKSFTVDFLTHKQKVNEGEVPQYYVEDHHEPIVSKEMFALVQTEMKRRDGMPGRRNRRRMLSGRILCAQCGSWFGEKKWHPNSKYQKVVWQCNGKYDKAHSQCTSGNLIEQDAQRMFVIAVNRLLKDSSSILETQKLVYDTVFDTAGLERERTALIADMSVTAELMERMSSGQPSSRSNGYAHTQEYQALQIRYEQAEKRKEELDNTIQDKVAKKALATSFFDNLKKQNSQVVRFDEDLWSGLVDHLKVYSPNDVRFIFRDGSEIKVDLSEEEKKRHPLTEKQMAEISSLRRDGMSYAKIGEKLNLPRGQVRSFCLSRTSENEAAVQEDGEHVLCKTCGKELEHTPGFRKKIFCSDGCRQDWWNRYAKFKAGEGRATNKVTCQNCGETFVTYGTNRKYCSRKCYTEHRGQEGDSRD

SEQ ID NO: 11670 - protein, 434 aa, synthetic construct
MRTIKLIQKPKQPATINRKKRVAAYARVSTVHERQEHSLESQVDHYKRLIQANTEWEYQGIYIDDGVSGTQISGRTQFQELITKCEQGMIDIVLTKSISRFARNTVDLLETVRRLKELNIDVRFEKENIETISSTGEFLLTVLASFAQEESRSTSENLRWGVRKRYEKGISLHHRVYGYRWTGKELVIEPTTAKVVRKIFRDYLKGKSMKRIADELNNRSIPHFGNPFNDVAIHTILHNERYIGDTLLQKTYCVDFMSHPRKKNRGEHPMYYVEDTHPPIIKREIFEAVSREIDRRRELGVYNMPKVSRRCFTGKIICEKCGNNYIRTYKTPTNANWRCKSNRRDGIKGCRSIGINEEQLKILSNFMLGLDEFDEQAFYKEVDHISGDGEGSYTFHFRDGRQINRFWPSREKAYKAAIDTRRKTNDNGAHAWQR

SEQ ID NO: 11671 - protein, 554 aa, synthetic construct
MKKNKNEKKETSNKIIDKEIAMNSMKAVTYERVSSKDQEKEGFSIPAQQKLLMLYAAENVLHIIKDFVDVETAKQAGRAEFNNMIKFLKTNQDVKIILCEKTDRLYRNFKDYVLLEDLDLEIHLVKEGEIISRDSRSHVKFIHGIKVLMAKNYIDNLSEETRKGMREKAEQGYYPSRAPLGYDNDPEIHQIKPDPEKAELVKKLFEWYGTGEYSLKLLAKKAYAEGLAYRKTGNKLTPGTLEVILKNPLYYGEFRWGGKLYKGHHEPLITRELFERVQEVFTRLNKPRVKKHDFAFAGLLKCGHCGCSITAEKKIKPSGRQYIYYRCTGFRGNCGEPYMNEETLSEKLGEVIRNIHIDDRILEWTKEALKLSHKDEKEYHQNMIDSLNKELSKIQGRITKIYEDKLDGLISNDLWEELRAKYTREQERIQVALKAHLNANQSYYDEGIRILELANKAYSLYLRQNHQERAKLIRTVLSNCSIKDGNLYPTYKKPFDMIAKGLSFANWRPQRDLNPCYRLERAMSWAGLDDGDALVSRVGFEPTTHALKGRCSTS

SEQ ID NO: 11672 - protein, 530 aa, synthetic construct
MVKVAIYTRVSSQEQVEGNSLENQLSDLKRWADYKEYEPLFYSDEGKTGTNDNREGLQQLLADAKAKRFEIVAVTKLDRFFRKLRPLLNCINQLDELGIVFTSITEGFDTKTEQGRFSLHMMGVIAEFERNRIVERTREGRYASYRKGQWAAGQPLYGYYYDRDTKILRIKLDEANVVKRIFHLYVYDRIGVERIARYLNEHKVLPRGGDTRHKTRQWYAGAVRDLISHPAYKGEHPLKIIAPKIIEPKIWDLAQQRRKDNRKLYIRKGSPWLLQGITKCGLCRHSLACGWAHARRRIYSCRGRLKLSNIDDRNKCKLRPIDAEWLEKEVWNKISKSLSNPRSLEQALDDYINGLQIRKSELEMIIQPIEKQLKQNDEKKQVLYERFIRGRIDKNIFKKLCDELDAEDDRLSSLKADIDPAQVEELNNTISWLQFWTKSKRELLLRLSFIHEDATEEEVHRQTLEVAQVLLGMADIGDPSLKDEVGGATTKRQLLDYLQCNIIAYDDRVEVKAILPVENILHQEYNPSYR

SEQ ID NO: 11673 - protein, 592 aa, synthetic construct
MSSSVASVIDTAPETRRTPIRRLASKEATMTLTMPIHDTDTSPLLTAVTYQRVSTKEQATKGGRDEGFSIPAQRQANARKAEDLGARIVAEFVDAGESARSADRPDLQRMLEYIATHQVTYCIVHKVDRLARNRLDDVEIHRRLVEAGVTLVSATENIDETPSGMLLHGIMSSIAEFYSKNLASEVSKGLNQKFETGGTPMRAPVGYLNVRKRDEQGREYRTVEIDAERAPLVRWVFEQYATGEHTVVSLLAEATARGLTTVPTPKRPSGPVGRSTFFSMLRNPYYIGIVRYKGAEQSGTHEPLVDVETWQQVQRLLDSRKIAAERRRTHDHYLKGSLFCGQCGSRMQLDYPANKQGVRYAYYVCSGRASKRKNCTRRAVPVGIAEQLVADCYRDISITEEQYAALAAQVETAFDERLASRSQELADLTENRKRLQNESDKLLAAHFADAIDLDTLKRHQDRIRAGLADIDRRLASEHDQHEGSRKHLSTALSLLVDCATLYARADDQGKRLANQALTNGIEISEDERATIKLAEPFAALAPTPASTDVRCSSTSEIVELRGIEPLTSSMRTKRATNCATAPCHRLSGARQL

SEQ ID NO: 11674 - protein, 535 aa, synthetic construct
MYADRGRGNIRLHASPLCCISLTIAVPAVPNNTHWRRAEVSERFDFAQVQAYSYQRFSSSSQASGDSLARQSSLAKAYADRHGLQLDDALTFRDLGVSGFRGRNAAHGELASFLEAVRVGRIAEGSFLLIESLDRLSRDNIIRAQAILTNLVIAGINVVSLADNRLYSEKSLADDPLGLIYALIVFIRANEESAIKSLRAREAWVRKRDFARTTVMSDRVPDWLSVQKGRILPIIDRVEVLRHIFGLAEAGATPEIIANTLNHEDVPRWRVDKPWTRAAVFTILNNRRVTGILPLYVSNYERNAECRTPIGVLEGYFPRIIEPEAFLRVWALSSTRRRGGNAAKGNIFANLLRCATCGADIRHRTVGGRGHAVLICAAAAIAHGCTAPEYAYAVLEKQTLIELTSWAAEGIVWVRSLDLKGGVNARGVHHRPLGNRALVIKHDRLLRSRASCEAIANALPPSAADYLRTRSGRRYLVNDLSTILTAAQSAMLTATGRVLTNASLRRIFSDATLDLETGRCAFRCGAASELLIEPQ

SEQ ID NO: 11675 - protein, 503 aa, synthetic construct
MRAVLYVRNSSGKQVAAGTHEGQLDEGRATAERLGAELVAVYADKGISAKSGNLAARGDFARLVADLPTLRPDICVVANVDRLTRSELFRELGAIWGPLQEAGVRVATAGGQVLDLGTPEGQLLAMFESWRAARENAARSERSKRGHARAVREGRAPCATPLGYSTALGETKEAAVVREVFERVAAGETCAAVARDFRRRGVRTARGGTWYASTVIAILRTDTYSTGRWAASPHAKLPALVSPELAAEALAHLPENQAAGRRRTKSIYLLEAIAVCGVCKSPIRIHGTIARRPSGRSYEYRYYACERRRLRIGECSLPWLRTDRIDELVWARLASWIDDPGLGRELVAGLDDPALVQAAADLEDAQRRLAQLDEWTAQTLERGRRGLLGVAAVDAELERIARARALAERQVSVWRDASQGAKRDLVALRELEAALVELRAACGVASPEERRELVQLLVSDGGIEVYPDELRITASVWSGGGRATAIQTPGQTIRAVLVAGIGR

SEQ ID NO: 11676 - protein, 529 aa, synthetic construct
MSRYCIYLRKSRADLEAEAHGEGETLSRHKTALLELARRMGITISATYEEIVSGETIAARPQMQRLLSEVGAGEWDGVLVMEIERLARGDTMDQGLVAQTFKYSGTKIITPLKTFDPQNEFDEEYFEFGLFMARREFTTTNRRLVRGREASAKEGKYVGSVPPYGYRKVKIPNDKGFTLEIVEEQAKVVRMIFEWYAEGAEVNDQKKRIGPYTIAVRLNELGIKSAGKKDYWTIYGVQNMLINPVYIGKIRWGYRKVKKTVTPEGMKKKSREFAQDGDYIVVDGLHEPILSEELFYKVQNLIAANPPTPIKYRHKNINPFAGLIFCAKCGHCMNYRRGYGRQPDYIGCYTAGCKNKASRFDLVEQRVLSILNSWVKDYSVDKAQIKHEADLNAELSNAISLAEKEIETLQDQLDKVYSFFERGTYTEKIFKQRSSAIEQQIMEIGEKIDRLKAEHQQVLERQNVQAEFVPSIKHLLEIYDTLEPVEKNKWLKQIIDRIVYEKNADGKYHNVDPGDFTIGILPRLPKRGS

SEQ ID NO: 11677 - protein, 580 aa, synthetic construct
MEFSKLTRVAIYIRVSTTMQAENGESLNVQRTQLTTYAQMMLNASPENIVIFEDAGYSGKNMDRPKFQDMMSQIRAGKFSHLLVWKIDRISRNLLDFSMMYKELKELGVTFVSKNEQFDTSTAMGEAMLKIILVFAELERNMTSERVTHTMIAMAQSGRWNGGRVPFGYTYRTEGEKKEKQIFEIDKGEAALVQEIFDLYEQERSIVREAKILNDRNAISRYGHEWSPVTVHLVLRNIFYVGDYRYNALREGDRSKPKPESEWIIVKDHHPAIISREQFARVQAILKANKRYRKDMAPASSRERIHIFGGLLFCGNCGKPLNNSVSNKKADGWQYSNYPCPTRRRSSNKCTGKSTSDPVVGEFVFNYILNMLNAQKGFKDIQTPVQLQDRLLFGDAFHNVISIDSDGLNSFFNLLSSGNISGAIYGKDVAVSKPKTAKVDPELVRLRKEKKRLERALDRLLNTYIMSDRPISENEYVRKRTDLETLLSDVNDKLGIAQSEEVQMALTDSEFLTKASQFIIGQKLSNRLYINYKNLAQSVDPSVLKTFVVSVIDNIVIYNGKVKSIVFRNGLAATFEYSSI

SEQ ID NO: 11678 - protein, 480 aa, synthetic construct
MATHKVAIYVRVSTTSQVDEGYSIDEQKAKLTSYCEIKDWNVYEIYTDGGFSGSNTERPALEQLIRDAKRKLFDTVLVYKLDRLSRSQKDTLYLIEDVFLENDIEFVSLLENFDTSTPFGKAMIGLLSVFAQLEREQIKERMQLGKLGRAKSGKAMQWSKTSYGYDYVKETGTLSINPYQALIVRKMFKWYLSGMSITKLRDALNEQYGQDKEWNYRTVRVILSNPVYCGYNQFKGQIFPGTHEPIISEDDFNKTQEEIKTRQRTAAQRFNPRPFQAKYMLSGIAQCGYCSAPLAIKLGMKRKDGTRLVKYECKQRHPRKTKGVTVYNNNEKCDSGFYFKDDIEHFVLTEISKLQTDSDYIDKLFSNTDKETIDRDSYQKQIDNLTAKISRLNDLYIDDRISLEELQKRSSDFMAERTALEKELDADTSLKAVERKKDIRRVLDTKDIFTLDYNQQKAIARALISKVKVTSKSIVILWKL

SEQ ID NO: 11679 - protein, 525 aa, synthetic construct
MAKRVTTIPATLNRFDSRPLQSVSKRRVAGYARVSTDSEEQATSYEAQVDYYTRYIKSNPDWEFVGIYTDDGITATNTSHRYGFKQMVEDALAGKIDLIVTKSISRFARNTVDSLVTVRELKEKGIEIYFEKENIWTLDAKGELLITIMSSLAQEESRSISENTTWGKRKSFADGKASVSFSRFLGYDRGPNGEFVINEAQAVTVRYIYKRFLEGLSTYQIAKELTQMGVKTAAGKDKWYTSSVLSILKNEKYKGDALLQKSFTKDFLTHKRVDNNGEVPQYYVEGHHEGIVTADQFEQVQAELYRRKNTDRYSGVGCFSSIIKCGECGSWYGAKVWHSNDKYRRVIYRCNKKYGKGCKCKTPHITEDEIKEMFIKAENELFSEKDEIIENTKTMMDMVCNTDGLDMELGDKVTELNIIAEQMQTAIAENSRTAIDQNEYERRYADLTERYNTIKSEYDKISEQIESKKAQRELFKGFIRALEKQGALVEEFDEGLWSSLVKEVVVNGKDDIRFIFKNGFEIKTR

SEQ ID NO: 11680 - protein, 599 aa, synthetic construct
MQVKVIKKIDGKLDRRTGKIITDRLRVCAYCRVSTGDEEQINSYESQKKYYDEKINSNSLWVFAGIYADEAITGTLDYKRNEFMRMITDAMEGKFDVIITKSISRFARNTLDTLKYVRRLKERNIAVIFEKENINTLEMSGEFLLTILSSIAQQESESISGNVKLGLKMKKERGEIVGFKHCLGYDYDNDSHEIKIQQDEAEIVRHIFNRYCEGAGSTIIARELTEAGYVPPKGGEKWADSTIRGIIKNEKYKGDVLQGKTFTIDPITHKRMINKGEEDKYYIENNHEAIVSAEVYEKAQSILEKRSGAIETGRRKGNYSRKYTFSSRVFCGFCGSVFVRRNLYNNTNHETKVWQCMSYVKNGKKFCPETKAIRENVIENCFVEAYELLCQDNKEVINNFLNRIDGFLRENNTKSMLQKLEIKKQGIKDKINSLINLMIDGTIDKETFNKKKIELNKKIKKIEKDQELFKCQLDDENTFDFGVEKIRKVFDKETKDFRVFDKDIFEALIYKVVIGDYDENGNKDPYVIKFIVKSGIENVKDKIESKVIENILNKENLILDFYSWQNYVSFEKQADGSLRKKLETKIRVKVELNSDNTTQ

SEQ ID NO: 11681 - protein, 522 aa, synthetic construct
MILLSCKNRITGKEEKMVVTEIQPTKKNDEKIRLAAYCRVSSDSSDQMNSFAAQIKYYTDYSKVHTEYELVDIYADEGISGTSLKKRDEFKRLIRDCENRKIDCIITKSISRFARNTSDLLTVLRMLKTLGVRVYFEEQALDSDKMNAELLVTLPGLAAQQESINISDNMRWSYRKRMESGDFNTTYPAFGYRISNNELIVNEDEAKTVRTIFALYLQGMGKQAIANTLNENNIPSRKGKWHCCSVDYILNNERYMGDALLQKTYTTESFPFVRKKNRGECAKYYIENSNVAIISKETFNAAKELQRRKSVQHSNASYPLSRVIRCCECGHNYRRIVTNNKVYWGCSYKASLKTDCTTQTLLESDIYSAYLAMMSKLKKHKSEILDNMINQLEYIEDTTNPNQASISAVDKQIADLSTQNLMIARLRTKSILSESEFSKQALEINSKISKLRSKRKLLLSDDSAEETICNLKHLSEIIDNFDYRDGFNEEMFSDTVEQIKAGYDNKLVFTLSGGLELTEIVK

SEQ ID NO: 11682 - protein, 544 aa, synthetic construct
MEQKVLQRKVNYIAPTLNTETESETAYRQIRVAAYCRVSTQMEEHLNSYEVQVKHYTDKINSEPKWFFAGIYADKGISGTSAKKRDEFMKMIRACKRHKIDMIITKSISRFSRNTLDCLKYIRILKELNVDVFFEEQGLHSKDAGAEFYITIYGSIAQSEAENISANVRWGKQQSAKEGKAAFSYNSFMGYKKGSDGKPEIVEGEAKIIREIYDKYLEGDSIRKIADYLNDTQIKTPTGKKVWYYGTVKSILSNEKYKGDALINKTYVIDCISKKVKRNDGERAQYYVENNHPAIISPEKFNRVQEEMARRSSKKKVKQVGTKTELGKYSSKYALSELLICGECHTPYRRCTWTTTNGEKKIVWRCINRLDYGKKYCHHSPSVEESALQNAIVQAVQNNIGKCSEVLKKLKQHIRIGLSGEETEDKTIDIQIEIARLDKEYADLLNRITSDMKNAEALESQLEEILIKKHRLQNELQIYENASNRQANTKTRIDEIFQIIEGLKYHPMEFNDVIIRQIIDCVIVESKEKIKVVFVGGYEILQSI

SEQ ID NO: 11683 - protein, 548 aa, synthetic construct
MANKTVKKIEATKPTLSAQYSTFTRKRKVAAYARVSTAKEEQENSFEAQVSYYTQKIQANPEWVFVEVYSDEGITGTNTKKRDGFNRMIEDALAGKIDLILTKSVSRFARNTVDSLVTIRQLKEKGVEVFFEKEIIYTLDAKGELLLTIMSSLAQEEARSISENTSWGRRKSFADGKVSLGYSNFLGYDKGPDGELVINEEQAKIVRRIYSEFLAGKTPGGIAKGLTADGIETPGHKKVWQASTVLNILKNEKYYGAAILQKEITVSYLTKEKRPNTGELPMYYIEKDHEPIVSPETFQMVQEEMRRRREAGSNMQCVSIFSSRIICGDCGGYYGRKIWHSSTKYTAWHWHCNAKFQKRKYCETPTLKEESLEETFVEVFNSLIADKDEIVENYRLCIDAVTDDSEYRRQLGDLNNGCGEVQTLIRSLLMTYSRQDTADDIHEKLKEYEERLDTMARLKQELDLKIAACAAKRVQITGFLNELMKHDAPLAKFDPLVWQAVINYATVNRDCTITFTFRDGTEKTVPIKNGVRPYTKRNKPQEVDGNDG

SEQ ID NO: 11684 - protein, 490 aa, synthetic construct
MTDKNLLVITPHRKEPGKQRIAAYCRVSSRSDEQLNSLTNQINFYRSLFENDDTVVFVGIYAEEGLSGTQAESRPQFMKMIEDCRSGLIDCIRTKSVSRFGRNTVDTLIYTRELRSLGIDVFFEKENIHSTESSGELMLTLMAAFAESESETMSENIKWGKRRRYEQGITGSITLNGMYGFRQNKGIVTIVENEAELVRRIYKDFIDGYSYCEIADRLIADEVPTRMPGASWAKTTVQNIIRNEKYCGDCLFQKAFIANPITHQQVRNNGELPKYLVEDCLPAIVDKETWKLAQAVAARHTPHRQAPNERYPFTGKLFCGVCGKPYYYYHYTTTNKKPLAAYRCMSHKTQSAVEVPGQTYTPPHKATFNYNASAKLIAYRERYCKPPKERQMLCTDVRIPTDLPQKAFCRAWNLIVAKKLRYQATLRSTVDNAEDILVRYRAEEMCLLIDEIGKINEFSYPLMLKTFDRVVVNANGKLTFIFQSGIKITV

SEQ ID NO: 11685 - protein, 434 aa, synthetic construct
MKKTIVNIAPAVAETPRTKRVAAYARVSCGKDTMLHSLAAQIDYYRDYIMMNPEWRFAGVYADESKTGTKDNREQFQLLLTECRSGNIDMVITKSISRFARNTVTLLETVRELKSLGIDVFFEEQNIYTMSAEGEVMLTLLASFAQAESLSCSDNCKWRIRKGFEEGRASTCTMLGYRLVNGEITLIEEEAEIAKRIFDLYLAGYGLQKIANTLNEEGMYSIFGNEWHPTTVRKVLTNEKYCGDLLLQKVYRENHLTKRKCHNTGELPQYFVEDDHPAVVTRQIFMAVQDELKRRAKEKTQPVGSKSSFTGKIRCSCCGKNYRRKTTPYNIVWCCSTYNSKGKKYCPDSKVIPEETLKRVAAEILKTDGFSDEAFETQICTIEAHPGNLLRFIFTDDSTTDYVWKDRSRSESWTDEMKAAAGRKTKERNANHGK

SEQ ID NO: 11686 - protein, 601 aa, synthetic construct
MEVEIIKAKGAGEDTSTGRKIDRLRVAAYCRVSTDDEDQIKSYNSMVRYYTDLIKSNKQWVFAGVFADKAITGTKTDKREEFQLLIQECLSGNIDLVIAKSIPRFARNTLDTLKYVRMLRERNIAVYFEVEKINTLKDGEFLLTILSSVAQQEVENTSAYVKKGLKMKMKRGELVGFQGCLGYDYDVVTKSLSINEEGAETVRYIFDRYVAGAGSTMIARELNEQGISTVKGNPWTSSSVMGIINNEKYKGDILLGKTFTVDPISKRRLENLGEEDRFYIKNHHEPIVSEEKFARAQEIRERRNGGRKKGVAPGKREKFSRQYAFSCMLECGFCGANLSRRRWHSSSKYTKTIWQCVESTKHGKRFCPDSKGIPEQVIEDAFIESYRMLCTDHKDVLEEFIKRVEKTLSEDSIEDKIEKLNRSVYNIQYKRKKLLENYLEGVVAKDIYEETDVGYEKKLSETKAQLSMLEQQYDNEGSLQRRLADFRKALSKNQILEEFDRGIFESIIEKVIVGGYDENGEKDPYKIIFIYKTGFKNEIGNAKERFGKKSKAVEKAKEMCSHIVDGVKDVCSYVSDNTCGDCVPLEQPKTRYHGKTQRGYG

SEQ ID NO: 11687 - protein, 502 aa, synthetic construct
MKTAVIYARYSSDKQTEQSIEGQLYDCYNYAKANNITVIGEYIDRAMTGRNDDRPDFQRMISDSAKHTFELVLVWKLDRFARSTEDAAYNRGKLKRNGVRLLSIKEDFGDSSAGDLMMHVMESFNEFYSADLREKTVRGMHQSALKCQSTGGQIPIGYKIEGKKYAIDEATRFIPETVFRMYAEGKRLAEIARYLNERGYRTRMGRKFTTGSFYTMLSNEKYIGVYKYGDVRIEGGYEAMIDPVLFDAVQKKLVENKKRAPKISERENFYLTGKLFCGHCGEPMNGMSGNSTKGKHLYYRCNGVRKHTGCDKRTERKEELENEIIGAIQRAFANADPEELTRKVIENYEKNSRPADQVKVMKAELQKITNKVDNVVNAIAEMGGNETLYTQLRQLTEQKEQKETEIRIAEHKADDMPTVELVKKILDLIQNADTMTDEGRQLLIDGAVSRIYVYDDSLDIYFNGGKNTEIPLNPANKDDVSDNSFACCKEWGSENEKKQKKS

SEQ ID NO: 11688 - protein, 490 aa, synthetic construct
MNVLDNVVDLYVRVSTTEQAEEGFSVGAQEEKLRAYCKAYNYQINAVHVDPGFSGATMDRPALKQVIRDVENNHCKKVIVWKLDRLSRSQKDTLILLEDVFAAHDCHFVSLMESFDTSTPIGRCMVGILAAFAQMERENIKARTMMGRQAKVKQGHYSGNKPPIGYAFNTASDGSVISNDLIVDPYNAKIVQDIFRWYLEGYSLNGIAKRLADAGTGSYAWQHSTSIRRILSNPVYIGKVKLNNELYEGMHEPLISESDFNEVSCMLAHQRELHKRPAASYQTKNGCRSANLLSGLLYCGDCGARMYARKVYKGSSIRKYMCYSVAKTAKSMIRSDCCTNREHPYTVEQLDEIVLNEIKKLALDKAQFSRIASKSDTVHEDAKIYNERLEELNKQIKRLMNLYQTGIIDLADISDRLQALNDEKLGVQSRLDELKEADNSDAKLKAWEQLESFPAILDAGDVQQIHRIVNALIDKIVVLNRDVTIYWSFS

SEQ ID NO: 11689 - protein, 502 aa, synthetic construct
MEIQIREGSREQKRKLKVCAYCRVSTDADEQENSLENQIRHYETVIKANPDYEYAGVYSDFAISGFKEKRPGLQKMLADAEKGKIDLILTKSVSRFARNTSIVLEATRKLKELNVGVFFELQNINTLSGEGELMLTILAAFAQAESESGSAGAKMVYQRKYEAGIPVQYLERSFGYTKDERGVFVADEAEAVWVRKIYEMAADGYTPASIKRYLNENGVKTVGGVQWVDSTVFRLLENEIYKGDYIMHKHFVNEERKLVRNRGEVDAWYIEDDHEAIVSPELWQKAQDALVAKRDYLAEGSVIEEFTEENYPYMNKIYCAKCGYPLYKRIYSKGNRLNWGCSGTKRYGKTFCDGINIPDGVLRSAWHFKENTYIAEKASDKGVKEFTYLKEQSWKRRHKKKQPPAIPENTEAEYPYREKIFCALCGSRLVRYVNPQSHKVTWVCSRRKRKGKDACDGTRVPDTIIKGWGEIKKDIYIQRKDDKNGKKRYSYTSKKPEGADRA

SEQ ID NO: 11690 - protein, 524 aa, synthetic construct
MAKKVMKIPATVSQFTASPIDSRKKRRVAGYARVSTDHDEQLTSYEAQLDYYTTLIKSHDDWEFAGMYSDEGVTGTSTKKREGFQTMVADALAGKIDLIITKSVSRFARNTVDSLSTIRELKEHNTEVYFEKENIWTFDSKGELLITIMSSLAQEESRSISENVTWGHRKRMADGKVAVAYSRFIGYDKGEDGSMVINEEEAKVIRLIYGEFLAGLSYHAIADRLTALGIKTPGGKSKWSQSTVKSILKNEKYKGDALLQKSYTPDFLTKKQVVNNGEVPQYYVQGSHEPIIEPEIFDRVQDMIKQRASKRGYSGVTIFSSRIYCGECGAAYGSKVWHSTDKYRRVIWQCNAKFKDKKHCSTPHLTEDEIKTAFVRVANKLVTDRTVVLKELREIQRTLTGTDELETEQKQLAEQMNADADAVQELIAQNARVAQDQTEYNLRYDALVSRFDKTKARYEQVTAEIAMKGVRRREFGRFIKSVENLPEMINEFDEALWGSLVEKVTVYSKDKIVFTMTSGMEIEV

SEQ ID NO: 11691 - protein, 595 aa, synthetic construct
MRKITKIEPTAPVVKQKKRVAAYARVSMDTERLQHSLSAQVSYYNDKIQKNPEWLFAGVYADNGISGTGTAKREEFNRLLADCEAGKIDLVLTKSISRFARNTVDLLETVRYLKEIGVEVWFERENIRSFDGDGELLLSILASFAQEESRSISENCKWGIRKRFEKGIPNGHFRIYGYRWEGDELLIVPEEAAVVRRIFQNFLDGKSRLETEREFAEEGITTRDGCRWVDSNIKKVLTNCTYTGDLLLQKEYISDPIRKKRRQNRGELPQYFVPEHHEAIIDRETFRYVQEEMERRKELGALANKSLNTCCFSGRIKCPHCGCSYMHNRRTKNGSYQEYWNCGSRKKKKVGDGCPVNGSISQKALEKACAEVLGLEAFDEDVFLARVARIEVPESYTLDFFLKDGTVIRKDAPNTGHRDCWTPEYKARASAYRREHAAMGKKGVSCFTSKIKCAECGCNFRGQTQSCLSTEDGKMKHWRCSTGSAVCGTPGLRDDLLRKLAAEVMGTEAFDEEQFLEQIDRIVVSKEKELTFLFCDGWEEKRAWEYKRQMPPWSKERRDSFDRKPRRSYTEEERKAASERMKKLRKERGSEWQKR

SEQ ID NO: 11692 - protein, 504 aa, synthetic construct
MEIQVLEARSSKGYRKKVCAYCRVSTDALEQENSLENQIAYYENLIQSNPEYEYAGVYYDFAISGYKEKRPGLQKMLTDARNGKIDLIYTKSVSRFARNTAIVLKASRELKELNVGIFFELQNINTLSSQGELMLTILAAFAQAESESGSIGAKMVYQRKYEQGIPVQYLERCFGYTKNEKGEFVPDTEQAKWIVKIYEMAAEGYSLSTIADEMNAAGVKTDKGAGWVESTVKRILENEIYKGDYIMHKNYVNEERKLVRNRGEVDAWYIEDDHPSIVSRQLWDKAQEARKKKRDYLDMDCQIREVTEENYPYKGHLFCAKCGSPLTHRIYSNGNRMSWDCSGRRRHGKEFCDGIHVPDTAVRQWKFDGNIYISVKDSRKSIKEFSYTKESSWSRRHKKKEFVRDVPELTEENYPYYRSIFCAECGSRLVRHIKKHGDIVWECNGRKRKGAAYCEGVRIPDRVVQAFMPIRKAIYIKERKGRNGTKHYSYSCKKPERATREEQD

SEQ ID NO: 11693 - protein, 510 aa, synthetic construct
MPNAVIYARYSSHAQRDASIDQQLSVCRAFAQRGGIDVVDVYTDRALTGTNDNRPGFRRMLADAAKGGWNYVIVYALDRFSRDRYDAATSKHKLKQAGVKLLSATEPIAETPAGILMESMLEGYAEYYSRELAAKVRRGQMDNAKKCMVNGSLPLGYCKGPDGRYAVEPTEAAVVQEIFRRVGAGEPLANIIDDLNDRGLRSKKGQPWNKSSFNRMLTNERYTGIYIYQDIRIPGGIPAIVTQEEFDAVQRAAISKKNPRRAVMPDAPMSRRRQDGIYLLTGKLFCGECGSPLIGVSGTARNQSLHHYYACKGRISKTAPGCGLKNIRREDIEYEIAAAIKQTMLTPETIQAIAQATYDYQCEAYANPDLTLLEDQLQETNRALKNLMSAIEQGLFTPTTRDRLLELELQKDNLNSRLAVAKSRAADLPTRDEIIAALDYYANGDLSDPLYQEALIDTFLVRAYVHSDHYDIYFSPDAKTKAEFPIGFTDATRPVFALLNGSHSLPEGPP

SEQ ID NO: 11694 - protein, 435 aa, synthetic construct
MQIKEISATKLPNIGIRRVAAYARVSSDKDAAIHSLSSQISYYNEYISNHVGWEFAGVYADEGITGTKDNRPEFMRLLEDCRKGKIDLVITKSITRFARNTVVLLDTIRELKLLEIDVFFEKENMHSISKNGELMLTLLAMYAEEESRSASENQKWRIQKMFEQGRPNTGRMLGYCLKDGQLTIIPEEAEIVRMIYEDYLSGMGRLAIANKLNDLHVPTVRGGKEWREGAIYLILRNEKYTGDMILQKTYSEDFRTKKRIINNGERRKYLVEKSHESIISKTIFAQVQEEISRRQSCIKMATHTSKGQFSGLLTCSECGKHFRRRIANASSKYAKPAWLCSTFATKGKRYCNNKQILESILLDKTKEALGLCSLDGVDLRDYISEIICHKEQELTFVLTNGNEITIAWSNSSRRNSWTEDMKQAARQKTLERSSQ

SEQ ID NO: 11695 - protein, 438 aa, synthetic construct
MARTIQQISFPAPMRPCLKRVAAYARVSSGKDAMLHSLSAQVSYYSALIQKHTGWLYCGVYADEAFTGTKDSRDGFQSLLAECRAGNIDMVITKSISRFARNTVTLLETVRELKAMGVDVYFEEQNIHTMSADGELMMTILASYAQEESRSASENQKWRIRRGFERGELVNLRFLFGYKIEKGCVAVDPEKAAVVREVFRRALEGASLTSLAIDLNRRGFTGVLGGKWNSMRIREMLSNEKYLGNALLQKQYRNNHLEKKEIPNRGELPQYYAEGTHEAIIDQATFDAAQELLAGITENSPVKRPRRRSAFTSMITCTVCGRNYKRCTGGKRHFWNCPTAVQTDLPSCGTSQIPEKLLYDLAAQVLGLAQFDEGVFLERVKGIDALPDKTLVFHFYDGSTVARHWEYTSRAKSWTPEMKEKARQRALAQRRGEKWQEP

SEQ ID NO: 11696 - protein, 525 aa, synthetic construct
MARAVTVIPPTIQPITHLARNAVVRRRVAAYARVSTSSEEQLTSYEAQVDYYTRFIQSKPEWEFVKVYTDEGISAVNTKKREGFNQMVRDALDGKIDLIVTKSVSRFARNTVDSLVTVRKLKEKGVEVYFEKENIYTLDSKGELLITIMSSLAQEESRSISENVTWGQRKRFADGKVSLPYSHFLGYRKGADGLPEIVPEEAETVRWIYSLFLSGKTTSSIASFLTREGIPTPAGKKRWAASTVESILKNEKYKGDALLQKAFTVDFLTKKQKKNEGEVPQYYVENSHPAIIDPAEWKLVQRELERRKSIGRSYSGNSIFSSRLVCGDCGGYFGSKVWHSTDKYRRTIWRCNSKFTGEEKCQTPHLTEEEIKARFLDAFNTLVSDKERLLDECRTMQAALTDTRSLDSEIVTLLSEMEIVAELTKRCIEENSTTAQDQAAYLERYNGLAERYETAKAKLEKLQAEKAQREAKAEDIGGFMFELAEYGKPITEFDDRLWLTVIDTVTVHRDGRLTFRFQTGHEIIA

SEQ ID NO: 11697 - protein, 491 aa, synthetic construct
MYLRKSRAEEGQSTEEVLAKHRAALEELADRLGLPVDGVYEEVASGEKLYARPEMLKLLERIRAGEVEAVLCMDIDRLGRGGMADQGAILDAFRESGTLIITPEKTYDLTNDVDIEMTEFKAFFARAEWRAIRKRMRRGLMQTIEAGGYTANAPYGYRRCRIGKLPSLEVIPEEARFVRYIYERYLAGIGAQTIAQELNVMGSAPRRGAEWNRNTVRHVLRNPTFAGKVAWNRVKHYRPGAHGKDKHHVVYTPEGEWLMVDGVHEAIIPWDTWLEAQERRKQRYIPPSNTGQRANPFAGIIRCSKCGNNMQRMGTNKGEPYLLCTTKGCAAGAKFEYVEERMVELLYDELARLRLLIDSGAAPNVDALEAALAAAQREQERVQARIPRLYEFLEDGTYDRATFRSRLEAAEKELAELANKRADLERQIDERRRSDPRKAAAALENLVQLYPTMSPADKNSALKALGVEVTYTKEKKTKPRDFTLELQLRDF

SEQ ID NO: 11698 - protein, 568 aa, synthetic construct
MKKKFSSVPDPDIQDAVIYARYSSHSQRDCSIEQQVADCELFAQQNGLRVVKIYADRHLSGTTDNRPQFQQMLKDAAHGHWPFVICWKIDRFARNRYDSATYKYKLKKAGVRVLYAKESIPDGPEGILLESVLEGSAEYYSASLAQNIRRGMRFNAENCKVNSGSIPFGYCKGPDGRFAIHETNAEIVRDIFRKAAAGVPFVDIATELNNKGLKTSRGGRWNKNSFVLLKNESYIGVYHFSDIRIEGGMPAIIDPGTFLAANERMNANRRVRGRHHDGGDYLLTGKLKCAHCGSYMIGFSGTAKNGESHYYYGCQKRRRERACKKANVPREWIEKVVVKAALDYVLQPDVMEWITDAVMEYQEREAASSQLAALTAELEENQKATDNVMRAIEAGIITATTKQRLLDLETKAKDLKRAIELEKLSHVRLEREQILYWLEQFQGGSLQSQEFRRKVIDTFVSVVYLSDDHLRIAFNYSGQNRSEADFNLIMDAETASADYPTNSLSLPLCPPHKKNPNLFPSGKGSDFSFAAFLTASFSFPVSAARLFSRCRLHIRSGCRLFRQRGGRE

SEQ ID NO: 11699 - protein, 514 aa, synthetic construct
MTAVIYARYSSDSQREASIEGQLRDCKDYAEKNGITVVGTYIDRAYSAKTDDRPDFQRMIKDSGKKIFDVVLVWKLDRFARNRYDAVNYKYQLEKNGVHLVSAMEPISQGPEGIMVESMLIGMAEYYSAELALKVARGERENALQCKYNGGMVPLGFTIGKEDRLYHIDPETAPIVQEIFRRYADSEPAEKIAASLNERGLRTRTGKPFVKNSFFQIFRNRRYIGEYRYKDIVTPGGIPAIVDQDLFDRVQQRFEQNRIAHGRPAKEDVSYLLTTKLFCGKCGTLMGGESGTSHMGNTYYYYKCGNAKRHGKAHCDLKAIRKEPLERFVVDTAIKVIFSDEIIERLIDLVMEAQQQENTRLPVLKEQLRDTEKRLANLLEAIEQGILTPTTKQRLDELEARKEALNTSILEEELKKPVLTREWIRFWLEKFRKGDVGSTEHQRQIIDTFVNSVYVFDDRVVLNFNFTDDAKTVTREEVLGSSAVDNAPPHKNQANPTIYFVGAFFVLIMPLPER

SEQ ID NO: 11700 - protein, 491 aa, synthetic construct
MDMQGKARTAVVYARFSCSKQREASIDDQLRECRAWCEREGVEVVREYCDYAVSGRTDERPEFQRMISSAGESDLVVVYMMDRFSRNEFDAPIYKRELQRHGVQLVSALERIPESPEGIIYEKLLEGLAACESRKTSVRTRRGMEGNALKSMPNGGQRPYGYRNVGGKYIVDEAEAAVVREIFERRASGETNHHIAADLAARGVVNAQGRPMRDQVVGKIIRSRRYVGEYRWGTIVTPNAFEAIVDEALWESANAKVAARSRDRERQDYREYPLVGKALCAVCGHGLSGESAHGRGGVRYDYYTCSAGGARNHIRRTRAQWLERAVVQGIRAMLSDRATAEHIAGMVVESKTGAAVERRRAGIQADIRKADDAMRNLIRAIEEGLYTPAMRERMDELQAAKAHAEAELAMVQETTVTVEEFTEFLLSGTSMSHRQIIDCFVWSIVLDNDDAVVTLNWDTRQAQKNEPARIELVRKNSEWLPEQGSNLQQLG

SEQ ID NO: 11701 - protein, 516 aa, synthetic construct
MARRKKVSPGNRLVAYYRYSGGSQQTEQSIEGQRRDCEAYARQHGLTIVHEYIDRHISGRGVESRLAFQQMIADSSKHLFDLVICWKTDRFARNRYDSAVYKKKLRDNGVRILYAAESSVEGPEGIILEGLMESLAEYYSAELAQKMRRGMRESALKGKAINPNRPLGLTTDEHKRFIIDEKNAPTIRFIFEHYAAGESSASIVDQLNAAGLRTSKGNSFNKCSIPRIIQNEAYHGVYICKAYDVRIDGAIPAIIDDDLWKRAQKMLTLNKQHRAPHSSHADYLLSGKLFCGCCHSLMRGISGHNCRNDVYYYYACGNKADGGTCKKKNIPKDVSENLVVNAICENILRPDTLEDLADAIAAAQQAEVNQPDPERAMLEQNLADVHRKINNIIESIENGTASSRLSARLADLEQQESTLNYQLESLKEVHPPVLDRERILFLLEQFLISPNERTEDYNRRIIDTFVNRIEITDTEMLIYFNLSEASASEKQKNSQPNSCSTGNHLVRVARIELTAS

SEQ ID NO: 11702 - protein, 528 aa, synthetic construct
MSERNVTVIPATLNAVRRIDPVVKKRRVAGYARVSTDKDEQFTSYEAQVDYYTRFIMSHPDWEFVKVYTDEGISGLGTRKRDGFNEMIADALSGTLDLIVTKSVSRFARNTVDSLVTIRKLKEKGVEVYFEKENIYSLDGKGELLLTIMSSLAQEESRSISENVTWGQRKRFSDGKITLPYKQFLGYDHGPKKDDPPVVNPEQATIVRRIYRDFMAGKTIGAIARELTADGIPSPSGKPKWSASTVNSILQNEKYRGAALLQKCFTTDFLTKKRKINEGEVPQYYIEHSHEAIIDPDEWEAVQEEIKRRKAIGRAYSSKSIFGAKLKCGDCGGWFGVKTWHSTDRYRTSIWQCNCKFDKGKDRCKTPHLTEEEIEARFIAAYNSMLTDKSAYLLGCETAREFLMDTTALDTEMEELLRELDVIAGLIRKCIDENSATAQDQTEYTSRYNAYVDRYEKAKARYDSLAANRQDKLAGAKAVERFMAVLDERDDPLTEFDRHLWIMTVDYATVHRDGTITFRFYDGTEITK

SEQ ID NO: 11703 - protein, 515 aa, synthetic construct
MKIKKIEAQPQEVKKLRVAAYCRVSTDNDDQKESLEAQKAHYETWIKRHSNWDFAGIFYDFGITGTKADVRDGLQALMYECRIGRIDYVLTKSVSRFSRNTTDCLSLVRELLSYNIPVYFEKENLDTGSMESELILSIISGMAQDESESISKNVKWTVQKRIEAGKYKFGYPPYGYGRDENGMMVINPEEAKHVRQIFDWALSGIGTFKIAHMLEEQGVPTRRGSAWAASTVKGILTNEKYYGAAMFQKTYTDSSFKRHRNHGEADSYFVSGHHEAIVSEEEFHKVQEIIEMHIKEKCIVRGTGKYNNRYLFSGIITCGECGDTFKRQTISSGISWCCKAHLKNKAKCSMMFIHEEAFKAAFVTMLNKLVFGGKQVLYPYYEMLRITNSDENIQRIQGMKQELQRYAERKDTIRQLRAKGIIDSVVYNQEIGSIDKQCEELRSKITALQQSDASAVLSETEALLRFSDSAGMQTEFSEQLFASFVERIIVYTRKSVGFKLKCGLTLKEELCTDTK

SEQ ID NO: 11704 - protein, 525 aa, synthetic construct
MARKITMIPQTINPQTRTAMDTRTKRKVAGYARVSTDYEEQITSYEAQVDHYTNYIQSRDDWEFVKVYTDAGISATNTRHREGFNQMVEDALAGKIDLIITKSVSRFARNTVDSLTTVRKLKEKGIEVHFEKEGIYTLDSKGELLITIMSSLAQEESRSISENVTWGQRKRFADGKVSLPYSHFLGYKKGEDGLPEIVPEEAEIVRFIYRSYMNGQTSYAIAKTLTERHIPTPAGKENWRQSTIESILTNEKYKGSALLQKKFTTDFLTKKTKINEGEVPQYYIEESHEPIISPEDFEEVQAEFTRRKKLGRKYSGSTMFSAKLVCGDCGHFFGSKVWHSTSKYRRVIWQCNNKFKGEHFCSTPHLYEDEIKIRFISAFAAFFQNREMVLETCRMLLEDLSDTSALDTKIEMLTMELNDIGTLIREHIQKNAESVQNQDSYNLRYDELTEQYERKKGLLQKMQQKRIEHQSRIESMASFLRTLEKTNEPIDYFDDSIWRTTIEKVTVFHDGRMVFQFVDGTEIEA

SEQ ID NO: 11705 - protein, 434 aa, synthetic construct
MARTIKKVEFLPKMPKLLNVAAYARVSSGKDAMLHSLSAQVSYYSEKIQKHTGWKYCGVYADEAATGTKDNREQFQKLLEKCRAGSVDLILTKSISRFARNTVTLLETVRELKDLGVDVYFEEQNIHSLSADGELMLTILASYAQEESRSASENRKWQIRKDFKEGKIGSITIFGYRRNADGILEIEPTEAEIVKMIFSDYLSGMGGLKIAKKLNEMGIRTAQGNLWTSPRIKELLSNEKYVGDMLLQKYFRNNHIEKRKMQNNGELPKYLVEDAHEAIIDRDTFQKVQELIAQRQSKFSHTGSKNRYPLSGMIQCGCCGKNYQRKVFKQGSAWICATFARRGKKYCPAAKQIPENILQSVLCEVLGLEKYDDDAVLKYIRQIIVPEPNELIFIFYNGKQVQKHWENPSRSESWTEEMKQKAKERSLQWHEKSQ

SEQ ID NO: 11706 - protein, 550 aa, synthetic construct
MKKFPIDLSCLTEEEISQFQEDPYTLYNGDQNVAIYLRYSSTGQSDQSIEGQLRDCRTFCKANHYRIVAIYVDRATTARKDVEKRVHLMEMISDSAKQNWEYVIVWKLDRFARNRNDSAIMKMRLRKNGVKVLSATEHLTDSPESIILESVLEGMAEFFSAELSQKVTRGMRESALKCHSVGGHIPLGYKVENHKLVVDPDTAHIVQEAFSLYANGESVAAICRKFNSAGYKTAKNTEFNRSSFKAMFRNTRYIGTYTYKDIVIENGIPAIIDKELFETVQRRLSKTATAPARGKAKVDYLLSGKLFCGHCGASMNGESGAGRHGKVYHYYSCYTKKRKLGCDKRPLKKDYIEGIVARDALNLLTDQLIDEIADMAIRQSEQDLINDTHIPQLTAQLSEVEKSIMNITAAIEKGIASETLMNRLVQLEHEKKTLNKEIKAEEKFVYRIDRDQIVFWLSQFKYGNIEDEDFRRRLIDLLVNSVTVWDEPDGYKITTAYNLTSCKTKTFRVEKNPAAEEATGFDFGESECAIPPQAIHCGGFLLSVGGWDVP

SEQ ID NO: 11707 - protein, 484 aa, synthetic construct
MNAVIYARYSCDRQTEQSIEGQLRECKAFAASEGIHIIGEYIDRAISGTTANRPEFQRMIADSRYKTFQAVIVYKLDRFARNRYDSAMYKSKLKANGVRVLSAKEHITDSPEGIILEGLLEAMNEYYSAELSQKIKRGMRENAIKGKTTGGNVALGYRIGADKQMEIDPAGASLVRRIFTGYDSGMTFTEICDDLNHAGYTTSRGKQFRIDTISRILANQRYTGTFQCAGEDAHCPPIIEPELFRSVQERLTESRHKHRHTQSPHEYVLTGKAICGTCGRRLTGRAGTSKTDKRYYYYCCPNKCCGWLPAAELERAVLDAIAQYTTPEACEQIANATYALYQRSTHENADLTAAQRRLQETEKKLENAVNAVLNGITSAALQATMQQLEQQKAALETEVRLLQTDAPELKLEHFQYFAHRLLEVQAEGTEKILQLLVNQVIVYKDRITVLVNLTDKTKTPPLEQVTAALRESSCSVACGGGDEN

SEQ ID NO: 11708 - protein, 535 aa, synthetic construct
MKKKQPNTRHGRAAIYARYSSHNQREASIEQQVKACRELAVRLGLDVVETYEDKAISGKSDRRPSFQRLLRDAEKGYFDCVLAWKSNRMGRNMLQAMTNEARLKDWGVRTFYAEEDFDDTAAGRFALRNMMNVNQFYSENMAEDITRGMMDNASKCLSNGALPLGYKAGENGRIVLDKAQAAVVQEIYTRVACREPFVDIAADLNRRGIKTKRGGPWTKSSFYTICRNERYRGIYIYDDVRVEGGVPRIVSDGLFYRVQKVLKVKKTPQSARHHTGAEDYLLTGKLFCGKCGRPMTGVSGTSRSGEMHYYYTCQKRRREHACDKKSVIREQIEKSVAQAIKQYMLTDEMIQHMADATMAYNARQEKDLHLQDLQGQLAAVKTSAANLLKAIEMGVITETTKARMVELEQEQGRLNAQIENARAELVPITRDNFVSLLHIYRDGDINDSKYLASLFETFLVRVDLYDDHFLIWFNPLGQKTPADIPIISIENGDVDGIFDECRSKNVFDWGGEWSTKIKAPAVPRRVFLFWCSVSC

SEQ ID NO: 11709 - protein, 502 aa, synthetic construct
MEIQIREGSREQKRKLKVCAYCRVSTDADEQENSLENQVRHYETVIKANPDYEYAGVYSDFAISGFKEKRPGLQKMLADAEKGKIDLILTKSVSRFARNTSIVLEATRKLKELNVGVFFELQNINTLSGEGELMLTILAAFAQAESESGSAGAKMVYQRKYEAGIPVQYLERSFGYTKDERGVFVADEAEAVWVRKIYKMAAEGYTPASIKRYLNENGIKTVGGVQWIDSTVFRLLENEIYKGDYIMHKHFVNEERKLVRNRGEVDAWYIEDDHEAIVSPELWQKAQDALAAKRDYLAEGSVIEEFTEENYPYMNKIYCAKCGYPLYKRVYSKGNRLNWGCSGTKRYGKTFCDGINIPDGVLRSAWHFKENTYIAEKASDKGVKEFTYLKEQSWKRRHKKKQPPAIPENTEAEYPYREKIFCALCGSRLVRYVNPQSHKVTWVCSRRKRKGKDACDGTRVPDTIIKGWGEIKKDIYIQRKDDKNGKKRYSYTSKKPEGADRA

SEQ ID NO: 11710 - protein, 464 aa, synthetic construct
MARSVTVIPARSQKVRTGHKAVQEKKIRVAAYCRVSTDQEDQLHSFEAQVEYYTKYINEHENYEMAGIYADEGISGTNTKKREQFKKMIADCEGGKIDLVITKSISRFARNTQDCLAYSRKLKNLGIGIIFEKENINTLDSTGELLFTILSSLAQDESRNISENCKWGIRTKFKNGEMHLNTFKFLGYDKDENGKLVINKEQAKTVRRIYRDFLIGINPAQIAKELTEEKVPGCLGQTKWYPSTVIGILKQEKHMGDALLQKTYTADFLTKRQVKNNGEIAQVYVKDSHKGIIDKETWNAVQEEFERREKFMQKHGTDRYSYGSECYPFCEKIFCGECGSLFTRHSWKSRGIIQWQCKNHRKDGKVACTNAYVDNADLEKGFVKAFNKLVTDREKYMEIWQQMKLDGTPLEKIRAGQMMEAVKNDPLTRFVPEIAQLVLCEVTVLGARKYEFFFLEGSRVKVSV

SEQ ID NO: 11711 - protein, 572 aa, synthetic construct
MASRIAEKLAAKKAAIYIRVSTHWQVDKDSLKVQRRELIAYVTLVLGITDYVVFEDPGYSAKNTDRPEYQAMMDRIRTGEFTHLVVWKIDRISRNLIDFAAMHDELQSLGVTFVSKNEQFDTSSAIGEAMMRIILIFAELERKTTAERVTAVMLSRASDGQWNGGRVPFGYSWSKETKTFSIVPEEAKAIRRMAELYEQYQSLLYVAKYLNDAGIVTKTGGQWTPTTVRTILTNPWYIGQYVYNVHSDGKGIEKRDSDEWITVENHHEPILNEDVFCRMKFLLTRNKRGGVPSHKTYVRKNIHIFAGLLRCGQCGSNMTANLDRRRANGFRPSQYACGSRRRKGTSCTNKYISDTTLGPFVLNYVANIIRASKNSSEATTPEVLERKLLRGEAFEDVASVSTDALGQLLDAFRSAGDAVEYRPQIAFSGDDNSIREIDTLRARRRKLDNALARLNALYLYDDEAMPEKDFVMQRGQITKQLEEVNARIEELQNQESSEELGDDFIGKASYYIMANKLIEDRYIDYEKYIRAIDPSIPRSFLQQIIDHIVVNDGRVTSITFKNGATHTFTYKT

SEQ ID NO: 11712 - protein, 525 aa, synthetic construct
MALLPRKPAKHPAKPKRGKKLEIEEPGVLYGRYSSHNQKDISVEQQFEKGYELAAEYGIRIIDTYADRAVSGRTDKRRDFQRMMTDAAKGKFRYVIAWKSNRMGRNMLEALINEARLQDLGVRVLYVEEDFDDTAAGRFAARSMMNVNQFYSENMAEDIKRGLYDNAANCMVANGHLPYGYKADETLHYAIDEPKAAVIREIFTRVSCGEAFVDIMASLNARGINTSYGRPWGRSSFQKILSNERYRGIYIYGDVRKEGGIPRIISDELYFKVQEVITTKKNPQGRHRVNGDYLLTGKLFCGHCKSPMTGVSGTGRSGNLHYYYVCQKRRTEKTCDKKNVRRDEIELQVAQAIKDYALKDDVIEWIADSTVAYNERKEAESKVGILEDQLAGTEHGIKNIMSAIEQGIITETTKSRLVELESERAAIKANIAAARADIVTVSRDDIISGLEMFRDGDVHDKKYQARLFDTFLVAVYAYDDDLRLVFSFSGNKNTIQIPIESAVNAVENNEAECSFKLCSAPPRTS

SEQ ID NO: 11713 - protein, 524 aa, synthetic construct
MAGAKNITVIPAKKRVGNTVTAEDKPKLKVAAYCRVSTDSEEQATSYDAQVEHYTEYIRKNPEWEFAGIYADDGISGTNTKKREEFNRMIEDTMAGKIDMIITKSISRFARNTLDCLKYIRQLKEKNVPVFFEKENINTLDAKGEVLLTIMASLAQQESESLSKNVKMGLQFRYQNGEVQINHNWFLGYTKDENGHLIIDEEQAVVVRRIFREYLQGASLKNIADGLMADGIPTATGNMKWRSDGIRKILTNEKYMGDALLQKTYTVDVLTKKRVANNGIVPQYYVENNHEAIIPRQLFMQVQEELQRRAHLRTENGKTKRVYSSKYALSSIIYCGKCGDLFRRVAWKARGASYNKWRCASRIEKGPKNGCDAEAISESEIQKAVMRAINKTLGGREEFLVQLQHNIEDVLNGDSTATLEYIDQRMAELQEKLVMCVNKNAEYDAIAKEIDALREKKAAVVTKDAEQEMLRKRINEMRHFLQMQTSRITEYDEQLVRRLIEKITVYDDKLIFEFKSSMTIELKR

SEQ ID NO: 11714 - protein, 520 aa, synthetic construct
MKNVTKINQVDFSIFKKTRVAAYCRVSTDSDEQELSLETQKNHYESYIKANSEWEYAGIYYDDGVSGTKTAKRDGLLRLMEDCEKGLIDLVITKSISRFSRNTTDCLTLVRKLLNYDVYVIFEKENINTGSMESELMLAVLASMAESESRSISENEKWSIKKKFQNGTYVISYPPYGYANADGEMVIVPEQAEVVKEIFSGCLAGKSTHIIAKELNEKGVPTKRGAKWTGATINGILTNEKYIGDALFQKTITDASFKRKRNYGEEEQYYCENHHEPIIDKDTFEKAKEAIRQRGLEKGNCSENTAKYQNRYAMSGKIKCGECGRSFKRRYHYISHGRSYNAWCCGGHIEDSSSCSMKFIRDDDLKRVFLTMMNKLRFGNDLILKPLLISITTSNSKKNIHSMEDIEKDMQSNEEQRKQLNTLLTRGYLERPVFAEAHNKLIMEYEQLAAKRDLLYRMDNAGYTMEQALSDMVSFLNGAEPFTEWDDSLFERFVEKVKVLSREEVEFELKFGLRLKERIA

SEQ ID NO: 11715 - protein, 505 aa, synthetic construct
MKITAIAPKDNSRKKLKVAAYCRVSTEADEQENSLNNQKDFYEKHIRSNKSYEFAGIYYDLGISGFKEKRPGFQQMIADAMNGKIDLILTKSISRFARNTVTTLKVVRKLKSAGVGIFFELQNLHTLSNEGELMLSIYAAFAQAESEDSSMNMYMAHQRRFKKGIPAIRVYECYGYRLNSDGEIVLDEIQSQVVKTMFELALQGIWVSKIRAYLDKNGIPSPQGKRWNDTAVNRILRNEIYKGDVMMQKTYIDADRVRHRNTGQKDRFYIEDHHPAIVDRFVWNEVQEVLDIRSMQLKQKLPKRSMGGNSHNKYSLTRMLYCPHCGSPLHHRVNSGGKYTYWCCGKKIKKGKDACIGITVPEDLTREWKITEEVTVFEEKDEFGRQHFSFMPKKEYEKSRKCPYEPTEKKGRDSHSIYPLSGKMYCGLCGSLMHHQIAWNGKGFWWCSKRIKKNACEGIKVPAEIADSWEFEGTITVMEGVDENGEKSYSYQSRAQTHHENGNKG

SEQ ID NO: 11716 - protein, 453 aa, synthetic construct
MKTATKVKKLRVAAYCRVSTDADEQLNSFENQVSYYTEYINSKEEYEMAGIYADEGISGTSTRRRNEFNRMIEDCEDGKIDLVITKSISRFARNTQDCLSYARKLKNMGIGVFFEKEGINSLDGTGELLFTILSSLAQEESRSISENCKWGIRKGFSDGKLHLNTNRFLGYDKDTNGELVINKDQAATVRRIYEEFMNGINPDIISMRLNEEQIPGVTGEAKWTCGTIWGILKNEKYMGDACLQKTYTEDFLTKKTTKNNGQITQYYIENDHDAIIDKKFWNAVQLEIARRRAFMEKYNLRTLGRYTDEQPFSNRVICGTCGHVSWRRTLTRSNGKFKVWMCGQRYRQKGVLGCKSKSVYEKSIHEAFVKAWNQIVENRDEYIQEWKENMKGENALLAFRSKQMMELTNSKPMKRISLPLVGKVLDHCIIYDDRICFILLDGTEITAEIKNKR

SEQ ID NO: 11717 - protein, 434 aa, synthetic construct
NRLMDDCRAGLIDRVLVKSASRFARNTADALSSVRELKSLGVTVAFEKEGFDTETSNGEMLLSIICAVAQEESLSISQNMKWGIHKRMRTGNYITNATPFGYTQINHQLVPEKNNAMIVNDIFKSYLSGMSINEIAEHLNTIYPKENSKWNPRTIHAILRNEKYIGDSLYQKTYTTDSLPLKRYLNTGQRSKYYAMETHEGIISKTDYEKVQNLLAKKSITGEIDRTCVFSKKIYCSICGAICSRKGPPTQGFVWCCRTHLQSKALCLLKSIREDELQQAFLSIYNRLQCNQKTILEPLVDDLLGLRHLQEQKYKKRLALGEDIQHLAKQKHNLTRIHTLGYIEEPQFIERSAAIEQQIRERKQQLSRNDMSNTSEKILQKTRLIQKKLSSTPPLELFDESVFKELVKKVLISNTAIQFELINGMKLSESRAAT

SEQ ID NO: 11718 - protein, 502 aa, synthetic construct
MEIQIREENSGQKQKLKVCAYCRVSTDADEQENSLENQIRHYEEVITSNPGYEYAGVYSDFAISGFKEKRPGLQKMLADACKGKIDLILTKSVSRFARNTSIVLETTRKLKELNVGVFFELQNINTLSGEGELMLTILAAFAQAESESGSVGAKMVYQRKYEAGIPVQYLERSFGFKKDERGVYIADEEEAAWVRKIYEMAADGYTPASIKRCLNENGVKTVGGAEWIDSTVFRLIENEIYKGDYIMHKHFVNEERKLVRNRGEVDAWYIEDDHEAIVSQKLWQKAQNALEAKRDYLAEGSVIEEFTEENYPYMNKIFCARCGHPLYKRIYSNGNRLNWGCSGTKRYGKSFCEGINIPDGVLRGAWHFDENMYIGEKQTDKGKKEFTYLKEASWKRRHKKKEPEPIPENTETEYPYRENIFCELCGSRLVRHVNTKNHKVIWVCNGRKRNGKDFCDGTRVPDTIIKGWGEIKKDIYIQRKDDKNGKKRYSYTSKKPKGADRA

SEQ ID NO: 11719 - protein, 464 aa, synthetic construct
MARNVTVIPARSQKVRTGHKAVQEKKIRVAAYCRVSTDQEDQLHSFEAQVEYYTKYINEHENYEMAGIYADEGISGTNTKKREQFKKMIADCEGGKIDFVITKSISRFARNTQDCLTYSRKLKNLGIGIIFEKENINTLDSTGELLFTILSSLAQDESRNISENCKWGIRTKFKNGEMHLNTFKFLGYDKDENGKLVINKEQAKTVRRIYRDFLIGINPAQIAKELTEEKVSGCLGQTKWYPSTVTGILKQEKHMGDALLQKTYTADFLTKRQVRNNGEVAQVYVKDSHKGIIDKETWNAVQEEFDRREKFMQKHGTDRYSYGSDCYPFCEKIFCGECGNLFTRHSWKSRGIVQWQCKNHRKDGKVACTNSYVDNVNLEKGFVKALNILIEEREKYMKRWNAMKSDGTPLEKIRAEQMMETVENDPLKRFVPEVAQLILCEVIVLDAKKYEFTFLEGSRIKVSV

SEQ ID NO: 11720 - protein, 525 aa, synthetic construct
MRAFIYGRFSSHKQQELSIEAQIDICREYAEKHNITVVGEYVDRARSARTENRADFRRLIRDACTGVVDCVLVWRYDRFFRDRAESALYRKQLEAAGVHLISVTEFIPDGSAGVITQGMIETVAEYFSAKLSEDVTRGMNKAAQHCQITGGAPLGYRPGPNKRWQIDPVGAELVKRCFEWYDSGKSMGELADHFNKEGHKTAKGNSFNKSSFTTVLRNKKYIGIYEYDGTVSIAGGVPRIIEDDLFFRVQRKLDANRHRPGAYKAEVPYLLSGKLFCGKCGSPMTGTAGTGKSGVRHYYYICNNRRAKKCDKKNVRLDLIEEAVLQSALDVLTDDNISYISAEVERRCSENSGNKALVASLRVQLTEVEKQLKNIGNAIAQGIITETTKQMLMDAEADRAALRQQIDRATVQASLEVKAEAVACWLDGFRHGDRKSPEFRKDIFGALVHSVFVYDDYMKIIFNVDSAGAALVPFSAVQNAATSDFVGALPGSYLGGSGVPKQNNPNLISVGEGFGLFLLLGGQHG

SEQ ID NO: 11721 - protein, 574 aa, synthetic construct
MARKKNIAAGQNAVIYARYSSHNQREVSIEQQVSECMKHAAELGLHVVGTYEDRAISGKTDKRPNFQRMMRDAEKGKFQAVVAWKSNRIGRNMLQAMVNEAKLEDCGVKVFYAEEDFDDTAAGRFALRNMMNVNQFYSENMAEDITRGLYDNASKCMANGRQPLGYKRGEDGRVVLDEANAAVVREIFTRVAAGDLFVDIARDLNAQGIKTSKGANWNKGSFQSICQNERYRGIYIYGDVRVVDGIPRIVSDDLWYRVQEAMRMKKNPVGTRHRVGAEDYLLTGKLRCGHCGSYMTGVSGTSRNGELHYYYTCQKRRTEHACDKKNIRRDVIEPAVAQAIKMYCLTDDVIEWMADRTVEYWEKHDNDLQIEALERQLEENKKATSNMLKAIEMGIITEATRTRMVELETEQSRLSVQLNAAKEDVVKIDREQIISYLELLQQGDIHDRDFQMELFKNFLVAVYVYDDNRMKLVFSCMGDQNSVEIPLETGEDPPDGGLSPDAKMFVLTPDSSTKKALYFVESMVLFFFSAAKNGGCTALPASFSDVLQAVQCSPQVIGASAGQKVPVQLTISSI

SEQ ID NO: 11722 - protein, 523 aa, synthetic construct
MNENVCIYLRKSRADQEAELRGEGETLARHERILLDLAKSRNYSVGAIYREIVSGETISARPVMQQLLREVEAGSWDGVLVVEVERLARGDTIDQGIVSRAFQFSNTKIITPTKTYDPDNEFDEEYFEFGLFMSRREYKTIKRRLNAGRISSVKEGKYCGSRPPYGYERVKLRGEKGFTLQPVPEQAEVIKMIYSLYSGASGDRIGVSKIVRKLNDMGIKSPSGKDWVPISVQDVLSNPVYAGMIRWNGRKTVRAIQDGVVTQSRPRSKEDDILLFPGRHPAIVSKEMYDSVQQIRKKNPPRPISIKNTIKNPLAGIVYCSKCGRAMVRRPYQKRGQDDTLMCSYTSCPTVSSKLSLVERAVLNGIQDLVDEYRLNAAVPGPDINNAVKSKEKLIAEKEHELEKLNVQKMKQYDLLEQGIYTTEVFLERSNSIASSINSCQDSIECLKEEIRHDKELIDQQSSFIPRCENLLEIYWSLDTAAKNKMLKELIERINYTKDAKNAFRMGNEATFVLDIFPRIQPN

SEQ ID NO: 11723 - protein, 536 aa, synthetic construct
MPRKKKLQEVGGLRLVAYYRYSNGGQQTEQSIEGQRRDCEAYAKAHGYKIVHEYIDRHISGKSDSRPAFQQMISDSDSHLFDAVICWKTDRLARSRYDSIIYKTRLRRNGVKILYAAETVVDGPEGIIIEGLMESLAEYYSAELAQKLRRGQRESALKCIALGGNRSFGYDIGPDKHYCINEKQAPAVRYIFEQYAAGATAADIVRELTARGYRTSRGNPFNKNSICRIITNEMYLGVYKYADIRIEGGVPAMIDRELFNRCQTQLAFNRAHGGGKGAPRADYVLVGKLDCGLCGHAMKGASATGHTGSKHYYYTCTQHVEKKCPKTSIEKNYLEQVIVDGVAKYVLTPEKISQIVDCMMELQAKEQEPKGNPEKDALEAELAECRRKQNNILEAIEEGGSARLAARLRTLEEQEAQLTFALGEINNAPTPPQFSREALTFMFEQFRREEDEVDEEYRRRILDTFVSSILLYEDRAEVKFNITDQKTGDFERVILPISANKKPPEDDDIPSNSEGSTALRLVEAMGVEPMSEKSSA

SEQ ID NO: 11724 - protein, 569 aa, synthetic construct
MTEQNEKIVALYVRVSTGYQVDKDSLPFQKKELKAYCEHVLHIDKNCIEIFEDAGKSGKNTKRPAFERMMGKVKSGQVSHVIVYKIDRISRNLVDFSLMYDDFKYNNVTFISLNEQFDTSSAIGEAILKIILVFAELERKLTSERVTDVMIGRAQSGQWNGARVPYGWDWDEEKQCPVHSKKEAQYAIAMYEMYLNGGSTVSIRDYNNAHNIPTKRGGEWTSKTVADFLRNPINKGAYRYNYRESARGRKKPNEEVVFIENAFPPLVEPRIWELVNKRMDENTLKLNTSSMHTIRKNCNVFAGLIVCGKCGVNYQVTAKDRRKGSGFRPSSYACTGKYQKNHCDNLNVSDVKIGPFMINYIAAMVDASKSRKFIKDTKSLEQVLLSHINFSNIAGIANDSLQETLELISGYSASKSALWSAETLSKEQQTDVDSKQSELNERLQKVNRAMERLKKVYLFSDDGMDEKEFLEMKSSLEADRVKIENEIKGLSAPIATNVDQVAFIKSASEFLLMHKINSGEFVDYKELATLDEESLKQFMNSVIDHIVVRERKIVEIVFINGLSHTLLYK

SEQ ID NO: 11725 - protein, 468 aa, synthetic construct
MVKEINNNMNDFTKKVEEVALYIRVSTEEQAINGDSLRTQREALTKFALANHYHIYGIYEDDGFSATNLNRPALQRLLEDVRKNKINRILLTKLDRLSRGVRNYYKVLDVLDAHCVFWQTIFEKYDSSTASGRLHINIMLSVAENESAQTSERIRSVFNNKIHQKEIISGKIPIGYKKEEKKLVVDEDKKALVIDAFNFYLKSGSVYKTFEYLAFFDPSINYPRTARLLANPLYIGTKVCKYGSIENYCEPIISKETFDEVQNLLKKNQRKRDNSDHEFLFSGLLRCNECGYKMSGKYCKNFPTNCTFYYLCSNARLKKKCNMLKQLNETKIEKKLLEQIVPEINKYIDKNNILEQEKVQIRDISKERDKVNKQLEKLRDLYVNDLIQIDHYEKQYKELTSKLDSLKEEEKPVEEKKTVNYDEFKSFLSRDFVALYNNLSRTEKRLIWASAIDTIYIDDNYNLRIVFI

SEQ ID NO: 11726 - protein, 500 aa, synthetic construct
MPQNTNYGNLSHSDSTKRAAAYIRVSTDDQLELSPDSQLKEIRAFADRNGYTIDDEYIFHDDGISGTSAKRRPAFMEMIATAKKKPKPFDAIIVWKFSRFARSREDSIVFKSMLKKLGISVISVSEPITDDKMSIIVEGLIESMDEYYSANLSEEVKRGMLEKFSRKQAMSAAPYGYRLEDKKYVPEPAEAEIIKEVFTRFVGGETVWGISKDLKARGIKTKRGNITEPRTIHYYLDNPVYIGSIRYTLDGGGSRQRYLDGNFMLQEDCHEPIISKELWNEAQKLIKKNREIYGKSTKPVSYHEYALKGIVKCASCEHNLTYCSSKDAPRVQCPMYQHNKCDTSSSVRLDLLNEALLLHLQEALKDKNLNIDISADTSTKSSREIQLEAEIKRETARLARMKEAYLNGVDTIEEYKENKSAQTKIISRLEKELKKLKSPPSDKEKQEKIKQVKTKIKTAIDALQSTAISETEKNALLKTFISKALYDSKTKTLTVYYYAQ

SEQ ID NO: 11727 - protein, 514 aa, synthetic construct
MTSKFTAIYVRRSVSDKEKGNNSLSIAAQREECIRYVGEGANFKVYCDDGKSGKDVCHRPEFMQMMSDAKDGYIDRIIVKKYDRFSRNMREYLNITDELDRYGVGVVSLSEPFNTETKEGRMMRNNLLNFAEFERETIAARVKDAYSTKAVETGFYQGGKMFFGFQSSRQTINGKTGSVLVPSEAAQTVIAAYEVYKEPGTSLLDVVNYIKAHNLPSSSTSGNNPINRSMDRSEISRILENPLYVRADKNVYEFFLSRGFTIIDDIDAFDGVHGLMWHKQKSEDRFIKVGYHEGLVDSETWLAVQDKKSHNHKIPKSRGELKSWLVGLTKCGHCGKALLIAYSYNVDKTKLWRYYNCTGLKTIKGCSRETERLKVRPDDAENVVLNAMREHIAEFEVAKNSRESRSSEAEKIKAELLRIETDTKKLIDRLVDADDVLFGYIQNKISELHAKKNEYEKQLLLIERRVKKIDTKPLIEPLNRWDELSIEEKNALAKVMINRVDITDEEGIKIHFSF

SEQ ID NO: 11728 - protein, 684 aa, synthetic construct
MSILQTIKTIIRVVLYLRLSDEDKNKLSKEELSQSIKNQEIMLRDYAEEQGWEVVGVYNDDDWSGSDATRPDFNRMIEECKNGNVDIVLCKTQARFARDMELVEKYVHNLFHEWNVRFITVVDRIDNARKETKKTSQILGLTDQWYLEDTSLNIRETLKSKRKDGQLTSSFATYGYMKDPENKNHLIIDPISAEVIKRIYDEYLSGTGLDKIARRLNEDKILSPYEYKLLNGSKLKIPVIKDYVNYGYIEKTGTYMLDVSFTNKEEYILKDLVSFNYITTDMKNFNNKCDIVLKKYTNNRTKIYYSENDNIDINNFNIDDCILLNENDVIPKTAKVIISHTKELDRTHTINYQFEITLKENREHEDYYINICGKATDEIKKSDFIHNIRKKFKWSSSTIRTLLTDEVYIGNMVQFKSTTVSYKNHTVVWNDDETRIRKDNTHEPIIAKDIWYTVQERLENTARSCKSGTVHPLCNKVYCSNCNQIFTKTGNRRSDGTGYLCCKDKKTNWSNCDNKASIREDQLHQFILEKMNEMLKKFYEEDDLKEMQNEVIEQDLYKDKLNSLEKELQSINKELQGKSTYFQKLYEDRTNGILPEKEFLILMNKYKDDNEKLEERQKIVKKEISSTLAKKETVKTKKNIFKKYRHIEELSIEIVEDFIDKILIGSYDETTNSRDIKIIWNFTI

SEQ ID NO: 11729 - protein, 568 aa, synthetic construct
MICVDSNGQAIEISVADQMWLDDAYFKGKQMHLEADAPRVALAYRVSTKGQVDHDDIPMQKIDCRKFAQKQGWRVVKEVAEKGVSGSKVSASKRDAIQQLKEEAANGEFDILLVYMFDRLGRIESETPFVLEWFVQHGIQMWSTHEGQQKIETHGDKLMNYIRFWQAAGESEKTSIRTRDRIRQIVSSGHYTGGFVCYGYQLVDQGRRNKRDKPVMDLVVNEEEAAWVRELFYKVVHEGASGYSLAEMLNNRGLRTRAGAKFQSSNILRIIRHEGYTGYIITKNARSEYIPELQIIDQETFEKANDIISRRSAKTAQDRRIAHTSQNPTLLAGIVYCAHCGAKMSGFMHTDRYKLADGSIREKVQPKYNCFQRGQRNKGGRDCDGQSLYLAERVDAIVLKIVEEVFEQIRDTPYSQVAENRIRQESNLQKTKRAAVEKKIKAAQHALERFEGEILKCLDGTSNFTEDMIAKQIRRYQQELDDAKAEYAELQNARLNEAAEIRKLRTYYNDFRGWAEEFDTAPLEMKRMILSQLINKVEVGRKYQVNVKFNMKYQQFVEHDAEAESGHI

SEQ ID NO: 11730 - protein, 514 aa, synthetic construct
MRRKKVEGGNRLVAYYRYSGGSGQTEQSIEGQRRDCENYAKLHGLTILHEYIDRHISGKTDDRAAFQQMMNDGDKGAFDMVICWKTDRFARNRYDSAVYKKRLRDNGIEILYAAESNVEGAEGIIIEGLMEALAEYYSAELAEKMRRGMRESALKGQAINRCRSLGLTTDENKKYVIDEKTAPTVRFIFEHYAAGESSTSIVEQLNAKGLRTSQGNPFNKCSIPRIIQNEMYRGVYTSKAYNVRIEGAIPAIIDDNLWKRAQAMMKTNRQLKAKYEPKAEYLLSGKLFCAKCGCTMKGVSGHSGGNGEVYRYYACSNPQCRKRNIPKDDLEGKVIRSICDHLLQPETIELLAETMVEVQKADMEKPNAERDVLEQELRDVRRRSKNIMDAIETGSANPQLVARLDDLTQQENTLTYQLSTMEAEKPLLFTKEQYLFLLQQFYAQPTEQDDAYKRRLINTFVTNIEVSDSELLIYFNISEETENKNKNAPQLNFDKSSSTEKRLVRVARIELTAS

SEQ ID NO: 11731 - protein, 491 aa, synthetic construct
MNAVIYARYSSDNQREESIEGQLRECKEYADQNGITVVRTYIDRALSAKTDSRPQFQQMIHDSATHTFEAVLVWKLDRFSRNRYDSAHYKRILKNNRIHVVSVTEPISNTPEGIMLESLLEGMAEYYSAELAEKVSRGHKENALKAKFNGGPVPLGYRIDSEHHYQIDPATAPVVQEAFQRYAAGESIRSIIESLNARGIRNSRGNPFTKNSFQTLLKNRRYLGEYRYKDTVIPDAIPAIIDPDCFDAVQRRCEIYRQAPAHNKADVHYLLTTKLFCGKCGTMMAGESGRSHTGTVHCYYKCGTRKRSGKEACSLKPVRKEPLEQFVVQTALEKVLNGRVIDLLADKLLEYQSKENTRLPVLQAELNEVKRRIDNLVTAIEQGILTPSTKARMEELEQQREALETSILQEQIEKPPITREQILFWFDQFRHGDPADIVFQEKVIDCFVNSIYLFDDRIVVNFNYQEGGRPVSLEEVLGSFLDGNGAPEKAR

SEQ ID NO: 11732 - protein, 501 aa, synthetic construct
MEIQIREGSREQKRKLKVCAYCRVSTDADEQENSLENQVRHYETVIKANPNYEYAGVYSDFAISGFKEKRPGLQKMLADAEKGKIDLILTKSVSRFARNTSIVLEATRKLKELNVGVFFELQNINTLSGEGELMLTILAAFAQAESESGSAGAKMVYQRKYEAGIPVQYLERSFGYTKDERGVFVADEAEAVWVRKIYKMAAEGYTPASIKRYLNENGIKTVGGVQWVDSTVFRLLENEIYKGDYIMHKHFVNEERKLVRNRGEVDAWYIEDDHEAIVSPELWQKAQDALAAKRDYLAEGSVIEEFTEENYPYMNKIYCAKCGYPLYKRIYSKGNRLNWGCSGTKRYGKSFCNGINIPDGVLRSAWHFEENTYIDEKASDKGVKEFTYLKERSWKRRHKKKQPSAIPENTETEYPYREKIFCALCGSRLVRYVNPQNYKVTWVCNRRKRKGKEACDGTRVPDTVIKGWGEIKKDIYIQRKDDKNGKKRYSYTSKKPSGIRV

SEQ ID NO: 11733 - protein, 463 aa, synthetic construct
MARSVTVIPARNRQVSGYRAAPQKKIRVAAYCRVSTDQEDQLHSFEAQVDYYTKHINDHENYEMAGIYADEGISGTNTKKREQFKRMIADCGKGKIDLVITKSISRFARNTQDCLMYSRKLKNLGIGIIFEKENINTLDSTGELLFTILSSLAQDESRNISENCKWGIRTKFKNGEMHLNTFKFLGYDKDENGKLVINKEQAKTVRRIYRDFLIGINPAQIAKELTEEKVPGCLGQTKWYPSTVIGILKQEKHMGDALLQKTYTADFLTKRQVKNNGEIAQVYVKDSHKGIIDKETWNAVQEEFERREKFMQKHGTDRYSYGSECYPFCEKIFCGECGSLFTRHSWKSRGIIQWQCKNHRKDGKVACTNAYVDNADLEKGFVKAFNRLVGEREKHIERWNSMKLDGTPLEKIRAGQMMEATESGQLQQYVPEAAQLVLEEITIFGAKKYEFAFLEGSRVKVSV

SEQ ID NO: 11734 - protein, 440 aa, synthetic construct
MNVVLRAALYPRVSTEEQKKFGLSIHDQQNDLEEYAKAHNMKVVGVFQDAGFSARKKIEKRPAMLQLLEAVKHDEIDIILVTKLDRWFRNIGEYYKVQEILEAHNVSWKTIYEDYDTSTAAGRLKINIMLSVAQDEADRASERIKKVLDAKKDRNEVCTGHLPKGYKREDKFAVIDKEAEPIMRRFFSTFLETGAITKAMDAVPELNLNYKTASAILNSTAYMGKWNGLTLPPYLTQQEFQRVQELRRRVTRKSPYNRIYLFSGLTVCGECGRRMTGHPTTLKDGTCVYKYLCQGAKQRRGCDNGLVVREQDIENYFMFSIDEQIQIKLKAKAQHAPKINTDAQIKAIQKKLAKLSELYIDDMISKPDYSKKYAELTEQVEALKQTQVQSRAPEEVADLFAPGWQDIYKNLTRENKRAFWKLKIKEIRLYKDSRIEFDFL

SEQ ID NO: 11735 - protein, 572 aa, synthetic construct
MASRIAEKLAAKKAAIYIRVSTHWQVDKDSLKVQRRELIAYVTLVLGITDYVVFEDPGYSAKNTDRPEYQAMMDRIRTGEFTHLVVWKIDRISRNLIDFAAMHDELQSLGVTFVSKNEQFDTSSAIGEAMMRIILIFAELERKTTAERVTAVMLSRASDGQWNGGRVPFGYSWSKETKTFSIVPEEAKAIRRMAELYEQYQSLLYVAKYLNDAGIVTKTGGQWTPTTVRTILTNPWYIGQYVYNVHSDGKGIEKRDSDEWITVENHHEPILNDDVFYRMKFLLTRNKRGGVPSHKTYVRKNIHVFAGLLRCGQCGSNMTANLDRRRANGFRPSQYACGSRRRKGTSCTNKYISDTTLGPFVLNYVANIIRASKNSSEATTPEVLERKLLRGEAFEDVASVSTDALGQLLDAFRSAGDAVEYRPQIAFSGDDNSIRELDTLRARRRKLDNALARLNALYLYDDEAMPEKDFVMQRGQITKQLEEVNARIEELQNQESSEELGDDFIGKASYYIMANKLIEDRYIDYEKYIRAIDPSIPRSFLQQIIDHIVVNDGRVTSITFKNGSTHTFTYKT

SEQ ID NO: 11736 - protein, 587 aa, synthetic construct
MRKCTNHFRNMNSEVKLMICVDQNGQAVEISVADQMWLDDAYFKEKQLRLGTDAPRAALAYRVSTKGQVDHDDIPMQKIDCRKFAQKQGWRVVKEVAEKGVSGSKVSASKRDAIQQLKEEAANGEFDILLVYMFDRLGRIESETPFVLEWFVQHGIEMWSTHEGQQKIETHGDKLMNYIRFWQAAGESEKTSIRTRDRIRQIVSSGHYTGGFVCYGYQLVDQGRRNKRDKPVMDLVINEEEATWVRELFYKVIQEGTSGYALAEMLNNRGLRTRAGAKFQSSNILRIIRHEGYTGYIITKNARSEYIPELQIIDQETFEKANDIISRRSAKTAQDRRIAHTSQNPTLLAGIVYCAHCGAKMSGFMHTDRYKLADGSIREKVQPKYNCFQRGQRNKGGRDCDGQALYLAERVDAIVLKIVEEVFEQIRDTPYSQVAENRIRQESNLQKTKRAAAEKKIKAAQHALERFEGEILKCLDGTSNFTEDMIAKQIRRYQQELDDAKAEYAELQNARLNEAAEIRKLRTYYDDFKGWAEEFDTAPLEMKRMILSHLIDRVEVGRKYQVIVKFNMKYRQFLECTAETYNTEIGA

SEQ ID NO: 11737 - protein, 463 aa, synthetic construct
MRRKTTAPVEKILLRVAIYIRVSTDKQVKDGDSMRDQLATGQKYIDSHENMILVDTYIDDGISGQKLKRDDFQRLIDDVRAGRIDLIIFTRLDRWFRNLRHYLNTQDILDKHGVSWTAIEQPYFDTSTPHGRAFVNNSMIWAELEAQNDSDRILGVFDDKVDNGEVLSGSTPLGYTIVNKHLVPDGDAPTAVAIFQYYRKTGNLSMTLRYMESEFGLVRSAASLKNMLTNTKYIGEFRDNKNYCPAIIDRDLFFDVQRLLKINIKSGKKHDYIFSGLVVCDDCDHIMSGCQQRARGRVRADGTRIIYKYSVYRCRQGVNLHRCPNRKLVFETTLEKMLLERIRPELENYIAEYEVANLPALRTDAKRRSVEGKMQKLKDLYLNDLITMDEFKLDREKLLMQLEKINAEDSRPVKDLSYLKNFLKMDFESVYDSLSIPERRELWRSIVKEIRVDHDKNIHIIFL

SEQ ID NO: 11738 - protein, 580 aa, synthetic construct
MYNMSPYSLSRSFRDKPCRAVIYGRASTEHEAQVKALQNQMQWYDDVARFHPQWNVINRYIDQGITGTQVYKRDAFMRMMEDAKQQKFDLIVTREVCRFARNTVDALVCVRQLAAIGIEVYFVNDNIWTLDGDGELRLTIMATMAQEESRKISERSLAGQRVSREKGVLYGNGNIFGYTRNKLTKQFEIDPDQAETVKMIFDLYDSGMGETLVAKELTRLGRKNGVGKVKWDAGKVSKIIKRKNYLGYTVYCQSYSNNYLEQKRIKRDESEFVYVKGGFPQIISEEQYERCNAIRRSRTKRLTDEKGRTRSFGIQQAQNVWGRKMRCRCGSPMLRHCWRTNNAGKPIYGYECKRHHDTPRIRLQNEQGNPTPICEIKPVGQSKLELMASKIFERVWGDQKEIVLQTCKMLDACYKPDADRRADLMKAKDDSVQLLQQQLDDLVVVRARGEIEQDKFLQRTIEIQQQMEALRQSKAQIASEDYNPGRLDMEAIEAALCEAVEMHDGLVSEDFIDLFVSQVTPLSDSRFAWCLDFSPQPTVAFLNLAGQRKYTTCSMDSKLHFGPFADEEGHTIPFPGSLRR

SEQ ID NO: 11739 - protein, 504 aa, synthetic construct
MYKASNGSGELMENKVIRVGGYIRVSTQEQAKEGYSIPAQTKCLKSYCSARNWILHELYIDPGYSGAKMERPALQKMLSDIKKGFVDLVLVYKLDRLSRSQKDTLYLIEDVFLKNEVAFVSINENFDTSSAFGRAMIGILSVFAQLEREQIKERTQMGLAERAKNGMWHGSGITPIGYDYDPASNQLVVNEYEAMQIREAFDLFVNQNYAFTKIVKTFRNKGYSHKHGVWAHSSKLRYILSNKTYIGRINWNGEDYPGKHDPIIPSSLFEAAQKKLAEKDWKLTDKPAKSPFDATQLLSGVLFCGNCGGRYYGAGCYRGSHDPNSPKRRYEHIYSCYSRTKTKLEMIKDPSCKNKNWKTETLDNYVITRIKNLRLEGEIENLIAKERPKNPGIDQRKALEKQIDDIDRQISRLLTLYQLEDVPTAEIGLRLSDLTRKKKTVEEAIENIPLYEPELSVAKAKSLLADAEEIFNCGTTEEKRSLIHALIRKIILTGNDVVIEWAFI

SEQ ID NO: 11740 - protein, 545 aa, synthetic construct
MLQVAAYCRVSTDKEDQANSFEAQQRYFREYIQRQPDWELQGIYADEGFSGTSTNKRVEFNKMLHAAELGQIDLIVTKEVSRFTRNTVDALQITRELRRRGVGVLFLNDSLDTRTNDGELRLTIMSSFAQDESRRTSERSKWGQMRSMEKGVVFGGSLLGYDVIGGKMTVNPEGAEVVRLIFHKYLQERKGCSTIARELREAGILSSKGNCLWSSATVTKILKNEKYCGDLIQKKTYTPDYLTHEKKYNHGKEPLVELKDHHEPIIDRETWQAVQRELSRRNRATGCGGHGNRYPLSGKIRCGECGKSFSHRTKKRQDGSSYYRWCCFTATNEGLRRTDGAENVIGCSVGRQIRDDIAMDLLRRSVNDVTLDKRAIISSLARIVERVLTSDEDSGEQELRRLELELEKLQARNDTIHDRFFDESITKADYQRAKARCESEMNRVQEKIAAIKQRQTLNTDTQTLKPDIRTAITGIVSGRTADDDFYGHLLQQMTVYRDGRVEVALNLLPAKWVYVLDGLEKYRAKIGGHDASSVPISVSRPLSSG

SEQ ID NO: 11741 - protein, 582 aa, synthetic construct
MAKHAITIPQNPKAALYIRVSTDMQADKDSLPLQESDLRKLADLNGIKDIEVFSDAGFSGKNLNRPAFRSMMDRIRAREFSHLYVWKLDRISRNLLDFLELYDELKCYGVAFASKNECFDTQSPGGEAMLKILLIFAELERKTIAERVTAVMLGRANENKWNGGRVPFGYMPGPVTTDANGKKCKSWPVPDPIEAPIVRAIFELYLREKALKKVAKALNAAGYRSRKGTQWSDTTVRCILKNHFYKGEYVYNRQNPNANRREDFYRSENDWVVVTGQHEAIVPEETWRRCNEMLSKNRNWLAPIGSLVSAQDKYIFGGLLQCAECGYTMNSKDRTRIHNHTHSSYYYCTGRWKAPAVCTGEHSGYASDRVLLPQILKLIARMIEACANAIKFASAEQLVSYLLNDNLIPGATGIKEAQRIYMIVRAHVKHIYGVDQTNQYNPNALLVEQSQKEKEKQERALSRLKRAYLFDDGDMSEAEYFEQKAAIEGTIAKLDKQIKSLSGNDIGADEAYFAQLSKLIMIKKLQDTNSDFDYYKLAKAIGRKPIHDFLTEIISRIIIGEQNRIIKIIFKNGVSITLQYEK

SEQ ID NO: 11742 - protein, 520 aa, synthetic construct
MARKKNIAAGQNAVIYARYSSHNQREVSIEQQVRECMKHAAELGLHVVGTYEDRAISGKTDKRPNFQRMMRDAEKGKFQAVVAWKSNRIGRNMLQAMVNEAKLEDCGVKVFYAEEDFDDTAAGRFALRNMMNVNQFYSENMAEDITRGLYDNASKCMANGRQPLGYKRGEDGRVVLDEANAAVVREIFTRVAAGDLFVDIARDLNAQGIKTSKGANWNKGSFQSICQNERYRGIYIYGDVRVADGIPRIVSDDLWYRVQEAMRMKKNPVGTRHRVGAEDYLLTGKLRCGHCGSYMTGVSGTSRNGELHYYYTCQKRRTEHACDKKNIRRDVIEPAVAQAIKMYCLTDDVIAWIADRTVEYWEKHDNDLQIEALEQQLEENKKATSNMLKAIEMGIITEATRTRMVELETEQSRLSVQLNVAKEDVVKIDREQIISYLELLQQGDIHDRDFQMELFKNFLVAVYVYDDNRMKLVFSCMGDQNSVEIPLETGEDPPDGGLSPDAKMFVLTPDSSTKKAPYFV

SEQ ID NO: 11743 - protein, 502 aa, synthetic construct
MEIQIREGSREQKRKLKVCAYCRVSTDADEQENSLENQVRHYETVIKANPDYEYAGVYSDFAISGFKEKRPGLQKMLADAEKGKIDLILTKSVSRFARNTSIVLEATRKLKELNVGVFFELQNINTLSGEGELMLTILAAFAQAESESGSAGAKMVYQRKYEAGIPVQYLERSFGYTKDERGVFVADEAEAVWVRKIYKMAAEGYTPASIKRYLNENGIKTVGGVQWVDSTVFRLLENEIYKGDYIMHKHFVNEERKLVRNRGEVDAWYIEDDHEAIVSPELWQKAQDALAAKRDYLAEGSVIEEFTEENYPYMNKIYCAKCGYPLYKRVYSKGNRLNWGCSGTKRYGKTFCDGINIPDGVLRSAWHFKENTYIAEKASDKGVKEFTYLKEQSWKRRHKKKQPPAIPENTEAEYPYREKIFCALCGSRLVRYVNPQSHKVTWVCSRRKRKGKDACDGTRVPDTIIKGWGEIKKDIYIQRKDDKNGKKRYSYTSKKPEGADRA

SEQ ID NO: 11744 - protein, 525 aa, synthetic construct
MQLDLIGNYCMYLRKSRKDIEAEKHGEGETLKRHFEMLMSLANRLKIIIREDAVYKEIVSGDTIASRPVMQQLLSDIETGKWDGVLVVEVERLARGDTIDQGIVAQTFKYSNTKIITPMKIYNPHDEGDEEYFEFGLFMARREYKKIRQRMQNGRVASVQEGKFVGNVAPYGFSRKKIKGDKGFILVENPEEADTLKLIFELYANQNYSYNRIADHLNDLGIKPRHAKNWNVATIRDILHNETYKGSLHWGARKNVKVIKKGIVTMTRPRNKGDYTVSQGLHTPLISQELWEKVLERHRVTAPKCPHRTALQNSLAGLVICGKCGAKMQRRPYKDRQPSLICTNRKCENISSDLEIIERKIIEALKEWLGDVAINFEKVEEENALQVKALERALAKTKAELEKAELKLKRVCECYEEKTYTREVYLQRSQTVSEEIRKLREDVVNQEKELEETRVKYKSEEDFVPQAQYVLDTYYMTNDPEERNIMLKNILEKVVYTKTERAIRKDSDPTNFTIELYPKISKIDS

SEQ ID NO: 11745 - protein, 535 aa, synthetic construct
MKKKQPNTRHGRAAIYARYSSHNQREASIEQQVKACRELAVRLGLDVVETYEDKAISGKSDRRPSFQRLLRDAEKGYFDCVLAWKSNRMGRNMLQAMTNEARLKDWGVRTFYAEEDFDDTAAGRFALRNMMNVNQFYSENMAEDITRGMMDNASKCLSNGALPLGHKAGENGRIVLDKAQAAVVQEIYTRVACREPFVDIAADLNRRGIKTKRGGPWTKSSFYTICRNERYRGIYIYDDVRVEGGVPRIVSDGLFYRVQEVLKVKKTPQSARHHTGAEDYLLTGKLFCGKCGRPMTGVSGTSRSGEMHYYYTCQKRRREHACDKKNVIREQIEKSVAQAIKQYMLTDEMIQHMADATMAYNARQEKDLHLQDLQGQLAAVKTSAANLLKAIEMGVITETTKARMVELEQEQGRLNAQIENARAELVPITRDNFVSLLHIYRDGDINDSKYLASLFETFLVRVDLYDDHFLIWFNPLGQKTPADIPITSIENGDVDEFFDECRSKNVFDWGGKWSTIIKAPAVPRQVFLFWCSVSC

SEQ ID NO: 11746 - protein, 514 aa, synthetic construct
MAKRKFNKGGEVRLVAYYRYSGGSGQTEQSIEGQRRDCEAYARLHNMTIQKEYVDRHISGKTDDRAAFQQMIADSDKGAFDMVICWKTDRFARNRYDSAVYKKRLRDNGVEIVYAAESNIPGAEGIIIEGVMEALAEYYSAELAEKMRRGMRESALKGQAISRCRALGLKTDEHKRFVIDEKTAPTVRFIFEHYAAGESAMSIVEQLNAKGLRTSQGNPFNKSSIPRIIQNEAYRGVYISKSYDVRIEGAIPAIIDDELWERAQTMLKLNRQLKAKNEPKADYILSGKLYCSCGSLMRGMSGHSATGEVYRYYTCPNKDCHLRNIPKDDLEGKVMQSIVDHLLQPESMEALAEAMVEVQKADVEKPNAERVAIEQSLSDVRRRSKNILDAIENGTANAQLCARLDDLTEQERTLNFQLSALEKEKPVVFTKEQYLFLLEQFLVEPSERTPEYGRRLVNTFVTSMVVSDRELVINFNVSEETVNKNKKTSQTNLQKESSSGMRLVRVARIELTAS

SEQ ID NO: 11747 - protein, 578 aa, synthetic construct
MRKVSKIEPISPSLPPRKKVAAYARVSMETERLNHSLSAQVSYYSNLIQSNPEWEYAGVYADNAVTGTKSSSREEFQRMLEDCEAGKIEIILTKSISRFARNTVDLLEAVRHLKELGIEVRFEKEHINSLSGDGEVMLTLLASFAQEEVRSLSENVKWGTRKRFEQGIPNGRFLIYGYRWEGDHLVVEPEEAKIVRLIYDNFLKGLSAEATEKQLEEMGVKSMKGMHFPNSSIRAILKNITYTGNLLFQKEYTLDPISKKTRKNHGELPQYFVENTHEAIIPMETYQAVQAEIARRQELGALANWSINTSCFTSKIKCGLCGASFVRNTRKNRAKTSQLGERYTFYGCGTNKRKGAHCFSGTIREDVLKEECAKALGLPEFDEDTFSGRVAKVTIPATGTMVFELTDGTSFEHHWSRNAKKESWTAERRKAVSEYRRSRETGWKCYHTFTHFIKCGRCGANYRCQTHKRVDGTVVRSWYCSSPTAVDCSKVGIREDTLKALIADVMGLPEFDEELFNQQLAYATVPADNEIAFHFRDGHEVSRTFAQKRQMPRHTEERKKHMSEVMKAKWRERHAEND

SEQ ID NO: 11748 - protein, 507 aa, synthetic construct
MNTKQSMGVYCVRKGVYRMEQYCIYLRKSRADAEAEARGEGETLARHEHALLGLAKSQKLAIVKIYREIVSGDSIAARPQMQQMLQDVTDKKYTGVLVMEIERLARGDTIDQGVVAQAFRESNTKIVTPIKTYDPSNEFDEEYFEFSLFMSRREYKTIKRRMQAGRIASIKEGNYIGTNPPYGYKKIQPEPKVKTLEIVPDEADAVRMMFDMYLSGMGAKAIATRLNQLQIPPRKSPAWEPVSIRKILQSPIYAGKIEWHTKKDGTILADGLHPEIISWEEFQQVQERRKRKTSPVPTGYTTQNYYHNILFCANCGHQMKRRPAPNGSSHMLCVRQQCRGKVVSAPTSRVDEAVLEAIRYRIQELKLSKEKIEKEDYHTKENEEKQRTRLKKALEKLQKQKEKLHTLLETDVYSVETFLERSKVLEQQKLDLETELAELNDAQKEVHLSPKQALLWLQHTLDHFETANPEQKNKMLQRVIKRIEYSKTERMCYRKQTSDLALHVEFL

SEQ ID NO: 11749 - protein, 517 aa, synthetic construct
MKKLTKIKIRDAVHQKKKLKVAAYCRVSTASDKQLVSLDVQKEHYENYIRSNEEWEFAGIYYDEGITGTKKDIRAGLLSMIADCEAGKIEFIVTKSISRFARNTMDCLEMVRKLTGLGVAIYFEKENINTGSMESELMLSILSSFAEKESVSISENNKWSVQKRFQKGTFIISYPPYGYYNNNGTMSIVPEEAEVVKEIFAACLAGKGTLAIAKELNDKGIKAKKNGKWYAGSIKNILTNEKYTGDVIFQKTYTDDSLNRHINYGERDRFLCKDHHEPIICHEVFDRVRAVLDQRAMDKGNGIETFRYKKRYCFSGKIKCGECGKTFKRRQHYKPSGNYVAWTCETHLENKEKCSMLYINDESVKLAFLTMMNKLIYSHKEILKPLYRKICHVYEKDRLLKINELETRINENADRKHILANLMAKGILDTAILNKENAALAMEEQMLWSEKEKLVVLDNKRVKELRKLVDFTAKSKMLKVFREETFIDFVERITVESRLTLVFHLKCGLNLKERLVK

SEQ ID NO: 11750 - protein, 523 aa, synthetic construct
MSVSKNITIIPARRRVGNTAKSVHTPKIRVAAYCRVSTDSDEQATSYEAQVEHYTTYIRMNPEWEFAGIFADDGISGTNTKKREQFNRMIERAMAGEIDMIVTKSISRFARNTLDCLKFIRKLKEKNIPVYFEKENINTMDAKGEVLLTIMASLAQQESQSLSQNVKLGIQYRYQQGYVKVNHNRFLGYTKDENGKLIIEKEGAEVVKRIYREYLEGASLQKICMGLEADGILTGAGKKIWRSDALRLILKNEKYIGDALLQKTYTVDFLEKKRVPNDGLMPQYYVENSHEAIIPRDVFMRVQEEMHRRANLHSGRQGKKRVYSSKYALSSIVYCSNCGDIYRRIQWRAHGEKYTVWRCCNRVENGPAACDADAILEEELHDVVVQAINRTLSKRENMKVVLASNIESVLTEVNGIPLGTIDSQLEELQNELIKVANAKGNYDSITDEIYRLRELKQNAMKKTAECKGIRLRVEEMRRFLEEQEVDITEYDERLTRRLIKRITVYDDHYSVEFKSGISVDIHK

SEQ ID NO: 11751 - protein, 684 aa, synthetic construct
MSILQTIKTIIRVVLYLRLSDEDKNKLSKEELSQSIKNQEIMLRDYAEEQGWEVVGVYNDDDWSGSDATRPDFNRMIEECKNGNVDIVLCKTQARFARDMELVEKYVHNLFHEWNVRFITVVDRIDNARKETKKTSQILGLTDQWYLEDTSLNIRETLKSKRKDGQLTSSFATYGYMKDPENKNHLIIDPISAEVIKRIYDEYLSGTGLDKIARRLNEDKILSPYEYKLLNGCKLKIPVIKDYVNYGYIEKTGTYMLDVSFTNKEEYILKDLVSFNYITTDMESFNNKCDIVLKKYTNNRTKIYYSENDNIDINNFNIDDCILLNENDVIPKTAKVIISHTKELDRTHTINYQFEITLKENREHEDYYINICGKATDEIKKSDFIHNIRKKFKWSSSTIRTLLTDEVYIGNMVQFKSTTVSYKNHTVVWNDDETRIRKDNTHEPIIAKDIWYTVQERLENTARSCKGGTVHPLCNKVYCSNCNQIFTKTGNRRSDGTGYLCCKDKKTNWSNCDNKASIREDQLHQFILEKMNEMLKKFYEEDDLKEMQNEVIEQDLYKDKLNSLEKELQSINKELQGKSTYFQKLYEDRTNGILPEKEFLILMNKYKDDNEKLEERQKIVKKEISSTLAKKETVKTKKNIFKKYRHIEELSIEIVEDFIDKILIGSYDEEVSSRDIKIIWNFTI

SEQ ID NO: 11752 - protein, 602 aa, synthetic construct
MRAAFLIRCSTKKQDYERQVNDLTRLAKKFGYTSSDNMIFGEHITGKDDASKRDRQSIQRLKDAAINKEFDVVLVSEVSRMSRDPMSGRLYVRQLINMDIPVYFRDIDTWTIDPVTGKKVRDAETIIGAAFDAAWKYIKSMKTQIASGRRDELDNNQMSIGQPFFGYKRYGGRDKGKKNSWVINDDAAKVVVDVLKSTALAITAKYGEQFNKKFSIGTIEHILTFEPYCTGIKVVSLTDPDTEDVDEFEVEIPTIITRAMFDKATTKRATNRTARTPYPKQATYILSKLLKCPICEHSLTPQKRGGDKGDKYRLMNGKVAIRWSCMSGINNATDCSSRITISNEKLEAIIWGLVKQELIGFANLNDEDRVAKVEELTDKITNLEMNIANFTSHISNMDRLIERAYSAYMDAPDSVMDIAKDKYYKTLTKCENERAECKDKIEALSAEKLRLENMRTFFNQPTLPKDAIEKAESDPIKMRNLVMELIDKIYPYRITTYVSPATNRIMRNGIVLLEVYTINGIYNVLYDGNQRNNKVAYYISSVYATFQNGRNKFDAYDTGEYFVISHATLVTETEDVDMLVTFNELIKICMQNGWEIDYTYKM

SEQ ID NO: 11753 - protein, 512 aa, synthetic construct
MQRAVIYARFSSDMQREESIDAQVRACKAYAKNKGYIVVDTYADEAKSGRDVTKRDAYNQMLADAMEDKFDVIIFHKIDRNSRNELNYFTFKDKLEKLGIRYEYAAQPIDALSPEGQMMETMMVGMAAYYSRNLAKETKKGLNENAYKALFNGGCPPLGYKIVDKKYVIDEQEAAAVRLIFELYLNGYGYAAICRELSAKGYTTKAGKAFAKNSLHDILCNEKYIGTYTFNKIPRKKGGRNSHAAERPEDFISIENAFPAIISKDDWALVRAKMDRNRHRAASYTAKEKYLLSGKVFCGHCGSAMVGHRIRKRYCYYGCTRKEQTPTSKCPQKMIRAEILEHWVLQILERVVFTVGGMRRIADAIVDAYEAEQKEQAGSQATLLQRKAVAEKKLNNLYKIFEEGNADEFDRQRLNQIKAELREINKSICETSVKPAKLLSKQKIAAILAAMKDEIFVKKNSYYVQQAVDLLIDHVTITDKVLKITLSTQNVCAYLVPRTGIEPVRVSLPEGF

SEQ ID NO: 11754 - protein, 574 aa, synthetic construct
MAYRKVISLLDTIGLRAVFYARVSTAEEEQLNAIELQIEENRNCISKNKWKKVDEYIDRSKSGTMVKGRDEYQRLYEDLLTDKFDIVVIKDQERLMRNTKDWYLFIDRLVQTGKLLYMYLDNRFYNPDDALITGIRAIIAEEFSRNLSKKLHNYHDGRIEKARQGKEIDLQGSGNVFGWDKKDGKYYINPEQAKVRRLMCEGIMARKGSTQIAKELNDAGYRNTVGKEWKPMDIPKFVYDCKNVGTMVINKERHDFESKQTIKLPEEEWVYVKNALPPIVTEEEWELICKIHDERVVATGSDKRGKGKKVSGYSFSGKLVCGVCGAPYWRKQRSTKEEYWVCSTKQQKGRKTRKRDSVNGKAGELNEAGCDNTNISYNSLMEIMSIISERLQANTELVKADMINKLNSWRKRIIEANRGATEEDLQKELSRKDKLLDALLDGILTKEEYTRKAESIENKIAELKQEIEANKTQFEDIAEIDRVLANIDEEVAIYLNENKQLKVEYILEHLEKVEIYPDKVIVIVPLFDVGFIVDKEQYVSREKRYKIGTEKVIHYLENYRYWNKDIGLYVQLVA

SEQ ID NO: 11755 - protein, 501 aa, synthetic construct
MKIEIREGRQTQERKLRVCAYCRVSTDADEQENSLENQMQHYEKVIKANPDYEYVGVYSDFAISGFKDKRPGFQSMLADARAGKIDLIMTKSVSRFARNTAIVLEATRELKERNVGVFFELQNINTLSGEGELMLTILAAFAQAESESGREGAKMVYRRKYEQGIPVQYLERSFGYTKDDEGNYVPDEKEMVWVKKMFQMAAEGYTPAAIKRFLNDKGVLTVGGSKWIDSAVIRILENEIYKGDYIMHKHYVNEERKLVRNRGEVDAWYIENDHKAIVSESLWQKAQEAIGKKREYLATASVIEDFTEENYPYMNKIFCAKCGHPLQKRIYSKGNRLNWGCTGTRRFGKEFCEGVNIPDGVLREAWRFEENMYIGEKPTNKGIKEFTYLKESSWKRRHKKKIPGKLVPDNTEENYPYKNQLFCGLCGSRLVRHYNPKNKKVFWICNRNKRQGKESCTGVRVPDSVIRAWGSIKGDIYIEGKVDRSGKKRYSYSGTKPTKSK

SEQ ID NO: 11756 - protein, 436 aa, synthetic construct
MAAYCRVSTDQEDQLHSFEAQVEYYTKYINEHANYEMAGIYADEGISGTNTKKRQQFRKMIADCEAGKIDLVITKSISRFARNTQDCLMYSRKLKNLNIGIIFEKEHINTLDSTGELLFTILSSLAQDESRNISENCKWGIRTKFKNGELHLNTYKFLGYDKDENGKLIINEEQAATVRRIYNEFLWGMNPAQIAKGLEDEGVPGCLGQTKWYPSTVVGILKQEKHMGDALLQKTYTADFLTKRQVKNNGEITQVYVKDSHEGIIDKETWNAVQEELERREKFMAVHGLDHYSYGTEYMPFSMRAFCGECGHLYTRHSWKSRDVVQWQCKNHRKEGKVICKNAYVNNADLEKGFIKAFNKLCGNREKYIARWKEQEENGTPLEKIRAGQMMEITEKEPLKQFVPEMAQLVIQEITILGAKKYEFIFMEGSKVKVSV

SEQ ID NO: 11757 - protein, 515 aa, synthetic construct
MSTNAVIYARFSSDKQREESIDGQIRECKAFAQDNQLNVITIYIDRAMSARTDHRPDFLRMIKDSRSGSFDYVLVYQLDRFSRSRYDSAIYKHELKKNGVKVLSAKENITDSPTGIMLEAMLEGYAEYYSAELSQKVRRGMTENLLEHKWNGSPVPLGYALDANHRLVIDPDMAPHVKALFEMFLAGKSYAELARYLDEKHIRTVTGRKYTGPTIHNLMSRQLYTGTYTWGGQVIEDFCPAIISKSDFARAALRMANRKRTAKDGIPMSVRRSPEYALTGIIYCGECGRTMTGYSGRGQNGDRYYYYRCNSNNNRCRQMEKIKCKNHPIRRNRLEDLVLQTTVNILSDKEAVAAIAEQVSRIKLENPYASELSNIKSRLANLKKRHDNSVKAIEAGVMSQAIMDNVCKYEAEMDNLKARQEKIKLATPSLQIDPVAVEYFLKSLLLNKKQHDKYRLDLFEAFIHRVVVYQDKVEIQYNYLPGHKLENPITTPLPGCSNLNKVVGPLGFEPRTNRL

SEQ ID NO: 11758 - protein, 520 aa, synthetic construct
MKKITKIENTASPKDAIKKKRVAAYCRVSTNSDAQLESLETQKSHYEHYINSRDDWQFAGIYYDAGITGTKKNKRPELLRLIEDCHAGKIDFIITKSISRFSRNTTDCLGLIRELLALHIPIYFEKEKINTGSMTSELFVSVLSSLAESESVSISENNKWSIRRRFETATYKIGYPPYGYEFDGEEMVINPKQAVVVRRIFHAFLSGKGAPAIARELNQEGIPTKRTGHWAPNTIIGMLTNEKYVGDCLYQKTYSDSQFLRHHNHGEMTQYLVQDHHKAIIPRETFEAAQAFIQQHGCEKGIAKGAKKYQYRYAFSGKIICGECGDTWRRRIHAYKGNKYIAWCCFTHLQDKTKCHMRYIRDEALKVAFLTMLNKLIFSHRTLLAPYVKALKNAPNNDILQQIQELKTLLSQNTERSETLTKLMAQGIIDQVIYAQETNILLTQADAYRRQIEALKNTASLSMKHVTEAVNLLHFTEKATLLTHFDDDLFKKFVDRIKIYERNNATFELKCGLHLTERIR

SEQ ID NO: 11759 - protein, 520 aa, synthetic construct
MKKVMIIPARKRMGNIEKEPEQKKLRVAAYCRVSTDSDEQETSYETQVSHYKEFISSHPDWVLAGIFADDGISGTNTKKRNEFNRMIQECMAGNIDMIITKSISRFARNTLDCLKYIRQLKEKNIPVLFEKESINTMDAKGEVLITIMASLAQQESESLSQNVKLGLQYRYQQGKVQVNHKHFLGYTKDENGHLIIDPEQAEVVKRIYREYLEGYSMKKIGKHLEADGILTGAGRKKWHDSTINKILRNEKYMGDALLQKTYTVDFLTKKRVKNNGFVPQYYVENDHEAIIPKDIFLQVQAELVRRRIVHISPSGQRHSFSSNNCFAQITYCGVCGELYRRVHWNNRGHKSIVWRCISRLDPRGAEINCTNRTVNENLLKEITMKAMNHILSDSHTFLLQMQKNITKTIMKNDTLSPECIQKRLDELQQELIQHATNRQNYNAIANEIFRLREQQEEAEQNNLSQQANIKRLEDLKKFIREHPTQITEFNEITIRKIIEKITIFPDHFLVKFKSGIEVTV

SEQ ID NO: 11760 - protein, 506 aa, synthetic construct
MEKQTAVIYARYSSDRQREESIEGQIRECKAFAAANGYRIIGTYIDRAMSARTDQRPDFQRMIHDSDRHLFQFVIVYALDRFSRSRYDSAIYKNRLKKNGVRVLSAKENIRDDPTGVILESLLEGYAEYYSLELAQKVRRGMADNLLEKKWVGTVIPFGYKKGTDSRLYVDESKRQVVIDIFQMYSDRYRLVDIIAYLNAHHFANAQGRPFSRNSLNNILVNSIYTGTFRWAGTVYPGYAPRIISDELFNKVQKIKEGRKRNMVKSASLDYELTGKIFCGRCGRPMVGVSGTGKSGNTYFYYKCSGKTHGRKDCDAKAIRRDAVESAVYNATVAMLKQPHAIKIITAQAILAQEREQGNSEVDRLKHEKAALDAKIRNISKAVAAGLTADEIIAQANEYSNRSKELESMIRVEELKEKAFTLTPEAVTFFLEKLLEKAETGNATLSTFWDFIRCIKINGCIAEIHFNYTAVPATLDNPIRVKIETNEECSNDDVLVDHQGFEPRTP

SEQ ID NO: 11761 - protein, 464 aa, synthetic construct
MARSVTVIPARNRQRETGRRAVQEKKIRVAAYCRVSTDQEDQIHSFEAQVDYYTKYINDHENYEMAGIYADEGISGTNTKKREQFKRMIADCEGGKIDLVITKSISRFARNTQDCLEYSRKLKNLGIGIIFEKENINTLDSTGELLFTILSSLAQDESRNISENCKWGIRTKFKNGEMHLNTFKFLGYDKDENGKLVINKEQAKTVRRIYRDFLIGINPAQIAKELTEEKVPGCLGQTKWYPSTVTGILKQEKHMGDALLQKTYTADFLTKRQVRNNGEIAQVYVKDSHKGIIDKQTWNAVQEEFDRREKFMESHGTDRYSYGADCMPFCEKVFCGECKSLFTRHSWRSRGIVQWQCKNHRKDGKVACTNAYVDNADLEKGFVKAFNRLVTDRDKHMERWQQMKSDGTPLEKIRAGQMMEAVGNEPLTRFVPEIAQLVLCEVTVLGAKKYEFFFLEGSRVKVSV

SEQ ID NO: 11762 - protein, 498 aa, synthetic construct
MEIQIREGNSRQKQKLKVCAYCRVSTDADEQENSLENQIRHYKEVITSNPDYEYAGVYSDFAISGFKEKRPGLQKMLADARKGKIDLILTKSVSRFARNTSIVLEATRKLKELNVGVFFELQNINTLSGEGELMLTILAAFAQAESESGSVGAKMVYQRKYEAGIPVQYLERSFGFKKDERGVYIADEEEAVWVRKIYEMAADGYTPAAIKRYLNENGVNTVGGAEWIDSTVFRLIENEIYKGDYIMHKHFVNEERKLVRNRGEVDAWYIEDDHEAIVSPELWQKAQDALEAKRDYLAEGSVIEEFTEENYPYMNKIFCARCGHPLYKRIYSNGNRLNWGCSGTKRYGKSFCEGINIPDGVLRGAWHFDENMYIGEKQTDKGKKEFTYLKEASWKRRHKKKVPEAIPKNTEEAYPYRKNIFCGLCGSRLVRHVNPKSHKVIWICNGAKRKGVAFCRGTRIPDSVIRGWGEIKKDIYIQRKDDKNGKKRYSYTSKKPTA

SEQ ID NO: 11763 - protein, 464 aa, synthetic construct
MGKSVTVIKASPKTVSKSKSGVKKLRVAAYCRVSTDQEEQLNSFENQVSYYTAYINGKPEYEMAGIYADEGISGTSTRKRTDFNRMISDCERGKIDLIIVKSISRFARNTQDCLSYSRKLKNMGIGVFFEKENINTMDGAGELLFTILSSLAQEESRSISENCKWGIRKKFSDGKYHLNTNRFLGYDKDEKGNLIINEEQAVTVRRVYKEFMDGVNPDIITKRLNDEKVPGCMGEPRWSCSTIWGILTNEKYMGDAILQKTYTSDFLTKKTEKNTGQITQYYVENDHEPIIEKDFWNAVQMEVQRRKEFMETHNLRTMGRYTDEQPFSSRVLCGTCGTIFWRRTLTRNGKHIKVWMCSQRYRQKGVVGCSSETLKEDALHNTFIKAWNGIIENRSKYVERWKNDMRGDNPLLAFRAKQMLELTKGKPMKKIDMALVGKVLERCVVLSPEVMEIYFLDGTCVKIA

SEQ ID NO: 11764 - protein, 530 aa, synthetic construct
MEQYLIYLRKSRSDLEAEAHGEGETLSRHEHTLLELAKRQHLNVTDIYREVVSGDTIAARPMMQRVLSEVEQGVWSGVLVMEVERLARGDTIDQGIIAQTFKFSGTKIITPIKTYDPDNEFDEEYFEFGLFMSRREYKIINRRLQRGRLASAKEGKWPSGLAPFGYRRVKLKNEKGCSLEPIEEQAAIVRMIFDLYTVGLQDEDGSARPLSLGSIATRLNDMHIPSPSGSQWARITIRGIIKNPTYIGMVRWGSRETKKKVVDGKVVSVRGPADPEKECIFKGIHPPLIPKETFELANDKLTRSENTSTHKEKVVRNPLAGLLVCSECGRQMMRMINPVRPDMPVVRCPRRGCPNCSSYLPIVEERVIQGLSEWMKGYELEWSSAAASSSVSLVGVREKALASAEAELRKLQQQLERTHDFLEQGIYDTDTFLSRSRMLSDKIAAAKDSVARCSRELTEEKLRETSRRDIIPKVKNLLDVYPLLETAEEKNALLKEVLEKVVYQKLNEKRKKSPDGFTIEIYPRIPKSEK

SEQ ID NO: 11765 - protein, 523 aa, synthetic construct
MAKSVTTIPATLSRFTAAPINSTKKRRVAAYARVSTDNEEQLTSYEAQVDYYTNYIQGRDDWEFAGVYTDEGITGTNTKKREGFKSMVADALAGKIDLIITKSVSRFARNTVDSLTTIRSLKEHNVECYFEKENIWTFDGKGELLLTIMSSLAQEESRSISENCTWGQRKRFADGKVTVPFKRFLGYDMGPDHNLVVNPEQAKLVKRIYGMFLQGQSPFQIARTLTEEGIPSPGGKDHWNPSNIKSILTNEKYKGDALLQKSFTVDFLTKKKKANEGEIPQYYVKDNHEAIIDPETFEMVQTLMATRKKGRNRKSSVSIFSSKVKCGDCGSWYGPKVWHSNDAYRKVIWQCNHKFDGQKCATPTLTEDEIKELFLRAANQVIDQREQFIAIYEQVLSRSLDTTALESELTDLEAEINIAAELIEECIKENAHVALDQAEYQKRYDGLVSRFDKAKARHTEVTDLIAERMARKHQIESYLNELRNREPLTEFRETDWLAMVDFITVHSKKDIRVTFKDGTEIKA

SEQ ID NO: 11766 - protein, 513 aa, synthetic construct
MMQQALNAVIYARYSSHNQTEQSIEGQLRDCYAFAEREGLQVVGEYIDRAITGRTDERPDFQRMIADARKQEFQRVIVWKFDRFSRDRYDSAIYKHKLKQCGVRVLSAMENVGDGDVSIILEALLEASAEQYSLDLSKKVLRGQRESRLKGTFLGGLTPIGYKLENRKLVADERTAPIVRYIFEQYAKGTSKQDIINELATRGILNRHGKPLSHSTLQTILKNKKYIGVYTHGGQDVAGGCEALIDEKTFLKVQEQLSKRKHAPAASKAVIEYLLQGKLYCGYCGFNMFGDSGRGRNGSTYRYYACRRRKKERDCKKKNEKKDFIEWYVVEQTVEYVLTPERIEYIASELVAQYKKDCGIDRIKAYEKQLDRIKAEISRLVDTLAVCPAAARQPIFDKMEQLDAEKQEVELDLSKLRISAKIQISKEHIADWLKQFCNGDALDVDFQKRIIDTFINSVYLYDDKVIIYYNIEGGKQVSYIDMIDSTEEPPFSDDAPGSSGGSDLKRPALRLCC

SEQ ID NO: 11767 - protein, 463 aa, synthetic construct
MSFFTPNPQLFGLRVVKYIRCSHDDQVLHGDTLEAQDLILEDFIKVNRMILVDTFIDEALTARKKFNKRKEFVRLLDGVKAHAFDLIIFTKLDRWFRNIGDYHKIQEILEANGVQWKAVTENYDTTTTNGRLHINIRLSVAQDECDRDSDRIKDVFAYKLKNKTYVSGSLPRGLKLDAEKHVIIDPEWNCFALDMFDRFEATCSKRDTQLFLQEKYNIRVCYDTVARYLKNPLFKGQYRDDPDFCPATISPERFERIQKLAIRNVRIRHTQQFYIFSGLLICSSCNHYMCGTVTYRRMADGSEKMYKNYRCNFKAQSKLCDRGKTYREADLEEYMLAHIRPALSDYIAKYEVTAASTIQKNPVTEIAKIERKMKKLYDLFMDDLIDKEAYRSEYDKFKAQIEELQKCSTAVPMRSLDSVKKLLSEDWEAVYHTFSDQEKNTFWKSFVESVLVYEDGSMDIRFL

SEQ ID NO: 11768 - protein, 576 aa, synthetic construct
MIRENTENGSNQRIRVAIYVRVSTVYQIDKDSLPMMKQDLTSYCKYILNTDDFVIFEDAGYSGKNTDRPAYQKMMSQIRQGLFTHLLVWKIDRISRNLLDFANMYAELKDLGVTFVSKNEQFDTSTAIGEAMLKIILVFAELERNMTSERVTATMINRANNGIWNGGRVPFGYAYDKESQTFSFDETEQKIVQLIFDTYEKTGSIVHTSRKLNDSGFLTRGGNIWSATAVWIILRNPWYKGVYRYNYYKIPGRKAVKDKKEWVIVENHHKPSIDPERFDKIQLTLTNNARYRRSPGRSNVQKNVHIFAGLLWCGECGAAFTSSPGKLHASGYRPSKYGCPNVRKTKTCHAKYTSDVVVGEFIINYILNIINAHKDIKLVRSPEDLQQHLLRGSTFSDICSIDSDGLSAMYDMLTCCSKSGMLFKRVKPKFKVDPELKHLQSEQKKQQRALDRLNELYLYSDESMSEREYIVRKQQITDKLDEINDAIGMMSQEPWMHTMGDSEFIQQASSFILNQKLHDRQYVYFTSLAESVDAEILKAFFGSIIDSIVITSGKIQRVIFRNGISHTFTYKNKPEN

SEQ ID NO: 11769 - protein, 548 aa, synthetic construct
MSTGTELRAVFYARVSTEEEKQLNALEKQIQENKDVIRDHGWRLVGEYIDEGKTGTTTKRRNDYKRLLKDMTENKFDIVVCKDQDRLQRNTLDWYLFVDNLVTNNLKLFMYLDNKFFKPSEDALITGVKAIIAEEYSRNLSKKLNNSNKRRIERALNGEEVSAMGNGKSLAFKIVNGKWVKDEEEAKLGKKIFELYLEYDSIRKVRDWVNEHGYTNSVGKPFTSESISRILKNEKAKGVIVMGKYHHDFDKKKIVRRSEEELVRIPAPELAYVSEEVFDKVQERLRAKTGNGRGVNAYSDPLSGKIYCGSCGRKLWKHASNGYVNWMCASQVAKGDVECNGTRITTVAIRNIYKKITDNLEVNKGVVKQYIVKWLNELKATLSDTSVNEKIQKDLDKLERKRTKLLEAYLEDFISKDDYKAKYEAIEGQIEEKKKLLVPVEENEDIKVIESVLQNIDDEIDAYVKTLDMEESKVDFLIEHTKRITVLENRDIIIELDLVAGAIIAGKDFLLYVHDTMPQHHGPKHLHPSGQQTAPRCCFRDRFSCDQP

SEQ ID NO: 11770 - protein, 554 aa, synthetic construct
MKAVIYARYSSDNQREESIEGQLRECTAYCVKNDITILRTYIDRALSAKTDNRPDFQRMVKDSAKGLFDVVIVWKLDRFARNRYDSAHYKAQLRKYGVKVLSATENISEGPEGIILESMLEGMAEYYSAELSEKVIRGHTENALKCKYNGGTPTFGYVIDKDMQYQLDPRTAPVVLEIFTRYDQGATMKEIMEEMRQKGVTTVRGKKIDLNFMARLLKNRKYIGEYSYREIVTPGGIPAIVPQDLFDRVQKRLAANRKAPARHKAEDDYLLTTKLFCGTCGAMMVGESGTSASKGRKYHYYRCVNTKKQKSCNAKHKSIRKTPIENAVVNAVMAKVMDDNFVEYIADTVMDIQTRESSVLPALRHQLEETERGITNMLNAIQMGIINASTKQRLDELEDRKADIELQIIQEEMKHPMLTREDVTYWICRFRTLDVSKLEERRRLIDSFVNSVTVFDDYILITFNYKEGEERLDFTDIESSDLQSVGGPCWTRTSRAVRHQIYSLARYLLRNTGPYLPPKAAWCAYPQCCCTGFREQYSLYCCNTSTPRPGESVL

SEQ ID NO: 11771 - protein, 529 aa, synthetic construct
MKVAIYTRVSSQEQVEGNSLENQLSDLKRWADYKEYEPLFYSDEGKTGTNDNREGLQQLLADAKAKRFEIVAVTKLDRFFRKLRPLLNCINQLDELGIVFTSITEGFDTKTEQGRFSLHMMGVIAEFERNRIVERTREGRYASYRKGQWAAGQPLYGYYYDRDTKILRIKLDEANVVKRIFHLYVYDRIGVERIARYLNEHKVLPRGGDTRHKTRQWYAGAVRDLISHPAYKGEHPLKIIAPKIIEPKIWDLAQQRRKDNRKLYIRKGSPWLLQGITKCGLCRHSLACGWAHARRRIYSCRGRLKLSNIDDRNKCKLRPIDAEWLEKEVWNKISKSLSNPRSLEQALDDYINGLQIRKSELEMIIQPIEKQLKQNDEKKQVLYERFIRGRIDKNIFKKLCDELDAEDDRLSSLKADIDPAQVEELNNTISWLQFWTKSKRELLLRLSFIHEDATEEEVHRQTLEVAQVLLGMADIGDPSLKDEVGGATTKRQLLDYLQCNIIAYDDRVEVKAILPVENILHQEYNPSYR

SEQ ID NO: 11772 - protein, 528 aa, synthetic construct
MLDNSNVAPGKNKTLRCAIYTRKSHEEGLEQEFNSLDAQRESAEHYIEAQRMRGWTALPDRYDDGGFSGGNMERPGLRRLLADIDAGKIDVIVVYKVDRLSRSLLDFMKMIDLFNEKGVSFVSVTQHFSTTDPTGRMFLGILITFAQYEREVIAERIRDKVAAAKRRGKYCGGVPILGYDVDRDNKKLLVNPDEARTVQYIFRRFIQIGSAKKLGQELNEQGYRTKAWTTKKGKVREGSEWNTGHIYRLLNNRVYIGEIAHKDRSYPGEHEGIIDRTTWDKVQAILEDNKPVKVSMARTKMVAPLKGVIRCGHCGCAMGPTYARKNGRHYTYYICQKDSKRTVSRCPLKRIPAGDIEQAVVEQLSAVFRTPTLVAKTYFAARDIEQVERERLFKQKAQLEMELSQARKQAIELMKPGSDQSGKTEMLTTVNRQAVELSKQLTHVSERCRAYQGSSITEQDVSEAFQNVEGFWEDLFPVERNRLIRLLVDKVEIRETGIDMELRTNGLTTLIAELAGLACEVTERRVSR

SEQ ID NO: 11773 - protein, 480 aa, synthetic construct
MQTINKVAIYVRVSTTNQAEEGYSIDEQKDKLKSYCQIKDWNVYKVYTDGGFSGSNTERPALEKLIKDAKNKKFDTVLVYKLDRLSRSQKDTLYLIEEIFIKNGIEFLSLQENFDTSTPFGKAMIGLLAVFAQLEREQIKERMQLGKLGRAKSGKSMMWARTSYGYDYHRETGAMTINELEAIAIRDIFESYLNGMSVTKIRDMLNDKYPKTPSWHYRIVRGILANPVYCGYNQYKGHVFPGNHEPIITEEAFNKTQEELKIRQQTALEKFNPRPFRAKYMLSGIAQCGYCSAPLSITLGTIRKDGTRNIRYQCKNRFPRATKGVTVYNGNKKCDSGFYEKADIERYVIEQICKLQHDKKHVEELFADHGPSVDRVACQKQIDLLTNKISRLNDLYIDDRITLEELQTKSSEFSSQRSILEEELENDPALKRKKREAEMKKILKTDDILDMDYERQKTIVRSLINKVRVTVDKIVIKWKI

SEQ ID NO: 11774 - protein, 447 aa, synthetic construct
MAETQKRAALYIRVSTDEQARHGYSLVEQEHDLRQHAKKQGYIVVGVYADEGATARKAISRRKALQRLLDDVRTGVINVIVFKCLDRWFRSVRDYYVVQDILDQHGVEWECSQEAIFNTTTTNGKLMLNLKLSLAQHESDQTGDRVRYVFDGRRRGGRVTSGSIPAGYVIDKDKRIQIDERTAPMVREMFRYFLVHRTVLGTQRMLREKYGYKRSDSTVGRALQNRLYIGEYHGIKKFCTPLIDEGTFAQAQKVFEGRTRFPRSGNIYMFTGLLHCPSCGRILTPAYRRTKQKVYIYYVCRNSTHSDCPYKTRWREDRIESILLDALEHGLEKYKADIKKVPQTEEEKQEPPIEELRVKQERLKELYVEGLIPREEFDMRYNDLNVQISSLRPPSEISLVYFKTVSVGDLHEYYTALDKPARKELWSRILDQVRVSGNLLIPVFRTF

SEQ ID NO: 11775 - protein, 539 aa, synthetic construct
MPRKPAKHPAKPKRGKKLEVEEPGVLYGRYSSHNQKDISVEQQFEKGYELAAEYGIRIIDTYADRAVSGRTDKRRDFQRMMTDAAKGKFRYVIAWKSNRMGRNMLEALINEARLQDLGVRVLYVEEDFDDTAAGRFAARSMMNVNQFYSENMAEDIKRGLYDNAANCMVANGHLPYGYKADETLHYAIDEPKAAVIREIFTRVSCGEAFVDIMASLNARGIKTSYGRPWGRSSFQKILSNERYRGIYIYGDVRKEGGIPRIVSDELYFKVQEVITTKKNPQGRHRVNGDYLLTGKLFCGHCKSPMTGISGTSRSGNLHYYYVCQKRRTEKTCEKKNLRRDDIELQVAKAIKRRTLDDDTINWIADSVVEYSQHQESASGIGLLEDQLKDTQRSIKNLMAAIEQGIITPTTKARLMELEKEQSDIDRKITMAKADVIPVNRDQLVGWLKKLQAGDVHDKKYQAELFDTFLIAVYVYDNPDGQDYMKVVFNYAGSKNTVEIPLDPSVIDNVENIETGAVRLSSAQVHQERVDESQLVLFVL

SEQ ID NO: 11776 - protein, 536 aa, synthetic construct
MSVDIKWQVPKAQPEANELAVVYARYSSHSQGEQSIEGQLSNARDYAAAHGYTIVHEYVDRAKSGRTDNRAEFQQMLKDTAKRQFSVIILWKVDRFGRNREEIAINKMKCRKNGVRVEYVAETIPDSPEGVILESVLEGFAEYYSLQLSQNIRRGRAESAEKCQSLGGNRPLGYKTGPDKKFVIDENTAPTVKIIFTMYADGKTVTEIVDKLNEMGLRTLRGGPFTKNSLHSILKNKKYIGIYEYQGHEIKDGVPRIIEDDVFNKVQEMLKINKRAPAKTWSRADYILTDKLFCGKCGALMFGESGTSKTGAKHNYYICSNKKRFRSCDKKAVRQADIEDTVLNATHELLQDDELLDYIVDRTWEYYLAQDNSQEELRNLQRQLAQTDTAISNLIRAIEAGILTEETKKRMDELTQQKADLKASIADREIARGFHLKKSHIAYYLRSLRDADWSDKETQKRLIQTFVNAVFVYDDHITLTYNFSGDKNTITLRDMQRFEDGEEFGCRASRSTIGRISEPYIAWGTVFVQTKRHSLP

SEQ ID NO: 11777 - protein, 541 aa, synthetic construct
MEKDKKVTALYCRLSKDDGSNSESLSIRTQKSMLMEYATRNGFGNCQYYVDDGYSGTNSDRPAFQELLDDIREGKVATVITKDQSRLGRNHIETGTYMEIFFPEHGVRYIAINDGYDSNEQSQMDIAPFRNIINEMYAKDTSRKIKSALRTRKKSGKYISSGAPFGYQKDPADHNHLVIDPNTAPVVEYIYSMAEEGLGLHRIAKRLHDEKVLKPCYYKKEMFGRFIDDEKMYDWDSAYISQVLHSPVYAGHIIYEAKPTVSMKSKKRRYIPFEERAIVPNTHEAIIPQDRWENVQRILYSRSSSFMCDKTDYDNIFKGIVRCADCGRTMLVKVEHRRKRNSVLDQTFYCCSTYRKYGAKACDSHNLEARVLHEAVFADIQAHAKAAVSNREALVKKIANQMHLRVSSDRAQHKRDLKQCKARIAEIEDLYAKLYEDVSKGLLPEKRFQMLADRYDKEQAELTEKIEQYEREGRAEHDQLDKIQDFIDEVSKYAGITELNYKILHQLIDKILVSKAEKVDGEYVQKIQIFYRFIGPLDAIE

SEQ ID NO: 11778 - protein, 536 aa, synthetic construct
MPRKKKLQEVGGLRLVAYYRYSNGGQQTEQSIEGQRRDCEAYAKAHGYKIVHEYIDRHISGKSDSRPAFQQMISDSDSHLFDAVICWKTDRLARSRYDSIIYKTRLRKNGVKILYAAETVVDGPEGIIIEGLMESLAEYYSAELAQKLRRGQRESALKCIALGGNRSFGYDIGPDKHYCINEKQAPAVRYIFEQYAAGATAADIVRELTARGYRTSRGNPFNKNSICRIITNEMYLGVYKYADIRIEGGVPAMIDRELFNRCQTQLAFNRAHGGGKGAPRADYVLVGKLDCGLCGHAMKGASATGHTGSKHYYYTCTQHVEKKCPKTSIEKNYLEQIIVDGVAKYVLTPEKISQIVDCMMELQAKEQEPKGNPEKNALEAELAECRRKQNNILEAIEEGGSARLAARLRALEEQEAQLTFALGEINNAPAPPQFSREALTFMFEQFRREEDEVDEEYRRRILDTFVSSILLYEDRAEVKFNITDQKTGDFERVILPISANKKPPEDDDITSNSEGSTALRLVEAMGVEPMSEKSSV

SEQ ID NO: 11779 - protein, 506 aa, synthetic construct
MNGVIYARYSSENQREESIDGQLRECTAFAQHNDIQIVGEYIDRAFSAKTDNRPSFQKMIKDSAKGEFDVIIVWKLDRFARNRYDSAHYKNILKKNGVKVVSATEAISSGAEGIILESVLEGMAEYYSAELAEKVSRGMKENALKCKYNGGSVPLGYYIDESKHFQIDSSVAPFVVECFEHYADGMTMKQLRDELNMKGVKNSRGGKLSIDVISRMLTNRKYLGEYTFQDITIKDGIPAIVSTSLFEKVQDRLTKTKKAPSSHKADDDYILTTKLFCGKCKSFMVGESGTNAQGKKYRYYKCVNHKKHQGCDMKSIRKDLIENMTIKYIREFLNDEDLINTLIDLAYDAQHKENEQLPLLRKQLAQTEKGIKNIVDAIEQGISTKSTRERLLDLEQRKNDIEMSISKESIENPMLTKKQFKFWFDQLKKLDISKSEQRQKLVDLFVNSIIIYDDHIKFFFNYKEHTETITFDELNNCSDLPDSPRPKGLPNGSPYFLPKIANSRIK

SEQ ID NO: 11780 - protein, 485 aa, synthetic construct
MPTSDLKIAAAYIRVSTDDQEEYSPDSQVRLIREYARKNGYLLPEEYVFQDDGISAATARKRPAFNRMIALAKEKERPFDAILVLMFSRFARNREESVLYKGLLRKQGISVISVKEPAVDGPFGTLIESIIEWFDEYYLINLSAEVKRGMSEKFLRGEAMGTAPFGYCIDSANKTFTVDPERAEIVCDVFRSYADGAGLRDIAVQLGDAGITTRRGNRPDSRFVEYMLRNPVYIGKIRWTPGHKTRYSRVHIADGVEVVDGKHPPIVSMDLWEAVQRRMDQRKAAYGRYQRQAPAAWMMRGLVRCSACGATLIMAGRSSSCPFLQCHSYAKGACHTSHSLSLRRANAAVLTGLRRSVGTLIFHMVPHLTSAPSRTADYGHLLEQERRRLARCKDAYQAGVDTLEEYRDNKARLEERIRRIEEQAASAAAAPESFDKAAYGKKTADILRFLETSADEGAKNEVLRSVVDHITYEKASRHLAIYFYT

SEQ ID NO: 11781 - protein, 459 aa, synthetic construct
MSTTHFYSHYPTIEYKTCALYVRCSKEEQAKFGDTIEAQIEDLKAFAKLHHLKIYAIYVDEGHTARKKYNKRKEFMRMLQDVELHKFEYIIFTKLDRWFRNIADFYKIQEILDNNGVTWLTALERYEMETTNGKLNVNIRLSVAQDEADRDSDRIKDVFRLKVKKGEAITGSLPIGLMVGENGKVDIDPDTVQIAYDMFDYFEAHNSKRGTLLYLIDKYNRYFCYETIAHALRNPLYKGEYRGNPDYCPKIIDPARFDRIQVLGKRNVKVRKNNRYYVFSGLAQCKECGHALVANTTVQKRYNREYTQYRCNYYSNSHLCTHSHGTNEKVIEKYLLDNIKPELEKYVTTYEVKQNAPTKKADPSKIKTKMQRLKELYVNELIDLDDYRIEYEQYKQELDRLTSTAAPEVKDLSAIRSFLALDLQSIYDSLTPQEKRTLWSSIIDKIIISDGGDIEIVFL

SEQ ID NO: 11782 - protein, 522 aa, synthetic construct
MAKTVRAIPATISRYTAAPINSRKKRRVAGYARVSTDHDDQISSYEAQVDYYTNYIRERDDWEFVGIYTDEGISATNTRHRDGFKRMVRDAMDGKIDLIVTKSVSRFARNTVDSLTTVRKLKDKGIEIYFEKENIWTLDAKGELLITIMSSLAQEESRSISENVTWGHRKRFADGKVCVPFGHFLGYDRGPDGNLVVNREQAKTVKLIYRLFLDGYTFHSIARELTSRGLETPARKKRWYPGTVESILTNEKYKGDALLQKRFTVNFLTKETKANEGEVPQYYVENNHEAIISPQVFDWVQEEIKRRREGRGRYSGVSIFSSKIKCGQCGGWYGAKVWHSTDKYRRTIYRCNDKFKSHCKTPHLTEDDIKEAFVRAVNQLIENKADVLDSITLLKERLTDTEDLEEERDRISTDLNLLADKIQQLIAENARVAQNQDDYDRNYNELVSRYEAAKTQYDKTCEAIQYRKARSRQMDSFIKELRNQDLIKEFDARLWGSLVDFITVYSKDDIRMTFKDGTEIRA

SEQ ID NO: 11783 - protein, 522 aa, synthetic construct
MRIIPAHQQKGNSVQPQQSRQPFEQLRVAAYCRVSTDYDEQASSYETQVAHYKELIQKEPTWEFAGIYADDGISGTNTKKREQFNQMIAACKAGKIDLIVTKSISRFARNTIDCLKYIRNLKAINVAIFFEKENINTMDAKGEVLITIMASLAQQESESLSQNVKMGIQYRYQQGKVFVNHNHFLGYTKDAQGNLVIEPAEAQVIKRIFYSYLDGMTMKQIADSLKADGVLTGGKTINWQSSGVARILKNEKYMGDALLQKTYTVDFLNKKRVKNQGIMPQYYVENDHPAIIPKSVFMQVQQIIKRRRNGITTKNGKHRRINGKYCFSQKVFCGKCGDILQRNMWYRPEKVAVWRCASRIRRSKTGRRCMIRNVKEPLLKEATVDAFNQLIESHDLASKQIKANIMKVIKSSKGPTLDQLDKQLEEVQMKLIQAANQHQDCDALTQQIMDLRKQKEIVQSRETINEVKLHIIDEINEFADLHKYGLLEFDEGLVQHLVEKITIFQRYMEFTFKDGEVIKINK

SEQ ID NO: 11784 - protein, 553 aa, synthetic construct
MSTITKIQGYQHDVKQLRVAAYCRVSTDNFEQLESLENQRVHYQKYINNHPNWELAKIYYGEGISGTKMTKRNALKELLTDCHNHRIDLVVTKSISRLSRNTTDCLQIVRELQQLNIPIIFEKEHINTGAMASELFLSILSSIAQDESHSTAGNLRWAIRKRFASGKFHVSSAPYGYSIEDGNLVINYTEAKTVRQIFQRFLSGTSASQIAKELNQKQVSTKRGGQWRSNTVINILRNSNYTGDMLCQKTYRDDQYHRHFNQGELAQYLIEDHHPSLINHENFNRVQVLLKEAVKKRHIETGSHKYQQHYLFSGKIICGQCGTIFKRQTRPHKIYWACQQHLRSAQQCPTKAVSEASLKAAFCNMINKLVYSKKFLLQPLLEGLKEEANVNSDGQLISLTKQIKANDHKAETLTELMHAGLLDKAIYVNQTARLEQDTYQCQEKIKQLNGQNTDSANDFENVRTLLRWCHQGKQLTEFDEGVFQEFVQQIVVNSSNKATFILKCGLKLPEKLNKNAAIDGHFYRDIIKQRYNDPIKQTEYLYSIIESEGDLIG

SEQ ID NO: 11785 - protein, 523 aa, synthetic construct
MNICCYGRKSIYSDHSDSIDNQFRMCRDYVEMKFSGQVDSFLEYQDEAFTGANIKRPDLQRLLVDIAAGNCDVLIVYQLDRLSRDVRDFANIYAILEEHHVKFISIKENIDTSTPIGRAMMYVTVVFAQMERETIAARVADNMIGLAKKGYWTGGNPPEGYVRTRIEANGKKHCSIVPDPEGVKYVNWIFDTFLQNDYSLQSMETAFKNQGIRTRRGAFFSTAQLHKILTMPYCVQATPEVYDYYVARGCQMDPESPRESWDGTCGVMIYGRTTQKNKKHQMQPPEKWLICLGAHEPFMPADKWLAVQARFCRNKFDKTMKYDVPLLKGVLRCSCGSIMCVARKKKKEGVSSWYYCLKRMRQGKEVCDSHQIKCELLDQKVLELLQSIERDPALIHQFAEQNAEVLAGPDPKVLASKISTCQTRIDRLVSSLSLAAESSAQKYILAELERLDLEIQALRREHNLALTAERNRTRQQQDTFSKVSEISRLIGDMDSFSASEKNAIVKDVIKKCVWDGESLSIML

SEQ ID NO: 11786 - protein, 522 aa, synthetic construct
MNENVVLIPAKKRPGNNVVKDAYKPKLKVAAYCRVSTDSDEQAGSYDAQVEHYTEYIGKNEAWELAGIYADDGITGVTTKNREGFKEMIDDCMDGKIDVVLTKSISRFARNTLDCLKYVRQLREKNIAIIFEKENINTLDSTGELLLTIMASLAQQESESISQNVKMGIQYRYQNGQYNINYNRFLGYTKGPDGKLAIVEEEAKIVRRIYKEFLDGATLRDIANGLQRDKVMTGAKKYKWHMSTVEKILKNEKYMGDALMQKTITKDFMQKTRKKNDGTVPQYYVTNGHEAIIPRDIFTEVQEEFLRRNSIYTKTGKKRLYSSKYALSSLCTCTKCGDVYRRIVLTDRGKVTIKWKCCTRFEHGPNACPAPMVPDVELKEAAVTAINQVLKCSKDMKVKLKENIETALANDNSKELEAINKVLAGKQKELLELAQARKDYSKLAEEIEKLKVDKKELMVDKAKNEGVKRKVAEMEKFLQEAPTEIAEFDDIMVRRYIKEIKIYDDRFQIIFKAGIDIDVPRQ

SEQ ID NO: 11787 - protein, 520 aa, synthetic construct
MVKITKIEPMQCFTAHKKTRVAAYARVSTDSDDQHQSLDAQKEHYECFIKGRSDWSYAGLYYDEGITGTKVEKREGLLNLLKDCKAGKIDRVITKSISRFSRNTENTLEMVRSLNQIGVSIYFEKENIDTEHMNSELMLSILGSIAESEARSISENSKWGVRHRYLEGIYKISYPPYGYRNDDGKMVVVPSEAEVVKKIFDMALAGHGSLAIAKALNSENIPSKRGGKWHPASVQDILKNEKYTGDVVFQKTYTDGNFRRHHNYGDVDRYLCQNHHEAIIDHETFDRVADAVQRRGVEKGIIDGEKYKTRYAFTGKIICGDCGANFKRRTHYKKSGDFIAWTCKTHLSDQLSCGMLYVKEEYIKAAFVKMMNKLRIAHPRMLRPFVDNLRGINSTDRLRQIKALEEKIRDNNMQQQVLAELMASGYTDPGTYQEEKNMLLIEADRLAKEKESISSYINGNLTHLTEAEKLLKYISKVKNPVAYDDELFLAYVESVTVKDRETYTFNLKCGLKLTERVEVE

SEQ ID NO: 11788 - protein, 547 aa, synthetic construct
MKLLVTYIRWSTKEQDSGDSLRRQTNLIDAFYSKHKNDYYLLPAHRYVDKGKSGFHQQHKNQGSDFRRMFENVMSGAIPEGSLIVVENFDRFSRADIDTAIDDVRQILRKGVSILTLGDGELYDKSALTDPVKLIKHIIIAERAHQESLVKQKRIAQVWNHKTQLARELKKPMGKQAPGWLELSDDGSHYIVDEDKASLVNIIYDKRLSGMSMFAICKWLNEQGYPTINQRKVRISKTKKPDGNWSALSVKHILTSRSVLGYLPAKISTEDRKTVLREEIEGFYPQIVTDSKFYAVQQLLEETGKGKTSSGEHWLYVNILKGLIRCKCGLVMTPTGIRKPVYQGTYRCNGNKESRCSYGTVSRKLLDTQLCSRLFSKLSQLHDEATDTAKLDELQRRLNTVDSELEKLTETLIQLPNITQIQEALRVKQEEKDELIVQLSREKARVKSVSSLDLSGLDMESVEGRTEAQIIIKRLVKEIVVSGNEKLVDIYLHNGNMIRGFPLDGKDDHTLTLEEATDEMQSLDDMLIFGEPVTRIYPAGDMEEVDA

SEQ ID NO: 11789 - protein, 581 aa, synthetic construct
MKKLYSYIRWSTDKQTGNTSLERQTEKAKQYAAIHGLEYVQLLDAGVSAFRAKNSTSGKLAGFISAVESGVIPSDSWLYVENLDRLSRADATTANELFLRLLRLGLTLVTGMDGKIFTRDGVNQNPTDLMLSILLFMRANEESLTKQKRAFETTLKLIERYRSGLPVNIKSAGSSPWWIDASGPNNEAVKPHSMHFKAAKEAVRLLLSGWGNYRVTNYLNDNSEIYPPPVGKKSKNQRKEVRWTVPNIKKMRLNRALMGEKVLTLNNVTHRLKNYFPPVCTPAEFARLQDVASNNKMPQGEQKQVITLLSGMGILRCGHCGGAMTSFSKKGKIRYMCESGKKRMSSCKAWSVSGELVERCLLQPLITGYISLVMDKQDSEQSISGLIDSKRGELEAIQSQIDNTTTAISMGGNLDSLVAMLQGFESRKSAILVDLDKLTQRELLQGSRDQQIEKIVDTMELITPELLEDTTDPDRLNIREVVRAVIARVTIGKGEDKALKLIFDVYDRQQFIYQGEIQTDDRGWIRRGYSLHIEDQSVEMHDGIEPDLSSKLSELIKTQHDKVDEMLSAFPPLKASWFVSK

SEQ ID NO: 11790 - protein, 584 aa, synthetic construct
MKEVEVIKARNDLQTRTRGKTIELMRVGAYCRVSTDSADQLNSYKSQVAYYTDMIKKNKEWVLADIYADEAITGTQVAKREDFQRMINDCMNGEIDMVITKSISRFARNTLDTLKYVRMLKERNIAVYFEDEKINTLTMDGELLLVVLSSVAQQEVENISANVKKGLKMKMKRGELVGFQGCLGYDYHKDTKTITVNEEEAEIVRYIFNRYIEGAGGSVIAHELENLGYKTKYGSSTWVQSTVIGIIKNEKYKGDLLLGKTFTVDPISKRRLENFGEEDKFYIRNHHEPIISEEVFEKAQEILARRNVNRGKIGEGSTKREKYSRKYAFSCMLECGFCGGTLTRRNWHSSSQYSKVIWQCVTATKKGKKFCKHSKGIPETAIEEAFVESYRLLCDDNKDVLEEFLQRMDDTLSSSVVSKQLAKAEKEIGALEKKKSKLVDMRLEEIIDKETYESKYADLVSKQEQLVEERKKLQETSDNEKDIKKRLKEFKKTLEQNEVLDKFDRYVFESIVEKVIVGGLDENGNVDPAQLTFVYKTGLKNNVDGAKFKPQRKNARGRHRTEELCSHDSNEVDKMCSDSSNDTC

SEQ ID NO: 11791 - protein, 427 aa, synthetic construct
MSTIQRIHFPIQNTCPERKRVAAYARVSRDHENLRRSLVNQVDYYTHLIKNNPHWDYGGVYVDSGISGTQISGRDQFQKLIEKCEEGLVDIILTKSISRFARNTIDLLSTTRRLKELGIDVRFEKEHINTLSQTGEFMLTILASFAQEESRSISENLQWSVRKKYEQGISLNHRVYGYQWTGNELVIDPESSRVVRKIFREYLKGNSMQKISDDLNKRSIDHFGKPFNDVAIHTILHNERYIGDTLLQKTICANVLEHKRKKNTGELPMHYITGTHKAIIKHETFEAAHKEITRRKKLGPFIIPKTVRRCFTGKITCEKCGSNYIRTYKTPTNANWRCSSNKKYGAKGCRSIGINEEQLKKLVAFVMEHEEFNEDSFSKEIDHITGCGDGTFNFHFTDGRSVTQFWDSRSRAIQDTITKRKMEKIHA

SEQ ID NO: 11792 - protein, 671 aa, synthetic construct
MPKIRTIPATKPLHANNSGEQSNTRRVAGYARVSTDSDEQVTSYQAQVDYFTSYIQGHPDWEFVKVYTDEGISGTSTNRRVGFKTMIADALDGKIDLIITKSVSRFARNTVDSLTTIRKLKEKHVECYFEKENIWTFDGKGELLITIMSSIAQEESRSISENVTWSKRKQAKDGKVSVAYGQFLGYDRGPDGEFVINEEQAETVKLIYSLFLQGKTPNNISTILTEQEVPTPANKKKWNDQCVARILQNEKYIGDALLQKRFTVDYLTHKLKVNEGEVPQYYIEEHHDPIISKEVYALAQAEFERRKGMIGRRNHKRMLSGKIRCAQCGSWFGQKTWHTNTSQKKVVWQCNSKYDKSHKTCTSGNLTKYMVEDMFMIAINKLLKSSTDILETQRLIYDSLFDTSYLQKERKNILAEMEITAELMNRVSLRNEQEEPEEAPYDSEYEVLLLRYVDAKKLKQEIDAKIQDKIDKKVLATEFFEKLKDHKGPLSKFNIDLWNALLYHIDVYSPNDVRFLFRDGSEIKVDMSIEEKRRPDLTAEQKKEISELRGTGLTYNKIALRMKLSQGQVRSFCLSRVSNHDKNKGTPEYCKTCGKKLVHTTGYKKKIFCSDGCRLDWWNVNANLKTGKYRAPHKFVCQNCGKTFVAYGKDRKYCNKACFLESRWKKSETID

SEQ ID NO: 11793 - protein, 610 aa, synthetic construct
MLGIYTRISKDRDNQISTEVQKEQGIKLASTISLKYKLYEEAKGTSGGKAIKQRPKLNELVEDIYDGKITAVYFYNQDRSSRDELTWFTLANLFIEKKVSLYENGTLIDLEDEDTYMLAGFKAVMNASSRKKTGRKIKDALVKLVKDGKATNHNITYGYTKDDKGYLILNNEPINSDGLTEIDVVKRIFKDSLNGIGSHIIARNLNEEGVPTRYAEKEGTLTTKNKLSGTITTKKKSAVKWQQNTVLQILKKKWYYGKRTYKGEVYDVPALFTKDYCDRVKDNLTKNRKNAGKIAVDKYLLRGVLKCGCGLNMYGKVQPSNGENFYFCSSRRTDNKCGLPSVNRPHLDKIIWEWFFKNKTLVNLIKEHFEDTDAKQMIQTINEDLIKLKAQLKENETEKNKSITFATKGYITEEELDSQLKRIRGDKNKIDNDILNLENQLITYQNSEKSADEIIKDISQYKTDVSYNDRKSIIHKYIKDIVVDFKHKHFVIKIIWNLPQLSNYYLVVHRRCYYVIQPFAGYSQVIYKYQRKKKGKPFEQTNDEFFESVYKKQQALEVFRIKNELLKNEFGLPAIDFESSPETDAKLKTMEQTPEFIELLNKMKLLNKSS

SEQ ID NO: 11794 - protein, 431 aa, synthetic construct
MEGDISLSETRIKYCLYARKSTESDEQQALSIDSQIKEMQAIAERLKLNVVDIKRESYSAKESGKRPIFKELLSEVSDGIYNGILTWAPDRLSRNAGDLGTIVDLMDAKKLIHIQTYGQTFSNSPNEKFLLMILCSQAKLENDNKSQNVKRGLRARVEMGLWPCKPPTGYTKFKRIDQKCEAILDPERAPVIKQMFEKIGYDGWSGRKLHIWLRDELDFKTENGKHLSLGNLYRIIENHFYYGRFEFPKNSGKWYDGVHEPIVTKELFNIVQTQIKSQILVPRSEQKEFAFTKIMTCGLCGSGITADEKFKKQKNGNVHRYVYYKCTRIKDPNCDCGFLNENDLILQLQKLLEDIDIKVVPMREKITNDLKRYKKFQQMLLGDETKVAVKDIDIRNYAKFILLEGDTEEKREFLRCLKSQIVLKKKVLSLA

SEQ ID NO: 11795 - protein, 487 aa, synthetic construct
MRMSAEFTDRAIGYIRLSDWRGKEDPSTSPARQRDVIRSYCQAKGWDLVEIVEDLDVSGSDRGLRLDREGLAKVRALYPRADHLVIPAIDRLARNTSDFLTVAEEAQKHSVALVSVKESLDMSTPNGRFVATILAAFAQMEAETIRARVLDGIERVKMLGRYAGGNNLPYGYRSESGPDGGKILVPDPEQAAIVREAAERVLSGETTYAVTRDLNARGVRSKTGKDWSIQAVRQMLTGPAIVGRITHRGEVVRDADGLPLQAFEPILSLESWRSLRSLLEVDKPTAQRTPRKRATRLLSGIVSCGRCGGVMYPATSGGGKSYRCSTASRGGDCVGVSIRCEPLEAMIEDEFLRRWGHLPVTVRRETVPPEPAELVEIEHAIRETASAMASDDADVVALAERLAALKGRRADLRSAPAEPVVEEVETGRSFREVWEDDETDVAVRRQFLERVLVLVAVAPGRAGRRPFAPERVTVEWLNDYLSAADLD

SEQ ID NO: 11796 - protein, 598 aa, synthetic construct
MRIGRARAPMSEPVARLSPDPTRAKSTGSLESQFVLKRPQPSPFGDIGDVRDIPLPMKYFLYCRKSSEAEDRQVLSIESQRADLERRLLALPEVEVVEIIEESRSAMTPGRPRFDAMVARIEAGEADGIATWAPDRLARNSIDGGRLIYLLDRGVLKDLKFSTYTFENNSQGKFMLQIMFGQSKYYSDALSENVKRGIRTKRDKGWQPGRPPVGYLNDPVTRTIVSDPERFPLVRRIFDQALAGQSPKQIALLAQNDWGLTSPPGKHIGRPISLATVYKILGNRFYLGEIRHAGASYPGRHQPMITEAEFDRVQSRLRQPNRPRPSRHRFAFTGLIRCGACGGTVTAEHKTNAYGSRYVYYHCAKRRIGPRCPERSLEERELERQIVAFLADLVVPDALAEWGRERLGRAEKDDAEFREAREKALDKAIATSERQRIELTGLRLRELIDDAEFASERQRLDQDLAKLRQSRIPETDPQEVIELFEGIVSFSKQAVDRFWSGDLTTRRRILELVGSNFSLKGKKLSIQAVELFRWRRVNPNILSGRREILEARTFQPPPEAETWLEEMLAHAKSGKRRKTLNRMNDLMSDAELGLAAWC

SEQ ID NO: 11797 - protein, 430 aa, synthetic construct
MTGYFAYTRVSTVKQGEGASLSEQKMLIAEYAQKHGLPITRWFEETDTAAKRGRKAYRQVLSLLERKQARGLIVHKIDRSARNLRDWADLGELIDQGIDVRFAHDNFDLDSRGGRLAADIQAVIAADYIRNLRDEVKKGIDGRLRQGLFPGCAPIGYQNRGSGRVKVPDPIMAPLITEAFELYASGEWSMRQIALALGPRGLRSRTGKPVSLNNVTRILHNPFYAGVIKMGAREEVAGIHQPLITRALYDQVALRLAKKLPPRRASHRFTYQLRMRCICGRFAIGELAKGRYIYYRCHGLGCHGTIVREQVVDEAVGVALASLALPPEVELNALLAPLHQRWQQLFINERFRNYRGREPRPWLLAALEHTNSSRAFADDRCAAFKALLLRPADLYQRAPRASREELLKIAEIELQISGKTVSAALKVRTS

SEQ ID NO: 11798 - protein, 498 aa, synthetic construct
MMPRQTESTRQVGIWIRVSTEDQVRGESPEHHERRARAYAEARGWEVAQIYRLDAVSGKSVMGHAEAQRMLADIRSGVISGLVFSKLARLARNTRELLEFSEIFRSCDADLVSLQEAIDTSTPAGRLFFTMIAAMAQWEREEIADRVAASVPIRAKMGKPLGGRAPFGYRWAGGKMEIHPEEAPVRRLVHELFIEHQRMKTVATVLNERGYRTGSGKLFSNTTINRLLHDATAKGIYCGNYSKYDGATKIRSLKPEEERVYTSVPAIVSEELFDQCVRIVASQREKRRPPAKRTRHLFTGFLHCACGAKMYIWHDFPKYRCRTCGTSIPSAVIEHVYREQLHGLLVSEHQLRSHLEAGHERLREKEALVSVGEAELARLNKEDDRLYALYQSGEFSAEDYGRRFRPLGARRNELEDEIPHLQAECDVLRITLASDLEAFSEARDLYAQWHTLEMPEKRSLVEAITDKIVVGKEEIEIHLISIPMSGTSGERSTNATGG

SEQ ID NO: 11799 - protein, 573 aa, synthetic construct
MQKNQTKKAALYIRVSTHYQIDKDSLPFQRNELINYAKYALGIDDYAIFEDAGYSGKNTDRPAYQDMMRRIRAKEFSHLCVWKIDRISRNLLDFAAMYDELKKFNCTFVSKNEQFDTSSAIGEAMLRIILVFAELERKLTAERVTSIMYSRANKGLWNGAPIPLGYKWDAKGKYPVIDEDTAVVVRYIYDQYEKIHSTMKLSDKLNRENIKSARGGEWTGTTVKGILRNPFYKGTYRYNYKTQTGRIKPVEEQIIHEDNHPGIIDKEQWDRVNKILDENSTRSVAQLRSNVKYTHIFSKLLRCGQCGHTMGGGLDRARSDGYRPSRYYCTSHTRKAGCTNGVYSDVYLGPFVFNYIANLVRAQRALTDSQKPRDLERMLLRGKFFDNIAGIEQQGLLDTYNTILYGSGEDVMLQPSPEIAAQSASELELLDRDQKKYERALERIEQLYLYSEESMPEKDYVLKRNELKAMLDNIAERRAEVNSRLGLAPASSDFLEKATYFYLTNSLNQKRSLDFRKMVDTFEPKMLQDFLCSVIDHITVVDGHVASISFKNGLTNKFIYKATKPPKNASTKP

SEQ ID NO: 11800 - protein, 540 aa, synthetic construct
MRTAIYARYSSQLQNARSIEDQVRVCQERAEREGWTITAVFTDFAISGAVRDRPGLNGLVEHIKAGKADQVLTEALDRLSRHQGDMSWLHDHIIHAGARIFSLSEGEINELQIGFKGTMAALFRKDMADKIRRGQSGRVAAGRIPGNLAYGYRKVHRLDARGEPELGLREIDPDQAEIIRRIVCEYIEGDSARTIARRLNVEGVPSPTGRKWSVSMINGDVRRQNGILRNEIYGGILVYNRTHMVRDPDTRRRVSRPNPPEKWQRTPVPELQIIPAEEWERLQLALGARAQVAKEVNRRPKRLLSGMIRCGVCKGSVVIVANGHWGCANTRSTGTCFNRRQISNAVLERKVLGGLEEHLLHPDEIAAAVKHYHRRRSELQKRDRQAESAQRKKVDQLTSKIDRLVAVIAEDGGKIPELLAALHAARAEREQLLAQIGERKAENTIILHPAIVDSYREAVKNITATLAHDAAAERTGRNILRSLIDYVVLTPAPGRTGLEVELVGRLQNIMALAEGVPPKGGGYTLTVVAEEGLEPPTYGL

SEQ ID NO: 11801 - protein, 546 aa, synthetic construct
MSELHIYSRVSSAVQEEDGTSLDTQKDAGERLAKQLGFSPVLWNEGGQSSASEDLTNRPVLRKLLERVNDGLVQHVFVYNTDRLSRNEATWSVIRLRFVKAKVTLHTPGGVFNLSNPMDKMLLGIMSEISTYDNALRSERTLLGKNERVKQGFWLGGPPPFGYRLENKKLVEEPKESKWVKFIFESYKDKWTTRAIRQELMKNGVLTRRGNVAWSLGSIEKLLTNTHYGGYHIVKLSRTDEQVRVQCPAILPSSLIRQVKVESTLRSRQTRVSESNLKQFYLLRGLLFCASCGARLSGRLFDKQNRSVYYCPRKERNYVTEDVSPVQQCSNRRYLKIDKTDELVWETVVEVLANSHRFKDEVKNQVFGSSTTHESTQDDLRTLKRTQSRLKKEIVDETNSIVSLETDKILKKRNANEISRILENLDAHRLELEESLEKVNNEIMRIESKTQWVDWLTKFGDRITELSDFSPKDKQSFLTGILEKIEVSTSNTQEHSLVFYFKVPYVNDKIGWTKGKSGKRKYRIDGGESVLSVEIETSKKSPRLRA

SEQ ID NO: 11802 - protein, 419 aa, synthetic construct
MENIPLKYCLYARKSSEADEKQALSIDSQISEMHKIAEQEWLEIVETLTESKSAKASGQRRVYMQLLDGLREWKYNAILTWAPDRLSRNAGDLWSIVDMMDAGVLVQIRTHGSSFSNNPNEKFLLMILCSQAKLENDNRTKNVKRWLRRKCELGMRPWCVPIGYELIRWRTVSEKSTVGIDEKRAPLVKQMFEWVVNDGFSGRQVWEFAHEKWLRTKNGKRLTLSMIFRMLDCPFYYWEFEYPKGSGEWYTGTHTPLITKELFQQAREKLKVAPKGIWGRKHFYFSKIFKCGCCGSGITGEDKFNRQWKRFVYYRCNRHGWKWTCHEKYVREEALIEGLVKLCESMTNYKPLLEKKLTKEVEKINAMQSMIHWEKAKITTKAEYLSFIFTGWSDAEKSEVLRQFGEKMVLKDRLPQIVK

SEQ ID NO: 11803 - protein, 672 aa, synthetic construct
MNARPQHDLNNDTESVAGPLRVCAYLRVSTGRQAESDLSLPDQRKQIAAFCAARGWNLVLEFVEPGASATDDNRPEFQKMIERATDSDRPFDVILVHSYSRFFRDSFGLEMYVRKLAKAGVRLISITQELGDDPAQVMMRQVIALFDEYQSRELAKHVLRAMKENARQGFWNGSPVPLGYRAEEVEKRGARIKKRLVIDPVEAETIKLIFRFYLHGDGKSGPVGMKEIVKRLNERGYRTRRNARFGVGTIHKLLTNRIYVGEWLFNRSESKSGRQKPAAEHISIEVPAIIERAEFDAVQATLKSRDPRVAPPRVISGPILLTGLAVCATCNGSMVLRTGTSKSGTVHRYYSCSTCSRKGKTACKGRSIPMDRLDTMVVDELSAQLFTAERLTAILTSLSARRASRVAEVDGRIATLQREVSNAEDKLKRLYKMVEDGIAELDDLLKERVDTLKLDRERNQAALDRIRANAAPATEISPDVIERFGCAMRENIKSGEVPFRKAYLRSVIDRIEVDDDVVRIIGDKTTLEQAIGGKGFAMSGVRSSARKWYAQGESNPCLRRERATALQASRPPFSAYVHTLFMIESRRIRYCAPMCRRVYLTKYLTVSHASRAQRVPTYHTERSPEARAGHPLAWLGCQYSSRIPKRRSRGSVVGTMVSRESEIRPGSTGGGR

SEQ ID NO: 11804 - protein, 666 aa, synthetic construct
MKYQKAKKVLKFWTKKKAALYVRVSTRYQIDKDSLPFQRKKLKEYCEFLGIEDFVIFEDDGYSAKNTDRPHFQEMANRIRSGEFSHLIVYKVDRVSRNLLDFAAMYQELKDHRVTFISMNEQFDTSSAIGEAMLKIILIFAELERNMTSERVTGIMMDRAENGLWNGARMPVGYRWNEETKFPEPDPEERKIVQFIFDEYERTRSAMKVSRYLNNNHVKSKRGGQWTSKLVHDIIRNPFYIGTYRYNMREAGRGPLKPESEWIVRPDNHQWIIGKEQFDRCNKIMDENASGRDVSDVRATKHIHTFSGHLVCGKCGANMIASKDRSRASGYRPSMYRCAQRSKMLDCDNSKTISESYIGPFIFNYVANLARIQKNFKMIDSTEKLQKELLRGVEFADVHSIMPDGLQDTFAALAYSELGPGAYLPNIGLSGEEKDYSTAEQLSLLRSEKEKCKTAITRLTDLYLYDPDSMTKEEFSNRKKDLTNKIVNFEKQIEDIQDGSEGEDLADLSFIKKASAFLVAQRIVSKKHVDYMQMALELDNEILKDFVDQVIDQIVVVDGRVQSITFANSLTHEFYYTKPADLPVCKLCGGRIGSTVGCRTRSITYKNKRYQRIKVGDPGDTYTGKKGAVCSECSAQFGRWHHYKCGMERCPICGEQLVTCQHGPNK

SEQ ID NO: 11805 - protein, 456 aa, synthetic construct
MRNKEIAPALVRVALYIRVSGEEQKIKGLSLEAQQERLEAYARERGWVIVGIYIDAAKTARKNIHKRTEFQRMMDSVKRDEVDILLFARLDRWFRSVADYYKVMEVLQAHNCDWKTTDEEYDTTTANGRLYINVKLSIAQNEADIDGERIDVVFDSKIAHGTVVSGSAPFGFHVNEEKRLEVVPEDAAIVQDAFNYFENTVSQRATVRYVRETYGVNWCDATFRRMLKEKLYTGVYDRGGRYNDQFCPAIISRQQFDRVQALLTRNVRSAPSGKVYIFTSILTCAECGHKLVGYKSSDYFYYRCNQHFQRGRCSHNHSAREDVVEQWLFEHLGEELERCQLEWDVEAAKKKASVARTDKAALKRKLTKLKELYVNDLIDIEDYKKDYQIYVSALNQIPEPAQEAPPDFAAVRRLLDNSFRTIYDTLTREEKRTLWRSVIKEIRIDNDQNITGVVFG

SEQ ID NO: 11806 - protein, 538 aa, synthetic construct
MAKKVTVIKAAKAQKHTQEERRLKVCGYARVSTGSQAQATSYTAQVEYYTEKIESNPLWEFAGVYADEGISGTNVKHRDEFQMMIADCEDGNIDLILTKSITRFARNTVECIQTIRKLKEIGVGIYFEKENINTLSEKSELFITILASVAQGESENISSNNRWAIQKRFQDGTYIISTPAYGYGKDEDGNLVIIESEAETVRWIYESYLNGMGVYVIAKALNQKGIPTIRGAEKWQDGVIQDILKNPIYEGDMLQQRTYTETRFPFVRRVNNGQRNQYLIKDSHPPIVTHEEAEAVRNLMAYRVDVLHMNKSDYTKRYLFSGRIICGECGRTFRRQKIYIGKPYEKIIWTCSGHVEDKESCCLKAIREDVLHRAFTDMWNKLYTNQGTILEPLLKELTELVAARQDSEEIRQLDKEIKDISGQSQILNQVMRKGYMDSALFMESSSKLGWQLTECRRKKTLLTRKLRRTKEIVRTEQLIQLIAEQDGLMEEFDEQLFKMTAEKIVVSKEHDITFCLYNGLKLTERGGGQDAVAHANRL

SEQ ID NO: 11807 - protein, 544 aa, synthetic construct
MAETAKKISMIPAKVQYDRNVKLSEKKMKVAAYCRVSTELEEQDSSYEAQVEYYTSKISENENWKNAGIYADDGKSGTNTKKRADFNAMIQDALAGKIDMILTKSVSRFARNTVDSLVTIRKLKEKNVAVVFEKEGINTLEGTGEILITILSSLAQEESRNISENIRWGVVRKFEKGKVIVNCTKFMGYTKNEDGDLVIVPEEAEIVKLIFRLYLEGYSTGKIAKHLEEQGIKTATGQDKWHSTVIDKMLRNEKYMGDALLQKTYTVDFMTKKKVKNTGIVPQYYVEDDHEAIIPKELFYRVQEEMMRRASLCKAAVTRKKNQRSRYSSTYALTGMLICGKCGQEYRRVTWARNGKKKVVWRCSNRLTNGVKKCGESETLEENTLNRAVMEAIHRITSDDMEFMENFRQNIIHVIGNYSTAKESGEYEEKIKEKQEEMVALIAENAKTGSYTPEFDERYRTIAEEINALKEAQKTARNEKRMADSYEQRIQDIDHYLSTSTCQIPEFDNDLVRRLISTIKVESSEKLLIQFQSGIVMEQEIRYE

SEQ ID NO: 11808 - protein, 516 aa, synthetic construct
MARRKKVSPGNRLVAYYRYSGGSQQTEQSIEGQRRDCEAYARQHGLTIVHEYIDRHISGRGVESRLAFQQMIADSSKHLFDLVICWKTDRFARNRYDSAVYKKKLRDNGVRILYAAESSVEGPEGIILEGLMESLAEYYSAELAQKMRRGMRESALKGKAINPNRPLGLTTDEHKRFIIDEKNAPTIRFIFEHYAAGESSASIVDQLNAAGLRTSKGNSFNKCSIPRIIQNEAYHGVYICKAYDVRIDGAIPAIIDDDLWKRAQKMLTLNKQHRAPHSSHADYLLSGKLFCGCCHSLMRGISGHNCRNDVYYYYACGNKADGGTCKKKNIPKDVSENLVVNAICENILRPDTLEDLADAIAAAQQADVNQPDPERAMLEQNLADVHRKINNIIESIENGTASSRLSARLADLEQQESTLNYQLESLKEVHPPVLDRERILFLLEQFLISPNERTEDYNRRIIDTFVNRIEITDTEMLIYFNLSEASASEKQKNSQPNNCSTGNHLVRVARIELTAS

SEQ ID NO: 11809 - protein, 514 aa, synthetic construct
MRKKKVKDGNRLVAYYRYSGGSGQTEQSIEGQRRDCENYAKLHGLTILHEYIDRHISGKTDDRAAFQQMMNDGDKGAFDMVICWKTDRFARNRYDSAVYKKRLRDNGIEILYAAESNVEGAEGIIIEGLMEALAEYYSAELAEKMRRGMRESALKGHAINRCRSLGLTTDENKKYVIDEKTAPTVRFIFEHYAAGESSTSIVEQLNAKGLRTSQGNPFNKCSIPRIIQNEMYRGVYTSKAYNVRIEGAIPAIIDDDLWKRAQAMMKTNRQLKAKYEPKAEYLLSGKLFCAKCGCTMKGVSGHSGGNDEVYRYYACSNPQCRKRNIPKDDLEGKVIRSICDHLLQPETMELLAETMVDVQKADMEKPNAERDVLEQELWDVRRRSKNIMDAIETGSANPQLVARLDDLTQQENTLTYQLSTMEAEKPLLFTKEQYLFLLQQFYAQPTEQDDAYKRRLINTFVTNIEVSDSELLIYFNISEETENKNKNASQSNFDKSSSTEKRLVRVARIELTAS

SEQ ID NO: 11810 - protein, 516 aa, synthetic construct
MARKKKVSPGNRLVAYYRYSGGSQQTEQSIEGQRRDCEAYARQHGLTIVHEYIDRHISGRGVESRLAFQQMIADSSKHLFDLVICWKTDRFARNRYDSAVYKKKLRDNGVRILYAAESSVEGPEGIILEGLMESLAEYYSAELAQKMRRGMRESALKGKAINPNRPLGLTTDEHKRFIIDEKNAPTIRFIFEHYAAGESSASIVDQLNAAGLRTSKGNSFNKCSIPRIIQNEAYHGVYICKAYDVRIDGAIPAIIDDDLWKRAQKMLTLNKQHRAPHSSHADYLLSGKLFCGCCHSLMRGISGHNCRNDVYYYYACGNKADGGTCKKKNIPKDVAENLVVNAICENILRPDTLEDLADAIAAAQQADVNQPDPERAMLEQNLADVRRKINNIIESIENGTASSRLSARLADLEQQESTLNYQLESLKEVHPPVLDRERILFLLEQFLISPNERTEDYNRRIIDTFVNRIEITDTEMLIYFNLSEASASEKQKNSQSNNCSTGNHLVRVARIELTAS

SEQ ID NO: 11811 - protein, 465 aa, synthetic construct
MKGNAGDTIVKKIDLSPELVRVALYIRVSGEEQKIKGLSLEAQQERLEAYARERGWVIVGIYIDAAKTARKNIHKRTDFQRMMDSVKRDEVDILLFCRLDRWFRSVADYYKIMEVLEAHNCDWKTTDEEYDTTTANGRLYINVKLSIAQNEADIDGERIDVVFDSKIAHGTVVSGSAPFGFRVNEEKRLEVVPEDAAIVQDAFNYFETSISQRATVRYIRETYGVNWCDATFRRMLKEKLYTGVYDRGGRFNDHFCPAIISKQQFDRVQALLERNARSVPSGKVYIFTSILTCAECGHKLVGYKSSDYYYYRCNQHFQRGRCSHNHSAREDVVEKWLFEHLAEELERCQLEWEVAAAKKKASIARTDKAALKRKLTKLKELYVNDLIDIEDYKRDYQIYTAALKQIPEPSIEPPPDFAAVRRLLDNDFKTIYENLTREEKRTLWRSVIKEIRIDNDQNITGVVFG

SEQ ID NO: 11812 - protein, 546 aa, synthetic construct
MGKKQKTNGGDAVIYARYSSHNQRDVSIEQQVEACRKHAAELGLTVTATYEDRAISGKTDKRPSFQRMMRDAEQHKFAYVLAWKSNRIGRNMMQALVNESRLVDCGVKVFYAEEDFDDNAAGRFALRSMMNVNQFYIENMAEDVKRGLYDNAKKGLVNGSLPLGYKRGADGKPEIDEPKAAIVREIYTRVAAGELFASIADDLNARGIKTARGREWNKGSFHVLCHNDRYRGIYMYGDIRIPGGMPRIISDELFYDAQEAYSMKKDNRYGRARHGAENYLLTGKLYCGHCGGYMVGISGTSKTGEMHYYYACQKHRLEHTCEKKAIRRDVIENAVARAIMMYCLDDETIDFIVDSTIAYFKQKDHELHIEAMENELAAVQQAISNLMKAIEAGIITPTTRTRLLDLEEQQAKLSAKINTAKAERVEIDRDDLIAGLQLFRTGDIKNKKFLAKLFNTFLIAVYLYDDNRLKIVFSFTGNHNSVEIPLELDNDCPDSQIVSDETEVRMSHLECRKNLGSPPSSGEAEKGDDCSDGRFVRTAPLPPHKK

SEQ ID NO: 11813 - protein, 585 aa, synthetic construct
MAKKKKPAGGNAIIYARYSSHNQRDVSIEQQIEACRKHAAELGLTITDTYEDRAISGRTDNRPAFQRMMRDAEDGKFQYVLAWKSNRMGRNMMQAMVNESRLMDCGVKVFYAEEDFDDSAAGRFALRSMMNVNQFYSDNLAEDVRRGLMDNASKCMANGRQPLGYKRGEDGKVVVDEPAAAIVREIYTRIASGEMFMDIARDLNRRGIKTQSGSEWNKSSFKVLCRNERYRGIYIYGDTRIEGGIPPIVDDVLWYKVQEVLKVKKSKNRHHCPSDEDYLLTGKLRCGKCGGYMIGMSGRSKTGDVHHYYACQNRRVGHTCDKKNIRRDVVEPAVAQAIKQYCLTDDAIEWITDQTIAYWEDEDRKLQIDSIENDLSAVQSSISNVMKAIEMGVITETTRDRLIELERQQTDLKSKLALAKEEIVHVDRKDLISSLLAFRHGNVHDRAYQEKLFNAFLIAVYVYDDDHLKLVFNSFGKDDTVNIALDLGENDDNSGLSDVSKSSPILSNGQPKKNQSNMFGWFFFLFVSPMNRSAPLSRFTASVQKPQIETAEHFILWFCETLFKQQNQDRPFNASPFGRGGIAKQ

SEQ ID NO: 11814 - protein, 530 aa, synthetic construct
MRAVRKRDREDPKTAPKATMRCAVYTRKSSDEGLDQEFNSLDAQRDAAEAYIMSQRAEGWECLPDRYDDGGFSGGSMDRPALDHLLRDIEAGRIDCVVVYKVDRLSRSLMDFARIMQLFEQHGVSFVSVTQQFNTTSSMGRLTLNILLSFAQFEREIIGERIRDKIAAQKRKGKWAGGVPVLGYDVDRSGPSPRLVVNAAEAARVVAMFELYAEIQALHPVVRELKRRKWCNKRRVTKKDRVIGGTPFNASTLYTHLTNPVYIGKIVHKAEVYDGEHEAIVRRELFDRVNEILKYNGRTGGAEVRNKYGALLRGLLRCKACGYAMSHTFARGQGRRTYHRYYRCIEAIKSGAAHCPSKTLPALEIERVVVEEVRRLAEDRDLLKRVLADAERLVAGELGELRKEHSGLARDLERHHAELGRLAQSGFTSADVALRVADLNERIAQGEARTQELNARSVELERQVIDPDEAAEVFAGFDAVWSNLIPREQARLLKLLIEVVHYDAANSSVAVTFRPSSIRAFMDRVKTEPA

SEQ ID NO: 11815 - protein, 607 aa, synthetic construct
MKQKLVAAIYARKSVILKKGDTLNIQEDKCRENLKLRYKYDYDLTIKCFTDEKTGKDMDREEMQSMIEQIKEGKVQVVCAYKLDRFGRNAIELVNFIELLKKYNVKLHCVDDQINYDPTDDNDVMTKLMIVLLSVLAEMERNNIRQRVIVTVYSLARKGFWLGGTAPYGFVSVRVPNEGIIDDVGAKSICILNPYAEEIQVVKYMYATYKDEDVSYSELANRCNDLGYEPRFASMFDQHTIQGMLMNLVYVKAAPQIYDWLISKGYSVENIPARDKFDGKHALLTYGKTLRGEEADNNIEAENKNRKDVKDWIVAIAPHEGVIEANDWLVVQNKIERNKGSKSKKNTKHNNVLITSDMFRCGCCGGVISSFNRKSRTDDNVLYPHYRCENKRKRRGKLCDVDNLPATDVDEKIIDLIFEKRDEIASSVEYIKRNLMPARKEYVKKNIIPKLEKEIKVQLKKIDGFLENMSSGKLNDNVLEMVNNKIEECNVKIKELEERIAEEDNKMLSMDKNHQNLDLLIDKFFSLDKTDFMKLPMKDKRNLVRLLIKEVVWDGENVHVYFKTPDSVCGGDTTDSLSINTALTNVDMVKQHFLMPYLIIFPRMKEY

SEQ ID NO: 11816 - protein, 520 aa, synthetic construct
MPQRALIYCRVSSKKQTREGSGLDSQEYRCRQYAEAKGYAVEAVFPDNVSGGGDFMQRPGMVALLAYMDARADERFVVVFDDLKRYARDVEFHLGLRRVMNERGAVRECLNFNFDDTPEGKFNEIVFAATGELERLQMARQNKQKSMARVEQGYCIQATPPIGLKYVKDKGGGKVLVHDEPLASIVREALEGFACGRFASQAEVQRYLQAQPEYPGTMKDNGVRQQQVRRMLEQILYAGYVAAPRWGIPMREGRHEGLISKETFWRNQERLKADPSMPARKDMHADFPLRGAIVCGSCGFSLTGGWSQGRKKQYAYYRCHHHGCAERGKGIPRARLTERFEDVLRSLAPTGPYLEMVKAMFARCWDAQHERMADAARVASDKARRLDDEIGKVVDRMIEVSNPRVLQAFENRIEALEREKLMALEMANRKPQSVRPFSEMFEHTMRFLANPYECWKIGGPTARKLVMRMAFDAPLAYDRKTGCLNTEKSSVFRILEGSNVLKSRMVGAAGIEPATPTMST

SEQ ID NO: 11817 - protein, 528 aa, synthetic construct
MLDNSNVAPGKNKTLRCAIYTRKSHEEGLEQEFNSLDAQRESAEHYIEAQRMRGWTALPDRYDDGGFSGGNMERPGLRRLLADIDAGKIDVIVVYKVDRLSRSLLDFMKMIDLFNEKSVSFVSVTQHFSTTDPTGRMFLGILITFAQYEREVIAERIRDKVAAAKRRGKYCGGVPILGYDVDRDNKKLLVNPDEARTVQYIFRRFIQIGSAKKLGQELNEQGYRTKAWTTKKGKVREGSEWNTAHIYRLLNNRIYIGEIAHKDRSYPGEHEGIIDRATWDKVQAILEDNKPVKVSMARTKMVAPLKGVIRCGHCGCAMGPTYARKNGRHYTYYICQKDSKRTVSRCPLKRIPAGDIEQAVIEQLSAVFRTPTLVAKTYFAARDIEQAERERLFRQKSQLEMELSQAREQALELMKPGNDQPGKTEMLTTVNRQAVELSKQLTHVSERCRAYQGNSITEQDVSEAFQNVEGFWEDLFPVERNRLIRLLVDKVEIRETGIDMELRTNGLTTLIAELAGLACEVTERRASR

SEQ ID NO: 11818 - protein, 499 aa, synthetic construct
MNAVIYARYSPGPRQTDQSIEGQVRDCMAYAKENGITVLDVYADRHISGSDFENRGEFNRMLRDAEKKQFDSIIVWKIDRFGRDREEIALNKIKLKRHGIRLLYAKEIIPDGPEGIILESLMEGLAEYYVADLRQKVKRGHRESALKGYAVGGQAPYGYKIVDRMYQVDEKEAWVVRYVFENYAAGCTAVEILENLEKMGVKNRKGGLITKNGIYTMLRNEKYIGRRFYDGIPIPIPAIINQELWDAVHATFHKRVGQASSYKADEKYLLSLKAYCGECGSLLVGECGYGKKGVRYSYYKCAARKRKHGSDKCTLKTYRKDDLEDFVVYHTINDVLQDDVIEYLADRVMEIQARDTVNLRLEQHTSALKDTEKAINNVMKAIEQGIITASTKQRLVELEAQAEDLKIIIAKEEIKKPALTRDHIIYWLNLFKKGDVSDPDFKQRLMDVFVHSVYVYNKKVVIAYNYADNNHSVDFDPEVFRCSDEHRIVRHRGFEPRTT

SEQ ID NO: 11819 - protein, 453 aa, synthetic construct
MECVAYMRVSTEKQAVEGNGLDSQKRDIENYCRKNELVITDWYIDDGYTGTNMDRPELQRLVNDCSRKRISCVVAFKLDRLSRNMIDGIYIIEKVFQKYNVVFKCVHDSVNYDSPMEQAYTQMMAVFAQLDKNTMMLRMRGGMLERVKQGYWFGGGNLPYCYSYSKDQGILIPIPEHAEQARKGLELFISGYSDAKIKEICGFRSELVTRSILTSVVNIGMIPYKGKIYQGKHEAVFDKDRFELGLELRKSRCSAKTYCITEPNLLTGLCYCGICGCKMRYQKWGSEKHKIYCCSRNKSLSYLPNYNASCNNSLEWADEIEKQVEEEILKISLDLSSYKPKEKATKLEIMQSQLEKEQIKLKRLYNLYADGNDTVLEMIKELESQIKEMKSNIAAESKNAINTQKKEFVYENIKKLADIWDKVDKKQKNMILKTIIDRIVIVNGNIEIQLKNF

SEQ ID NO: 11820 - protein, 543 aa, synthetic construct
MEVKRIDIADVEIKQQKMKNVCAYCRVSTNIPHQKGSYESQLEYYENMIRSKAGWNFAGIYADYGKSGTKEKGRTDFMRMLEDCEAEEIDIICTKSISRFARNTVECIKVVRELKKKQIDVYFEKERIHTLSEKSELLLSIYSSVAQAESESISSNQKWSIQKRFLNGTYILPNPAYGYYTNENGLLELDQKRAVVVRYIFDEYLDGKGVWLIAKSLNEQKIPTRTGKKNWIPVTVYTILKNSIYTGDLLLQKTYSEDTVPFVRRKNHGEYRQVLIENDHEPIVTHEEYEAVQRMLKQKSNRTKENQEEQPEEVSEFKGKVICGICGSSYNRQVKKDRTGKSNITWSCARRIQTKDLCENDIIKESQLEQAFRTMWNKLSSHCDEILVPLVNELEQLQETPMIQEQLERLDKQIQEQKKQREILNHLASGEMIDSAFYMEQQNIISKNLKEYQRAKEQCLRKSRQRKELIQTKELIGQIKKGPQYLEVYDKTLFQAIVKKIIVNPNELIFQLKNGLKLTERRKKAWAEKQQFMAISLQKASYK

SEQ ID NO: 11821 - protein, 538 aa, synthetic construct
MSIPYERKVQVIPPKINIHTTKKQEVKRMNVAAYCRVSTTQESQETSYEAQVAYFTQLITENPSWQLAGIYADDGISGTDMKKRDNFNALMERCLRKDGDIDMVLIKSVSRFARNTVDSLSCIRKLKEKNIAIYFDEEHINTLESSGELLITILSSQAQEESRNISENVKWGLKRKYEKGEVLVRRMFGYQKGIDGQLHIIPEEAEVVRLIYGKYLEGESLNSIARILKEKGIKTIRGNTQWNVNSIRTILINEKYIGDAMAQKTFTIDYLTKARKENQGELQKYYVENAHEAIIPREVFYKVQEELHQRANLYKKSSKQETESKGKHSGKYALSKITVCKECGCEYRRQIWSKYGEKKTVWRCENRLRNGTRYCKDSPTIEENVLHKAVLHAINQVLENKGDFVQTFRKNVVTALTHGTEDSEYAKEKKNLQKAMAELIQQQAQQGSNETAFEERCQAITAQIEALEMEQIKAACRGEKSRKMEDIEGFLDKTNCILTEYDDKLVRQLIQNINVVNARKIEVVFKSGITVEEMLLEY

SEQ ID NO: 11822 - protein, 530 aa, synthetic construct
MAKKKKPAGGIAVIYARYSSHNQRDVSIEQQIEACRKHAAELGLTIIATYEDRAISGRTDNRPAFQRLMHDAEKGKFSYVLAWKSNRMGRNMMQAMVNESRLMDCGIKVYYAEEDFDDSAAGRFALRSMMNVNQFYSDNLAEDVRRGLMDNANKCMVNGRQPLGYKRGKDGKVVVDEPAAAIVREVYARVASGELFTDIARDLNRRGIKTADKGEWNKNSFHRLCSNEKYRGIYIYGDVRIEGGIPTIIGDTLWYKVQEALRVKKLKRNGRHRPGDEDYLLTGKLRCGKCGGYMIGMSGRSKTGDIHYYYACQNRRVGRTCDKKNIRRDVIEPAVAQAIKEYCLTDDAIEWIADKTVEYWEKADRNLQLDSIEGDLAAVQSSISNVMKAIEMGVVTETTRDRLIELEKQRTDLKSKLALAKEEVVHVDRKKLISSLLLFRNGDIHDRQYQEDLFKTFLISVYVYDDDDNGHLKIVFNAFGDNNTVDLPIDFGETDNQSAFSDGAEKFDYSLHRSTRLKPSEEAQVAFLFV

SEQ ID NO: 11823 - protein, 523 aa, synthetic construct
MRFFSYGRKSVFSDKSDSIDNQFRMNREYCESKFSGQVDSWQQFSDEDFTGANTSRPDLQRMLSFIKGGFCDVLVVYQLDRLSRDVRDFANIYALLEEHGVMFISIKENIDTTTPIGRAMMYVTVVFAQMERETIAARVTDNMLGLAKKGYWTGGNPPVGYVRKHIVVNGKKHCSIEVDPEGARYVTQIFDTFLAYNCSLQGMETRFKNQGIRTQNGKFFSTAQLHKMLTMPYCVEATPEVYDFYAAKGCIMDPGSPREMWDGSVGVIIYGRSTEKNKKHQAQPPEKWTVCLGMHKPFMPAEKWLAVQARFGQNKCIKDAKWPVPLLKGVLRCKCGNLMQVSRKKKVDGTCSSWYYCRKRMRQGVDACDMGQIKCDLLDDEVLELFRGIAADPAMIQKFVKAEAPDEVPDLKAAQARVSACERKIGRLAASLALAEESSASKYIIAEMERLDVELGALKREASLAEMESHRAAASAKDAKATAVEIAKLIHGLEGFDDKEKNAIARAVIQECTWDGERLFITL

SEQ ID NO: 11824 - protein, 463 aa, synthetic construct
MNTYFHPQPELYGLRVVKYIRCSHEGQVLHGDTLEAQDTLLNEFIEVNHMVLVDTFVDEALTARKKFTKRKEFVRLLNGVRAHAFDMILFTKLDRWFRNIGDYHKIQEILDANSVQWKAITESYDTTTTNGRLHINIRLSVAQDECDRDSDRIKDVFAYKLKNKSYISGRLPRGLKLDADKHIIHDPEWKQWALDMFDHFESSGSIYSTFLFLTNKYGPLLRYDGVSRALKNPLYKGMYRDDPEFCDPLIDPERFDHLLELAKKNVRQRKTRRYYIFTGLLVCSSCQHSLVPYTIPHTLADGTHKDYVSYRCGYHSSSRLCDRSRTYREEYIEQYLLDHVRPALSHYIAEYDVVSSSASKKDPAAEAAKIRRKLEKLYDLFLDDLIEKDLYRQKYDELQAQLKECLAAPSAPVRDFSAVQELLSKNWEDMYCTFSKTEKNVFWKSFVESITVYEDGSMDINFL

SEQ ID NO: 11825 - protein, 406 aa, synthetic construct
MRIKVIKPTKAVHQQKKKVCAYVRVSTDSLQQEDSLENQTTYFKGFITANPEWEFVGIYSDQGISGYKENRPGFQKMIEDARAGNIDLIVVKSISRFARNTETVLKFSRELKSIGVGIFFQLQNINTLSGAGELMLTVLAAFAQAESEGASDNAKMTYKRKFESGIPAHGLECTFGYKANAQGDIVVDEEKAAVVRQIFDLAEQGIWPSKIKQYLNKNGVPGCAGGDWDDTAVFRVLHNVSYKGDAILQKTYTDSRRKRHKNEGQVDQWYIAENHQPIVPPDQWDKVQEILQKRSEHLQTPALPKTDKPRSSRNTYPLSNMMYCPHCGAKLIHNWSNKGRQEYWVCRTNNKVSKDACKGVWLPAEVANSWGEITEPIVVVQYEDEYGMRRFTAYPKDEYDAFKRED

SEQ ID NO: 11826 - protein, 467 aa, synthetic construct
MAREIVHIPARRGLSNRATVTDRKIRVAAYCRVSTDHEEQINSFENQVTYYTEYINRNPNYELADIYADEGISGTNTRRRDDFNRMIADCEAGKIDLIITKSISRFARNTQDCLNYSRKLKDLGIGIQFEKEGINTMDSSGELLFTILSSLAQDESRSISENCQWGIRSLFKQGVLHLNTNRFLGYDKDEKGNLVINEEQAVIVRRIYTEFMNGINPDVISRRLRDEEVPGCMGEAKWQASTIFGILRNEKYMGDAILQKTFTSDYLTKKTVKNEGQLEQYHVKGDHEAIIDPEYWDAVQLELERRQNYMTAHSLRTMGRYTDEQPFSNRVLCGECGKVFWRRTWYRLNNTYKVWQCGNRYREKGVVTCHSENLKESDLHGAFVMAWNGILESRAEFAETWKAQAENGNALERFRAKQMLELTKMKPMKEIDLLLVGKVLDYVIVQYGGELEFHFLDGTQLAVEVTE

SEQ ID NO: 11827 - protein, 520 aa, synthetic construct
MKRITKIGANETLIQKKKLKVAAYCRVSTASDEQLISLDAQKAHYESYIRSNDEWEYVGLYYDEGITGTKKDVRAGLLSMIADCEDGKIEFIITKSISRFARNTTDCLEMVRKLTDLGISIFFEKENINTGSMESELMLSILSSLAESESVSISENSKWSVQRRFQNGTFIIAYPPYGYDNDNGTMVIVPEQAEVVKEIFAACLAGKGTHAIAKELNSRGLKTKKNGKWGAGAVNAILTNEKYTGDVIFQKTYSDSSFNRHINYGERDRFLCQNHHEPIISHEDFDKVRAVLDQRAMEKGNGTDTYRYQNRYCFSGKIKCGECGATFKRRQHYKPSGDYVAWTCGTHLESKENCSMLYISDEGIKLAFLTMMNKLVYGHNAVLKPLLRTLCGMDDKDRLLRIQELETRMEENTDRKQTLTSLMAAGFLEPAVFNKENNALVVEEQQLRQEKEQLMNSVGGDKVKIKELQKLMAFTSKGEMLTEFLDDTFLAFVETITVETRERIVFHLKCGLNLTERLVM

SEQ ID NO: 11828 - protein, 523 aa, synthetic construct
MEATKNITVIPARRRVGNTVNKEEKPKLKVAAYCRVSTDSDEQAISYEAQVEHYTDFIKKNTEWEFAGIFADDGITGTNTKKREEFNRMIDEAMAGRIDMIITKSISRFARNTLDCLKYIRQLKEKNIPVYFEKENINTMDAKGEVLLTIMASLAQQESQSLSQNVKLGFQYRYQQGQMTVNHNRFLGFTKDEKGQLIVEPDEAVVVKRIFREYLEGASLQQIGRGLEADGILTGAGKKKWRPETLQKILKNEKYIGDALLQKTYTVDFLEKKRVPNNGLVPQYYVENSHEAIIPRDLYMQVQEEMIRRANLHSGQDRKKRVYSSKYALSSIVYCSKCGDIYRRIAWNNRGKHSIVWRCCTRVEHGPGACNADTIQESELQNLTVRSINMVLGKKESMSETLQKNVEAVLTGADGVPLDEIDSRLEQLQKELLKVANAKGNYDSIADEIYHLREIKQNALVDNAEREGMKQRISEMQQFLSEQTQEITEYDERLVRRLIEKITVYEEKVTVEFKSGTSIDVRR

SEQ ID NO: 11829 - protein, 480 aa, synthetic construct
MATHKVAIYVRVSTTSQVDEGYSIDEQKAKLTSYCDIKDWNIYEIYTDGGFSGSNTERPALEQLIRDAKRKLFDTVLVYKLDRLSRSQKDTLYLIEDVFLENDIEFVSLLENFDTSTPFGKAMIGLLSVFAQLEREQIKERMQLGKLGRAKSGKSMQWAKTSFGYDYIKETGTLSVNPYQALIVRKMFEWYLSGMSITKLRDALNEQYGQDKEWSYRTVRVILSNPVYCGYNQFKGQIFPGAHEPIISEEDFNKTQEEIKTRQRTAAQRFNPRPFQAKYMLSGIAQCGYCSAPLAIKLGMIRKDGTRLVKYECKQRHPRKIKGVTVYNNNAKCDSGFYFKDDIEHFVLTEISKLQTDSDYIDKLFSNTDKETIDRASYQKQIDNLTAKISRLNDLYIDDRISLEELQKRSSDFMAERSALEKELDADSSLKAVERKKDIRRVLDTKDIFTLDYEQQKTIARALISKVRVTSESIVILWKL

SEQ ID NO: 11830 - protein, 484 aa, synthetic construct
MNAVIYARYSCDRQTEQSIEGQLRECKAFAASEGIHIIGEYIDRAISGTTANRPEFQRMIADSRYKTFQAVIVYKLDRFARNRYDSAMYKSKLKANGVRVLSAKEHITDSPEGIILEGLLEAMNEYYSAELSQKIKRGMRENAIKGKTTGGNVALGYRIGADKQMEIDPAGASLVRRIFTGYDSGMTFTEICDDLNHAGYTTSRGKQFRIDTISRILANQRYTGTFQCAGEDAHCPPIIEPELFRSVQERLTESRHKHRHTQSPHEYVLTGKAICGTCGRRLTGRAGTSKTDKRYYYYCCPNKCCGWLPAAELEHAVLDAIAQYTTPEACEQIANATYALYQQSTHENADLTAAQRRLQETEKKLENAVNAVLNGITSAALQATMQQLEQQKAALETEVRLLQTDAPELKLEHFQYFAHRLLEVQAEGTEKILQLLVNQVIVYKEQITVLVNLTDKTKTPPLEQVTAALRESSCSIACGGGDEN

SEQ ID NO: 11831 - protein, 525 aa, synthetic construct
MPRKKKLQEVGGLRLVAYYRYSNGGQQTEQSIEGQRRDCEAYAKAHGYKIVHEYIDRHISGKSDSRPAFQQMISDSDSHLFDAVICWKTDRLARSRYDSIIYKTRLRRNGVKILYAAETVVDGPEGIIIEGLMESLAEYYSAELAQKLRRGQRESALKCIALGGNRSFGYDIGPDKHYCINEKQAPAVRYIFEQYAAGATAADIVRELTARGYRTSRGNPFNKNSICRIITNEMYLGVYKYADIRIEGGVPAMIDRELFNRCQTQLAFNRAHGGGKGAPRADYVLVGKLDCGLCGHAMKGASATGHTGSKHYYYTCTQHVEKKCPKTSIEKNYLEQVIVDGVAKYVLTPEKISQIVDCMMELQAKEQEPKGNPEKDALEAELAECRRKQNNILEAIEEGGSARLAARLRALEEQEAQLTFALGEINNAPAPPQFSREALTFMFEQFRREEDEVDEEYRRRILDTFVSSILLYEDRAEVKFNITDQKTGDFERVILPISANKKPPEDDDTTSNSEGSTALRLVEAT

SEQ ID NO: 11832 - protein, 558 aa, synthetic construct
MLQADKITALYCRLSQEDMQAGESESIQNQKLILQKYADDHHFFNTRFFVDDGFSGVSFEREGLQSMLREVEAGNVATVITKDLSRLGRNYLKTGELIEIVFPEYEVRYIAINDGVDTARDDNEFTPLRNWFNEFYARDTSKKIRAVKQAKAQKGERVNGEVPYGYIADPNDRNHLLPDPETAHVVKQIFAMYVRGDRICEIQNWLREHEILTVSEMRYRRSGSCRHPRPHPNCIYNWPDKTLYDILSRKEYLGHTITGKSYKVSYKSKKTKKNPEEKQYFFPNTHEPLIDEETFDLAQKRIATKHRPTKVNEIDIFSGLLFCGDCGYKMYLQQGAGTLERKHAYTCGKYRNRIRTGELCTTHYIRKSVLKELVLADLQRVLSYVQTHEQAFIQTANECSEQAMKKTMAQQHKELDKAQGRMSELNVLFRKLYEDNALGKLSDEQFAFLTSGYDEEKKTLTRRIAELTQELDTAAERSADVKRFVTLVRKYTAIEELTYENVHEFIDRILIHELDKETNTRKIEIFYSFVGRVDTGDKPTESISYFRQIGADVKSYAI

SEQ ID NO: 11833 - protein, 528 aa, synthetic construct
MAYCIYLRKSRADRELELQGFGETLKRHRDTLIELAKKKNLPIGEIYEEVVSGDSIAARPQMQRLLNDVSDGKWEGVLVMEIERLARGDTSDQGIVTKTFTYSNTLIITPMKTFNPTDEFDQEYFEFGLYMSRREYKTIKRRLHAGMEASCKEGNYIHHTPPFGYSIVKNKKSKGYRLEPKPGEAEIVKLIFQWYTKGILKEDGSYELLGTARIADKLNSEYSIKPLGGVWTIPTISTMLRNEHYLGYIVFGKKKRKKVVENGIIVDKWTRNESYGLYKGKHPALVSQDTFNLAQERLSRNPRRPSKTITNPLAGVIKCGMCGRSMYRRPYQKRCQSASLICSEKTCHNVSSAFYLVEDALLTAIKEWIDGYEIKEEANKYDTSVLESKTKLLEEQQKQLITYKNQLTKVFEAYENGIYDSDTFLNRQKTVSESISSTEEAIVKLNKEIANEREIISHQEEIIPKARKILEIYKTSDDVQLKNDLMKSILDKVVYTKTANGHFKDQRQDDFKLELFPKLPKNKGNSSE

SEQ ID NO: 11834 - protein, 573 aa, synthetic construct
MAKVKLPDKPRVAIYTRVSTLHQIDKDSLPMQRQDLINYARLILNTEEYVVYEDAGYSGKNTDRPKFQEMMQQVRLGMFTHILVWKIDRISRNLLDFATMYSELKQLGVVFVSKNEQFDTSSAMGEAMLKIILIFAELERNMTSERVTAAMLSRAANGQWNGGRVPLGYDYDPETKTFTINESEAAVVKIIHDKYEQERSLVSLARYLNGHGYRTRTGCTYSPSTLLIILRNIFYCGDYRYNVLKDGDRQKRKKESEWITVKDHHPAIISREQKEEIARILKENRRLECERRGIYSKKKNVHVFGGLVICGNCGHAMTSTIRPADQDGIRWSVYVCPTKRRSEYLCKGRATSEVVLGEFVFNYILNMLNVQKNFDSINSVEDMEKMLLSGSTFRDVDGIERAGLDDLYNMLASGLTEKAPFDSSVEVRKKPVVSDIELENLNTEKTRIERAAERLQNLYLYSDDSISQKDYIIQREKLMSQLAEVNEQIGMVMSNADEKDVSDEEFVHAASKFILTQKLEGRTYIYYKRLATTVSREVLRSFVMSIIENITIYDGRVQTIVFKNGLSHTFILK

SEQ ID NO: 11835 - protein, 519 aa, synthetic construct
MADFEHVIIYLRKSRSDDPATTVEEVLFRHENILQEYAVKEWGARIPEDRIYREVVSGETIKDRPVMQHVMKILETGLVSGVLVVEPQRLSRGDLQDCGHIINSLRYTNTAVITPPKTYDLSDEYDRKFFEMELTRGNDYLEYTKKILNRGRIASVKAGNFIGNSAPYGYRKICVGTGKEKYYTLEIVPEEAEAIRLMFDLYVNKDYGFRSIAHALDMAGYKPRRSAEWSPAAISCMIANETYIGRVVWNRRKTIKKWENDTIVRTRPRQSEYISVPGKHPAIISDELFYAAKAKRNRTPRIKRYVQLLNPLAGLLYCGTCGHAMSRKRTVDKKYGSVSVSFLCNNQSNCHTKSVMYDAVIDRVKETLRQSIEDFEVKVNNKDETDIAYHRAMITNLKGELKKLKEKDMRQKDAYEDGIYTKEEFVVRNAKLAEQISIAQLKLDEAESSTTQLVDYQERLVRFRECLEALDDDTISAADKNALLKSCIDKIMYYNDSPSLPGIGRYVDNPFRLEIFLKL

SEQ ID NO: 11836 - protein, 597 aa, synthetic construct
MAYRKITDIRDTIGMRAVFYARVSTAEEEQLNAIELQIEENRGCIKDHGWKLVGEYIDRSKSGTMVKGRDDYQRLYEDLYEDLFDIVVIKDQERLQRNTLDWYLFINRVVQTGKLLFMYMDGKFYSPDDALITGVRAIIAEEFSRNLSKKLHNYHDHRIEKARQGQEIALQGSGNVYGWDKKDGKYYINPEQARVRRLMCEGIMARKGSTLIAKELNDAGYRNTVGKPWKPMDIPKFVYDCKNVGTMIINKERHDFESKQTIKLPKEEWVYVENALPPIVTQEEWDLICKIHEERVIATGSDRRGKKTSGYSFSGKLVCGICGAPYWRKQRVSKDEYWVCSTKQTKGRRTRKRDSTMGKAGEINPLGCDNKNISYNSLMEIMGVVSERLQANTDTIKQDMINWLTKLRKQLLEANGGHTEADLQRELSRKSKLLDAYLDGILNKQEYQKKAEELDERIIQLKTETEKNKANSGDIAEIDKVLANIDEEVARYVDGNEKLKVEYLLEHLEQVQIFPDKVIVIVPILSEGIVVEKTQYVSREKRSRQNDLFENDLWSVQPNGRRIFYFWIQRKGACTGSLACRLSDRGTGHLSKYDGER

SEQ ID NO: 11837 - protein, 521 aa, synthetic construct
MGNVMIIPAKRQVGNTSRRQEDKPKLRVAAYCRVSTDSDEQASSYETQVEHYTEYIKKNPEWEFAGIYADDGISGTNTKKREEFNRMIEACKAGEIDMIITKSISRFARNTLDCLKYIRMLKDKNIPVFFEKESINTMDAKGEVLLTIMASLAQQESQSLSQNVKMGLQFRYQNGQVQVNHNHFLGYTKDREGNLVIDPEQAEVVKRIYREYLEGSSMDKIAKGLEKDGILTGAGKKKWWTSTINKILRNEKYIGDALLQKTYTTDFLNKTRVKNNGIVPQYYVENNHEAIIPKDIFLRVQEELVRRRVVKTSANGKKRSYSCNHCFAQLVICGECGEMFRRIHWNNRGCKSIVWRCLSRLEATGMECHARTVNETVLENVVVQAINTLLGDKSAYQAQLQQNIAKVIREAQKNNTDGIDEQLMELQKELLEKANNKEAYDEIAQQIFKLREQCQQCTVDTAARDAQIARITDLQDYIKKQRTNLESFDETLVKRWLKQITVWEDHFTVELKSGLKIDIEG

SEQ ID NO: 11838 - protein, 535 aa, synthetic construct
MAKKKKPAGGNAIIYARYSSHNQRDVSIEQQIEACRKHAAELGLTITDTYEDRAISGRTDNRPAFQRMMRDAEDGKFQYVLAWKSNRMGRNMMQAMVNESRLMDCGVKVFYAEEDFDDSAAGRFALRSMMNVNQFYSDNLAEDVRRGLMDNASKCMANGRQPLGYKRGEDGKVVVDEPAAAIVREIYTRIASGEMFMDIARDLNRRGIKTQSGSEWNKSSFKVLCRNERYRGIYIYGDTRIEGGIPPIVDDVLWYKVQEVLKVKKSKNRHHCPSDEDYLLTGKLRCGKCGGYMIGMSGRSKTGDVHHYYACQNRRVGHTCDKKNIRRDVVEPAVAQAIKQYCLTDDAIEWITDQTIAYWEDEDRKLQIDSIENDLSAVQSSISNVMKAIEMGVITETTRDRLIELERQQTDLKSKLALAKEEIVHVDRKDLISSLLAFRHGNVHDRAYQEKLFNAFLIAVYVYDDDHLKLVFNSFGKDDTVNIALDLGENDDNSGLSDVSKSSPILSNGQPEQSHLRKLRWLFCLYHSARKNYYR

SEQ ID NO: 11839 - protein, 524 aa, synthetic construct
MRFFNYGRKSVYSDKSDSIDNQFRMSREYCEQKFPGKIESWQEFSDEDFTGANTSRPDLQRMLSYIEEGFCDVLVVYQLDRLSRNVRDFSNIYAMLEEHNVMFISIKENIDTTTPIGRAMMYVTVVFAQMERETTATRVADNMRGLAKKGYWMGGQAPLGYSIKHIVIGDKKHSALELDPDGVHYVTQIFDDFLSSHGSLNAMVTRFRHQGIRTLTGKFFSKAHLHNILTMPYCVEATPEVYDYYAAKGCIMDSASPREKWDGSTGVLIYGRFSDKSQKHLVQPPENWTICLGLQKPFIPAEKWLAVQERFKQNTFCKDAKWPVPLLRGILRCNKCGSLMPVSRRKKVDGTCSSWYYCRKRKDEGSEACDMNQIKCDLIDEKVLEIFRKIALDPDSIHQFVKTESPSEIPNLSFISSRISSVESKIGKLAASLALAENSTASKYIIEEIERLDAELAALKREASHAEMKIHQAAAKERNSQATAIEITKFINNLDGFSAKEKNEIARSVIRDCRWDGEKLFLTL

SEQ ID NO: 11840 - protein, 546 aa, synthetic construct
MKAAIYSRKSKFTGKGDSIENQIQLCMDYSKSIGIKEFLVYEDEGFSGGNIDRPQFKKMMQDAKDKKFDCLVCYRLDRISRNVSDFSTLIEKLNKLEISFISIKEQFDTSTPMGRAMMFISSVFAQLERETIAERIKDNMYELARSGRWLGGKTPHGFTSKKISFLDENLKERSMYQLEVNDEQMEIVKLIFNKYLELRSLSQLYKYVYHNGIKGPRGGKFDPSSLSGILRNPAYVKANEDILDYLRSLGMEVVGVPDGQCGILTYAKNTSNSIAAIAKHHGVIEPDIWLEVQSILNENKDKIPRISTGKTALLSGLLKCGKCGANMRIMYKGKRNDEDLKYYYVCGTKRSLGVEGCNCKNLNGPLVENLVIDKIKNCNIESVINAFNSNKAKVDTVFSDVRSEIDLFKNSISEKEKLIGNLVMELAKNTGSVASEYIISQIESLNGEIDSLKSKVSELESSSVDINSASLNLDIIVSNLKKFNYEVDDASLDDKRLLLFTIVDSIVWDDASGNLSIVYMGAKMDDLVSLSDGSHFCSDGRSYIYE

SEQ ID NO: 11841 - protein, 632 aa, synthetic construct
MPQLYSYIRWSSDRQEKGTTKNRQVAAAKAYAEEAGLEMVEILEPGTSAYRGKNRAGKLGDFIDAVKNNAIPSDSWLYCENLDRLSRDQVDEALRLFLELIGLGLTIVTGMDRKVYNRESIRQNPTDLMISILMFIRGNEESETKSNRTIGNVVALVERHKAGLPVNIKSVGRHPFWIDDSGSQYEAVKEHPVYWSIAREAIDMFLDGNGIYTVKRHLDKKYPNGLKGKEWDYQVLKKMRDNRALIGERTINAGGATYKLDNYYPWLCKDEAEYLTLAERKQQNNFKAKKDKVEEIKLLSGLQVLRCSKCGGTMHSFMNHGSARYICTNGVHLQKNCSGWSISAQLVEHCTIISLLIGYMNKRLKDGIDTTVIEEDLSRKETLITDLESRITNMAQAIAIAPNVSALAVQLNAFDMERKKTVLEVDKLKERLYSLKGKGSLEVDINEFMILIQWAVFTNMQDTDRNKIRKVISSIIESVIVDKTDGCITIKIKYHFKDEWLVFGGTDRKPHWAFKVEFSSVDNVSIRDEGFLTTSNLPLFNKAVEQLDKIEQSYLDLFNTANEMLEVVGYSEISGASFWPNTGKYDRVDIVYEGNTYSIALNGRVPKDIATALESTGLTRKEFIERYRIDQI

SEQ ID NO: 11842 - protein, 516 aa, synthetic construct
MARRKKVSPGNRLVAYYRYSGGSQQTEQSIEGQRRDCEAYARQHGLTIVHEYIDRHISGRGVESRLAFQQMIADSSKHLFDLVICWKTDRFARNRYDSAVYKKKLRDNGVRILYAAESSVEGPEGIILEGLMESLAEYYSAELAQKMRRGMRESALKGKAINPNRPLGLTTDEHKRFIIDEKNAPTIRFIFEHYAVGESSASIVDQLNAAGLRTSKGNSFNKCSIPRIIQNEAYHGVYICKAYDVRIDGAIPAIIDDDLWKRAQKMLTLNKQHRAPHSSHADYLLSGKLFCGCCHSLMRGISGHNCRNDVYYYYACGNKADGGTCKKKNIPKDVAENLVVNAICENILRPDTLEDLADAIAAAQQADVNQPDPERAMLEQNLADVRRKINNIIESIENGTASSRLSARLADLEQQESTLNYQLESLKEVHPPVLDRERILFLLEQFLISPNERTEDYNRRIIDTFVNRIEITDTEMLIYFNLSEASASEKQKNSQPNSCSTGNHLVRVARIELTAS

SEQ ID NO: 11843 - protein, 574 aa, synthetic construct
MRKKKIDAPKEKPQRAAIYLRVSTAYQVDRDSLPMQRKDLVGYCEYALNISDYTIFEDAGYSGKNTDRPAFQKMMMQIRNGMYSHLLVWKIDRISRNLLDFAQMYEELKTLGVTFISRNEQFDTSTAMGEAMLKMVLIFAELERKTTAERVTATMISRANDGTWNGGRIPFGYDYNKETQTFSVNGDESFIVLEMYDLYEKTDSLVHTARELNDRGYVSRQHNPFSPVSVWTILRNPWYIGTYRYNYYKIPGRKAIKDESEWVVIPDHHTPLVSKERFDRVQKMLDSNARYRNTPGRSATQKNLNIFSGLIWCACCGAAFTASPGKLHASGYRSAKYGCPNVRKTKTCNAKYTSDTVLGEFLLNFILNVINAQKRFDQIKTPADLEARLLRGDTFKNVAGIDSASVAALYEMLAEYSPADSVLLKKPTVKKNLDPELRKLRADKRKTERALARLDHIYLYSNKQMSDKEYLIKKNDLMNDLKEQDKSIGLLTSESWAQSLSDDDFLEQASSFIMSQRLQEHEYIYFQGLAECTEPSVLRSFFLSIVDSVRMRNGHVETLTFKNGISHKFTYLAI

SEQ ID NO: 11844 - protein, 579 aa, synthetic construct
MTKETSLQACDIITTSNPVLADCPPIKEEQDMNRQSDKITAIYCRLSRDDELAGESNSIVNQKAILKKYAQEQGFRNIQFFVDDGYSGANFNRPDWKRMIELVENDKVGVIIAKDMSRIGRNYLEVGLYTEMLFPEHDVRFIAVNSGVDSANQQDNDFTPFLNIINEFYVKDSSKKVKAVMKQKGESGEYLTTNPPYGYMKDPDNPKRHWIVDDEAAAIVRQIFAWCMEGYGPSQIAKKLKEAKVDCPTVHWMKMGRNAPAKTPDNPYDWAPRTITGILEKQEYLGHMVNFKTRKQSYRSKKKLENPPDQWKIFENTHEAIIDEETFARVQELRKNKRRPARTGKTNMFSGLVRCADCGEKLYYCTSASFETRQDHFVCSTSRKKGKEVCDTHFIRAVVLEEGTLQHMRLVIQCVADYEDAFRKALGAKRSEEAKKELSAKKRTLQKSENRLAELDRLFKRIYEDMVNRKLSEARFQMLSDDYEQEQADLRAKIEMLENEIQNQEDQAENVDRFIRQAKKYLYLEKLTPTILNDMVNAVYVHAPDKSSGHRVQDVTISYNYIGILPANLLYDVMNGKAA

SEQ ID NO: 11845 - protein, 548 aa, synthetic construct
MKFKYPAMGTTKNAVIYARYSSHSQREESIEGQLRICHEYAKAEGLAIVGEYIDRAISGTTDARPDFQRMIDDAKKKQFSYVIVYRLDRFARNRYDSVLYKHELKQCGVKVVSATEGIGTGDESILLEALIEASAEYYSMELSRKIKRGRQDSAMKGNFLGGAVPLGYKVVDSKFIIDDETAPIVRYIFERYAAGIGKKQIIDELTAKGYMRRTGKPFTYRSFDSVLRNRKYTGEFTQTGITVEGGCPAIVDTEMFEKVQARLEINRRAPAKAKAKTEYLLSGKMFCGYCGEPMIGISGTGRHEKTFYYYSCVGRRGKSGCKKQHEKKDFIEWYVCEQTVQYMQDPERLSHVAKRIIEINDAEFDGGKVKELERAVENCDSDIRKLVDALTTIPDAARPALYDKIERIGAAKADMEIDLAKLRVLSEVRYKQEDVEAWIRSMCRGDLMDFEFRRQLIDVFINSVYLFDDRVVIVYNIKNGKQVSAIDVLNAVEELDGVELFPDSAEDSSAGGNGSFLVADAPPKQDNPNLRPIGQGFGFLVFIKDIEV

SEQ ID NO: 11846 - protein, 438 aa, synthetic construct
MSTDQEEQLLSYENQVNYYTNYISENPLYEYAGTYADEGISGTNTKKRDEFNRMIADCRAGKIDMIITKSISRFARNTLDCLNYVRELKDLGIGIIFEKENINTLDAKGEVLLTILSSLAQDESRSISENCTWGIRRRFETGKHKMSTKRFLGYDTDETGKLVINRTQEPIVIRLYQEFLDGKTTDHIKRIFEREGVKNWDGGTKWQSTTLMSMLENEKYKGDALLQKSYTVDFLTKKRTQNKGEIQMFYVEDDHDAIISKRIWECVQLEIKRRKKYLEEHGTNSYSHRPESNPFASKIICGDCNKVFARKGWRSSTGVDRKVWQCSERYKVKGVMGCANRHVEEETLIKPYLMAWNALVENREDFMEQWTEQLQSENLLESYRAEKFIEYTDGAKPLTEMDTDFMLKTLDHIKVFEDGTLLVVFLDGTEIECKNEEE

SEQ ID NO: 11847 - protein, 426 aa, synthetic construct
MRVKVINKRPASVLQKKRVCAYARVSTDSRRQEDSLENQMETYERLITGNPEYEFIGVFADQGISGYCENRPQFQRMMEKARAGEIDLIITKSISRFARNTVTVLKFARELKELGVGIFFEEQNINTLSGDGEMMLAVLASFAQEESRSMSENNKWSIRKKFERGEVMITTSRFLGYDKNEYGDLIVNRKEAEIVSLTFDLYLMNVGSSRIGELLDYLGVKTVTGTTWESGTINGMLCNEKYKGDFHLQKYYTPENKRNHTRKNNGEVQSYYISENHEPIVSPEVWEKVQEVREQRKRDRNIGQDSTMKFQNRYPLSGMLICPYCGKALRRRQVYKKKIQWLCSTYIEKGVKACKGIRIDDVELQGLNITEQTVIEEVVKNGKKHYCYTSKADFDCGIRNSTVSAEIEDGSVLPSVNRPRRTVIKL

SEQ ID NO: 11848 - protein, 523 aa, synthetic construct
MKKVQVIPATLRSYTKKLMDSQKKRRVAGYARVSTDHDEQLTSYEAQVDYYTRYIQSRNDWEFVGMYTDEGISATNTKHRKGFKRMIDDAMDGKIDLIITKSVSRFARNTVDSLTTVRKLKDKGIEIYFEKENIWTLDAKGELLITIMSSLAQEESRSISENVTWGHRKRFADGKVSLAFSHFLGYDRGMDGNLVVNKKQAEIVKLIYRLYLSGYTFHSIAKELTERKIPTPAGCKIWRANTIRSILMNEKYKGDALLQKKITVDFLTKETKKNEGEVPQYYVEHNHEAIISPQVFDWVQEEIKRRRKGKKRYSGVSIFSSKIKCGQCGGWYGAKVWHSTDKYRRTIYRCNDKFKRHCQTPHLTENEIKGAFIRAVNQLIENKEDILSNITMLKKRLTDIASLEKERDALELDLNMLNDQVQLLIAENAQVAQDQDEYGRKYNGLVSRYEETKKKYDQVCDAIQQCVDRYWKLDNFMKNLQKQNLVYEFDERLWCSLVDFIIVYSKVKIQIVFKNGTKIHVGM

SEQ ID NO: 11849 - protein, 545 aa, synthetic construct
MRTIRKIEQKISGLKQRKKVAAYARVSMESERMHHSLSAQVSYYSKLIQKNPNWEYAGVYVDYGISGTGIKKRQEFRQMLEDAEAGKIDIILTKSIQRFARNTVDLLQTVRHLKELGIEVWFEKENIHTMSGDGELMLTILASFAQEESRSISDNIKWRFRKKFEQGIPHAKFFVYGYCWEKDNLVIQPEEAAIVREIFDAYLQGRTRKDILRELKRREIRTMYGNYFKDASIRQILTNRIYTGVLEIQKTFVTDPITKRQAVNHGERNRYVVEWHHEAIISSDMFERVQQELKNRKEMGMQRGGYARDFLNTSCFTGIIKCGICGKSYVHVVRKYKGRIREYWTCGSHKGKGTNCGAYGSIPQPALKKACAAVLGTDEFDEELFVQRVKKIVVPSYHTLVFHFKDGNVITQEWKSTALKDMWTDEQKKKQRQWMETYHQRDTSGRYTAFSERIVCPACQTKFIRCLEKRKNGKVAYWRCRGEHRCIHVRSIKEEWLQRMAAETMGKLEFDDTAFRAQVQRIEVQDNETLLFQFNDGHTKEVKLS

SEQ ID NO: 11850 - protein, 516 aa, synthetic construct
MPKTEEKQAAKAVIYARYSSDRQREESIEGQLRVCEDYARRNNITILHTYADRAMTGRSDQRPEFQMMIRDAATMAFNVILVYKLNRFARNRYDSAKYKHKLKKYGVKVVSAMENIADDPSGILLESVIEGMAEYYSAELSENVLRGMTQNALEGKWPGGVIPLGYKLDKGGRLIINEEKAPIVRMIYQMFLEGMSVARIERKLNDKKYTTDAGKVFSRSRVYYILHNERYIGTFQWKDIKKEGIIPPIISKEAFHAVQERINAMKSSSYRTNNNYLLAGKAFCASCGAKVSGTSGKSQNGNKYCYYGCSHHHRSARYEYCETKNIRADVLEKLVCDKTHEILSSKKAIKEIARQAVKLRPRNESELEIRAIKNHISSCQKKIDNCIKAIENGVMSNALVESLNENERTLDVLKEKLAKASLMQGSGLLTEEKIQFFFETIREKAKETEKYNDILLTSLVRAVYICNEYVEIQYNYAEQLPILTNPVRIESCSYKCTNGGTIWIRTKDLFDVNEAL

SEQ ID NO: 11851 - protein, 610 aa, synthetic construct
MENERTMLPAVAYYRYSPGGGQTEQSIEGQRRDCLAYARSHGYVIVKEYIDRHMTGRNDKRPNFQLMMHDAELHRFDTLIAWKNDRISRNRRDALNYKDQLRRCGVQIRYAEMDIPRGPEGILMESVMDGLAEYYSAELAQKIRRGMTESAHKCYALGSTPPFGLMVQDHKYVPDPATAPYVRWIFEQYASGTLITEICSTLNAKGVRTARGHEFNKNSLRVLLRNEKYIGVYEAKGIRTEDAIPPIIPRDLFYAVQQRIPQNAHSGHKLSGPRSFPLSGIAYCAICGAPLIGTCGTGKSGAVHTYYACTAHKHKRTCAKKNIRQASLEKQVYTATLDYVLQPSVIRPIAKQVEALSAADNANQEEMLAVQSQLKDTTRRINNILTAMEEGDFSKAVSARLSVLESEQTRLEGQLAALRRAKPKVTASRVEFMLEKMRQTLTDLTSDQLTALTKIFLSRVDLSDDELILTYTLIGTPSSPHPIPLKDATSATLVPFPLCSQDVHSAPPYCANPNSIFFVKYCFGFVFVLEDVDLSTSSFFRRIVSKRLFSIPDASRGRVAPANPRAAYMRPLRRSKKQKAAYLKRDKRLLAGVEGFEPSARGFGDRCSTN

SEQ ID NO: 11852 - protein, 514 aa, synthetic construct
MRKKKVKDGNRLVAYYRYSGGSGQTEQSIEGQRRDCENYAKLHGLTILHEYIDRHISGKTDDRAAFQQMMNDGDKGAFDMVICWKTDRFARNRYDSAVYKKRLRDNGIEILYAAESNVEGAEGIIIEGLMEALAEYYSAELAEKMRRGMRESALKGHAINRCRSLGLTTDENKKYVIDEKTAPTVRFIFEHYAAGESSASIVEQLNAKGLRTSQGNPFNKCSIPRIIQNEMYRGVYTSKAYNVRIEGAIPAIIDDDLWKRAQAMMKTNRQLKAKYEPKAEYLLSGKLFCAKCGCTMKGVSGHSGGNDEVYRYYACSNPQCRKRNIPKDDLEGKVIRSICDHLLQPETMELLAETMVDVQKADMEKPNAERDVLEQELWDVRRRSKNIMDAIETGSANPQLVARLDDLTQQENTLTYQLSTMEAEKPLLFTKEQYLFLLQQFYAQPTEQDDAYKRRLINTFVTNIEVSDSELLIYFNISEETENKNKNAPQLNFDKSSSTEKRLVRVARIELTAS

SEQ ID NO: 11853 - protein, 528 aa, synthetic construct
MAYCIYLRKSRADRELELQGFGETLKRHRDTLIELAKKKNLPIGEIYEEVVSGDSIAARPQMQRLLNDVSDGKWEGVLVMEIERLARGDTSDQGIVTKTFTYSNTLIITPMKTFNPTDEFDQEYFEFGLYMSRREYKTIKRRLHAGMEASCKEGNYIHHTPPFGYSIVKNKKSKGYRLEPKPGEAEIVKLIFQWYTKGILKEDGSYELLGTARIADKLNSEYSIKPLGGVWTIPTISTMLRNEHYLGYIVFGKKKRKKVVENGIIVDKWTRNESYGLYKGKHPALVSQETFNLAQERLSRNPRRPSKTITNPLAGVIKCGMCGRSMYRRPYQKRGQSASLICSEKTCHNVSSAFYLVEDALLTAIKEWIDGYEIKEEANKYDTSVLESKTKLLEEQQKQLITYKNQLTKVFEAYENGIYDSDTFLNRQKTVSESISSTEEAIVRLNKEIANEREIISHQEEIIPKAKKILEIYKTSDDVQLKNDLMKSILDKVVYTKTANGHFKDQRQDDFKLELFPKLPKNKGNSSE

SEQ ID NO: 11854 - protein, 427 aa, synthetic construct
MDRIIKRVDFPKIMQPQALKVCAYTRVSSGKDAMLHSLSAQVSHYSEMIQSHIGWVYCGVYSDEALTGTKSDREGFQQMLTDCRAGKIDMVITKSISRFARNTVTLLETVRELKNLGIDVFFEEQNIRTMSADGELMLTILASYAQEESRSVSENQKWRVKRNFEAGIPWNGRMLGYRMQEGKYCIIPEEAELVRRIYREFLDGMGRNRIAARLNEEGIQPTRYGEEWHPQTIAKILRNYAYTGNLLLQRFFCESYITKKMVPNVGQKAMYHAVGTHEAIIPLAEWKAAQEEIIRRAERHCSKPPAQPSFFYTGRIQCAKCGKTFRRKTTAARVVWICGTFNTKGKKYCASKQIPEVTLDELVQQVTDDPSSIEKIIADDGNTLHFHFSDGTIVTRTWADRSRAESWTPEMKEKARQQSLARRRQKS

SEQ ID NO: 11855 - protein, 527 aa, synthetic construct
MNTAVRTVTVIPPSINPMTHLTNAPLYKLRVAAYARVSTDSDEQFTSYEAQIDYYTQYIQRNPEWTFVKVYTDEGISGTNTKHRAGFNEMIEDALAGKIDLIVTKSVSRFARNTVDSLVTIRKLKEKGVQVYFEKENIYTFDGKGELLLTIMSSLAQEESRSISENVTWGQRKRFADGKVNLPYKNFLGYRKGADGFPEVIPEEAVIVRRIYSRFMAGQTTAMIAKDLTADGILTPARKQRWQSSTVESILKNEKYKGAALLQKCFTVDFLTKKRKVNEGEVPQYYVEHSHEPIISPEEFDKVQAEFERRKQLGRQYSGKSIFASRIVCADCGSFFGPKVWNSNSKYRKVIWQCNGKFRGEKKCSTPHLDERTIKDGFVAAFNQLLGDKERILDDCRLMQNTLTDCEGIDGQIAALEQEIEVVTELTKRCISENAQAALSQSEYNTRYNGLVQRYNTATANLENLQKTKADRATKADAIGAFIFRVQELDTLTEFDEKLWLTIIDTVTVRADGRMTFHFQSGVEIAL

SEQ ID NO: 11856 - protein, 456 aa, synthetic construct
MRNKEIAPALVRVALYIRVSGEEQKIKGLSLEAQQERLEAYARERGWVIVGIYIDAAKTARKNIHKRTEFQRMMDSVKRDEVDILLFARLDRWFRSVADYYKVMEVLQAHNCDWKTTDEEYDTTTANGRLYINVKLSIAQNEADIDGERIDVVFDSKIAHGTVVSGSAPFGFRVNEEKRLEVVPEDAAIVQDAFNYFESTVSQRATVRYVRETYGVNWCDATFRRMLKEKLYTGVYDRGGRYNDQFCPAIINRQQFDRVQALLTRNVRSAPSGKVYIFTSILTCAECGHKLVGYKSSDYFYYRCNQHFQRGRCSHNHSAREDVVETWLFDHLGEELERCQLEWDVEAAKKKASVARTDKAALKRKLTKLKELYVNDLIDIEDYKKDYQIYVSALNQIPEPAQEAPPDFAAVRRLLDNSFRTIYDTLTREEKRTLWRSVIKEIRIDNDQNITGVVFG

SEQ ID NO: 11857 - protein, 459 aa, synthetic construct
MSTTHFYSHYPTIEYKTCALYVRCSKEEQAKFGDTIEAQIEDLKAFAKLHHLKIYAIYVDEGHTARKKYNKRKEFMRMLQDVELHKFEYIIFTKLDRWFRNIADFYKIQEILDNNGVTWLTALERYEMETTNGKLNVNIRLSVAQDEADRDSDRIKDVFRLKVKKGEAITGSLPIGLMVGENGKVDTDPDTVQIAYDMFDYFEAHNSKRGTLLYLIDKYNRYFCYETIARALRNPLYKGEYRGNPDYCPKIIDPARFDRIQVLGKRNVKVRKNNRYYVFSGLAQCKECGHALVANTTVQKRYNREYTQYRCNYYSNSHLCTHSHGTNEKVIEKYLLDNIKPELEKYVTAYEVKQNAPTKKADPSKIKTKMQRLKELYVNELIDLDDYRIEYEQYKQELDKLTSTAAPEAKDLSAIRSFLALDLQSIYDSLTPQEKRTLWSSIIDKIIISDGGDIEIVFL

SEQ ID NO: 11858 - protein, 518 aa, synthetic construct
MVAIYVRQSLDKKDSLSIESQINDCITLCKRNGWDDYQVYKDKGWSAKNLDRPEFQKMNNDVEAGKIKAVVCYKIDRISRSIRDLVNLIEDYHELGVHFVSFADNINTAAPGGLMMATLFGSLAQMEREAIIARVTDNYYYRCELGYWGGGPAPYGFNLKKIVENGQKHTVLEINEREAAVVKQFFKWYLEPDGTIYEILKKADKAGITTRKGGAWTSRVVSELLSKPMYAPNSMDIYNFYAAQGVRVRVTPEQCDGKLSLNVFGRRDRGSKHPKRSRPVNEMTLAICKNPPIIDSDTFLKTQFKKKAKLQVSPRTGTAKTTMLSGLVKCAICGRAMSPSGSSRGVRYFTCSGKRNYAAGTCTSKSIKVAALEKIVTDDILRYATNPKVIDMFHAMQGSKLTAEQSHEVNLLQQETAKLDIEIDNLLDACSAGNATAIEYLNKRIEKLDNRKHDILNRINEIKKETENVISLFSGIEIENVPYILAHGSVDEKKNVCQFLLNVVLFTNADDVKVYYKM

SEQ ID NO: 11859 - protein, 489 aa, synthetic construct
MLKTVIYARYSSDKQNEQSIEGQIHECEQFAKTHDMVIIKHYIDRALSGKTDDRPSFLQMIKDSSSGLFDAILVYKTDRFARNRYDSAVYKAKLKKNGIKIFYAKENIPDGPEGIILESMLEGFAEYYSAELSQKVKRGIKENIRKGLSFGGACPFGYKIVNKKYVIDDEQAPYVKKIFEDYAKGRRAIDIFNELNTLPNYAGKGRKWNRSSLNRMLTNKKYIGIYELEDVCVKDAIPPIIDEALFNKVQSRILFNRRHTTRAKVNYLLSGKLFCGLCEHSMTGKTGTSKTKAKYHYYVCSHRHCKQKKYRKELLEDIVIQYTVKDILNPKYFKMIAKKCLEIQQADNKINDILLILKKQLTATKTKINNLMNAIEAGIITTSTKDRLEQLEQEKYKLELEISTQQLNSNRLLSEKQIIYMLNVFYNKRVDVSFYNQIIDCFIYKIYIYSEKICIVYNLNNSDKDVTYSDINELYKSSHLNSCGSPYVN

SEQ ID NO: 11860 - protein, 668 aa, synthetic construct
MAYAKVKNHLKIWTKKKAALYVRVSTRYQVDKDSLPFQRKKLKEYCKFLGLEDYVIFEDDGYSAKNTERPHFQEMMSRVRSGEFSHLIVWKVDRVSRNLLDFAAMYQELKDHKVTFISMNEQFDTSTAIGEAMLKIILIFAELERNMTSERVTGIMLDRAEQGLWNGARMPVGYRWNNETKFPEPDPEEVKIVQLIFDKYEEWKSSIKIARYLNNNNFKSKRGGQWTSKLIHDIIRNPFYIGTYRYNLRESGRGPLKPESEWIVRENNHPAIIDKAQFDRCNKIMDRNGSSRDTSDLRARKYVHTFSGHLVCGKCGANMIASKDRARANGWRPSMYRCAQRSRMLDCDNSRTINESYIGPFIFNYIANLARVQKNFKNITTVEKLERELLKGETFDGVAGILPEGLNLTFQALSFRQVGNGTYIPDIDFLGDSDGASDHNQIELLKSEIEKSKNAVTRLTDVYLFDPDSMTKEEFATKKKELAKKIEGMERKLADLLDDSGNDDLADMSFIKKASAFLVAQRIVSKSFVDYVGMAQELDNEILKDFIDQIVDQIVVLDGRVQSITFINGLKHEFRYATPAELPVCQKCGGHIGSTCGCRTRTFDFSGKRYQRIKVGDPRDMLHGKKNPVCPECFAQEGRWHHWNCKVETCPICGGRLAECEHGPNGKN

SEQ ID NO: 11861 - protein, 538 aa, synthetic construct
MSTAPNVTVIPAKVQTAESRDKYHQLRVAAYCRVSTELEEQQNSYQVQIAYYTDLINKKKEWTLAGIFADEGISGTQTKKRTEFNRMIRMCRNKKIDLVITKSISRFARNTVDCLEYVRQLKDLGIGVIFEKENINTLTMTSEFMIALYGSFAQAESESISKNVSWGKEKAYREGKVQFQYKHLLGYKKGADGKPEIIPEEAETVKLIYTMFLDGHSMKNIALILHVKGIHTKTGSTEWRTNTITRILQNEKYVGDALLQKTFTSDCITHKVVKNHGERPMYLVTNHHDPIIDRDTYNRVQQELARRNSKRKISDKTVTEQGKYSSKYALSELLICGHCGTPYRRTTWAARGKKQIVWRCLSRLEHGKKYCPDSPTINEEQLHRGILRAINNYYSCRNDIVRILKANIGSVLECQGQEEILSVEKRLKEIDQARTDLVNLIASGGCDEDKLDSEFAKLYAEEQGLSERLTMLKSQNKTSEETQAKLDKIMDMIEHEKFELETFDNVLIRKLIECVKILSKTEILVIFKGGYEVRTEIE

SEQ ID NO: 11862 - protein, 512 aa, synthetic construct
MPTVTVIQPTITEEQNIKIRCAAYCRVSSDSNDQLNSFMAQTRYYSQVFENSETEELIDIYADEGITGTREDKRDEFQRMLKDCRRGKIDRIYTKSISRFSRNTRDCLKSVRELKSLGITIFFEKENIDTANLTDEMMITIMGGLAQEESTSISQNMRWSIKKRMQNGTYRNSCPPFGYTVQNDTLVVNEEQAKIVKQIFNWYNEGYGLQAIADTLNSMAVPSSQTAERWHASSVKYVLSNERYIGDALFQKKYRTETLPTMQKRNRGEKPKYYVQSVNTPIIDKDIFYSVQELLNKRHREYINNNHFLSKRILCSKCGATYKCVSSKNSVFWTCRTHNNKASDCSNGRIADIKIYAAFVRLCNKLLYNYKTVLIPLQTALQDLKLRKFSGKTQVMDIHKEIAKLREQTHVLARLKAKGFLDEAKYIEQTTELTAKINKLQTDLKKLTRSDDEDETLNQIEMLIDFFEMRDKPITKFEESAFESIVERIVVINQHELEFHLIGGLKFKEKIK

SEQ ID NO: 11863 - protein, 545 aa, synthetic construct
MTQTAVIPQKSVHVIPAQVNIQDEIKSAYRQLRVAAYCRVSTKEEEQLNSYEVQTKYYIEKINSEPKWSLVEIFADKGISGTSLKKRDEFKRMIKMCKRGKIDMIITKSISRFARNTVDCLESTRLLKELGVDVFFEEQGIHSTDPGAEFYITIYGSIAQSESENISANVKWGKAQSAKEGNVPFQYKRFLGYRKGADGKPEIDPEQAETVKRIYERFLAGDSLAKIAEDLNTDGVPTPSDKGSWLRGTIQSILTNEKYKGDAVLNKTYISDCLTKKVKINNGERPKYYVENNHPAIIDSATFGRVQEEMARRSGKRKVKQVGTKTEQGKYSGKYALTELLVCGECGTPYRRCTWTAKGKKKIVWRCINRLDYGKKYCHHSPSIEESILQNAIMSAVIDTAKLNADILKTLKLHIGMGLDQNDTEDKSLDIQIRIAEIDAEFHKMLKAISADTVESFDETKATELMNEKSRLEQQLAQYAEVQQKRENAKSRLDEIYTILDGLKNHPLTYDDQIIRQILECVVVESKEKIKVVFVGGLKVEQMLN

SEQ ID NO: 11864 - protein, 527 aa, synthetic construct
MAKRKVTQIPATINKFTAKPVDSKKKRKVAGYARVSTDHEDQTTSYVAQVDYYTNYIKGRDDWEFAGLYSDEGISATNTKHRDGFNTMIADALAGKIDLIITKSVSRFARNTVDSLSTIRKLKEHNIECYFEKENIWTFDSKGELLLTIMSSLAQEESRSISENVTWGHRKRFADGKVSFAYSRFLGYDKAPDGSLVINEEQAQTVKLIYKLFLDGLTMHSIANELTKRGLKTPASKDNWSQSTVRSILTNEKYKGDALLQKSYTVDFLTKKTKTNEGEVPQYYVENNHPAIIEPELFDLVQAEIQRRGKGSTRYSGVSIFSSKVQCAECGGWYGSKVWHSNDKYRRIIYQCNNKFRHKTGCSTPHLTEFEIKEYFVKAMNQLITEKAEILDNLQLIRTTLCDKADLVKKKESLEEEIAIAVEMTQNIVAENARVAQNQDEYNKKYNSLVERYNKLKEEYDTVCTTISEKDAKYEQMGRFITVLNGQSELITEFDEALWSSLVEKIVVKSKEEVTVVFKDGTEIKVE

SEQ ID NO: 11865 - protein, 597 aa, synthetic construct
MRTITKIESTIPTIKKRKKVAAYARISMESERMNHSLSAQISYYNDFIQKNPDWEFAGVYADNGISGTSTVKRDEFRRMIADAEQGKIDIILTKSIQRFARNTVDLLETVRHLKNLGIEVRFEKENINSLSGNGELMLSILASFAQEESRSISDNVKWGIRKRMQEGMLNASGHFNIYGYEWQGDELIIVPKEAEVVKRIYQNFLDGKSRLETERELEAEGIRTRQGCVMRDSNIKKILTNITYTGNMLFQKEFISDPINKKRKQNRGELPQYWVEDTHEAIIDLETFQYIQDEMARRRQLGALANKSLNISCFTGKIKCPYCGVSYMHNTRKPRTPNGKRLEFWVCGSRKKKGGHCEVGASINQDNMKKVLAEVLDIDEFDDEVFLDKVDFINVPKRYTLEIHLQDGTIVTRPCENTGHQDCWTKEYRDKVSKQRRKKNTNPKGASVFTSKLKCKHCGCNYRRCTQPSTSSEDGKFYYWRCAERTACKAQGLREDFLKSQLAEVLGMAEWDEKVFAEKVEQINIDGYQLEVVGKDGIVTPMTFEPPKRGGRHCSEEQKEHMRQIMKEKWTPERKAEMSQRMKNMRKERGRNWRKEK

SEQ ID NO: 11866 - protein, 475 aa, synthetic construct
MNAVIYARYSSDKQSEDSIEAQVRACREYAAKHDLNVLCVYADEAISGKTANRAQYQKMLRDCEKGLFDTILIHKYDRIARNLGEHVNLEMKLKEKGVALIATAQDFGNSKESKIMRALMWSLSEYYLDNLSSETKKGHKETALKGLHNGGYAPFGYDVVNQTYIINELEAGYVKRIFDVALKREGFTALIEEMEKAGIRGKRGKPIRYPQIYEILRNEKYTGVYTYSQEEETNRSDRRNKPNTIRIENALPTIISKAQFAEVQRIMNERKQTGKKANYLCSGLVFCECGAKMHGMTSKRKGHEYRYYTCSKHCGAPVVRMDEVDAAAYRYLYTLLSEENQNRIADALRQYQAGEGSRMDEFKQALAKRIEEKQKQYKALLANLSSAVLPAEVVSDIAAQMQSIKEEIALLEATEPPKDFTVDQIRAWLEALKNTPDDKAVRLLISRIDIKQKTIFNMESTLKVVLSEIGCGSWI

SEQ ID NO: 11867 - protein, 512 aa, synthetic construct
MERAVIYARYSSDHQREESIDAQVRACREYCQRKGYLVTKIYADEAKSGKSIAKREQYKKMLSDSQKDLFDVVVFHKIDRNSRNELDYYLTKNQLISSGIKYEYAAQNIDTSPAGQMVEGILVAVAANYSRNLAEETKKGLKENALKALFNGGRPPLGFEINQENKYVINDYEAGAIRIIFDLYLKGKGYHYIISQLNSLGYKTREGRKFGKNSLYDILRNPKYCGTYTFNKVNKDPSGKRNSHKISENTIIVEDAIPAIISKENFRKVQEKMSRNKHRTAAYRSKETYLLTGKAFCGICGAAMTGHRASARGKKYVYYTCAARDRLGTSACENKVVPRDELEQVVLDTLKEELLSNNFQKNLNHYILEEFHTLASEVSNEADSLAEQKAIAERKLNNLYSIIEQGTADEYDLQRLADVKRELTSIKEKLSKCAAAHSLSDINPIAIERTIKLCRNMLLKNASAETLTLIFDDMVEKIVIGAKKITLQFKLECFDTYGAEGRTRTGTWGNHA

SEQ ID NO: 11868 - protein, 547 aa, synthetic construct
MKAAIYSRKSKFTGKGDSIENQIQLCMDYSKSIGIKEFLVYEDEGFSGGNIDRPQFKKMMQDAKDKKFDCLVCYRLDRISRNVSDFSTLIEKLNKLEISFISIKEQFDTSTPMGRAMMFISSVFAQLERETIAERIKDNMYELARSGRWLGGKTPHGFTSKKISFLDENLKERSMYQLEVNDEQMEIVKLIFNKYLELRSLSQLYKYVYHNGIKGPRGGKFDPSSLSGILRNPAYVKANEDILDYLRSLGMEVVGVPDGQCGILTYAKNTSNSIAAIAKHHGVIEPDVWLEVQSILNENKDKIPRISTGKTALLSGLLKCGKCGANMRIMYKGKRNDEDLKYYYVCGTKRSLGVEGCNCKNLNGPLVENLVIDKIKNCNIESVINAFNSNKAKVDTVFSDVRSKINLLKNSISEKEKLISNLVMELAKNTGSVASEYIISQIEGLNGEIDDLKSKVSELESSSIDINSASLNLDIIVSNLKKFNYEVDDASLDDKRLLLSTIVDSIVWDDASGNLSIVYMGAKMDDLVSLSDRSHFCSDCRSYIYEW

SEQ ID NO: 11869 - protein, 405 aa, synthetic construct
MRIKVIKPTKAVHQQKKKVCAYVRVSTDSLQQEDSLENQTTYFKGFITANPEWEFVGIYSDQGISGYKENRPGFQKMIADARAGNIDLIVVKSISRFARNTETVLKFSRELKSIGVGIFFQLQNINTLSGAGELMLTVLAAFAQAESEGASANAKMTYKRKFESGIPAHGLESTFGYKANAQGDIVVDEEKAAVVRQMFDLAEQGIWPSKIKQYLNKNGVPGCAGGDWDDTAVFRVLHNVSYKGDLILQKTYRDSRRKQRKNEGQVDQWYIAENHQPIVPPKQWDKVQEILRKRSEHLQKPAPPKPDKPRSSRNTYPLSNLIYCPICGEKLIHKWGKGKNEYWACKTNLKVGKDACKGIWLPAEVANDWGEITEPIVAVQYEDEYGMRRFTAYPKGEYDAFKRED

SEQ ID NO: 11870 - protein, 467 aa, synthetic construct
MAREIVHIPARRGLSNRATVTDRKIRVAAYCRVSTDHEEQINSFENQVTYYTEYINRNPNYELADIYADEGISGTNTRRRDDFNRMIADCEAGKIDLIITKSISRFARNTQDCLNYSRKLKDLGIGIQFEKEGINTMDSSGELLFTILSSLAQDESRSISENCQWGIRSLFKQGVLHLNTNRFLGYDKDEKGNLVINEEQAVIVRRIYTEFMNGINPDVISRRLRDEGVPGCMGEAKWQASTIFGILRNEKYMGDAILQKTFTSDYLTKKTVKNEGQLEQYHVKGDHEAIIDPEYWDAVQLELERRQNYMTAHSLRTMGRYTDEQPFSNRVLCGECGKVFWRRTWYRLNNTYKVWQCGNRYREKGVVTCHSENLKESDLHGAFVMAWNGILESRAEFAETWKAQAENGNALERFRAKQMLELTKMKPMKEIDLLLVGKVLDYVIVQYGGELEFHFLDGTQLAVEVTE

SEQ ID NO: 11871 - protein, 612 aa, synthetic construct
MRAAFLIRCSTKKQDYERQVNDLTRLAKKFGYTSSDNMIFGEHITGKDDASKRDRQSIQRLKDAAINKEFDVVLVSEVSRMSRDPMSGRLYVRQLINMDIPVYFRDIDTWTIDPVTGKKVRDAETIIGAAFDAAWKYIKSMKTQIASGRRDELDNNQMSIGQPFFGYKRYGGRDKGKKNSWIINDDAAKVVVDVFEEYVKDGATLKSTALAITAKYGEQFNKKFSIGTIEHILTFEPYCTGIKVVSLTDPDTEDVDEFRVEIPIIITRAMFDKAATKRATNRVTKIPYSKQATYVLSKLLKCHICGHTLTPRKRSGDKGEKYRLMNGKVALTWLCMSGINNATDCSSRITISNEKLEAIIWGLIKQELIGFANLNDEDRVARVVELTDKITNLEMNIANFTSHISNMDRLIERAYSAYMDAPDSVMDIAKDKYYKTLTKCENERAECKDKIEALNVEKLRLENMRTFFNQPTLPKDAIEKAESDPIKMRNLVMELVDKIYPYRITTYVSPATNRIMKNGIVLLEVYTINGIYNVLYDGNQRNNKVAYYISGNYATFQNGKNKLDAYDAGEYFVISNATLVTETEDVDLTVTFNELIKICMQNGWEIDYTYKM

SEQ ID NO: 11872 - protein, 687 aa, synthetic construct
MQSAFFFIPFFGSWRKGLFMAYVRNKKKILKFWSKKKAALYVRVSTRYQVDKDSLPFQRKKLKEYCKFLGIEDFVIFEDDGYSAKNTDRPHFQEMMSRVRDGEFSHLIVWKVDRVSRNLLDFAAMYQELKDHKVTFISMNEQFDTSTAIGEAMLKIILIFAELERNMTSERVTGIMLDRAEQGLWNGARMPVGYRWNPEIKFPEPDPEETKIVHFIFDEYERVRSTTKIARYLNHNQIASKRGGQWTSKLIRDIIRSPFYIGTYRYNLRESGRGPLKPESEWIVRENNHPAIITKEQFDRCNAIMDENGTSRDTSELRARKYVHTFSGRLVCGKCGANMIASKDRARANGWRPSMYRCAQRSRMMDCDNSKTVNESYIGPFIFNYAANLARIQKNFKNIKTLEQLEKELLKGPEFENMKVSKESLRRTFDALAFQEVGKGAYLPDIDLSDGDDDYTAAEQLSILKRELDKCKTAIDRLTDLYLYDPDSMTKEEFAKKKRDLVNKIAGYEKQIEASQATGDKDDLADLEFIRKASAFLVAQRIVSKKHVDYIQMALDLDNEILKDFVDQVIDRIEILEGRVQSIRFVNGLVHEFTYSTPADLPVCQKCGGRIGSTCGCRTRTFDFAGKPYRRIKVGDPGDKFHGVTGAVCPECSAQAGRWHHWKCGIERCPICGEQLIACEHGPNGKK

SEQ ID NO: 11873 - protein, 523 aa, synthetic construct
MFFGIYGRKSVYSDKSDSVDNQHRMCNDYIKAHFKADDITLVTSYSDEDYTGANTKRPDLQRLLEDVKSGAINVLVVYQLDRISRDVRDFSNIYAMLEEYHVMFISIKENIDTTTPIGRAMMYVTVVFAQMERETIATRVRDNMIGLAKKGFWTGGNPPYGYVRKNILINGKKHVTIEPDPDGVAYNIWIYDSFLKNHCSLQSMETNFRKEGIKTRNGAFFSTTQLYKILTMPYCVEATPEIYDYFAAKGCQMDPDSPREKWDGSVGVMIYGRSTGVNKKHQLQPPEKWLVCLGLHKPFMPAAKWLAVQNQFSENKFDKTQKYDIPLLKGILRCSCGSIMAVSRKKKINGEVSSWYYCLRRMKNGVEACDRKQIKVDIIDQKLLNTLHSIEIDPSMIYRFVQKSELPLPDIKTINNKISSIESRIGRLASSLALADGSAASKYIVAEIERLDSDLQFLKRERAVINVEIKKRDELNESAEGKAQHIQNVMKGLNGFTAEEKNRIMRDILKECVWDGSELSIVL

SEQ ID NO: 11874 - protein, 513 aa, synthetic construct
MARITKIEATKDNSKRKLRVAAYARVSTDSNEQLVSLETQKNHYERYIKARPDWEYAGLYYDEGVSGTSMDKRDGLLHMLDDCDRGLIDYIIVKSISRFSRNTVDSIETVRRLCEKGIYIFFEKENIDTGKMEGELLLSILSSLAESESHSIAENNKWSIQKRFQNGTFKIGYTPYGYDNVDGQMVVNEEQAKTVRWIFEAILSGMSPGTIARKLNEKGIRTKRDGRWTGHTVNGMIRNEKYTGDVIMQKTYTDDRFNRHINRGERTQYLARDHHEPIISHEAFEAANAIINANGLEKGIHKDEDKYKNRYAMSGKIICGECGGTWKRVKLANHFGFSCNTHVRNKTACSMKTIAEEPVKAAFITLMNKLTYGRSLILIPYAEMLKSSQRSGNIDRLTELDEMLEKNTERRSQITQFFTKGLLDPAVYAEESDDLTEEADRLSEERDFLTTQMNGNRDQTEALDRLLKYTAKGTMITEFDPSLFTEHVDRIVVYERTEIGFAMKCGPMFRERI

SEQ ID NO: 11875 - protein, 497 aa, synthetic construct
MLKTVIYARYSSDKQNEQSIEGQIHECEQFAKTHDMVIIKHYIDRALSGKTDDRPSFLQMIKDSSSGLFDAVLVYKTDRFARNRYDSAVYKAKLKKNGIKIFYAKENIPDGPEGIILESMLEGFAEYYSAELSQKVKRGIKENIRKGLSFGGACPFGYKIINKKYVIDDEQAPYVKKIFEDYAKGRRAIDIFNELNTLPNYAGKGRKWNRSSLNRMLTNKKYIGIYELEDVCVKDAIPPIIDESLFNKVQSRILFNRRHTTRAKVNYLLSGKLFCGLCEHSMTGKTGTSKTKVKYHYYVCSNRHCKQKKYRKELLEDIIIQYTVKDILNPKHFKMIAKKCLEIQQADNKINDILSMLKKQLTATKTKINNLMNAIEAGIITTSTKDRLEQLELEKYKLELEISTQQLNSNRLLSEKQIIYMLNVFYNKRVDVSFYNQIIDCFIYKIYIYSDKICIVYNLNNSDKDVTYSDINELYKSSHLNSCGSPEAKMATLPAST

SEQ ID NO: 11876 - protein, 523 aa, synthetic construct
MRFFSYGRKSVFSDKSDSIDNQFRMNREYCESKFSGQVDSWQQFSDEDFTGANTSRPDLQRMLSFIKGGFCDVLVVYQLDRLSRDVRDFANIYALLEEHGVMFISIKENIDTTTPIGRAMMYVTVVFAQMERETIAARVTDNMLGLAKKGYWTGGNPPIGYVRKHIVVNGKKHCSIEVDPDGARYVTQIFDTFLAYNCSLQGMETRFKNQGIRTQSGKFFSTTQLHKMLTMPYCVEATPEVYDFYAAKGCIMDPGSPREMWDGSVGVIIYGRSTEKNKKHQAQPPEKWTVCLGKHKPFMPAEKWLAVQSRFTQNKCIKDAKWPVPLLKGVLRCKCGNLMQVSRKKKVDGTCSSWYYCRKRMRQGVDACDMGQIKCDLLDEKVLELFRGITADPALIQKFVKAEAPADVPDLKAAQARVSACERKIGRLAASLALAEDSAASKYIIAEMERLDVELGALKREASLAEMESHRAAASAKDAKATAAEIAKLIHGLDGFDDKEKNAIARAVIQECTWDGERLFITL

SEQ ID NO: 11877 - protein, 554 aa, synthetic construct
MTAVIYARYSSDNQREESIEGQIRECTAYAEKNGITIVKHYIDRAISAKTDNRSEFQQMIKDSDKKLFDIVLVWKLDRFARNRYDSARYKTQLKKNGVKLMSATEIISEGPEGIILESVLEGYAEYYSADLAEKVVRGQTENILKGRCNGGRGTFGYTLDSERKFHIDPLASPFVLESFRKYRDGLTMKEIRDWLNENGIKNPVGGAFTYNSVEHMLKNRRYIGELKFWDVVVPDAIPPIVPLELFDDVQEKIAKNKKAPARRKAEDDYLLTTKLHCGCCGALMFGESGTSRTGEVHRYYKCATAKKKKGCKKKTVRKQWLEDLVVNQTMQLVRDDAAMESIIAKVMELQDRENTNLPLYEKQLRDAESGIQNMLNAIQAGILTSSTKERLEQLEETKRELEARIAEEKLAKPKIKEEFIRFWLMRFRKLDMSLKDQRQALVDTFINSIYLYDDKVLITFNYKEGTQTITFEEAAQAASKENGSDLDCFTAPRKTSTHCVLVFLFRCGRGLEQQRRRPQPAAETGRSCWGRVLIFQSPAKGLRKNQLTQPVAVA

SEQ ID NO: 11878 - protein, 575 aa, synthetic construct
MKKKFSSVPEPDIQDAVIYARYSSHSQRDCSIEQQVADCELFAQQNGLRVVRIYADRHLSGTTDNRPEFQQMLKDAAHGHWPFVICWKIDRFARNRYDSATYKYKLKKAGVRVLYAKESIPDGPEGILLESVLEGSAEYYSASLAQNIRRGMRFNAENCKVNSGSIPFGYCKGPDGRFAIHETNAEIVREIFRKAAAGVPFVDIATELNNKGLKTSRGGRWNKNSFVLLKNESYIGVYHFSDIRIEGGMPAIIDPGTFLAANERMNANRRVRGRHHDGGDYLLTGKLKCAHCGSYMIGFSGTAKNGESHYYYGCQKRRRERACKKANVPREWIERVVVKAALDYVLRPDVMEWITDAVMEYQEREAASSQLAALTAELEENQNATDNLMRAIEAGIITATTKQRLLDLETKAKDLKRAIELEKLSHVRLEREQILYWLEQFQGGSLQSQEFRRKVIDTFVSVVYLSDDHLRIAFNYSGQNRSEADFNLIMDAETASADYPINSFSLPLSPPDKKNPNLFPLEKGSDFFVCRISYRVIFISSLSSAAFLSMPPAYPVRLPFAPTTRWQGMMIEITL

SEQ ID NO: 11879 - protein, 484 aa, synthetic construct
MNAVIYARYSCDRQTEQSIEGQLRECKAFAASESINIIGEYIDRAISGTTANRPEFQRMIADSKYKTFQAVIVYKLDRFARNRYDSAMYKSKLKANGVRVLSAKEHITDSPEGIILEGLLEAMNEYYSAELSQKIKRGMRENAIKGKTTGGNVALGYRIGADKRMEIDPAGAALVRRIFTSYDSGMTFAQICDDLNHAGYTTSRGKQFRIDTISRILANQRYTGTFQCAGEDAHCPPIIEPELFRSVQERLTESRHKHRHTQSPHEYVLTGKAICGTCGRRLTGRAGTSKTDKRYYYYCCPNKCCGWLPAAELEHAVLDAIAQYTTPEACEQIANATYALYQQSTHENADLTAAQRRLQETEKKLENAVNAVLNGITSAALQATMQQLEQQKAALETEVRLLQTDAPELKLEHFQYFAHRLLEVQAEGTEKILQLLVNQVIVYKEQITVLVNLTDKTKTPPLEQVTAALRESSCSVACGGGDEN

SEQ ID NO: 11880 - protein, 528 aa, synthetic construct
MAYCIYLRKSRADRELELQGFGETLKRHRDTLIELAKKKNLPIGEIYEEVVSGDSIAARPQMQRLLNDVSDGKWEGVLVMEIERLARGDTSDQGIVTKTFTYSNTLIITPMKTFNPTDEFDQEYFEFGLYMSRREYKTIKRRLHAGMEASCKEGNYIHHTPPFGYSIVKNKKSKGYRLEPKPGEAEIVKLIFQWYTKGILKEDGSYELLGTARIADKLNSEYSIKPLGGVWTIPTISTMLRNEHYLGYIVFGKKKRKKVVENGIIVDKWTRNESYGLYKGKHPALVSQETFNLAQERLSRNPRRPSKTITNPLAGVIKCGMCGRSMYRRPYQKRGQSASLICPEKTCHNVSSAFYLVEDALLTAIKEWIDGYEIKEEANKYDTSVLESKTKLLEEQQKQLITYKNQLTKVFEAYENGIYDSDTFLNRQKTVSESISSTEEAIVKLNKEIANEREIISHQEDIIPKAKKILEIYKTSDDVQLKNDLMKSILDKVVYTKTANGHFKDQRQDDFKLELFPKLPKNKGNSSE

SEQ ID NO: 11881 - protein, 609 aa, synthetic construct
MHIRNILKKGYSLFCYLQLYFRWYNKVVTERLKYNRKVLDMNIAAYCRVSTDKADQLNSLEAQKQFFSEYTQRTGDNLVRLYADEGISGTKIKNRKEFLRMMADAEHGLFDMVVVKDISRFARNTVDLLQNVRKLKALGIETQFLTANMTSMGNSEFVLTIFGALAQEESANTSKRVKFGKKMNAEKGRVPNIVYGYDKTIGDYFNLAINEEEAAVIRQIYKWYIEEGYGAAKIANMLNAKGIRTKRNCQWSQNATCRILTNELYTGKIINGKQEVTDFLTGQRTEKDETEWMVTERPELRIIEPEMYEKAQEILECRSKTFKLTKERQSNKYLFSTLIKCKECGWSFRRTVRTYKNTYIRWVCSGHNGRGADSCPNAQTVDEEELIEVLSEYFSELLKAKKNVIRHVTGEFQRVYKAKDENLNYEKELNAQLHKLQKMRQKYMDMYTDDLITREELNEKIGGTKQEIERLENELKMVAYHLTKGEQLETILNRTFKEIEDISDVHQMTNAQLKRIIQKIEVDKDGNVDIYLRIFGDLGLDETVLISDNQTFGGLGSMVSQVVGAECPRKVVPMSLPDAPVITGTSQEVFDYYGLNAEGIAKKAKELLA

SEQ ID NO: 11882 - protein, 519 aa, synthetic construct
MKKIFKVDNAAATSKRKLRVAAYARVSTDSDEQLVSLKAQKEHYESCIKLNPEWDFAGLYYDEGLSGTKKDNRTGLLDMIADAEQGKIDFILTKSISRFARNTTDCLEMVRRLIDVGVFIQFEKENINTGSMESELMLSILSGLAESESVSISQNSKWAIQKRFINGTFIISYPPYGYINADGKMEVVPEEAEIVRTIFRECINGKGAFLIAKELNERGIPSKRGTIWHPSTVQGVLKNEKYTGDVIFQKTYTDSKFNRHINYGEENQYLLENHHEAIINHEDFEKAQSIMEQRGKEKGVLKKEGKYQKRYVFSGKITCGECGSRFKRRIHYSGKNEYIAWCCTKHIDHTVKCSMKFIKDEDIKAAFVTMLNKLVFSCDMLLKPFMQGLRNIDEKAYLKKITEIEERIEKNENQRNVLMELMSKGLLNPGLFTKQNTELLSEFARLATEKKHISYAVSGNASKIDETQRLIRFCSRNRMALKFNDNVFEDFVDEIVVNSREEIVFKMKCGLSLKERLVD

SEQ ID NO: 11883 - protein, 502 aa, synthetic construct
MEIQIREGNSRQKQKLKVCAYCRVSTDADEQENSLENQIRHYKEVITSNPDYEYAGVYSDFAISGFKEKRPGLQKMLADACKGKIDLILTKSVSRFARNTSIVLEATRKLKELNVGVFFELQNINTLSGEGELMLTILAAFAQAESESGSVGAKMVYQRKYEAGIPVQYLERSFGFKKDERGVYIADEEKAAWVRKIYEMAADGYTPAVIKRYLNENGVKTVGGAEWIDSTVFRLIENEIYKGDYIMHKHFVNEERKLVRNRGEVDAWYIEDDHEAIVSLELWQRAQDALEAKRDYLAEGSVIEEFTEENYPYMNRIYCARCGHPLYKRIYSNGNRLNWGCSGTKRYGKSFCEGINIPDGVLRGAWHFDENMYIGEKQTDKGKKEFTYLKEASWKRRHKKKEPEPIPENTETEYPYREKIFCGLCGSRLVRHVNTKNHKVIWVCNGRKRKGKDFCDGTRVPDTIIKGWGEIKKDIYIQRKDDKNGKKRYSYTSKKPKGADRA

SEQ ID NO: 11884 - protein, 464 aa, synthetic construct
MARSVTVIPARSQKVRTGHKAVQEKKIRVAAYCRVSTDQEDQLHSFEAQVEYYTKYINEHENYEMAGIYADEGISGTNTKKREQFKKMIADCEGGKIDLVITKSISRFARNTQDCLAYSRKLKNLGIGIIFEKENINTLDSTGELLFTILSSLAQDESRNISENCKWGIRTKFKNGEMHLNTFKFLGYDKDENGKLVINKEQAKTVRRIYRDFLIGINPAQIAKELTEEKVPGCLGQTKWYPSTVTGILKQEKHMGDALLQKTYTADFLTKRQVRNNGEIAQVYVKDSHKGIIDKQTWNAVQEEFDRREKFMESHGTDRYSYGADCMPFCEKVFCGECKSLFTRHSWGSRGIVQWQCKNHRKDGKVACTNAYVDNADLENGFVKAFNRLVTDRDKHMERWQQMKSDGTPLEKIRAGQMMEAVGNEPLTRFVPEIAQLVLCEVTVLGAKKYEFFFMEGSRVKVSV

SEQ ID NO: 11885 - protein, 522 aa, synthetic construct
MGNVMLIPARRQVGNNARKQEEEKPKLRVAAYCRVSTDSDEQATSYEAQVEHYTEYIQKNPDWEFAGIYADDGISGTNTKKREEFNHMIDDCKAGNIDMIITKSISRFARNTLDCLKYIRQLKDMNIPVLFEKESINTMDAKGEVLITIMASLAQQESQSLSQNVKMGLQYRYQQGKVQINHNRFLGYTKDADGNLIIDPEQAEIVKRIYREYLEGLSMDKIAAGLERDGIITGAGGKRWHTSTINKILRNEKYIGDALLQKTYTTDFLNKTRVKNNGLVPQYYVEGNHEAIIPKEIYLQVQEELVRRRVVKTSANGKKRSYSCNHCFSQIVICGECGEMFRRLHWNNRGVKSIVWRCISRLESTGLECHARTINELVLQDAVVKAINQMLGDKSSYQAQLQLNIASVIRASQATSVENIDEKLMALQQELIQKAQSKEAYDEIADEIFRLRELRQQTTVDTAARDEQIKRINDLQDYIAQQTTHLTEFDESLVRRWIKQITIWDDHITVELKSGVSIDVDA

SEQ ID NO: 11886 - protein, 571 aa, synthetic construct
MICIDSNGQAIEISVADQMWLDDAYFKEKQMRLEPDAPRAALAYRVSTKGQVDHDDIPMQKIDCRKFAQKQGWRVVKEVAEKGISGSKVSAAKRDAIQQLKEDATNGEFDILLVYMFDRLGRIESETPFVLEWFVQHGIEMWSTHEGQQKIETHGDKLMNYIRFWQAAGESEKTSIRTRDRIRQIVSSGHYTGGFVCYGYQLEDQGRRNKRDKPVMDLAINEEEAAWVRELFYKVVNEGASGYALAEMLNNRGLRTRAGAKFQASNILRIIRHEGYTGYIITKNARSEYIPELQIIDKDTFDRANDIIIRRSTKIKQEKQISHTSQNPTLLAGIVYCAHCGAKMSGFMHKDRYKLADGTIREKVQPKYNCFQRAQKNKGGRDCDGQSLYLAETVDAIVLEVVRKVFAQIKDTPYSRVAEQRIRQESNLQKVKRAAIEKKMRSAQHALERFEGEILKCLDGTSCFTEDMIAKQIRKSQKDLDDAKAEFAELQKERINEAAEIRKLRSYYDDFRGWADEFDSAPLEIKRTILSQLIDRVEVGRKYAVTIKFNMSYQQFLKCDNTIEPRQEIGA

SEQ ID NO: 11887 - protein, 486 aa, synthetic construct
MIIAAAYVRVSTDEQTDYSPSAQLADIREYARQNGYHIPDEFVFMDEGISGKRADKRPAFQSMIRQARKKSNHIQYIIVHKFDRFARNKEDSVLYKALLKKDGVKVISVKEPIPQDDKFAVIYESMLEAMAEYYSLNLAEEVNKTMIKKAQAGEWQATAPFGYKNENKSLTIVPEEAKMIRYIFEQYIAGTSMFALSRQMNQMGYRTHRGNVFENRTIQYIINNPVYKGYSRWTPGRMHLRDYSDPASIISKGNWEPIVSEEIWEAAVTRFKAEKRTYYKHKRPETEGIHWLSSMVKCSACGRSLIVGTKYKNGAVQFQCGGYNHGQCHDSHAISSNRLIPALLSELEKIAAHPNTEGCRYTIRREFPASHELDVYVPLLAKAQQRLKKAKDAYLNDIDTLEEYRSNKTSIEKEIAELKEHIAEIEEQQKMPFDQAAFSTKIASVIEILRDESRSMEDRRKAFKSVCEKVIYNKHTNSLELFLIDG

SEQ ID NO: 11888 - protein, 523 aa, synthetic construct
MFFGIYGRKSVYSDKSDSVDNQHRMCNDYIKAHFKADDITLVTSYSDEDYTGANTKRPDLQRLLEDVKSGAINVLVVYQLDRISRDVRDFSNIYAMLEEYHVMFISIKENIDTTTPIGRAMMYVTVVFAQMERETIATRVRDNMIGLAKKGFWTGGNPPYGYVRKNILINGKKHVTIEPDPDGVAYNIWIYDSFLKNHCSLQSMETYFRKEGIKTRNGAFFSTTQLYKILTMPYCVEATPEIYDYFAAKGCQMDPDSPREKWDGSVGVMIYGRSTGVNKKHQLQPPEKWLVCLGLHKPFMPAAKWLAVQNQFSENKFDKTQKYDIPLLKGILRCSCGSIMAVSRKKKINSEVSSWYYCLRRMKNGVEACDRKQIKVDIIDQKLLNTLHSIEIDPSMIYRFVQKSELPLPDIKTINNKISSIESRIGRLASSLALADGSAASKYIVAEIERLDSDLQFLKRERAVINVEIKKRDELNESAEGKAQHIQNVMKGLNGFTAEEKNRIMRDILKECVWDGSELSIVL

SEQ ID NO: 11889 - protein, 526 aa, synthetic construct
MPYCIYLRKSRADAEAELAGEGETLARHEKTLLALAKKLKLPITKIYKEILSGETIAGRPVMQQLLQDVEAGIWQGVLVMEVERLGRGNTLDQGIILNAFKYSSTKIITPMKSYDPNDEFDEEYFEFSQFMSRREYKTILRRMQRGREASVKEGKFAGSIAPFGYRRVKLPQEKGFTLEIEDAEAAAVRLAYELYAYGDPQPDGTFADIGRATIAKRLDQMGIRNRKGGTWATASVTRMLQNPVYIGKVHWNRRPEKKHTENGKIKKARPLAENYLLVDGLHEPIIPEELWNLAQAKMKQHYRPTGVNGIMQNPLAGLVHCSYCGNAMQRRPYLKTGQPASLICTTHFCPQISSPLYMVEGKILEALSLWMKQHEPTWEEESSADVFSTKIMALEHAIADMEQELQGLQSQFEKIFEFLETGIYTPEVFTARNKTLSEKMAEIRSAIEETQAELSKLKAARKNQVSMIPKIKNILDTYETLAPAEKNKLLKEVLDHVEYHKKIKGKKNVPADNFEIILFPKISPEN

SEQ ID NO: 11890 - protein, 700 aa, synthetic construct
MDSNAFLNDLMSKMKLPEAKGKKKAEQSESVAQILSAMQKVRAEKKKPPVTSYAPVKEMPVNEPESMEEFSQLASDVMQECRPAIPMVKTSISEKAVRVAAYIRVSSTNPAQEDSYEMQERYFMSLLAGNAGWTSAGIYSDHGISATSREGRTGFNRLLRHCKQGKIDRVICKSISRFARNTQDFLVALRTLKENNVTILFEREAMDTADAYSEFILTTLAAIAQEESRSISANIAWSNQKRFPAGNVCNKDIYGYEFRKGEYTVNENGYRYRAVFIIPEEAEIVRMVFRLFTKEELSFTQIAQKLDALHIPPPNSGCRQRQKRKPTVLPAGALKEEDKRGWTATDVRYMIANVRYCGSVLCQKTYTDHRNGHKQKVNKGEKPKYLIRNHHPAIISEELWQEAQEVWKAYTAKYRGIEKGRNERNYSKLLLCGECGRYFQGHSTTRTTIWRCATKLAQQGQKRCRMEPIYEEQIQTLLCKAFAEKFKLGEKMDAEVHEVMQMISKAPIDNARNQALKNLTEKLREIHDFDQMEQEGDFLKRQLSAVNYSIRDVHQHIRDIQAEKEALKVRCEVLGEPRDKEAVTELENRLLNEEEQLEKLEHEAQQQAEQVRYMEDYWKKLEQTHEIREKTLQWLDSLAGGTQMFLDEAVGTYVKAFVLSVTIFSPKHFRIHWFDDTCTEVECDSVFEGYQQPGMIRRKY

SEQ ID NO: 11891 - protein, 463 aa, synthetic construct
MTNKLLRCAIYIRVSTFEQSVHGKSLQAQKEFLERYAAEHGMIVVGVYADEGKTARKELKKRKAIHALVNDVKQDKIDVILFWRLDRWFRNLSDFYKVQDILDEHSVRWISASEPGINMETRDGRLQLNVVLSIGQNEVDTTSERIKFVNEASIRQRKLIFGDANMPLGYKSGIVDGRKCMIKDPGTEHMVEDFFQYFKKHQSKQGAIRYMQSTYGINFSYSMLRTMLSSEFYKGTYRGFPYCPAYLTESEWNEIQTISVRNVKRTPSGRVYLFSSLMHCPVCGQKLVGTGCSSIINRKTGEKRTYCYYRCNRAITDCICTNRHRVSQNLIEKYLLENLTDEYHRYKIRNNKINEENRKKKVDRSPEQIRKELERLNLLFQKGRISFDYYDEEYTRLEQDLSTINATPIEPDRDLSYLDELLQTDFREMYNSLTLENRRAFWRSTIKEIHLNDDYTVKEVDFL

SEQ ID NO: 11892 - protein, 480 aa, synthetic construct
MQDLLPTAIYVRVSSEMQAGEDRYSIPEQIDRLRKYCDAQGWTIAKEYVDPGHSGSNLKRPAIQELISDTKNGFIRRVVVFKLDRLSRSQRDTMYLIEDVFKAHDVAFVSLSEMFDTSTPFGMAMIGILSVFAQLERENIKDRMSMGRLGRAKRGLWRGGCNTPVGYDFMDGQLVINEYEALQVREIFRLFIDEQLSFHAISREMQGRFTNKYSTYNDSGSISTILRNRLYIGKIKYGTQEFDGQHQPIIDREIFERAQARIEEISRNTGEHWKNPYHGKHLLSGLIWCGNCGARYFCVTTKRKNGPQYRYYQCYTRNGSSDMRKADFCKNPNWRVEKLNAAVMEEIRRLCTDEKYFNRIARDGKKENNNAGKEKALQRELSSIEKQISRLVELYQMGVSVQDIATRIHDAQERKNKLTQELLSLNQQSPKNRRQEALTYIHELKWCLDADDVAAQRRLLDALVNKIVITEGGFEVDWKF

SEQ ID NO: 11893 - protein, 554 aa, synthetic construct
MAERVCCSYQNVLSIQNRVCCLYRVSTTKQVDHDDQNQADIPVQRKACREFAERMGWTIVYEEQENGVSGFKVSANDRDKIQLIKEYAEQGKFDILLVFMFDRIGRRAEETPFVVEWLINHGIQVWSVNEGEQRIDTHVDRLTNYIRFWQADGESQKTSMRTKAALGQMVQEGRFRGGSAPYGYDLVPSGTYNKRKHEVFKLEINPDEAKVVRMMFDLCVGSGYGRFKIANFLSEMGIKTRDGKNWHEATVGHILHNIMYTGVLRSGSTQSKAFPDLQIISPENFGLAQKLMAERANECNALRTMPRNTRGQSLLSGNVFCGHYGGRLTLTTNGTTRINAAGEKVGRKRIRYVCYNKTRKRSNCDGQTGYTMHILDKMVTDILHQVFDRMRSVEENEIISRTHRSAMVSLKKRLSDAKAESAKATKEYESLKLEVIKAVQGESAFPMDILSELVNNARTRMLDANAQLTELNEEVEKSNQRVEAIKADYRRIMEWSEMFDGSDMDVKKMIAGYIIKRVDVYSDYRLHIEFNMSFAQFELGLETEVEYEAQNIVS

SEQ ID NO: 11894 - protein, 498 aa, synthetic construct
MENKRAVIYARYSSDRQREESIEGQIRECTAFAKRSNLDVINTYTDRALSARTDNRPSFQKLIRDSNKRIFDYVIVYTLDRFSRSRYDSAVYKNKLKKNGVKVLSAKEHIEDTPSGIILESVLEGYAEYYSAELAQKVKRGLTDNVLEHKWTGTCIPFGYKKDDANHLVPDAVTSPLIPRIYEAALGGKSRVEIARWLNEKGYITTYGRRFRPEQVTKILKNRIYTGTFTWDGKQYPAFTTPLITEELFDKVQKTFRKNTRKNPDDYVLTGKIYCGRCGSTMTGMSGTSKSRKTYYYYRCSSMNHSARQAKEPCGAKNVSRDMIEKLIYDKTLQILNTPEWRKEIAHQAMLAQSDDSEELKIKAMEQELSDAKRKITNIITAISNGISSEELAKTLHDLEARKKELESQISHEQLVKKDLTLTEDAIEFYFVQLARKSAGGSDLNVFWDFINHIVVYDDYIEVFYNYVANKKIANPVIIQCSPRNVLVDHQGFEPRTP

SEQ ID NO: 11895 - protein, 503 aa, synthetic construct
MDSSKNAVIYARYSSDNQREESIEGQIRVCEDYARKNGFNVINIYADRALTGRTDKRPQFQLMIKDSETMTFRHVIVYKLNRFARNRYDSAIYKNKLKKNGVKLVSAMENIADDPSGILLESVIEGLAEYYSAELAENVRRGMTENALDCRYTGGAVPMGLKIDENGHFMPDYPAANIIYQIFKAAASGAEYREILDRFNSPDNVAVLGRKITRGTLLKMLKNEKYIGTYSWNGIRKENAFPAVVDKKTFEFIQDLRRSRMHKHQSKPYEYPLSGKLFCRCGAPMVGTSGTSKNGSIYNYYSCTAHLKSTENCKQKSIPRDDIETTIVRAVTDILSDEKAIDILAQQVVALAKSKGKPQEILAIESQISDLDKKISHAVAAIEKGISSPALFSSLNENEAKKSELSAALARERLRHRGTNITEETIRQFFRSMRDKDFSNEQYRRILLRSIVNRVQIGDGEIIISFNYTQKLPTLPNPVKVESSYTATLAERGRFELPHRKPV

SEQ ID NO: 11896 - protein, 510 aa, synthetic construct
MSYFIYARKSRKDSELEALGIDVLERHITTLLELAKTLSLPIGAIYREVVSGDSIDSRPVMSQVMVEVESCMWDGCLVMDVDRLARGDTIDQGRVQRAFFYSNTKIVTPNKTYDPANEYDNEYFEFSLFMSRREYATIKRRMQRGRERSSSDGYYVGNIPPYGWRRVIAPDGKHFSLAPDPTESPVLDLMYDLCGNKQYGYQKACTHMAEMGILSRSGRPFTPSTLKGIISNPANIGKVRWGHRKTVRTVKDGKISRSRPHSSDYILADAVWPPRISADLFQRANQPKGSCSAPVRDDRPIQNIFAGLVRCSQCGRLMVRKKAHTKTPYDILICQYTECPTVGIRIDELELALLEWLRNYVDKYELTDALPEDAENVAAKEAIVKNFEKEHETLLKQRESLFDFLEQGIYTKEIFIERSNALEQRVKECMEHIISAQNDLHATLALQANRKNFVPRCKNLLGEWGKLTIPEKNSALKVLIEKIMFTKTKRNKKGQDRSDFEIDVFPKVPK

SEQ ID NO: 11897 - protein, 536 aa, synthetic construct
MQTGKITALYVRFSYDDGIDAESGSIEHQKLLLRSYAESNGFTDLSYYADDGYTGTNFNRPDFQRMLGDIHKGLVSTVIVKDMSRLGRNYLMVGQYVEIEFPKHNVRFIAISDNVDSAKGMNDLLPIHNLMNEWYSRDISKKVRAMIRQKGNSGQSIASKLPYGYYNTPEDKQTWLIDESAANVVRRIFDLYLNQSFGMYQIARILKAEGIPRPTYHRRMAKGIKVEADDLCVWSASVVRDILQHREYIGDTVNFRTEITSYKNKKVIHNSDDKLKIFPNTHPAIIDKETFQKVQNKISKVIRHTRNVHSYLFADYLYCMDCHSRMHGRQCYLKGGRTLSAYECSTYRKSKGCCFHGVPEMYLQAEVLAKIQNVLAFAKSNSAEFRQNISKALEEQSDGSKAVIQEELDKAQARTTEIDKYIQGLFEAKVRGEIDGSLFASLKKTYDEEKEQLNNLIIELITKLSRENEADEKIQLLYAAIRKYDAVWELTPEVLTDFIEKIEVGQVSAENKKISFELRDNQISVFFWGVGIIDFM

SEQ ID NO: 11898 - protein, 516 aa, synthetic construct
MARRKKVSPGNRLVAYYRYSGGSQQTEQSIEGQRRDCEAYARQHGLTIVHEYIDRHISGRGVESRLAFQQMIADSSKHLFDLVICWKTDRFARNRYDSAVYKKKLRDNGVRILYAAESSVEGPEGIILEGLMESLAEYYSAELAQKMRRGMRESALKGKAINPNRPLGLTTDEHKRFIIDEKNAPTIRFIFEHYAAGESSASIVDQLNAAGLRTSKGNSFNKCSIPRIIQNEAYHGVYICKAYDVRIDGAIPAIIDDDLWKRAQKMLTLNKQHRAPHSSHADYLLSGKLFCGCCHSLMRGISGHNCRNDVYYYYACGNKADGGTCKKKNIPKDVSENLVVNAICENILRPDTLEDLADAIAAAQQADVNQPDPERAMLEQNLADVRRKINNIIESIENGTASSRLSARLADLEQQESTLNYQLESLKEVHPPVLDRERILFLLEQFLISPNERTEDYNRRIIDTFVNRIEITDTEMLIYFNLSEASASEKQKNSQPNNCSTGNHLVRVARIELTAS

SEQ ID NO: 11899 - protein, 548 aa, synthetic construct
MSTGTELRAVFYARVSTEEEKQLNALEKQIQENKDVIRDHGWRLVGEYIDEGKTGTTTKRRNDYKRLLKDMTENKFDIVVCKDQDRLQRNTLDWYLFVDNLVTNNLKLFMYLDNKFFKPSEDALITGVKAIIAEEYSRNLSKKLNNSNKRRIERALNGEEVSAMGNGKSLAFKIVNGKWVKDEEEAKLGKKIFELYLEYDSIRKVRDWVNEYGYTNSVGKPFTSESISRILKNEKAKGVIVMGKYHHDFDKKKIVRRSEEELVRIPAPELAYVSEEVFDKVQERLRAKTGNGRGVNAYSDPLSGKIYCGSCGRKLWKHASNGYVNWMCASQVAKGDVECNGTRITTVAIRNIYKKITDNLEVNKEVVKQDIVKWLNELKATLSDTSVNEKIQKDLDKLERKRTKLLEAYLEDFISKDDYKAKYEAIEGQIEEKKKLLVPVEENEDIKVIESVLQNIDDEIDAYVKTLDMEESKVDFLIEHTKRITVLENRDIIIELDLVAGAIIAGKDFLLYVHDTMPQHHGRKRPHPPGPPAAPRQPVRDRLRCDQP

SEQ ID NO: 11900 - protein, 503 aa, synthetic construct
MDSSKNAVIYARYSSDNQREESIEGQIRVCEDYARKNGFNVINIYADRALTGRTDKRPQFQLMIKDSETMTFRHVIVYKLNRFARNRYDSAVYKNKLKKNGVKLVSAMENIADDPSGILLESVIEGLAEYYSAELAENVRRGMTENALDCRYTGGAVPMGLKIDENGHFMPDYPAANIIYQIFKAAASGAEYREILDRFNSPDNVAVLGRKITRGTLLKMLKNEKYIGTYSWNGIRKENAFPAVVDKKTFEFIQDLRRSRMHKHQSKPYEYPLSGKLFCRCGAPMVGTSGTSKNGSIYNYYSCTAHLKSTENCKQKSIPRDDIETTIVRAVTDILSDEKAVDILAQQVVALAKSKGKPQEILTIESQISDLDKKISHAVAAIEKGISSPALFSSLNENEAKKSELSAALARERLRHRGTNITEETIRQFFRSMRDKDFSNEQYRRILLRSIVNKVQIGDGEIIISFNYTQKLPTLPNPVKVESSYTATLAERGRFELPHRKPV

SEQ ID NO: 11901 - protein, 604 aa, synthetic construct
MKKVFVYHRVSSDQQLDGSGIARQAELLEGYLERTGICAEMDDPAPVVLSDQGVSAFKGLNISEGELGAWMEQVRNGMWDSSILVVESIDRFSRQNPFDVMGYINALMAHNVAIHDVMANIVISRSNSKDLPFVMMNAQRAYDESKYKSDRIRKGWAKKREHAFNKGTIITNKRPQWIEVENDKYVLNEKAVVVKEIFALYQTGMGCPTIAKQLQRKEGEQYKFNRPWTGELVHKILTNRRVTGKIFISEIIRNHDDIEYPVTQKKYDMDVYPVVINEEEFELVQELLKSRRSNAGRITVKKDGQEEVLIKSNLFSGIARCTECGGPMYHNVVRAKRTPKKGDPKIEEYRYIRCLNERDGLCENKAMTYETVERFVVEHLLGMDLSTVMKEQEFNPEIEVLRIQIDQVKDQITNYENGIERRKSAGKPISFDMREELDDAKSELERLLARQASLATVQVDVPVLQDVNVTELYDVNNVDIRTRYESELNKIVSNICLKRNGTSYTIDINYKQNELKRHVLFVENKKKEQTLISEVIIEDVDGAKFYYTPSFMIMLKDSEIRFQQTNEDLSIIDYSLLLNYIDAVDRNDAVGVWMRDQFNFLTSN

SEQ ID NO: 11902 - protein, 520 aa, synthetic construct
MKRITKIEENNALSVKTKTRVAAYCRVSTASDEQLISLDTQKAHYEDYIKSNSEWEYAGVFFDEGITGTKKECRDGLNSLIDSCEKGLVDLVITKSISRFSRNTTDCLELVRKLMALNVTVIFEKENINTDTMESELMLSILSSLAESESVSISENNKWSIQKRFQNGTYIISYPPYGYENAGGEMIVVPEQAEVVKKIFEDTLAGKSTHAVAKELNDSGVRSKKGGKWTPGAINAIIRNEKFTGDVIFQKTYTDSQFSRHTNDGELNQYLCENHHEPIVSHEIFDKANEVLNQRGKEKGNGERTERYQNRYGFSGRIKCGECGGIFKRRNHYKPSGSYIAWCCTHHIEDRHSCSMKYITDDGIKTAFLTMMNKLVFAHQSVLKPLLHSLQGFDDKDRLLQIQEYETKLEKNMEKRQVLTSLMAGGLLEPALFSKENNAFILEEKHLQEEKKQMINSVSGDRTKIEALETLIKFASGSEMLTEYSDEIFLSYVEGITVLSRKEIVFELKCGLKLKERLVG

SEQ ID NO: 11903 - protein, 520 aa, synthetic construct
MTAVIYARYSSDNQREESIEGQIRECTAYAEKNGITIVKHYIDRAISAKTDNRPEFQQMIKDSDKKLFDIVLVWKLDRFARNRYDSARYKTQLKKNGVKLMSATEIISDGPEGIILESVLEGYAEYYSADLSEKVIRGMTENALKGKFSGGAIPFGYTINADRRFEIDPLTAPFVAEAFQRYNDGQTMREIRDWLNEKGIKNKRGGPMTFNVIQHMLSNRRYIGELKYRDVLIPDAIPPIVSVELFNDVQEKMLKNKKAPARRKAEDDYLLTTKLFCGYCGALMFGESGTSRTGEVHRYYKCATAKKHKGCKKKTVRKQWLEDLVVNQTMQLVKDDAAMESIIAKVMELQNKENTNIPLYEKQLRDAESGIQNMLNAIQAGILTSSTKERLEQFEETKRELEARIAEEKLAKPKVTEDFIRFWLLRFRKLDMTQPEQRQVLVDTFINAIYLYDDKVLITFNYKEGTQTVTFGEASEIASEGNGSDLDCFTAPNKEDPNLFSKEKGSDLFFSARGFSGLQT

SEQ ID NO: 11904 - protein, 510 aa, synthetic construct
MSYFIYARKSRKDADLEALGIDVLERHITTLLELAKALSLPIGAIYREVVSGDSIDSRPVMSQVMAEVESCMWDGCLVMDVDRLARGDTIDQGRVQRAFFYSNTKIVTPNKTYDPANEYDNEYFEFSLFMSRREYATIKRRMQRGRERSSSDGYYVGNIPPYGWRRVIAPDGKHFSLAPDPVEAPVLDLMYDLCGNKQYGYQKVCTHMAEMGILSRSGRPFTPSTLKGIISNPANIGKVRWGHRKTVRTVKDGKISRSRPHSSDYILADAVWPPRISADLFQRANQPKGSCSAPVRDDRPIQNIFAGLVRCSQCGRLMVRKKAHTKTPYDILICQYTECPTVGIRIDELELALLEWLRNYVDKYELTDALPEDAENVAAKEAIVKNFEKEHETLLKQRESLFDFLEQGIYTKEIFIERSNALEQRVKECMEHIISAQNDLHATLALQANRKNFVPRCKNLLGEWGKLTIPEKNSALKVLIEKIMFTKTKRNKKGQDRSDFEIDVFPKVPK

SEQ ID NO: 11905 - protein, 511 aa, synthetic construct
MSNAVIYARYSSGHQREESIEGQIRECTNFAKRNGLTIVEHYIDRAISAKTDDRPSFQQMVADSSKKTFDTIIVYTLDRFARNRYDSAVYKAKLKRNGVRVLSAKENITSDPSGIILESVLEGMAEYYSVELAQKVKRGMTENALACRWASGRIPFGYTIDADKHLHPDPALVPIVQEAFEMYAAGAKIVDIARKINSYHVVTGMGNKFGRSSFDRMIRSETYIGVFKWNDIRKENAIPPIITPELFYKCQARYNARNRKNVARPSAIYLLSGKLRCGCCGGSMCGMSGKSRNGTMHYYYSCYSTRRRTSHCDIGNIRRDEIEHIIAAHAASILKKPINLDIIANQALKTNNSVKNYRLESLIQQEKDLTQKLENCMKAIDQGLVSITLMDRIKQYEADLQSVKNDISLEKIKSNPIQVTKEHIIFFLEKFALLEGEKFKDRIISTMVRDIVIKKEKDGNYLVTVQYNYANSKELPNEESYSVPESIGSQDVELVDNSGVVTNRLRFYPYY

SEQ ID NO: 11906 - protein, 477 aa, synthetic construct
MSNSSSFPAKISAIYCRESTEKQNIQSLIDMCKKAAKKINLQNIKVYYDVASGYNKDREQYSKLKEDIQNNLVDTLVLYESSRLTRDELEHHIFYGLLRVHNVKVYTVTHGWLDLQDADDTFLTNLLNLLDAREGRKTAKRSKDRMTELAEQGKWTGGPAPLGYKLVNKELVIVPEDAEKVKTIFKLFLDGKTRQSIANFFGYEVKKVRRLLENPVYIGKLKFHSVEIINKKKILHKDYKVLNGIHEPIIDESTFSLVQGKLKNIKVERNTDVYIFKDLIKCTCGRKMYRVVNKYNYLKKSTNEISRKTENLYYCRTSDKYKSLGCGAIGIHEEELFEEVMASLKKIIFSLEVENIDTKFDDYQSQLVLYKKELASLSGKEELLARQLLNSLISEEVFEKLMKELKEKKAFLEEKIKNLTTLITNKKNTNKNSEILKKYFFKLEKEKAPEKINNFLKLIIDEIEMVNDYRFYIHLKF

SEQ ID NO: 11907 - protein, 576 aa, synthetic construct
MKKNFKMPGSGSETPIRVAIYVRVSTVYQIDKDSLPMMKQDLTSYCKYILNTDDFVIFEDAGYSGKNTDRPAYQKMMSQIRQGLFTHLLVWKIDRISRNLLDFANMYAELKDLGVTFVSKNEQFDTSTAIGEAMLKIILVFAELERNMTSERVTATMINRASNGVWNGGRIPFGYSYDKPTQVFSIDPEENKIYNFMVETYEDTQSIVHTSRRLNEAGYRSRNGNMWSPVAVWTILRNPWYKGVYRYNYYKIPGRKAIKDESEWVIVENHHPASIDPDRFDRIQATLDKNARYRNTPGRKTAQKNVHVFSGLVWCAECGSAFTASPGKLHVSGYRPSKYGCPNVRKTKTCHAKYTSDVVLGEFLLNYILNILNAQKQFAYIHSTDDLQKCLLHGSTFSNVDHVDPDGLASLLNMLEKCSGSDPVLLKRPRSKPKMDPELKRMMADQKKQQRALDRLNDLYLYSDDSISEREYLVRKQQITDRLQEINEAIGMMSQEPWMRTMNDEEFIRQASSFILTQKLADKQYIYYENLAESLDPEILKNFFVSILDSIILRDGRPETVVFRNGLSHTFTYKDS

SEQ ID NO: 11908 - protein, 561 aa, synthetic construct
MKKTKVYIYTRVSTSMQIDGYSLDAQKERLTKYAEGNDMVIAGEYSDEGKSGKNIAGRVDFQRMLNDIACKKDGVEYVLVFKLSRFGRNAADTLTSLQFMQDYGVNLISVEDGIDSSKEAGKLMVHVLSAVAEIERENILVQTMEGRKQKAREGKWNGGFAPYGYKLVDGELIIEEDEAEAIRIIFDKFVHTNLGYNGVVNYLNNNGIKKKARQNGYLTQFTTSTVKAILDNPVYYGKIAYGRRKTTKIEGTRNEYHVVAQKEFDVYDGRHKAIVDEQLWKDAQAKRRATASKLEKKHDLDHEHVLSGLVKCPVCGAGLYGNVKRAKRKDGTYYKTYFSYACKHRLNKDGHKCDYHRQWSEEKVDNAVSEIIRKLVNNPRFSEVMKTKINTSVDTSEAEKELANAKKVLKQLVGTKDKIILQIDTLDILDKNYDRKYDDLQKRLDTIYDKIGDAEDLVSETEDKLSNIQKDKITGDNIYNYLLMFDSVYDVLSDMEKKQFYNALLTDIQIYEEEQDKQIIKSIGFKFPVFYDGEFTKRIIRDKEKTVETVVLMQYCGKKEK

SEQ ID NO: 11909 - protein, 528 aa, synthetic construct
MAYCIYLRKSRADRELELQGFGETLKRHRDTLIELAKKKNLPIGEIYEEVVSGDSIAARPQMQRLLNDVSDGKWEGVLVMEIERLARGDTSDQGIVTKTFTYSNTLIITPMKTFNPTDEFDQEYFEFGLYMSRREYKTIKRRLHAGMEASCKEGNYIHHTPPFGYSIVKNKKSKGYRLEPKPGEAEIVKLIFQWYTKGILKEDGSYELLGTARIADKLNSEYSIKPLGGVWTIPTISTMLRNEHYLGYIVFGKKKRKKVVENGIIVDKWTRNESYGLYKGKHPALVSQDTFNLAQERLSRNPRRPSKTITNPLAGVIKCGMCGRSMYRRPYQKRGQSASLICSEKTCHNVSSAFYLVEDALLTAIKEWIDGYEIKEEANKYDTSVLESKTKLLEEQQKQLIAYKNQLTKVFEAYENGIYDSDTFLNRQKTVSESISSTEEAIVKLNKEIANEREIISHQEEIIPKAKKILEIYKTSDDVQLKNDLMKSILDKVVYTKTANGHFKDQRQDDFKLELFPKLPKNKGNSSE

SEQ ID NO: 11910 - protein, 489 aa, synthetic construct
MLKTVIYARYSSDKQNEQSIEGQIHECEQFAKTHDMVIIKHYIDRALSGKTDDRPSFLQMIKDSSSGLFDAILVYKTDRFARNRYDSAVYKAKLKKNGIKIFYAKENIPDGPEGIILESMLEGFAEYYSAELSQKVKRGIKENIRKGLSFGGACPFGYKIVNKKYVIDDEQAPYVKKIFEDYAKGRRAIDIFNELNTLPNYAGKGRKWNRSSLNRMLTNKKYIGIYELEDVCVKDAIPPIIDEALFNKVQSRILFNRRHTTRAKVNYLLSGKLFCGLCEHSMTGKTGTSKTKVKYHYYVCSNRHCKQKKYRKELLEDIIIQYTVKDILNPKHFKMIAKKCLEIQQADNKINDILLMLKKQLTATKTKINNIMNAIEAGIITTSTKDRLEQLEQEKYKLELEISTQQLNSNRLLSEKQIIYMLNVFYNKRVDVSFYNQIIDCFIYKIYIYSDKICIVYNLNNSDKDVTYSDINELYKSSHLNSCGSPYDL

SEQ ID NO: 11911 - protein, 534 aa, synthetic construct
MNRPHSPTKGLIFMSTNAVIYARFSSDKQREESIDGQIRECTKFAEDQGLEVIGTYIDRAMSARSDNRPDFLRMIADSARGQFQYVIVYQLDRFSRSRYDSAVYKNKLKKNGVRVLSAKERIGDDPTSIILESMLEGYAEYYSAELSQKVKRGMTENILEGKWTGGRVPLGYALTPDKKLKVVTTAAKAVNIIYEMYNAGNRVIDIINHLNAHSYTTASGRPFCRSSINSILTNKIYIGTYEWDGHVIKNFTTPIVPYDLWRAVQNRINYHKSNPRAKSHSTAYALTGYIYCGKCGLPMTGQSGRSNNGNLYYYYRCSSKNNYHERGKKMKYRCQSRNISRDKIESLVLKTTVDILRSPEAIKMIAQQVANLQEIDPTADEQARIKKERNSIQSKLDNSIKAIENGLCSTTITANIEKYEARIAELTQKIDELKFKYAPIHIDAVAVEFFLRSLLLNKKEHDAYRLDMFRTFIRRVIVHQDSIEIQYNYTACPPTLKSPVSIPLTGETECSDKNQNGAPRRIRTFAPGSGDRCS

SEQ ID NO: 11912 - protein, 581 aa, synthetic construct
MAYAMKVPAVSADDRIVAIYVRVSTGYQVDKDSLPFQKKELKAYCKHILHVDMSRVEIFEDAGRSGKNTKRPAYERMMQKVRAGLVSHVLVYKIDRISRNLVDFSLMYDDFKYNRVTFVSLNEQFDTSSAIGEAVLKIILVFAELERKLTSERVKDIMIGRANEGKWNGARVPYGWDWDSSAGWPVHSEKEAPFGRAMYEMYLKVKSTGKIRDYNNAHGIPTKRGGEWTSKTVGDFLRNPMNKGDYRYNYRESARGRKKPIDEVVYLEGVFDPLIDPEIWEKVNKIMDINRDKRNMGGSHPVEKNCNVFAGLIQCGSCGSGYLVGKKDKRRKNGFTPSMYYCSAKTRAIHCQNLNVSDVKIGPFVINYISAMVRVSNERRKIKTPEDLEEMLLSDKAVFADIMGLSSDSLNSTFELLTGKSATGGALWRADLVDHEGTVADPAEIESLKDQIRKYERAKERLEGAYYFSDDGMSEKEYLEKKNRFDSGRVAAENKLKELTETHIASGVDESTFMKSASAFLLTHKIRAGSHIVYSDLAGMVEEESIKEFFNLVLDHITVKDRRVTEIVFANGLSHKFVYRD

SEQ ID NO: 11913 - protein, 486 aa, synthetic construct
MIIAAAYVRVSTDEQTDYSPSAQLADIREYARQNGYHIPDEFVFMDEGISGKRADKRPAFQSMIRQARKKSNHIQYIIVHKFDRFARNKEDSVLYKALLKKDGVKVISVKEPIPQDDKFAVIYESMLEAMAEYYSLNLAEEVNKTMIKKAQAGEWQATAPFGYKNENKSLSVVPEEAKMIRYIFEQYIAGTSMFALSRQMNQMGYRTHRGNVFENRTIQYIINNPVYKGYSRWTPGRMHLRDYSDPASIISKGNWEPIVSEEIWEAAVTRFKAEKRTYYKHKRPETEGIHWLSSMVKCSACGRSLIVGTKYKNGAVQFQCGGYNHGQCHDSHAISSNRLIPALLSELEKIAAHPNTEGCRYTIRREFPASHELDVYVPLLAKAQQRLKKAKDAYLNDIDTLEEYRSNKTSIEKEIAELKEHIAEIEEQQKMPFDQAAFSTKIASVIEILRDESRSMEDRRKAFKSVCEKVIYNKHTNSLELFLIDG

SEQ ID NO: 11914 - protein, 524 aa, synthetic construct
MGDKMKRVYCLYRVSTKGQVDKDDIPMQKTSCREFAERNGWTILKEFQEKGVSGFKVSASDRDAIQDLKAAAEKKEFDVLLVFMFDRIGRIDDETPFVVEWFIKHGIEVWSVNEGEQRMDNHVDKLMNYIRFWQANGESKKTSARVKTRLNQMTLDGKFTGGVAPFGYKLIKSGEVNKKGKELMDIVVDDDEAPIVKKIFEMTVKEGYGSYRMADFLNSHGIRTHNNSKFQCNTVNRILKNKMYCGYFISGGVESPYIERLHIIDENIFDQAQFILKQRSSKNEEKQQIARTTKGSTLLSGNIYCAHCGQKMVSTSYIDRYDRADGSQYRVRRQRYICTNKAMKRGACDGQSAYVAHRIDGAVIATLRDYLAKIKSTPKDIALEKRYKSEISEYKRKQTKIEKEVEKLKRQIVELSAEIGKSLLGESRFTPDMLSTSIDNTNDLLHKKEFELNDIKFKLANQQNAMGKLDFYYSQFRTWADEFDNSTMEQKKMIACQLIREVKVSRGYELEIVFDLNYEQFLSL

SEQ ID NO: 11915 - protein, 520 aa, synthetic construct
MNVAIYARKSKATKKGESISNQIELCKKYFLNTTNEDVNFLIYEDEGWSGGNINRPQFTKMINDAKLNRFSTLICYRLDRIARNVADFSSTYKILEENNIAFISITEQFDTSTIMGRAMINISATFAQIERETIAERIKDNMLELSRTGRWLGGISPLGFKSVQITENNKKLYKLEVVNDELEIVKLIFNLYPQYKSTVPVARYLVSNHIKGKNGGDFSKNTVLQILKNPVYCCSDTEAIKYFKDKDSTLNCIDNKELGLMVYNKKKSGKKENPIDEWIVATGKHQGIIPGAEWVNCQKILEEISRKASPRKATGNKFLLSGMLKCARCGSSMCSWSRTSRGIYYRSYRCELKNRAATRCDSKMVNADDLESFVIELCKNINLEEIINIKKTKNNNSTLKRELTSLNKTLVENDKLLQGLVKKLALIDDIDILTIIQAEIKKIKSENENINKRINEINLSMFDSEDEYKNQQILLESHKLFKDTIDLVKDVEAKRNLIMSFIEYFTYDSQTNEIGYKLRL

SEQ ID NO: 11916 - protein, 520 aa, synthetic construct
MNKIAIYTRKSKFTGKGESIENQIEKCKKFIEFKFNIDSKSVNIFIDEGFSGKNEDRPEYQRMMNQIKSKQINSIVIYQLNRLGRNARDIHNTMQLCDDLGTIIYSATEGFDSSTSFGRAVIGILASLAQLEREQLAERVKDNMYTLAKMGRWLGGQSPLGFDGTREYYIDENGKERSVTELKPNKEELNIIKLIYQKYIEEKSLSQVAKWSLTNHLKGKNGGNITKSAINVILKNPVYVKSTDKVLEYLEKENYEVCGSANGNGLLRYGKDNEQIIAVSKHKGIINADDWMKVQNILKENTDKAPRRGKTNTALLTGILKCNCGSSMNIAHGKLKNGTKTFYYQCAMKVASGGTRCKSKNLNGPLLEEKLIDYLKNYSEIQIIADLENILNKSNELNLKLTAESIDNAIEQCDKSIKVLVNKLKVIEDLEVSKIIIDELTKEKDKKKDLEKQKENLLEDEASKSLSEAEILEVLNLVEHFKNNIDSLDFESKKKLLNEMIESIVIDTDEFIINFNIKKN

SEQ ID NO: 11917 - protein, 493 aa, synthetic construct
MDNRIDAIYGRQSIDKKDSISIESQFEFCRYELKGGEGREYKDKGYSGKNIERPDFQRLLQDIKLGLIKRVIVYKLDRISRSIVDFAKLMELFKQYNVEFVSCTEKFDTSTPMGRAMLNICIVFAQLERESIQMRVQDAFYSRCTKGYYMRGRTPYGFDTEPIVMDGIKTKKLVENAEMDFAELMFQMYAEPSSSYGDITRYFVKNSIEVYGKALQRAFISKLLRNPVYVQADMDIYEYFKAQGVKIESPPEMFTGDNSCYLYQGREGEEQILVIAPHQGRIPSSLWLTVQRKLSQNTSFQNGRKCHNTWLAGKIKCGRCGYALVGLRAQNGVTYLRCKQRADNGSCEGAGTLTAQSMESFVYGEMVEKMRKYHTLKGGKEPGYNPKLTAARVALAKTESEIEKLLDTLSGANPLLLQYANNRIEELDAERQKQLKLVADLTANSVSDTQIDCITNYLNDWESVSFDDKRKVVDILISHIDATSESVTIHWKI

SEQ ID NO: 11918 - protein, 463 aa, synthetic construct
MARSVTVIPARNRQVSGYRAAPQKKIRVAAYCRVSTDQEDQLHSFEAQVDYYTKYINDHENYEMADIYADEGISGTNTKKREQFKRMIADCGKGKIDLVITKSISRFARNTQDCLMYSRKLKNLGIGIIFEKENINTLDSTGELLFTILSSLAQDESRNISENCKWGIRTKFKNGEMHLNTFKFLGYDKDENGKLIINREQAKTVRHIYRDFLWGLNPAQIAKELEEEQVPGCLGQTKWYASTVIGILKQEKHMGDALLQKTYTADFLTKRQVKNNGEVAQVYVRDSHKGIVDKETWNAVQEEFERREKFMQKHGTDRYSYGSECYPFCEKIFCGECGSLFTRHSWKSRGIIQWQCKNHRKDGKVACTNAYVDNADLEKGFIKAFNRLVGEREKHIERWNSMKLDGTPLEKIRAGQMMEATESGQLQQYVPEAAQLVLEEITIFGAKKYEFAFLEGSRVKVSV

SEQ ID NO: 11919 - protein, 501 aa, synthetic construct
MEIQIREGSREQKRKLKVCAYCRVSTDADEQENSLENQIRHYETVIKTNPDYEYAGVYSDFAISGFKEKRPGLQKMLADAEKGKIDLILTKSVSRFARNTSIVLEATRKLKELNVGVFFELQNINTLSGEGELMLTILAAFAQAESESGSAGAKMVYQRKYEAGIPVQYLERSFGYTKDERGVFVADEAEAVWVRKIYEMAADGYTPASIKRYLNENGVKTVGGVQWVDSTVFRLLENEIYKGDYIMHKHFVNEERKLVRNRGEVDAWYIEDDHEAIVSPELWQKAQDALAAKRDYLAEGSVIEEFTEENYPYMNKIYCAKCGYPLYKRIYSKGNRLNWGCSGTKRYGKSFCDGINIPDGVLRSAWHFEENTYIDEKASDKGVKEFTYLKERSWKRRHKKKQPSAIPENTETEYPYREKIFCALCGSRLVRYVNPQNYKVTWVCNRRKRKGKEACDGTRVPDTVIKGWGEIKKDIYIQRKDDKNGKKRYSYTSKKPSGIRV

SEQ ID NO: 11920 - protein, 521 aa, synthetic construct
MGNVMVIPAKRQIGNTGRKQNAKPKLRVAAYCRVSTDSDEQATSYEAQVEHYTEYIKKNPEWEFAGIYADDGISGTNTKNREEFNRMIEDCEAGTIDMIITKSISRFARNTLDCLKYIRQLKEKNIPVFFEKEAINTMDAKGEVLLTIMASLAQQESQSLSQNVKLGLQFRYQNGQVQVNHNRFLGYTKDEEGNLVIDPEQAEVVKRIYREYLEGYSMDKIAAGLEADGILTGAGKPRWHTSTINKILRNEKYIGDALLQKTYTTDFLNKTRVKNTGIVPQYYVEGNHEAIIPREIYMRVQEELVRRRVVKTSANGKKRSYSCNHCFSQIIICGDCGEMFRRIHWNNRGCKSIVWRCISKLEPTGLECHARTINELDLQEIVLTALNELLGDKSKYQKQLQQNIASVIRASAAITTDGIDEKLMELQQELVKKANNKEAYDEIADQIFALREKRQQASIDTVQRDEQLQRITELQDFIKDQPSDLTVFDEALVKRWLKQITIWPTHCTVELKSGLKVDVER

SEQ ID NO: 11921 - protein, 519 aa, synthetic construct
MKKVTKIDKVQKVTSKRQKLRVAAYCRVSTSNDAQLESLETQKAHYESYITSRDDWLFAGLYFDEGITGTKKDKRPELMRLMQDCATKKIDFIITKSISRFSRNTTDCLELVRKLQELDVPIYFEKENINTGSMESELFLTILSSMAEGESTSISENSKWSIKKRFQNGTFKLSYAPYGYRWDGRTLRIVPEQAEVVKRIFADVLSGKGTDAIAKELDDEGVPTKRGGKWTSTSVRGILANEKYTGDVIFQKTYTDDSFNRHTNKGELDMYYVADHHEAIISKEDFEAAGLLISQRAAEKGIKRESQKYQQRYAFSGKIICNECGDTFRRRMHSSTYGKYVAWCCNTHLADKDKCSMMFLRDDDLKVAFITVLNKLIYSHKLVLKPYAAALQNNSGDENLIRIQHLERLLEQNTEQRETLTRLMAQGYIDQVLYNSETNALLSQANTYREDIEVINATMSGDSSRFFEAERLLHFAERGSMLEVYSEDLFERFVDHILVYSRQEVGFVMKCGLTFKEMI

SEQ ID NO: 11922 - protein, 505 aa, synthetic construct
MSQKCVIYARYSSDRQREESIEGQIRVCEEFALRNDLEVIQTYTDRALTARTDRRPAFQQMIADCKKRQFSYILVYKLNRFSRNRYDSAVYKHKIAQYGVKVLSAMERITDDPSGILLESLIEGIAEYYSAELAENVHRGMTENALEGKANGRAPLGYKKGPDGKLVVDERNAKAVRFIFQSVLEGRALKKIAGKLNAMGYKNSFGRPFASGNFGNLLRNKKYIGIYHWGNEDVEGVVPPIVERSVFDKVQELIESRKHKSTRKRVENYLLTGRMTCGLCGAAYIGKSGTSHTGVPYAYYCCSNRVHRKGCKGKNYRQDKLEEWIALETLKALNRPETIRQLAKQIIRIQEEAAGEPDPVVDNLEAELKDYKKRVANSIKAIEAGVISETISRNITEYEEKIKALEKELSRAKLKRQPFTLTQDHIEFFLTSLLAGDPADAKYRSQLIDTLIAGVVIYPDKIAVYYKYQKELPSLRNPLTISEEGSSNGKKLVGPQGFEPWTNRL

SEQ ID NO: 11923 - protein, 581 aa, synthetic construct
MARKRTNLIGNTPSVRETKVAIYIRVSTIHQVDKDSIPMQKKDLIAYCQLILGTDNYEIFEDAGYSGKNTDRPAFQNMMGRIRKGEFTHVLVWKIDRVSRNLLDFAEMYEELRSLRVTFVSKNEQFDTSTAIGEAMLKIILVFAELERNMTSERVTATMISRANSGQWNGGRIPFGYSYDPKEKVFSIREDEASICRELKDLYLLNRSLAYVSRALNEKGYKTRAGVSWSPHSVWIIASSPFYAGIYRYNRYKGVESRTINPEEEWVMIQNHHPAIFTLEEHQTMRSIMKSNQRNMDNLPGRVHLSTKTHIFQGIMYCDKCGSKMVSTPGRLHVDGYRTSNYGCPLRRNTKKCNNPTVNDIVIGEFVINYILNMLNAKKTFSTINTPDELNAALLSGSVFSEVSSVEENGLNSFFNLLSRYGSDRSYIFSVKSPRKKKAAVDPELSKLRKEKEKQERALQRLQDLYLYSETSMSEKDFIIRKSEISSHLDNINRQLGLMTQDQASFLSDEEFIKQASHLLIQKELKNKKYIYFKKLVSTVDPDILKAYMETILDSIYTADGKITAITFKNGLTHRFIYKDK

SEQ ID NO: 11924 - protein, 536 aa, synthetic construct
MPRKKKLQEVGGLRLVAYYRYSNGGQQTEQSIEGQRRDCEAYAKAHGYKIVHEYIDRHISGKSDSRPAFQQMISDSDSHLFDAVICWKTDRLARSRYDSIIYKTRLRRNGVKILYAAETVVDGPEGIIIEGLMESLAEYYSAELAQKLRRGQRESALKCIALGGNRSFGYDIGPDKHYCINEKQAPAVRYIFEQYAAGATAADIVRELTARGYRTSRGNPFNKNSICRIITNEMYLGVYKYADIRIEGGVPAMIDRELFNRCQTQLAFNRAHGGGKGAPRADYVLVGKLDCGLCGHAMKGASATGHTGSKHYYYTCTQHVEKKCPKTSIEKNYLEQVIVDGVAKYVLTPEKISQIVDCMMELQAKEQEPKGNPEKDALEAELAECRRKQNNILEAIEEGGSARLAARLRALEEQEAQLTFALGEINNAPAPPQFSREALTFMFEQFRREEDEVDEEYRRRILDTFVSSILLYEDRAEVKFNITDQKTGDFERVILPISANKKPPEDDDTTSNSEGSTALRLVEAMGVEPMSEKSSA

SEQ ID NO: 11925 - protein, 498 aa, synthetic construct
MEIQIREGNREQKRKLRVCAYCRVSTDADEQENSLENQIRHYETVIKANPAYEYAGVYSDFAISGFKEKRPGLQKMLADAQKGKIDLILTKSVSRFARNTSIVLEATRKLKELNVGVFFELQNINTLSGEGELMLTILAAFAQAESESGSTGAKMVYQRKYEAGIPVQYLERSFGYTKDERGVYIADESEAVWVRKIYEMAADGYTPAAIKRYLNENGVKTVGGTKWIDSTVFRLIENEIYKGDYIMHKHFVNEERKLVRNRGEVDAWYIEDDHEAIVSPELWQKAQDAIEAKRDYLAEGSVIEEFTEDNYPYMNRIFCAKCGHPLYKRIYSNGNRLNWGCSGTKRYGKSFCEGINIPDGVLRKAWHFDGNMYIDEKPSVKGTKEFTYLKESSWKRRHKKKVPEAIPENTEEAYPYRKKIFCRLCGSRLVRHVNPKSHKVIWICNGAKRKGVAFCGGTRIPDSVIRGWGEIKKDIYIQRKDDKNGKKRYSYTSKKPTA

SEQ ID NO: 11926 - protein, 523 aa, synthetic construct
MRFFSYGRKSVFSDKSDSIDNQFRMNREYCESKFSGQVDSWQQFSDEDFTGANTSRPDLQRMLSFIKGGFCDVLVVYQLDRLSRDVRDFANIYALLEEHGVMFISIKENIDTTTPIGRAMMYVTVVFAQMERETIAARVTDNMLGLAKKGYWTGGNPPVGYVRKHIVVNGKKHCSIEVDPDGARYVTQIFDTFLAYNCSLQGMETRFKNQGIRTQSGKFFSTTQLHKMLTMPYCVEATPEVYDFYAAKGCIMDPGSPREMWDGSVGVIIYGRSTEKNKKHQAQPPEKWTVCLGKHKPFMPAEKWLAVQSRFTQNKCIKDAKWPVPLLKGVLRCKCGNLMQVSRKKKVDGTCSSWYYCRKRMRQGVDACDMGQIKCDLLDEEVLELFRGITADPALIQKFVKAETPADVSDLKAAQARVSACERKIGRLAASLALAEDSAASKYIIAEMERLDVELGALKREASLAEMESHRAAASAKDAKATAAEIAKLIHGLDGFDDKEKNAIARAVIQECTWDGERLFITL

SEQ ID NO: 11927 - protein, 477 aa, synthetic construct
MRDSKSKTVIIYNRVSTIMQDKNESLTEQTDECIRYCKTNGYEIYKILKDVKSGTKDDRAGYLELKKHIRRRDFDILVVLETSRIARKMKELVLFFSLLNENNIEYISIREPNYNTTTPDGKFAMNIRLGLIQFERDNTAERVTDRLYFKASKGQWVNGKPPIGYKLVNKRLEIDEEKAEIVRNIYEDFLNGYSLNQINNKLQFSWGSKQVKRILTNPTYKGYIRYGTRSNRKKNNREAFIVKGWHEAIIPEDKWEKVQEMYKSLNRKASNTKPTLLSGLLKCKECGNNYIRKRGGSYDKNLYYGCNLNNLRYSDKFFYKDIPECSSATIKGDLLEKAVIDTLKKQINDLNFNDIEIEKKRQVNIKQIDNSINKFKNRLNKIYELYIEDEIPKDKYLKDKKDIEARIISLEKQKKSFGEIEVEKSNNEMIQEYFSKIDLSNIEEANRILKIIVNKIVVYKKKKTPKDDFEVEIYLNI

SEQ ID NO: 11928 - protein, 448 aa, synthetic construct
MSKLQVAYLRVSTETQTEKYGLDMQKQKIMDYCEKHGITIDKWYIDGGYSGSKLDRPEIQELLEHAKSGIIDTVYIYKLDRMSRDVIDTLTLFYKTLPGYGVKVVSMTEELRTENPMDRMMLTMNAAMNQYEREVIRMRMSSGMVERVKNGFWPGGGNVPVGYYYDRNDGILHIDNKKADMVRDTFRLYLDGYSCIRIADILGFSCERIVVNILKRKTYIGLIEYKGNVYKGKHESIIDEETFYKVQEMHKKRSTNAHVSRRYLLTGLCYCGVCGARMRYHQWNGINPRIVCYSQYGKDYMARDRNCNNLKPHASHIESEVEECFKQFAINVKQKDKQKDDPVNKLKVAIKKEEDGVKRLYLVYAENPTKNLMDVIKETEKKITRLNKKLLEESSRKEMNNSKKIQEIRRVSDVWDTLTTQEKNKILKECIEKVVISGNDLEIRFITF

SEQ ID NO: 11929 - protein, 521 aa, synthetic construct
MGNVMIIPAKRQVGNTSRRQEDKPKLRVAAYCRVSTDSDEQASSYETQVEHYTEYIKKNPEWEFAGIYADDGISGTNTKKREEFNRMIEACKAGEIDMIITKSISRFARNTLDCLKYIRMLKDKNIPVFFEKESINTMDAKGEVLLTIMASLAQQESQSLSQNVKMGLQFRYQNGQVQVNHNHFLVYTKDREGNLVIDPEQAEVVKRIYREYLEGSSMDKIAKGLEKDGILTGAGKKKWWTSTINKILRNEKYIGDALLQKTYTTDFLNKTRVKNNGIVPQYYVENNHEAIIPKDIFLRVQEELVRRRVVKTSANGKKRSYSCNHCFAQLVICGECGDMFRRIHWNNRGCKSIVWRCLSRLEATGLECHARTVNEKVLESVVLEAINRLLGDKAAYQAQLQQNIAQVIRDANKNTSEKIDEQLMALQKELLQKANNKEAYDEIAEQIFKLREQRRQNTVDTTARDAQIERITALQDFINQQNTMLTEFDETLVKRWLKQITVYNDHFTVELKSELKVDVER

SEQ ID NO: 11930 - protein, 520 aa, synthetic construct
MKKITKIDELPQGQLPTTKLRVAAYARVSTDSDEQLESLKAQREHYERYIKSNPEWVFAGLYYDEGISGTKMEKRTELLRMIRDCKQGRIDFIITKSISRFARNTVDCLELVRKLIDIGVYIYFEKENLNTGDMESELMLSILSGFAAEESASISQNSQWSIQKRFQNGSYVGTAPYGYSKVDGEMFIVSEEAEIIKRIFAECLSGKGGSTIARGLNKDKIPARRGNSWSAGTVIDMLRNEKYMGDILLQKTYTDSNYNRHPNTGEKDQYYYKDNHEPIISREDFAKAQDLIDERAKMKCKGVKKNVYLNRYALSGKIVCGECGRNFRRKTNYSAGRSYIAWSCIGHIEDKESCSMLFLRDGEIKATFTTMMNKLAFSNKLILEPLFKSISQIDEESDRERMDAIDKRMEQLMEERNTLITLMAKGFLEPALFNQERNVLDSEMKNLSTEKTNLVSNSASGVLQANEIKDLIDYVSADNFNGDYTEELFVEFVVNIIVNSRDELTFNLKCGLSLKEKVVR

SEQ ID NO: 11931 - protein, 526 aa, synthetic construct
MTEKNIMVIPARKRVGSTAAKEKIKKLRVAAYCRVSTETEEQNSSYEVQVAHYTEFIKKNNEWEFAGIFADDGISGTNTKKRDEFNRMIAECMDGNIDMVITKSISRFARNTLDCLQYIRQLKDKNISVYFEKENINTMDAKGEVLLTIMASLAQQESQSLSQNVKLGLQYRYQQGKVQVNHKRFMGYTKDEDGNLIIVPEEAEIIKRIYREYLEGQSLVGIGQGLEKDGILTAAGKPRWRPESVKKILQNEKYIGDALLQKTVTVDFLTKKRVKNEGHVPQYYVENSHESIIPKELYLQVQEEIHRRSNIYTGAGKNKRIYSSKYALSAITFCGDCGDIYRRTYWNIHGRKEFVWRCVTRIEQGPEVCKNRTVKEDELYDAVMTAINKLLAGGNNMIKTLEENIHAVIGETTEYQISEINNLLEEKQKELIKLANKGQDYEHLADEIDELRDKRQLLLVEDASLNSENERIDELIEFIRKNKFRTLEYDDKLVRKIIQNVTVYEDNFIIAFKSGIEMEICKCCDI

SEQ ID NO: 11932 - protein, 668 aa, synthetic construct
MAYAKAKKHLKIWTKKKAALYVRVSTRYQVDKDSLPFQRKKLKEYCKFLGLEDHVIFEDDGYSAKNTERPHFQEMMSRVRSGEFSHLIVWKVDRVSRNLLDFAAMYQELKDHKVTFISMNEQFDTSTAIGEAMLKIILIFAELERNMTSERVTGIMLDRAEQGLWNGARMPVGYRWNGETKFPEPDPEEVKIVQLIFDKYEEWKSSIKIARYLNNNNFKSKRGGQWTSKLIHDIIRNPFYIGTYRYNLRESGRGPLKPESEWIVRENNHPVIIDKAQFDRCNKIMDQNRSSRDTSDLRARKYVHTFSGHLVCGKCGANMIASKDRARANGWRPSMYRCAQRSRMLDCDNSRTINESYIGPFIFNYIANLARVQKNFKNIATPEKLERELLKGETFDGVAGILPEGLNLTFQALSFRQVGNGTYIPDIDFLGDSDGASDRDQIELLKSEIEKSKNAVTRLTDVYLFDPDSMTKEEFATKKKELAKKIEGMERQLADLLDDSGNDDLADMSFIKKASAFLVAQRIVSKSFVDYVGMAQELDNEILKDFIDQIVDQIVVLDGRVQSITFINGLKHEFRYATPAELPVCQKCGGRIGSTCGCRTRTFDFSGKRYQRIKVGDPRDTLHRKKNPVCPECFAQEGRWHHWNCKVETCPICGGRLAECEHGPNGKN

SEQ ID NO: 11933 - protein, 600 aa, synthetic construct
MVDNCARAVFYARVSTQEEEQLKALPKQVEECKDIIASKGWRLINGYVDEGKSGTKKDGRKAYIKLLEDMQEDKFDIIVVKSQDRLQRNTFDWYKFADLLNKNNKRLYLYMDNKFYEPSEDALITGIKAILAEQYSRDLSKKLNNYHEHRIEKARAGEEVPAMGNGQTYGYQLINGKWVVDESQRELVRKMYELYTDLHSVCKVRDALNEQGYRNQRGNLFTDENIGRIVKNVMHKGWVILNRHHKEFDSKETIKKLEDEWVIVKNDHEAIVSEELWDAVNDEIQSHRNKGNSGTRGKRGGTDPLSGKMVCNCCGRVLWKHASQGSYKSKEGRKYTYKRYTQWYCSGKMGRGELACTDPATISGVKLQKYLVEMADMFLDYSTVEYSKNLLKRRTISWLEDLKDKLTTPNDNGKIEQDLKALEGKRGKLIDLYTDELISKEEFKSRSVDLDAEIEKKRALLVPVEENPDIKAIEDTIANIDAEIGALFEDEAMVEEKKVQFIQEHIKKVYVSKNSDVFIVLDNVAGAFLFIDKEDTRIEVVPVAEYNPEELSEEGITENDFVPFDRESMPQHHGPKHLHPSGPQTASRCCFRDRFSRDQP

SEQ ID NO: 11934 - protein, 505 aa, synthetic construct
MSQKCVIYARYSSDRQREESIEGQIRVCEEFALRNDLEVIQTYTDRALTARTDRRPAFQQMIADCKKRQFSYILVYKLNRFSRNRYDSAVYKHKIAQYGVKVLSAMERITDDPSGILLESLIEGIAEYYSAELAENVHRGMTENALEGKANGRAPLGYKKGPDGKLVVDERNAKAVRFIFQSVLEGRALKKIAGKLNAMGYKNSFGRPFASGNFGNLLRNKKYIGIYHWGNEDVEGVVPPIVERSVFDKVQELIESRKHKSTRKRVENYLLTGRMTCGLCGAAYIGKSGTSHTGVPYAYYCCSNRVHRKGCKGKNYRQDKLEEWIALETLKALNRPETIRQLAKQIIRIQEEVAGEPDPVVDNLEAELKDYKKRVANSIKAIEAGVISETISRNITEYEEKIKALEKELSRAKLKRQPFTLTQDHIEFFLTSLLAGDPADAKYRSQLIDTLIAGVVIYPDKIEVYYKYQKELPSLRNPLTISEEGSSNGKKLVGPLGFEPRTNRL

SEQ ID NO: 11935 - protein, 521 aa, synthetic construct
MKVPVWCYARISTLKQIDGFGIQRQINTINQFLQCVELDHRLPFTLDVDNVTQMVAEGKSAFRDKNWNEKTKLGQYRKMVMDGVISDSVLIVENIDRLTRLDPYMAIEIISGLVNRGTTILEIETGMTYSRYIPESITVLVMQCNRANGESKRKSIMMQKSHANRYGKVSKVRPRWFDVVEIDGIKQYRPNETAKAIQRMYNDYINGIGAAHIVRTYGNTDNGKAWTLVTVLRALSDKRVADDARYPPIIDKELYDSVQALKAATNKKGNTHQKNMLNIFSGMSRCPVCNQSIIVKRNSHGNLFTVCLGKRTNKTCEARSISYFALERPLLTAIRGLDFSEVYKHEDKNVLTLRDQWIQNERDIAAFRERLSKASRYEKFVILDELETMNREQEELTIRLKSVDVPKDIQLTFDDDKLDLDTNYRIELNNRIKKLIQHINIVREDVTKSSYTIYCTIKYWTDVISHLVIIDVNIKRTGTGGTNTLTTTLRSVSSLNMDGTVSGNPDSDAWEYWKSFLDNLK

SEQ ID NO: 11936 - protein, 523 aa, synthetic construct
MPNTESFTVNEVLVYLRKSRSDSPDMSVEEVLRKHEEMIQQYASTHFCSPIPKKNIFREVVSGETIDSRPQMKNLLKMIESEQFKAVLVVEPQRLSRGDLEDCGRLINILRYTNTTVLTLTHSFDLQEEYERKFFEMEITRGNDYLEYTKRILRRGREASVAKGNYIGSVDPYGYKKTVIKKDGITCHTLEIIPEEADTVKLIHELYAYTPGGIGFTNIAHKLDAMHIKPKKAAHWTPAIISSILCNPLYLGMVRWNNRKVVKYINEGQLAKARPQNSEAKYYKGLHEPIITQELYDACMARRGTNPSLRRNKELCNPFAGLLYCGTCGHAMSLKIYKNHNSVSQMMLCNHQAYCHTKSVLYSGFLRRFISSMEDTLNDFELAQKSDDGRTQAISKTIVVNLENKLKKLNEKDARQKDAYEDGIYSKEEFLKRNVRTQQDIASTIIALEDARAKKADIVDYEEKIRRFKDCLHALNDPELSAAEKNRFLKSCVDKILYYNNMESKAGIGRYIENVFSLEIQYK

SEQ ID NO: 11937 - protein, 501 aa, synthetic construct
MEIQIREGSREQKRKLKVCAYCRVSTDADEQEYSLENQVRHYETVIKANPDYEYAGVYSDFAISGFKEKRPGLQKMLADAEKGKIDLILTKSVSRFARNTSIVLEATRKLKELNVGVFFELQNINTLSGEGELMLTILAAFAQAESESGSTGAKMVYQRKYEAGIPVQYLERSFGYTKDERGIFVADEAEAVWVRKIYEMAADGYTPAAIKRYLNENGVKTVGGAEWIDSTVFRLIENEIYKGDYIMHKHFVNEERKLVRNRGEVDAWYIEDDHEAIVSPELWQRAQDALEAKRDYLAEGSVIEEFTEENYPYMNKIYCSKCGYPLYKRIYSKGNRLNWGCSGMKRYGKSFCDGINIPDGVLRSAWHFEENTYIDEKASDKGVKEFSYLKERSWKRRHKKKQPPSIPENTEAEYPYREKIYCALCGSRLVRHVDTKSNKVTWVCNGRKRKGKDFCDGTRIPDTILKGWGEIKKDIYIQRKDDKNGKKRYSYTSKKPSGIGA

SEQ ID NO: 11938 - protein, 463 aa, synthetic construct
MARSVTVIPARNRQASGHRAAPQKKIRVAAYCRVSTDQEDQLHSFEAQVDYYTKYINDHENYEMAGIYADEGISGTNTKKREQFKRMIADCEKEKIDLVITKSISRFARNTQDCLMYSRKLKNLGIGIIFEKENINTLDSTGELLFTILSSLAQDESRNISENCKWGIRTKFKNGEMHLNTFKFLGYDKDENGKLIINREQAKTVRRIYRDFLWGLNPAQIAKELEEEQVPGCLGQTKWYASTVVGILKQEKHMGDALLQKTYTADFLTKRQVKNNGEVAQVYVKDSHKGIIDKETWNAVQEEFERREKFMQRHGTDRYSYGSECNPFCEKIFCGECGSLFTRHSWKSRGIIQWQCKNHRKDGKVACTNAYVDNADLEKGFVKVFNRLVSEREKNMERWNAMKSDGTPLEKIRAVQMMEATESGQLQKYVPEAAQLVLEEIIIFGAKKYEFAFLEGSKVKVSV

SEQ ID NO: 11939 - protein, 582 aa, synthetic construct
MAKHAITIPKTPKAALYIRVSTDMQADKDSLPLQESDLRKLADLNGIKDIEVFSDVGFSGKNLNRPAFQSMMERIRAREFSHLYVWKLDRISRNLLDFLELYDDLKDYGVAFASKNESFDTQSPGGEAMLKILLIFAELERKTIAERVTAVMLGRANENKWNGGRVPFGYMPGPITTDANGKKCKSWPVPDPIEAPVVRAIFELYLREKALKKVAAALNAAGYRSRKGTQWSDTTVRCILKNHFYKGEYVYNRQNSNASRREDFYRSENDWVVVTGQHEAIVPEETWRKCNDMLSKNRSWLAPIGSLVSAQDKYIFGGLLECAACGYTLNSKDRARGHDHTRSTYYYCNGRWKVPAVCAAEHPGYASDCVLLPRLLKLIARIIEACANAIKFASAEQLVSYLLNDNLVPGAIGIEEAQKIYMIVRAHVKHIYGVDQADHYNPNALLVEQSKKEKEKQERALSRLKRAYLFDDGDMSEAEYFEQKAAIEGTIAKLDKQIKSLSGNDIGADEAYLAQLSKLIMIKKLQDTNSDFDYYKLAKAIGRKPIHDFLAEIISRIIMGEQNRIIKIIFKNGVSITLQYEK

SEQ ID NO: 11940 - protein, 517 aa, synthetic construct
MLRAVIYARFSSDMQREESIDAQVRACKNYCQSKGYLVIGQYVDEAKSGRELTKRDAYNQMLADALEDKFDIIIFHKIDRNSRNDLNYYTTKDKLEKLGIRYEYAVQHIDASPEGQMMEGVLVSMAAYYSRNLSKETKKGLNENAYKAQFNGGTAPLGFRIVDKHYEIEPIEAEAVRLIFKLYLAGYSYIRICRELELAGYKKRNGKPFDKTCLYDILGNEKYMGRYTFNKTPRAKNGQARNSHSKTRPDDYIVIDDALPAIISKEDFAAVQAKRETNQRRFSSYKAVEPYLLSGKVICGYCGSAMSGHRVAPRNGEPYGYYYCLKKERVAGERCPQKYIRAEKLEKIAIRALEEEIFSEASMKKIAALMREGYAAMTNEADESRKALLQAKAAAEKKLDNLYSFIENGEVDEYSLARMKKIKDELAKIKARLCETSVKFSKILTEEEIFATLAAFKKDLESNADNSAKRFVVNLLINKITVRDNCATVEILPNMLTVYLVPRTGIEPVRVSLPEGF

SEQ ID NO: 11941 - protein, 468 aa, synthetic construct
MLYGKPQNYAWYRARVVLYIRVSTDEQARHGYSLGAQREALHEFCDTFQCQIVAEYSDDGVSARKEIRRRPGLLRVLEAVKAGGVDYVLFIKLDRWFRSVREYYRVQDVLEAAGTNWKAILEDYDTSTTNGRLNLNIRLSVAQDESDRTADRIKFVFSERVKNGGAIFGSKSLPYGLEVRDHRVQIVEDQAVIVRAFFDHYEAAQSARSTQVWLRDQCGVDLPRNTIGRMLRNGLYCGQYRDNKNYCPAIISPDQFQRVQEILARQASGHTRQSKYSYVFTGLLRCPVCGCTLKAFPQFDYKWNRLYLRYRCTQHWIENRCSWKTTPWEPRLEGWLLDHIQPQLDAYIAQFDVQEAQRRRAVVDVGAIQRKLSRLQDLYVDGMIDRASYDEKYQALIRQQEAAQAAQQSQSAGRDLEPLRQLLAGDFRSIYATLSPQERHTLWASVIDHIVVKDGRYGHFDLDVIFLP

SEQ ID NO: 11942 - protein, 498 aa, synthetic construct
MEIQIREANSGQKQKLKVCAYCRVSTDADEQENSLENQIRHYKEVITSNPDYEYAGVYSDFAISGFKEKRPGLQKMLADARKGKIDLILTKSVSRFARNTSIVLEATRKLKELNVGVFFELQNINTLSGEGELMLTILAAFAQAESESGSVGAKMVYQRKYEAGIPVQYLERSFGYTKDERGVYIADEEEAVWVRKIYEMAADGYTPATIKRYLNENEVKTVGGAEWVDSTVFRLIENEIYKGDYIMHKHFVNEERKLVRNRGEVDAWYIEDDHEAIVSPELWQKAQDAIEAKRDYLAEGSVIEEFTEDNYPYMNRIFCAKCGHPLYKRIYSNGNRLNWGCSGTKRYGKSFCEGINIPDGVLRKAWHFDGNMYIDEKPSVKGTKEFTYLKESSWKRRHKKKEPEAIPENTEESYPYRKKIFCGLCGSRLVRHVNPKSHKVIWICNGAKRKGVAFCRGTRIPDSVIRGWGEIKKDIYIQRKDDKNGKKRYSYTSKKPTA

SEQ ID NO: 11943 - protein, 464 aa, synthetic construct
MARSVTVIPARNRQRETGHRAVQEKKIRVAAYCRVSTDQEDQLHSFEAQVDYYTKYINDHENYEMAGIYADEGISGTNTKKREQFKRMIADCEGGKIDLVITKSISRFARNTQDCLAYSRKLKNLGIGIIFEKENINTLDSTGELLFTILSSLAQDESRNISENCKWGIRTKFKNGEMHLNTFKFLGYDKDENGKLVINKEQAKTVRRIYRDFLIGINPAQIAKELTEEKIPGCNGQTKWYPSTIVGILKQEKHMGDALLQKTYTADFLTKRQVKNNGEIAQVYVKDSHKGIIDKETWNAVQEEFERRERFMKNHGTDRYSYGADCMPFCEKVFCGECKSLFTRHSWKSRGIVQWQCKNHRTDGRVTCRNAYVDNSDLEKGFVKAFNKLVADREKFMERWNQMKTDGSPLEKIRAEQMMEATENEPLGRFVPEIAQLVLAEVTVLGAKKYEFFFLEGSRIKVSV

SEQ ID NO: 11944 - protein, 536 aa, synthetic construct
MPRKKKLQEVGGLRLVAYYRYSNGGQQTEQSIEGQRRDCEAYAKAHGYKIVHEYIDRHISGKSDSRPAFQQMISDSDSHLFDAVICWKTDRLARSRYDSIIYKTRLRRNGVKILYAAETVVDGPEGIIIEGLMESLAEYYSAELAQKLRRGQRESALKCIALGGNRSFGYDIGPDKHYCINEKQAPAVRYIFEQYAAGATAADIVRELTARGYRTSRGNPFNKNSICRIITNEMYLGVYKYADIRIEGGVPAMIDRELFNRCQTQLAFNRAHGGGKGAPRADYVLVGKLDCGLCGHAMKGASATGHTGSKHYYYTCTQHVEKKCPKTSIEKNYLEQVIVDGVAKYVLTPEKISQIVDCMMELQAKEQEPKGNPEKDALEAELAECRRKQNNILEAIEEGGSARLAARLRALEEQEAQLTFALGEINNAPAPPQFSREALTFMFEQFRREEDEVDEEYRRRILDTFVSSILLYEDRAEVKFNITDQKTGDFERVILPISANKKPPEDDDTTSNSEGSTALRLVEAMGVEPMSEKSSV

SEQ ID NO: 11945 - protein, 541 aa, synthetic construct
MGTTKNAVIYARYSSHSQREESIEGQLRICHEYAKAEGLAIVGEYIDRAISGTTDARPDFQRMIDDAKKKQFSYVIVYRLDRFARNRYDSVLYKHELKQCGVKVVSATEGIGTGDESILLEALIEASAEYYSMELSRKIKRGRQDSAMKGNFLGGSVPLGYKVVDSKFIIDDETAPIVRYIFERYAAGTGKKQIIDELTAKGYMRRNGKPFTYRSFDSVLRNRKYTGEFTQTGITVEGGCPAIVDTEMFEKVQARLEINRRAPAKAKAKTEYLLSGKMFCGYCGEPMIGISGTGRHGKTFYYYSCVGRRGKSGCKKQHEKKDFIEWYVCEQTVQYMQDPERLSHVAKRIIEINDAEFDGGKVKELERAVENCDNDIRKLVDALTTIPDAGRAALYDKIERIGAAKADMEIDLAKLRVLSEVRYKQEDVEAWIRSMCRGDLMDFEFRRQLIDVFINSVYLFDDRVVIVYNIKNGKQVSAIDVLNAVEELDGVELSSDSTEDGNAGGSGSFLVADAPPMQDNPNLRPIGQGFGFIVFIKDIEV

SEQ ID NO: 11946 - protein, 561 aa, synthetic construct
MEKKILCIVRASTEQQETESQKKELVEYCITKGFAREEIDYIEVAGASARKLNKKYIQMLEDIKATLLTSPTIKAVALWDLNRLGRVESKLHEMKEFFVNNKIQVYCKAPEFTLLKEDGSVSEAGGIVFSVFAAVVKHDTDEMFAKMKRGRERNKANGIFYGGKIKFGYTLDDTKHFIINEEEAKIIRLIFELYATGKYSFYKLVEELRARGITKSGQKITYEMIQNALSDKAYYKGVNGKLPLIEKELFDKCSAIKDNTVAVKRTKESINVNFAVGLLKCSCGNNFIASGDFYRCYSKMNNNRKKKVVECDFPTIRRDVLDDLLWLVTRPLQQKFLMEKDTVSIEEQKDKINVLTVKVSTAKKELSDIKGRKEKLEDAYYVDGSMTEAQFKKRLASLHSKELQTKSQIRNYKLEIADTQKIIEQIELPTNDRYLQSLILSDLDDNELEDRKKIKEMMFANIDKVTVKKLMKGNHKCVEITITSKSKLSFVFLYDSWLNSHRKGECNIFYADKPVYEISGKFIGQNPTVRQMLYQKIGLPELTNEEIGEAAIRYAKLPAPL

SEQ ID NO: 11947 - protein, 493 aa, synthetic construct
MNSCVIYARFSSDKQREESIEGQVRECRAFADANNLEVIHIYVDRAKSARTDQRPDFLKMIKQSAKGLFQYVIVYTLDRFSRSRYDSVTYKAKLKKNGVKVLSAKENIRDDPSGIILESVLEGYAEYYSAELAQKVKRGMTDSILEHKWPGTEVPFGYHKKEDGTLDVDPIAAPVVKKIFEAVLQGHTRAEITRRVAMKHYKTESGRSISYAMINRLIKNELYTGRYHWGQLDVAGFCPVLVKKETFEAVQRAIAPHPKTRRNAAAYVLTGKIYCGKCKEAMAGVCGTSKSGEKYRYYRCASKSNSIRRNRIPCSGHNVPVAWLDDIVFKTTLDILNTPEARTEIARQAIEAQRRDKSTDSEEKHLKKQKADVEKRLQNSVKAIEAGVVSDTIAANIKKYEKEIKDIQAAIDELKLKTAVPEITETAIEFFFEQLAKKAKTEGATLGLFFDFIQRVEVFDDKVVIYYSYLPTKKTPNPVEVRCSSNYQMVTPE

SEQ ID NO: 11948 - protein, 533 aa, synthetic construct
MKRAAIYARYSTDLQNDQSVEDQFRLCRAHAERLGLNVVGEFSDRAKSGASMFGRPGLANLIQAADRAEFDVLVSEAPDRISRDIADLAHIHKTLKFRGIEMNCVNGGAMDTVQIGMYGVIGQMQREEGAKKVRRGMVGVVRSGRNPGGKAYGYRPIFGRRGELEIVEDEAATVRRIYELYAGGMAPRSIAAILNEENVPAPRGERWNASTINGSGQRGNGILRNPIYAGRIVWNRIQMVKDPSTGRRISRVNPESDYEEVAAPHLQIVDSGLFDSVQRRKEATGGADRAKGPRSKRILSGLLRCGACGGGMALVGPDRSGNRIQCSTFRESGICKNSRRYYVERIETEVVDGLRRQFADTSIIEAYVEAYQAEQKRLRGDAQRARANAQRALQDAKDGITKIVEKISKGLIEDDEAAALLAPLRAERDRQKAILETTEDPPNVIEIQPKAVKRFRENIESLAQIVREKGGEASPEIAAPFRQLVAAVVINPTEKGQPYEINIKGYLSSLIDSDLSVIKMVAEEGFEPPTQGL

SEQ ID NO: 11949 - protein, 545 aa, synthetic construct
MLQVAAYCRVSTDKEDQANSFEAQQRYFREYIQRQPDWELQGIYADEGFSGTSTNKRVEFNKMLHAAELGQIDLIVTKEVSRFTRNTVDALQITRELRRRGVGVLFLNDSLDTRTNDGELRLTIMSSFAQDESRRTSERSKWGQMRSMEKGVVFGGSLLGYDVIGGKMTVNPEGAEVVRLIFHKYLQERKGCSTIARELREAGILSSKGNCLWSSATVTKILKNEKYCGDLIQKKTYTPDYLTHEKKYNHGKEPLVALKDHHEAIIDRETWQAVQRELSRRNRATGCGGHGNRYPLSGKIRCGECGKSFSHRTKKRQDGSSYYRWCCFTATNEGLRRTDGAGNVIGCSVGRQIRDDIAMDLLRRSVSAVTLDKKSIISSLTRVVESVLASGEDSGEQELRRLELEFEKLQARSDAILDRFLDESISKEDYQRVKARCENEMNRVQEKIAAIKQRQTLNTDTQTLKPDIRTAITGIVSGRTADDDFYGHLLQQMTVYRDGRVEVALNLLPAKWVYVLDGLEKYRDKIGVHDASSVPMSVSRPLSSG

SEQ ID NO: 11950 - protein, 529 aa, synthetic construct
MSRYCIYLRKSRADLEAEAHGEGETLSRHKTALLELARRMGITISATYEEIVSGETIAARPQMQRLLSEVGAGEWDGVLVMEIERLARGDTMDQGLVAQTFKYSGTKIITPLKTFDPQNEFDEEYFEFGLFMARREFTTTNRRLVRGREASAKEGKYVGSVPPYGYRKVKIPNDKGFTLEIVEEQAKVVRMIFEWYAEGAEVNSQKKRIGPYTIAVRLNELGIKSAGKKDYWTIYGVQNMLINPVYIGKIRWGYRKVKKTVTPEGMKKKSREFAQDGDYIVVDGLHEPILSEELFYKVQDLIAANPPTPIKYRHKNINPFAGLIFCAKCGHCMNYRRGYGRQPDYIGCYTAGCKNKASRFDLVEQRVLSILNSWVKDYSVDKAQIKHEADLNAELSNAISLAEKEIETLQDQLDKVYSFFERGTYTEKIFKQRSSVIEQQIMEIGEKIDRLKAEHQQVLERQNVQAEFVPSIKHLLEIYDTLEPVEKNKWLKQIIDRIVYEKNADGKYHNVDPGDFTIGILPRLPKRGS

SEQ ID NO: 11951 - protein, 498 aa, synthetic construct
MEIQIREGSREQKRKLKVCAYCRVSTDADEQENSLENQVRHYETVIKANPDYEYAGVYSDFAISGFKEKRPGLQKMLADAEKGKIDLILTKSVSRFARNTSIVLEATRKLKELNVGVFFELQNINTLSGEGELMLTILAAFAQAESESGSTGAKMVYQRKYEAGIPVQYLERSFGYTKDEKGIFVADEAEAVWVRKIYEMAADGYTPAAIKRYLNENGVKTVGGAEWIDSTVFRLIENEIYKGDYIMHKHFVNEERKLVRNRGEVDAWYIEDDHEAIVSPELWQKAQDAIEAKREYLAEGSVIEDFTKENYPYMNRIFCAKCGHPLYRRIYSNGNRLNWGCSGTKRHGKSFCEGINIPDGVLRKAWHFDGNMYIDEKPSVKGTKEFTYLKESSWKRRHKKKVPEAIPENTEEAYPYRKKIFCGLCGSRLVRHVNPKNHKVIWICNGAKRKGVEFCRGTRIPDSVIRGWGEIKKDIYIQRKDDKNGKKRYSYTSKKPTA

SEQ ID NO: 11952 - protein, 518 aa, synthetic construct
MVAIYVRQSLDKKDSLSIESQINDCITLCKRNGWDDYQVYKDKGWSAKNLDRPEFQKMNNDVEAGKIKAVVCYKIDRISRSIRDLVNLIEDYHELGVHFVSFADNINTAAPGGLMMATLFGSLAQMEREAIIARVTDNYYYRCELGYWGGGPAPYGFNLKKIVENGQKHTVLEINEREAAVVKQFFRWYLEPDGTIYEILKKADKAGITTRKGGAWTSRVISELLSKPMYAPNSMDIYNFYAAQGVRVRVTPEQCDGKLSLNVFGRRDRGSKHPKRSRPVNEMTLAICKNPPIIDSDTFLKTQFKKKAKLQVSPRTGTAKTTMLSGLVKCAVCGRAMSPSGSSRGVRYFTCSGKRNYAAGTCTSKSIKVSALEKIVIDDILRYATNPKVIDMFHAMQGSKLTAEQSHEVNLLQQEAAKLDIEIDNLLDACSAGNTTAIEYLNKRIEKIDTRKHEILTRINEIKRDTENVINLFSGIEIENVPYILAHGSIDEKKNVCQFLLSSVLFTNADDVKVYYKM

SEQ ID NO: 11953 - protein, 668 aa, synthetic construct
MAYAKAKKHLKIWTKKKAALYVRVSTRYQVDKDSLPFQRKKLKEYCKFLGLEDHMIFEDDGYSAKNTERPHFQEMMSRVRSGEFSHLIVWKVDRVSRNLLDFAAMYQELKDHKVTFISMNEQFDTSTAIGEAMLKIILIFAELERNMTSERVTGIMLDRAEQGLWNGARMPVGYRWNDETKFPEPDPEEVKIVQLIFDKYEEWKSSIKIARYLNNNNFKSKRGGQWTSKLIHDIIRNPFYIGTYRYNLRESGRGPLKPESEWIVRENNHPAIIDKAQFDRCNKIMDQNGSSRDTSDLRARKYVHTFSGHLVCGKCGANMIASKDRARANGWRPSMYRCAQRSRMLDCDNSRTINESYIGPFIFNYIANLARVQKNFKNIATPEKLERELLKGETFDGVAGILPEGLNLTFQALSFRQVGNGTYIPDIDFLGDSDGASDRDQIELLKSEIEKSKNAVTRLTDVYLFDPDSMTKEEFATKKKELAKKIEGMERQLVDLLDDSGNDDLADMSFIKKASAFLVAQRIVSKSFVDYVGMAQELDNEILKDFIDQIVDQIVVLDGRVQSITFINGLKHEFRYTAPAELPVCKKCGGRIGSTCGCRTRTFDFSGKRYQRIKVGDPRDMLRGKKNPVCPECFAQEGRWHHWNCKIETCPICGGRLAECEHGPNGKK

SEQ ID NO: 11954 - protein, 519 aa, synthetic construct
MTTSARTDSGAIRCAIYTRKSTDEGLEQEFNTLDAQRESAEAYVASQRHEGWTCLPDRYDDGGFSGGNLERPALKRLMADIEAGGIDCVVVYKVDRLSRSLLDFSRLMEIFDRHGVSFVSVTQQFNTTHSMGRLTLNILLSFAQFEREIIAERTKDKMWAARRKGKWVGGMPVLGYDVAEGGGRLEINPEEAARVRAIFQLYLELESLLPSAQELERRGWNNKRWVTRKGKERGGKPFNKSTLFRLLTNPIYTGKVVFQGTTYEGEHEAIVDMETWKKVQAILRRNRLNGGTLVRNKYGALLKGLIFCTPCGTGMTHSCANRKNGKSYRYYVCQTAQQRGWAKCPTKSVNAYDIESAVVQHIKGLGANPAVLSTTLTKATEQAEARLHELEMERKAAERELKRLHAQVRKLLGGALPAGASEIATDRLADLQERIRTTEQRMTAIQEEIIVLGKTTVKESDLTQALADFDEVWNSLSSKEQAKIIHILVERVGFDGRDQSVTVTFRSEGLKQLCQRTAA

SEQ ID NO: 11955 - protein, 537 aa, synthetic construct
MRNNPLSSADEYCMYLRKSRVDLEAEAHGDGETLARHEKLLLEVARRDHLNVTQIYREVVSGETIAARPVMQHLIQEVELGRWAGVLVVEVERLARGDTIDQGIVAQTFKYSGTKIITPLKVYDPNNEYDEEYFEFGLFMSRREYKTINRRLQRGRLASAKEGKWVSGVAPYGYEKIRVPNDKGWTLRPLEDEADIVRFIFRLYTAGEEAEDGSVKKVGSYSLAVRLDKMGVKPPSGSPCWNSNTIQSILQNPVYIGKIRWNVHKTRKRVINNVVRVERYLAPPDEQILVDGLHPAIVDEAVFLAAQDLMAQKGPVPVQAANTVSNPLAGILVCGKCGRHIVLRPNAYGGVLMCPNRACDNVGSKYGIVEERLLQALSQWLSDYRLEWSDRLPAEEQALIDLKGKSIRKAQQEIDTLQKQLERTHDLLEQGVYDTDTFLARSRSITERINSANESIASLSAELIEDEARAASRKLVVPKVEKLLEVYAELPSAQAKNEMLKEVIEKVEYTKLQRSGRNGPFDNFDLLLYPKLPPSLG

SEQ ID NO: 11956 - protein, 572 aa, synthetic construct
MTNAPKADIIKAPDPVRTVAPIKEETEMLRATDKITALYCRLSQEDANEGESNSISNQKRILEQYARDHRFPNPVFFVDDGYSGTSFQRPGFQKMLDEIEAGHVAVCIVKDLSRFGRNSALTGMYTNITFAKYGVRFIAINDNYDTIDPNSVDNDFAGIKNWFNEFYARDTSRKIRAVNKAKGERGEPLTTNIPYGYKKDPDTPKGWLVDEEAAQVVKRIFTLCMEGRGPMQIARALTEARVLTPTAYKQRQGRKTPNKEGADPYHWNTNTVVHILERREYTGCTVNFKTYTNSIWDKKQRHSPEDRQAIFYNTHPAIIEAEVFDKVQEIRQQRHRRTKTGKSSIFSGLVYCADCGAKMRYCTTNYFERRQDHFVCANYRSNTGSCSAHFIRAVVLEELVWRHMEAVISYVSRYEAHFRAVMEERLKLSTGEAIRVRRKKLAQDEKRLAELDRLFMRLYEDNVSGKVSDQRYATMSAAYEDEQAALQAEAQTLEKEIEVQERQLENLEQFIQRVHKYAGERELTPYALRELVKAIYIEAPDKSSGKRRQNIRIVYDLVGFIPLNELMKEETA

SEQ ID NO: 11957 - protein, 521 aa, synthetic construct
MKTVTKIEANQRTTGSEKKLRVAAYCRVSTGSDDQLESLAEQKKHYETYIQAHESWEFAGLYYDEGISGTKKEKRSELMRLLSDCEAGQIDFIITKSISRFARNTTDCLEMVRKLLAINVAIYFEKENINTTSMESELVLAVLSSLAESESVSISGNEKWSIKQRFQSGTYKMNPPPYGYSWNGEQLEVNNNQAEIVKRIFAEFLSGKGVMNIARALDSDNIAPARGKHWCQSSILRILKNENYTGNAVFQKTFTDESFRRCVNYGQLDKYLVNNHHEGIISKADFDAAAALIDRHAVEKNVTKGSHKYQLRYCFSGKIVCGECGATLKHRTHRIGGETYEAWCCSTHIYNKESCSMKFIRDDDIKLAFVTMMNKLVFGHKLILKPYLLTLRSSSTDSSIQRIQQLRLLIEQNTGQQETLTRLMANGFIDRTLFGRELNAIMAQTDEYRAEIDTLSSSVTGDGAKLKETERLIKLVECGRMFTEFDADLFSKLVNRICVFSRNEIGFALKCGLTLRERIGE

SEQ ID NO: 11958 - protein, 521 aa, synthetic construct
MSNITIIPARPQRANSQQNETVKPKLRVAAYCRVSTDSDEQATSYEAQVSHYTEQITRNPEWAFAGIYADDGISGTNTKKREEFNRMIADCMDGKIDMIITKSISRFARNTLDCLKYIRQLKDRNIPVFFEKENINTLDAKGEVLLTIMASLAQQESQSLSQNVKLGLQFRYQRGEVQVNHSRFLGYTKDENGRLVIDPEQAEVVRRIYREYLDGYSTDKIAAGLERDGILTGAGNPRWHTSTVAKILRNEKYMGDALLQKTYTVDYLSKKRIKNNGIMPQYYVENDHEAIIPKDIFMRVQDELVRRRLVKVSPNGRKHGFSSNHVFSQMIVCGECGELFRRVHWNNHGCRSIVWRCLSRLQPTAVICHARTVKEEVLKNVVVQAFNELLGSRSTYQKRLRDNLAVVLRGYEDEQALDIDKRLAELQQDLINHASRREDYNDIADEIFRLREMKQKNFTDTAVRDEQVKRINELNEFIEQQDSEMTEFDESLARRWLKEIVVWDDRFSVELKSGLAIDIDI

SEQ ID NO: 11959 - protein, 573 aa, synthetic construct
MAKVKLPDKPRVAIYTRVSTLHQIDKDSLPMQRQDLINYARLILNTEDYVVYEDAGYSGKNTDRPKFQEMMQQVRLGMFTHILVWKIDRISRNLLDFATMYSELKQLGVVFVSKNEQFDTSSAMGEAMLKIILIFAELERNMTSERVTAAMLSRAANGQWNGGRVPLGYDYDPETKTFTINESESAVVKIIHDKYEQERSLVSLARYLNGHGYRTRTGCTYSPSTLLIILRNVFYCGDYRYNVLKDGDRQKRKKESEWITVKDHHPAIISREQKEEIARILKENRRLECERRGIYSKKKNVHVFGGLVICGNCGHAMTSTIRPADQDGIRWSVYVCPTKRRSEYLCKGRATSEVVLGEFVFNYILNMLNVQKNFDSINSVEDMEKMLLSGSTFRDVDGIERAGLDDLYNMLASGLTEKAPFDSSVEVRKKPVVSDIELENLNTEKTRIERAAERLQNLYLYSDDSISQKDYIIQREKLMSQLAEVNEQIGMVMSNADEKDVSDEEFVHAASKFILTQKLEGRTYIYYKRLATTVSREVLRSFVMSIIENITIYDGRVQTIVFKNGLSHTFILK

SEQ ID NO: 11960 - protein, 499 aa, synthetic construct
MGQGETLARHRAALLDYAARHGLEIGAVYEEIISGESIDARPKMKQLLREVEQGRWAGVLCMDIDRLARGNSADQARVSNTFRISGTLIITPSKVYDQSRESDEEYVDFELFMARREYKTISRRIMRGRIASVKEGHFIGSTPPYGYNKVKVERGRGFTLSPNSESDTVKLIYSMCISGMGCNAIARRLDTMGIEPRKGSSWSSASIKDILRNPVYCGKIRWQYRREEKSLTDGIVTTRRRENPDCIIAQGLHPALISEEEFEKAQQFLNSRRIPHKKESTELRNPLSGLVYCGMCGSMMTRLGTGSRNHCDTLRCPNRNCGNVSAKLELVESALVEGVARWLNDCRVNVSRKPAADTAKVERTAADKVRSELTKLDSQRERIYLFLEQGVYSAGEFRERMEALEKRRAQLSENLRQAEQAVSEADGARQLYAQIIPRAERVMDIYAQSTPEEKNRLLKTIISRAEYIKTERNTRGNADRCNFTLNVIPLFPEIKTGAE

SEQ ID NO: 11961 - protein, 529 aa, synthetic construct
MSKYCIYLRKSRADLEAEAHGEGETLSRHKTALLELARRKGITISATYEEIVSGETIAARPQMQRLLSEVGAGEWDGVLVMEIERLARGDTMDQGLVAQTFKYSGTKIITPLKTFDPQNEFDEEYFEFGLFMARREFTTTNRRLVRGREASAKEGKYVGSVPPYGYRKVKIPNDKGFTLEIIEEQAKVVRMIFEWYAEGAEVNSQKKRIGPYTIAVRLNELGIKSAGKKDYWTIYGVQNMLINPVYIGKIRWGYRKVKKTVTPEGMKKKSREFAQDGDYIVVDGLHEPILSEELFYKVQDLIAANPPTPIKYRHKNINPFAGLIFCAKCGHCMNYRRGYGRQPDYIGCYTAGCKNKASRFDLVEQRVLSILNSWVKDYSVDKAQIKHEADLNAELSNAISLAEKEIETLQDQLDKVYSFFERGTYTEKIFKQRSSAIEQQIMEIGEKIDRLKAEHQQVLERQNVQAEFVPSIKHLLEIYDTLEPVEKNKWLKQIIDRIVYEKNADGKYHNVDPGDFTIGILPRLPKRGS

SEQ ID NO: 11962 - protein, 521 aa, synthetic construct
MKKVQVIPATLQNYTEKPIHSQKKRRVAGYARVSTDRDEQLTSYEAQVDYYTNYIKGRSDWEFAGMYTDEGISATNTLHREGFKSMIRDAMDGRIDLIITKSVSRFARNTVDSLTIVRKLRDNGVEIYFEKENIWTLDAKGELLITIMSSLAQEESRSISENVTWGHRKRFADGKVSLAFSHFLGYDRGADGNLVVNKEQAETVKLIYRLYLSGYTFHSIAKKLTEQKIPTPARCKIWRPNTVRSILMNEKYKGDTLLQKKFTVDFLTKKSKRNEGEVPQYYVQNNHEAIISPQVFDLVQEEMRKRKNSKIRHSGISIFSSKIKCGQCGSWYGAKVWHSTDKYRQTVYRCNDKFKRHCKTPHLTENEIENIFVRAVNQLIKNKDEILSNIILLKIRLVDTTDLEKKRNALEFNMNLLAERVQQLISENACLTQDQVQYNREYSELVNRYEKIKIKYDQICDTMKQRTSRGQQLERFIENLQKQEFISIFDKRLWCSLVDFITVNEKDDIWVTFKDGTEIKA

SEQ ID NO: 11963 - protein, 566 aa, synthetic construct
MEKKMWKIEQKVTEISKRKRVAAYARVSVESERMQHSLSAQISYYSSLIQKNPAWEYAGVYADYGITGTKIIKRKEFQRMLADAEARKIDIILTKSIQRFARNTVDLLKTVRHLKEIGVEVWFEKENICSLSGDGELMLTILASFAQEESRSISDNIKWRFQKKYEKGIPHAKFFIYGYRWKDGELVIQNEEAAIVRRVFKGYLAGKTRRDIQRELANIGAHTMYGNLFQDSTIKQMLQNPVYKGNLVIQKTFVIDPITKHQVINHGEKDKYVVENHHEAIIDAATFNQVQEEMAWRKEAGKQRGGYARNFLNTSCFTGIIKCGICGKSYIHNIRKYKGKPSEYWSCLSNKGKAEERCGAYGAIPQPALERACMSALEMAIFDKTEFLQRVEKIVVPAYHSLLFYLKDGKVIKQPWKSTALKDMWTEKRKEQVQQRMVQYRKSGLSSRYSAFSERIFCPTCDVKFVRCLETRKNRRVAYWRSRNKYKCVHTSGIQEDWLKKQRQPFLANLHLMSKNFGNRWNGLRFRRIGPCCSGFILEKIKRCNCHEKSAGHTSYTTELHRKTYS

SEQ ID NO: 11964 - protein, 534 aa, synthetic construct
MERAVIYARYSSDHQREESIDAQVRACREYCQRKGYLVTKIYADEAKSGKSIAKREQYKKMLSDSQKNLFDVVVFHKIDRNSRNELDYYLTKNQLISSGIKYEYAAQNIDTSPAGQMVEGILVAVAANYSRNLAEETKKGLKENALKALFNGGRPPLGFEINQENKYVINDYEAGAIRIIFDLYLKGKGYHYIISQLNSLGYKTREGRKFGKNSLYDILRNPKYCGTYTFNKVNKDPSGKRNSHKISENTIIVEDAIPAIISKEDFRKVQEKMNQNRYRSAAYKSKETYLLTGKVFCGICGAAMNGHRASSNGKKYVYYTCSGRDRLGTSACQNKVVPRDDLEELVLLTIEQELLSENSLKKLKDTIEMEYQAVANEYADEASSLSEQKAIAERKLNNLYTVIEQGTADEYDLERLAAVKQELSQIKEKLAKCAGANSIATINPAHIEKVLKVCRKMLFKNITNESLRMLFDDLVNKITIDAKKITLQLKLECSGTYGAEGRTRTGTSVNPLDFESSASANSATSATQCSVTEQ

SEQ ID NO: 11965 - protein, 527 aa, synthetic construct
MTTAKNVMVIPARRRLGNTVQAEERPKLRVAAYCRVSTDSDEQATSYEAQVEHYTAFIKQNSEWEFAGIFADDGISGTNTKKREEFNRMIGECMAGNIDLIVTKSISRFARNTLDCLKYIRELKEKNIPVFFEKENINTMDSKGEVLLTIMASLAQQESQSLSQNVKLGLQYRYQNGEVQVNHNRFLGYTKDEDGHLIIEPVEAEVVKRIYREYLEGASLLQVCRSLKADSILTAANKPHWRPETVKKILQNEKYIGDALLQKTYTVDFLTKKRVKNNGIVPQYYVENSHEAIIPRDLYMQVQEEMVRRANLHSGANRKKRVYSSRYALSSHVYCPKCGDIYRRIAWNNRGKRSTVWRCVSRVEHGPKCCDAPTVQESALQDAVMQAINKAYHSRDTVIEQLKQNIETVLSKAEQPAEDIDGRLEELQKELLKLASRKADYTEVADEIDRLRELKQNALTEAAERDSYKKRIDEMMKYLKEQDEDIENYDEALVRKMIEKVMVYEDKFTVEFKAGISLDVVRWEVII

SEQ ID NO: 11966 - protein, 520 aa, synthetic construct
MKRITKIEENKALSTKKKIRVAAYCRVSTASDEQLISLEAQKAHYEDYIKSNDEWEYAGLYYDEGITGTKKECRDGLLSLVDACEKGMVDLVITKSISRFSRNTTDCLELVRKLLDLKVTVIFEKENINTGAMESELMLSILSSLAESESVSISENSKWSVQKRFQNGTFIISYPPYGYKNEDGEMVIVPEQAEVVKQIFADTLAGKSTHAIAKELNERGVASKKGGNWTPGTINAIIRNEKFTGDAIFQKTYTDSSFTRHLNKGECDQYLCEGHHEAIVSHEVFEKANEVLNQRGKEKGNGVNTQRYQNRYGFSGRIRCGECGGVFKRRMHYKPSGNYVAWCCTRHIEDKNSCSMKYITDEGIKAAFLTMMNKLAFAHQIVLKPLLHNLQGLDDKDRLLQIQEYEDKLEKNTEQRQVLTSLMASGLLEPALFNSENNRLVQEEHRLQNEKSNVMNSVSGDRTKVDALKKLIKAVSGGRTFTEYDDDVFLAHVESIIVVSRDEIIFVMKCGLNLKERLVR

SEQ ID NO: 11967 - protein, 521 aa, synthetic construct
MSKNITVIPARRRVGNTVNREEKPKLKVAAYCRVSTDSDEQATSYDAQVEHYTNLIKKNDDWEFAGIFADDGISGTNTKKREEFNRMIEECMAGNIDMVITKSISRFARNTLDCLKYIRQLKEKNIPVFFEKENINTMDSKGEVLITIMASLAQQESESLSKNVKLGLQFRYQNGEVQVNHNRFMGYTKDENGHLIIEPDEAEIIKRIYREYLQGASLKQIGEGLEADGILTAAGKTKWRPETIKKILKNEKYIGDALLQKTYTVDVLTKKRVVNNGIVPQYYVENSHEPIIPRDIYMQVQEEMLRRANLHSGENRKKRVYSSKYALSSIVYCSKCGDIYRRIAWNNRGKHSIVWRCVNRVEHGPGCCDAPTIQETDLQNAVVKAINMVLGGKDEMLEALETNIATVFALEDDGSLESINARLEELQKELLKRANAKQDYNDLADEIDHLRELKQNAMVENAEREGLKQRIAEMQQFLAEQTKQIEEYDETLVRRMIEKITVYEDRFTVEFKSGTSVDVKR

SEQ ID NO: 11968 - protein, 500 aa, synthetic construct
MYLRKSRADDPHESIEDTLRKHEKILFDLANKLNIKKDEIVQFKEVVSGENLKNRPQAQKMLKLVMENAFEGVLVVDSQRLARGDTLDQGTIIRAFSLNNTKIITPGKTINPGDEIDQDYFEFDLFMGRREYKMINKRMQRGRNISVQEGNYVGSIAPYGYKKTKIGKCHTLKINEDEIDCFNKMKELALNGLGCTSIANELNRLGFKPRKSKLWTTNAVRDILLNKTNLGLIKWNTRKSVKLYKNDEIIKSRPRNEEAEYYPGKHPAIITQVEYDAIVENIKNRARPVKKDKKLQNPLAGVVYCGKCGKAMIRRSYNNGYRDGLICTNTHCNNVSSVLEVVEKRVLESLEDTLKEYRQFIDNYHNDKTKTNNDSLIIKTEKEINKIDSQINKACEMLEVGTYSVELFKERKTLLDNQKKALIDKIEALKKEDTDFKLQNYINAVPILENAIKLYWNSSVEEKNKLLKQIVKRCDYLKSERGKRNGKGVYNFKLNIYLKI

SEQ ID NO: 11969 - protein, 482 aa, synthetic construct
MIFYIYEVIFMIRAAIYIRVSTEEQARHGFSLAEQEHDLTDYADKHHYLVVGVYADEGSSARKAITRRKQLQRLLDDVRADRVDIILLKCLDRWFRNVADFYKVQAILDEHHVQWVCTQEDYNTTTTNGRLMLNLKLSIAQNESDQTSDRIKYVSQGLLRRKREIGGKPPFGYRFVNLAGGGKRIEIIEEQRATVEFIFASHLSGHSPTQIAHDVFTLYGTPITSCRVRCILRNETYTGRRYGIDGFCPAIISPDTFQLARERLAGNKPWAKNRHFLYLFRGKVICPSCGKILFGHNGTYTKKDGHISRYCNYYCGKHFVTGAPDEAAGGCAYGGAVSERSVESFLLDHLSELIKSYQLEVEKKKSSMRLAPELRIRAATDKLNRLKDLYVDGFIDKPTFEADHTKLQQEVSAALAEKQAIHVTPAAVRDLILKADDFRTIYAAMDRQHKYDLWQSTIKSIKIDEPTPPRGCSYKKFIVDFY

SEQ ID NO: 11970 - protein, 436 aa, synthetic construct
MARIVERVDFYTPKIKKQKRVAAYARVSSGKDAMLHSLSAQVSYYSDLIQKNPEWRFCGVYADEAMTGTKDSRQNFQKMLAECRAGNLNLIITKSISRFARNTLTLLETVRELKDLGVDVYFEEQQIHSLSSDGELMLSILASYAQEESLSASENQKWRIRKDFEKGKVSSLQMLGYKRNHNGVLEIIPDEARIVRLIFNSYLSGMGKLAVANMLNEMHISTKFDNEWTAEAVRRILTNEKYCGELMLQKFYSENHLTKRKMVNHGEIKKFYVEEAHPPIIEKSVFLAVQNLMKKHQEQFTPTKSTAVTYPFTGKIKCECCGKNYRRKTTPTGIVWICATYNTKGKKYCSKAKQIPENTLISVCCEVLDLQKFDVNVFESQIAIILVPAPNEMTFIFTDGHQISANWKDRSRSESWKPEMKKATGERSRKWHEQSR

SEQ ID NO: 11971 - protein, 525 aa, synthetic construct
MARTVTMIPQTINPLTHLPNDIVIKRRVAGYARVSTEQEEQQTSYAAQVDYYTKYIKKHGEWEFVKVYTDEGISATNTKHRDGFNQMIKDALDGKIDLIITKSVSRFARNTVDSLSTIRKLKEHNVECYFEKEQIWTFDGKGELLITIMSSLAQEESRSISENVTWGHRKRMADGKVSLPYSSFLGYKKGEDGLPKIVPEEAEIIRFIYRSFLEGMTTYSIAKALMYRGVLSPSGKEKWYASTVESILTNEKYKGSALLQKSFTTDFLTKKKKINEGEVPQYYIDESHEAIIDPQDFEQVQLEMKRRKKLGKQYSGNSLFAAKLVCADCGCFFGSKVWHSTSKYRRVIWQCNNKFKGQQLCSTPHLYEDEIKQRFINAFSMFFQEKDLILETVQMLIESISDTSALNTKIEKTIQEMSNTSALNQMHIQNNIVTARNKEEFDRRHDELVQQYESQKTIYEKLMQKKSNQQNKVKQLQQLVLHLEKADTPIDTFDENLWRTMIEKVTIFHDNRMFFQFLDGTEIEA

SEQ ID NO: 11972 - protein, 576 aa, synthetic construct
MKKNFKMPGSGSETPIRVAIYVRVSTVYQIDKDSLPMMKQDLTSYCKYILNTDDFVIFEDAGYSGKNTDRPAYQKMMSQIRQGLFTHLLVWKIDRISRNLLDFANMYAELKDLGVTFVSKNEQFDTSTAIGEAMLKIILVFAELERNMTSERVTATMINRASNGVWNGGRIPFGYSYDKPTQVFSIDPEENKIYNFMVETYEDTQSIVHTSRRLNEAGYRSRNGNMWSPVAVWTILRNPWYKGVYRYNYYKIPGRKAIKDESEWVIVENHHPASIDPDRFDRIQATLDKNARYRNTPGRKTAQKNVHVFSGLVWCAECGSAFTASPGKLHVSGYRPSKYGCPNVRKTKTCHAKYTSDVVLGEFLLNYILNILNAQKQFAYIHSTDDLQKRLLHGSTFSNVDHVDPDGLASLLNMLEKCSGSDPVLLKRPRSKPKMDPELKRMMADQKKQQRALDRLNDLYLYSDDSISEREYLVRKQQITDRLQEINEAIGMMSQEPWMRTMNDEEFIRQASSFILTQKLADKQYIYYENLAESLDPEILKNFFVSILDSIILRDGRPETVVFRNGLSHTFTYKDS

SEQ ID NO: 11973 - protein, 525 aa, synthetic construct
MAKRVTTIPATLNRFDSRPLQSVRKRRVAGYARVSTDSEEQATSYEAQVDYYTRYIKSNPDWEFVGIYTDDGITATNTSHRDGFKQMVEDALAGKIDLIITKSISRFARNTVDSLVTVRELKEKGIEIYFEKENIWTLDAKGELLITIMSSLAQEESRSISENTTWGKRKSFADGKASVSFSRFLGYDRGPNGEFIINEEQAVTVRYIYKRFLEGLSTYQIAKELTKMGVKTAAGKDKWYTSSVLSILKNEKYKGDALLQKSFTKDFLTHKRVDNKGEVPQYYVEGHHEGIVTADQFEQVQAELYRRQNMERYSGVGCFSSIIKCGECGSWYGAKVWHSNDKYRRVIYRCNKKYGKGCKCKTPHITEDEIKEMFIKAANELFSEKNEIIENTKTMMDMVCNTDDLDKELGDKVAELNIISEQMQTAIAENSRMALEQNEYERRYADLTERYNTIKSEYDKISEQIESKKAQRELFKGFIRALEKQGALVEEFDEGLWSSLVREVVVNTKDDIRFIFKNGFEIKTR

SEQ ID NO: 11974 - protein, 503 aa, synthetic construct
MANIRRIEPVFPRFKARKRVAAYARVSMETEQLHHSLSAQVSHYSALIQSNPEWEYAGVYADEGITGTATKHRDEFKRLMADCDAGKIDLVLVKSVSRFARDTVDTLKATRHLKDLGIDVYFERENIHSISKEGELLLTLLAAFAQAESRSISENIKWSIRKKFKLGIPNGNKAPYGYEWNGDSFSIIPEQGEVVREIYDRYLAGEPAYSIAKGLAEKGVKGQSGVPMDDATIKNILSSLSYTGTMLLQKNFFTEGHKRRKNKGELPMYAVEEMFEPLVSEADFDKAQQIMKDRAEAMPNRNPKLTAFSGIVRCANCGCSVSRRTSKYGKKWICNTKERKGKAVCDFRDIYESELEDAATKALSLDGFNADEVKSRIAFITIDNAYITFRMKNGTSRQVLRKYKKGYSGFSTRLFCGCCGGMLEADTWNMGPAGKKTKYKVWVCRNCSAPREFDSTFRKAIQELFHEEQCDGLFAQNIEKAINYDEKIEFYYKRGEVVTWQKE

SEQ ID NO: 11975 - protein, 550 aa, synthetic construct
MSRKKQVNQKITALYCRISLEDGGDNESMSISNQKLMLRDFAEKNGMFQYEYYVDDGYTGRNFNRPSFQRMIADIEAGKIGCVITKDLSRLGRNYIEAGSYIEIFFPKHNVRYIAITDGVDSLTRQEMDITPFKNILNDMYSRDISKKVLAGRMTRSRQGKFCGGQPPLGLMRDPEDKGHLIRDPETAPVIRKIYDMALDGWGCMRIAKQLMDDKVPITRVKSNTECDVNYYSWGSARISHILRNPFYKGAHLVCRTHQKGIRSNTYDIIPREDWEIIEDCHEAIISPEEWEQVQEIIDRRPTIMKGNSCPFYNLFHGIIYCATCGKSMQVRYEKVGRTGKNRFTGEQREPIDKAYYICQTYNRLGKNACTSHKIEARDLYNLVLKDIQELAKTALKDADAFYQRLSSRMERRYLLDASQTQKECQRLESRNCEIDEMFLSLYTDKAKGILTEQRFMKLTATLEQEQEANQKRLRDLLLMMRHSDEQENEVRTFIKEIRRYAAIEELDEAVLNRLISKILVGEVKKIDGQKVQEVRIVYNFVGEIPEITA

SEQ ID NO: 11976 - protein, 516 aa, synthetic construct
MPKTEEKQAAKAVIYARYSSDRQREESIEGQLRVCEDYARRNNITILHTYADRAMTGRSDQRPEFQMMIRDAATMAFNVILVYKLNRFARNRYDSAKYKHKLKKYGVKVVSAMENIADDPSGILLESVIEGMAEYYSAELSENVLRGMTQNALEGKWPGGVIPLGYKLDKGGRLIINEEKAPIVRMIYQMFLDGMSVARIERKLNDKKYTTDAGKVFSRSRVYYILHNERYIGTFQWKDIKKEGIIPPIISKEAFHAVQERINAMKSSSYRTNNNYLLAGKAFCASCGAKVSGTSGKSQNGNKYCYYGCSHHHRSARYEYCETKNIRADVLEKLVCDKTHEILSSKKAIKEIARQAVKLRPRDESELEIRAIKNHISSCQKKIDNCIKAIENGVMSNALVESLNENERTLDVLKEKLAKASLMQGSGLLTEEKIQFFFETIRKKAKETEKYNDILLTSLVRAVYICNEYVEIQYNYAEQLPILTNPVRIESCSYKCTNGGTIWIRTKDLFDVNEAL

SEQ ID NO: 11977 - protein, 465 aa, synthetic construct
MARSITVIPASQPYRVGGRTQQKTRNLRVAAYCRVSTDQEEQLNSFENQVEYYTKYIQDNPLYQMAGIYADEGISGTNTKKREEFKRMIRDCEEGKIDLVITKSISRFARNTQDCLEYSRRLKNLGIGIFFEKEHINTLDASGELLFTILSSLAQDESRNISENCKWGIRSKFKKGIPQVDCTKFLGYDKDDDGKLIVNQKQAKIVKRIYQEFLNGYNPAAIAKMLMEDHIKTGTGREEWRSASVRAILKNEKYMGDALLQKTYTADFLTKKVKKNHGEVEQFYVKESHEAIIPKEQWEAAQLELERRDSYMQELGLTFYGYGSEVNPFSCRVVCGKCGAVCGKKSWKSRGVEFWQCNNRSKNHGVKGCASENLPHENLLKGFVTAWNQIVAEREQYLPKWEKKKKEGNPLEKLRAEQMIELTLQPPLTKMLPELGQMVLERVIVQGKEILFIRFLDGTEIKVRI

SEQ ID NO: 11978 - protein, 498 aa, synthetic construct
MQIEVRKADMGKEKKRLKVCAYARVSTEASEQENSLENQVSHYTEMIQSNPAYEFAGVYADFGISGFKESRPQFQKMMQDAKNGKIDLIITKSVSRFARNTAIVLKASRELKERNVGIFFELQNINTLTEAGELLLTILAAFAQAESESASESSKMAYLHRIENGEVVAYLERSYGYEKDENGEYRAKEPEASVIREIYDLVIQGVNCTNIARVLNARNIQTVQGAEWTASTVFRIVENEIYKGDVLMQKTFIDGKRHQVQNRGEKAMYYAKDNHPPIVSEKTWEKAQRKLEDMRAERAEHSVIQEFTEENYPYMNHIFCAKCGWPLKPRVYSHGHRLSWDCSGQKRGTKKFCTGIHVLDNDLRKMEIEGNRYFSETVDKYGEVHLKHIGERTWKNKHKKKKFNHKELYPELNEENYPYYRRLYCARCGSRLGRYISHGTVRWICSGYKRKGQAKCPGVRIPDEIIKGWNLPDGKIYIMGKEDKNGEKHYSYTSESAL

SEQ ID NO: 11979 - protein, 595 aa, synthetic construct
MSKVIALYRSSTDRQEVESQKKEVADMAISDGNKEADIIAIGCAGASAIKLDKQYIDRINEVYKTIEEQDIKCVYAWAIDRIGRNEVVLMQFKNFMIQHKVQLKIRTMSTPLFNSDGSVDSGFELVYSFFATQAKQEMEQKQARFERARRRNMEAGKYNGGYIALGYKVNDNGYFEIDEEEADLIRLIFREFNSGNYSTVTLAKELNQRGYTSKGNIPFCSAIISRILNHRQYSGEVTDKKGRKKVFPAIISKEEQDKAKQILNGNNTKQTKATKHYYFANKLIVCPECGHHFQVLNNCYQCSGAIMAKREGTQHLSNCKNNIAITFTNLDGMLWDITKREVIIFIETDHSAAAEETKAKIAVLVQKIQTLSDKLSKYEDKINDIIENSDVLLLSEAQIAKRVANVRKAQEAEKNELNILLEEKERLEYTLNYSETFKRWLNGYGSLNEIDLNGDEKVMYDLVHQYISKITVERSEYNGNKNYQLITIEAKSGIYKIYYHGHKKVGSRAIIQYPEYAEGDFVDYDFDKVERTNSGITTAETELFKEFIAMLSEKETDFESNEEMWEFLITNDTYKKCMEKNAQRTTSYINEITSR

SEQ ID NO: 11980 - protein, 513 aa, synthetic construct
MPTDYALYLRKSRADLEAEAHGEGDTLARHEHILMELAKSRALPIGAIYREIVSGERIANRPVMQQLLSEVEDGRWKGVLVTETSRLARGDTIDQGIVAQAFKLSGTLIVTPSKTYDPTQEADEEWMEFGLFMSRQEYRMIRRRMTAGMNAAKREGRFIGNVAPYGYERFKLDGRGWSLRIVPEQAEIVRMIFDLYNSGLGYCRIEKRLNELHIPAPKGEKWTSATIPGIIQNPHYIGMIPEGRRPGRKVVKDGEVKLIRPRQKCELYPGMHEPIISRETWDKAQARIGKNHEARVPAGRRQSNPLAGLLVCDCCGKNMQRRPQTGRGSQTQILCPTRGCPTVAHNADELEDMVIDSLRVFLAKLEAGKPAKTDVSAENAALEECTKKLKDLEARQRRTFELVEDGTYTREIFLARQAELTAERVKIEQQKAELEEAITKKKQEAEAQNNLAPAARQVLEAYKKELSAEDRNRLLKKVIDHIDYHKRKRTRWNPESDLSITLHPVVTYSNPHR

SEQ ID NO: 11981 - protein, 541 aa, synthetic construct
MDNLITTEEKITALYCRLSQEDEKEGDSNSIENQKAMLMKYAIENGFINIEVFVDDGYSGVFFNRPAFQKILNLIEENKVETLITKDLSRLGRNYISVGNYIEMEFPHRDVRYIAVNDNYDSQDINSSSNELAPFKNLFNEWFARDTSKKIRAVIKSKAERGERIGSHIPYGYKKDPDRKGHLIINEETAKNVKLIFQLCATGMGPRNIAKILAEKKIPRPSVYRYENDGVIIQKTDITDRYSWATKTIVGMLENEVYLGHTVNCKTTTLSYKDRKKKLVPVENQFRFENTHEAIIDKETWDIVQKVREGRKRITKSGNINKYSGLLYCADCGARLTYNSGNKPKPKSYYFMCSSYRRHKDGDCVLPHRIREIVLDEIVREEINQAIYYAVNEKDKFVECISKRSLSESRKKLSQKITEIDRLNNRKNELNVIFRKLYEDNALGKIPDDQYRLLSDSYTAELHELKAKIPELQNQINTIKTEESNVERFIALANKYIYIEELTSEILRTFVSKITIHENDKDNPGAKYEIDIFLTHIGKFW

SEQ ID NO: 11982 - protein, 509 aa, synthetic construct
MKAVIYARYSPGPNQKDKSVEEQIADCRQFARENDIMIVGDYADRKKTGRNDNRAEFQKMLKDSAKGLFDAVIVWKIDRFGRNREEIAINKVKLRRNGVRVMYAKEHIPDGPEGIILESTLEGLAEYYSANLSQNIMRGMRGVAMKGQSTGGGGHSLGYYVDQDKYFQIDEHGAQIVRQIFEMYSSGKQASEIIKELNGRGLKTANGKPFNHNSIARILSNRRYIGEYRWHDILIPDGMPRIIDDETFERVQKRLEKNKKAPARKIQAGSEEEFLLTTKLFCGHCGATMIGDSGTGKSGKKYSYYTCSTRKRRKDGRKCDKKSVRKDELERYIVEQTVAHVLVDDVIEYIADKVVELQRKELQDTSMLDYYKSSLRDTEKSLKNIVTAIEQGIFTPTTKDRLLELEAEKADLEECIQKEEIARPTFSKEQIIFFLERFKGGDVNDQSYQRQIIDTFVSRIWIYDDKTVITYNYSGEGNTITLEAAEKAADEAVGGCSAQLPPSPPRKSG

SEQ ID NO: 11983 - protein, 515 aa, synthetic construct
MTTAVIYARFSSDKQREESIEGQVRVCTKFAKDNDLEVLRIYTDRALSARTDQRPGFLEMVADSEKGLFKYVIVYQLDRFSRNRYDSAVYKHRLGQHGVKVLSAMENITDDPSGILLESLIEGVAEYYSAELSQKVKRGMTENILERKWAGSHVPLGYALDAAHHLVTVEPAAQTVRDLYRLCLSGTTYVHMAERLNRAGYRTALGHVYTGQTVKNLLGREIYTGTYTWAGETVEGFCEALVSKEDYAKVMARITAKRKAKEPKAVQRDPETYKLTGRITCGQCGRYMTGFSGTGRKGVTYYYYRCSWYNNKTRREDRGTPCTSKMVSRDELEALVLQTTVTILRSPDMLRAIAEQAAAVQIESPYEEEIQIKRAKLQDLTKRHDNSVRAIEAGVLSETIASNIQKYEKEIGELRVRLEQLQLLSKPAAIDALDVEYYLRSLLLNKKEHDAFRLDVLDTFVRRVVVYPDKVEIWYNYAPDSHLPEQPVSVPLSAADLNTAKLVGLLGFEPRTNRL

SEQ ID NO: 11984 - protein, 409 aa, synthetic construct
MRVKAIQAIEPKKVNKLKVCAYARVSTDEESQGRSLENQETHYKNAIARNPSYEFVGVYTDQGISGYSENRPGFQKMLDEARNGNIDLIITKSISRFARNTVTILKVVRELKSLGIAIFFEEQNINTLSQEGELLMTTMAAFAEEESKAMRDNLKWTIQKKFERGDIMINTTRFLGYDLDEYGDMVINQEQAVLVRKIFQMYLDGMGFFKIAKELNREKIPTITDAKWGDSTIKGILTNEKYKGDYLLQKYYTPEGKRHQTTRNRGELQSYYISENHPAIIAPEDWEKVQLLMKEHAKKKGIDYENLDKYQNRYPQTSMLVCPYCGKNLRRRYVYDKKVQWICSTYILDGKNVCKGVRIDDDWIKKQNISKPTVVEEVTVRDEKRYRLTEKDLFDLLEQERKQYASKKD

SEQ ID NO: 11985 - protein, 411 aa, synthetic construct
MRVKKIEPKDEEKKVKVCAYIRVSTLHDKQLGSLDNQRLYYENKIRNNPDYEYCGIYCDTGVSGSKENRKGLQSMMADARAGKIDLILTKSISRFARSTRIVLKYVRELQQLGVAIEFEEQQLNSSTANGEVMLTIMASFAEEERKNISENTKWSMRKKFKQGVVLLDTNRFMGYVKDKDGKLVVQKEEAEVIKLIYKRYLEGTSAYRIAKELNALEIPTDNDYEWSGQRIIRIISNEKYKGDCLLQKKFVSEYKGKLQPNRGEIEQYYIRNDHEAIASKEDWEKAQILRASRKRKTYPFSGILHCPYCEATLIRHKKWKEKYDWVCATYLTNGKSVCKGIKVPESALEGMEFTENIVVGEIDNHGEKSYSFTSQKDYKRTKPQDESSGILPSVNKQRRAAVKLYKSSDLL

SEQ ID NO: 11986 - protein, 468 aa, synthetic construct
MARRITVIPSQRQQQEIAEEPKSKKVRVAAYCRVSTDQEEQLSSYENQIKYYKTMIEEHPEYELVDIYADEGISGTNTKKRAEFNRMISDCRKRKIDRVVTKSISRFARNTLDCLNYVRELQALNIAIIFENENINTLDGQGEVLITILASLSQNTSKQISDNTKWGIHRRYEQGQFKISTKRFLGYDHDENDKMVINKGQAKIVKRIYEEYLSGKTTDYITRILIKERVKNWNGSTIWHTTTLQSILGNEKYMGDAILQKGYTVDFLTKKRAKNEGQLQSFYVEESHEAIIEPNMWKCTQLEMKRRKMYLEEHGILSYGINVERNPFSSKVICGECNKAYSRKGWKTQYGTRLVWQCAERYKIKGTVGCINRHVDEETLHQAFVMGWNSLVSEKEKHKIRWKEQQGIEDLLVKYRAAEFLKLIDEVGIVSKMNTDHMLETLECIKVFEDGRLAISFLDGSEVLLQGE

SEQ ID NO: 11987 - protein, 529 aa, synthetic construct
MKFTSTWRISDPLAQYIVYLRKSRKDMEAEALGQTDTLKRHRAALLSLAESSGLNVVEICEEVVTGDSIAVRPEVQKVLQLVETGSYAGVLVMEVERLARGDTIDQGIIAQTFKYSNTKIVTPNKVYDPNNEMDEEYFEFGLFMSRREYNTIKRRLSRGKEASLREGKWISGKTPFGWLREKLPNDKGYKLIPHPEQAPILRQIYDWYTGEGCARIGSYAIASRLNTLGIKTNSGNSWTTSAILELLRNPANAGWIKSGGRPETKRIVDGSVVVSRPRTRQEDLKLYKGLHDALISQAQYDKAVSLSYSVVAPRGKGAWKTVTSLAGLVRCDQCGRVMVRRASSGDRCPSFMCPTQGCPTVSSWYSEVEEALLDALRDWLRELEVGEADTNDDHSLLDALSASINADQKQLAKLEAQEARAYELVETGVYTPEVFLQRSQALAADKQVIVSRVEENQRAQDEITRAKQARARLAPAVRHVLEAYPLAATPQDKNDLLKTVLQKVLYHKRSKSYSKAGSDMCLTLYPLTD

SEQ ID NO: 11988 - protein, 406 aa, synthetic construct
MRRERLYLKIIKLPLLKEEFKKRKVAAYTRVSVSSDSLLHSLANQVSHYTEMIQKNPEWEFVQVYVDEGVTGTSTESREQFLKMMDDARAGRFDLLLTKSVSRFARNTVDLLESCRELKSLNVEVRFEKDRISTFNSDGELVLSLLASYAQAESESISQNVKWGKTKQMQDGVYHHFTRCYGYDWDGDIYEIVEEEAEVVRFIYKAYLDGMSPKKISELITAKTVTGKNFTRGTVKDILKNRIYIGDRVLQQFYSPRVRKCNRNYGEVPKYILPEVHEPIIAREMFDEVQNVMQQKAKDTPKKTFTCFSGRLKCGHCERALCRRTLHGKKIWKCQGNEISKTCQARYITEEKLKEYTFSIFEDENEFKMRVDHIKVYDDYLEYIFKDDTMKTIERKEPKRRCRQGK

SEQ ID NO: 11989 - protein, 528 aa, synthetic construct
MQTRKVVTVIPEKKQDIIQEDSAELKKKKVAGYARVSTELDEQQNSYNSQLDYYTNYINSRSDWEFAGMYSDEGITGTSIKKREGFTSMIQDALDGKIDMIVTKSISRFARNTVDTLSTVRKLKNAGIEVFFEKENIYTLDSKGELLLTILSSLAQEESRSISENTTWGQRKRMADGHGCLGFSRFLGYDRGPNGEFVINEEQAKIVKRIYYEYLDGKSSAEIARRLTADGIKTVTGKDRWDTSTIISILKNEKYKGDCLMQKYYINDYLEKKLIKNKGELQQYYVENHHVPIVSAEVFDRVQMMMKSKRRKKRVSAARDFSSMIICGDCGECYGSKVWHSNSKYKKIIYRCNAKYNGEKKCNTPAIDEERLKEIFVEAINILLIDKDEIIDNINCLLDIKKQCKTYADEIRQAAVKVENIEQVYRKIINDQKSNPLPFEEYEMLIKKYGHEYDNARESYNALIEDNNLHEREVCKLEEFIHQFEHCDKIVLEYDYDLMKRTTESIVVNTDGTITINFIGEQNITLKI

SEQ ID NO: 11990 - protein, 521 aa, synthetic construct
MPKITKIPASISRYTSAPIDAPVKRKVAAYARVSTDSEEQLTSYAAQISYYTEYIKGREDWEFVGVYTDEGISGCSTKRREGFQRMISDAMAGKIDLIITKSVSRFARNTVDSLTTIRLLKENNVECYFEKENIWTFDGKGELLLTIMSSISQEEARSISENVTWGHRKRFADGKVSVAYSRFLGYDKGPDGKMVVNPEQAEIVKLIYRLFLEGMTPHTIAIHLTEKGIKTPGGKDKWNATTIRRILTNEKYKGDALLQKEFTVDFLTKKTKKNCGEIPMYYIEDDHEAIIDPAVFDMVQQEMERRKTGTSRYSGVSIFSSKIKCGECGGWYGAKVWHSTDQYRKVIYRCNNKYNDERCTTPHIMEEEVKAVFLKSLNKLLANRDELIENVKLICDKLTDTSELEAEKEKYAEEMSLVADMVQAAMLENARIALDQEEYRQKNDVLSARFEAAKKKHDELAMRIEEIETRGQNLRHFQETLESLNGQVTEFDSDLWGSLVDYITVYENGEKTVTFRDGSVI

SEQ ID NO: 11991 - protein, 527 aa, synthetic construct
MNTAARTVTVIPPSITPMTHLTNTQLYKLRVAAYARVSTDSDEQFTSYEAQIDYYTQYIQRNPEWTFVKVYTDEGISGTNTKRRAGFNEMIEDALAGKIDLIVTKSVSRFARNTVDSLVTIRKLKEKGVQVYFEKENIYTFDGKGELLLTIMSSLAQEESRSISENVTWGQRKRFADGKVNLPYKNFLGYRKGADGFPEVVPEEAVIVRRIYSRFMEGLTSGAIAKELIADGIPTPSGKLRWQSSTVESILKNEKYKGAALLQKCFTVDFLTKKKKINEGEVPQYYVEHSHEPIITPEEFDKVQTELARRKQISRQYSGKGIFSSRIVCGGCGSYFGSKVWNSTSKYRRVIWQCNGKFKGEHKCETPHLDEETIKARFVTALNAIIESKDNILEDCRLMQATLTDCAGIDTEIESLLEEIDVVTELTMRCIAENSQTAQNQEEYAARYNGFVERYEKAKARLEQLRTTKAAREAQSEAIGAFMFEVQELDALTEFDEKLWLTIIDTVTVHTDGRMAFKFQGGTEIEA

SEQ ID NO: 11992 - protein, 427 aa, synthetic construct
MDRIIKRVDFPKIMQPQALKVCAYTRVSSGKNAMLHSLSAQISHYSEMIQSHIGWAYCGVYSDEALTGTKSDREGFQQMLTDCRAGKIDMVITKSISRFARNTVTLLETVRELKNLGIDVFFEEQNIRTMSADGELMLTILASYAQEESRSVSENQKWRVKRNFEAGIPWNGRMLGYRMQEGKYCIIPEEAELVRRIYREFLDGMGRNRIAARLNEEGIQPTRYGEEWHPQTIAKILRNYAYTGNLLLQRFFCESHITKKMVPNVGQKAMYHAVGTHEAIIPLAEWKAAQEEIIRRAERHGSKPPAQPSFFYTGRIQCAKCGKNFRRKTTAARIVWICATLNTKGKKYCASKQIPEATLDELVRQVTDDPCSIEKIIADDGNTLHFHFLGGTVVTRTWTDRSRAESWTPEMKEKARQQSLARRRQKS

SEQ ID NO: 11993 - protein, 542 aa, synthetic construct
MKLQKVLNLFNVAIYIRLSREDGDKEESDSVGNQRKLLTEYVAKKEDFILYDIYVDDGYSGTNFNRPSFQRMIADIEDGKVNCVVVKDLSRFGRDYIDTGRYLERYFPELGVRFISVTDSIDSMKQAYDMLLPIKNIFNEQYARDISKKIQATVKSKQKAGEFIGAFTSYGYKKSPVNKNKLVIDDYAADVVRRIFSLYIQGYGKQRIAKLLNAEGILCPAEYKKVNGENYKNCNRLESTTYWSYSTINSILHREMYVGNMVQGTKHQRMRSKQKKMPKEDWIIVENTHEPIIDKETWEKAQSLLKKRTRELDLETNKNIFAGFVKCGDCGRAMTKNMWRRADGSKTYSLYCGTYKRNGKQYCTPHTLPMAVLEDIVLGDLKAIVDSVDNLKELVQSQSFTASKVKRIADTELGKIKAELERVKRLKKSIYEDYREELISKEEFLSYREDYLKKEELYSKQIEALEEKKKDNVTEDVFETPWLKRLLELKDIESLDRDIVVEMISEIRVYENRKIKITYNFGNELEHLFSSVYSVESEEKVI

SEQ ID NO: 11994 - protein, 470 aa, synthetic construct
MKKAAIYVRVSTQEQAQEGFSIPEQTERLTKYCEAHGWTIGNIYTDPGFSGANTNRPALKCLFKDCERKRFDIVVVYKLDRLSRSQKDTLYIIEDVFLKNSISFISMNENFDTGSPFGRAMIGILSVFAQLEREQIKERMAMGREGRAKQGKWHGGGNVPIGYTSVDGNLIPDEYEAMQVRKVFSLALEGHSFIQITRMMAATGYTHKYGAYKAGYVTVSKMLHNPIYIGMIKNGDDYVSGIHDPLIDQQTFDAVQKRLQQISDDYQKNHRKNQPVAYMLSGLCHCALCGSEYSGFYVGAKGYRKKYYRCKKRAYHWREKKETCTAPNIRVEQLDAAVIEEIRKIQTDPAYFEKVSKPQTSINNELQTLNNRFSEIQKRIQRTIKLYSLGNIEDDDIDDQMKQLYCERDSIQNEIDRLSGSQPDVDYIKEVLSLAVLEDMSTLELRQLCQTLIDHIIIKEDESIEIYWAF

SEQ ID NO: 11995 - protein, 568 aa, synthetic construct
MRCAVYTRFSTDKQDMLSIETQLMMCRREIERQGWREVACFTDAAESAATLHRPGMQALLTAIQAGDIDIVFADAMDRLSRSQADIASLFERLRFRGIILATRKEGVVTPLHIGMMGTINAEQLSATSDKTRDALVRRHAMGRNPGGSAYGYETRVAYDGNGERIRGLQQIVPAEAAVVVRIYEDYAAGLSPIAITRRLNAEGVPSPRGGQPGKGRIKLAAWTPNTLTGNAARGTGILNNQLYIGQRPYGKQTYRKNPDSGKRHAFINGADAAKSLAPAPDLRIVPDALWQAVKVRQAALARGPRTAPAAPARPFFAQQRPKYLLTGKMTCGVCGASYAKSGQHRFGCQGAAKKGPTWCDNRLTIRQDALDARVLKGLITAMLRDDVAAAFLEEYAVETRRLEEASITTRPEHEAELTEVDQQIMHAKTAILKGVDPALFVDELQRLGTRRTVLIDALAAAERPEEAESLLHPDLGRIYREKVTKLTDAYEDEALRAQVFERIRALIEAVVLTPEGGNLTIELRGELASMLELTGSEHMQNAPEAVASEALQIKMVAGTGFEPVTFRL

SEQ ID NO: 11996 - protein, 465 aa, synthetic construct
MKGNAGDTIVKKIDLSPELVRVALYVRVSGEEQKIKGLSLEAQQERLEAYARERGWVIVGIYIDAAKTARKNIHKRTDFQRMMDSVKRDEVDILLFCRLDRWFRSVADYYKIMEVLEAHNCDWKTTDEEYDTTTANGRLYINVKLSIAQNEADIDGERIDVVFDSKIAHGTVVSGSAPFGFRVNEEKRLEVVPEDAAIVQDAFNYFETSISQRATVRYIRETYGVNWCDATFRRMLKEKLYTGVYDRGGRFNDHFCPAIISKQQFDRVQALLERNARSVPSGKVYIFTSILTCAECGHKLVGYKSSDYYYYRCNQHFQRGRCSHNHSAREDVVEKWLFEHLAEELERCQLEWEVAAAKKKASVARTDKAALKRKLTKLKELYVNDLIDIEDYKRDYQIYTAALKQIPEPSIEPPPDFAAVRRLLDNDFKTIYENLTREEKRTLWRSVIKEIRIDNDQNITGVVFG

SEQ ID NO: 11997 - protein, 516 aa, synthetic construct
MKKKIVVAYCRFSSDNQRLESIDAQVRAIKEYCRKEGYTLIKIYIDEAISGTSIDDREEFLQMIEDSKKKEFSYVIVHKFDRFARNRYDHAIYEKQLNENGVKLISVLEQLNDSPEAVILKSVLTGMNEYYSLNLAREVRKGQKENALKCVHNGGIPPLGYDLTTEKTYIINEEEAKAVKLIFKMYLEGRGYANIADELNSLGLKNKLGKPFRKISIRDTLCNEKYTGNFIFGKKDKKGRLTDKEIRIENGIPAIISKEDFEKVQIKLKSRVRKTSSRSTALNTYLLTGLCECGECGGTYSGGYRSRNRNNTVSYGYLCRNRKDKVNDCKNTPMRKELLEGLVISTLKENIFASPQIDIVTDKVFNYLTNNFNKADKEIKRIEKSILKLQEKSNKLLDYSLDGIISDYEYKTKKKEIDMEILNLKREKLEYDTNSETMGKEQIKNHLIELGKNLDSKDDSLVQLIIQTFVKKIIVDRTSVTIHIRLFPNTDMANDGGDDGNRTRVRNYQCHKLLQA

SEQ ID NO: 11998 - protein, 465 aa, synthetic construct
MARSITVIPASQPYRVGGRTQQKTRNLRVAAYCRVSTDQEEQLNSFENQVEYYTKYIQDNPLYQMAGIYADEGISGTNTKKREEFKRMIRDCEEGKIDLVITKSISRFARNTQDCLEYSRRLKNLGIGIFFEKEHINTLDASGELLFTILSSLAQDESRNISENCKWGIRSKFKKGIPQVDCTKFLGYDKDDDGKLIVNQEQAKIVKRIYQEFLNGYNPAAIAKMLMEDHIKTGTGREEWRSASVRAILKNEKYMGDALLQKTYTADFLTKKVKKNHGEVEQFYVKESHEAIIPKEQWEAAQLELERRDSYMQELGLTFYGYGSEVNPFSCRVVCGKCGAVCGKKSWKSRGVEFWQCNNRSKNHGVKGCASENLPHENLLKGFVTAWNQIVAEREQYLPKWEKKKKEGNPLEKLRAEQMIELTLQPPLTKMLPELGQMVLERVIVQGKEILFIRFLDGTEIKVRI

SEQ ID NO: 11999 - protein, 498 aa, synthetic construct
MQIEVRKADMGKEKKRLKVCAYARVSTEASEQENSLENQVSHYTEMIQSNPAYEFAGVYADFGISGFKESRPQFQKMMQDAKNGKIDLIITKSVSRFARNTAIVLKASRELKERNVGIFFELQNINTLTEAGELLITILAAFAQAESESASESSKMAYLHRIENGEVVAYLERSYGYEKDENGEYRAKEPEASVIRGIYDLVIQGVNCTNIARVLNARNIQTVQGAEWTASTVFRIVENEIYKGDVLMQKTFIDGKRHQVQNRGEKAMYYAKDNHPPIVSEKTWEKAQRKLEDMRAERAEHSVIQEFTEENYPYMNHIFCAKCGWPLKPRVYSHGHRLSWDCSGQKRGTKKFCTGIHVLDNDLRKMEIEGNRYFSETIDKYGEVHLKHVGERTWKNKHKKKKFNHKELYPELNEENYPYYKRLYCARCGSRLGRYISHGTVRWICLNYKRKGQAKCPGVRIPDEIIKEWNLPDGKIYIMGKEDKNGEKHYSYTSESAL

SEQ ID NO: 12000 - protein, 456 aa, synthetic construct
MRNKEIAPALVRVALYIRVSGEEQKIKGLSLEAQQERLEAYARERGWVIVGIYIDAAKTARKNIHKRTEFQRMMDSVKRDEVDILLFARLDRWFRSVADYYKVMEILQAHNCDWKTTDEEYDTTTANGRLYINVKLSIAQNEADIDGERIDVVFDSKIAHGTVVSGSAPFGFRVNEEKRLEVIPEDAAIVQDAFNYFENTVSQRATVRYIRETYGVNWCDATFRRMLKEKLYTGVYDRGGRYNDQFCPAIINRQQFDRVQALLTRNVRSAPSGKVYIFTSILTCAECGHKLVGYKSSDYFYYRCNQHFQRGRCSHNHSAREDVVEAWLFDHLGEELEHCQLEWDVEAAKKKASVARTDKAALKRKLTKLKELYVNDLIDIEDYKKDYQIYVSALNQIPEPAQEAPPDFAAVRRLLDNNFRTIYDTLTREEKRTLWRSVIKEIRIDNDQNITGVVFG

SEQ ID NO: 12001 - protein, 558 aa, synthetic construct
MNRYGKRCVLYPRVSTEMQVDGYSLEGQKNMLTRFADREEMIVVDTYEDAGKSGKSIEGRPAFQKMLRDIEDGLDIDYILVYKLSRFGRNAADILNSLELVQSYGVNLICIEEGIDSSQTSGKLLISVLSAVAEIERENIIEQTMNGRREKARQGGWNGGFAPYGYTLEDNKLMIEETEAVAIRKIFELYTSSEIGLGGIANQLNLQGIRKIPRQNGTLEDWTGHFIKLILDNPVYCGKIAYGRRTKEKVKGTKNDYQMKRNDDYILTEGQHKGIVSEEVWEKAHAKRLRTGVKQPSKIGRDRVHLLSGLLKCPVCGSPMYTNKHAWTNKDGTYKEIYYYVCSRNRMVRGKHCEYKAMLKKTDIEPMVIEAIREIVRNEEYAQAIKKRIGVQIDTKAVDKELEGYQAKLKEVDLNKTRLEREIDSLPADAKYRERKLHDMTLRLDSLYDVIVELEEKIEDARLRRDAIKQQAITLENIYKIMVNFDCVYNIINDEEKRNVVTALIKEIEIYRNDESEYPLKRIGLNFPVFKDGGEVTELLWDKGNTVETVCLMSKKDK

SEQ ID NO: 12002 - protein, 522 aa, synthetic construct
MGNVMLIPARRQVGSSARKKEEEKPKLRVAAYCRVSTDSDEQATSYEAQVEHYTEYIQKNPDWEFTGIYADDGISGTNTKKREEFNRMIDDCKDGKIDMIITKSISRFARNTLDCLKYIRQLKDMNIPVIFEKESINTMDAKGEILITIMASLAQQESQSLSQNVKMGIQFRYQQGKVQINHNRFLGYTKDAKGNLVIDPEQAEIVKRIYREYLEGLSMDKIAAGLEHDGILTGAGKAKWHTSTINKILRNEKYIGDALLQKTYTTDFLNKTRVKNNGLMPQYYVEGNHEAIIPKEIYLQVQEELVRRRVVKTSANGKKRSYSCNHCFSQIVICGECGEMFRRLHWNNRGVKSIVWRCISRLESTGLECHARTINELFLQDAVVKAINQMLGDKSGYQAQLQLNIAAVIRASQATSLDNIDSKLMALQQELIQKAQSKEAYDEIADEIFRLRELRQQTTVDTAARDEQIKRINDLQDYISQQTTHLTEFDESLVRRWVKQIIIWDDRITVELKSGVSIDVDA

SEQ ID NO: 12003 - protein, 521 aa, synthetic construct
MKKVTKIEGVQNNSTQKKKLRVAAYCRVSTGSDAQLESLEAQKTHYERYINSREDWQFAGLYFDEGITGTKAEKRPELLRLISDCESKKIDFVITKSISRFSRNTTDCLALVRKLQSLDIPLFFEKENINTGSMESELFLAILSSMAEGESTSISENTKWSIKRRFQNGTFKLSYTPYGYDWDGENMVVNPAQAEIVKKIFADVLSGKGTQAIADELNADGIASKKNSKWTATTIRAILANEKYTGDVIFQKTYTDENFNRHINYGEVDQYMAPDHHEAIISHEDFDAANALVAQRASEKGIEKGNGKYQQRYAFSGKIICGECGDTFKRRIHPCTTYKYVAWTCNTHLKNTSACSMKYIRDDEIKAAFVTMLNKLIYGHRLILAPYLKALENSSGDEAIQRIQHLELLLAQNSEQRETLTKLMAQGYIDQILYNQETNALLLQAETYRSDIEVITICMTGDSAKVTETNLLLHFVSHANMLTAYSEELFETYADHIEVISRNEIRFVMKCGLTFTERIGD

SEQ ID NO: 12004 - protein, 517 aa, synthetic construct
MKAVIYARYSSDSQREESIEGQLRECAAFAEKNGITVLRHYIDRAYSAKTDNRPEFQSMIKDSGKRLFDIVIVWKLDRFARNRYDSARYKATLKKNGVKVVSATEIISEGAEGIILESVLEGYAEYYSADLSEKVVRGMTDNALKCKFNGGMMPIGYVIDAEQHFQIDPLTAPFVLEAFKRYDGGETISSIMNWLNEQGLTNTRGQKMTFNSVGHILHNRRYIGEFRYRDVIVPDGIPAIVPQDLFDRVQEKLAKNKKAPARHKAEDDYLLTTKLFCGYCGAYLCGESGTSRTGKVHHYYKCVSVKKKRTECHKKPVRKEWIEDLVVGETMKMVMDDKAIEAIVSMLMDLQDRDNVNVPLYEQQLREADTAIGNLLNAIQQGILTRSTKARLEELENRRDELENRLAREKMAKPKVSAEFMTFWLHRFRKLDVRQQSHRKMLIDTFINAIFLYDDKMVITFNYKEGTKTITFAELQEAISNKNGSDLDCIVAPRLRRPMIGAGGVFAFGEHLYCAAV

SEQ ID NO: 12005 - protein, 594 aa, synthetic construct
MPRKPAKHPAKPKRGKKLEVEEPGILYGRYSSHNQKDISVEQQFEKGYELAAEYGIRIIDTYADRAVSGRTDKRRDFQRMMADAAKGKFRYVIAWKSNRMGRNMLEALINEARLQDLGVRVLYVEEDFDDTAAGRFAARSMMNVNQFYSENMAEDIKRGLYDNAANCMVANGHLPYGYKADETLHYAIDEPKAAVIREIFTRVSCGEAFVDIMASLNVRGIKTSYGRPWGRSSFQKILSNERYRGIYIYGDVRKEGGIPRIISDELYFKVQEVITTKKNPQGRHRVNGDYLLTGKLFCGHCKSPMTGVSGTGRSGNLHYYYVCQKRRTEKTCDKKNVRRDEIELQVAQAIKDYALKDDVIEWIADSTVAYNERKEAESKVGILEDRLAGTEHGIKNIMSAIEQGIITETTKSRLVELESERAAIKANIAAARADIVTVSRDDIISGLEMFRDGDVHDKKYQARLFDTFLVAVYAYDDDLRLVFSFSGNKNTIQIPIESAVNAVENNEVECSFKLCSAPPFAEPDEPCQFVWLFCYARRSARSVVFLRCPIRFRARRNHAAYFPSECARRCTWERRQELRLIQVSLAVFFCTSLL

SEQ ID NO: 12006 - protein, 464 aa, synthetic construct
MARSVTVIPARNRQCETGRRAVQEKKIRVAAYCRVSTDQEDQLHSFEAQVDYYTKYINDHENYEMAGIYADEGISGTNTKKREQFKRMIADCEGGKIDLVITKSISRFARNTQDCLAYSRKLKNLGIGIIFEKENINTLDSTGELLFTILSSLAQDESRNISENCKWGIRTKFKNGEMHLNTFKFLGYDKDENGKLVINKEQAKTVRRIYRDFLIGINPAQIAKELTEEKVPGCNGQTKWYPSTIVGILKQEKHMGDALLQKTYTADFLTKRQVKNNGEIAQVYVKDSHKGIIDKETWNAVQEEFERRERFMKDHGTDRYSYGADCMPFCEKVFCGECKSLFTRHSWKSRGIVQWQCKNHRTDGRVTCSNAYVDNSNLEKGFVKAFNKLVADREKFMERWNQMKTDGSPLEKIRAEQMMEATENEPLGRFVPEIAQLVLAEVTVLGAKKYEFFFLEGSRIKVSV

SEQ ID NO: 12007 - protein, 498 aa, synthetic construct
MEIQIREENREQKRKLRVCAYCRVSTDADEQENSLENQIRHYETVIKANPAYEYAGVYSDFAISGFKEKRPGLQKMLADAQKGKIDLILTKSVSRFARNTSIVLEATRKLKELNVGVFFELQNINTLSGEGELMLTILAAFAQAESESGSAGAKMVYQRKYEAGIPVQYLERSFGYTKDERGVYIADESEAVWVRKIYEMAADGYTPAAIKRYLNENGVKTVGGTKWIDSTVFRLIENEIYKGDYIMHKHFVNEERKLVRNRGEVDAWYIEDDHEAIVSPELWQKAQDAIEAKRDYLAEGSVIEEFTEDNYPYMNRIFCAKCGHPLYKRIYSNGNRLNWGCSGTKRYGKSFCEGINIPDGVLRKAWHFDGNMYIDEKPSVKGTKEFTYLKESSWKRRHKKKVPETIPENTEEAYPYRKKIFCGLCGSRLVRHVNPKSHKVIWICNGAKRKGVAFCRGTRIPDSVIRGWGEIKKDIYIQRKDDKNGKKRYSYTSKKPTV

SEQ ID NO: 12008 - protein, 470 aa, synthetic construct
MKKAAIYVRVSTQEQAQEGFSIPEQTERLTKYCEAHGWTIGNIYTDPGFSGANTNRPALKCLFKDCERKRFDIVVVYKLDRLSRSQKDTLYIIEDVFLKNSISFISMNENFDTGSPFGRAMIGILSVFAQLEREQIKERMAMGREGRAKQGKWHGGGNVPIGYTSVDGNLIPDEYEAMQVRKVFSLALEGHSFMQITRMMAAAGYTHKYGAYKAGYVTVSKMLHNPIYIGMIKNGDDYVSGIHDPLIDQQTFDAVQKRLQQISDDYQKNHRKNQPVAYMLSGLCHCALCGSEYSGFYVGAKGYRKKYYRCKKRAYHWREKKETCTAPNIRVEQLDAAVIEEIRKIQTDPAYFEKVSKPQTSINNELQTLNNRFSEIQKRIQRTIKLYSLGNIEDDDIDDQMKQLYCERDSIQNEIDRLSGSQPDVDYIKEVLSLAVLEDMSTLELRQLCQTLIDHIIIKEDESIEIYWAF

SEQ ID NO: 12009 - protein, 522 aa, synthetic construct
MGNVMIVPAKRQVGNTSRRQEDKPKLRVAAYCRVSTDSDEQASSYETQVEHYTEYIKKNPEWEFAGIYADDGISGTNTKKREEFNRMIEACKAGEIDMIITKSISRFARNTLDCLKYIRMLKDKNIPVFFEKESINTMDAKGEVLLTIMASLAQQESQSLSQNVKMGLQFRYQNGQVQVNHNHFLGYTKDREGNLVIDPEQAEVVKRIYREYLEGSSMDKIAKGLEKDGILTGAGKKKWWTSTINKILRNEKYIGDALLQKTYTTDFLNKTRVKNNGIVPQYYVEGNHEAIIPKDIFLRVQEELVRRRVVKTSANGKKRSYSCNHCFAQIIICGECGEMFRRIHWNNRGCKSIVWRCLSRLEATGQECHARTVNEKVLENVVVQAINKLLGDKSTYQTQLQQNIAKVIRDAQKNTADGIDEQLLELQKELLKKANNKESYDEIAQQIFKLREQRQQCTVDTATRDAQIARITELQDFIKQQRTDLAEFDETLVKRWLKQITVYEGHYEVKLKSGLKVNIDIE

SEQ ID NO: 12010 - protein, 519 aa, synthetic construct
MKKVTKIDKIQPAKNAENKLRVAAYCRVSTATDAQLESLEAQKSHYENYINSRDDWCFAGVYYDEGITGTKASKRPELMRLLADCKAKKIDFVITKSISRFSRNTMDCLEIVRTLLNLNIPVYFEKENINTSSMESELFLSVLSTMAEGESASISSNNRWSIKKRFENGTYRLSSAPYGYKLESGGLQVVSEQADIVKRIFRELLSGKGMYSIAKELNAEQVPTQKGGRWTSTSVHNILTNEKYTGDCIFQKTYADSNFNRHINNGELNRYLIQNHHEAIISHEDFKAAVALIEQRAAEKGIESGSYKYQQRYAFSEKIICGECGNTFRRRIHKGKYNSYVAWVCNTHLSDTNRCSMLFVRDDALKLAFVTMLNKLIFSYRLLLKPYLAVMQSNTADEALLRIQYLENQLDQNAEQRSTLHKLMAQGYIDQILYTQESNELLLQARDFRSEIEVLNNTVAGDTTKVYETERLINYCKRGEMLTDFNESLFELFVDHILIYSRQKIGFVLRCGLTFEEMI

SEQ ID NO: 12011 - protein, 525 aa, synthetic construct
MNVVIYARFSSHSQTEQSIEGQLKACYEYAERNSYTVIGEYIDRALTGTNDNRPEFLRMIEDSGKKTFQGILVYQLDRFARNRYDSAVYKKKLKKNGVRVLSARENISEDASGILIESVLEGMAEYYSAELSQKIRRGLDINASKCLCTGGGVALGFKVDKDRHFQVDEDTAPVVREIFEMYANGKTVTEIITMMNARNIVTSRGSAFNKNSLRKMLQNKRYIGTYTYKGTEIPNGIPRIIDDDLFMQVQEMMKKNRKAPARARAKEEYLLTTKLFCGHCKEMMTGYSGTSHTSAVHHYYICNNRKKKLCKKKNVQKDFIEKLVISECRKLLTPENIERISREVVAASQKDQDMTNVKRLSKQLTDIERKRKNLMSAIMECDSDLIRKTLYEQIPLLEKEKSDTELQLTLEKAKQVKLTVSEVRFFLNALRKGDPDSIKYQKALISVLVNAVYLYDDKITLIFNSGDNAVTLDTALLEKIEQQADSVPVEDRFVYEQLSSTIGRISEPYIAWGTVFVQTKRHSLP

SEQ ID NO: 12012 - protein, 459 aa, synthetic construct
MSTTHFYSHYPTIEYKTCALYVRCSKEEQAKFGDTIEAQIEDLKAFAKLHHLKIYAIYVDEGHTARKKYNKRKEFMRMLQDVELHKFEYIIFTKLDRWFRNIADFYKIQEILDNNGVTWLTALERYEMETTNGKLNVNIRLSVAQDEADRDSDRIKDVFRLKVKKGEAITGSLPIGLMVGENGKVDIDPDTVQIAYDMFDYFEVHNSKRGTLLYLIDKYNRYFCYETIARALRNPLYKGEYRGNPDYCPKIIDPARFDRIQVLGKRNVKVRKNNRYYVFSGLAQCKECGHALVANTTVQKRYNREYTQYRCNYYSNSHLCTHSHGMNEKVIEKYLLDNIKPELEKYVTAYDVKQNAPTKKADPSKIKTKMQRLKELYVNELIDLDDYRIEYEQYKQELDKLTSTAAPEVKDLSAIRSFLALDLQSIYDSLTPQEKRTLWSSIIDKIIISDGGDIEIVFL

SEQ ID NO: 12013 - protein, 613 aa, synthetic construct
MYDIYNQKPTSRKVVIYARVSTEHEAQLSALENQKDWYKPILQQHPEWDIVKMYVDEGITGTSAKKRPQFMQMIQDASSGNFDLILTREVSRFARNTVDTLQYTRELKSKGVEVFFLNDNIKTFDGDGELRLTIMATLAQDESRKTSVRVKSGQQTSMENGVFYGNGNILGYDRVGKDMVINPEQAKTVRMIFDWYLDGWGMRKIQFELEKAGRLTAMGKSNWHVSNISKILRNSFYCGIITYHKEFTPDFLEQKKIRNFGDMEFTQVRGNHKPIITEEEYDQAQKRINSRRKTLSVDTSGQRMYGEKPPSDVWVKLLECECGHKFNRKMWHNTTEGKQYGYQCYSSIRTGTVRTRLNKGLPIDGICQTPMIAGWKLQMMAKYIFKNYLSDTDQVLSLAESMLEKHIDDEEEVRDNTDIINQKKEELQKLLKRLDNLIEMRADGELARDIFILKKESTENSISQLKKELAELEPSEIESEIDEVTSKEKITILKYALDQYTNFDSDADIPESVIEAFVEKIIARKDGFDWYLRFNPEESPMGCLVDGKRKRGAKVSAFCSPQHRQLLTKVGNNSFTKMYEYVINLADAKSYLYTYSTKHRIFRWEDINVSIFM

SEQ ID NO: 12014 - protein, 508 aa, synthetic construct
MYNVIIYARVSTLIQAEQGYSIDAQLEDCRKKAQELGATNIEEYIDRGKSGKFLERPELQKMLYNIKHSETNYDALIIYKLDRLSRDSMGLAYIIKILQQNNIKIISTDGAHYGTNPQDILIMQMMGSISEFENALRKERSIRGKIEKRRQGKIDKVKKYGFIYNNKKKNFDINKEEAEIIKKIFNWFTEERIGAFKIAKRINKLKIPTPLPSKNIHIWHENTIRGILRDESYAGTMHTMKYKFEKISIKKIKKTIRPKSEWIDVSVPAIVEKITWEKAQEILNDNKNNKRNTKNIWLLQGLVLCNICKKPMYIKQTITKSKNTNNKVFYFRCRTKIYNHAGLPEKCDARSVQVNVVEDLVWNTLLKIFYSKETLEKYLKRNRKENTENILLEELITKRQTLLNKKNTITDWFLDGKLEEDIATEKLNKLNMELDTLNLRIKMLKKNATKQPATIESLYNKFHEVNNPDREKKKEIIQSIVDKIYLERLDDTNGKYCVPKLKLNIILY

SEQ ID NO: 12015 - protein, 515 aa, synthetic construct
MKVAIYCRLSHEDDDKLHENDESESIQNQKSMLINYAMEQNWDIYNIYCDEDYSGIDSLRPEFNKLLSDAQNHKFDIVLCKTQSRFTRDMEIVEKYLHNKFVEWNIRFISLVDHVDTLDKGNKKSRQINGLVNEWYLEDLSENIRKTFDNKRKQGLHIGSFVCYGYTRNPQNKNKIIIDHNVSGIIQLIFNLYEQGTGITKIAQVLNTRNILPPTKYKQSQGLNFKNQNKNIEYWCESTIRKILKDEVYIGNLVQGYNKKISYKSKKIVAQPQSQWIIVENTHPPIISKEQFYKVQEILKSKTRKCKNGEMHLFTNKLICASCGSKLYKCTNDRGYVYFSCKNSKKLYKTCTPHSIGYNNLKSLITDKIREKILEFYDFNSINDNMFLSDNTSQLLENKILSISNEINNITNAIKELYLNKSANKIPESIFQVLNSDFISDKIAKEQELQNLKSNLSNLSESKIDVQSLKENTINELKNFSKLNREIINSFINYIEIDEKNKKTNSQDIIIHWNF

SEQ ID NO: 12016 - protein, 668 aa, synthetic construct
MAYVRNKKKILKFWSKKKAALYVRVSTRYQVDKDSLPFQRKKLKEYCKFLGIEDFVIFEDDGYSAKNTDRPHFQEMMSRVRDGEFSHLIVWKVDRVSRNLLDFAAMYQELKDHKVTFISMNEQFDTSTAIGEAMLKIILIFAELERNMTSERVTGIMLDRAEQGLWNGARMPVGYRWNPEIKFPEPDPEETKIVQFIFDEYERVRSTTKIARYLNHNQIASKRGGQWTSKLIRDIIRSPFYIGTYRYNLRESGRGPLKPESEWIVRENNHPAIITKEQFDRCNAIMDENGTSRDTSELRARKYVHTFSGRLVCGKCGANMIASKDRARANGWRPSMYRCAQRSRMMDCDNSKTVNESYIGPFIFNYVANLARIQKNFKNIKTLEQLEKELLKGPEFENMKVSKESLRRTFDALAFQEVGKGAYLPDIDISDGDDDYTAAEQLSILKRELDKCKTAIDRLTDLYLYDPDSMTKEEFAKKKRDLVNKIAGYEKQIEASQATGDKDDLADLEFIRKASAFLVAQRIVSKKHVDYIQMALDLDNEILKDFVDQVIDRIEILEGRVQSIRFVNGLVHEFTYSTPADLPVCQKCGGHIGSTCGCRTRTFDFAGKPYRRIKVGDPGDKFHGVAGAVCPECSAQAGRWHHWKCGIERCPICGEQLIACEHGPNGKD

SEQ ID NO: 12017 - protein, 555 aa, synthetic construct
MNYIIRDDKEHETTAPKVKVIAPRKKFQPSYNDRQNREIRVGAYCRVSTDSDEQELSYETQCEYYENYIGSHENWELVAIYSDEGITGTSTNKRSDFMRMIDDARAGKLDMIITKSITRFARNTVDSLMYLRILKEYNVDVYFEVENVHSLEANEMLLTILSSVAQQSSEDKSESIKWGYQRQFEKGKVYAANMYGYKSNRGTLDIIEEEAEVVREIFSKYLSGMSESKIARYLTENKVPKKNGSTKWDSGTIGRMLQNEKYSGDALLKKTFSIDFLHKKRYKNEGQKKMYFVENSHPAIVTKEVFKAAQVERTKRNMKSNDEKEVVESHHQNRYSSKNPLSNKIICSECGALYRRTVWTKRNKEKEPVWRCSNRLKNGKAICPNSVTLKEKPLLDALTSLINGKTKSKEKTRLELAKELSEYLNPKDIVEKKQKLNCELENVNSQINELLDKGMLLVARGVQDESQIEEHLAQCYQTKQMLKNELQKLDDKYNALKQGRQEKLLKTLEKNSNEHTVMTQEDLAVFIDRIVVKKDKIEVDTIDDQKCELLLNQIS

SEQ ID NO: 12018 - protein, 516 aa, synthetic construct
MAQAQKQVHIIEPLERFVNRINLIGCYARVSSDSEDQLNSYNNQVDFYESYVNSLENSKLVKIYTDEGITGTRMDKRDGFLQMIEDCRKGLINTIITKSISRFARNITETLSVVRELKSIGVSVYFMTEKIDTAKMGSEMMLAVYAACAEVESKAISNAQKWAFRTRAKEGRYNQPKLPYGYQRIDGEVKVIEDEAKIVEDIFNKYVNKDFSVTKLVDYLNKHYFKKKKWSQSTVSSMLKNERYCGDMLLQKRYSPDVFPYKLVTNKDELAQYYVYDVFPKIIDRELFEKANEKLVNNKLKFNKKQTDGNREYLLTSKIKCEHCGGTFKRRVLRNKEYWSCSNHVASAKKCEVKMIGTDEIEDAFLKIFYKLKENIHVLEAYKKHIVNFTTNDDDRCELDLVNCELKKVTSSINTLVRYYQKDLISLEDYKKKHNELLVDKSVFEMQKCKLNEKIYQRFEVIQTQIIIECLESVKEITALDEEIFNTLVDSIEVGTLDIQLTLKNDLKLKVERKQF

SEQ ID NO: 12019 - protein, 546 aa, synthetic construct
MEETIKAVGYARFSSSMQREESITAQKRYMMMYAKRNNMEVIDWYCDEAKSAKTVNRPAFQKMINDAKNNPEFKAVLVHKTDRFSRNLSDSIQYKKLLEEYGVQVIFVNERFEDNPESHLLYHIMGSVNQFYNENLAREVMKGLKENAYQCKFTGGRPPLGYDVDKDLKLVINEKEAEAVRLIFEMSAEGYGYGETIDKLNILGYKTKKGLPFVKNSLYEILRNEKYKGTYIFNRSCSANSLNKRNNHRRKPEEEIIRIENGCPAIVSSGLWHRANAVKKATRSSYTNAKNTYLLTGLIHCGECGGKFHGNVRYNKNNTNLVYRCSSKKNKRKCESKEIRCEYLDSFVIDKFVEFFFNDDNIKVITKQLNEQYNKSCISDLEYNEAKSTLKILEKSRNNLVEAIAKTGINDIMSDKIKEYEEQIKKTAEFIQKYEKQKVDRVITEDEIREQINHLKDYFYNPKNIIRTKYVLSQYIDRIDISNENVQVQFKVSMSPSGNTDGDYFCVHTEMIKRKYLFDYVCEKVDFEQWNIEKLNKSESEHRKGA

SEQ ID NO: 12020 - protein, 523 aa, synthetic construct
MFFGIYGRKSVYSDKSDSVDNQHRMCNDYIKTHFKSDDITLITSYSDEDYTGANTKRPDLQRLLEDVKSGAINVLVVYQLDRISRDVRDFSNIYALLEEYHVMFISIKENIDTTTPIGRAMMYVTVVFAQMERETIATRVRDNMIGLAKKGFWTGGNPPYGYVRKNIVINGKKHVTIEPDPDGVAYNIWIYDSFLKNHCSLQSMETYFRKEGIKTRNGAFFSSTQLYKILTMPYCVEATPEIYDYFAAKGCQMDPDSPRDKWDGSVGVMVYGRSTEVNKKHQLQPPEEWLICLGLHKPFMPAAKWLAVQNQFSKNKFDKTPKYDIPLLKGVLRCSCGSIMAVSRKKKINGEVSSWYYCLRRMRNGVEACDRKQIKVDIIDQKLLNTLHSIESDPSMIFCFVQKKELPLPDIKTINNKISSVESKISKLASSLALADGSAASKYIVAEIERLDSDLQFLKRERAAINIEIKKRDELNESAESKALHIQNVMKGLSGFTAEEKNLIMRDILKECVWDGSELSIVL

SEQ ID NO: 12021 - protein, 498 aa, synthetic construct
MDSARLRVVCYVRVSTREQAEKGYSVSEQQERLKAYCLAKDWVVAQVITDPGFSGAKLERPGMQQLISLVQAKKCDAVLVWKLDRLSRSQKDTLYLIEDVFLKNGCAFVSMNENFDTSTAFGRAMIGILSVFAQLEREQIRERMAVGRVGRAKAGLFHGGGFAPIGYDYKTIAEGGAGLVVNEYEAMQVREVFSLYLQGWPVNRIRKYMAAHYTTKDGDWGSDTTVRDVLKNPLYTGKINWAKKVYDGQHEPLISQETFDAAAARLATSSWKRTCSDGMERNSPFKSTHLLGGIIWCARCGARYFASGNYSGRGENKRYWPYYVCYSRAKSAKHMIRDPNCRNDRWAVAKLDAIIEGEIRKLAFDPAALELAASGPQQDEDVAQRRASLQQRLNDLRAQMGRVLDLYQMGGSLPASMVGDRVAKLQAEIDGVEAALAEAVEEPPARRMDAARAALVGAEDVLDNGTLDERRELVHSLIRRIDLDGENIDIHWSFAPEN

SEQ ID NO: 12022 - protein, 516 aa, synthetic construct
MARRKKVSPGNRLVAYYRYSGGSQQTEQSIEGQRRDCEAYARQHGLTIVHEYIDRHISGRGVESRLAFQQMIADSSKHLFDLVICWKTDRFARNRYDSAVYKKRLRDNGVRILYAAESSVEGPEGIILEGLMESLAEYYSAELAQKMRRGMRESALKGKAINPNRPLGLTTDEHKRFIIDEKNAPTIRFIFEHYAAGESSASIVDQLNAAGLRTSKGISFNKCSIPRIIQNEAYHGVYICKAYDVRIDGAIPAIIDDDLWKRAQKMLTLNKQHRAPHSSHADYLLSGKLFCGCCHSLMRGISGHNCRNDVYYYYACGNKADGGTCKKKNIPKDVAENLVVNAICENILRPDTLEDLADAIAAAQQAEVNQPDPERAMLEQNLADVHRKINNIIESIENGTASSRLSARLADLEQQESTLNYQLESLKEVHPPVLDRERILFLLEQFLISPNERTEDYNRRIIDTFVNRIEITDTEMLIYFNLSEASASEKQKNSQPNSCSTGNHLVRVARIELTAS

SEQ ID NO: 12023 - protein, 626 aa, synthetic construct
MIDNCVRAVFYARVSTQEEEQLKALPKQVEECKDIIASKGWRLIDGYVDEGKSGTKKDGRKAYIKLLEDMQEDKFDIVVVKSQDRLQRNTFDWYKFTDLLNKNNKRLYLYMDNKFYEPSEDALITGIKAILAEEYSRDLSKKLNNSNKRRIEKAKAGEEVSAMGNGQTYGYSIVNGKWVVDESQREVVRRMYELYTELHSVRKVRDALNEQGYRNQRGNLFTDENIGRIIKNVMHKGWVILNRHHRDFDSKEIIEKSEEEWVIVKNDHEAIVSEELWDAVNDEIQSHRNKGNSGTRGKKGGTDPLSGKMVCSCCGRVLWKHASQGSYKSKEGRKYTYKRYTQWYCSGKMGRGELACTDPATISGVKLQKYLVEMADMFLDYSTVEYSKNLLKRRTISWLEDLKDKLTTPTDNGKIEQDLKALEGKRGKLIDLYTDELISKEEFKSRSVDLDAEIEKKRTLLVPVEENPDIKAIEDTIANIDAEIEALFEDEAMVEEKKVQFIQEHIKKIYVSKNSDVFIVLDNVAGAFLFIDKEDTRIEVVPVAEYNPEELSEEGITENDFVPFDRESMSFPHGGIRNEKISIRCRTHRPLPDRLRGHQHRGNLERHRESGVSAGEVGAGEAWDLL

SEQ ID NO: 12024 - protein, 541 aa, synthetic construct
MRIAIYSRKSKFTGKGESIGNQVEMCRDYIATNYNGEEHSIQVFEDEGFSGKNLDRPQFKKMIEIENVIPFDLIVVYRLDRISRNVGDFASLIEKLNKKNTSFVCVKEHFDTGNSMGRAMMNIAAVFAQLERETIAERIKDNMYLLAKEGHWLGGTTPLGYKSIEVTNGKRTHFELIIDESQIDLVNIIFSKYKQLGSINGVETYLFVNGYKTQKNNYWHKSNVKRILTNPIYCIADIDSLNYFTDLGCNVCFTLDDCNGKKGIYPYNRFSGQKREMQSYDRWIITISEHQGILAGKEWVAIQQQLKANSKDGFGGKANERRSTNNTSLLSGVLFCSCGAYMRPKKYPSGNTFYICENKMDKKITECNNSNINADELDKIVLNELFSFDIKDGVVDSQIQNLKEQIANVDSDLQKQIGRLKKQIETNKNTVNKFMNIVALSIENDTPEQVVEVYNQKINELLNQNKITQKRIDELQDTNIVQTKMTNRLNSLTDAIVYLKENFDKLTIVEKRGFVKEIVDRIVWDGKNINIFIKGISELSE

SEQ ID NO: 12025 - protein, 628 aa, synthetic construct
MKAAFLIRCSTKNQDLNRQTRDLTRLAKSMGYEYDLENLVYGEKITGKDDVTKKNRDSIDRLLRAAKEQRFNVVLVSEVSRMSRDPASGRIYVRLLINMNIPVYFKDIDLWTINPETGKKVRDAELVIGAAFDAAWKYLKSMKTQIASARRNELDNNRISIGQPYFGYKRYEGTDKSKKNQIVVNEEEAEVVQAVYNEYLKEGATLKSTALAITNMYGEKLNRKFSLGTIEHILTYESYATGIKKVNLKDPDTDEVEVFDVSTPIIIDKELYEAATNKRKKNRVKDEPYPNQQVYLLSKLIKCPDCGYTLTPRRKAGEFGQTYRLVNGKPAVSWFCMSGINNITNCTNRTSIANEKLEPIIWELVKKELIGYANMNDEKREEQIRECEEKIEYQNYSIQNFTKEIDKLKKRLSTAYQFSINAAEMAGDDEDMRTMAMEEFNRTAKGVRQEMKNFEKSIEQAKGELEKLRDLKTFYSQPTLPKDYLEQIEGNFTEKRNLVKQLITKIVPYRITTFKKKERESGVKTCNKMITVKNGAVLLEVYTIGGVYNVFYNANSKFQVKTAYYVHGEYATFQNGIRKYPAYNEGEYFVISNANMVMETDDIDEVVTVNEFVDIAIANNWVIEYQYI

SEQ ID NO: 12026 - protein, 456 aa, synthetic construct
MRNKEIAPALVRVALYIRVSGEEQKIKGLSLEAQQERLEAYARERGWVIVGIYIDAAKTARKNIHKRTEFQRMMDSVKRDEVDILLFARLDRWFRSVADYYKVMEILQAHNCDWKTTDEEYDTTTANGRLYINVKLSIAQNEADIDGERIDVVFDSKIAHGTVVSGSAPFGFRVNEEKRLEVVPEDAAIVQDAFNYFENTVSQRATVRYVRETYGVNWCDATFRRMLKEKLYTGVYDRGGRYNDQFCPAIISRQQFDRVQALLTRNVRSAPSGKVYIFTSILTCAECGHKLVGYKSSDYYYYRCNQHFQRGRCSHNHSAREDVVEQWLFEHLGEELERCQLEWGVEAAKKKASVARTDKAALKRKLTKLKELYVNDLIDIEDYKKDYQIYVSALNQIPEPAQEAPPDFAAVRRLLDNSFRTIYDTLTREEKRTLWRSVIKEIRIDNDQNITGVVFG

SEQ ID NO: 12027 - protein, 526 aa, synthetic construct
MPKVTMIPATINPLTHLPKVAAQKRRVAGYARVSTDSDEQFTSYEAQVDYYTKFIQSKPEWDFVKVYTDEGISGCNTKKRDGFNSMVSDALAGKIDLIVTKSVSRFARNTVDSLVTIRKLKENGVECYFEKEGIFTFDGKGELLITIMSSLAQEESRSISENITWGQRKSFADGKVHLAYKRFLGYEKGEDGRPTIVESEAKVVQLIYRLFLDGKSQAAICRCLENLGIPSPGGKDKWSKTTVTSILQNEKYKGDALLQKSFTVDFLEKRMKPNEGEVPQYYVEGSHPAIVDPDEWDHVQTEFARRKALGRAYSGKSVLSAKLVCEDCGGFFGSKVWHSTDRYRRTIWQCNSKFKVEERCHTPTVNTETVQRLFTQAYNRMMENREQIIKDCETMRRALTDFAELDAEIERQLEETQVVAELVKAAVKENASTAQSQEAYLRKYEALTERYEKAAAELERLQNLRTTQSQQDKAMALYIRTLKKQPVVLREWSDTIWTVMVEKAIVHRNGAITFVFKNGTEVKVGE

SEQ ID NO: 12028 - protein, 433 aa, synthetic construct
MSGRITTVSKPPKLERKKRVAAYARVSSGKDAMLHSLSAQVSHYSDLIQRNSDWLYAGVYADEAKTGTKDSRADFQRLIADCHAGKIDMVITKSISRFARNTVTLLQTVRDFKAWEVDIFFEEQNIHTMSADGELMLTILASYAQEESRSASENQKWRIKRNFEEGMPWNGAMLGYRLKDGRYEIVPKEATLVRRIYNEYLAGDGYQAVAKRLTEEGVPSRFGGKWNQSVVSKILSNYTYTGNLLLQKTFRENHITKKTVINHGELPKYHAEDAHDAIISIEIFHAVQTEKARRAAQFNKKPAPRTTYPFTSLLVCDICGKNYRRKTTKTGIVWVCGTFNTLGKSVCASKQIPEATLQQVTAEVLGVKAFTREQLHSQVQSIRVCNGNILVFCFKDGSKVTRTWKDRSRAESWTDEMKEAARRKTLERSKHNA

SEQ ID NO: 12029 - protein, 572 aa, synthetic construct
MASRIAEKLAAKKAAIYIRVSTHWQVDKDSLKVQRRELIAYVTLVLGITDYVVFEDPGYSAKNTDRPEYQAMMDRIRTGEFTHLVVWKIDRISRNLIDFATMHDELQSLGVTFVSKNEQFDTSSAIGEAMMRIILIFAELERKTTAERVTAVMLSRASDGQWNGGRVPFGYSWSKETKTFSIVPEEAKAIRRMAELYEQYQSLLYVAKYLNDAGIVTKTGGQWTPTTVRTILTNPWYIGQYVYNVHSDGKGIEKRDSDEWITVENHHEPILNEDVFCRMKFLLTRNKRGGVPSHKTYVRKNIHVFAGLLRCGQCGSNMTANLDRRRANGFRPSQYACGSRRRKGTSCTNKYISDTTLGPFVLNYVANIIRASKNSSEATTPEVLERKLLRGEAFEDVASVSTDSLGQLLDAFRSAGDAVEYRPQIAFSGEDNAIREIDTLRARRRKLDNALARLNALYLYDDEAMPEKDFVMQRGQITKQLEEVNARIEELQNQESSEELGDDFIGKASYYIMANKLIEDRYIDYEKYIRAIDPSIPHSFLQQIIDHIVVNDGRVTSITFKNGATHTFTYKT

SEQ ID NO: 12030 - protein, 518 aa, synthetic construct
MLSFNNIIIYLRKSRSDDPTQSVEEVLARHEHILQEYCMKEYGECIPENRIYREVVSGETIQDRPIIQQVLRLLESGSIDGVLVVEPQRLSRGDLENCGHIVNSFRYTNTLVITPTKTYNLQDEYDRKFFEMELTRGNDYLEYTKKILARGRLASVMQGNYINAIRPYGYNKIVIGTGKDKIHTLEIFKEESDVLLLMKHLYLDENYGLVRIAHTLDDLSIKAPKGDHWSASTISRILSNPLYNGKIVWNKRKTVVKWKDGKKVKSKPLNRGDDVIIVQGKHPAIFDDETFNAILKRMENSPKVKRSSKLRNPFAGLLFCSTCGSAMILRRSGRKSGVYSLTCNRQSICHTKSVQYKAVLLKVKQSLAEAISDFEVKMSNNNTTASELHAINISTLENELEQLYRKDLIQKDAFEDGTYSKAEYMQRNAQLQTQIAAVTDKLNRARKDAPEPVSYEERIVCFRDCLNALDDDTVSAEVKNTLLKACISKIVYYNDSPSISGIGRYVDNPFRLEIFLKL

SEQ ID NO: 12031 - protein, 464 aa, synthetic construct
MNSTYFRPQPELFGLRVVKYIRCSHDGQVLHGDTLEAQDALLDEFIKVNRMVLIDTFIDEALTARKKFTRRKEFVRLLDGVRAHSFDMILFTKLDRWFRNIGDYHKIQEILEANGVQWKAITESYDTTTTNGRLHINIRLSVAQDECDRDSDRIKDVFAYKLKNKTYLSGSLPRGLKLDDEKHVIIDPEWKRFALDMFDHFEQTNSKRGTLLYLKEKYGIYLCYDTISRNLRNSLYKGMYRDDPDFCEPLIEPERFDRIQVLGKRNVRQRYSNRTYIFTGLLICSSCNHYLVGQTTHRTLSDGTEKHYPSYRCNQRYQSHSCDRNRSYREDYVEEYLLQHIRPALSEYVAEYEVTGANPARKNPAAEAAKIRTKMQKLYELYMDDLIDRDTYKRDYSAFQEKLKELDSIVVAPSRDLADLKKLLEQDYEDIYRTFSPQEKNAFWKSFVQSITVHEDGEMDIVFL

SEQ ID NO: 12032 - protein, 527 aa, synthetic construct
MEERAKAVIYARFSSDKQRKESIDGQIRECTAYAESQNLEVIGAYIDRALSARSDNRPDFLRMIADSARKTFQYVIVYQLDRFSRSRYDSAIYKNKLKKNGVRVLSAKEHIGDDPSSIILESMLEGYAEYYSAELSQKVKRGMTENILEGKWVGCRVPLGYKLTADKKLQIVSRDADAVRLIYTMYNANERIIDIVRYLNAHRYKTSAGRAFTRSSLTKILGNKIYIGTYEWDGHVVEQFVPPILADDVWEAAQKRTQQHKLNPRPKRRSADYALTGLIYCGECGNPMTGQSGRSKNGSMYRYYRCSTKNNYHSRGKKQHIKCKSRNISREKVEDLVLDETVRILSNPKAVKIIAKQAANVQKIDPTAQEQARIAQERKTIQAKLENSIAAVEKGLCSKTIAENIERYESRISELDQQIDELKFAYAPIRIDAVAVEFFLKSLLNKKKDHDKYRLNMFRTFIRQVIVYADKIEIRYNYTACPQILKNPVSIALTGLPECSGNDSVVRLEGFEPSHPVPETGALSPEL

SEQ ID NO: 12033 - protein, 582 aa, synthetic construct
MSVSVTLNTQKPDTTTNAVIYARYSSHGQTEQSIEGQLAKGHEYAAARGYTIVHEYIDRAITGRNDNREAFQKMLSDTGKHQFQVIIVWKVDRFGRNREEIAFNKHTCKKNGVRVEYVAESLPNSPEAVILESVLEGMAEYYSIQLSQNIRRGQLESAKKCQCVGGSVPLGYTLDSDKHFVIDPQTAPVVKKIFDLYAEGATISEITGQLNEQGIRTIRKQLFTKNSLTKLLKNEKYIGVYTYKDIVRVEGGVPAIVDKSTFDRVQELLKINRRAPSHTWTKVEYLLTDKLFCGHCGSPMVGESGFSHTGAKYSYYGCIKRRREKACDKKPVRQDWIEALVLDETVKLLHDDELMEYIIDRTWEYYQVTDKVQEEKAVLEAQLAEVDKAINNLVRAIEAGIFNAATKSRMDELDAQKAALTTSLADLELTSGIRITRDHIEYFLLRLRDLDVKDRECQKRLVQTFVNAVFVYDDGRVKITYNYSGQSSTITLNQIASAEKGKGFVCCLPCSTFSPRFRVGNRGIFCFWGKQDANILPISAALCYNGSENGRGGRKNEKAACCVPDGARLLGLCGVRGRNAGR

SEQ ID NO: 12034 - protein, 516 aa, synthetic construct
MARKKKVSPGNRLVAYYRYSGGSQQTEQSIEGQRRDCEAYARQHGLTIVHEYIDRHISGRGVESRLAFQQMIADSSKHLFDLVICWKTDRFARNRYDSAVYKKKLRDNGVRILYAAESSVEGPEGIILEGLMESLAEYYSAELAQKMRRGMRESALKGKAINPNRPLGLTTDEHKRFIIDEKNAPTIRFIFEHYAAGESSASIVDQLNAAGLRTSKGNAFNKCSIPRIIQNEAYHGVYICKAYDVRIDGAIPAIIDDDLWKRAQKMLTLNKQHRAPHSSHADYLLSGKLFCGCCHSLMRGISGHNCRNDVYYYYACGNKADGGTCKKKNIPKDVAENLVVNAICENILRPDTLEDLADAIAAAQQADVNQPDPERAMLEQNLADVRRKINNIIESIENGTASSRLSARLADLEQQESTLNYQLESLKEVHPPVLDRERILFLLEQFLISPNERTEDYNRRIIDTFVNRIEITDTEMLIYFNLSEASASEKQKNSQSNNCSTGNHLVRVARIELTAS

SEQ ID NO: 12035 - protein, 510 aa, synthetic construct
MSYFIYARKSRKDADLEALGIDVLERHITTLLELAKTLSLPIGAIYREVVSGDSIDSRPVMSQVMAEVESCMWDGCLVMDVDRLARGDTIDQGRVQRAFFYSNTKIITPNKTYDPANEYDNEYFEFSLFMSRREYATIKRRMQRGRERSSSDGYYVGNIPPYGWRRVIAPDGKHFSLAPDPAEAPVLDLMYDLCGNKQYGYQKACTYMTEMGILSRSGRPFTPSTLKGIISNPANIGKVRWGHRKTVRTVKDGKISRSRPHSSDYILADAVWPPRISADLFQRANQPKGSCSAPVRDDRPIQNIFAGLVRCSQCGRLMVRKKAHTKTPYDILICQYTECPTVGIRIDELELALLEWLQNYIDKYELTDALPEDAENVATKEAIVKNFEKEHEMLLKQRESLFDFLEQGIYTKEIFIERSNALEQRVKECMEHIVSAQNDLHATLALQANRKNFVPRCKNLLGEWGRLTIPEKNSALKVLIEKIMFTKTKRNKKGQDRSDFEIDVFPKVPK

SEQ ID NO: 12036 - protein, 477 aa, synthetic construct
MSNSSSFPAKISAIYCRESTEKQNIQSLIDMCKKAAKKINLQNIKVYYDVASGYNKDREQYSKLKEDIQNNLVDTLVLYESSRLTRDELEHHIFYGLLRVHNVKVYTVTHGWLDLQDADDTFLTNLLNLLDAREGRKTAKRSKDRMTELAEQGRWTGGPAPLGYKLVNKELVIVPEDAEKVKTIFKLFLDGKTRQSIANFFGYEVKKVRRLLENSVYIGKLKFHSVEIINKKKILHKDYKVLNGIHEPIIDESTFSLVQGKLKNIKVERNTDVYIFKDLIKCTCGRKMYRVVNKYNYLKKSTNEISRKTENLYYCRTSDKYKSLGCGAIGIHEEELFEEVMASLKKIIFSLEVENIDTKFDDYQSQLVLYKKELASLSRKEELLARQLLNSLISEEVFEKLMKELKEKKAFLEEKIKNLTTLITNKKNTNKNSEILKKYFFKLEKEKAPEKINNFLKLIIDEIEMVNDYRFYIHLKF

SEQ ID NO: 12037 - protein, 600 aa, synthetic construct
MVDNCARAVFYARVSTQEEEQLKALPKQVEECKDIIASKGWRLINGYVDEGKSGTKKDGRKAYIKLLEDMQEDKFDIIVVKSQDRLQRNTFDWYKFADLLNKNNKRLYLYMDNKFYEPSEDALITGIKAILAEQYSRDLSKKLNNYHEHRIEKARAGEEVPAMGNGQTYGYQLINGKWVVDESQRELVRKMYELYTDLHSVCKVRDALNEQGYRNQRGNLFTDENIGRIVKNVMHKGWVILNRHHKEFDSKETIKKLEDEWVIVKNDHEAIVSEELWDAVNDEIQSHRNKGNSGTRGKRGGTDPLSGKMVCNCCGRVLWKHASQGSYKSKEGRKYTYKRYTQWYCSGKMGRGELACTDPATISGVKLQKYLVEMADMFLDYSTVEYSKNLLKRRTISWLEDLKDKLTTPNDNGKIEQDLKALEGKRGKLIDLYTDELISKEEFKSRSVDLDAEIEKKRALLVPVEENPDIKAIEDTIANIDAEIGALFEDEAMVEEKKVQFIQEHIKKVYVSKNSDVFIVLDNVAGAFLFIDKEDTRIEVVPVAEYNPEELSEEGITENDFVPFDRESMPQHHGPKHLHPSGPQTASRCCFRDRFSCDQP

SEQ ID NO: 12038 - protein, 535 aa, synthetic construct
MKKKQPNTRHGRAAIYARYSSHNQREASIEQQVKACRELAVRLGLDVVETYEDKAISGKSDRRPSFQRLLRDAEKGYFDCVLAWKSNRMGRNMLQAMTNEARLKDWGVRTFYAEEDFDDTAAGRFALRNMMNVNQFYSENMAEDITRGMMDNASKCLSNGALPLGYKAGENGRIVLDKAQAAVVQEIYTRVACREPFVDIAADLNRRGIKTKRGGPWTKSSFYTICRNERYRGIYIYDDVRVEGGVPRIVSDGLFYRVQEVLKVKKTPQSARHHTGAEDYLLTGKLFCGKCGRPMTGVSGTSRSGEMHYYYTCQKRRREHACDKKNVIREQIEKSVAQAIKQYMLTDEMIQHMADATMAYNARQEKDLHLQDLQGQLAAVKTSAANLLKAIEMGVITETTKARMVELEQEQGRLNAQIENARAELVPITRDNFVSLLHIYRDGDINDSKYLASLFETFLVRVDLYDDHFLIWFNPLGQKTPADIPITSIENGDVDEFFDECRSKNVFDWGGKWSTKIKAPAVPRRVFLFWCSVSC

SEQ ID NO: 12039 - protein, 454 aa, synthetic construct
MECVAYLRVSTEKQAEEGNGLDSQKRDIENYCRKNQLIISDWYEDDGFTGSNMNRPALQRLINDCSKKKLKCVVAFKLDRLSRSMVDGIYLIERVFIPNGVDFRCVHDSVSYDSPMEQAYTQMMAVFAQLDKNTMLLRMRGGMLERVKQGYWMGGGNTPYCYRYSKEDGILVPIPERKEMALRAMNLYISGYSDVRIQKLIGFKSEFVTRQVLTSPVNIGMIPYKGKLYRGRHEPIFDIKVFELAQELRKTRKQSKSFCVNHENQLLTGLCYCGVCGCKMRYQKWTHGKHKIYCYSRDNGMSYLPNYNPNCSNSLEWAEDIEKQVEDEILKISLNLSSHKPKERESCLDILSKQLQKEKTKLKRLYTLYAEGNDTVLEMIKETESGIDELKLKIQNEMKNPDNSQKKEFVYDNIKKLADVWEHIDKQNKNRILKTIISKIIIVNGNIEIQLKKF

SEQ ID NO: 12040 - protein, 570 aa, synthetic construct
MRKKITKKQAEDKVAIYVRVSTHWQIDKDSLPMQKTDLANYCAYVLNINNYEIFEDAGYSAKNTDRPDFQKMMSRIRSGEFSHLLVWKIDRISRNLLDFIDMYEELKRLGVAFVSRNEQFDTTTAMGEAMLKIILVFAELERNTTSERVSNVMISRAETGKWNGGRVPYGYVSPGRGKMPVVDKIEAAVVKQIFNNYESSRSTTMVARDLSDKGILTKAGNKWSATTISKILGNRWYIGSYIYNMRDSTDDYNLKDESEWVVVDNHHEPIISRDQFNRVQETLSMNTKDKTRGAITRQRKNAHIFSCLLECGQCGGNMAATIDRPRKDGTRPSIYGCYSRRSTSKCTNKYVSDVTLLPFMLSYIKAMMLMKKKVSSIENVKSAENFLIANAGMTDVKAIEGVGETYKLLKSGSVGIEYEPGISSYKDAPETKASMERLRTEYGKNVRALNRMKSLFLYGDDDIDKASFLKEQHDLEDEIKRQETILARYESTDGSLDEMDEDEFEAKASYVIMAKMLTGEFDPSYDIVCKTLDPMVLQRFFKSIIDKVGIVDGKVCWIRFRNGITHKFMY

SEQ ID NO: 12041 - protein, 576 aa, synthetic construct
MKITAPARSARAVSLEAFVDNLNLANVVIYARYSSAGQNDQSIDGQLAKCREYAQQRGYRVVGEYCDRALSGRYAETRPEFQRLIADSAKRAFDFVLVWKLDRFSRDRYDSAIYKKKLRANGVRVLSVTEGVGDSSESVLLEAILEAMAEEYSRQLAQNVRRGMRQNAEKGLSLGGLAPLGYRVVNKQYEINEDEARIVRFIHEQYADGAGQKQIVADCARLGYRNQRGNPLTLTSVKRILANERYAGRYDYLGEIVIEDAFPAIVSKDLKKRVRDRLKANAKAPGHAKAKVEYLLHGKLFCGECGAPMIGECGRGRHGATYYYYTCAARKKQHTCKKRNERKDELEASIVDYIGSCVLTDSWIDGAAERVVAEYQKSYDASGIKPLEKQIRDADKEIDQLVDALISATAEAARRRINERIETAEARKQALEADLASLRIASRVQIRKEDIVVWLNQFRTGDRSDLEYRKKVIDLFVNAIYLYDDSFKLFLNVADSSQVTYADALALAPPSVSDFGVSGVPEKQLISFWNQLLFFFVLHYRRSTKRLPLYARGAVGASVYLLVQTIRLDGKNRISS

SEQ ID NO: 12042 - protein, 571 aa, synthetic construct
MPRKPAKHPAKPKRGKKLEVEEPGVLYGRYSSHNQKDISVEQQFEKGYELAAEYGIRIIDTYADRAVSGRTDKRRDFQRMMTDAAKGKFRYVIAWKSNRMGRNMLEALINEARLQDLGVRVLYVEEDFDDTAAGRFAARSMMNVNQFYSENMAEDIKRGLYDNAANCMVANGHLPYGYKADETLHYAIDEPKAAVIREIFTRVSCGEAFVDIMASLNARGIKTSYGRPWGRSSFQKILSNERYRGIYIYGDVRKEGGIPRIISDELYFKVQEVITTKKNPQGRHRVNGDYLLTGKLFCGHCKSPMTGISGTSRSGNLHYYYVCQKRRTEKTCEKKNLRRDDIELQVAKAIKRRTLDDDTINWIADSVVEYSQHQESASGIGLLEDQLKDTQRSIKNLMAAIEQGIITPTTKARLMELEKEQSDIDRKITMAKADVIPVNRDQLVGWLKKLQAGDVHDKKYQAELFDTFLIAVYVYDNPDGQDYMKVVFNYAGSKNTVEIPLDPSVIDNVENIETGAVRLSSAQVHHVVADCISFATTFFQKVISHSFRRSSSPNATRYAGLAFGVWTQAWR

SEQ ID NO: 12043 - protein, 513 aa, synthetic construct
MREVIVINPNAKPLHDKIRTAAYCRVSSDSDEQLASFSSQVSEYTNRISKNPDWVMVDIYADEGISGTSAAKRPEFQRLMADCRKKKIDRILTKSISRFARNVKECIAYIRELQSLGVSIEFEKEGIDTAFLSGEMMVAVFGSLAQEESASISANMRLSYKGRMERGEFITCCAPYGYRLNNGKMEIIPEQAEIVRWIFESYINGMSREKIANLLTKRGVKTSANGTIWYGAGIGYILSNEKYVGNSLSQKRFTQNGIWTKRIVNHGEQAQYFCKNSHPAIISEWVFEQAQRLVKRRTNDHGQPHVTYPLSKRIQCPYCGASFRRKSYANGVVRWSCYTHDRNSAKCSNPSIEESIIKDAFCQVFLQLKSQFILQSTAIQLRQLRNIMLAHEPSVTNRNREIASITAQLHMLSRLRSKDLIDDESFLSQANEMNRKLLTLREQRQIAIQEHQKDDVLEKTLEIIDILQDAPESIASLEDGGVFASIVDKVIIDKSKNITFRLINGLELGGVHG

SEQ ID NO: 12044 - protein, 541 aa, synthetic construct
MSSTPECTVTMIPAKLSPQASAGRRRGPLRVAAYCRVSTDDKEQLTSYQNQITYYTEKINSNPDWTLAGIFADEGITGTSTKKRKEFNKLITLCKQGKVDIILTKSTSRFARNTVDCLEYTRMLRELGVAVVFEKENINTATMNSELVLSFYGSFAQAESESLSKNVSLGNRYGFKQGRVRMNYKYLLGYRKGDDGKPEIVPEEAVVVRRIFHSFLAKYSIGRIKAELEQDGIPSPLKKSQWSRSAIENILRNEKYIGDALLQKTFVTDCISKKVKKNNGELPQYYVKDNHPAIIEREIFNQVQEEFARRNSKPKASPKANRGKFSSQYALTELLYCGECGTPYRRCTWARSGRKKIVWRCINRLENGKTVCKNSPTIPEGELHDAILRSLQLLATQQDEIQEGLQDALRAAVISQDGNSPDAIDRMIAGQVDKRKKLMRDVIEQGETEESHIADFAMIANAISVLRLQKAEAEQDAVKHENTKARLAAMWERLNSADINLETYDDLLVKQMVESVKVLSREKVQIRFKMGIEIGMELSLL

SEQ ID NO: 12045 - protein, 520 aa, synthetic construct
MARITKIEATKGFIGKKKTRVAAYARVSTRSDEQLLSLETQKEHYDNFISANSEWEYAGLYYDEGVSGTKVEKRDGLLALLKDCEDGKIDRVITKSISRFSRNITDCLEMVRRLASLNIYLYFEKENIDTEHMSSELMLSILSSIAESESRSISQNSKWSIKHRFEEGTFIISYPPYGYDNKDGKMVIVPKEAAVVRDIFDMTINGMGTYVIARELNDRGLQSKKGAKWHPSTVRGILQNEKYTGDVIFQKTYTDDNFNRHNNYGEKNMYLCKNHHEPIISHEIFDKAAAVIEQRAKEKSIEAGIGKYQQLYAFSGKIICGECGATFKRRQHYKPSGDYVAWCCNTHIADKDACSMMYIRDEDIKTAFLRMIRKLQTAHAKVLKPFVEGLKGTNNKERLRQVLTLEEQIEKNAEQIVVLTNLMISGYIKPEIFQAEKNQLNLEADRLAREKQLISKNINGDLTHLDEAQKLLRFVSKKTEITKFEDEMFLEYVNTMTVHSRDEITFNLKCGLDLTERLVK

SEQ ID NO: 12046 - protein, 523 aa, synthetic construct
MNENVTLIPARIQAGNRISKEENKPKLRVAAYCRVSTDSDEQAGSYDVQVQHYTEYIGRNKEWELAGIYTDDGISGTNTKKREGFNEMIDDCMAGKVDLIITKSISRFARNTIDCLKYVRQLREKNIAIIFEKENINTLEASGELLLTIMASLAQQESASLSQNVKLGLQFRYQEGKVVVNHEHFLGYTKDAKGNLIVDKKEAKVVKRIFREYLEGASFRDIAMGLERDHIKTGGKRYKWHQSTVRGILSNEKYIGDALLQKTITTDFIEKTRIKNDGTVPQYYVKNSQEAIIPRDVFTQVQEEMLRRANMTSGRDGQKRRIYSSRYALSSICTCMKCGDIYRRVAWNNRGKKSIVWRCCTRVENGPSGCTAPTVPEEELQQAVIDAMNAVLESSKDVIAILEENILEVISQDNSDEIEKINKTIAEKQKELLELVHGKKDYSKCANEMEELRQNKQLLLVKHAQTEGTRQRINELTAYVKTQDTRITEYDDKLVRKYIDQIKIYDDKFVVCFKAKMEINVLR

SEQ ID NO: 12047 - protein, 506 aa, synthetic construct
MAKPEVSELAVVYARYSSHSQGEQSIEGQLSNARDYAAAHGYTIVHEYVDRAKSGRTDNRAEFQQMLKDTAKRQFSVIILWKVDRFGRNREEIAINKMKCRKNGVRVEYVAETIPDSPEGVILESVLEGFAEYYSLQLSQNIRRGRAESAEKCQSLGGNRPLGYKTGPDKKFVIDENTAPTVKMIFTMYADGKTVTEIVDKLNEMGLRTLRGGPFTKNSLHSILKNKKYIGVYEYQGREIKDGVPRIIEDDVFNKVQEMLKINKRAPAKTWSRADYILTDKLFCGKCGALMFGESGTSKTGVKHNYYICSNKKRFRSCDKKAVRQADIEDTVLNATHELLQDDELLDYIVDRTWEYYLAQDNSQEELRNLQRQLAQTDTAISNLIRAIEAGILTEETKKRMDELTQQKADLKASIADREIARGFHLQKSHIAFYLRSLRDADWSDKEAQKRLIQTFVNAVFVYDDHITLTYNFSGDKSTITLHDMQRFEDGEEFGCRASRSTRNPP

SEQ ID NO: 12048 - protein, 571 aa, synthetic construct
MKQSNNNKKSRDVTAFLYERLSRDDNMDGESYSIGNQKKLLTKVAKEKGYTNLVHFFDDGISGVTMDRPGFADMIQQLEQGKAAAVFVKDLSRLGRNYIEVGRLTEEFFPNHDIRLVAVSDNIDTDEGENELAPIRNLFNEWYARDISKKRRISNKIKGNAGEPMGQPPYGYIKDPENPKRWIVDEEAAQVVRRIYRMTLEGVGTEQIAAKLEEDGVLTPRAYWQSKGINRPGKVKDLPPTHWNSSSVIKMLSVQEYCGDILNFKTYSKSYKNKKRLENDRENWAIFKDVHEPIIERAVFEQVQQKRGKMRKRQAKDGERSMFSGLLVCADCGSNLHFHFNQGNPEIKYFNCSNYKGNRGTCGSTHYVRVDFLEQVVLGEIRRLTKYAGLYEDDFLKEVIGHSRQAEETERRLKEKELKSLLARDDELDGLFERIYEDNVSGKLSDDRFAKMSRRYEEEQKELSEKIKKLRSEIEKQSSRATSTDMFVSIVRKYTRARKLTPRMLNELVEKIEVYNAEKIDGEWVQRLRIHYNCVGEMNIPNEPALPIPAVTVNTRKGVFVSYTTDDRPAV

SEQ ID NO: 12049 - protein, 543 aa, synthetic construct
MPKKPTKHPAKPKRGKKLETEEPGVLYGRYSSHNQKDISVEQQFEKGYELAAEYGIKIIDTYADRAVSGRTDKRKDFQRMMSDAAKGKFRYVIAWKSNRMGRNMLEALINEARLQELGVRVLYVEEDFDDTAAGRFAARSMMNVNQFYSENMAEDIRRGLYDNASNCMVANGHLPYGYKRDDTLHYVIDEPKAAVIREIFTRVAAGEPFVDIMSSLNARGIKTSYNRPWGRSSFQKILSNERYRGIYIYGDVRKEDGIPRIISDELFFKVQEVITTKKNPQGRHRVNGDYLLTGKLFCGKCKSPMVGISGTGRSGKLHYYYVCQKHRTEKTCDKKNVRRDEIEMQVAQAIKDYALKDDVIEWIADSTVAYNERKEAESKVGILEDQLAGTERGIKNIMSAIEQGIITETTKSRLVELESERATIKAKIAAARADIVTVSRDDIISGLEMFRDGDVHDKKYQARLFDTFLVAVYVYDNDLRLVFSFSGNKNTVQIPIESAVNAVENNEAECSFKLCSAPPKNKRHAFACLLFFGFTHFIRSPQG

SEQ ID NO: 12050 - protein, 516 aa, synthetic construct
MARRKKVSPGNRLVAYYRYSGGSQQTEQSIEGQRRDCEAYARQHGLTIVHEYIDRHISGRGVESRLAFQQMIADSSKHLFDLVICWKTDRFARNRYDSAVYKKKLRDNGVRILYAAESSVEGPEGIILEGLMESLAEYYSAELAQKMRRGMRESALKGKAINPNRPLGLTTDEHKRFIIDEKNAPTIRFIFEHYAAGESSASIVDQLNAAGLRTSKGNSFNKCSIPRIIQNEAYHGVYICKAYDVRIDGAVPAIIDDDLWKRAQKMLTLNKQHRAPHSSHADYLLSGKLFCGCCHSLMRGISGHNCRNDVYYYYACGNKADGGTCKKKNIPKDVAENLVVNAICENILRPDTLEDLADAIAAAQQADVNQPDPERAMLEQNLADVRRKINNIIESIENGTASSRLSARLADLEQQEGTLNYQLESLKEVHPPVLDRERILFLLEQFLISPNERTEDYNRRIIDTFVNRIEITDTEMLIYFNLSEASASEKQKNSQSNNCSTGNHLVRVARIELTAS

SEQ ID NO: 12051 - protein, 464 aa, synthetic construct
MPEKILRCAIYIRVSTFEQSVHGKSLQAQKECLEQYATDNNMSIVGVYADEGKTARKELKKRKAIHALVEDVKRDKIDVIIFWRLDRWFRNLSDFYKVQDVLDEHGVRWISVSEPGINMETRDGRLQLNVVLSIGQNEVDTTSERIKFVNEASIRQKKLIFGDANMPFGYKTGVVDGKKCMIKDPETEHMVEDFFNYFRIHNSKKGAVRYMQEAYGIDFSYGMLRTMLSSEFYKGTYRGYPYCPAYLSEKEWDEMQTISKRNIKSTPSGRVYLFTGLIRCPVCGQKLVGTGCSSIINRETREKRTYCYYRCNRALIDHICTYRHRMSQNLIEKYLLENLEREYEKYKVRSNQISEELKKQKKTKDPEKLRKEMERLNLLFQKGRISFDYYDNEYQRLEEEYSVSAAFPEEEETRSLHYVEELLKTDFRQMYDSLSLENRRSFWRSTIREIYLNEDNTIKCVDFI

SEQ ID NO: 12052 - protein, 638 aa, synthetic construct
MALPYVVHNLNCKENYVDAGGMHMNEYNKITALYSRLSVGDEDRDGGESNSIVNQKAFLERYAQQQRLTNIRHYIDDDESGRFFDRSAYSRMMEDVENGKIGVCIMKDLTRWGRDYLQVGNAMEVFRRNNVRFIAVNNGIDSDNPDTLEFAPFINIMSEWYAKDISKKVKTGIRTKGASGKPIATEAPYGYMKDPNNKDFWIIDEEAAEVVRLIFRLFIGGKNRNQIAVYLKNEQILTPTFYLKQHDRGTAKSRPLNEENRYKWNKATLTKILTRQEYCGDVVNFKTTKHFRDKRNHYVDKSEWQITENVHEPIIDRADFETVQRILENAPVRRPNGDGEIHPLSGLMFCKDCGAKMHIRIDYRNGGKRHVAFCSEYHKGKAKNPKCNSPHIIDADLVMQTIADVLKKVAEYSISNREEFEALVRKNLDMQQTDKSKKQQKRIPQITTRLEQIDKVLNKLYEDNALGAIPQDRYEQMSQKYSEEYYTLKAELAELKEQLSAFEDAGGWAHKFLKLIERYAAFTDLTPAILNEFISRIEVHERDKKRAKQAVQHIGIYFSYIGKFENELTQLAEPTEEEIRQMREKIEEAQKEKSRAYHRNYSKEYRAKNLEKRREYERIKAREYRAKRKAQAAALPVS

SEQ ID NO: 12053 - protein, 506 aa, synthetic construct
MTKIITAGIYVRVSTSEQAEQGYSIQTQIRACKDKAYELGAIDILEYADEGFSGAKLDRPAMAKLRDDIRKDKLDIIICYDPDRLARNLAHQLLITDEIEKYCREGLIFVSVSFENSPEGRLFYSMRGAFSAYEREKILERIIRGKKGKLLAGRLGNNHLYGYDFDKDTQMYVINENEAKIIRKIFEWYISGISSEQITDKLNANNIPKIWQGKRYKWSGSTVRTILKNEKYTGIFHGWQYLQVINKCGGYSIKKKDKSQWIDIEIPAIISNEIFEKAQKQIIKNRTYNTRKEKEVHLLTGLAYCGSCGNKIYNHHNIRRKYYVCSILYDKRITDKKICKPKFLHIPEVDELVWNALTKICSSPKLIKEYMTDINNHENTFLNYKEKLCMLDKKLTKLKNSQNDILEWFSDGLIDKETAQKKLENNKQKIEQLNSNKKELLINISNLKEKHTPEDIYNIFKKSAKISIDDKRNILRSILDKIYLTKLDKSKECKSKLSLKIVFVFK

SEQ ID NO: 12054 - protein, 536 aa, synthetic construct
MLKNTKIAVYCRVSSDEQAERGTIDNQVTFARQYADLHHLAIYDVYKDDGVTGTIPLQDRPEGHRLLQDAADERFTLVVFYKMDRLGRSTRVILNAVEALSQYGVGVQSMSEPFDTATPSGRFMLTMFAGVAELDRANILDRMYQGTLRHARLGKWCGGPAPFGYKLEDGYLVISEEPMPGQQLSEADVIRILYSKTIEGWSALRLAQHLNALGIPNKYKLRGNVAAGSGKWHQSKILYILHNTLYYGERSFGKMSKSSNKNIIPQQVPAIVSRETWDAAQAAVEQHSIMPKFIKRRSYLLRGLIRCGLCGHTYVGTYYKRKAGNSIYYVCNAKNTRGVTPEPCKGQTLRGEWIESLVWEDCLRYIKQPDVIAVDEDCRYLQSADDIKKEIDAATAQLKQLDQERQTVIGLCRQGIITAADLDGQLSEITAKQNTLQQTLEGLNSQSIVTKEDAEKRIKEIADILDGFRQQLQSGGELSFDAKQGIIRTLVKQITVHTELQPGAERDIPTVRVCIDYNFTLLSAKTAMLDPYRHGF

SEQ ID NO: 12055 - protein, 582 aa, synthetic construct
MAKHAISIPQNPKAALYIRVSTDMQADKDSLPLQESDLRKLADLNGIKDIEVFSDAGFSGKNLNRPAFRAMMERIRAREFSHLYVWKLDRISRNLLDFLELYDELKDYGVAFASKNESFDTQSPGGEAMLKILLIFAELERKTIAERVTAVMLGRANENKWNGGRVPFGYMPGPVTTDANGKKCKSWPVPDPIEAPIVRAIFELYLREKALKKVAAALNTAGYRSRKGTLWSDTTVRCILKNHFYKGEYVYNRQNPNAGRREDFYRSENDWVVVTGQHEAIVPEETWRRCNEMLSKNRSWLAPIGSLVSAQDKYIFGGLLQCAECGYTMNSKDRTRIHDHTHSSYYYCTGRWKAPVVCTGEHSGYASDRVLLPQILKLIARMIEACANAIKFASAEQLVSYLLNDNLIPGATGIEEAQRIYMIVRAHVKHIYGVDQANQYNPNALLVEQSQKEKEKQERALSRLKRAYLFDDGDMSEAEYFEQKAAIEGTIAKLEKQIKSLSGNDIGADEAYLAQLSKLIMIKKLQNTNSDFDYYKLAKAIGRKPIHDFLTEIISRIIIGEQNRIIKIIFKNGVSITLQYEK

SEQ ID NO: 12056 - protein, 528 aa, synthetic construct
MLKEDGIYYAYLRKSREDHIAEKNGAEDTLARHEFLIKELAARNHIQISRWYKEVVSGETISDRPEMLRLLSDIEMTSPDGVLVVEVERLSRGNPQDQGRVMDTFKYSNTLIITPMKIYDLNQESDEEWIDFGLLRSRMEYRTIKRRMQNGRLTSAMQGKYIGNITPYGWIRQKLKGEKGYTLIPDPETSRIVKLMYQLVTTGNETTGWTPVGTPTVARMLDDMGIPTPRGSAEWECSAISKIIQNPVNIGMVRIGHRKEVIRVVDGVMKKSRPLNHDAVLVPARWEGIVEKDVYDRACSRFAKYARLGTFVEISNPMAGVVRCKLCGRPMSGRPSPKRNMLFCRTRNCPTVGAYTDLVEERLVASLEDFLADYKLHVSSPSLRVLNTESNDNQAILNELHAKLDKLNAQYKKICTLFEQDVYDVQTYLTRSQDVKNEIAAVNARIGAIDGKLAKAQQDATVRENFIPYFEYVLASYKESTDPKYKNKLLKEIVTSVDYSKTTRAGRNQKGMDSFVLDVHVNLQAHPI

SEQ ID NO: 12057 - protein, 512 aa, synthetic construct
MERAVIYARYSSDHQREESIDAQVRACREYCQRKGYLVTKIYADEARSGKSIAKREQYKKMLADSQKNLFDVVVFHKIDRNSRNELDYYLTKNQLISSGIKYEYAAQNIDTSPAGQMVEGILVAVAANYSRNLAEETKKGLKENALKALFNGGRPPLGFEINQENKYIINDYEAGAIRIIFDLYLKGKGYHYIISQLNSLGYKTREGRKFGKNSLYDILRNPKYCGTYTFNKVNKDPSGKRNSHKISENAIIVEDAIPAIISKEDFRKVQEKMSRNKHRTAAYRSKETYLLTGKAFCGICGAAMTGHRASARGKKYVYYTCAARDRLGISACENKVVPRDELEQVVLDTLKEELLSNNFQKNLNHYILEEFHTLASEVSNEADSLAEQKAIAERKLNNLYSIIEQGTADEYDLQRLADVKRELTSIKEKLSKCAAAHSLSDINPRAIERTIKLCRNMLLKNASAETLTLIFDDMVEKIVIGAKKITLQFKLECFDTYGAEGRTRTGTWGNHA

SEQ ID NO: 12058 - protein, 612 aa, synthetic construct
MRAAFLIRCSTKKQDYERQVNDLTRLAKKFGYTSSDNMIFGEHITGKDDASKRDRQSIQRLKDAAINKEFDVVLVSEVSRMSRDPMSGRLYVRQLINMDIPVYFRDIDTWTIDPVTGKKVRDAETIIGAAFDAAWKYIKSMKTQIASGRRDELDNNQMSIGQPFFGYKRYGGRDKGKKNSWVINDDAAKVVVDVFEEYVKDGATLKSTALAITAKYGEQFNKKFSIGTIEHILTFEPYCTGIKVVSLTDPDTEDVDEFEVEIPTIITRAMFDKATTKRATNRTARTPYPKQATYILSKLLKCPICEHSLTPQKRGGDKGDKYRLMNGKVAIRWSCMSGINNATDCSSRITISNEKLEAIIWGLIKQELIGFANLNDEDRVAKVEELTDKITNLEMNIANFTSHISNMDRLIERAYSAYMDAPDSVMDIAKDKYYKTLTKCENERAECKDKIEALSVEKLRLENMRTFFNQPTLPKDAIEKAESDPIKMRNLVMELIDKIYPYRITTYVSPATNRIMKNGIVLLEVYTINGIYNVLYDGNQRNNKVAYYISGVYATFQNGRNKFDAYDTGEYFVISNATLVTNTEDVDLLVTFNELIKICMQNGWEIDYTYKM

SEQ ID NO: 12059 - protein, 590 aa, synthetic construct
MKTVEKIERKLPVLKTRKRVAAYARVSMESERMQHSLSAQVSYYSALIQKNPEWEYAGVFADYGISGTGTKKREEFNRMLAECEAGNIDIILTKSIQRFARNTVDLLNTVRHLKDLGIEVRFEKENINSLSGDGELMLSILASFAQEESRSISENVKWGTIKRFKQGIPNGKFSIFGYEWQDDKLVIVPEEAEIIRWMYAEYMKGASRIEIGRALMDRGIYTRQGKPWVDSNVKVILTNITYTGNMLFQKEYCEDPITKHRRKNYGEMPQYFVEDTHEAIIPMDEWQAVQAEFKRRRDLGPFGNKSLKLSAFSTKITCGCCRKHYRHSGKRNTAGEVYYIWICQTKSQKGVSACPSKNIPEKMLQNTAAEVLGLDKFDEDVFSQQIEEVIVIGDDTLTFRFYDGHEVTTKWQSTAKTDWWTDERRKLWGERHKRKDTNPNRNTFYEFTGFIKCGCCGANYRCQSGKRKDGTPTRSWYCTGPRSECRNPAIRDETMKRLVTEILGLDEFDEATMDAQIESATILDHMVTFHFRDGHIESRDFLDKRHGTPWTEERREKAKKSMKAAWTDERREAMSERIKKIRSEKKWPNP

SEQ ID NO: 12060 - protein, 523 aa, synthetic construct
MAKSVTTIPATLSRFTAAPINSTKKRRVAAYARVSTDNEEQLTSYEAQIDYYTNYINGRDDWEFVGVYPDEGITGTNTKKREQFRQMVADALDGKIDLIITKSVSRFARNTVDSLTTIRKLKEHNVEVYFEKENIWTFDSKGELLLTIMSSLAQEESRSISENCTWGQRKRFADGKVTVPFKRFLGYDMGPDHNLVVNPEQAKLVKRIYGMFLQGQSPFQIARTLTEEGIPSPGGKDHWNPSNIKSILTNEKYKGDALLQKSFTVDFLTKKKKTNEGEIPQYYVKDNHEAIIDPETFEMVQTLMTTRTKGRNRKSSVSIFSSKVKCGDCGSWYGPKVWHSNDAYRKVIWQCNHKFDGQKCATPTLTEDEIKELFLRAANQVIDQKEEFIAIYDQVLSRSLNTTALESELSDLEAEINIAAELIEDCIKENAHVALDQDEYQKRYDALVARFDKAKARHTEVTDLIAERMARKHQIEAYLKNLRSREPLTEFRETDWLAMVDYITVHSKKDIWVTFKDGTEIKA

SEQ ID NO: 12061 - protein, 467 aa, synthetic construct
MIRMARSVTVIPARNRQRETGRRAVQEKKIRVAAYCRVSTDQEDQLHSFEAQVDYYTKYINDHENYEMAGIYADEGISGTNTKKREQFKRMIADCEGGKLDLVITKSISRFARNTQDCLAYSRKLKNLGIGIIFEKENINTLDSTGELLFTILSSLAQDESRNISENCKWGIRTKFKNGEMHLNTFKFLGYDKDENGKLVINKEQAKTVRRIYRDFLIGINPAQIAKELTEEKVPGCNGQTKWYPSTIVGILKQEKHMGDALLQKTYTADFLTKRQVKNNGEIAQVYVKDSHKGIIDKETWNAVQEEFERRERFMKDHGTDRYSYGADCMPFCEKVFCGECKSLFTRHSWKSRGIVQWQCKNHRTDGRVTCSNAYVDNSNLEKGFVKVFNKLVADREKFMERWNQMKTDGSPLEKIRAEQMMEATENEPLGRFVPEIAQLVLAEVTVLGAKKYEFFFLEGSRIKVSV

SEQ ID NO: 12062 - protein, 537 aa, synthetic construct
MAKRKFNKGGEVRLVAYYRYSGGSGQTEQSIEGQRRDCEAYARLHNMTIQKEYVDRHISGKTDDRAAFQQMIADSDKGAFDMVICWKTDRFARNRYDSAVYKKRLRDNGVEIVYAAESNISGAEGIIIEGVMEALAEYYSAELAEKMRRGMRESALKGQAISRCRALGLKTDEHKRFVIDEKTAPTVRFIFEHYAAGESAMSIVEQLNAKGLRTSQGNPFNKSSIPRIIQNEAYRGVYISKSYDVRIEGAIPAIIDDELWERAQTMLKLNRQLKAKNEPKADYILSGKLYCSCGSLMRGMSGHSATGEVYRYYTCPNKDCHLRNIPKDDLEGKVMQSIVDHLLQPESMEALAEAMVEVQKADVEKPNAERVAIEQSLSDVRRRSKNILDAIENGTANVQLCARLDDLTEQEQTLSFQLSSLEKEKPVVFTKEQYLFLLEQFLMEPSERTPEYGRRLVNTFVTSMVVSGRELVINFNVSDETVNKNKKTSQTNLQKESSFGMRLVHLAHQQANYSLYAASGYFSLVEHQFSARLWRTA

SEQ ID NO: 12063 - protein, 523 aa, synthetic construct
MVSFDSIIIYLRKSRSDDPAQTVEEVLAKHEHILQDYCMKEYGKAIPEKRIYREVVSGETIQDRPVMQQLLKELETGNISGVLIVEPQRLSRGDLQDCGQIINSFRYTNTAVITPGKTYNLSDEYDRKFFEMELTRGNDYLEYTKKILSRGRVASVRQGNYICSVRPYGYRKITLGSGKDKCHTLEIIPEEADAIRLMYHLYLDENMGFTNIARTLDSLHIKPLKSDNWSAATIRDMIDNPIYIGKVVWNSRKVVKKWENEQITKVRPRNKGDDVICVNGRHEAIIDEHTFEAARNKRGLTPKIKKFKELRNPLAGLLFCGTCGHGMSMKKYVDKRSHTGKVTTVMLCNQQAVCHTKSAQYEDILAKIKVSLANAIFDFEIKLKEQENNNIDMHELRMSSLLDELNRLYSKDVRQKDAYEDGIYTKEEYIERNSKLQERILNVKEDIADEKKNIPVKIDYEDKIITFKDCLASLDDPNISAADKNILLKSCIDKIIYYNDMPSKPGIGRYIENSFRLEIFLKL

SEQ ID NO: 12064 - protein, 520 aa, synthetic construct
MQYEEYLIYLRKSRSDASLEAMGVDVLERHEQILLDLAKRMNLSIGGIYREVVSGESISARPEMQKLLSEVESGRWEGVLVMEVERLARGDTVDQGIVQRAFQYSGTKIITPTKTYNPNNEFDEEYFEFGLFMSRREYKTIRRRMRAGVTAAVKEGKWPFNQAPYGWQRVKLEHGRGWVLAPDPDEAPVVKLIFRLYTGPDRIGITHICRYLDNRGIKPRNGDTWLECSVMGILRNVVNDQRVGIGRRKVVKQVQNGSVSKVRPHSDYDFTAPGLQPRLIDHDVFLEAQEYLAKNSHKLPESYGIKNPLAGILVCSCCGKKMQRRPASRDGSSGRCPYDVLMCNTRGCPTIGSTLELVERELIQALSDWVAGYQLDPTLEVENKVPEKEQLLSSAVSNHDLLLKQNGNLYDLLEQGVYTTEIFLERSHELQKRIKESEEHIEILKKDLEYEKEKIANIENFIPSCKELLSCYWDLSAQDRNKALKMLLESVEYTKTKRNRKGDKDNPTFTLNLKPRIPRI

SEQ ID NO: 12065 - protein, 512 aa, synthetic construct
MERAVIYARYSSDHQREESIDAQVRACREYCQRKGYLVTKIYADEAKSGKSIAKREQYKKMLSDSQKNLFDVVVFHKIDRNSRNELDYYLTKNQLISSGIKYEYAAQNIDTSPAGQMVEGILVAVAANYSRNLAEETKKGLKENALKALFNGGRPPLGFEINQENKYIINDYEAGAIRIIFDLYLKGKGYHYIISQLNSLGYKTREGRKFGKNSLYDILHNPKYCGTYTFNKVNKDPSGKRNSHKISENTIIVEDAIPAIISKEDFRKVQEKMSRNKHRTAAYRSKETYLLTGKAFCGICGAAMTGHRASARGKKYVYYTCAARDRLGTSACENKVVPRDELEQVVLDTLKEELLSNNFQKNLNHYILEEFHTLASEVSNEADSLAEQKAIAERKLNNLYSIIEQGTADEYDLQRLADVKRELTSIKEKLSKCAAAHSLSDINPRAIERTIKLCRNMLLKNASAETLTLIFDDMVEKIVIGAKKITLQFKLECFDTYGAEGRTRTGTWGNHA

SEQ ID NO: 12066 - protein, 523 aa, synthetic construct
MRFFSYGRKSVFSDKSDSIDNQFRMSREYCDTKFSGQVDSWQQFSDEDFTGANTQRPDLQRMLSFIKNGFCDVLVVYQLDRLSRDVRDFANIYSLLEEHGVMFVSIKENIDTTTPIGRAMMYVTVVFAQMERETIAARVTDNMLGLAKKGYWTGGNPPRGYVRKHIVVDGKKHCSIEPDPDGVRYVTRIFDTFLAMNCSLQGMETRFKNQGIRTESGKFFSTTQLHKILTMPYCVEATPEVYDFYASKGCIMDPGSPREMWDGSVGVIIYGRSTEKNKKHQAQPPEKWTVCLGMHKPFMPAEKWLAVQARFGQNKCIKDAKWPVPLLKGVLRCKCGNLMQVSRKKKVDGTCSSWYYCRKRMRQGVDACDMGQIKCDLLDDEVLELFRGIAADPAMIQKFVKAEAPDEVPDLKAAQARVSACENKIGRLAASLALAEESSASKYIIAEMERLDVELGALKREAALAEMESRRAASSAKDAKATAVEIAKLIHGLEGFDDKEKNAIARAVIQECTWDGERLFITL

SEQ ID NO: 12067 - protein, 447 aa, synthetic construct
MSITNVAIYVRVSTDRQAKKGDSIDEQLSTCKAYIASKENMVLAGTYIDDGISGRKIKRGDFEQLLDDVRLGRVNLIIFTKLDRWFRSLRHYLNTQAVLEANHCDWLAVDQPYFDTTTPHGRAFVAQSMTFAELEAENDSVRIRDVFDYKYRQGEVLAGKAPLGFSIENKHLVPNQDAEKVLHIFQFYAACNSLNQTITHLESDMGIVMTQSNLKTAILKNKKYIGVFRDNDHYCPAIIPLDLFERVQELLAINVKISQKYNYIFSGLLRCAHCGHSFSGATRKIKKKTGGFYKYPLYKCHGAYPSKRCSNRKVVFESCIERYLIANIKPLLQEHIAEYEITSAKVIDYDSRRAALLRKIDKLKDLYVNDIITMDELKRDKEKYIKELENLPRNQEQKDLAPIQKLLKMDLDSIYQTLEPAERRQLWRSVIKEIQIDDHKNLKVIFL

SEQ ID NO: 12068 - protein, 527 aa, synthetic construct
MYELTQSMESLSVDEIIVYLRKSRSDSPEMSVEDVLKKHEEMIQDYANTNFGSPIPEKNIYREVVSGETIDSRPQVKIVLQKIESPQIKAVLIVEPQRLSRGDLEDCGRLINILRYTNTMVLTLTHSFNLQEEYERKFFEMEITRGNDYLEYTKRILRRGRESSAAKGHYIGSVDPYGYRKIVIKKDGVNCHTLEIVPEEANVVKLIHELYAYTPGGIGFTNIAHKLDSMNLKPKKAAHWTPAIISSILCNPLYLGLIRWDTRKVVKYINDGQLEKSRPRSSDAKYYKGLHEPIISQDLYDACMARRGTNPSLRRNKELCNPFAGLLYCGTCDHAMSLKIYKNHNSVSQIMLCNHQSYCHTKSVLYSAFLERFISSMENTIHDFELALLADNGNAQAVNQSIVANLETRLKKLQEKDMRQKDAYEDGIYSKEEFLERNIKTQQEIASTITALTAAKETKENYVDYGEKIRRFRDCINALNDPELSATEKNQFLKSCVSKIIYYNNMESKAGVGRYVENVFSLEIQYI

SEQ ID NO: 12069 - protein, 441 aa, synthetic construct
MKRAAIYVRVSTKEQKEKGLSVDSQLLALREYCSNNGYVIAGEYNDAGISARKKYINRPALLQLINDCKEGKIDIILFTKLDRWFRSVADYYQVQTLLDSYKVPWRAIWEDYETETSTGLFKVNIMLSVSQNEADKTSERTKEAVKYRRLRGDFVGGRCPCGYRRENKKLVFDEETYDAINAMFRTYLSCFSIAKATEAVAEYGLHIATSQICRMLKSPAYAGNASGSECPAYITWDEHLLILTNSTKRNRTPKRSDRVYLFSGLCRCGYCGGRMVARVNRWVKNGQQLYYPFYSCAAHNDKRNLDCPGVNLAETKIEAYLMEHLEAELKMCQSEFELEQENKATCENKIKTLEQKLKRIGVRYEDGDIPFEEYKDKRFAIKKEIAGYKDKIDNARSVPSLPDNWKDLYNSLTPDNKRGFWLNILKEIDITKEAINIVFPV

SEQ ID NO: 12070 - protein, 476 aa, synthetic construct
MKIALYCRVSTEEQARTGESILDQRQALERWARDRGHEIIGVYEDEGFSAHKSYKSRPGLSRLLDDVRDGKVELIAFTKFDRWTRRAADYYELQEVLDRHHVPWTAILEDYETVTADGRFKVGIMLSVNQHEAERTSERIKFTFAEKRRRGEIISGNMPKGYKLVDKKPAKDPETEDGMNVFWRTYLSGAGLKPAIMAAESRGVRLSTSTGSFILRNAEAYTGKIQGVSCEAYITEEEAARVLATRKIKAKASGYTYLFTGLLYCGECAHRMGGHRNFWEHKDGSRGFQVFYNCSHRYRTNQRECSNSVNIYESDIERALVFGLSDAIEAEAVKMEAQIAEMRRQREAAQDVQPVREKLERRKRRAWEAYLDEIIDKKAYQREAAKIDAELAKIVQVPQIDEDAPRKIRETMPEGWRELYFKLDAQHRREFWMQTLQRIDVYPDRSISITVKPGENPFITRIQQPDGYWIEIVPEK

SEQ ID NO: 12071 - protein, 569 aa, synthetic construct
MLGYGYCRYSSDMQDEKSIEQQKMEINEYAQKNNIEVVTFYCDEAKSGTKDNRDSFQNMISDASKNKNIECVLVWKTDRFARNVQDSLYYRNKLKKNGTKLISITQPIDDSTPEGQLMATLLAGMDEYYSQNLASNVKRAQKLKAQNCEFQGGIPPLGYKIVDKHYEIDEKEAIIVKKIFEKYLDGYSLIDIAQYLNNIGYKTKKGKAFGKNSIYDILGNIKYTGTYIYNKAYKHNSHILRNDAFIFNDAIPSIISVEDFNMVQQKRKTKKSGEASSKNLYLLSGLITCGKCGGTYTGSTSVKEKNGNVYKTGYYKCSNRNKLTKCDMPIIKQAEIEDIVIKLLTDKLLNSADIDNVVNKVQLEYEKMYNDSFDEIKHIETEIDNISKQIDNITDAIANGISSISLSSKLAGLENQKELLEDKLLFNKSINHIKIDATYIKELLRKDVLKLSKDVPAKEIIKKWVKKIEVHDNEIIINFSFGTNSVPCMVARGRFELSTHWVWTSCSSQLSYLAISKTKCSVYYNYKIAFCQYLFSILYLVFCILVVSFFFTVCFFFLWNSLFCIYSFI

SEQ ID NO: 12072 - protein, 521 aa, synthetic construct
MPYCMYLRKSRKDFEAESAGQGETLARHKAALLETAQRLHLAVSEIYQEIVSGDSIAARPEMQRLLADVETGKWDGVLVMEVERLARGDTMDQGQVQRTFVYTGTKIITPTRTYDPSDPADAEYFEFGLFMSRREYQTINRRLLAGRERAVREGKWPQGHAPYGYRAVKVPKGKGYMLEVVPKEAEIVKSIFNWYVNGAEYNGAFLRVGARRISTMLNSMGLTTQAGNLWSAPAVRVILKNHAYIGKVTWYKQTLRKSMSNGAVVKKLERTPERTLICDGLHEAIISEELFEAAQARLSADSTGPATKGPLQSPLAGLLYCGLCGCVMARQHEKGKPAYYVCRNPLCRCRGSKLEVVEQRVVATLAHWLAGYEITAKAQAQTVDIGALQSALDGAQRELLAYQQQQTRLYDLLERGIYTEQVFLQRQAAITGEVQRLQTAVADTEAAIAKAVRINASARDIVPAVHAVLDAYPTYTTAQEKNDALRMVLSRVEYTRTVGGFGSDPQDFEVKIFPRLPEPVE

SEQ ID NO: 12073 - protein, 498 aa, synthetic construct
MEIQIREGNSIQKRKLKVCAYCRVSTDADEQENSLENQIRHYKEVITSNPDYEYAGVYSDFAISGFKEKRPGLQKMLADARKGKIDLILTKSVSRFARNTSIVLEATRKLKELNVGVFFELQNINTLSGEGELMLTILAAFAQAESESGSVGAKMVYQRKYEAGIPVQYLERSFGFKKDERGVYIADEEEAIWVRKIYEMAADGYTPAAIKRYLNENGVKTVGGAEWIDSTVFRLIENEIYKGDYIMHKHFVNEERKLVRNRGEVDAWYIEDDHEAIVSPELWQKAQDAIEAKRDYLAEGSVIEEFTEDNYPYMNRIFCAKCGHPLYKRIYSNGNRLNWGCSGTKRYGKSFCEGINIPDGVLRKAWHFDGNMYIDEKPSVKGTKEFTYLKESSWKRRHKKKVPKAIPKNTEEAYPYRKNIFCGLCGSRLVRHVNPKSHKVIWICNGAKRKGVAFCRGTRIPDSVIRGWGEIKKDIYIQRKDDKNGKKRYSYTSKKPTA

SEQ ID NO: 12074 - protein, 467 aa, synthetic construct
MIRMARSVTVIPARNRQRETGRRAVQEKKIRVAAYCRVSTDQEDQLHSFEAQVDYYTKYINDHENYEMAGIYADEGISGTNTKKREQFKRMIADCEKEKIDLVITKSISRFARNTQDCLMYSRKLKNLGIGIIFEKENINTLDSTGELLFTILSSLAQDESRNISENCKWGIRTKFKNGEMHLNTFKFLGYDKDENGKLIINKEQAKTVRRIYRDFLIGINPAQIAKELTEEKVPGCLGQTKWYPSTIVGILKQEKHMGDALLQKTYTADFLTKRQVKNNGEIAQVYVKDSHKGIIDKETWNAVQEEFERRERFMKDHGTDRYSYGADCMPFCEKVFCGECKSLFTRHAWKSRGIVQWQCKNHRTDGKVTCSNAYVDNSDLEKGFVKAFNKLVTDREKFMERWNQMKTDGSPLEKIRAEQMMEATGNEPLGRFVPEIAQLVLAEVTVLGAKKYEFFFLEGSRIKVSV

SEQ ID NO: 12075 - protein, 522 aa, synthetic construct
MALLPRKPAKHPAKPKRGKKLEIEEPGVLYGRYSSHNQKDISVEQQFEKGYELAAEYGIRIIDTYADRAVSGRTDKRRDFQRMMTDAAKGKFRYVIAWKSNRMGRNMLEALINEARLQDLGVRVLYVEEDFDDTAAGRFAARSMMNVNQFYSENMAEDIKRGLYDNAANCMVANGHLPYGYKADETLHYAIDEPKAAVIREIFTRVSCGEAFVDIMASLNARGIKTSYGRPWGRSSFQKILSNERYRGIYIYGDVRKEGGIPRIISDELYFKVQEVITTKKNPQGRHRVNGDYLLTGKLFCGHCKSPMTGVSGTGRSGNLHYYYVCQKRRTEKTCDKKNVRRDEIELQVAQAIKDYALKDDVIEWIADSTVAYNERKEAESKVGILEDQLAGTEHGIKNIMSAIEQGIITETTKSRLVELESERATIKANIAAARADIVTVSRDDIISGLEMFRDGDVHDKKYQARLFDTFLVAVYAYDDDLRLVFSFSGNKNTIQIPIESAVNAVENNEAECSFKLCSAPP

SEQ ID NO: 12076 - protein, 464 aa, synthetic construct
MKSKTLRCAIYIRVSTTEQMMHGKSLEAQKDYLIHYAKEHDMNIVGVYADEGKTARKELKRRKAIQELVKAVERDEIDVILFWRLDRWFRNLSDFYKVQDILDQHNVRWISASEPGINMETRDGRLQLNVVLSIGQNEVDTTSERIKFVNEASIRQGKVIFGDSNMPIGYIVGTVDGVKRMVKDPEKEDLVNAFYRYFRTHQSKMKTLKFIQENYDPTFSYSQLRNMLESDFYHGAYRDNPHYCPAYLTEKEWAEIQEISNRNVKHPASGRVYLFSGMMRCPVCGQLLAGRGGSSIINRKTRETRTYCYYRCNKACIDHMCTYRHNVSQNLIEEYLISNLEEEYNRYKIQSQNIHSKADLPKKKRTPEQVKKEMQRLNLLFQKERIEWDYYNEEYEKLTTELSSLEESDQKPKTNFDNIEKILHNDFRKTYDNLSPENRRAFWRSIIKEIHINTSHEVTGIDFY

SEQ ID NO: 12077 - protein, 559 aa, synthetic construct
MSQEKTKVYTYTRVSTAMQIDGYSLDAQKARMKAYADFNGYQIVGEYEDAGKSGKSIEGRASFCRMMEDIKSGKDGIAYVLVFKLSRFGRNAADVLSTLQVMQDFGVNLICVEDGIDSSKDAGKLMISVLSAVAEIERENIRVQTMEGRIQKAREGRWNGGFAPYGYRLVDGVLQINEDEAPAIRTIFEQYVNTDTGANGLSKYLETHGFQKLARQNGTSPLFSATLIRAILKNPVYCGKIAFGRRKLEKIHGTRNEYHQVPQENYLLVDGLHEGIVSEELWNAAQVKLLAQSKRYEPVNRSKTEQAHLLSALVKCPICGAGMYSNKCTKRKKDGTPYKSFSYYSCKHRKMQCGQKCDFNKQIQEEVLDNAVVEVIIKLVSNPKFAAMMQEKINSKVDTTAIEQEIAAAEKQLRQYYSIKSKIMEEIDTLDPDDRHYIIRKSDLDERLYRMYDKIEEAENNLMDARAKKQAIEADKITGDNIYKVLVCFEKLYNVMNPVERKKLMEHLISEIQIYPERQPNGQWLKSIKFRLPIIENGADLCLDNGSHVEVVSCYTKTM

SEQ ID NO: 12078 - protein, 569 aa, synthetic construct
MTEQNEKIVALYVRVSTGYQVDKDSLPFQKKELKAYCEHVLHIDKNCIEIFEDAGKSGKNTKRPAFERMMGKVKSGQVSHVIVYKIDRISRNLVDFSLMYDDFKYNNVTFISLNEQFDTSSAIGEAILKIILVFAELERKLTSERVTDVMIGRAQNGQWNGARVPYGWDWDEEKQCPVHSKKEAQYAIAMYEMYLNGGSTVSIRDYNNAHNIPTKRGGEWTSKTVADFLRNPINKGAYRYNYRESARGRKKPNEEVVFIENAFPPLVEPRIWELVNKRMDENTLKLNTSSMHTIRKNCNVFAGLIVCGKCGVNYQVTAKDRRKGSGFRPSSYACTGKYQKNHCDNLNVSDVKIGPFMINYIAAMVDASKSRKFIKDTRSLEQVLLSHINFSNIAGIANDSLQETLELISGYSASKSALWSAETLSKEQQTDVDSKQSELNERLQKVNRAMERLKKVYLFSDDGMDEKEFLEMKSSLEADRVKIENEIKGLSAPIATNVDQVAFIKSASEFLLMHKINSGEFVDYKELATLDEESLKQFMNSVIDHIVVRERKIVEIVFVNGLSHTLLYK

SEQ ID NO: 12079 - protein, 581 aa, synthetic construct
MAYRFSQQTAAPDTRTVALYVRVSTGYQVDKDSLPFQKQELRNYCRHVLHIEESRLEVFEDAGKSGKNTKRPAFERMMAKVKAGLVSHVIVYKIDRISRNLVDFSLMYDDFKYNRVTFISLNEQFDTSSAIGEAVLKIILVFAELERKLTSERVKDIMIGRANEGKWNGARVPYGWDWDSVACRPVHSEKEAPFARAMYEMYLEVKSTGKIRDYNNAHGVPTKRGGEWTSKTVSDFLRNPLNKGDYRYNYRESAKGRKKPEDEVVYLEGVFDPLVDPELWDKVNKIMDSNRDKRNMGGLHPIEKNCNIFAGLIRCSVCGADYLVGKKDKRRKNGFTPSIYYCGSKTKAIHCKNLNVSDVKIGPFMINYISAMVRVSNERRKIKSPEDLESMLLSDKAVFGEIAGLSSDSLNSTYELLTGKSVTSGALWHADLVDQGGTADGSAEIAELKNQIQKYERAKERLEDAYYFSDDSMSEKEYLEKKNRFDSGRVAAENKLKKLTETHIAAGVDESSFIKSASAFLLTHKIRAGSHIVYSDLAGMIEEESIKEFFNLVLDHIIVKDRRIIEVVFANGLSHKFIYRE

SEQ ID NO: 12080 - protein, 465 aa, synthetic construct
MPEKILRCAIYIRVSTFEQSVHGKSLQAQKECLEQYATDNNMSIVGVYADEGKTARKELKKRKAIHALVEDVKRDKIDVIIFWRLDRWFRNLSDFYKVQDVLDEHGVRWISVSEPGINMETRDGRLQLNVVLSIGQNEVDTTSERIKFVNEASIRQRKLIFGDANMPFGYKTGVVDGKKCMVKDSETEHMVEDFFNYFRIHNSKKGAVRYMQEAYGIDFSYGMLRTMLSSEFYKGTYRGYPYCPAYLSEKEWNEMQTISKRNIKSTPSGRVYLFTGLMRCPVCGQKLVGTGCSSIINRKTGEKRTYCYYRCNRALIDHICTYRHRVSQNLIEKYLLENLEREYEKYKVRTNQISEELKKQKKAKDPKKLRKEMERLNLLFQKGRISFEYYDTEYNRLEEEYVHSSNPCQQKEEARNTRYIEELLQTDFRQMYNSLSLENRRSFWRSTIQEIYLNDDNTIKAVDFL

SEQ ID NO: 12081 - protein, 559 aa, synthetic construct
MRTIRKIERRIPNLKQRKKVAAYARVSMESERMHHSLSAQVSYYSSLIQKNPDWEYAGVYADYGISGTGMKKRQEFLRMLEDAEAGKIDSILTKSIQRFARNTVDLLRTVRHLKELGIEVWFEKENIHTMSGDGELMMTILASFAQEESRSISENIRWRIKKQFEQGNPNGRFRVYGYRWEGDNLVVVPEEAAVVRRIFQNFLDGKSRLETEREFAAEGITTRNGCRWMDSNIRVVLTNVTYTGNMLFQKENVTDPILKKRKKNRGELPRYYVENTHEPIIDKETFDYVQQEMARRKELGALANKSLNTTCFTGKIKCGICGRSYMHNRRTDRGFEEFWDCGSHKLKGRNCGAKGSIPHAVLVKESTEVLGLDDFDEQAFLDRVEKIVVPEYHVMVFCMKNGQKLIRHWVSTAKKDCWTDEYKDRQRAWMKNYMANGKGTRFSVFTTRIRCALCGSSFRRCKTKHDRPVYWRCSKGGKCESVSIREDDLKRVAAETMGLEDFDEDRFRGKVESIEAGKPDCLTVHFKSGRTEEISYTPTPSKRRPKARRKESGEKWQRQ

SEQ ID NO: 12082 - protein, 558 aa, synthetic construct
MNREGKKCVLYPRVSTEMQVDGYSLEGQKNSLKRFADREEMEIVGVYEDAGKSGKSIEGRPAFKKMLSDIKNGLEIDYILVYKLSRFGRNAADILNSLEFVQSYGINLICIEEGIDSSQTSGKLLISVLSAVAEIERENIIEQTMNGRREKARQGGWNGGFAPYGYYLENNQLLIEETEAKAIRIIFEKFGNSDIGLGGVAKYLNLQGIKKIPRQNGKLETWSSHFIRQILDNPVYCGKIAYGRRTREKVKGTKNEYKQVHTDDYILEDGQHEGIVSAELWEKVRAKRIATGIKQPSKVGKDRSHLLTGVLKCPMCGSSMYTNKHAWTNKDGTYKEVYYYICGRNKQERGHHCDYKASLRKTDIEPLVIEAVKELVSDKYFAREIKSRIGIQTDTGNVDKEIANYESKLKEVDLNKARLEREIDNLPADARYRERKIHDMTLRLDGLYDTIVELEERIEDAKLRRSSIEMEAITLENVYKIMKNFGKLYAIMSDEEKKSVISYLIKEIQIYPNGESEMPLKSIEFNFPIYRDGKEVRKVLWERGNTVETVCLLSRKDK

SEQ ID NO: 12083 - protein, 523 aa, synthetic construct
MPNTESFTVNEILVYLRKSRSDSQDMSVEEVLRKHEEMIQQYASTHFHSPIPEKNIFREVVSGETIDSRPQMKNLLKMIESEQFKAVLVVEPQRLSRGDLEDCGRLINILRYTNTTVLTLTHSFDLQEEYERKFFGMEITRGNDYLEYTKRILKRGREASVAKGNYIGSVDPYGYKKTVIKKDGVTCHTLEIIPEEADTVKLIHELYAYTPEGIGFTNIAHKLDAMHIKPKKAAHWTPAIISSILCNPLYLGMVRWNNRKVVKYINEGQLAKARPQNTEAKYYKGLHEPIITQELYDACMARRGTNPSLRRNKELCNPFAGLLYCGTCGHAMSLKIYKNHNSVSQMMLCNHQAYCHTKSVLYSAFLRRFISSMEDTLNDFELAQKSDDGRTQAISKTIVINLENKLKKLNEKDARQKDAYEDGIYSKEEFLKRNVRTQQDIASTIIALEDARAKKADIIDYEEKIRRFKDCLHALNDPELSAAEKNRFLKSCVDKILYYNNMESKAGIGRYIENVFSLEIQYK

SEQ ID NO: 12084 - protein, 527 aa, synthetic construct
MYELTQSMESLSVDEIIVYLRKSRSDSPEMSVEDVLKKHEEMIQDYANTHFGSPIPEKNIYREVVSGETIDSRPQVKIVLQKIESPQIKAVLIVEPQRLSRGDLEDCGRLINILRYTNTMVLTLTHSFNLQEEYERKFFEMEITRGNDYLEYTKRILRRGRESSAAKGHYIGSVDPYGYRKIVIKKDGVNCHTLEIVPEEANVVKLIHELYAYTPGGIGFTNIAHKLDSMNLKPKKAAHWTPAIISSILCNPLYLGLIRWDTRKVVKYINDGRLEKSRPRSSDAKYYKGLHEPIISQDLYDACMARRGTNPSLRRNKELSNPFAGLLYCGTCDHAMSLKIYKNHNSVSQIMLCNHQSYCHTKSVLYSAFLERFISSMENTIHDFELALLADNGNAQAVNQSIVANLEIRLKKLQEKDMRQKDAYEDGIYSKEEFLERNIKTQQEIASTITALTAAKETKENYVDYGEKIRRFRDCINALNDPELSATEKNQFLKSCVSKIIYYNNMESKAGVGRYVENVFSLEIQYI

SEQ ID NO: 12085 - protein, 525 aa, synthetic construct
MPYLIYLRKSRADMDAEAHGEGETLARHEKVLLALAKKMELNVTAIYREIVSGETIASRPKMQQVIQEVEEGLWEGVLVMEVERLARGDTKDQGIVAEAFKYGNAKIITPLKVYDPQNEYDEEYFEFGLFMSRREYKTIRRRLERGRLASIKEGKYIAAAAPYGYERVKIKGDKGFTLKIVPEEAEIVRLIFSLYTKGEIQENGKYKRLGMYLISKRLDSLGIPPRVSQYWSRSTIKDILINPTYIGKVRWQWRKVEKKIVDGSIVRNRPKDHNCMKIDGLHEPIIDEDTFNLAQDIIMHQKNISVVPDKVLMNPFSGLVICEKCGAAMTRAASNTKINYPVLRCPNRYCNNVSAPIYLIERQLILSLKQWIMDYELPWQDNAEENTLLEATLTSIKKIESKLSTLNKQLLSTYDLLEQGIYTTDVFTERNRRIANQIAESKKYLQELQIQYNNHLLQEKARRDFLPSVRHIIDVYDTLEDAEAKNALLNNVIDHMTYLKTERNGKGNLDNINFELTIYPKIPLT

SEQ ID NO: 12086 - protein, 545 aa, synthetic construct
MTNAVIYARYSPGPNQTDQSIEGQIHECTRFCEDNDLRIVGTYIDRKQTGRNDNRADFQKMLRDSSRHGFSTVVVWKIDRFGRNREEIAKNKAVLRMNGVRVLSAKEHIPDGPEGIILESVLEGLAEYYSANLSQNIKRGMRESALKCQFNGSGLSTGYTVDADHKYRIDPDGAAVVRTIFEMYDGGKKIADILRYLQQSNIKTMRGKEYTHYGISRILRNRVYIGEYHWHDIVVPGGVPQIIDNDLFDRVQKRLEVNKHAPAARRGDVDFLLTSKLICGNCKSTMIGDCGTGKNGARWYYYTCRAKKTKSSKCRKKSVPKEALEREITALTAAYVLRDDVIDYIANKVVEIQKSEHDDKSMLRYFESQLKDTNKAIANIMRAIEAGIITETTRSRLEELEDTKRDLETEIIKEKVARPTIEREQVIFFLEKFRGGNVDDKEYQRKIIDTFVHKVILYDDKITITYNYSTDSTKNAENTVESIESAASAAECKCSNKPSSSPPRKNLVHKNEVFSVIFACGELYCFAVIFGIRRVIFALQASGRI

SEQ ID NO: 12087 - protein, 510 aa, synthetic construct
MIEDARQRKFDMIITREVSRFARNTVDTLQYTRLLKEYGVEVFFINDNIKTFDGDGELRLTIMATLAQDESRKTSIRVKAGQQTSMQNGVFYGNGNILGYDRVGKEMVINPEQAKTVRMIYDMYLSGMGVTAIQYELEKAGRLTAMGKERWFSSYIAKMLRNSFYCGIITYHKEYTPDFLKQKKIKNYGDLEYVQVQGTHEPIVTVEEYEQVQKLMDAKSVIMKNHNKGKRRVGRMQHTTAFGRLMICQCGNKFNLRFHSRDGRTDGVDYQCYTSVNRGSVAKRLNKGISIEHSCESPYIQGWKLEMMAEQVFDRYIENADKVMDLSYAMLEKHIADQEELPDNTDVIQRKQGEIEKLMNKRTNLIEMRAEGDIDKEMFRSKKQEIEDRVAKLTEEIKGLQPEKEPTSNEDYSAKLLELRERLKEYTGFDYSVIPESIVEAFVERIWVSKDEFRWYLRTGSKEKGEFDPDNHIKIGSFTLTIDDAKKYIYSFSTRRRVYKWVDLNVSVWI

SEQ ID NO: 12088 - protein, 531 aa, synthetic construct
MLYDIKSVDLENIIIYLRKSRSDDPSMSVEEVLASHERQLQEYSKTMFGEKIPEEHIFREVVSGETIADRPVMKEIMKLLETGMVKAVLVIEPQRLSRGDLEDCGRIVNTFRYTNTLIVTPPKTYNLSDEYDRKFFEMELTRGNDYLEYTKKILNRGRYASVKQGNFIGSIAPYGYKKVKNVSSHSKSYTLEIIPEEADAVKMMYHLYVDEGFGFARIARQLDELGIKPRHASHWSSSALKDMIENPVYIGKIRWNWRKTEKIMVDGQIVKTRPKTKDPSQWIYVDGKHEPIIDEETYNKAIGKRRINVSVRKSKEIVNPFAGLLFCGKCGKAMSYKRTYNRKKDGSKAYCLSMLCNDQAVCKTKSVKYDALEDRVIQVLKDSIADFELKLENDDGNAHKIQMDLIQDLQNTITNLKQKDARQKDAYEDGIYTKQEYAVRNAKVQEEIAEAKKALANAQNTLPPSVDYNEKIIKFTDCLNAFHSPDVSPREKNNLLKACVSKILYYNDGVSKVGIGRHVENKFNIEVTLRL

SEQ ID NO: 12089 - protein, 565 aa, synthetic construct
MAVFAQAVRPDFNNDVADVVIYSRYSSIGQNDQSIDGQIDACMQYAAQRGFRVVGQYIDRAMSGTHADSRPEFQRLIRDGKKGIFKYVLVWKLDRFARNRYDSAIYKNELKKHGVKVLSVTEGIDAGSDSIILEAVLEAMAEEYSRQLSQNVRRGMRQNAEKQLTLGGNTPLGYRVEDKRLVVDKDEAEIVRFAFRSYADGMTKTEIAKECNRRGWRTRSGRPFTLSSFSVMLKNQTYIGTYTFKDELAVEDAVPAIVDRSTFDKVGAMLERNRRAPGRVKAKEDYELQGKVFCGYCGSPMVGESGRGKCGNTYHYYACATRKKVHTCQKKNEKKGFLEWYIVEQITTSILTDQRIHEIAAGVVAEYNRSFDAGNVRELEKKIRAMDKEMDTLVDTLIRTTAAPAVTKINERIDLLAIQKEEAEVDLAKLKVASRITLSEDEIIAWLQQFVHGDPMDPDFRQRVIDIFVNSIYLYDDKVVMYFNIKDASQVSYIEMQENLKDLEGSDLNGCGVPARSLCSLRTQASLFFSGPSPASSLPISRHRPVKFQATSTITISSSLLSGCR

SEQ ID NO: 12090 - protein, 497 aa, synthetic construct
MKNYFNTAAIYARVSTKRQAKEGFSLASQIKACKKKASELGAINFREYIDETSGTTLKRPALTKLRNDIKKGDIDIIICYDQDRLSRKLGQQLFITEEFEKFCKNLIFVCGDYKNSVDGRLSYLIKGAIAEYERERILERCIRGKKEKFLKGEITNSHLFGYKYNHKKKTYDINEDEANIVRRIYDLYINGMSSRQILMLFQAENIPKFFRGKSVGWNDPSVILRILKNDSYTGVFHAFKHNTPKEKNRYKDKSEWINIPIPAIIDKEKFELANKKIKENTDNSSRNTKRIHLLSRIAYCTCGRSIYSRTANKKDYYICASKNYKKKDESEYNKCINSRFMLSDKVDKIFWQALCKICISKKSIEDYINQQKSDIKIDKIILQIKNIEDNIIKKKKEQSKIIEWFSSELIDDNVAKEKLEKVNKILISLKKQKEELEKSINIKNKPEKIFNIFKNEKKITLEEKRSLIKKIVDKVYIERIDNNKNSKMNISIYIIFK

SEQ ID NO: 12091 - protein, 512 aa, synthetic construct
MLAEYLEKIKSRNNVTILKAALYARYSSDMQRGESVDAQIRLIKEFAEKNNIVIVKQYVDEAKSAKWDSRESFQQMIKDSKTSEWQVVIVHKLDRFARNRDDSTMYRIQLRRYRKYLISAVEQLGDSPEDQLLEAMIEAMAEFYSKNLARETIKGLTENALKGKHCGGIPPLGYELDEFNFYKVNEFEAQGVKLIYSLFLEGKSYTEIIAEINLLGYRTKRNRLFTRNSLYEILRNEKYTGTFIYNKMESRDEFSGVRSRHKYKPENEIIKVENMIPEIISKEDWKSVQTILNRRKKAYTNHAKEEYLLSGKIKCGECGGNYVGKRTFNSRGVKYVSYICNRKRNPNYKCSNSCIKRDWIEEKVIKVVKDFIRKFNEAYFDEIQHKYIEEMQDKKQKEVKVLQNELNRINADIERIVEAIAKAPLESLIEKLQVLENQKNGLKENINKIQQVPDFEVTIQEMKSLIKKAEKMLEENSVPFKELIDLVVKEIVVNRDNIQIYMCFDKKFIQER

SEQ ID NO: 12092 - protein, 494 aa, synthetic construct
MRVVGYARVSTREQADHGYSIGEQNSRLRAYCQAKDWTLLRVIEDPGFSGAKMQRPGLQQVLEMVRRRECDAVLVWKLDRLSRSQKDTLYLLEDVFLANGCGFVSMLENFDTSTAFGRAMVGILSVFAQLEREQFKERSAIGRVGRAKAGLFHGGGYAPIGYDYYTKEDGGQGLVVNEYEAMQVREVYRLYLAGWAVHKIQVYMHERYTTKNGCWASDTTVRSVLSSPIYLGRITWAGKTYEGQHEALVSQNDFDQVAARRESLKWQPAEPRAACDLIKNSPFRSTHILGGITWCARCGARYFASGNYSGRGENRKYWPYYTCYSVAKSSKKMIKDPNCKNKRWAVGKLDAIILAEISRLEFDPAALAKAAGPVDVSGVEEKRRVLEARVAEVRPQMERLLDLCQTGGLPVASVSGRLAALQKELDALNGELSGLAVPETVDRLAVAQEMLAGASAVIENGTPEQKRALVHSLIGRIDIDGEDITIHWLFAPGN

SEQ ID NO: 12093 - protein, 510 aa, synthetic construct
MSYFIYARKSRKDAELEALGIDVLERHITTLLELAKTLSLPIGAIYREVVSGDSIDARPVMTQVLSEVEACMWDGALVMDVDRLARGDTIDQGRVQRAFFYSNTRIVTPNKTYDPANEYDNEYFEFSLFMSRREYATIKRRMQRGRERSSSDGYYVGNVAPYGWERVIAPDGKHYSLTPSQTEAPVLDLMYDLCGNKQYGYQKACTYMTNMGILARSGKPFSPSTLKGIISNPANIGKVRWGHRKTVRAVKDGRVVKSRPKATDYILSDAAWAPRISPDLFKRANQPKGCFSAPVRNDRPIQNLFAGLVRCSQCDRLMVRKKAQTKTPYDMLICQYTECSTVGIRIDELEEALLGWLKDYIAKYEFADTHEEDTAAIAAKELIVTNFETEHQTLLKQRESLFDFLEQGIYTKEIFIERSNALEQRIRDCMNNITAAREDLHTTIARQANRKNFVPKCKNLLSEWDSLTVSEKNSALRQLIDRIVLTKTKRNKKNQKNSEFTIDVYPKVPK

SEQ ID NO: 12094 - protein, 456 aa, synthetic construct
MRNKEIAPALVRVALYIRVSGEEQKIKGLSLEAQQERLEAYARERGWVIVGIYIDAAKTARKNIHKRTEFQRMMDSVKRDEVDILLFARLDRWFRSVADYYKVMEVLQAHNCDWKTTDEEYDTTTANGRLYINVKLSIAQNEADIDGERIDVVFDSKIAHGTVVSGSAPFGFRVNEEKRLEVVPEDAAIVQDAFNYFENTVSQRATVRYVRETYGVNWCDATFRRMLKEKLYTGVYDRGGRYNDQFCPAIISRQQFDRVQALLTRNVRSAPSGKVYIFTSILTCAECGHKLVGYKSSDYFYYRCNQHFQRGRCSHNHSAREDVVEQWLFEHLVEELERCQLEWDVEAAKKKASVARTDKAALKRKLTKLKELYVNDLIDIEDYKKDYQIYVSALNQIPEPAQEAPPDFAAVRRLLDNSFRTIYDTLTREEKRTLWRSVIKEIRIDNDQNITGVVFG

SEQ ID NO: 12095 - protein, 528 aa, synthetic construct
MAYCIYLRKSRADRELELQGFGETLKRHRDTLIELAKKKNLPIGEIYEEVVSGDSIAARPQMQRLLNDVSDGKWEGVLVMEIERLARGDTSDQGIVTKTFTYSNTLIITPMKTFNPTDEFDQEYFEFGLYMSRREYKTIKRRLHAGMEASCKEGNYIHHTPPFGYSIVKNKKSKGYRLEPKPGEAEIVKLIFQWYTKGILKEDGSYELLGTARIADKLNSEYSIKPLGGVWTIPTISTMLRNEHYLGYIVFGKKKRKKVVENGIIVDKWTRNESYGLYKGKHPALVSQDTFNLAQERLSRNPRRPSKTITNPLAGVIKCGMCGRSMYRRPYQKRGQSASLICSEKTCHNVSSAFYLVEDALLTAIKEWIDGYEIKEEANKYDTSVLESKTKLLEEQQKQLITYKNQLTKVFEAYENGIYDSDTFLNRQKTVSESISSTEEAIVKLNKEIANEREIISHQEEIIPKAKKILEIYKTSDDVQLKNDLMKSILDKVVYTKTANGHFKDQRQDDFKLELFPKLPKNKGNSSK

SEQ ID NO: 12096 - protein, 492 aa, synthetic construct
MNVAMYLRKSRADENNPLETLERHKEILLSYAKDNNLTVIDIFEEVISGGMLYNRTEMLKLLDAIPSHIYDAVLCIDLDRLGRGSAADSEKIFDVLKENDVKIITLKKIYDLNNEYDEDYSEFEMFMARKELKFITRRMNRGRIKSINDGCFVSGAPFGYRNAVINKKHTLEVYEPEAKYVRMIFDMYVNQSMGITSISRQLANLGVLSKKNTPLHPTTIARMLRNHTYIGKIVWNKSKSVKGKNTQEKTSKDDWLYVSGLHEPIIDEDTFNKAQDIINLKYKPPMRTGTLQNPFAGLLKCANCGRAIVINTSNETVEKYRLCCRTLGCNKASALSIVEDKVFEVLTKEFKDIELSLKNSRQSHNKDKFSCLDTIATLETELKKLDKQQLRLYDLLEQEVYTKELFIERNNAISDRRKKINATIAQEREKFKLVDTTSIEDRLPLLRELLTNYNSLSADEKNSILKNFVKKIEYKREKSAPEGDIFLKIYYK

SEQ ID NO: 12097 - protein, 536 aa, synthetic construct
MPRKKKLQEVGGLRLVAYYRYSNGGQQTEQSIEGQRRDCEAYAKAHGYKIVHEYIDRHISGKSDSRPAFQQMISDSDSHLFDAVICWKTDRLARSRYDSIIYKTRLRRNGVKILYAAETVVDGPEGIIIEGLMESLAEYYSAELAQKLRRGQRESALKCIALGGNRSFGYDIGPDKHYCINEKQAPAVRYIFEQYAAGATAADIVRELTARGYRTSRGNPFNKNSICRIITNEMYLGVYKYADIRIEGGVPAMIDRELFNRCQTQLAFNRAHGGGKGAPRADYVLVGKLDCGLCGHAMKGASATGHTGSKHYYYTCTQHVEKKCPKTSIEKNYLEQVIVDGVAKYVLTPEKISQIVDCMMELQAKEQEPKGNPEKDALEAELAECRRKQNNILEAIEEGGSARLAARLRALEEQEAQLTFALGEINNAPAPPQFSREALTFMFEQFRREEDEVDEEYRRRILDTFVSSILLYEDRAEVKFNITDQKTGDFERVILPISANKKPPEDDDIPSSSEGSTALRLVEAMGVEPMSEKSSV

SEQ ID NO: 12098 - protein, 504 aa, synthetic construct
MNGVIYARYSSENQREESIDGQLRECTAFAQHNDIQIVGEYIDRAFSAKTDNRPSFQKMIKDSAKGEFDVIIVWKLDRFARNRYDSAHYKNILKKNGVKVVSATEAISSGAEGIILESVLEGMAEYYSAELAEKVSRGMKENALKCKYNGGSVPLGYYIDESKHFQIDSSVAPFVVECFEHYADGMTMKQLRDELNMKGVKNSRGGKLSIDVISRMLTNRKYLGEYTFQDITIKDGIPAIVSTSLFEKVQDRLTKTKKAPSSHKADDDYILTTKLFCGKCKSFMVGESGTNAQGKKYRYYKCVNHKKHQGCDMKSIRKDLIENMTIKYIREFLNDEDLINTLIDLAYDAQHKENEQLPLLRKQLAQTEKGIKNIVDAIEQGISTKSTRERLLDLEQRKNDIEMSISKESIENPMLTKKQFKFWFDQLKKLDISKSEQRQKLVDLFVNSIIIYDDHIKFFFNYKEHTETITFDELNNCSDLPDSPRPKKEIPDERYLFLFSMHKT

SEQ ID NO: 12099 - protein, 462 aa, synthetic construct
MKRQTAKLNDKLLLRVAIYIRVSTDQQAQDGDSVRDQLATGQKYIENHENMILADTYVDDGISGQKVKRDDFQRLMNDVRAGSIDLIIFTRLDRWFRNLRHYLNTQDVLDKNGVSWTATEQPYFDTSTPHGRAFVNNSMIWAELEAQNDSDRILSVFDDKVENSEVLSGSTPLGYRIENKHLVPDDDAPTAAAIFEYYRSNGNLAMTLRYMETEFGLIRSSASLKNMLTNTKYIGEFRTNKNYCPAIIDRDLFDDVQRLLKINIKSGKNHDYIFSGLVVCEECEHTMSGCQQRNSRILADGTRVVYKYNSYRCRQGITLHRCPNHKVMLESTMEKILLARIRPELENYIAEYEVANRPAMRTDSKRRNLEHKMQKLKELYLNDLITMDEFKVDREKLMQQLDKIKSDDSQPMKDLSYLKNFLKTDFENIYVSLSIPEKRELWRSIIREIRVDHERNVRIIFL

SEQ ID NO: 12100 - protein, 520 aa, synthetic construct
MKNVTKINKVDFSVFKKTRVAAYCRVSTDSDEQELSLETQKNHYESYIKANSEWEYAGIYYDDGVSGTKTAKRDGLLRLMEDCEKGLIDLVITKSISRFSRNTTDCLTLVRKLLNYEVYVIFEKENINTGSMESELMLAVLASMAESESRSISENEKWSIKKRFQNGTYVISYPPYGYANDDGEMVIVPEQAEVVKEIFAGCLAGKSTHIIAKELNEKGVPTKKGAKWTGGTINGILTNEKYIGDALFQKTITDASFKRKRNYGEEEQYYCEDHHEPIIDKDTFEKAKEAIRQRGLEKGNCSENTAKYQNRYAMSGKIKCGECGRSFKRRYHYTSHGRSYNAWCCGGHLEDSKSCSMKFIRDDDLKRVFLTMMNKLRFGNDLVLKPLLISITTNNSKKNANSVEDIEKEMKSNEEQRKQLNTLLTNGYLERPVFAEAHNKLIMKYEHLVAKRDLLFRMDDAGYTMEQALKELVDFLNDAKPFTEWEESLFERFIEKVKVLSREKVEFEFKCGLKLKERID

SEQ ID NO: 12101 - protein, 524 aa, synthetic construct
MAGAKNITVIPAKKRVGNTVTAEDKPKLKVAAYCRVSTDSEEQATSYDAQVEHYTEYIRKNPEWEFAGIYADDGISGTNTKKREEFNRMIEDTMAGKIDMIITKSISRFARNTLDCLKYIRQLKEKNVPVFFEKENINTLDAKGEVLLTIMASLAQQESESLSKNVKMGLQFRYQNGEVQINHNWFLGYTKDENGHLIIDEEQAVVVRRIFREYLQGASLKNIADGLMADGIPTATGNMKWRSDGIRKILTNEKYMGDALLQKTYTVDVLTKKRVANNGIVPQYYVENNHEAIIPRQLFMQVQEELQRRAHLRTEDGKTKRVYSSKYALSSIIYCGKCGDLFRRVAWKARGASYNKWRCASRIEKGPKNGCDAEAISESEIQKAVMRAINKTLGGREEFLVQLQHNIEDVLNGDSTATLEYIDQRMAELQEKLVMCVNKNAEYDVIAKKIDALREKKAAVVTKDAEQEMLRKRINEMRHFLQTQTSRITEYEEQLVRRLIEKITVYDDKLIFEFKSGMTIELKR

SEQ ID NO: 12102 - protein, 628 aa, synthetic construct
MKAAFLIRCSTKNQDLNRQTRDLTRLAKSMGYEYDLENLVYGEKITGKDDVTKKNRDSIDRLLRAAKEQRFDVVLVSEVSRMSRDPASGRIYVRLLINMNIPVYFKDIDLWTINPETGKKVRDAELVIGAAFDAAWKYLKSMKTQIASARRNELDNNRISIGQPYFGYKRYEGIDKSKKNQIVVNEEEAEVVQAVYNEYLKEGATLKSTALAITDKYGEQLNRKFSLGTIEHILTYESYATGIKKVNLKDPDTDEVEVFDVSTPIIIDKELYEAAANKRKNNRVKDEPYPNQQVYLLSKLIKCPDCGYTLTPRRKAGEFGQTYRLVNGKPAVSWLCMSGINNITDCTNRTSIANEKLEPIIWELVKKELIGYANMNDEKREEQIRECEEKIEYQNYSIQNFTKEIEKLKKRLSTAYQFSINAAEMAGDDEDMRTMAMEEFNRTAKGVRQEMKNFEKSIEQAKGELEKLRDLKTFYCQPTLPKDYLEQIEGNFTEKRNLVKQLITKIVPYRIITFKKKERESGVKTCNKMITVKNGAVLLEVYTIGGVYNVFYNANSKFQVKTAYYVHGEYATFQNGIRKYPAYDEGEYFVISNANMVMETDDIDEVVTVNEFVDIAIANNWVIEYQYI

SEQ ID NO: 12103 - protein, 498 aa, synthetic construct
MQIEVRKAAMGKEKKRLKVCAYARVSTEASEQENSLENQVSHYTEMIQSNPAYEFAGVYADFGISGFKESRPQFQKMMQDAKNGKIDLIITKSVSRFARNTAIVLKASRELKERNVGIFFELQNINTLTEAGELLLTILAAFAQAESESASESSKMAYLHRIENGEVVAYLERSYGYEKDENGEYRAKEPEASIIREIYDLVIQGVNCTNIARVLNARNIQTVQGAEWTASTVFRIVENEIYKGDVLMQKTFIDGKRHQVRNRGEKAMYYAKDNHPPIVSEKTWEKAQRKLEDMRAERAKHSVIQEFTEENYPYMNHIFCAKCGWPLKPRVYSHGHRLSWDCSGQKRGTKKFCTGIHVLDNDLRKMEIEGNRYFSETVDRYGEVHLKHVGERTWKNKYKKKKFNHKELYPELNEENYPYYKRLYCARCGSRLGRYISHGTVRWICSSYKRKGQAKCPGVRIPDEIIKEWNLPDGKIYIMGKEDKNGEKHYSYTSESAL

SEQ ID NO: 12104 - protein, 465 aa, synthetic construct
MPEKILRCAIYIRVSTFEQSVHGKSLQAQKEYLEHYAKEHNMSVVGVYADEGKTARKELKKRKAIHALIEDVKQEKIDVILFWRLDRWFRSLADFYKVQDVLDEYDVRWISASEPGINMETRDGRLQLNVVLSFGQNEVDTTSERIKFVNEASIKNGRLIFGEANMPFGYKSGVVDGKKCMIKDPETERMVIDFFRHYKKHQGKQDALKYMQRTYGIYFSYGMLKTMLSSEFYKGTYRGYPYCPAYLTEKEWNEIQEISVRNVKRAPSGRVYLFTSLMRCPSCGQKLVGTGCSSISNRKTGKKRTYCYYRCNKALADHLCPNRHRISQNLIEQYLLENLSSEYEKYKIRSNKINEEKKKVRKAKNPAQLSKEMERLNLLFQKGRISFDYYDEEYQRLEEELAFAASDPSLEEPKRNYSELEKLLRTDFKEMYDSLSLENRRAFWRSIIKQIHLNDDCTIKEVDFL

SEQ ID NO: 12105 - protein, 456 aa, synthetic construct
MEKKLTVIPPSQTNGNAKSASSSQCRVAAYCRVSTEQEEQLGSFANQIAYYTDYINEKEGYQLAGIFSDEGISGTGTRKRAGFRSMIAACEAGKVDLVITKSISRFARNTRDCLHYARYLKSLGIPVIFEKEGINTMESSGELLFTILSSLAQEESRNISENTRWGIHSRFQQGIPHINASCFLGYDKDEAGHLVINEGQAKVVRRIFREFLEGWQPSEIARMLNTEHVSGVHGESRWAAVSVVRILQNEKYKGDLLMQKYYIRDFLTKELEKNDGKLTQYYVENDHEAIIEREIWDAAQLEINRIKEFKRNHQIRELGSSSLEPFYGKIFCGCCGGRMMKKSRKSVWRCINSGKEKGGFCKAKPVEGHKLEEYVSAAWAQLVSQRENLLPGWEKDIAQGNALERLRAAQMKELTEKYPAWFQAAKKTRMVIREIIIGGDRGCEILFMDGVRLVTD

SEQ ID NO: 12106 - protein, 460 aa, synthetic construct
MSEIQKPGFSSPYENLLSISTVEKPLSIPAAENPLSIPTAAPLSSIPTAIYCRVSTLHPHQQDSLENQIRHYQEFMKKTPNYILTGIYYDFGISGYKENRPGFCKMLEDARKGCFQQIITKSITRFARNTDTVLKTTRELKELGIDIYFELQKIHTLSQEGELLLTLYAAFAQAESENARWLTKTAIQQKYRKGHPMRQLHRCLGYRKDQEGNLVPDENAELVRQIFQMAADGWSISQITKYLNENKITTQNDRTFSRSTVSRILHNNAYTGDYICQRYYVNNQRKLVRNKGEKQMYYIRHDHPAIISEELWETAQEKLAKKSERSRQGLPSDEIAVTKKAQVPDAPEKRTPKEKIPQKEKSGLIPDKQPLTIANYPYKDRIFCKYCGSRLRRIIARNHSVWWICNGLSRKGKAFCKGVRIPDERLSPLRNIGFSAYIGKELIDGKETYGYSPKPDEWKC

SEQ ID NO: 12107 - protein, 632 aa, synthetic construct
MNTAVNTNQFNYRFKLTDYSLFDRNRARRVAIYGRVSTEHEAQLSALDNQLQWYDDQVRYHPNWDVVAKYIDEGITGTQAKKRPDFLRMIEDAKQGKFDLIVTREVCRFARNVVDTLVVTRELKSIGVEVFFIEDNIWTMDGDGELRLSLMATLAQEESRKTSERVKAGQKISRDNGVLYGNGNILGYDRVGDTYVINEEQAETVRMIYDLYLQGYGSMKIAGILTERKRKTASGLVKWSVSNIMRAIRNATYTGTKCYNKSRSNNFLEQKRINNLDMSTYEYVEGDFPAIISQEIWDKAQEIRESRVKPSLVSATKTTHSKRDSADVWVNKLRCSCGSSFRKNKWHTKLDGKTSYGYQCYNQLNNGNKKKREELGLDTDGYCDTRMITDWKLDFMAKALLEHLWTERRKSVLIAIDLIKCYYKEEKEIGKQSDVVVVQARLDKANTRLTNLIAMRADGEITKDEYQVMRTPIDTEIQELQKVLENIPTDNDNLKGFDLDSIISTLNSLVDFSGSTISHDVINQFVYLVTPTSDTTFEWYVNLNGKPNVKATFTAEGRKKNCLIRLEEIERISSLHRKENESNAQLIKNPCLLTYLHRLLLLRCNSVIFVLILYSVIFWAVPFWDSPFALLK

SEQ ID NO: 12108 - protein, 501 aa, synthetic construct
MKRINAIYARQSVDRADSISIESQIEFCKYELKGGAFKEYKDKGYSGKNTVRPQLQQLLTDIRRGEVEKVIVYKLDRISRSILDFSNMMELFQQYQVEFVSSTEKFDTSTPMGRAMLNICIVFAQLERETIQKRVSDAYYSRSQKGFRMGGKPPYGYRLEEIMMEGIHTKKLVEEPQEAAIVREIFEMYEKPYTSYGDITRYYAEKGVQFYGKELIRPMLAQLLRNPVYVRADMDVYRFFKSHGTNIVSRQEQFDGIHGCYLYQGRDAAADKLQNLKGHMLVVAPHEGLVSSEQWLNCRIKLFGNKTIQANRKAVNTWLAGKVKCGHCGYALMSVKIQSGKQYLRCTKRLNNKACPGCGKIYTEEVENYVYGEMVRKLRDAQTPVGYTKLNENPQVKQIYREIEEIEEEISVLVDSLIGAGETLTNYINQRVEQLDHTRQLKAEEMTTLAENHATPEQMEKVVSNISLWNDIDFDEKRFTVDKMITLLKVLPGSIQIQWKF

SEQ ID NO: 12109 - protein, 547 aa, synthetic construct
MKAAIYSRKSKFTGKGDSIENQIQLCMDYSKSIGIKEFLVYEDEGFSGGNIDRPQFKKMMQDAKDKKFDCLVCYRLDRISRNVSDFSTLIEKLNKLEISFISIKEQFDTSTPMGRAMMFISSVFAQLERETIAERIKDNMYELARSGRWLGGKTPHGFTSKKISFLDENLKERSMYQLEVNDEQMEIVKLIFNKYLELRSLSQLYKYVYHNGIKGPRGGKFDPSSLSGILRNPAYVKANEDILDYLRSLGMEVVGVPDGQCGILTYAKNTSNSIAAIAKHHGVIEPDIWLEVQSILNENKDKIPRISTGKTALLSGLLKCGKCGANMRIMYKGKRNDEDLKYYYVCGTKRSLGVEGCNCKNLNGPLVENLVIDKIKNCNIESVINAFNSNKAKVDTVFSDVRSEIDLFKNSISEKEKLIGNLVMELAKNTGSVASEYIISQIESLNGEIDSLKSKVSELESSSVDINSASLNLDIIVSNLKKFNYEVDDASLDDKRLLLFTIVDSIVWDDASGNLSIVYMGAKMDDLVSLSDGSHFCSDGRSYIYEW

SEQ ID NO: 12110 - protein, 581 aa, synthetic construct
MARKRTNLIGNTPSVRETKVAIYIRVSTIHQVDKDSIPMQKKDLIAYCQLILGTDNYEIFEDAGYSGKNTDRPAFQNMMVRIRKGEFTHVLVWKIDRVSRNLLDFAEMYEELRSLRVTFVSKNEQFDTSTAIGEAMLKIILVFAELERNMTSERVTATMISRANSGQWNGGRIPFGYSYDPKEKVFSIREDEASICRELKDLYLLNRSLAYVSRALNEKGYKTRAGVSWSPHSVWIIASSPFYAGIYRYNRYKGVESRTINPEEEWVMIQNHHPAIFTLEEHQTMRSIMKSNQRNMDNLPGRVHLSTKTHIFQGIMYCDKCGSKMVSTPGRLHVDGYRTSNYGCPLRRNTKKCNNPTVNDIVIGEFVINYILNMLNAKKTFSTINTPDELNAALLSGSVFSEVSSVEENGLNSFFNLLSRYGSDRSYIFSVKSPRKKKAAVDPELSKLRKEKEKQERALQRLQDLYLYSETSMSEKDFIIRKSEISSHLDNINRQLGLMTQDQASFLSDEEFIKQASHLLIQKELKNKKYIYFKKLVSTVDPDILKAYMETILDSIYTADGKITAITFKNGLTHRFIYKDK

SEQ ID NO: 12111 - protein, 440 aa, synthetic construct
MAAYCRVSTDQEEQLLSYENQVRFYTENINSNPEYECAGIYADEGISGTNTKKRDEFNRMIMDCRAGKIDRIITKSISRFARNTLDCLNYVRELKGLGIGVTFEKENIDTLDAKGEVLLTILSSLAQDESRNISENSTWGIRKRFEIGQHKMSTKRFLGYDTDEDGKLVINQKQAAIVKRLYFEFLSGKTVDYIKRIFEREGVVNWDGSAKWQVTTLQSMLENEKYKGDAVLQKSYTVDFLTKKRVMNQGEIQKFYIEDDHEAIIEPWIWACVQLEIERRKRYLEEHGTKSYSNNTENNPFASKIVCGECNKVFTRKGWRSSTGETRKIWQCSERYKVKGIMGCANRHVEESTLEKAFVMAWNGILENKEYFLRKWAEQEKSEYLLEAYRAKDFRILVNNVVIREMDINFMLRVLNCLKIFENGRLLLVFLDGTEIEFIK

SEQ ID NO: 12112 - protein, 426 aa, synthetic construct
MRIRMLEPVQNKIQKKKRVCAYARVSTDSRKQGESLENQISSYERSLRSNPEYELIGVFADQGISGFSRNRPEFQRMVQMAKDDQIDLIITKSISRFARNTAVLLETVRELRLIGVAVYFEEQNINTLSGDGEVMLTVLASFAEEESRNVSENRKWSIRKKFERGEYMINTERFMGYDKDEFGELVINSKEAMAVRFFADMYLLGVGSSRLGQLADFLGIPSVTGGRWTGGSFMGMFKNEKYKGDFHLQKYYTPEDKRNQTVRNNGEVQSYYMEDSHPAILSTEVWDALQEKIEANKRDRNIAQEDSQKYQNRYLLTGMLYCPHCGKTLRRRIGYKKKVEWLCSTYIEEGKRACPGVRISDESAARQDIIEPTVAEEVYRNGKKHYRYTSKAEFENRGRESCKEEKTAGGGVLPGEYRPRRTAIKL

SEQ ID NO: 12113 - protein, 493 aa, synthetic construct
MDSRIDAIYGRQSIDKKDSISIESQFEFCRYELKGGEGKEYKDKGYSGKNIERPDFQRLLQDIRLGLIKRVIVYKLDRISRSIVDFAKLMELFKQYDVEFVSCTEKFDTSTPMGRAMLNICIVFAQLERESIQMRVQDAFYSRCTKGYYMRGRTPYGFDTEPIVMDGIKTKKLVENAEMDFAELMYQMYAEPGNSYGDISRYFAENDIKVYDKSLKRGFIAQLLRNPVYVQADMDIYEYFKAQGVKIESPPEMFTGDNSCYLYQGREGEEPILVIAPHQGRIPSQLWLTVQRKLSQNTTFQNGRKCHNTWLAGKIKCGRCGYALASLNARNGVTYLRCKQRADNKSCEGAGTLTAQSMEAFVYGEMVKKMRKFHTLKGGKEQSYNPKLTAARVALAKTESEIEKLLDTLSGANSLLLQYANTRIEELDAERQKQLRLVADLTANSVSASQIDSITGYLDDWESVSFDDKRKVVDILISQIDATSESVTIHWKI

SEQ ID NO: 12114 - protein, 530 aa, synthetic construct
MTYQEGGEAMKKITKIEGNKVASIIKPKLRVAAYCRVSTGSDEQLVSLQAQKSHYETYIKANPEWEYVGLYYDEGISGTKKENRTELLRMLSDCENKKIDLIITKSISRFARNTTDCLEMVRKLLDLGIYIYFEKENINTQSMESELMLSILSGLAESESISISENTKWAIQRRFQNGTFKISYPPYGYQNIDGRMIVNPKQAEIVKYIFAEVLSGKGTQKIADDLNRKGIPSKRGGRWTATTIRGILTNEKYTGDVILQKTYTDSRFNRHTNYGEKNMYLVENHHDAIISHEDFEAVEAILNQRAKEKGIEKRNSKYLNRYSFSGKIICSECGSTFKRRIHSSGRREYIAWCCSKHISHITECSMQFIRDEDIKTAFVTMMNKLIFGHKFILRPLLNGLRSQNNAASFRRIEELETKIENNMEQSQMLTGLMAKGYLEPALFNKEKNSLEAERESLFAEKEQLTHSVNGNFTKVEEVDRLLKFTTKSKMLTAYEDELFENYVEKIIVFSREVVGFVLKCGITLKERLVN

SEQ ID NO: 12115 - protein, 529 aa, synthetic construct
MVDVVAYCRFSSDNQRVESIEAQERAIKEYCLKNNFNLIAIYKDEAISGTSIKDRESFIKMINDSKKKIFKYVIVHKFDRFARNRYDHAIYEKKLEDNGVKLLSVLEQLNDNPESVILKSVLTGMNEYYSLNLSREVKKGQKENALKCIHNGGAMPLGYDLGEDRRYVLNEKEAEIVKKIYKLYLNGVGYTKIAEILNEEGYKNKAGREFRKTSIRDFLLNEKYTGVFVYGKKDANGRLTGKEIKIENGCPQIISKEDFQKVQNMMGKRKTGARMTAITPYYLSGYCYCGECGGSYTGGYRTRRRNGTIDYGYLCINRKTKVNQCKNKPIIKEKLEGMVFDTIKKEIFTGKRIDGIANGIYKKIMESQSGVEKELMTLEKEIEKVTNKAVNLLNKNLEGNISDEVFNVMNEKINLELTTLKNKKNSLKSPVKIEKEKIFNYLKNLKDNFKNPQIKKSIVEAFIDSVIIYPNHVEIRVRDIPADMDRNGGDDGNRTRVRNYQRHRLLQCLVYYFISQQSLPQTGLTEAIL

SEQ ID NO: 12116 - protein, 523 aa, synthetic construct
MAVSRNVTVIPAIKRIGNNKNSESKPKIRVAAYCRVSTDSEEQASSYEIQIEHYTNYIKRNKEWDLAGIFADDGITGTNTKKRDEFNRMIEECMAGNIDMIITKSISRFARNTLDCLKYIRQLKDKNIAVFFEKENINTMDSKGEVLLTIMASLAQQESQSLSQNVKLGIQYRYQQGEVQVNHKRFLGYTKDENKQLVIDPEGAKVVKRIYREYLEGASLLQIARGLEADSILTAAGKAKWRPETLKKILQNEKYIGDALLQKTYTVDFLSKKRVKNNGIVPQYYVENSHEPIIPRELFMQVQEEMVRRANLRSGKGGKKRVYSSKYALSSIVYCGQCGDIYRRVHWNNRGYKSIVWRCVSRLEEKGSECTAPTINEETLQAAVVKAINELLTNKEPFIQALQKNITTILSEENDNTTDDIDRKLEELQQQLLIQAKSKNDYEDVADEIYRLRELKQNALVENADREGKRQRIAEMSNFFNEQSCELEEYDEQLVRRLIEKVTVFHDKFAVVFKSGVEIDVEG

SEQ ID NO: 12117 - protein, 477 aa, synthetic construct
MSNSSSFPAKISAIYCRESTEKQNIQSLIDMCKKAAKKINLQNIKVYYDVASGYNKDREQYSKLKEDIQNNLVDTLVLYESSRLTRDELEHHIFYGLLRVHNVKVYTVTHGWLDLQDADDTFLTNLLNLLDAREGRKTAKRSKDRMTELAEQGRWTGGPAPLGYKLVNKELVIVPEDAEKVKTIFKLFLDGKTRQSIANFFGYEVKKVRRLLENSVYIGKLKFHSVEIINKKKILHKDYKVLNGIHEPIIDESTFSLVQGKLKNIKVERNTDVYIFKDLIKCTCGRKMYRVVNKYNYLKKSTNEISRKTENLYYCRTSDKYKSLGCGAIGIHEEELFEEVMASLKKIIFSLEVENIDTKFDDYQSQLVLYKKELASLSRKEELLARQLLNSLISEEVFKKLMKELKEKKAFLEEKIKNLTTLITNKKNTNKNSEILKKYFFKLEKEKAPEKINNFLKLIIDEIEMVNDYRFYIHLKF

SEQ ID NO: 12118 - protein, 489 aa, synthetic construct
MLKTVIYARYSSDKQNEQSIEGQIHECEQFAKTHDMVIIKHYIDRALSGKTDDRPSFLQMIKDSSSGLFDAVLVYKTDRFARNRYDSAVYKAKLKKNGIKIFYAKENIPDGPEGIILESMLEGFAEYYSAELSQKVKRGIKENIRKGLSFGGACPFGYKIVNKKYVIDDEQAPYVKKIFEDYAKGRRAIDIFNELNTLPNYAGKGRKWNRSSLNRMLTNKKYIGIYELEDVCVKDAIPPIIDEALFNKVQSRILFNRRHTTRAKVNYLLSGKLFCGLCEHSMTGKTGTSKTKVKYHYYVCSNRHCKQKKYRKELLEDIIIQYTVKDILNPKHFKMIAKKCLEIQQADNKINDILSMLKKQLTATKTKINNLMNAIEAGIITTSTKDRLEQLEQEKYKLELEISTQQLNSNRLLSEKQIIYMLNVFYNKRVDVSFYNQIIDCFIYKIYIYSDKICIVYNLNNSDKDVTYSDINELYKSSHLNSCGSPYVN

SEQ ID NO: 12119 - protein, 458 aa, synthetic construct
MKKDTPVGESLPLRAALYPRVSTEEQAKYGLSIHDQQGDLEEYARAHGMRIVGVFADAGYSARKNVEYRPAMLALLEAVKRDEVDIVLVTKLDRWFRNIGEYYKVQEILEAHNVSWRTIYEDYDTSTAAGRLKINIMLAVAQDEADRTSERIKKVFDGKRARLEPLTGDKPFGYTIEGKRYVKDPETEAAVDAFFRKYMACGSVSATQDYIRSEYGIFIPYQGADKLLRSTAYYGRYFATDGMCPAYITKAQYDAIQLMRKRVMRRPAQNRVYLFSGLIFCPVCGGRMGGRKNQNVVSSHYNCSNHFCRRIPCTNNRSISEAKLERYLLSALDAKFAEYKRQTSRLSGARRKDYSSEIAALKGKLSRLKELYLNELIFLDEYKRDRAGFMAKLDELEAKQAALAVPAPSGEKIDGLLQGDWKGMYADLPKDKQQEFWRIVIKEIRLYPDRHIEFDLNL

SEQ ID NO: 12120 - protein, 496 aa, synthetic construct
MIKERLKKLEVELGHTPAAYLYARISREDYRDDDPKHAIDSQLLILRRVVKENNLFLYKEKAEIESGVTAEEAQKEILDLIKEKKINILIIKDWSRFARNRSWAEKMLDYAELFKKSFILYSLSDREGIYDPVARMYWDLNNVFNAQYVRDITSKMKTAKEESAKQGFYMTRLFGYMRVKKKIYPDTTDPLKPQIVRELHEKFNDGYFINKNQMLLYCLEKYPQYKFDYTRIESFFSNPAYKGTVVYNKVKTYKGKKVLSNSKEEIIEIPNSQHIIPIIPPALWDKNFIRLKQVTTVYRAKEEGNYLLSGKIYCYCGCKIYGNGNYYICGSNAINNRYKKNGEKIICDWKPKLLKEVEEYVLTKIIEEFKNIKKCNTSLDKKIERELEQLEKNIFDSNRYIKNIKDSAKLGVYTPQEAKKELDIITKELERLEREKSILLMKKKKKSIDINKEEVFKKIIEYSKENNRVMLKRLLNAYISRVVFYNRFEAEIYTYF

SEQ ID NO: 12121 - protein, 559 aa, synthetic construct
MKNIKIKCNIYTRVSTTMQVDGYSLDAQKEKLRRYAEFQNMEIVNEYSDEGKSGKSVEGRPEFQRMLDNIENGTDEIQFVLVFKLSRFGRNAADVLNSLQRMQDFGVNLICVEDGIDSSKDSGKLMISVLSAVAEIERENILVQTMEGRKQKAREGKWNGGFAPYGYELVNGELQIAEDEAEVIRLIYDKFIHTNMGIAAIAIWLNQHGYKKKKRQNNTLDAFAASFIKGVLDNPVYCGKLAYGRRKNEKVAGTRNEYRIVKQENYMLYDGIHEGIISETDWELAHQKRVKNGVKYEKIHSLDHEHILSGILKCPLCGSGMYGNVNRKKKKDGTLYKDYFYYACKHRRLMNGHRCDYHKQWSEDKVNNAVEEVIRKLVQNPKFEEAIRKKIGSRIDTDEIEREIENLEKQHRQLTGAKARLGQQMDNLDIMDKFYEKKYQDMETRLYRLYDEIEGVENSIEEVKKRLLNIQQQKISEENVYQFLLYFDKLYDKFTDLEKKEFLNSFVERVDIYDQEQPDGRFLKHIKFRFPVYFGDRETQELCWDNESTVETVCKLVRK

SEQ ID NO: 12122 - protein, 502 aa, synthetic construct
MDIIREDCIYARQSVDRKDSISIESQIDFCKYELKGGSCKVFKDKGYSGKNTDRPEFQKLLGEIRKGRVRRVIVYKLDRISRSILDFANMMELFQEYDVEFVSSTEKFDTSTPMGRAMLNICIVFAQLERETIQKRVTDAYYSRCLKGFHMSGQAPYGYQLEPTVVEGIRTKKMVADPETSQYVKLMFEMYSEPETSFGDITRYFEEQNIKVYGKSLFRTFISQLLRNPVYAQADLELYEFFKSQGAAIVNDASDFAGTNGCYLYQGRDVKEDKDRSLKDQILVIAPHEALIPSDVWLKCRKKLMTNKSFQQGRKPKNTWLAGKVKCGCCGYALKATHVPNSEGYFRCSKRTENKGCPGCGKIRKSEFEEFIFSAMRARFKNFQVRHSREEKVNPKLTAHQIELAQVEAEIEKLLDTLTGANATLLAYANKKIEELDTRRQTISKEIAEMSIETMSPQKEQELSYYLDHWDSIEFDDKRKAVDGLIISISATSDHVQVEWKI

SEQ ID NO: 12123 - protein, 514 aa, synthetic construct
MSTEYALYLRKSRADLEAEAHGEGDTLARHEHILMELAKSRALPIGAIYREIVSGERIANRPVMQQLLSEVEDGRWKGVLVTETSRLARGDTIDQGIVAQAFKFSGTLIVTPAKTYDPTQEADEEWMEFGLFMSRQEYRMIRRRQLAGTRASKKEGHYVPGRPPYGYERYKLDGRGWSLRPVEPQAGVIRTIYDMYLSGKGFSEIANELNAMKIRTPLDKKWVPATTRAILQNPHYAGFIPSAMKVNTKIVQKGKLITKRPVNKNCELYEGIHEAIIPRDVWYSVQQRMKDTVTPRVPRKYQQMNPLAGLVYCDQCGKLMSRHPYRREDKVRFGCENPSCSTVSSLFEDVESLVLQSLREFLHEIELSSPTLLDTKSEEIALQNIDKQLTDINHRLQRTYELLEDGVYSKETFLQRQSAISQDQTALLNTKHEIERKLHNKQTDIEAQKNSAPLIRHVLDVYPTLEDPKEQNLLLKQVIRRIDYHKTVRVYGKAKSDLHLTIHPKIAIPQTSNI

SEQ ID NO: 12124 - protein, 526 aa, synthetic construct
MPKVTMIPATINPLTHLPKVAAQKRRVAGYARVSTDSDEQFTSYEAQVDYYTKFIQSKPEWDFVKVYTDEGISGCNTKKRDGFNSMVSDALAGKIDLIVTKSVSRFARNTVDSLVTIRKLKENGVECYFEKEGIFTFDGKGELLITIMSSLAQEESRSISENITWGQRKSFADGKVHLAYKRFLGYEKGEDGRPTIVESEAKIVQLIYRLFLDGKSQASICRYLEDLGIPSPGGKDKWSKTTVTSILQNEKYKGDALLQKSFTVDFLEKRMKPNEGEVPQYYVEGSHPAIVDPDEWDHVQTEFARRKALGRAYSGKSVLSAKLVCEDCGGFFGSKVWHSTDRYRRTIWQCNGKFKGEERCHTPSVDTETVQRLFIQAYNRMMENRERIIKDCEAMRRALTDFVELDAEIERQLEETQVVAELVKAAVKENASTAQSQEAYLRKYEALTERYEKAAAELKRLQNLRTTQSQQDKAMALYIRTLKKQPVVLREWSATIWTVMVEKAIVHRNGAITFVFKNGTEVKVGE

SEQ ID NO: 12125 - protein, 433 aa, synthetic construct
MSGRITAVSKPPKLERKKRVAAYARVSSGKDAMLHSLSAQVSHYSDLIQRNSDWLYAGVYADEAKTGTKDSRADFQRLIADCHAGKIDMVITKSISRFARNTVTLLQTVRDFKAWEVDIFFEEQNIHTMSADGELMLTILASYAQEESRSASENQKWRIKRNFEEGMPWNGAMLGYRLKDGRYEIVPKEAALVRRIYNEYLAGDGYQAVAKRLTEEGVPSRFGGKWNQTVVSKILSNYTYTGNLLLQKTFRENHITKKTVINHGELPKYHAENTHEAIIDMKTFHAVQTEKARRAAQFNKKPAPRTTYPFTSLLVCDNCGKNYRRKTTKTGIVWVCGTFNTLGKSACASKQIPETTLQQVTAEVLGVKAFTREQLHSRIQSIRVCNGNILIFCFKDGSEVTRTWKDRSRSESWTDEMKEAARQKALERSKHNA

SEQ ID NO: 12126 - protein, 498 aa, synthetic construct
MENKRAVIYARYSSDRQREESIEGQIRECTAFAKRSNLDVITTYTDRALSARTDNRPSFQKLIRDSNKRIFDYVIVYTLDRFSRSRYDSAVYKNKLKKNGVKVLSAKEHIEDTPSGIILESVLEGYAEYYSAELAQKVKRGLTDNVLEHKWTGTCIPFGYKKDDANHLVPDAVTSPLIPRIYEAALGGKSRVEIARWLNEKGYITTYGRRFRPEQVTKILKNRIYTGTFTWDGKQYPAFTTPLITEELFDKVQKTFRKNTRKNPDDYVLTGKIYCGRCGSTMTGMSGTSKSRKTYYYYRCSSMNHSARQAKEPCGAKNVSRDMIEKLIYDKTLQILNTPEWRKEIAHQAMLAQSDDSEELKIKAMEQELSDAKRKITNIITAISNGISSEELAKTLHDLEARKKELESQISHEQLVKKDLTLTEDAIEFYFVQLARKSAGGSDLNVFWDFINHIVVYDDYIEVFYNYVANKKIANPVIIQCSPRNVLVDHQGFEPRTP

SEQ ID NO: 12127 - protein, 581 aa, synthetic construct
MPEKIINCAIYTRKSTEEGLEQDFNSLDNQYEFCTNYLKSLNDPALQLLPARYDDGGYSGGSLNRPALQRLLADIQCGLVNRVIIYKIDRLTREIRDFFKLLDVFEKYNVEFVSVKENQYYNTTTAIGRLMVNMFLVFAQFERENAGDRIRDKIATSKAKGMWMGGCPPYGYDIGDRCLVINETEAQNVRFIYQTFCNTHSLADTTDALNSGGIRTKRYTTRQGRTFGGRKYSVKTVQRILQNPLYKGMVAHRGKQYPGQHAAIIDAVQFDMVQAVFAAHKEKRETRRPKMPSSGGERETAALTGLIYCGCCGSAMTPSYCCKGDIRYHYYRCYRRASKLEDKCPINQIRTSEIDRVVMEQVLAILKSRDFFVQYISHHHEFDVSTAFALFNSLDDVWNSLFETEKRRILRELLAKVTIYKDKIVLDVKKAGLAGVFAELSQNNRLAEVEYKENETFQISVAYRATRLANGAKIIVPATAKEESRFNGSLRLARQIAKGFAWRKMMESGLSLQELTASAKTNERDIRFAMRLSMIDPAIVESVLSGKSPEFLTYAFMKKHPIPLLWSDQRKLYGFEERKQQ

SEQ ID NO: 12128 - protein, 477 aa, synthetic construct
MSNSSSFPAKISAIYCRESTEKQNIQSLIDMCKKAAKKINLQNIKVYYDVASGYNKDREQYSKLKEDIQNNLVDTLVLYESSRLTRDELEHHIFYGLLRVHNVKVYTVTHGWLDLQDADDTFLTNLLNLLDAREGRKTAKRSKDRMTELAEQGRWTGGPAPLGYKLVNKELVIVPEDAEKVKTIFKLFLDGKTRQSIANFFGYEVKKVRRLLENPVYIGKLKFHSVEIINKKKILHKDYKVLNGIHEPIIDESTFSLVQGKLKNIKVERNTDVYIFKDLIKCTCGRKMYRVVNKYNYLKKSTNEISRKTENLYYCRTSDKYKSLGCGAIGIHEEELFEEVMASLKKIIFSLEVENIDTKFDDYQSQLVLYKKELASLSRKEELLARQLLNSLISEEVFEKLMKELKEKKAFLEEKIKNLTTLITNKKNNNKNSEILKKYFFKLEKEKAPEKINNFLKLIIDEIEMVNDYRFYIHLKF

SEQ ID NO: 12129 - protein, 462 aa, synthetic construct
MSFFTPNPQLFGLRVVKYIRCSHDDQVLHGDTLEAQDLILEDFIKVNRMILVDTFIDEALTARKKFNKRKEFVRLLDGVKAHSFDLIIFTKLDRWFRNIGDYHKIQEILEANGVQWKAVTENYDTTTTNGRLHINIRLSVAQDECDRDSDRIKDVFAYKLKNKTYVSGSLPRGLKLDAEKHVIIDPEWNCFALDMFDRFEATCSKRDTQLFLQDKYNIRVCYDTVARYLKNPLFKGQYRDDPDFCPATISPERFERIQKLAIRNVRIRHTQQFYIFSGLLICSSCNHIMTGTVTYRRMADGTEKAYKSYRCNFKAQSKLCDRGKTYREEYVEEYMLNHIRPALSDYVAKYEVTAASAVQKNPVEEMSKIERKIKKLYDLFMDDLIDKDAYRSEYDKFKKQIEELQKCPAAPVRNLDSVRKLLNDDWEAVYNTFSNQEKNVFWKSFVESVLVHEDGSMDIHFL

SEQ ID NO: 12130 - protein, 469 aa, synthetic construct
MKEQLLKCVIYCRVSTEKQEERDSLTNQIERCRGYAVGRGFEIMDIITDVQSGGDDNRPGYLRLKEMVNNRLFDVLLVLEFSRISRNAAEFLNINKTLRDKKIGLISIQQNFDTSTIMGKALAQLSAVISELEKDTVAERVGDRMLQLIKSGRYVSTPPFGYRYNEHKLLEIVEEEAIILRDVFNSFLNGETRNSIAERYHFDYSKVHRWLSSVIYIGKIGYVGGGDNRNRKGYTAIYDGLHQPIIDQATFDAVQAILNKNKKTRNRDIDDYVFTGITYCECGKKMYPSFVKLKKGDKIYPKIRYSCNSKKNKSRFQRKIECHQKGINQDEISVVVKKALLEKLKQENIEYKRKDDTKDKIKIINQQLDIVNSQLSKAKELFYADKISLEEYGKDSDVFNNRKLELLSQLEKLKANIHEEIDSSKIKELVLDKIRDIDKDNAKFKKIVRLAISKIIIKFDKIIEVEFNF

SEQ ID NO: 12131 - protein, 536 aa, synthetic construct
MPRKKKLQEVGGLRLVAYYRYSNGGQQTEQSIEGQRRDCEAYAKAHGYKIVHEYIDRHISGKSDSRPAFQQMISDSDSHLFDAVICWKTDRLARSRYDSIIYKTRLRKNGVKILYAAETVVDGPEGIIIEGLMESLAEYYSAELAQKLRRGQRESALKCIALGGNRSFGYDIGPDKHYCINEKQAPAVRYIFEQYAAGATAADIVRELTARGYRTSRGNPFNKNSICRIITNEMYLGVYKYADIRIEGGVPAMIDRELFNRCQTQLAFNRAHGGGKGAPRADYVLVGKLDCGLCGHAMKGASATGHTGSKHYYYTCTQHVEKKCPKTSIEKNYLEQVIVDGVAKYVLTPEKISQIVDCMMELQAKEQEPKGNPEKDALEAELAECRRKQNNILEAIEEGGSARLAARLRALEEQEAQLTFALGEINNAPAPPQFSREALTFMFEQFRREEDEVDEEYRRRILDTFVSSILLYEDRAEVKFNITDQKTGDFERVILPISANKKPPEDDDTTSNSEGSTALRLVEAMGVEPMSEKSSV

SEQ ID NO: 12132 - protein, 504 aa, synthetic construct
MTAVIYARYSSDNQREESIEGQIRECTAYAEKNDITIVKHYIDRAISAKTDNRPQFQQMIKDSDKKLFDIVLVWKLDRFARNRYDSARYKTQLKKNGVKLMSATEIISEGPEGIILESVLEGYAEYYSADLAEKVVRGQTENILKGRCNGGRGTFGYTLDSERKFHIDPLTSPFVLESFKKYNEGSTMKEIRDWLNENGIKNPVGGAFTYNSVEHMLKNRRYIGELKFRDVVVPDAIPPIIPLELFEDVQEKIAKNKKAPARRKAEDDYLLTTKLFCGYCGALMFGESGTSRTGEVHRYYKCATAKKHKGCKKKTVRKQWLEDLVVNQTMQLVKDDAAMESIIAKVMELQNKENTSIPLYEKQLRDAESGIQNMLNAIQAGILTSSTKERLEQLEETKRELEARIAEEKLAKPKVTEEFIRFWLLRFRKLDMSLKDQRQALVDTFINAIYLYDDKVLITFNYKEGTQTVTFGEAAEAASKGNGSDLDCFTAPSKIQRLTVENAV

SEQ ID NO: 12133 - protein, 530 aa, synthetic construct
MARKKNIAAGQDAVIYARYSSHNQREVSIEQQIAECTKYAAALGLRIVGTYEDRAISGKTDNRPRFQQMMRDAGKGKFQAVVAWKSNRIGRNMLQAMVNEAKLDDYGVKVFYAEEDFDDTAAGRFALRNMMNVNQFYSENMAEDITRGLYDNASKCMANGRQPLGYKRGEDGRVVLDEANAAVVREIFTRVAAGDLFVDIARDLNAQGIKTSKGANWNKGSFQSICQNERYRGIYIYGDVRVADGIPRIVSDDLWYRVQEAMRMKKNPVGTRHRVGAEDYLLTGKLRCGHCGSYMTGVSGTSRNGELHYYYTCQKRRTEHACDKKNIRRDVIEPAVAQAIKMYCLTDDVIEWMADRTVEYWEKHDNDLQIEALEQQLAENKKATSNMLKAIEMGIITEATRTRMVELETEQSRLSVQLNAAKEDVVKIDREQIISYLELLQQGDIHDRDFQMELFKNFLVAVYVYDDNRMKLVFSCMGDQNSVEIPLETGEDPPDGGLSPDAKMFVLTPDSSTKKALYFVGSMVLFFLLS

SEQ ID NO: 12134 - protein, 465 aa, synthetic construct
MKGNAGDTIVKKIDLSPELVRVALYIRVSGEEQKIKGLSLEAQQERLEAYARERGWVIVGIYIDAAKTARKNIHKRTDFQRMMDSVKRDEVDILLFCRLDRWFRSVADYYKIMEVLEAHNCDWKTTDEEYDTTTANGRLYINVKLSIAQNEADIDGERIDVVFDSKIAHGTVVSGSAPFGFRVNEGKRLEVVPEDAAIVQDAFNYFETSISQRATVRYIRETYGVNWCDATFRRMLKEKLYTGVYDRGGRFNDHFCPAIISKQQFDRVQALLERNARSVPSGKVYIFTSILTCAECGHKLVGYKSSDYYYYRCNQHFQRGRCSHNHSAREDVVEKWLFEHLAEELERCQLEWEVAAAKKKASVARTDKAALKRKLTKLKELYVNDLIDIEDYKRDYQIYTAALKQIPEPSIEPPPDFAAVRRLLDNDFKTIYENLTREEKRTLWRSVIKEIRIDNDRNITGVVFG

SEQ ID NO: 12135 - protein, 546 aa, synthetic construct
MPQTAAKKKVSMIPAKPQYDRSIKLSEKKLQVAAYCRVSTELEEQESSYEAQVEYYTRKIQETDNWKMAGIYADDGKSATNTKKRDDFNAMIKDALDGKIDMILTKSVSRFARNTVDSLLTIRKLKEKNVAVVFEKEGVNTLDGTGEILITILSSLAQEESRNISENTRWGVVRRFENGKMIVNHNKFMGYTKNENGDLVIVQEEAEIVRLIFRLYLEGYSAKKISQYLEENGIKTATGQDKWYDSVIFKMLRNEKYMGDALLQKTYTVDFMTKKKVINKGIVPQYYVEDDHEPIIPKELFYRVQEELARRASMNKSAVTRKKNQKSKFSSEYALTGLLLCGDCGQEYRRVTWSRNGKKKIVWRCSNRLTNGTKHCKKSETLEEGVLNRAVMEAINRITRGDGDFVGAFRQNVIRVIGSYNGEQEPDEYDEKIKEKEEEMVALIAENARVGSYTDEFDEGYRRIAEEITILKEEQIEARRKKKLATSYEQRLKDMDSFLEKQTCQIPEFDNDLVRRLIASIKVVSAEKLIIQFQSGIVMEQEIRYE

SEQ ID NO: 12136 - protein, 538 aa, synthetic construct
MAKKVTVINAISESIHTQPQQRLKVCAYARVSTGSRAQAESYATQVEYYTEKIENNPLWEFAGVYADEGSTGTKVKGRDDFKAMIAACEDGDIDLILTKSITRFARNTVECIQTIRKLKAIGVGITFEKEGINTLTEASELMLTILASVAQGESEDFSGNNRWAIINRFENGTFIVGTPAYGYRKAEDGNLIIEETEAEVVRWIFESYLNGMGAYVIAKMLNDHQIPTIREGEKWQDSVVKNILTNPVYEGDVLHQRTYTEKQFPFTRKVNYGQMNMYLTKDAHPPIITHEEAEAVRSIMEYRSRTLNMDGKRSQSRYIFSSRIICGDCGSHFRRQKIYIGKPYEKIIWTCHKHVEDKEFCHMKAIREDVLQQAFVTMWNKLYTNQGTVLEPLLKALTELAASKPDTEEIEQLDNEIHSLSEQSRILNQVMKKGYMDSVLFMEKNNLLAHRLTECRRRKTLLARKYKRTKEIVRTEQLIGLLKQEGYQKEFQEELFDMAVKEIRISLDHEISFCLKNGLVLTEKEGGSEDAVAYTNRV

SEQ ID NO: 12137 - protein, 463 aa, synthetic construct
MRRKTTAPVEKILLRVAIYIRVSTDKQVKDGDSMRDQLATGQKYIDSHENMILVDTYIDDGISGQKLKRDDFQRLIDDVRAGRIDLIIFTRLDRWFRNLRHYLNTQDILDKHGVSWTAIEQPYFDTSTPHGRAFVNNSMIWAELEAQNDSDRILGVFDDKVDNGEVLSGSTPLGYTIVNKHLVPDDDAPTAVAIFQYYRKTGNLSMTLRYMESEFGLVRSAASLKNMLTNTKYIGEFRDNKNYCPAIIDRDLFFDVQRLLKINIKSGKKHDYIFSGLVVCDDCDHIMSGCQQRAGGRVRSDGTRIVYKYSVYRCRQGVNLHRCPNRKLVFETTLEKMLLERIRPELENYIAEYEVANLPALRTDAKRRSVEGKMQKLKDLYLNDLITMDEFKLDREKLLMQLEKINVEDSRPVKDLSYLKNFLKMDFESVYDSLSIPERRELWRSIVKEIRVDHDKNIHIIFL

SEQ ID NO: 12138 - protein, 523 aa, synthetic construct
MRFFSYGRKSVFSDKSDSIDNQFRMNREYCESKFSGQVDSWQQFSDEDFTGANTSRPDLQRMLSFIKGGFCDVLVVYQLDRLSRDVRDFANIYALLEEHGVMFISIKENIDTTTPIGRAMMYVTVVFAQMERETIAARVTDNMLGLAKKGYWTGGNPPVGYVRKHIVVNGKKHCSIEVDPDGARYVTQIFDTFLAYNCSLQGMETRFKNQGIRTQSGKFFSTTQLHKMLTMPYCVEATPEVYDFYAAKGCIMDPGSPREMWDGSVGVIIYGRSTEKNKKHQAQPPEKWTVCLGKHKPFMPAEKWLAVQSRFTQNKCIKDAKWPVPLLKGVLRCKCGNLMQVSRKKKVDGTCSSWYYCRKRMRQGVDACDMGQIKCDLLDEEVLELFRGITADPALIQKFVKAEAPADVPDLKAAQARVSACERKIGRLAASLALAEDSAASKYIIAEMERLDVELGALKREASLAEMESHRAAASAKDAKATAAEIAKLIHGLDGFDDKEKNAIARAVIQECTWDGERLFIKL

SEQ ID NO: 12139 - protein, 506 aa, synthetic construct
MTKIITAGIYVRVSTSEQAEQGYSIQTQIRACKDKAYELGAIDILEYADEGFSGAKLDRPAMAKLRDDIRKDKLDIIICYDPDRLARNLAHQLLITDEIEKYCREGLIFVSVSFENSPEGRLFYSMRGAFSAYEREKILERIIRGKKGKLLAGRLGNNHLYGYDFDKDTQMYVINENEAKIIRKIFEWYISGISSEQITDKLNANNIPKIWQGKRYKWSGSTVRTILKNEKYTGIFHGWQYLQVINKCGGYSIKKKDKSQWIDIEIPAIISNEIFEKAQKQIIKNRTYNTRKEKEVHLLTGLAYCGSCGNKIYNHHNIRRKYYVCSILYDKRITDKKICKPKFLHIPEVDELVWNALTKICSSPKLIKEYMTDINNHENTFLNYKEKLCMLDKKLTKLKNSQNDILEWFSDGLIDKETTQKKLENNKQKIEQLNSNKKELLINISNLKEKHTPEDIYNIFKKSTKISIDDKRNILRSILDKIYLTKLDKSKGCKSKLSLKIVFVFK

SEQ ID NO: 12140 - protein, 477 aa, synthetic construct
MSNSFSSPAKISAIYCRESTEKQNIQSLIDMCKKAAKKINLQNIKVYYDVASGYNKDREQYSKLKEDIQNNLVDTLVLYESSRLTRDELEHHIFYGLLRVHNVKVYTVTHGWLDLQDADDTFLTNLLNLLDAREGRKTAKRSKDRMTELAEQGRWTGGPAPLGYKLVNKELVIVPEDAEKVKTIFKLFLDGKTRQSIANFFGYEVKKVRRLLENPVYIGKLKFHSVEIINKKKILHKDYKVLNGIHEPIIDESTFSLVQGKLKNIKVERNTDVYIFKDLIKCTCGRKMYRVVNKYNYLKKSTNEISRKTENLYYCRTSDKYKSLGCGAIGIHEEELFEEVMASLKKIIFSLEVENIDTKFDDYQSQLVLYKKELASLSRKEELLARQLLNSLISEEVFEKLMKELKEKKAFLEEKIKNLTTLITNKKNTNKNSEILKKYFFKLEKEKAPEKINNFLKLIIDEIEMVNDYRFYIHLKF

SEQ ID NO: 12141 - protein, 528 aa, synthetic construct
MDEQKKTSGSLALNSTPRVITIAPSTPVRDRKLRVAAYARVSSRSEDQLNSFATQNAHYTELITDNPEWEFVDVYADKGITGTSAEKRDDFQRLLADCRRGRVDKILVKSSSRFARNAKECLETVRELKALGVGVCFEEQGIDTSELAGEFLTAIFAMMDQKESENISDNLRWSIDMRMRAGKYNTCTAPFGYRLVKGKLELIPEQVPIIRYIYEAYLSGKTAGDIAAALNLFSKGKLWKPQRIDYILTNERYSGNAFLRKRYTTDTLPRKIKYNHGQKPMYFVEGINEAAISQEVFNKAQELRRRRGDSQVPGIAGQRPLANGWLYCGCCGKALRPKCINRKWYMACRGHEESTELCDLLPIAEEAVVSAVFHLYYKLRHQGVPILTQLLADLQNARKGKLLWSLDIVALNQKIADITRQDRLLAQLKQQGLVGPDIFISRQNELAEQLRAAKLEKERFLEAEEDQTIQQTQELIEALEAGPDFLDAFDGELFRELVDKIIVESNDRLRFRLVNSLELTEPIERTMR

SEQ ID NO: 12142 - protein, 525 aa, synthetic construct
MYLEISNPMDYHVALYIRLSKEDENEGPSQSVQNQESLLREFVQQHRLSVYDTYVDDGFSGTSFDRPSFQRMIGDIETKKVNMVITKDLSRLGRDYIMTGHYMERYFPEHRVRYISLLDGIDTGVDSTANDITPFRAIMNDMYAKDISKKIKSVKRDKQRKGQFIGGKPMYGYKMHPTEKNKIVIDEEVAPVVRRIFALALSGMSCRKIATTLNEEGIPTPATYCGWKVGNPGPYTGLWSSERISEMLKNETYIGNMVQGRSVKISYKSQKCLRQSPENWVVVEGTHEPIIDPETFQKVQLLVNSRKHTRSRTYDFLLKGLIFCHECGYPMAVLNRKNAAGEDRLFFVCRTYQRFTKAGVCTCHSIKEETVNEAVLTKVREVCQAYLNPDRLRPIAEEAVENASKAASCEAEMQALQSKITAFTTNLDQMYMDRLNGLLSEEDFQRIYQKVKMDRTVLEDRLKSLQEQAKQPLNTEEKAKALVKQFLDSALTSRELLVSLIERVELTEEKEIIIKFRFHELEAIS

SEQ ID NO: 12143 - protein, 499 aa, synthetic construct
MSKAVIYARYSSTNQREESIEGQIRECTDFAKRQDITIVGSYIDRALTGKTDARPQFQKMIADSGKQLFDIVIVYTLDRFARNRYDSAIYKAKLKKNGVKVISAKENITDDPSGIILESVLEGMAEYYSVELAQKVLRGMTENALECKWLSGIIPLGYKLDNDKHLIIDDTAAPIVRKIFEMYAAGDRIVDIAKYANSTHLKTAKGNNFSRCSFTHMLKNETYIGTYKWRDIVKTKVIPQFISYDLFYAVQKRIKSRKETNIRGKSENFLLSSKLKCGKCGQFMTGVSGTSKQKRRYYYYQCYASKSKNCDMPLFPREKLEDIILAETIKLLSEPQTIEFIANTVANLPIDENMQLNILETEIAEINNKLKNCIKAVEGGLISNTISKNISEYEKKLSVLEKDLSIEKVLNEPFKITSDHVKFFLYNILQIKNADERRDMIISTFVRDIVLTKDDIGYTVKITYNYNENPSTSLDNSVQKGSQKSSLVAPTRIELVISP

SEQ ID NO: 12144 - protein, 404 aa, synthetic construct
MIIKKVMPKIPVAKKRVAAYCRVSTFRNEQDESFETQQKYYEELIQSHPDWELVKVYADRHSATRVKNRPGFQEMAAAAEAKKLDIIICKSISRFSRNMVDCQQYAKWFRTLGVTIIFEEQNIRTDDPTCDFVLSILAAVAQDESHSISENEKAAYASRFARGEYNLGNNRILGYDCVDGELVPNKDAWIVKEVFRRFIEGESYRQIAKGLEELGAQSLHSKKGFGVETLRYMVSNETCVGDKRLQKKAPLDYLTKKPNPNQKVESNYLWDDHEAIIDRETWDKAQEILEKRKELAKVGIHKTNREHHFLYGKVFCGECGAPFLRRTLKAAGGFKTQSTYKAWNCRNRQKGKGNERCGNRFIKEEELIDAILRELDWLNMDQERFEKEVSKVLVYPDHIEVEKN

SEQ ID NO: 12145 - protein, 503 aa, synthetic construct
MEITVEKVDTGVQKLGFQALSTLKTVRVAVYARVSTDQEIQLHSLEEQMKAFRAKIAQHPGWMLVDVYADEGISGTSVKKRKEFLRMMEDCEAGKVDYIMAKSISRFARNTVECLSYVRHLQSIGVQLYFEKEGLDTATSVSELILTVMAAFAQEESRSISENLKWGIRKRFESGESRWTKTYGYRKTKDGEIVIEPDEAAIVRMIFKMYQYGIPMTDILDELTFIQAPSARGKQTWNKTALKYLLENEKYIGDMRLQKWVSVDHISHRSVRNDSTVIPVYNVRNHHVPIIDRHTYQQVQRIMELKSPHGEYSRYPYFDTNIVCPLCGKKMIPRVMKVNSHKRILGCFDVDGCRGYAVKGYLVDAALLEAYNTLEIKEKKRTVAMQRMLEIKAESPKLDTVQYYWLDDLVGHIEFKQDTMRVFWKCGLESEVALNASKVEEPTHVAELYRNSLDRAQRSENKPVSVVRADKKSVNTREAQRNAAMQTAKNLRAKENGVAANDY

SEQ ID NO: 12146 - protein, 523 aa, synthetic construct
MAEKTITVIPARKRVGSRKQVTEEKPKLRVAAYCRVSTDRDEQESSYEAQVEHYTEFIDRNPEWQLAGIYADDGISGTNTKKREEFNRMIEDCMASKIDMVITKSISRFARNTLDCLKYIRQLKEKNISVYFEKENINTMDAKGEVLLTIMASLAQQESQSLSQNVKLGLQFRYQAGKVQVNHNRFLGYTKDDEGNLVIVPEEAEIVLRIYREYLEGASLFQIGQGLEADGIKTAAGSDYWLQSTLKKILTNEKYIGDALLQKTYTVDFLNKKRVANNGIVPQYYVENSHPAIIPREKFMKVREEMYRRAHMECGPDQKRRIYSSRYALSSIVYCAHCNDIFRRINWNNRGCKSTVWRCLSRVEKDRPSCTARTVKEELLHEVVVRAVNEVITGSSSFIPALQASFERCLGDSNSAAVEGIDAHLLELQQELLKLANAKQNYETLADEIDELRAEKEELLLQEANKEGIRQRIADMMAYLQSEPEEVTEYSEALVRRMIEKITVYDDHFVVEFKSGIEITINE

SEQ ID NO: 12147 - protein, 448 aa, synthetic construct
MERIIQKVTPPARKKAPKLKRVAAYARVSSGREAPLHSLSAQISQYSGMIQKTPGWQYAGVYADEALTGTKDSRGEFQRLLADCRAGKIDMIITKSVSRFARNTVTTLRTIRELRLMGVDVFFEEQNIHTMGEDGELLLTLLAAYAEEEARSVSENQKWRIKSNYEQGLPWSITMYGYRQVNGRLEVVPEEAEIIRLAADLYLEGYGRCKLEDAFAAVNIKGRHGANMGGNSIVDLICNEKIVGDMLLQKTFVVDPITKEVRKNNGEKPQYFVEGSHEGILDRETYEKVLAERARRAAAYKPRSGNYERNRFPFSGKIHCGKCGKSFTRKVLNGNTPYEKRGWLCRTFNQKGKAHCDAKQIPEEILKRVSAEAMGLPEFDEAAFAAKVEEIQVPENGVLVFVFYDGHTVTKTWDNPSRRHSWNPENRQRARELALRQAAERRLAKCQQ

SEQ ID NO: 12148 - protein, 537 aa, synthetic construct
MPAVTATRVTIIPAKKDRLPINVLSSEARKLRVAAYARVSTNNEEQLTSYEAQVDYYTRYIQSKDEWQFVEVYTDEGISATNTKKRDGFNRMVADALAGKIDLIITKSISRFARNTVDTLTTVRKLKEKGIEVFFEKENIRTLDGKGELLITIMSSLAQEESRSISENVTWGQRKRFADGKVSLPYRRFLGYEKGPDGLPVIVESEAVIIRLIYRLFLYGKSPSAIATYLTDEGIPTPGGKKVWRAKVVESILTNEKYKGDALLQKKFTVDFLTKKQKVNEGEVPQYYVTNSHPAIIEPELFDLVQYELKTRKTDGRFTSCLHPFSGRIICGECGGIYGSKVWHSNTENRSLVWQCNEKYRGQHCSTPHLTEGEIKAAFLAAFNIVLGSRDEIIEAYEEVIAALTDTADLDAEQETLENESEVVLGLIQKIISENAQTAMDQEEYNRRYDAYSERFEAARKRLAEIAELRQERNAKKTRIRLFMENMNSHQELVQSFDEELWYSTVDYVTVYEDKRLVFTFRDGRQVEITAELWRAA

SEQ ID NO: 12149 - protein, 543 aa, synthetic construct
MEVAKIPKKIVTVIEPKRSMTVDKEKYRQKKVAAYCRVSTDSEEQLVSYANQKKVYTEMIASRKDWCFAGLFADEGKSGTRADKRPEFNKMINDCLAGKIDYIITKSVSRFARNTVDCLDYVRMLKSKGIGVYFEEQQIDTLKTDSELYLVIYAGFAQSESESISKNITWSVRKKFEEGTPVFIYKRFLGYKKGADGEPEIVPSEAAIVERIFNLYLAGETVDNISKMMQAENYDIPGKTISFSKGMIMNMLSNERYCGDAILQKSVTVDCIEKKRKKNTGEAPMYYVQNNHPAIIDRVTFNKVQEELARRKTKTPGSAKSSITSTGKYSRYALTDVLICGNCGTRYRRVTWSRNGTKRIVWRCISRLDYGKKYCSDSPTIMEDKLQEAIVRAVNKFNKQDNATYKALMRATISEALGLNGDPEEVDMLERKIEALNNKMLALVNESVSSGDGIEAHESEFMTLSQEAELLKQRIAAIQESTAKDNGEQNRLEQIQAIIAERESKCMEYDDSIVRQMVECIKVYPGGKLEIIFGGGYLVEESV

SEQ ID NO: 12150 - protein, 513 aa, synthetic construct
MPEVRLITPITRQNTKKMQVAAYCRVSSNSADQLNSYAAQIRAYKKCIGARDDWELVDIFADEGLTGMKSETRDEFQRMIRMCELKQIDLIITKSISRFARNTKDALAYVRKLKLLGVGVQFEKEGISTLSMGDEMLLNTFSALAQEESQSISMNQRLSIVKRMELGEYVDSNAPYGYRLVDKALAVYEPEAAVVRDIFDLYLRGFSISEIGRELKSRNIPTKAGKESWHPYRIAYMLKNERYIGDSFYQKTYRETTVPFNQHINRGQEDRFYAKGTHPGIIDKDVFNAVQQLIQKRKETFSRTTTQNIYPLTSRIQCSECGSFYRRRSVSGTVKWVCALHKDDSTACDSHYYSEERIYDGFITMVNKLRFSEDNILGQVISRLEMTLAAMKRNNLVARDLSNSIAELNAKLLMLEQLRSKGYLAPEVYQAQANEIGAELAKLKDVRQEKFNSKAASMLEEVKKLKMLIFELEEPLEAFDEKLFLEIVKSIQINKEDEMSVEFLGGLRFKERI

SEQ ID NO: 12151 - protein, 478 aa, synthetic construct
MKKVAIYVRVSSQEQANEGYSIQEQTERLTKYCEAHGWILAKTYTDPGFTGANRNRPALQMLCADVTKSLFDTVLVYKLDRLSRSQKDTLYIIEDIFLKNGISFVSMNENFDTGTPFGRAMIGILSVFAQLERDQIRERVQMGLDARAKEGYFHGGGYAPIGYDYNNGILTVNEYEASLVRKAYSLFLDGLPIHSIYLILEKEYPAGTRFGAVTYSSVKSMLTTILYAGYIRWKGALYPGKHEAIIPYEQFQEVQRLIKRRQIDEPQRLTAFQHTTILGGIMFCGYCGARYYCKNNTASRVSRITQRYYTCYSRGKTSKRMIRDPNCKNKSWNVHKLDAIVLDEIAKLEFSRDFASYDTAPDQSGRIQSIKAALTAANKKLEKLIDLYTDDTIPVHILSERISRLNAEKETLESELSELQEAPEPDLSFDQANKILDSFKDIIATGDNDLIRNMVRSLIDSIIIRGEDIEIHWKFTSF

SEQ ID NO: 12152 - protein, 581 aa, synthetic construct
MAYRSTITTPSAASRKVKAALYIRVSTLYQIDKDSLPFQRQELINLAKYMLGTDDYEVFEDAGYSGKNTDRPSYQRMMTRIRQKEFSHLCVWKIDRISRNLLDFAAMYDELKKYNVTFVSKNEQFDTSSAMGEAMLKIILVFAELERKLTSERVMGVMLDRASKGLWNGARMPLGYKWDTNAKFPVIDADEAVTIRFIFDKYEEVKSTLQISRILNRNHIKTKRGGEWTSKTVNDIVRNPFYKGTYRYNYRESARGAIKNEEEWIIVPNALPAIITEEQWTRCNALMDSHHETKDTSSFRVCHTHIFAGILKCCDCGGGFSSNRDRPRLSGWRPSTYRCTRSAKMQDCPTFGISDVVLGPFIFNYIANFVRLQRKGTNYTVESIEKALLSGKPFENIAGIDSTSLEETLLALKQYNSSSNAANYSPDLLEELPNQSDNGSNIDIELLRQEENKYKTALQRLLDLYLFDPTAMPQKDYLLRKEELEGKLQEVQASIKRNSASTPEAAGATDISFIKKASAFIISQRILSKQDIDFEDLIQKCTPELLKDLVNSTIKEIGIRGRRVEYIEFQSGLRHTFIYKD

SEQ ID NO: 12153 - protein, 525 aa, synthetic construct
MAKRVRAIPATISRYTAVPIDSQKKRKVAGYARVSTDHDDQVTSYEAQVDYYTNYIKGRDDWEFVGIYTDEGISATNTRHREGFKRMVQDAMDGKIDLIVTKSVSRFARNTVDSLTTVRKLKDKGIEIYFEKENIWTLDAKGELLITIMSSLAQEESRSISENVTWGHRKRFADGKVSLAYSRFLGYEKGPNGGLVIVPEEAKTVRLIYKLFLEGLGKTTIAKELTKRGLKTPAGKYKWSVATVSSILQNEKYKGDALLQKSYTVDFLTKKTKINKGEVPQYYVEHDHEAIIEPQLFDLVQEELKRRSKARKYFSGTSIFSTKLQCAECGGWYGAKVWHSNDKYRRIIFQCNNKFRNKTGCRTPHLTEDEIKTYFVRAMNKMITEKKDIIQSIECARKVICDNQHLFEKRDALQKEISILVEMAQNAVERNARVAQDQDDYQKQYDEIINRYNTMKVEYEQLCERIKKRQARYEQLGHFVEELKRRENLLTEFDQSLWCVLVDKMVVKSKEDVTVIFKDGTKIKA

SEQ ID NO: 12154 - protein, 590 aa, synthetic construct
MRKITQVQRPMPVLERKKKVAAYARVSVESERMHHSLSAQISYYSSLIQKNPEWEYAGVYADYGISGTGINKRQEFKQMLEDAESGKIDIILTKSIQRFARNTVDLLRTVRHLKDLGIEVWFEKENIHTMSGDGELMLTILASFAQEESRSISENIRWRIKKQFEKGIPNGHFRVYGYRWEGDKLVIVPEEATVVRRIFQNFLDGKSRLETEREFAAEGIRTRSGGRWMDSNIRIVLTNITYTGNMLLQKEYVSDPILKKKKKNKGELPKYYVENTHEPIIDKETFDYVQQEMARRKKLGPLANKSLNTTCFTGKIKCGICGKSYTHNARTDRGYEEFWECGSHKVAGGNCGAKGSIPQKVLLKECTEVLELEAFDEQAFLDRVEKIVVPEYYVMIFCLKDGRKVTRHWVSTAKKDCWTEELKNRQKAWIKNYMANGKETRFSPFTTRIRCVVCGSVFRRCTQRTKNGSTVYWRCSRGGQCESTGIREENLEQAVAKGMGMPTFDGDAFRKKVEYVEVGRKGSLTVYFKDGRRVETSYIPSGRKMPRHTKEYREYMSKVMKERWTPERKKHVSEKMKKMRKERGKNWRKE

SEQ ID NO: 12155 - protein, 512 aa, synthetic construct
MERAVIYARYSSDHQREESIDAQVRACREYCQRKGYLVTKIYADEAKSGKSIAKREQYKKMLADSQKNLFDVVVFHKIDRNSRNELDYYLTKNQLISSGIKYEYAAQNIDTSPAGQMVEGILVAVAANYSRNLAEETKKGLKENALKALFNGGRPPLGFEINQENKYIINDYEAGAIRIIFDLYLKGKGYHYIISQLNSLGYKTREGRKFGKNSLYDILRNPKYCGTYTFNKVNKDPSGKRNSHKISENTIIVEDAIPAIISKEDFRKVQEKMNQNRYRSAAYKSKETYLLTGKVFCGICGAAMNGHRASSNGKKYVYYTCSGRDRLGTSACQNKVVPRDDLEELVLLTIEQELLSENSLKKLKDTIEMEYQAVANEYADEASSLSEQKAIAERKLNNLYSIIEQGTADEYDLQRLADVKRELTSIKEKLSKCAAAHSLSDINPRAIERTIKLCRNMLLKNASAETLTLIFDDMVEKIVIGAKKITLQFKLECFDTYGAEGRTRTGTWGNHA

SEQ ID NO: 12156 - protein, 528 aa, synthetic construct
MTKRKWGELMKTITKIEEIESVGPAKKIRVAAYCRVSSSSDDQLISLETQKAHYETYIRANPEWEFAGLYYDEGISGTKTSKREGLLSMLKDCGRGKIDYIVTKSISRFARNTTDCLEMVRKLIDLGVHIYFEKENINTGSMESELMLSILSGLAESESISISENTKWAIQRRFQNGTFKISYPPYGYQNIDGQMIVNPKQAKVVKYIFAEVLSGKGTQKVANDLNQKGIPSKRRGRWTATTIRGILTNEKYTGDVILQKTYTDSHFNRHTNYGEKNMYLVENHHEAIISHEDFQAVDAILNQRAKEKSIEKRNSKYLNRYSFSSKIICSECGSTFKRRIHSSGRKYIAWCCSKHISNITECSMQFIRDDDIKTAFVTMMNKLIFGQKFILRPLLEGLRNQNNVASFHRIEELETKIENNMEQSQVLTGLMAKGYLEPALYNKEKNSLVQERERLLAEKDQLTRFVNGNLAKVEEVNHLLRFATKSKMLTAYEDELFENYVEKIVVFSREEVGFELKCGITLKERLVN

SEQ ID NO: 12157 - protein, 526 aa, synthetic construct
MPYCIYLRKSRADAEAELLGEGETLARHEKTLLALAKKLKLPITKIYKEILSGETIAGRPVMQQLLQDVEAGIWQGVLVMEVERLGRGNTLDQGIILNAFKYSSTKIITPMKSYDPNDEFDEEYFEFSQFMSRREYKTILRRMQRGREASVKEGKFAGSIAPFGYRRVKLPQEKGFTLEIEDAEAAAVRLAYELYAYGDPQPDGTFADIGRATIAKRLDQMGIRNRKGGTWATASVTRMLQNPVYIGKVHWNRRPEKKHTENGKIKKTRPLAENYLLVDGLHEPIISEELWNLAQAKMKQHYRPTGVNGIMQNPLAGLVHCSYCGNAMQRRPYLKTGQPASLICHTHFCPQISSPLYMVEGKILEALSLWMKQHEPTWEEESSINVFSTKIMALEHTIADMEQELQGLQFQFEKIFEFLETGIYTPEVFTARNKTLSEKMAEIRSAIEETQAELSNLKAARKNQVSMIPKIKNILDTYETLTPAEKNKLLKEVLDHVEYHKKIKGKKNVSADNFEIILFPKISPEN

SEQ ID NO: 12158 - protein, 520 aa, synthetic construct
MAKVTKIFAEKDEENSKLKVAAYCRVSTDSDEQLESLEAQKKHYQTYIKSNPAWQYAGLYYDEGISGTKMEKRKQLLAMLDACERKEIDLVITKSISRFSRNTVDCLEMVRFLIEHGVFVYFEKENLNTMTMESELILSILSSMAEEESHSISKNNKWSIQKRFEQGTYVISCPPYGYINDGGEMRIVLKEAEVVRRIFNDTINGKGSSQIASELTAEGIKSKKGKKWHSTTIRGMLRNEKYTGDAIFQKTFTDDRFTRHTNNGEEQQYYCRNHHEPIISHEIFELAEQETQRRANEKNIKKSTQKYNKRYAFSGIMKCGECGGIMKRRTHYTGRKEYIAWSCGTHIEDKSKCTLLYVRDDAIKAAFTTMMNKLVFGYKEVLTPLLEGLDENTNYMNTEKQKEFDKQQQAIKERETLLREHFHKNLLSQEIFSKGMADIEQELRTLAQMKEDYLHNQNRGITYLAAARDLYAYCCKSEMHSVYDEEVFKRFVNWIIIFSRDEVGFRLNCGITLRERMVVR

SEQ ID NO: 12159 - protein, 516 aa, synthetic construct
MPKTEEKQAAKAVIYARYSSDRQREESIEGQLRVCEDYARRNNITILNTYADRAMTGRSDQRPEFQMMIRDAATMAFNVILVYKLNRFARNRYDSAKYKHKLKKYGVKVVSAMENIADDPSGILLESVIEGMAEYYSAELSENVLRGMTQNALEGKWPGGVIPLGYKLDKGGRLIINEEKAPIVRMIYQMFLDGMSVARIERKLNDKKYTTDAGKVFSRSRVYYILHNERYIGTFQWKDIKKEGIIPPIISKEAFHAVQERINAMKSSSYRTNNNYLLAGKAFCASCGAKVSGTSGKSQNGNKYCYYGCSHHHRSARYEYCETKNIRADVLEKLVCDKTHEILSSKKAIKEIARQAVKLRPRDESELEIRAIKNHISSCQKKIDNCIKAIENGVMSNALVESLNENERTLDVLKEKLAKASLMQGSGLLTEEKIQFFFETIREKAKETEKYNDILLTSLVRAVYICNEYVEIQYNYAEQLPILTNPVRIESCSYKCTNGGTIWIRTKDLFDVNEAL

SEQ ID NO: 12160 - protein, 508 aa, synthetic construct
MYGMYLRKSRADDPNETMDETLAKHEKLLFDLAESMHIDRNEIIVLKEVVSGESIANRPEIQRGLKLIMDGVIDQGMFAVDSQRLARGDTLDQGTILRVFSLTKVKIITPLKIINPADEFDEDYFEFDLFMGRREYKMINRRMQRGRHISVQEGYYVGSVAPYGYNRCRYNKSYSLEINQEEYHIFSLMKNMAIEGIGTTNIANKLNEMGFKPRKGDRWTTATVRGILINKTNLGLIKWNSRKEVKKFDNNEIVKTRPINKEAEYYPGLHPAIITQEEYDMIIEQMKARNNAPIKKNMKIRNPLAGLIVCADCGRNMVRRPYKKNQDSLICPTSNCKNVASYVSVVEERIIESLKAILNQYKTFVDDYDHSNKDKYVSSKKTRIETLDKEIEKLHGQINKACEMLELGAYSVALFKERKKNLDDKIRSLEKEKATIEKESEDEKVEQYRKAIPKIEKAVSLYYDASIEERNKLLKSVIYKCYYKKEVPGSRWKSDAMKEFKLEIHMKV

SEQ ID NO: 12161 - protein, 519 aa, synthetic construct
MKKVTKIDKIQNVTNQKQKLRVAAYCRVSTSNDAQLESLETQKAHYESYITSRDDWQFAGLYFDEGITGTKKDKRPELMRLMQDCAAKKIDFVITKSISRFSRNTTDCLELVRKLQELDVPIYFEKENINTGSMESELFLTILSSMAEGESTSIAENSKWSIKKRFQNGTYKLSYAPYGYRWDGRTLRIVPEQAEVVKRIFADVLSGKGTDAIAKELDDEGVPTKRGGKWTSTSVRGILANEKYTGDVIFQKTYTDYSFNRHTNKGELDMYYVADHHEAIISREDFEAAGLLISQRAAEKGIKRESQIYQQRYAFSGKIICNECGDTFRRRMHSSTYGKYVAWCCNTHLADKDKCSMMFLRDDDLKVAFVTVLNKLIYSHKLVLKPYAAALQNNSGDENLVRIQHLERLLEQNTEQRETLTRLMAQGYIDQVLYNSETNALLTQANTYREDIEVINTTMNGDSSRFFEAERLLHFAERGSMLEEYSEDLFKRFVDHIQVYSRHEVGFVMKCGLTFKEMI

SEQ ID NO: 12162 - protein, 521 aa, synthetic construct
MGNVMVIPAKRQIGNTGRKQDAKPKLRVAAYCRVSTDSDEQATSYEAQVEHYTEYIKKNPEWEFAGIYADDGISGTNTKNREEFNRMIEDCEAGTIDMIITKSISRFARNTLDCLKYIRQLKEKNIPVFFEKEAINTMDAKGEVLLTIMASLAQQESQSLSQNVKLGLQFRYQNGQVQVNHNRFLGYTKDEEGNLVIDPEQAEIVKRIYREYLEGYSMDKIAAGLEADGILTGAGKPRWHTSTINKILRNEKYIGDALLQKTYTTDFLNKTRVKNTGIVPQYYVEGNHEAIIPREIYMRVQEELVRRRVVKTSANGKKRSYSCNHCFSQIIICGDCGEMFRRIHWNNRGCKSIVWRCISKLEPTGLECHARTINELDLQEIVLTALNELLGDKSKYQKQLQQNIASVIRASATITTDGIDEKLMELQQELVKKANNKEAYDEIADQIFALREKRQQASMDTAQRDEQLQRITELQDFIKGQPSDLTVFDESLVKRWLKQITIWDDHCTVELKSGLKVDVER

SEQ ID NO: 12163 - protein, 502 aa, synthetic construct
MEIQIREGNSRQKQKLKVCAYCRVSTDADEQENSLENQIRHYKEVITSNPDYEYAGVYSDFAISGFKEKRPGLQKMLADACKGKIDLILTKSVSRFARNTSIVLEATRKLKELNVGVFFELQNINTLSGEGELMLTILAAFAQAESESGSVGAKMVYQRKYEAGIPVQYLERSFGFKKDERGVYIADEEEAAWVRKIYEMAADGYTPAVIKRYLNENGVKTVGGAEWIDSTVFRLIENEIYKGDYIMHKHFVNEERKLVRNRGEVDAWYIEDDHEAIVSLELWQRAQDALEAKRDYLAEGSVIEEFTEENYPYMNRIYCARCGHPLYKRIYSNGNRLNWGCSGTKRYGKSFCEGINIPDGVLRGAWHFDENMYIGEKQTDKGKKEFTYLKEASWKRRHKKKEPEPIPENTETEYSYREKIFCGLCGSRLVRHVNTKNHKVIWVCNGRKRKGKDFCDGTRVPDTIIKGWGEIKKDIYIQRKDDKNGKKRYSYTSKKPKGADRA

SEQ ID NO: 12164 - protein, 472 aa, synthetic construct
MQTKRKVAIYSRVSTLHQAEEGYSIGQQIEALTKYCQAMGWVIYDNYSDGGFSGGKLERPAMQKMIQDAKSGKFDTVVVYKLDRLSRNVRDTLYLVKDVFNANNVDFVSLQENIDTKSAMGNLFITLLSAIAEFEREQIKERMQLGVKGRAKSGKTTSWTTPPFGYEYDTNTQLMTINHYQAEIVRDMFDKIISGWSIMGITTHLRKTNNKKWTHVRVKRILENVAYIGKVKYRDEIFDGEHAPILTEEIFYKAQKALEERTSKKDNTRPFQGLYMLSNIAKCGYCGTPLKIDSYKPRKDGTRKRTYTCINRNPKRIKTATYNDGKQCKESGRYDVKDVERYVLNEISKLQLNPKSIESLYRDKPEENITAHQERLKKLETKLSKLNDLYINELISMEALKQKSAELLKEKSSLETFINNNKRKINNKPAFEKVAKMDDVFKMSYDDQKKIVKTLIKRVEVKRDEINVIFKL

SEQ ID NO: 12165 - protein, 506 aa, synthetic construct
MYGMYLRKSRSDDPNEDINDTLAKHEKILFDLADSLNINRKEIMQFKEVVSGENIQNRPEMKKLLEYVMEGVLEGVLVVDSQRLARGDTVDQGTIIRAFSINNTKIITPMKTIDPQNEYDQEYFEFDLFMGRREYKMITRRMQRGRHIAAQEGYYVGSIAPYSFSRIKLEKGYSLEIYEEENIVFNIMKKKALEDEGSTNISNHLNELGYKPRKGEYWTKSAVEAILLNETNLGLIKWNSRKEVKVFKDGKIVKTRPRNPNYELYPGKHPAIMTQDEYDRIKFLMKKRSHPVKKDRTLQNPLAGLIVCGFCNHKMARRPYKNGRVETILCTTSRCKNVASDIHVVEQRIIDTLKDTLKNYTNYVNNYSVSVNKTYDDNKKLQLEECDKELERLNKQIIKACEMLELGAYTVELFKERKNTLENKINTVNKRKDILAKETEAMKIEQYKKAIPQLQNAIDLYWKSSTEEKNKILKSIIDKCIYKKEKGGRWDPDAIKQFKLEIYLKV

SEQ ID NO: 12166 - protein, 523 aa, synthetic construct
MAVSRNVTVIPAIKRVGNNKTSESKPKIRVAAYCRVSTDSEEQASSYEIQIEHYTNYIKKNKEWELAGIFADDGITGTNTKKREEFNRMIEECMAGKIDMIITKSISRFARNTLDCLKYIRQLKDKNIAVFFEKENINTMDSKGEIMLTIMASLAQQESQSLSQNVKLGIQYRYQQGEVQVNHKLFLGYTKDENKQLVIDPEGAEVVKRIYREYLEGASLLQISRGLEADGILTAAGKAKWRPETLKKILQNEKYIGDALLQKTYTVDFLSKKRVKNNGIVPQYYVENSHEPIIPRELFMQVQEEMVRRANLRGRKGGKKRVYSSKYALSSIVYCGHCGDIYRRVHWNNRGYKSIVWRCVSRLEEKGSECTAPTINEETLQTAVVKAINELLANKEPFLSTLQKNIATVFNEENDNATDDIDGKLEELQQQLLIQAKSKNDYEDVADEIYRLRELKQNALAENAEREGKRQRIAEMTDFLNEQSCELEEYDEQLVRRLIEKVTVFDDKLTVEFKSGVEIDIEI

SEQ ID NO: 12167 - protein, 529 aa, synthetic construct
MTYQEGGERMKKITKIEGNLANSFIKAKMRVVAYCRVSTDSNEQLVSLQAQKAHYETYIKANPEWEYAGLYYDEGISGTKKENRSDLLRMLSDCETGRIDLIITKSISRFARNTTDCLEMVRKLIDLGVHIYFEKENINTGLMESELMLSILSGLAESESISISENTKWAIQRRFQNGTFKISYPPYGYQNIDGQMIVNLKQAEVVKYIFAEVLSGKGTQKVANDLNQKGIPSKRGGRWTATTIRGILTNEKYTGDVILQKTYTDSHFNRHTNYGEKNMYLVENHHEAIISHEDFEAVDAVLNQRAKEKGIEKRNSKYLNRYAFSSKIICSECGSTFKRRVHSSRRKYIAWCCSKHISNITECSMQFIRDEDIKAAFATMMNKLIFGHKFILRPLLDELRSKNNAKSFRRIEELETKIVNNMEQSQVLTGLMAKGYLEPALFNKEKNALEAERERFLAEKDQLTRSVNGNIAKVDEVDRLLKFATKSKMLTAYEDELFENYVEKIIVFSREKVGFELKCGITLKERLVN

SEQ ID NO: 12168 - protein, 480 aa, synthetic construct
MAMHKVAIYVRVSTTSQVDEGYSIDEQKAKLTSYCDIKDWNIYEIYTDGGFSGSNTERPALEQLIRDAKRKLFDTVLVYKLDRLSRSQKDTLYLIEDVFLENDIEFVSLLENFDTSTPFGKAMIGLLSVFAQLEREQIKERMQLGKLGRAKSGKSMQWAKTSYGYDYIKETGTLSVNPYQALIVRKMFEWYLSGMSMTKLRDTLNEQYGQDKEWNYRTVRVILSNPVYCGYNQFKGQIFPGTHEPIISEEDFNKTQEEIKTRQRTAAQRFNPRPFQAKYMLSGIAQCGYCSAPLAIKLGMIRKDGTRLVKYECKQRHPRKTKGVTVYNNNAKCDSGFYFKDDIEHFVLTEISKLQTDSDYIDKLFSNTDKETIDRASYQKQIDNLTAKISRLNDLYIDDRISLEELQKRSSDFMAERSALEKELDADTSLKAVERKKDIRRVLDTKDILTLDYERQKTIARALISKVRVTSESIVILWKL

SEQ ID NO: 12169 - protein, 489 aa, synthetic construct
MLKTVIYSRYSSDKQNEQSIEGQIHECEQFAKTHDMVIIKHYIDRALSGKTDDRPSFLQMIKDSSSGLFDAVLVYKTDRFARNRYDSAVYKAKLKKNGIKIFYAKENIPDGPEGIILESMLEGFAEYYSAELSQKVKRGIKENIRKGLSFGGACPFGYKIVNKKYVIDDEQAPYVKKIFEDYAKGRRAIDIFNELNTLPNYAGKGRKWNRSSLNRMLTNKKYIGIYELEDVCVKDAIPPIIDEALFNKVQSRILFNRRHTTRAKVNYLLSGKLFCGLCEHSMTGKTGTSKTKAKYHYYVCSHKHCKQKKYRKELLEDIIIQYTVKDILNPKHFKMIAKKCLEIQQANNKINDILLMLKKQLTATKTKINNLMNAIEAGIITTSTKDRLEQLEQEKYKLELEISTQQLNSNMLLSEEQIIYMLNEFYKKRADISFYNQIIDCFIYKIYIYFDKICIVYNLNNSNKDVTYSDINELYKSSHLNSCGSPYDL

SEQ ID NO: 12170 - protein, 536 aa, synthetic construct
MPRKKKLQEVGGLRLVAYYRYSNGGQQTEQSIEGQRRDCDAYAKAHGYKIVHEYIDRHISGKSDSRPAFQQMISDSDSHLFDAVICWKTDRLARSRYDSIIYKTRLRKNGVKILYAAETVVDGPEGIIIEGLMESLAEYYSAELAQKLRRGQRESALKCIALGGNRSFGYDIGPDKHYCINEKQAPAVRYIFEQYAAGATAADIVRELTARGYRTSRGNPFNKNSICRIITNEMYLGVYKYADIRIEGGVPAMIDRELFNRCQTQLAFNRAHGGGKGAPRADYVLVGKLDCGLCGHAMKGASATGHTGSKHYYYTCTQHVEKKCPKTSIEKNYLEQVIVDGVAKYVLTPEKISQIVDCMMELQAKEQEPKGNPEKDALEAELAECRRKQNNILEAIEEGGSARLAARLRALEEQEAQLTFALGEINNAPAPPQFSREALTFMFEQFRREEDEVDEEYRRRILDTFVSSILLYEDRAEVKFNITDQKTGDFERVILPISANKKPPEDDDTTSNSESSTALRLVEAMGVEPMSEKSSV

SEQ ID NO: 12171 - protein, 503 aa, synthetic construct
MQRAVIYARYSPGPNQTEQSIEGQVRECTKYAEQHDLRIVGTYVDRKISGKTDNRREFQRMIDDSEKHIFDVIILYHTDRFARNRYDSAIYKHKLKENGVELRYATTDIPKGPEGIILESIMEGWAEYYSAELSRKIKRGMRESALKCHSTGAGRCLGYRTAEDKSLVIEPEGAKAVQTVFNMYIKGKSHADICRYLNDCGFRTAQGKFFNKNSVTHIIRNKRYIGVYTYDDITIEDGIPAVVSKDTFHLAQLEAARRKTVKRPKEPKAEYLLSGKAFCGHCQKPLVGVSGTGKSGNKWYYYYCQESRAKRGCTKRPVKRDWLEREVVKRTIAEVLQPGVIQHIAKKCYDLQMEYRQDNSDVLFYELKLKDVRKAIKNTMHAIESGVKTKTLPARLQELENEEEALEAELAIAKASDFVITTDQIEFLLTQFAEPWECESEEEYHRRIIKCFVHKVFLFDDKLLIYYNVSRDGKTREQSEAELLEEVLGEGFDKRSSGSTNAR

SEQ ID NO: 12172 - protein, 574 aa, synthetic construct
MARKKNIAAGLDAVIYARYSSHNQREVSIEQQIAECTKHAAALGLRIVGTYEDRAISGKTDNRPRFQQMMRDAEKGKFQAVVAWKSNRIGRNMLQAMVNEAKLDDYGVKVFYAEEDFDDTAAGRFALRNMMNVNQFYSENMAEDITRGLYDNASKCMANGRQPLGYKRGEDGRVVLDEANAAVVREIFTRVAAGDLFVDIARDLNAQGIKTSNGANWNKGSFQSICQNERYRGIYIYGDVRVADGIPRIVSDDLWYRVQEAMRMKKNPVGTRHRVGAEDYLLTGKLRCGHCGSYMTGVSGTSRNGELHYYYTCQKRRTEHACDKKNIRRDVIEPAVAQAIKMYCLTDDVIAWIADRTVEYWEKHDNDLQIEALEQQLEENKKATSNMLKAIEMGIITEATRTRMVELETEQSRLSVQLNVAKEDVVKIDREQIISYLELLQQGDIHDRDFQMELFKNFLVAVYVYDDNRMKLVFSCMGDQNSVEIPLETGEDPPDGGLSPDAKMFVLTPDSSTKKALYFVGSMVLFFFSAAKNGGCTALPASFSDVLQAVQCSPRVIGASAGQRMPVQLTISSI

SEQ ID NO: 12173 - protein, 457 aa, synthetic construct
MKKKELCPAVIRVALYIRVSGEEQKIKGLSLEAQQERLETYAKERGWIITGTYIDAAKTARKNLHKRTEFQRMMESVKRNEVDILLFARLDRWFRSVADYYKVMEILQAHNCDWKTTDEEYDTTTANGRLYINVKLSIAQNEADIDGERIDVVFDSKIAHGTVVSGSCPYGFRVNEEKRLEIIPDDAAIVQDAFNYFESSASQRATTKYIREKYGVNWCYATFHRMLIEELYTGVYNRSNRYNANFCPAIIDREQFDRVQTLLKKNVHTAPSGRIYIFTSILTCDECGHKLNGCLSQGIYYYRCGQRLLRGRCTHNHSIREDYVERWLFDHLGEEFDRVKLDWEIQAAKRKRSSSSKDKAVLKRKLNKLKELYVNDLIDIEEYRKDYEIYTSALEQMPNDKEMEQPPNFKAVERLLQSDFKNLYNTLTREEKRTLWRSAIKEIRIDNDYNITGIIFE

SEQ ID NO: 12174 - protein, 559 aa, synthetic construct
MTAVIYARYSSDNQREESIEGQIRECTAYAEKNGITVVKHYIDRAISAKMDNRPEFQQMIKDSDKKLFDIVLVWKLDRFARNRYDSARYKTQLKRNGVKLMSATEIISEGLEGIILESVLEGYAEYYSADLAEKVVRGQTENILKGRCNGGRGTFGYTLDSERKFHIDPLVSPFVLELFKKYRDGLTMKEIRDWLNENGIKNPVDGAFTYNSVEHMLKNRRYIGELKFRDVVVPDAIPPIVPLELFDDVQEKIAKNKKAPARRKAEDDYLLTTKLFCGYCGALMFGESGTSRTGEVHRYYKCATAKKHKGCKKKTVRKQWLEDLVVNQTMQLVKDDSAMESIIAKVMELQNKENTNIPLYKKQLRDAESGIQNMLNAIQAGILTSSTKERLEQLEETKHELEARIAEEKLAKPKVTEEFIRFWLLRFRKLNMSQKDQRQALVDTFINSIYLYDDKVLITFNYKEGTQTITFEEAAQAASKGNGSDLDCFAAPRKTRTRLCSGFSFCQHDGRGSNRAAARSAASNQPSGLLLSPRVPTRRNVYRGSCKSKDFMAFLFFWP

SEQ ID NO: 12175 - protein, 517 aa, synthetic construct
MNTVIYARYSAGPRQTDQSIEGQLRVCTDFCKQRGLTVIDTYCDRHISGRTDERPEFQRLIADAKRKKFEAVVVYKTDRFARNKYDSAVYKRELKRNGIQIFYAAEAIPDGPEGIILESLMEGLAEYYSAELAQKIKRGMHESALKCQSTGSGRPLGYRVDEQKHFQIDPESAQTVQTIFEQYIKGESNAAICELLNSRGLRTAQGKPFNKNSINRIIKNRKYIGEYRYHDIVVEGGMPAIISKDTFNLAQAEMERRRTHKAPKSPKAEYLLAGRLFCGHCKGPMQGVSGTGKSGNKWYYYYCGNTRGKNKTCDKKQVSRDRLEHAVVDFTVRYILQEEVLEELARKVHAAQERQNNTASEIAFYEKKLADNKKSIANVLRAIESGAATQTLPARLQELENEQAVILGELSFLKGKRLAFTEDQILFALMKHLEPYPGESEQDYRRRIISDFVSEVYLYDDRLLIYFNISSEDGKLKSADLSNIEGGEFDEGLVSSIQQKTALSQQYGRAVFLFAVL

SEQ ID NO: 12176 - protein, 518 aa, synthetic construct
MSIMSFNNIIIYLRKSRADDPTMTVEEVLAKHESILQDYCIAEFDQPMPESRIYREVVSGETIQDRPVMQRVLRLLESGNIDGVLVVEPQRLSRGDLEDCGHIINSFRYTNTAVITPTKTYNLQDEYDRKFFEMELTRGNDYLEYTKKILARGRLAAVMSGQYIGSVRPYGYTKIVYGSGKNRIRTLEKFKKENDVLILMKRLYLDNDYTPEEIARTFDSMGIEPPKGKHWTASAVRRLLASPINNGKIVWNKRQTVVEWKNGKQVKSRAKSNKDDVIIVQGKHPATYDDETYAAIMAKLSIHSVKVTNQRGLRNPFAGILFCQCGRAMSLRSTHNGHSVILICNDHFYCHTRSVAFNPVLEKVKRALSEAITDFSVKISNKEHTESELYALNISTLENKLEQLYKKDLVQKDAYEDGVYSKAEYIQRNTQLQEQISAIADSLKEAKAKAPEVINYKDCIIRFQDCLNALEDNNVSIEVKNALLKACISKIVYHSVNSNPEYSGRTKNPFNLEVFFKL

SEQ ID NO: 12177 - protein, 464 aa, synthetic construct
MQEKILRCAIYIRVSTFEQSVHGKSLQAQEECLKQYAADHNMAVVGIYADEGKTARKELKKRKAIHALVEDVKQDKIDVIVFWRLDRWFRNLSDFYKVQDVLDEHGVRWISVSEPGINMETRDGRLQLNVVLSIGQNEVDTTSERIKFVNESSIRQKKLIFGDANMPFGYKTGVVDGKKCMVKDPETEHMVEDFFNYFRIHNSKKGAVRYMQEAYGIDFSYGMLRTMLSSEFYKGTYRGYHYCPAYLSEKEWNEMQIISKRNIKNTPSGRIYLFTGLMRCPVCGQKLVGTGCSSIIDRKTREKRTYCYYRCNRALIDHICTYRHRVSQNLVEKYLLENLEREYEKYKVRSNQIGEELKKQKKAKDPEKLRKEMERLNLLFQKGRISFDYYDKEYQRLEKEYSVSADFPEEEETRSLHYVEELLKTDFRQMYDSLSPENKRSFWRSTIQEIYLNDDNTIKAVDFL

SEQ ID NO: 12178 - protein, 513 aa, synthetic construct
MAQAKLISPVSRQAYERTKVAAYCRVSSNSADQLNSYAAQIRAYTKLIKSNDSWELVEIFADEGLSGMKAENRVEFQRMIEMCEHKQIDLIITKSVSRFARNVKEALEYVRKLKLLGIGVQFEKEGIYTLALGDEMLLNTFSAIAQEESKAISQNQRLSIVKRMERGEYVDSNAPYGFRLQDKKLEAFDREADVVRYIFQQYLSGWSTSEIARDLTEKGIQTKLGKEQWRSTKISYILSNERYVGDCRYQKTYRDTTVPFKQSKNRGQEDMFYASETHDPIIDRESFEKVQALLQDRKERFSKPEQLNIYPLTSRIRCSECGSVFRRKVRNGAIKWVCARHSADTHACPSGYYSEERIYDGFITMVNKLRFGEERILDQVIAKLETAAALYKRNNISAGKMSQSIAELNAKLVMLEQLRSKGYLAIEVYQSQTRDIQKQISSLKSERRSAFESTIQTMLDEVLKMRSLLNEIEEPLEEFNDKLFHELVKGIEINKQDEMTVTFLGGLKFTELI

SEQ ID NO: 12179 - protein, 522 aa, synthetic construct
MNTLERDCIYLRKSRADREAEARGEEETLARHERILLDLAKRRSCHIGAIYREVVSGETISARPVMQRLLQEVESGMWDGVLVVEVERLARGDSIDQGVVARAFQYSDTKIITPTKTYDPNNEFDEEYFEFGLFMSRREYKTIKRRLNAGRVSSVQEGKYCGNKPPYGYRRVKLEHTKGYSLEPIPEQAEIVKLIYNWYTYGIDGERIGMCKITRKLIDMGVPSLSGKSWSTATVANILENPVYTGKIRWNRRKGMNKIENGNVVKSRPRCNDYILTDGLHEAIISQEIYDLAQNYRSMNPPRPIGASNTVKNPLSGIIKCGKCGHNMVRRPYNSRKQEDTLLCSYTGCNNVSSRLSLVEKALIAGLAELVQSYKINDTLNDTNGVDIIAAKEKVLLDKRAELDNLNTQKNRQYELLEQGIYTTEVFLERSGATAKQIDDCATAIERIAADLAHDRELLEQKFNFIPKCEHLLSNYWDWDAPTRNSVLKELLERVDYFKDNKNDFKRGDEITFTLDIYPKIQ

SEQ ID NO: 12180 - protein, 501 aa, synthetic construct
MSKNCVIYARYSSDRQRDESIEGQIRECTAFAENENLKIIKIYVDRAMSARTDHRPEFKKMIQDSAKDSFEYVLVYQLDRFSRNRYDSAMYKAKLKKNGVKVISAKENITDDPSGIILESVLEGMAEYYSAELSVKVTRGMTENALKGVWPGGTVLQGYKLDENKKLIIDEKYKPMVEYIFTEYINGYRMETIARQVNAMGYKRKSGKPFTMQSIAGILDNEKYTGTFIWKDIRIEGCYPAIINYETYYHVQELRKLRTKKKNSKSEIYQLSTKLVCGKCGAAYIGMSARSSNGSTHYYYACYNRRKHNSCDAKNIRCADIENLVIEHTYKMLQNEFIINKIAQQAVRAQNIPQVEDNTLERLKSDLIAKETELNNYMKAIASGLHSASMNAAITDVENQIEKLKQDIAIEELKKPAFVITEDHIKFFLHKILKGDHSAAASRERMIDTFIRQITIYDDHLEIAYNYKSEPPTLNNMQVIKSSLSSGMVDDDRIELPTSCL

SEQ ID NO: 12181 - protein, 492 aa, synthetic construct
MTAVIYARYSSDNQREESIEGQIRECTAYAEKNGITVVKHYIDRALSAKTDNRPEFQQMIEDSDKKLFDIVLVWKLDRFARNRYDSAHYEYQLERNHVKLVSATEPISDGPAGIMVKSMLTGMAEYYSAELSEKVVRGMTENVLKGKYNGGTIPIGFKVDEEKFFQIDPLKAPFVVEAFQRYNDGATMKELMNWLNDSGVTTNRNQKFTYNSIQTLLTNRRYIGENRFKDIVMPDSIPVIIEKELFDSVQDKIAKNRRAPARHKAEDDYLLTTKLFCGMCGTMMFGECGTGRNKVVHHYYKCATAKRFKTCKKKTVRKEWLEDLVVAETMKLIQDDAVIDAIVAEVMELQDQENTTLPLLEKQMREVENGIENMLNAIQAGVLTNSTKSRLEKLEAQQKELEVRIAEEKIARPRLSENQVRFWLTRFRKLDPNVKSHRETLINTFVNAVYLYDEKVLITFNYKDGTKTITFDEIAAKDAPEGNGSDLGCFAP

SEQ ID NO: 12182 - protein, 586 aa, synthetic construct
MINSDFVKKRVVIYARVSTEHEAQISALENQMDWYKPILAARPEWTLVGQYVDEGITGTSAAKRPQFMKMIADAKKKQFDMIITREVSRFARNTVDTLQYTRQLKSLGVEVFFINDNIKTFDGDGELRLTIMATLAQDESRKTSVRVKSGQQTSMNNGVIYGNGNILGYKRVAKIVDDNKKEVEWTVDPEQAKTVKMIYAMYLDGMGLMQIKDELERRGRKTSAGLDRWYCTVISHILKNSFYCGIITYHKEYTPDYLTQKKVKNYGEIEFTKVQGSHEALVSVADYERVQIIMESKRSKCKNLDTGRKATGKRPRTTVWGKLLICECGHKFSMRVWDRKDRVANAAYQCYSSVHTGSYESRKKRGLSLDGICQTPMIPEWRLQMMANYIFRNYLTEKDKVLALANSMLEAHIGDTESREDHTETLRCKRAELEKLNTKLDNFIEMRAEGEISKELFKKKTSELELTMQKLDSEIKELESKQEPEIQIEDYAEKLTVLQYALEQYTNWDDKDVPESVIEAFVVKIVASKDGFDWYLRFSGNPDDPLHCTVGGKRKSTAKISVAGECSPAIHKGDTGSYQGTAPIKS

SEQ ID NO: 12183 - protein, 580 aa, synthetic construct
MSEKIINCAIYTRKSTEEGLEQDFNSLDNQYEFCTNYLKSLNDPTLHLLPTRYDDGGYSGGSLNRPALQCLLADIRCGLVNRVIIYKIDRLTREIRDFFKLLDVFEKYNVEFVSVKENQYYNTTTAIGRLMVNMFLVFAQFERENAGDRIRDKIATSKAKGMWMGGCPPYGYDIGDRCLVINETEAQNIRFIYQTFCNTHSLADTTEALNSGGIRTKCYTTRQGRTFGGRKFSVKTVQRILQNPLYKGMVTHRDKQYPGQHAAIIDATQFDLVQAIFAAHKDKREARRCPQKASGGERETAALTGLIFCGCCGSAMTPSYCCKGDIRYHYYRCYRRASKLEDKCPINQIRTSEIDRVVMEQVLAILKSREFFVQYISHHHEFDVSTAFALFNNLDDVWNSLFETEKRRILRELLAKVTIFKDKIVLDVKKSGLAGVFAELSQNNLLAEVEYKENETFQISIAYRATRLANGAKIIVPATAKEESRFNGSLRLARQIAKGFAWRKMMESGLSLQELTASAKTNERDIRFAMRLSMIDPAIVESVLSGKSPEFLTYAFMKKHPIPLLWSDQRKLYGFEERKQ

SEQ ID NO: 12184 - protein, 700 aa, synthetic construct
MDSNAFLNDLMSKMKLPEAKGKKKAEQSESVAQILAAMQKVRAEKKKPPVTSYAPVKEMPMNEPESMEEFSQLASDVMQECRLAMPTVKTSISEKTVRVAAYIRVSSTNPAQEDSYEMQERYFMSLLAGNAGWTSAGIYSDHGISATSREGRTGFNRLLRHCKQGKIDRVICKSISRFARNTQDFLVALRTLKENNVTILFEREAMDTADAYSEFILTTLAAIAQEESRSISANIAWSNQKRFPAGNVCNKDIYGYEFRKGEYTVNENGYRYRAVFIIPEEAEIVRLVFRLFTKEELGFTQIAQKLDALHIQPPNSGCRQRQKRKPTVLPAGALKEEDKRGWTATDVRYMIANVRYCGSVLCQKTYTDHRNGHKQKVNKGEKPKYLIRNHHPAIISEELWQEAQEVWKAYTAKYRGIEKGRNERNYSKLLLCGECGRYFQGNSTTRTTIWRCATKLAQQGQKRCRMEPIYEEQIQTLLRKAFAEKFKLGEKMDAEVHEVMQMISKAPIDNARNQALKNLTEKLREIHDFDHMEQEGDFLKRQLSAVNYSIRDAHQHIRDIQAEKEALKVRSEVLGEPIDKESVTELENRLLNEEEQLEKLEQEARQQAEQVRYMEDYWKKLEQTHEIREKTLQWLDSLAGGTQMFLDEAVGTYVKAFVLFITIFSPKYFRIHWFDDTQTDVECDSVFEGYQQPSMIRRKN

SEQ ID NO: 12185 - protein, 501 aa, synthetic construct
MKKAVIYARYSSDMQREESIDAQVRACTYYARQYQYEMVHVYADRAQSGKRTKNREQFLQMIADASDGGFEVILVHKLNRFGRNTLEVLEYKNSLEDMGIELISVTERLESTPEGKLMLIIIAGMNEFYSDNLSQEVMKGLKENAYQCKFTGGVPALGYKVDPESKKLVIDEREAPIVQLIFRRYASGWGYNLIINELTGLGYRTKYGKPFGKNSLFELLRNEKYIGIYTFNRAAKRKRDGTRNYHATKDPSEIIRIPGGCPALIDRETFDKVQQIMVQNRKMNLQQHGQKVYLLSGKLFCANCGARMYGNCKTVRGEAHFYYVCSNSWRKHSCTARHIPAEELETQIIELLQSRIYSPEFLQKVSQQLQNDSQRNQQLTQRQRESAAKRLQAVNFRIKNLMNLLSEGIEFEEVSETLTKLKQEKEVLTATLDTLDHLPPTNMEESETVPQRLTRLSLLQPSEQAALLRQYVDKVFVFAEKKSKTPATVEILLRSDLFPDK

SEQ ID NO: 12186 - protein, 499 aa, synthetic construct
MSKAVIYARYSSTNQREESIEGQIRECTDFAKRQDITIVGSYIDRALTGKTDARPQFQKMISDSGKQLFDIVIVYTLDRFARNRYDSATYKAKLKKNGVKVISAKENITDDPSGIILESVLEGMAEYYSVELAQKVLRGMTENALDCKWLSGIIPLGYKLDDDKHLIIDDHAAPIVRKIFEMYAAGDRIVDIAKYANSTHLKTAKGNNFSRCSFTHMLKNETYIGTYKWRNIVKTKVIPRFIPDDLFYAVQKRIKSRKETNIRGKSENFLLSSKLKCGKCGQFMTGVSGTSKQKRRYYYYQCYASKSKKCDMPLFPREKLEDIILAETIKLLSEPHTIEFIANTVANLPIDENTQISILETEITEIKNKLKNCIKAIESGLISDTISKNISEYEKKLSVLEKDLSIEKVLNEPFKITPDHVKFFLYNILQIKNADERRDMIISTFVRDIVLTKDDIGYTVKITYNYNENPSTSLDNSVQKGSQKSSLVAPTRIELVISP

SEQ ID NO: 12187 - protein, 523 aa, synthetic construct
MAERSVTILPPRLNRKAQEIKAEEKAKLRVAAYCRVSTDSDEQATSYEAQIEHYTLFIQNNPEWKLAGIFADDGISGTNTKKRDEFNRMIEECKAGNIDMIITKSISRFARNTIDCLKYIRQLKALNISVFFEKENINTMDSKGEVLLTIMASLAQQESESLSQNIKMGIQFRYQQGIVQVNHNRFLGYTKDADKNLVIVPEEAEIVKRIYREYLEGANYKEISAGLEADGILTAAGNPKWHSSTLKKILTNEKYMGDALLQKTYTVDCLTKKRVANDGTVPQYYVNNDHEAIIPRELFARVQEEMKRRANIRQGMDGKRRVYSSKYALSSIVFCGHCGDMYRRTHWNNHGKKQIVWRCVTRLNVPGVECPARTLSEIQLQNLVLEAINKVLGGKQRAIKVLETNISEVVGNTHSEELERIKQQIEKQQTLLVKMTAASEDYSKVVDKIYALQREQEEAMAANVNYKAGKERIQEMIEYLKSKPKRVTVYDEQLVRKLIEKITVYDDHLDFLFKSGIQIEMKG

SEQ ID NO: 12188 - protein, 520 aa, synthetic construct
MAKVTKIFNEKEEENKKLKVAAYCRVSTDSDEQLESLEAQKKHYQTYIKSNPAWQYAGLYYDEGISGTKMEKRKQLLAMLDACERKEIDLVITKSISRFSRNTVDCLEMVRFLIEHGVYVYFEKENLNTMTMESELILSILSSMAEEESHSISKNNKWSIQKRFEQGTYVISYPPYGYINDGGEMRIVPEEAEVVRRIFNDTINGKGSAQIAKELTEEGIKSKKGGKWHSTTIRGMLKNEKYTGDAIFQKTYTDDRFTRHINNGEEQQYYCRNHHEPIISHEIFELAEQETRRRADEKNIKKSTQKYNKRYAFSGIIKCGECGAIMKRRTHYTGRKEYIAWSCGTHLEDKSKCPMLYVRDDAIKAAFTTMMNKLVFGYKEVLTPLLEGLDENMNYMNTEKQTEFENQQKAIKEREKLLREHFHKNLLSQEIFSRSMEDIEQELRTLAQMREDYLHNQQRGTTYLAAARDLYAYCCKAEMHTVYDEDVFKRFVNGVIVFSRDEAGFRLNCGITLRERMVVR

SEQ ID NO: 12189 - protein, 513 aa, synthetic construct
MLYAIYLRKSRADLEAEAMGQGETLARHRAALLDYAAHHGLEIGAVYEEIISGESIDARPKMKQLLREVEQGRWAGVLCMDIDRLARGNSADQARVSNTFRISGTLIITPSKVYDQSRESDEEYVDFELFMARREYKAISRRIMRGRIASVKEGHFIGSTPPYGYDKVKVEKGRGFTLSPNYESDIVKQIYSMCISGMGCNAIARRLDMMGVTPRKGSSWSSASIQDILKNPVYCGKIRWQYRKEEKSLTDGIVTTRRRENPDCIIAQGLHPALISEEEFEKAQQFLNSRRIPHKKESTELRNPLSGLVYCGMCGSMMTRLGTGSRNHSDTLRCPNRNCGNVSAKLELVESALVEGVARWLNDCRVNVSRKPAADTAKAERTAAEKVRAELAKLDSQREKIYSFLEQGVYSAGEFRERMESLEKRRTQLSENLRQAEQAVSEAEGNRQLYARIIPRVERVMDIYAQSTPEEKNRLLKTIISRAEYIKTERNTRGNADRCNFTLNVTPLFPETD

SEQ ID NO: 12190 - protein, 465 aa, synthetic construct
MKGNAGDTIVKKIDLSPELVRVALYIRVSGEEQKIKGLSLEAQQERLEAYARERGWVIVGIYIDAAKTARKNIHKRTDFQRMMDSVKRDEVDILLFCRLDRWFRSVADYYKIMEVLEAHNCDWKTTDEEYDTTTANGRLYINVKLSIAQNEADIDGERIDVVFDSKIAHGTVVSGSAPFGFRVNEEKRLEVVPEDAAIVQDAFNYFETSISQRATVRYIRETYGVNWCDATFRRMLKEKLYTGVYDRSGRFNDHFCPAIISKQQFDRVQALLERNARSVPSGKVYIFTSILTCAECGHKLVGYKSSDYYYYRCNQHFQRGRCSHNHSAREDVVEKWLFEHLAEELERCQLEWEVAAAKKKASVARTDKAALKRKLTKLKELYVNDLIDIEDYKRDYQIYTAALKQIPEPSIEPPPDFAAVRRLLDNDFKTIYENLTREEKRTLWRSVIKEIRIDNDQNITGVVFG

SEQ ID NO: 12191 - protein, 488 aa, synthetic construct
MNEKYACYVRVSTDRDEQVSSVENQIDICRNWLERHGYSWNGNSVYKDEGISGTILKDRPAIQLLLEKAKKKEINMVLFKSISRLARDLKDALEIREIFLSRNVRIISIEEGYDSDVAGKNDMSFEMASMFADHYSRMLSGSVSAALAAKVRRGEHIGKIPFGYSRENGKLQIKQDEAEVVTMIFDWYVNEGLGFKTITRKLNELNLKPKEIQKWQVTSVQTIIRNRLYCGDFVLNRYTTMKVEGKKKQIQNPESRWIIFKEHHEPIVSREWWEKANSNLTKTKKKISAWNDLRGILKCSECGSSIVPMLSWRLLANGTKKDYRYMKCSKYRRMGEAGCINHSPMLYEDVKSFLIKQLLEKSYMLQFSFEDNFQGQKNDRLSVIKKEIEDLKNKGSKLIDLHLEQIITKEEFKQKRDELDWKIKNLENEQIDLSKQDYATEKIENIKQAFDALSNDGQNLHHAFRTLLDRVVVHPQGEMDIYYTFNVE

SEQ ID NO: 12192 - protein, 523 aa, synthetic construct
MRFFSYGRKSVFSDKSDSIDNQFRMNREYCESKFSGQVDSWQQFSDEDFTGANTSRPDLQRMLSFIKGGFCDVLVVYQLDRLSRDVRDFANIYALLEEHGVMFISIKENIDTTTPIGRAMMYVTVVFAQMERETIASRVTDNMLGLAKKGYWTGGNPPVGYVRKHIVVNGKKHCSIEVDPDGARYVTQIFDTFLAYNCSLQGMETRFKNQGIRTQSGKFFSTTQLHKMLTMPYCVEATPEVYDFYAAKGCIMDPGSPREMWDGSVGVIIYGRSTEKNKKHQAQPPEKWTVCLGKHKPFMPAEKWLAVQSRFTQNKCIKDAKWPVPLLKGVLRCKCGNLMQVSRKKKVDGTCSSWYYCRKRMRQGVDACDMGQIKCDLLDEKVLELFRGITADPALIQKFVKAEAPADVPDLKAAQARVSACERKIGRLAASLALAEDSAASKYIIAEMERLDVELGALKREASLAEMESHRAAASAKDAKATAVEIAKLIHGLEGFDDKEKNAIARAVIQECTWDGERLFITL

SEQ ID NO: 12193 - protein, 632 aa, synthetic construct
MPRTSRKAKTSPSDAMRLVAYYRYSGGSRQTEQSIEGQRHDCEAYARAHGMTIAKEYIDRHISGKTDDRPAFQQMISDSDRHLFDAVICWKTDRLARNRYDSAIYKNRLRKNGVKILYAAETIVDGPEGIILEGLMESLAEYYSAELSQKLRRGQRESAMKCNALGGNRSFGYDIGADKHYCINEQQAPAVRYIFEQYAAGHTAAEIVAHLNASGIRTSRGHEFNKNSILRIITNEMYLGVYKYSDIRIEGGVPAMIDRDLFDRCQKQLAYNRARGGCASRDQRADYLLSGKLFCGLCSRPMKGVSGTSHTGDKHYYYACPGRTDKKGCTKSYVEKDALESAIVRATAQYVLAPEILNRIIDQIQTLQAQREKPKPNSEKQALKAQLADVRAKQEHLLDALESGGSVCLVARLQQLEQQEAELNARIVAIQDPVAPRTFTRDELEFMLSQFRRADDEQTTAYRRRLLETFVSSVVLAEDGATVCFNLSASDAADADRISVPFSASSKNKNPAESGENSSNSAGSTALRLVEAMGVEQCHFIPFEKQPFNFSRIHADFQRQHSVQIASFLCTGFNSGLQNGFAAQDFLQLILKLQRGLFFLALQQVRIHAVGVHLARVPHQRLHGSFRERFCQ

SEQ ID NO: 12194 - protein, 510 aa, synthetic construct
MSYFIYARKSRKDAELEALGIDVLERHITTLLELAKALSLPIGAIYREVVSGDSIDARPVMTQVLSEVEACMWDGALVMDVDRLARGDTIDQGRVQRAFFYSNTRIVTPNKTYDPANEYDNEYFEFSLFMSRREYATIKRRMQRGRERSSSDGYYVGNVAPYGWERVIAPDGKHYSLTPSQTEAPVLDLMYDLCGNKQYGYQKACTYMTNMGILARSGKPFSPSTLKGIISNPANIGKVRWGYRKTVRAVKDGRVVKSRPNATDYILADAAWAPRISTDLFKRANQPKGCFSSPVRNDRPIQNLFAGLVRCSQCGRLMVRKKAQTKTPYDVLICQYTECSTVGIRIDELEEALLEWLKDYIAKYEFTDTHEEDAAAIAAKEMIVTNFETEHQTLLKQRESLFDFLEQGIYTKEIFLERSNALEQRIRDCMNNITAAQEDLHTTIARQANRKNFVPKCKNLLSEWNSLTIPEKNSALRKLIDRIVLTKTKRNKKNQKNSEFMIDVYPKVPK

SEQ ID NO: 12195 - protein, 552 aa, synthetic construct
MIPTKRIAIYARVSTARQEEEQTIKTQLVVLKEYAAEHGYVIVQEYIDEGWSGDILARPALDKLRQDATSGIWSAVLIYDPDRLARRYSYQELVMDELKEKGIEILFVTVSTPKNSEEKILHGVRGLFAEYERAKISERFRLGKMRKIKEGHILVSEPAYGYSYIPRQENRHGYYEVNESEAHVVRDIFSWVANEGLTIRKVIARLHKEGVKPRKSKRGVWSSSTLSTLLKNPVYIGKAKWGSSFAVVPENPLKNERYKKLRKTSRRMKPKEEWLFVSVPAIITKELFNRAQEQIQNNFELCNRNKKNQYLLAGKIRCTCGKTRAGEGPQNGRYLYYRCADRVSCYPLQPNCREKGINARVADTLIWDKIVELMSSPRLIKEQIIRLQKRKTEGNPAEQVSAVINKEIVKLKETENRYNTAYGSGVLSLEQLKEYVVPIRGRISQLESRNEQEHKKHYEREVKIPDEDEIEAFTVKSQKALKNLHFEARRAIVINVLDKVVGNKESLQVYGCIPITNVGLFTNHRDGLNINRHNSEDIYVPFYFTLTLGNLL

SEQ ID NO: 12196 - protein, 500 aa, synthetic construct
MGKAKNVGIWIRVSTDFQVKDDSPEHHERRAKMYAESKGWNVVEIYRLEAVSGKSVMGNAEAKRMLHDLQARKITGLIFSKLARLARNTKELLEFSEIFRKYNADLISLSENIDTSSSAGRLFYTMIAAMAEWERQEISERVAASVPVRARMGKPLGGQAPFGYRWEDKELQIDKKEAPVRKLMYELYAEHKRKGTVATLLNKKGYRTRNGSKFTDTTIGRLLTDPVAKGQRRANYTKSTGEGKHWEIKPESEWVIIPCPAIVSEELWDECNRIIESQTYTRKPTRKTVHPFAGILICQCGGKMYVPSRVKKYVCNSCKETNISAEDIDHIYYEQLKSFLLTKDDIATFLSRAEEAIKTKQTELQTLSKEKMKLKSEMDNLVKLHSKGQIPTDDFGSYYNPLSEQYKQIDLSQAELEAQIDYIKVQQLDGDHILENAENLYDKWPTLDNEAKRQIVEELTESIQMGSEEITIKFNYTPTLTATPKNTPTTQRNDMDSYSL

SEQ ID NO: 12197 - protein, 656 aa, synthetic construct
MGLRSKYTEQQICKLEKKEFMKEASFDDIFIDYGHDLNVLILCRESTAHEDQQKALNDQVERMKGIVDRHRQLHLVDDGIIIEDAKSGLAMDVRPKFQATIKRAVAEDIDVILVQEASRFSRNTGDFFYNMNILQNSGVGILIMEGGFWTYFMAPGDYPRLANEVAKGQAESLTTAKRVNRGIETYRSRGQLVSGNMFGYDLVKAVERKNNTYKINPVDGATVQLIFDMYVNKGIGTELIATHLNAHNYPTAKRTGEWSASKVRRVIMNEKYANLIMYGKFQIVDTSTKKKIATHIKPVRTTTYDKDGNIIQERNVQYGTWEPLVDEETWWKAQEIMASRSNSYNLKDDTGKSKRCANGLRTSNDAYANKAYCCCGHTLSPQYTHTATDTKYAQFRYNCRWQINSHTDAYRKKHGLPPSDCTCKLPAVTDVAMRLMSIKVFEYLFTDIRDTIDDTVRIIELANKQAVDSINNSGVSVEDLEATYAKLNNRLSRFADMYADGDLTREQYRDKKSSVEEELKHTKELIDSKKLAISEQKKKSLDIEAIKARLNTYVDLKGYGVSNEMIEFFVERIIRRPDNEYVWELNLTGQPSKPNKYKIKKYNKEYSDSLQDDSNFNIIKTFVISLDECRKFCENLAHRQFKGAYWNQITVKIAVK

SEQ ID NO: 12198 - protein, 523 aa, synthetic construct
MRFFSYGRKSVFSDKSDSIDNQFRMNREYCESKFSGQVDSWQQFSDEDFTGANTSRPDLQRMLSFIKGGFCDVLVVYQLDRLSRDVRDFANIYALLEEHGVMFISIKENIDTTTPIGRAMMYVTVVFAQMERETIAARVTDNMLGLAKKGYWTGGNPPVGYVRKHIVVNGKKHCSIEVDPDGARYVTQIFDTFLAYNCSLQGMETRFKNQGVRTQSGKFFSTTQLHKMLTMPYCVEATPEVYDFYAAKGCIMDPGSPREMWDGSVGVIIYGRSTEKNKKHQAQPPEKWTVCLGKHKPFMPAEKWLAVQSRFTQNKCIKDAKWPVPLLKGVLRCKCGNLMQVSRKKKVDGTCSSWYYCRKRMRQGVDACDMGQIKCDLLDEKVLELFRGITADPALIQKFVKAEAPADVPDLKAAQARVSACERKIGRLAASLALAEDSAASKYIIAEMERLDVELGALKREASLAEMESHRAAASAKDAKATAAEIAKLIHGLDGFDDKEKNAIARAVIQECTWDGERLFITL

SEQ ID NO: 12199 - protein, 451 aa, synthetic construct
MRLLVDCKAKKIDFVITKSISRFSRNTMDCLEIVRTLLNLNIPVYFEKENINTGSMESELFLSVLSTMAECESASISSNNKWSIKKRFENGTYRLSSAPYGYKLESGGLQVVSEQADIVKRIFRELLSGKGMYSIAKELNAEQVPTQKGGRWTSTSVHNILTNEKYTGDCIFQKTYADSNFNRHINNGELNRYLIQNHHEAIISHEDFNATAALIEQRAAEKGIESGSDKYQQRYAFSEKLICGECGNTFRRRIHKDKYNSYVAWVCNTHLSDTNRCSMLFVRDDALNLAFATMLNKLIFSYRLLLKPYLAAMQSNTADEALLRIQYLEKQLDQNAEQRSTLHKLMAQGYIDQILYTQESNELLLQARDFRSEIEALNNTVAGDTTKVYETERLINYCKRGEMLTDFNESLFELFVDHILIYSRQKIGFVQYSLAPSVYAMYCAARHSGQA

SEQ ID NO: 12200 - protein, 515 aa, synthetic construct
MKMKEERQVLKIPAVSPIGKITEEKKQTLCVAAYCRVSTELDQQAGSYARQMSYYREKIDKKEGWILAGIYADEGVSGTAKKRRDGFLQMIQDCEDGKIDLILTKSISRFARNTVDLLTTIRNLKSRNIAVYFEKEHINTLDGAGEILLTILSSQAQEESRNTSENIRWSIRQKFERGELMVNHNHFMGYTKDTNGQLQIVPEEAEIVRSVFHLYLIGHSCAFIARYLEQHGMKTVMGKNKWCATVIEKMLSNEKYLGAALLQKTYTVDYLTKQRSKNNGELSKYFIKNNHSPIVSEEIFYDVQNEKLSRSYYRRKDAGRPSQYPITMKLICDCCGDHYLRVTRKGDRKEHIVWRCKSRILHGDRYCTKLSTIPETELHKAIWGAYSRILHIKDCSDQVELGQIADQMADRKKMIFRAIQENVQGFWVWNDLMAYYANVKNEYDELSELLLRKFLEREESMFIRCPFKHMKAYSNYNKYEDELVNLYVERIWTVASNEVIILFKNGSVVREKWDY

SEQ ID NO: 12201 - protein, 467 aa, synthetic construct
MTRKRNDFQAMIDNCMAGKIDMVITKSISRFARNTVDSLTHIRKLKAKNIAVYFEKENINTLGDGGEMLITILSSQAQEESRNLSENVHWGYVRQFENGVVYVNHNKFLGYTKDEEGNLIIVPDEAKLVRRIFRLYLEGNSINKIAETLTKEGIRTVTGNTVWHATVISKMLMNEKYMGDALLQKTYTVDFLEKKRAVNKGIVPQYYIEGNHEAIIPRELFYQVQEERARRANVYRPANKKGSTIRGRYSSKYVLADIMYCKECGQPYRRQVWVNGGTKKPVWRCYSRLKSGTKKCKHSPSLEEKALHEAIMEAVNSVVKDEGEFIDAFRDNVIRILGSYSDNVEPTEYDEKIDSLQKQMMALIEDSAKTESADEEFDRAYREIADQIRVFKKKRTELLREKQLAEAYDQRVEGMGQYIRKTNYLKRQFDDELVRRLIKGIKVISEDKIEIQFHSGIVMTQRIDDYD

SEQ ID NO: 12202 - protein, 535 aa, synthetic construct
MAKKIVKKITKIEPVSSGFAANAVEVKRVCAYCRVSTNSADQKNSFEAQVDYYTRLIGEKEGWVLAGIYADEARTGTKLYQRDDFQQMMLDCRQGKIDLILTKSVTRFARNTVDSIKAIRELKALGIAVYFEKERVNTLMEKSEQMITILSSIAQGESESISTNNKWSVVRRFRNGTFIISSPPYGYENNEYGELVIQKEEAKVVRRIFDEYLGGKGSYTIAAELETAGIPTSRGAKEWQDSVVKGILQNCAYEGDLLLQKTYTTDGVPFIRKANRGELPQYLIADDHEPIITREEAAAVRQIYEYRRERQCVKDSSVYQNRYAFSSRIRCGECETNFRRQKIYIGKPYEKIQWCCYQHIKDSKKCSQKAVREDVIQAAFLTLWNRLASNYEEILIPMLAALKAIQGNPEQDREMQEIEQNIQELKRQGYRLGRVLTEGSISSAIFIERQNQIEAQLEADRRRLRQLQGQRAFEWEISQTEYLISVFRNRPAILEAYDEELFLLLVDHITVMPGRRLVFRLKNGLELEENEQEVS

SEQ ID NO: 12203 - protein, 536 aa, synthetic construct
MPRKKKLQEVGGLRLVAYYRYSNGGQQTEQSIEGQRRDCEAYAKAHGYKIVHEYIDRHISGKSDSRPAFQQMISDSNSHLFDAVICWKTDRLARSRYDSIIYKTRLRKNGVKILYAAETVVDGPEGIIIEGLMESLAEYYSAELAQKLRRGQRESALKCIALGGNRSFGYDIGPDKHYCINEKQAPAVRYIFEQYAAGATAADIVRELTARGYRTSRGNPFNKNSICRIITNEMYLGVYKYADIRIEGGVPAMIDRELFNRCQTQLAFNRARGGGKGAPRADYVLVGKLDCGLCGHAMKGASATGHTGSKHYYYTCAQHVEKKCPKTSIEKSYLEQVIVDGVAKYVLTPEKISQIVDCMMELQAKEQEPKGNPEKDALESELAECRRKQNNILEAIEEGGSARLAARLRALEEQEAQLTFALGEISNAPAPPQFSREALTFMFEQFRWEEDEVDEEYRRRILDTFVSSILLYEDRAEVKFNITDQKTGDFERVILPISANKKPPEDDDITSNSEGSTALRLVEAMGVEPMSEKSSA

SEQ ID NO: 12204 - protein, 492 aa, synthetic construct
MNVAMYLRKSRADENNPLETLERHKEILLSYAKDNNLTVIDIFEEVISGGMLYNRTEMLKLLDAIPSHIYDAVLCIDLDRLGRGSAADSEKIFDVLKENDVKIITLKKIYDLNNEYDEDYSEFEMFMARKELKFITRRMNRGRIKSINDGCFVSGAPFGYRNAIINKKHTLEVYEPEAKYVRMIFDMYVNQSMGITSISRQLANLGVLSKKNTPLHPTTIARMLRNHTYIGKIVWNKSKSVKGKNTQEKTSKDDWLYVPGLHEPIIDENTFNKAQDIINLKYKPPMRTGTLQNPFAGLLKCANCGRAIVINTSNETVEKYRLCCRTLGCNKASALSIVEDKVFEVLTKEFKDIELSLKNIRQSHNKDKLSCLDTIATLETELKKLDKQQLRLYDLLEQEVYTKELFLERNNAISDRRKKINATIAQEREKFKLVDTSSIEERLPLLRELLTNYHSLSAAEKNSILKNFVKKIEYKREKSAPEGDIFLKIYYK

SEQ ID NO: 12205 - protein, 492 aa, synthetic construct
MAAIDFNNVVDLYIRVSTSEQAEEGYSVAEQEERLRSYCAAYNYTINAVHVDPGFSGASLDRPAIKKVMYDVEHGRCKKVIVWKLDRLSRSQKDTLILLEDVFLANDCNFISLMESFDTSTPFGRCIVGILAAFAQMERENIKIRTMMGRQARIREGHFHGSRCPLGYKFQYAPDGTLLSNDLVVDPYTSKLVQEVYRLSLGGSSFSSIAAHMASTYGCSLYDWSRNTAIRRILSNPIYMGKVKVGNELYPGIHEPLVSETDWYMVAAMLKHNKEQQKRTYAYQISCGVYADNLLTGLLFCGDCGARMYARRVSQNKKKYICHSVAKTSPAMIKSDHCTNRLHPFTVHQLDEMVIDEILKLSLDRPGFDMLCNQPDDSSKSEDKKIYEERLAEVNRQLDRLVKLYQTGLIDLDNISARLGDLNQEKNFLEGNLATINEVTPAEIRETAWKSIQSLQSVLNNGDMDEVHRIIHTLIDKVVVLNTDVTIYWSFC

SEQ ID NO: 12206 - protein, 578 aa, synthetic construct
MGYVTKKAAQRFEEKKAAIYVRVSTQYQVDRASLPVQREELINYAKYALGISDYVIFEDAGYSAKNTDRPDYQQMMARMRTGEFSHLLVWKIDRISRNLLDFSVMYAELKELGVVFVSKNEQFDTSSAMGEAMLKIILIFAELERKTTSERVSAVFVSRANDGIWNGGKVPYGYSYDKEGKTFSIAEDEAKIVRLIYSLYESEKSIVRVARIMNERGLKSRAGNDWSPTTVHTILSSPFYSGTYRYNYRDESNAKRFREKGKDEWVLVENHHPAIVSPERQASVGVILESKRYNKNATYQRKNVHVFAGLLTCGCCGSTMAATTDKVRADGWRPSMYICSRRRKSEDCTNKYVSDVSLGPFVLNFFANLIKASNSFGRTTSIETLEKKLLRGEALSRVDHIERPGLEELYNHLRSGFDEKRFESPTIAATESSADLSERDLLLSEKRRLERALNRLKAIYLYGDDEMASKDFNIERERITKALSEVDSRINELDIANAFDLSLSDEAFMQKASQFILTQQLLDKRYVNYERFIRKIDPKIVKDFLNETVSNFCMKDGLTTSILLKNGIELRFSYKTAE

SEQ ID NO: 12207 - protein, 521 aa, synthetic construct
MKKVTKIDGVQKNTAINSRLRVAAYCRVSTSSDAQLESLEAQKSHYEQYINSREDWQFAGLYFDEGITGTKAEKRPELLRLITDCEARRIDFVITKSISRFSRNTTDCLALVRKLQSLEIPIYFEKENINAGSMESELFLAILSSMAEGESASISENAKWSVKRRFQNGTYKLGYTPYGYDWDGKNMIINPDQAAVVKRIFADILSGKSTNAIADELNAEKVPSKKNTNWTSSTIRGILANEKYTGDVIFQKTYTDENFNRHTNYGEVDQYMALDHHEAIISHSDFDVANALVNQRAAEKGIEKGSDKYQQRYAFSGKIICGECGDTFKRRIHSCTTYKYVAWACNTHLKNKESCHMKYVRDDEIKAAFITMLNKLIYGYRLILTPYLKVLENSSGDEAIHRIQHLEQLIAQNSEQREALTKLMAQGYIDQILYNQETNELLLQAETYRSDIEAITIGMTGDAAKVTETRLLLHFVSHTDMLTAYSEELFENYADHIEVMSRNEIRFVMKCGLTFTERIGD

SEQ ID NO: 12208 - protein, 522 aa, synthetic construct
MGNVMLIPARRQVGSNARKQEEEKPKLRVAAYCRVSTDSDEQATSYEAQVEHYTEYIQKNPDWEFAGIYADDGISGTNTKKREEFNRMIDDCKAGNIDMIITKSISRFARNTLDCLKYIRQLKDMNIPVLFEKESINTMDAKGEVLITIMASLAQQESQSLSQNVKMGLQYRYQQGKVQINHNRFLGYTKDADGNLVIDPEQAETVKRIYREYLEGLSMDKIAAGLERDGILTGAGGKKWHTSTINKILCNEKYIGDALLQKTYTTDFLNKTRVKNNGLVPQYYVEGDHEAIIPKDIYLQVQEELVRRRLVKTSANGKKRSYSCNHCFSQIVICGECGEMFRRLHWNNRGVKSIVWRCISRLESTGLECHARTINELVLQDVVVKAINQLLGDKSNYQAQLQLNIAAVIRASQATAIDSIDEKLMALQQELIQKANSKEDYDEIADEIFKLRELRQKTTVDTAARDEQIKRINDLQDYISQQTTYLTEFDESLVRRWIKQITIWDDRITVELKSGVSIDVDA

SEQ ID NO: 12209 - protein, 606 aa, synthetic construct
MAIQDFRSPKSRPNTTKYAVALCRVSTEDQFTKGLSVPEQRQRIQKWAYEHNVNILKWVELHHSAYRGLDEDPEVLELLEFAKNNAKVSLFLVDEKSRFARRKYLRVVWQEELRKHGVTVIGVSEPQYDRNTIHGIWLEGISETKDEARSIETAYHTTKGMMRNAATRDPETGYCYKNGGIAPDGYINKRVIRGKDSRGKDIVKLLWEIDENRARLIRYMVLDLWYQKKMSYKEIRDHLNSKGAEYQNRKGKPWSVTTIREICMRALEGVYSGYYYWNRTGRDLRGTGQKWKDADEWVVIENAHPAIITLDEWQELKEVMGPVVEKRKKNIVPTRTENSPYLFSGDNAAGEPMFVCLNCGSPINSQQVANKYYYICSAYKNKGRAGCNKGVAIRKDEVETKVLRAIKEYFTLKKIKVIVKEINNVLNEDNKDIDQAKKHLQKSIAETENAINNIMAAIQQGKESNVIPLLLGQLEKLQEEKQALKIELEELDKERPKAEKIDEYTILSKVHNLESVLSASDASNKEKRMAVRYFIRQLQFNPDTGELYVYFWHDPMGHDVKRLKLLKNKIGQNKKEDVESSSLDNISENIMISSGAGNRNRTGTIF

SEQ ID NO: 12210 - protein, 539 aa, synthetic construct
MAANTAVKKIRKIEAKPVQVIKGLPENAKTRVCAYCRVSTDNKEQESSYESQVFYYTNYINSRSDWTLVDIYADDGISGTSTAKREDFKRMIQDCMDGKIDMIITKSISRFARNTLDCLDYVRRLKEKGIAVFFEKENINTLDSKGEVLLSILSSLAQDESRNISENTRWGIVRQFEKGRVLVNTTRFLGYDKNEAGELIINEEEAKIVRRIFREYLEGKSYNAIAKGLMKDGIKTVTGNPKWWDSTISGILENEKYYGDALLQKTITIDFLRHKRVDNKGQAEQYIIEGNHPPIISKEIFDRVQAEKARRAAKYNNIEGDRQKYSNKYPFSGKVFCGNCGNIYRRRQWNSNNPSRKFVWQCKTYIMNGKKACAAKAVDESVLKDAFVRVFNQLYENREDFIKTLIENIEKVLLHKPSDREIEALENKIEELKTELKRLIRFQTNNGMDDEVYREEYKRISDELEKLREKRAEVDKDSILKESLKGRADEIIEVIKGRQEALEEFDEGIFNALVEKIEVVSPTHFVFELKSGARVEERI

SEQ ID NO: 12211 - protein, 525 aa, synthetic construct
MKVDIYLRKSRADEELEKTIGQGETLARHRAALLRLAKERNYTIVNIHEELVSGEELYFRPAMLEVLKDVENRLIEGILVMDIQRFGRGDTEEQGYILKKFKAANIKIITPGKIYDLSNEFDEDYLEFEAFMGRKEYKMITRRMQGGRIRSVEEGNYIATLPPYGYDILRVDKKTRTLTINEEQAKVVRMIFDLYVNHGMGYGSIANYLNELGIKPYSSIRKLNNQEYSGKWDGSMIGAILKRQIYVGNVVWKAKKIKKSKTPGKKKDVKLRPKSQWVICKGKHPPIIDPETFEKAQAILAGKYHPPYQVIRGLANPLAGLVVCGICGAKMQRRPYVKTEPFLICSNKCGIKSNRFSSVEKAVIEELKKYLHTLEIKLEAGPQKPFNDEIALLTQNLNELKNELKTLETQHLKTFDLLEQGIYDVATFKARSELLSNKITEVKNAIKACEAKIQSLNNANDNLNNTITQIKNVIDIYPTLDEPKDKNMLLKGILEKVEYYKEKDWGSDEFRLKLYPKTSSICTSY

SEQ ID NO: 12212 - protein, 489 aa, synthetic construct
MLKTVIYARYSSDKQNEQSIEGQIHECEQFAKTHDMVIIKHYIDRALSGKTDDRPSFLQMIKDSSSGLFDAVLVYKTDRFARNRYDSAVYKAKLKKNGIKIFYAKENIPDGPEGIILESMLEGFAEYYSAELSQKVKRGIKENIRKGLSFGGACPFGYKIVNKKYVIDDEQAPYVKKIFEDYAKGRRAIDIFNELNTLPNYAGKGRKWNRSSLNRMLTNKKYIGIYELEDVCVKDAIPPIIDEALFNKVQSRILFNRRHTTRAKVNYLLSGKLFCGLCEHSMTGKTGTSKTKAKYHYYVCSHRHCKQKKYHKELLEDIVIQYTVKDILNPKHFKMIAKKCLEIQQADNKTNDMLLILKKQLTAIKTKINNLMNAIEAGIITTSTKDRLEQLEQEKYKLELEISTQQLNSNRLLSEKQIIYMLNVFYNKRVDVSFYNQIIDCFIYKIYIYSDKICIVYNLNNSDKDVTYSDINELYKSSHLNSCGSPYDL

SEQ ID NO: 12213 - protein, 578 aa, synthetic construct
MAYPMKNTAADNRIIAIYVRVSTGYQVDKDSLPFQKKELKAYCKHILHVDLSQVEIFEDAGRSGKNTKRPAYERMMEKVRAGLVSHVLVYKIDRISRNLVDFSLMYDDFKYNRVTFISLNEQFDTSSAIGEAVLKIILVFAELERKLTSERVKDIMIGRATEGKWNGARVPYGWDWDPDVEQPVHSKIEAPYARGMYEMYLKVRSTGKIRDYNNSHNIPTKRGGEWTSKTVSDFLRNPMNKGDYRYNYRESARGRKKPEDEVIYQEGVFEPLVDPEVWERVNRIMDDNASKRNTGGLHPIMKNCNVFAGLIQCAECSSGFQVVKKDRRRKNGFAPSMYGCTSRFRKIHCPAPNVSEVQIGPFVINYISAMVHATKERFKIHSPAALESMLLSDPIFANIAGIESQGLNETFALLTGVSVSGSALWRTDPVKQSDTAATSSEIENLKKQIQKYNRAKERLEDAYYFSDDAMSEKEYLEKKNKFDAARVAAENKLKELTEVQIASHVDDSGFMKSASAFLLAHQLHAGVHIEYRDFAVTVEEESLKEFMNLVLDHISVKDRRVVEIVFSNGLSHRFIYRE

SEQ ID NO: 12214 - protein, 498 aa, synthetic construct
MEIQIREGNSIQKRKLKVCAYCRVSTDADEQENSLENQIRHYEEVITSNPDYEYAGVYSDFAISGFKEKRPGLQKMLADARKGKIDLILTKSVSRFARNTSIVLEATRKLKELNVGVFFELQNINTLSGEGELMLTILAAFAQAESESGSVGAKMVYQRKYEAGIPVQYLERSFGYTKDERGVYIADESEAVWVRKIYEMAADGYTPAAIKRYLNENGVKTVGGTKWIDSTVFRLIENEIYKGDYIMHKHFVNEERKLVRNRGEVDAWYIEDDHEAIVSPELWQKAQDAIEAKRDYLAEGSVIEEFTEDNYPYMNRIFCAKCGHPLYKRIYSNGNRLNWGCSGTKRYGKSFCEGINIPDGVLRKAWHFDGNMYIGEKPSVKGTKEFTYLKESSWKRRHKKKVPEAIPENTEEAYPYRKKIFCGLCGSRLVRHVNPKSHKVIWICNGAKRKGVAFCRGTRIPDSVIRGWGEIKKDIYIQRKDDKNGKKRYSYTSKKPTA

SEQ ID NO: 12215 - protein, 464 aa, synthetic construct
MARSVTVIPARNRQRETGRRAVQEKKIRVAAYCRVSTDQEDQLHSFEAQVDYYTKYINDHENYEMAGIYADEGISGTNTKKREQFKRMIADCEGGKIDLVITKSISRFARNTQDCLAYSRKLKNLGIGIIFEKENINTLDSTGELLFTILSSLAQDESRNISENCKWGIRTKFKNGEMHLNTFKFLGYDKDENGKLVINKEQAKTVRRIYRDFLIGINPAQIAKELTEEKVPGCNGQTKWYPSTIVGILKQEKHMGDALLQKTYTADFLTKRQVKNNGEIAQVYVKDSHKGIIDKQTWNAVQEEFERRERFMEAHGTDRYSYGADCMPFCEKVFCGECGSLFTRHSWRSRGIVQWQCKNHRKDGKVACSNAYVDNSDLEKGFVKAFNKLVADREKFMERWNQMKTDGSPLEKIRAEQMMEATENEPLGRFVPEIAQLVLAEVTVLGAKKYEFFFLEGSRIKVSV

SEQ ID NO: 12216 - protein, 514 aa, synthetic construct
MAKRKFNKGGEVRLVAYYRYSGGSGQTEQSIEGQRRDCEAYARLHNMTIQKEYVDRHISGKTDDRAAFQQMIADSDKGAFDMVICWKTDRFARNRYDSAVYKKRLRDNGVEIVYAAESNISGAEGIIIEGVMEALAEYYSAELAEKMRRGMRESALKGQAISRCRALGLKTDEHKRFVIDEKTAPTVRFIFEHYAAGESAMSIVEQLNAKGLRTSQGNPFNKSSIPRIIQNEAYRGVYISKSYDVRIEGAIPAIIDDELWERAQTMLKLNRQLKAKNEPKADYILSGKLYCSCGSLMRGMSGHSATGEVYRYYTCPNKDCHLRNIPKDDLEGKVMQSIVDHLLQPESMEALAEAMVEVQKADVEKPNAERVAIEQSLSDVRRRSKNILDAIENGTANAQLCARLDDLTEQEQTLSFQLSSLEKEKPVVFTKEQYLFLLEQFLMEPSERTPEYGRRLVNTFVTSMVVSDRELVINFNVSDETVNKNKKTSQTNLQKESSSGMRLVRVARIELTAS

SEQ ID NO: 12217 - protein, 521 aa, synthetic construct
MGNVMIIPAKRQVGNTSRRQEDKPKLRVAAYCRVSTDSDEQASSYETQVEHYTEYIKKNPEWEFAGIYADDGISGTNTKKREEFNRMIEACKAGEIDMIITKSISRFARNTLDCLKYIRMLKDKNIPVFFEKESINTMDAKGEVLLTIMASLAQQESQSLSQNVKMGLQFRYQNGQVQVNHNHFLGYTKDREGNLVIDPEQAEVVKRIYREYLEGSSMDKIAKGLEKDSILTGAGKKKWWTSTINKILRNEKYIGDALLQKTYTTDFLNKTRVKNNGIVPQYYVENNHEAIIPKDIFLRVQEELVRRRVVKTSANGKKRSYSCNHCFAQLVICGECGEMFRRIHWNNRGCKSIVWRCLSRLEATGMECHARTVNETVLENVVVQAINALLGDKSTYQAQLQQNIAKVIREAQKNNTDGIDEQLMELQKELLEKANNKEAYDEIADQIFKLREQRRQNTVDTAARDAQIERINALQDFIKQQSATLEVFDETLVKRWLKQITIWDDHCTVELKSGLKVDVER

SEQ ID NO: 12218 - protein, 519 aa, synthetic construct
MKKVTKIDKIQPAKNAEDKLRVAAYCRVSTATDAQLESLEAQKSHYENYINSRDDWCFAGVYYDEGITGTKASKRPELMRLLADCKAKKIDFVITKSISRFSRNTMDCLEIVRTLLNLNIPVYFEKENINTSSMESELFLSVLSTMAEGESASISSNNRWSIKKRFENGTYRLSSAPYGYKLESGGLQVVSEQADIVKRIFRELLSGKGMYSIAKELNAEQVPTQKGGRWTSTSVHNILTNEKYTGDCIFQKTYADSNFNRHINNGELNRYLIQNHHEAIISHEGFKAAVALIEQRAAEKGIESGSYKYQQRYAFSEKIICGECGNTFRRRIHKGKYNSYVAWVCNTHLSDTNRCSMLFVRDDALKLAFVTMLNKLIFSYRLLLKPYLAVMQSNTADEALLRIQYLENQLDQNAEQRSTLHKLMAQGYIDQILYTQESNELLLQARDFRSEIEVLNNTVAGDTTKVYETERLINYCKRGEMLTDFNESLFELFVDHILIYSRQKIGFVLRCGLTFEEMI

SEQ ID NO: 12219 - protein, 434 aa, synthetic construct
MKKTIVNIAPAVAETPRTKRVAAYARVSCGKDTMLHSLAAQIDYYRDYIMMNPEWRFAGVYADESKTGTKDNREQFQLLLTECRSGNIDMVITKSISRFARNTVTLLETVRELKSLGVDVFFEEQNIYTLSAEGEVMLTLLASFAQAESLSCSDNCKWRIRKGFEEGRASTCTMLGYRLVNGEITLIEEEAEIAKRIFDLYLAGCGLQKIANTLNEEGMYSIFGNEWHPTTVRKVLTNEKYCGDLLLQKVYRENHLTKRKCHNTGELPQYFVEDDHPAVVTRQIFMAVQDELKRRAKEKTQPVGSKSSFTGKIRCSCCGKNYRRKTTPYNIVWCCSTYNSKGKKYCPDSKVIPEETLKRAATEILKTDGFSDEAFETQICTIEAHPGNLLRFIFMDGSTAEYVWKDRSRSESWTDEMKAAAGRKAKERNTSHGK

SEQ ID NO: 12220 - protein, 548 aa, synthetic construct
MANKTVKKIEATKPTLSAQYSTFTRKRKVAAYARVSTAKEEQENSFDAQVSYYTQKIQANPEWVFVEVYSDEGITGTNTKKREGFNRMIEDALAGKIDLILTKSVSRFARNTVDSLVTIRQLKEKGVEVFFEKENIYTLDAKGELLLTIMSSLAQEEARSISENTSWGRRKSFADGKVSLGYSNFLGYDKGPDGELVINEEQAKIVQRIYSEFLAGKTPGGIAKGLTADGIETPGHKKVWQASTVLNILKNEKYYGAAILQKEITVSYLTKEKRPNTGELPMYYIEKDHEPIVSPETFQMVQEEMRRRKEAGSNMQCVSIFSSRVICGDCGGYYGRKIWHSNTKHASWHWHCNAKFQKRKYCETPTLKEESLEETFVEVFNGLIANRKEIEENYRLCIDTITDDSEYRRQLEDLNNGCGEVQTLIRSLLMTYSRQDTADDIHEKLKEYEDRLDTMARLKQELDLKIAACAAKRVQITGFLNELMKHDAPLAKFDPLVWQAVINYATVNRDCTITFTFRDGTEKTVPIKNGVRPYTKRNKPQEVDGNDG

SEQ ID NO: 12221 - protein, 490 aa, synthetic construct
MTDKNLLVITPHRKEPGKQRIAAYCRVSSRSDEQLNSLTNQINFYRSLFENDDTVVFVGIYAEEGLSGTQAESRPQFMKMIEDCRSGLIDCIWTKSVSRFGRNTVDTLIYTRELRSLGIDVFFEKENIHSTESSGELMLTLMAAFAESESETMSANIKWGKRRRYEQGITGSITLNGMYGFRQNKGIVTIVANEAELVRQIYKDFIDGYSYGEIADRLIAEGVPTRMPGASWAKTTVQHIIRNEKYCGDCLFQKAFIANPITHQQVRNNGELPKYLVEDCLPAIVDKETWKLAQAVAARHTPHRQAPNERYPFTGKLFCGVCGKPYYYYHYTTTNKKPLAAYRCMSHKTQSAVEVPGQTYTPPHKATFNRNASAKLIAYRERYCKPPKERPMLCTDVRIPIDLPQKAFCRAWNLIVAKKLRYQATLRSTVDNAEDILVRYRAEEMCLLIDEIGKITEFSYPLMLKTLDRVVVNTNGKLSFIFQSGIKITV

SEQ ID NO: 12222 - protein, 448 aa, synthetic construct
MERIIQKVTPPARKKAPKLKRVAAYARVSSGREAPLHSLSAQISQYSGMIQKTPGWQYAGVYADEALTGTKDSRGEFQRLLADCRAGKIDMIITKSVSRFARNTVTTLRTIRELRLMGVDVFFEEQNIHTMGEDGELLLTLLAAYAEEEARSVSENQKWRIKSNYEQGLPWSITMYGYRQVNGRLEVVPKEAEIIRLAADLYLEGYGRCKLEDAFAAVNIKGRHGANMGGNSIVDLICNEKIVGDMLLQKTFVVDPITKEVRKNNGEKPQYFVEGSHEGILDRETYEKVLAERARRAAAYKPRSGSYERNRFPFSGKIHCGKCGKSFTRKVLNGNTPYEKRGWLCRTFNQKGKAHCDAKQIPEEILKRVSAEAMGLPEFDEAAFAAKVEEIQVPENGVLVFVFYDGHTVTKTWDNPSRRHSWNPENRQRARELALRQAAERRLAKCQQ

SEQ ID NO: 12223 - protein, 512 aa, synthetic construct
MQIRNAVAYCRFSSDNQRSESIDAQIRAIKEYCKNNKYMLTHIYKDEALSGTSDKRDQFQQMITDSKDGLFDAVIVHKLDRFARNRYDSAIYKKKLKDNGVVVLSVLENLDDTPEAVILESVLEGMNEYYSKNLSREVRKGLNENAIKCIHNGGIPPLGYDVTPDKHYCINEKEAAAVRLIFNMYSENYGYRLIINKLNELGYKTKLGRSFSVSSLHDIIINEKYRGVYVWNKRKSKKAGNHAYKDDEEIVKIEGGMPRIISDDLFFKCQKIKKTKIKPRRHSSHEYILTGKIFCGKCGHSYCGSSAYRNKNNNMVYNYCCMNRKNKKGCDNKAINADKLEYAVLEAIRDTFLNDDAIKLIANKMDHYLKETVSTVDKDAVSKLNRDLENIDTKQERLIDLYLDEKLSIESLNKKSALLDQEKTIIKNKLNELSNIVKLDFNIDEIIVFLNDMKGKLNDTDSQTKRTLIEAFIYRISINEDDVDIMLYLDNLIDKNCDNIGGGEGNRTPVQA

SEQ ID NO: 12224 - protein, 406 aa, synthetic construct
MRKEWLYLKIIKLPLLKEEFKKRKVAAYTRVSVSSDSLLHSLANQVSHYTEMIQKNPKWEFVQVYVDEGVTGTSTESREQFLKMMDDARAGRFDLLLTKSVSRFARNTVDLLESCRELKSLNVEVRFEKDRISTFNSDGELVLSLLASYAQAESESISQNIKWGKTKQMQDGVYHHFTRCYGYDWDGDIYEIVEEEAEVVRFIYKAYLDGMSPKKISELITAKTVTGKNFTRGTVKDILKNRIYIGDRVLQQFYSPRVRKCNRNYGEVPKYILPEVHEPIIAREMFDEVQNVMQQKAKDTPKKTFTCFSGRLKCGHCERALCRRTLHGKKIWKCQGNEISKTCQARYITEEKLKEYTFSIFEDENEFKMRVDHIKVYDDYLEYIFKDDTMKTIERKEPKRRCRQGK

SEQ ID NO: 12225 - protein, 510 aa, synthetic construct
MSYFIYARKSRKDAELEALGIDVLERHITTLLELAKTLSLPIGAIYREVVSGDSIDTRPVMTQVLSEVEACMWDGALVMDVDRLARGDTIDQGRVQRAFFYSNTRIVTPNKTYDPANEYDNEYFEFSLFMSRREYATIKRRMQRGRERSSSDGYYVGNVAPYGWERVIAPDGKHYSLAPHQTEAPVLDLMYDLCGNKQYGYQKACTYMSNMGILARSGKPFTPSTLKGIISNPANIGKVRWGHRKTVRAVKDGRVVKSRPKATDYILSDAAWAPRISPDLFKRANQPKGCFSAPVRNDRPIQNLFAGLVRCSQCDRLMVRKKAQTKTPYDMLICQYAECSTVGIRIDELEEALLGWLKDYIAKYEFSDTHEEDTAAIAAKELIVTNFEAEHQTLLKQRESLFDFLEQGIYTKEIFIERSNALEQRIRDCMNNITAAREDLHITIARQANRKNFVPKCKNLLSEWDSLTVSEKNSALRQLIDRIVLTKTKRNKKNQKNSEFTIDVYPKVPK

SEQ ID NO: 12226 - protein, 520 aa, synthetic construct
MKRITKIIDTKVLSVKKKIRVAAYCRVSTARDEQLISLDAQKAHYENYIKSNDEWEYAGLYYDEGVTGTKKEVRDGLLSLIADCEKGMIDLVITKSISRFCRNTADCLELVRKLLDLNVYINFEKENLNTGSMESELMLSILSSLAESESVSISENEKWSIKRRFQNGTYIISYPPYGYFNIDGEMVIVPEQAEVVKQIFADTLAGKSTHIIGKELNERGVISKKGGKWTPGTINAIIRNEKYTGDVIFQKTYTDSSFNRHTNYGEQDQYLCTAHHEAIVSHEVFNKANEAISQRGKEKGNGENTQRYQNRYGFSGKIRCGECGSVFKRRIHNKPSGNYVAWCCTHHIEDKYSCSMKYITDDSIKVAFLTMMNKLIFAHQVVLRPLLRSLQGLDDKDRLLQIQEYETKLEKNMEQRQVLTSLMASGILEPALFNSENNTLIQEKEMLETEKNKLMHSVSGDRTKFDALEKLIKYVSGSEMLKEYEDEVFLAHVDKITVVSREEIIFLLKCGLELRERMAY

SEQ ID NO: 12227 - protein, 521 aa, synthetic construct
MNKSVTVIPARRRIGNTVKMEDKPKLRVAAYCRVSTDSDEQATSYEAQIEHYTNFIQKNEEWQLSGVFADDGISGTNTKKRDEFNRMIEECMAGNIDMIITKSISRFSRNTLDCLKYIRLLKEKNISVYFEKENINSLDSKGEILLTIMASLAQQESESLSKNVKLGLQFRYQNGEVQVNHNRFMGYTKDDEGHLIIEPTEAEIVKRIYLEYLQGASLKQIGESLESDGILTAAGKARWRPETIKKILKNEKYIGDALLQKTYTVDVLTKKRVKNNGIVPQYYVENSHEPIIPRDLFMQVQEEMVRRANLRGGKGGKKRVYSSKYALSSIVYCGQCGDIYRRVHWNNRGYKSIVWRCVSRLEEKGSECTAPTINEEILQTAVVKAINELLANKEPFLSTLQKNIAAILNEGNDNATDDIDSKLEELQQQLLIQAKSKNDYEDVADEIYRLRELKQNALVENAEREGKRQRIAEMTDFLNEQSCELEEYNEQLVRRLIEKVTIYEDKLTVEFKSGIEIDIEI

SEQ ID NO: 12228 - protein, 525 aa, synthetic construct
MAIERKVTVIPAVEAFIPTNIESNSRLKRVAAYARVSTENEEQLSSYEAQVDYYTRYIKANAEWEFVEVYADEGISATSTKKRDGFNRMITDALEGKIDLIITKSVSRFARNTVDTLTTVRKLKDKGVEVYFEKENIYTLDSKGELLITIMSSLAQEESRSISENVTWGQRKRFADGKVSLPYKQFLGYEKGEDGLPKIVESEAKTVRLIYKLFLEGKSTSWIAKYLTEHKISSPARKDKWQETTVRSILKNEKYKGDAMLQKSFTVDFLTKKKKINEGEIPQYYVENSHPAIITSEVFDLVQHEIKKRKDAKGYKTVGGCFSGKIVCGECGSFYGSKVWHSSSKYRRVVWQCNSKFKNTEKCNTPHIYEDKLKQAFVEVFNNILKNKNEIIQEYEAIIHALTDISELDKESDKLQSEMEIITEMLRKCVEENAHSALNQIEYEERYNVLAQRYQSIKDELEGIEEKRLEKSTKHERILVFIKELNQREILVTEFDEKLWNETVEKVVIDTDKKMTFVFKDGKEL

SEQ ID NO: 12229 - protein, 540 aa, synthetic construct
MAATAARRVVREIPRASLFVYSTDAVQKMIVAAYARVSTEKEEQEDSFERQVEHYTALIKSKDEWEFGGIYADPGITGTRAERRPDFMRMIADCRAGKINKVLVKSISRFARNTVDALNYIRELKDLGISVYFENENIDTLTPGGEVLITILAAMAEQESRTMSTNIKWTYQKKFKNGEIVLNTGLMLGYVKAGKDAEGRDTYEINENEAAIVRRIYGEYLTGVSIHRICRGLEADGIPTKLGKKRWAYSVVHSILCNEKYTGNAILGKTYKPDVLTKYRKKNNGQAPMYYVEETHPAIIDKDMFDMVQSEMERRKETKEQAVGSGKYSSKYPFSGLLVCGGCGHKLRRHVRRVGSGKTVPAWGCCNRISNGRDVCDSHHVNEETLQRTYLAAISEMVEDSEEIMTAVRESAGLVLQPENEETLNRIGQEIIEVQEAVLALHKAKQSCSVSATDYATRIQAYSQRMQELETKQEEQKSVATRYAEVKAWLDAFEKHISDGTIMDADDSTILKQLVEQIIVGSSGIEIQFKCGVSIEKDYE

SEQ ID NO: 12230 - protein, 491 aa, synthetic construct
MDRRRKRAVAYVRVSTASSAQLHSYEFQEQYWHDKLDSDPYVELVHIYADLGISGSSMDKRPQLLAMMRDARAGKFDIIYTKSVSRFARNTIELLEAVRELRDIGVEVVFEKENIRSSDPASELMLTVAATIAEDDLKVDSERQRWSFKRRFENGWISIGNGMYGYRMLEDNTLEIVPEEAAVVRRIFEMYINGAGSSMIAATLDREGIPSRIGKGWRPQTILEMLANEKYMGDSLMGKSVTINGRQFDNMNGEYGQRYYMEDTHEGIISKETFALVQELRLQRQNRKLVGQPIPAYPFTGIIECGECGKHYQHKVNNSGKKWQNDIWCCATSLKKGVAVCSCTRIKDSVLREKFIEAYNEFVTQRSQGDNIAALQSVVSGLKKEESELAALRMQRLITEAGFRAEQRRIKAKITELTAKINEQRSKEVTESDYTTITEFDEAKVAKFITKVIVRRWMVTFVFYNGAKITRAYSNGQAGNKPGWNKKKEVV

SEQ ID NO: 12231 - protein, 501 aa, synthetic construct
MSKLAVIYARFSSDKQREESIEGQIRECTAFAAANDIKIVGTYIDRAMSAKTADRPQFQAMIRDSSKQTFDYVIVYQLDRFARNRYDSATCKARLKKNGVRVLSAKENIKDDPSGIILESVLEGMAEYYSAELAVKVKRGMTDNVLEGKWPGGTVPLGYKLNAQKHLEIDPVGAECIRFIFKKYLDGWPRVKIIKYLNERQYKTSKGKSFSRSSLNTILRNQIYAGLYAWKNVPFPEGSIPAIISTADFEKAQEYISQRKTRLAAPSDVYALIGKLYCGQCGSTMIGMSGTSQTGTRHFYYACLNKRHQKQCTSKNIRRDDLEKLILQKTVSLLQDKNALELITDQAMKIIQHDQANDIELKNICAQIDDISARLKNCMNAVDNGLVTASIVEHIKDYEKQLETLKDAKETAERKKEAIYITADHVRFFLQSLVTRCNEKTNKYKDDLFSAFIRQVIVYDDYIEIRYNYKKELPTLPNPVTINSSFLATMVDRQGIEPWTP

SEQ ID NO: 12232 - protein, 535 aa, synthetic construct
MKKKQPNTRHGRAAIYARYSSHNQREASIEQQVKACRELAVRLGLDVVETYEDKAISGKSDRRPSFQHLLRDAEKGYFDCVLAWKSNRMGRNMLQAMTNEARLKDWGVRTFYAEEDFDDTAAGRFALRNMMNVNQFYSENMAEDITRGMMDNASKCLSNGALPLGYKAGENGRVVLDKAQAAVVQEIYTRVACREPFVDIAADLNRRGIKTKRGGPWTKSSFYTICRNERYRGIYIYDDVRVEGGVPRIVSDGLFYRVQEVLKVKKTPQSARHHTGAEDYLLTGKLFCGKCGRPMTGVSGTSRSGEMHYYYTCQKRRREHACDKKNVIREQIEKSVAQAIKQYMLTDEMIQHMADATMAYNARQEKDLHLQDLQGQLAAVKTSAANLLKAIEMGVITETTKARMVELEQEQGRLNAQIENARAELVPITRDNFVSLLHIYRDGDINDSKYLASLFETFLVRVDLYDDHFLIWFNPLGQKTPADIPITSIENGDADEFFDECRSKNVFDWGGKWSTKIKAPAVPRRVFLFWCSVSC

SEQ ID NO: 12233 - protein, 510 aa, synthetic construct
MTKTAVIYARYSSNRQREESIEGQIRECKAFAAQNNLTIIHEYIDRAFSAKTINRPDFLKMIEDSSKHAFDYVIVYTLDRFSRNRYDSAVYKYKLKKNGVRVLSAKEKIADDPSGIILESVIEGCSEYFLADLAQKVKRGMLENVINGKWPGGNIPYGFYLGPDKHLHFNHEQVSGVRLIFSLLASGQKYSSIVKTLNEKGYRTSFNKPWTRNSLSHIARNPIYIGTFNYQGQVFKNYVPPMVSLADFDAVQRMFNKRKRTGLVSPKSANYALVGKIYCGLCGCAYTGVSGTSRNGNKYYYYTCSSKNNGSEKSKRLDKKCSSKNLRRDELEKAILDTTIQILSAPNSIKSIAKQVAAFQEKNKDSGIVERLEKEMEEVQKKLTNSIKAIEQGIFSETIKNNIERYEHEVLELQEAISKEKLIAKAFTITEEFVEYYLTSFLKKIKKYDECKLDMFETFIRRIIVFDDHIEIQYNYNKDIPILDNHAVLPCSSMHNLVGPPGFEPGTNRL

SEQ ID NO: 12234 - protein, 581 aa, synthetic construct
MYGLNSDFQKRDVAIYARVSTEHEAQLSALENQIDWYKPILEARPDWTLTAQYIDEGITGTSAEKRPRFMQMIEDARQRKFDMIITREVSRFARNTVDTLQYTRLLKEYGVEVFFINDNIKTFDGDGELRLTIMATLAQDESRKTSIRVKAGQQTSMQNGVFYGNGNILGYDRVGKEMVINPEQAKTVRMIYDMYLSGMGVTAIQYELEKAGRLTAMGKERWFSSYIAKMLRNSFYCGIITYHKEYTPDFLKQKKIKNYGDLEYVQVQGTHEPIVTVEEYEQVQKLMDAKSVIMKNHNKGKRRVGRMQHTTAFGRLMICQCGNKFNLRFHSRDGRTDGVDYQCYTSVNRGSVAKRLNKGISIEHSCESPYIQGWKLEMMAEQVFDRYIENADKVMDLSYAMLEKHIADQEELPDNTDVIQRKQGEIEKLMNKRTNLIEMRAEGDIDKEMFRSKKQEIEDRVAKLTEEIKGLQPEKEPTSNEDYSAKLLELRERLKEYTGFDYSVIPESIVEAFVERIWVSKDEFRWYLRTGSKEKGEFDPDNHIKIGSFTLTIDDAKKYIYSFSTRRRVYKWVDLNVSVWI

SEQ ID NO: 12235 - protein, 521 aa, synthetic construct
MRVVQRIPATIRNFKTKPLDTQQKRRVAGYARVSTDHDDQITSYEAQVDYYTHYIKGRDDWEFVGIYTDEGISATNTRHRDGFKRMVKDAMDGKIDLIVTKSVSRFARNTVDSLTTVRKLKDKGIEIYFEKENIWTLDAKGELLITIMSSLAQEESRSISENVTWGHRKRFADGKVSVPYRHFLGYDKGPDGNLAVNKEQARTVKLIYRLFLDGYTFHSIARELTARGLETPAKKKRWYPRTVESILTNEKYKGDALLQKRFTVNFLTKETKMNEGEVPQYYVENNHEAIISPQVFDWVQEEIKRRREGRSRYSGVSIFSSKIKCGQCGGWYGAKVWHSTDKYRRTIYRCNDKFKSHCKTPHLTEDDIKEVFLRAANQLIENKADILNSITLLKERLTDKEALEKERDRISTDLNLLADKVQQLIVENARVAQNQDDYDQKYSELVSRYEAAKKQYDKTCDDIQYRKARSRQMDSFIKELQEQELIKEFDARLWGSLVDFITVYSKDDIRVTFKDGTEIKG

SEQ ID NO: 12236 - protein, 477 aa, synthetic construct
MSNSSSFPAKISAIYCRESTEKQNIQSLIDMCKKAAKKINLQNIKVYYDVASGYNKDREQYSKLKEDIQNNLVDTLVLYESSRLTRDELEHHIFYGLLRVHNVKVYTVTHGWLDLQDADDTFLTNLLNLLDSREGRKTAKRSKDRMTELAEQGRWTGGPAPLGYKLVNKELVIVPEDAEKVKTIFKLFLDGKTRQSIANFFGYEVKKVRRLLENSVYIGKLKFHSVEIINKKKILHKDYKVLNGIHEPIIDESTFSLVQGKLKNIKVERNTDVYIFKDLIKCTCGRKMYRVVNKYNYLKKSTNEISRKTENLYYCRTSDKYKSLGCGAIGIHEEELFEEVMASLKKIIFSLEVENIDTKFDDYQSQLVLYKKELASLSRKEELLARQLLNSLISEEVFEKLMKELKEKKAFLEEKIKNLTTLITNKKNTNKNSEILKKYFFKLEKEKAPEKINNFLKLIIDEIEMVNDYRFYIHLKF

SEQ ID NO: 12237 - protein, 578 aa, synthetic construct
MAYPMKNTAADNRIIAIYVRVSTGYQVDKDSLPFQKKELKAYCKHILHVDLSQVEIFEDAGRSGKNTKRPAYERMMEKVRAGLVSHVLVYKIDRISRNLVDFSLMYDDFKYNRVTFISLNEQFDTSSAIGEAVLKIILVFAELERKLTSERVKDIMIGRATEGKWNGARVPYGWDWDPDAEKPVHSKVEAPYARGMYKMYLEVRSTGKIRDYNNSHNIPTKRGGEWTSKTVSDFLRNPMNKGDYRYNYRESARGRKKPEDEVIYQEGVFEPLVDPEVWERVNRIIDDNASKRNTGGLHPIMKNCNVFAGLIQCADCGSGFQVVKKDRRRKNGFAPSMYGCTSRFRKIHCPAPNVSEVQIGPFVINYISAMVYATKERFKIHSPAALESMLLSDPIFANIAGIESQGLNETFALLTGVSVSGSALWRTDPVKQSDTAATSSEIENLKKQIQKYNRAKERLEDAYYFSDDAMSEKEYLEKKNKFDAARVEAENKLKELTEVQIASHVNDSGFMKSASAFLLAHQLHAGVHIEYRDFAVTVEEESLKEFMNLVLDHISVKDRRVVEIVFSNGLSHRFIYRE

SEQ ID NO: 12238 - protein, 454 aa, synthetic construct
MECVAYLRVSTEKQAEEGNGLDSQKRDIENYCRKNQLIISDWYEDDGFTGSNMNRPALQRLINDCSKKKLKCVVAFKLDRLSRSMVDGIYLIERVFIPNGVDFRCVHDSVSYDSPMEQAYTQMMAVFAQLDKNTMLLRMRGGMLERVKQGYWMGGGNTPYCYRYSKEDGILVPIPERKEMALRAMNLYISGYSDVRIQKLIGFKSEFVTRQVLTSPVNIGMIPYKGKLYKGRHEPIFDIKVFELAQELRKTRKQGKSFCVNHENQLLTGLCYCGVCGCKMRYQKWTHGKHKIYCYSRDNGMSYLPNYNPNCNNSLEWAEDIEKQVEDEILKISLNLSSHKPKERESCLDILSKQLQKEKTKLKRLYTLYAEGNDTVLEMIKETESGIDELKLKIQNEMKNPDNSQKKEFVYDNIKKLADVWEHIDKQNKNRILKTIISKIIIVNGNIEIQLKKF

SEQ ID NO: 12239 - protein, 467 aa, synthetic construct
MIRMARSVTVIPARNRQRETGRRAVQEKKIRVAAYCRVSTDQEDQLHSFEAQVDYYTKYINDHENYEMAGIYADEGISGTNTKKREQFKRMIADCEGGKIDLVITKSISRFARNTQDCLAYSRKLKNLGIGIIFEKENINTLDSTGELLFTILSSLAQDESRNISENCKWGIRTKFKNGEMHLNTFKFLGYDKDENGKLVINKEQAKTVRRIYRDFLIGINPAQIAKELTEEKIPGCNGQTKWYPSTVTGILKQEKHMGDALLQKTYTADFLTKRQVKNNGEIAQVYVKDSHKGIIDKQTWNAVQEEFDRREKFMESHGTDRYSYGADCMPFCEKVFCGECKSLFTRHSWRSRGIVQWQCKNHRKDGKVACTNAYVDNADLEKGFVKAFNRLVTDRDKHMERWQQMKSDGSPLEKIRAGQMMEAVENEPLTRFVPEIAQLVLCEVTVLGAKKYEFFFQEGSRVKVSV

SEQ ID NO: 12240 - protein, 498 aa, synthetic construct
MEIQIREGNREQKRKLRVCAYCRVSTDADEQENSLENQIRHYETVIKANPSYEYAGVYSDFAISGFKEKRPGLQKMLADAQKGKIDLILTKSVSRFARNTSIVLEATRKLKELNVGVFFELQNINTLSGEGELMLTILAAFAQAESESGSVGAKMVYQRKYEAGIPVQYLERSFGFKKDERGVYIADESEAVWVRKIYEMAADGYTPAAIKRYLNENGVKTVGGTKWIDSTVFRLIENEIYKGDYIMHKHFVNEERKLVRNRGEVDAWYIEDDHEAIVSPELWQKAQDAIEAKRDYLAEGSVIEEFTEDNYPYMNRIFCAKCGHPLYKRIYSNGNRLNWGCSGTKRYGKSFCEGINIPDGVLRKAWHFDGNMYIDEKPSVKGTKEFSYLKESSWKRRHKKKVPEAIPENTEEAYPYRKKIFCGLCGSRLVRHVNPKSHKVIWICNGVKRKGVAFCRGTRIPDSVIRGWGEIKKDIYIQRKDDKNGKKRYSYTSKKPTA

SEQ ID NO: 12241 - protein, 504 aa, synthetic construct
MEIQVLEARSLKDYRKKVCAYCRVSTDALEQENSLENQIAYYENLIQSNPEYEYAGVYYDFAISGYKEKRPGLQKMLMDARNGKIDLIYTKSVSRFARNTAIVLKASRELKELNVGIFFELQNINTLSSQGELMLTILAAFAQAESESGSIGAKMVYQRKYEQGIPVQYLERCFGYTKNEKGEFVPDTEQAKWIVKIYEMAAEGYSLSTIADEMNAAGIKTDKGAGWVESTVKRILENEIYKGDYIMHKNYVNEERKLVRNRGEVDAWYIEDDHPPIVSRQLWDKAQAARKKKRDYLDMDCQIREVTEENYPYKGHLFCAKCGSLLTHRIYSNGNRMSWDCSGRTRYGKDFCDGIHVPDTAVRQWQFDGNIYISVKDSRKSIKEFSYIKESSWSRRHKKKEFVRDVPELTEEYYPYYRSIFCADCGSRLVRHIKKHGDIVWECNGRKRKGAAYCEGVRIPDRVVKAFMPIRKAIYIKERKGRNGTKHYSYSCKKPERAAREEQD

SEQ ID NO: 12242 - protein, 435 aa, synthetic construct
MAAYCRVSTDQEDQLHSFDAQVDYYTRYISDHPNYEMAGIYADEGITGTNTKKREQFRRMISDCESGKIDMVITKSISRFARNTQDCLQYSRMLKNLGIGILFEKEHINTLDSSGELLFTILSSLAQDESRNISENCKWGIRSKFKKGEMHLNTHKFLGYDKVDGKLVINEREAKIVRRIYREFLWGHSPQEIAKGLEDEKIEGCMGAKKWYPSTVINILKNEKHMGDALLQKSYTADFLTKKQVKNHGEVTQVYVKGSHIGIIDKEIWNAVQLEFARREEFVKEHGLKGYGYGRECNPFTSRIFCGECGSSYTRHTWKSRGIMQWQCKNHMTNGKVTCVNRVVSQSDLELGFVRAYNMLMSRKENLIPRWKKTIETGNALEKLRAKQFMELSEQPKLECYVPELAQLVIQMVIIKGAKKYEFTFMDGSRETVSV

SEQ ID NO: 12243 - protein, 527 aa, synthetic construct
MKSMKFPIDLSMLTEEEIDQFRQDPSTLFEGDTDVSLYLRFSSERQREQSIEGQLRDCRSFCKVNRYRIAAIYVDRATTARKDVEKRIHFQEMIRDSEKKPWKYVVVWKLDRFARNRTDSALFKFRLRKNGVRVISATEAISEKPEGIILEAVLEGMAEFYSADLSQKITRGMRESALKCHSIGGHVPLGYKIEDHKLVVDLNTAHIVQEAFQLYANGETVAEICRMFNTKGYRTAKGAEFNRNSFKSMFRNERYIGVYTYRDIRIEGGVPAIIDKELFETVSHRLSVNAEAPARGKAKVDYLLAGKLFCGHCGGSMNGESGTSKTRAIHNYYTCYSRKRHHSCDKRPLKKEWIERIVAQDAMELMSDEVIEELADMAMAQTDQDLKENTRIPELTERKKEIESGIANITKAIEKGIASDSLMERLVELEKDKKKILRLLEEEEKYVCRIDREQIIFWLEKFKGGNLEDEGFRRIIIDLIVNSVTVWDEPDGFRITTAYNLTSCKNKTYRVSPSSGKGFGFEGSEST

SEQ ID NO: 12244 - protein, 553 aa, synthetic construct
MKTTDQPQVKQYVIYSRKSKFTGKGESIENQIELCRQYIAMHFGEDEAEHALVYEDEGFSGGNLERPQFKQMMKDSQKIEFAAIVVYRLDRISRNIGDFAKLIEDLGDRHIDFISIREQFDTSSPMGRAMMYIASVFSQLERETIAERIRDNMHELSKTGRWLGGTTPTGYASESLSSVTVDGKVKKACKLKPIPEEIQLVKTIFSVFTESGSLSKTDQYLLEHRCVTKRGKQFTRFAIRGILTNPVYMIADDTAYQYLKENNVDLFAEPSEFDGEHGIMAYNRTLQRPGKATQIRPMEDWIVAVGKHPGIISGANWVRVQSMLDVNKSKSYRKPRSNVALLSGLLRCGECGDYMRPKLTGRTNANGELIYTYMCSTKERSHGTVCSMKNCNGNTLDAKIVEEIRKVATDKKDFGQLLSKTKKVINDNKASYEAELTLLVKNHAETEARIKRLVESLSVASETSAKYVMEQIDELHRQSEQEQTRIAELEKLARQSNALSQNLFFYRDMIESFADTVDSTTIEERRRLLRTIVKKVVWDGKNVYVYLFAEDGE

SEQ ID NO: 12245 - protein, 502 aa, synthetic construct
MEIQIREGNREQKRKLRVCAYCRVSTDADEQENSLENQIRHYETVIKANPSYEYAGVYSDFAISGFKEKRPGLQKMLADAQKGKIDLILTKSVSRFARNTSIVLEATRKLKELNVGVFFELQNINTLSGEGELMLTILAAFAQAESESGSVGAKMVYQRKYEAGIPVQYLERSFGFKKDERGVYIADEEEAVWVRKIYDMAAQGYTLAAIKRYLNENNVKTVGGAKWLDSTVLRILENEIYKGDYIMHKYFVNEERKLVRNRGEVDAWYIEDDHEAIVSPELWQKAQDALEAKRDYLAEGSVIEEFTEENYPYMNKIFCARCGHPLYKRIYSNGNRLNWGCSGTKRYGKSFCEGINILDGVLRGAWHFDENMYIGEKQTDKGKKEFTYLKEASWKRRHKKKEPEPIPENTETEYPYREKIFCGLCGSRLVRHVNTKNHKVIWVCNGRKRKGKDFCDGTRVPDTIIKGWGEVKKDIYIQRKDDKNGKKRYSYTSKKPKGADRA

SEQ ID NO: 12246 - protein, 464 aa, synthetic construct
MARSVTVIPARSQKVRTGHKAVQEKKIRVAAYCRVSTDQEDQLHSFEAQVEYYTKYINEHENYEMAGIYADEGISGTNTKKREQFKKMIADCEGGKIDLVITKSISRFARNTQDCLAYSRKLKNLGIGIIFEKENINTLDSTGELLFTILSSLAQDESRNISENCKWGIRTKFKNGEMHLNTFKFLGYDKDETGKLVINKEQAKTVRRIYRDFLIGINPAQIAKELTEEKVPGCLGQTKWYPSTVIGILKQEKHMGDALLQKTYTADFLTKRQVRNNGEIAQVYVKDSHKGIIDKQTWNAVQEEFDRREKFMEAHGTDRYSYGADCMPFCEKVFCGECKSLFTRHSWKSRGIVQWQCKNHRKDGKVACTNAYVDNADLENGFVKAFNRLATDRDKHMERWQQMKSDGTPLEKIRAGQMMEAVGNEPLTRFVPEIAQLVLCEVTVLGAKKYEFFFLEGSRVKVSV

SEQ ID NO: 12247 - protein, 524 aa, synthetic construct
MAGAKNITVIPAKKRVGNTVTAEDKPKLKVAAYCRVSTDSEEQATSYDAQVTHYTEFIRKNPEWEFAGIYADDGISGTNTKKREEFNRMIEDTMAGKIDMIITKSISRFARNTLDCLKYIRQLKEKNVPVFFEKENINTMDSKGEVLLTIMASLAQQESESLSKNVKMGIQFRYQNGEVQVNHNWFLGYTKDENGHLIIDEDQAIIVRRIFREYLQGASLKTIADGLMADGIPTATGNKKWRGDGIRKILTNEKYMGDALLQKTYTVDVLTKKRVSNNGIVPQYYVENNHEAIIPRQLFMQVQEELFRRAHLKTEGGKTKRVYSSKYALSSIVYCGKCGDLFRRVAWKARGASYNKWRCASRIEKGPKEGCDADAISETEIQNAVVRAINKTLGGREQFLVQLQHNIEDVLNGNSTATLEYIDQRMAELQEKLVMCVNKNAEYDVIANEIDALREKKVAVVTKDTEQEMLKKRIEEMRQFLQTQSSRVTEYDEQMVRRLIEKITVFDNKLIFEFKSGMTLELKR

SEQ ID NO: 12248 - protein, 520 aa, synthetic construct
MKNVTKINQVDFSIFKKTRVAAYCRVSTDSDEQELSLETQKNHYESYIKANSEWEYAGIYYDDGVSGTKTAKRDGLLRLMEDCEKGLIDLVITKSISRFSRNTTDCLALVRKLLNYDVYVIFEKENINTGSMESELMLAVLASMAESESRSISENEKWSIKKKFKNGTYVISYPPYGYANVDGEMVIVPEQAEVVKEIFAGCLAGKSTHIIAKELNEKGVPTKRGAKWTGATINGILTNEKYIGDALFQKTITDASFKRKRNYGEEEQYYCENHHEPIIDKDTFEKAKEAIRQRGLEKGNCSEDTAKYQNRYAMSGKIKCGECGRSFKRRYHYTSHGKSYNAWCCGGHIEDSSSCSMKFIRDDDLKRVFLTMMNKLVFGNDLVLKPLLISITTNNSKKNVNSVEDIEKEMKSNEEQRKQLNTLLTNGYLERPVFAEAHNKLIMEYEHLVAKRDLLFRMDDAGYTMEQALKELVDFLNDAKPFTEWEESLFERFIEKVKVLSREKVEFEFKCGLKLKERID

SEQ ID NO: 12249 - protein, 544 aa, synthetic construct
MKVYSYLRFSDPKQATGNSIERQIQYANRWAEERGHDLDQTLSLRDEGLSAYHQKHVKQGALGTFLRAIEEERIAPGSVLIVEGLDRLSRAEPIQAQAQLAQIINAGITVVTASDGKEYNRERLKAQPMDLVYSLLVMIRAHEESDTKSKRVTAALRRQCENWMTGAWRGVIRNGKDPAWVKWTGTSWELIPERVTAVRHVIDAYKKGHGGTEIVRQLTSLGLSPTGKLVAASNLYRTIRLRALIGEKEIEVQGTTYRLPGYYPSIISDAEFAELQQLASHRGRRKGKGEIPGIITGLRITYCGYCGSAVVGQNNMARRRNEDGSVQDGQRRILCVGVNHSKGCKGGSCSVVPVERALLTYCADQINMTAMLSGGGAEQAARDRVALARQRVAELQTQIERITDAILGAAQESTPLAFTRKALALEQELDAEMKRAMAAEQELTALQNRAAPALAEAWAALAGHAQAQDYDARMKIRRLVADTFSHIVVYTRSINLESDDSRRYIDLVLVAKSGTTRTLRIDRRSSAWVASEDFDSSALTSNEF

SEQ ID NO: 12250 - protein, 577 aa, synthetic construct
MSINRNNTSETPKKAALYVRVSTNYQIDRDSLPMQRQELITYAQLMFGINDYVVFEDAGYSGKNTDRPEFQNMMRRIRAGEFTHLLCWKIDRISRNLLDFASMYQELKDLGVTFVSKNEQFDTSTAIGEAMLKIILVFAELERNMTSERVTATMLSRAQNGLWNGGRVPYGYDYDKDSKTFSINQEEAFLVRKMYDLYSEHRSLVMVSRALNEDGYASRAGNDWSPVSIFIILTNPFYTGIYRYNHYKIPGLKIEKDPSEWIEVPDHHPRIISDEQFGNVNRILQSNSRSKRLPGQQHTSKGIHIFGGLLYCGTCGSQYVSTPSRLLASGYRPSKYACPNLRKKKTCNTKSISDPVIGEFVLNYVLNMMHARAAFSSIHDTSELQDALLNGGTFQNVDHIGKDGLDSCFHMFSSTPLDGKRFRKPKKATTIDPELKRLRAEKRKTERALDRLMNLYLYADNPISEKDFVIRKQALDDYLKEINENLGMIDRGRGIETISDENFIKRASYFIMSKELAGKDYIYFKKLAMDMDAEILRDFFQEIIDSIVMEGSNVKEIVFRNGLAHTFFYKDTEKPEA

SEQ ID NO: 12251 - protein, 502 aa, synthetic construct
MIAIYARQSVDKKDSISIESQIDFCKKEVEEEDYKVYKDKGYSGKNIDRPAFKEMMRDIKKNAITKVVAYKLDRISRSILDFNNLLEEFKKHNIEFVSVTEKFDTSTPMGKAMVNIVVTFAQLEREQIAQRVKDNYYERGKTGRFLGGKVPLGYTNTKVEIQGKKVPTLVINKEEALLIEKMFNMYAYEDISLSKISDYLNEQGLKSAKGTAWDSGKISRIIKNALYVKADVNVYNYYKNLGVEINNPIEDFIGTNGCFVYGKRDRNENRYTNLKDHKLSIGLHEGIVDADTFLKCQYKLSQNQQITRSGSGKHTWLTGLTKCGYCGYSMSAVVNSSGKYFNCRGKTNMKICNGHSRTIKVEEIENIVETEILNRLEELSKVKIKMENSNSKKIKSIETEIKILDENIEKLLDKILESNDITIKYINKKVEELDNKKTELRNELNRITLEGSNNSSLEEVLKDVDKIKNLNFDKKKSIAKSLIDKILIRDDEIDIQWKVFNQ

SEQ ID NO: 12252 - protein, 525 aa, synthetic construct
MQENISINQIIMYLRKSRSDDPCMTVEEVLARHERQLQDYAVASFGSPVPEHHIFREVVSGETIADRPVMRQLMHLLESGSVRGVLVIEPQRLSRGDLEDCGRIINAFRYTNTLVLTPPKTYDLSDEYDRKFFEMELTRGNDYLEYTKKILNRGRLASVKQGNYIGSVAPYGYRKVKIGSGKDTAHTLEIVPEQADAVRMMFQLYLAGNGFTRIAAELDALGIKPLKSDHWSPAAISEMLSNPVYIGKIRWNHFKTVKTMQNGQITKTRPANSDYILVQGKHPAIIDQKTFDAVAARRGTAPKVKRGHELRNPFAGLVYCGTAGCGRSMTFKQFTNYRSKVPRRSESMICSNQRICHTKSVQYSAFVERVKEILSKTVDDFEIKLQNDDGNIVRIHENIIRNLEQDLLKLKDKDLRQKDAYEDGIYTKEEYASRNAKLQEQICEVQLSIQRAKDTMPPEVDYQERVSRFSDCLSKFEDTDISASEMNLLLKSCIEKIIYHNSSESKPGIGRFVSNPFELDIYLRL

SEQ ID NO: 12253 - protein, 591 aa, synthetic construct
MIDNCARAVFYARVSTQEEEQLKALPKQVEECKDIIASKGWRLIDGYVDEGKSGTKKDGRKAYIKLLEDMQEDKFDIVVVKSQDRLQRNTFDWYKFTDLLNKNNKRLYLYMDNKFYEPSEDALITGIKAILAEEYSRDLSKKLNNSNKRRIEKAKAGEEISAMGNGQTYGYSIVNGKWVVDESQREVVRRMYELYTELHSVRKVRDALNKQGYRNQRGNLFTDENIGRIVKNVMHKGWVILNRHHRDFASKEIIEKSEEEWVIVKNDHEAIVSEELWDAVNDEIQSHRNKGNSGTRGKRGGTDLLSGKMVCSCCGRVLWKHASQGSYKSKQGRKYTYKRYTQWYCSGKMGRGELACTDPATISGVKLQKYLVEMADMFLDYSTVEYSKNLLKRRTISWLEDLKDKLTTPNDNGKIEQDLKALEGKRGKLIDLYTDELISKEEFKSRSVDLDAEIEKKRALLVPVEENPDIKAIEDTIANIDAEIEALFEDEAMVEEKKVQFIQEHIKKVYVSKNSDVFIVLDNVAGAFLFIDKEDTRIEVVPVAEYNSEELSEEGITENDFVPFDRESMPQHHGAECLCPSGGGSEPGRLF

SEQ ID NO: 12254 - protein, 620 aa, synthetic construct
MTNTIFKNNTKIGNPYDFLDRNRHRKMVFYGRVSTEHEAQMAALENQIEWYDDQAKYHPNWEVLNKYIDEGITGTQAKKRPAFLQMIEDAKKGKFDLIVTREVCRFARNTVDTLVTTRELKNIGVEVYFVEDNIWTMDGDGELRLTIMATLAQEESRKTSERVKAGQHISRQQGMVYGRGNILGYNRKAKSTYTINPEQAETVRMIFDMYLQGEMGASKIANELTRLGRKNASGLVKWSPCVITRIVNNPTYMGYQAYGKSYSNNYLEQKRILNNDFSTYMLVKSDYEPIITEEEWYRCQEIKQRRVTKTIGVSTDGKKKQPNHGKNETKDLWATKLKCRCGASFRRNRWHKNNNAPWSYGYLCYNRLNNGSAQKRRDAGLDDTGYCDQTEIPDWKLEMMGKMIMEQVWRTKAEDIKLACKILQECYKPDSKSPRQNKSVMLANIEKLKSKKDILLDMRSDGEITKEEFLKKKEDIDKKISQLTAEYEKDDCPTESDEAGLELGKIESALNELIDFSQPVLPREIYQKFVSKVTPYSKTHYRWYLNLDGKGAQTADVKVNGRKSNAAVAFCDEGEIPPVHFKEIIFFNILKQEIKNKKSFFVATLHRLLSQTSNSAHRMY

SEQ ID NO: 12255 - protein, 523 aa, synthetic construct
MAVSRNVTVIPAIKRVGNNKNSESKPKIRVAAYCRVSTDSEEQASSYDIQIEHYTNYIKKNKEWELADIFADDGITGTNTKKRDEFNRMIEECMAGNIDMIITKSISRFARNTLDCLKYIRQLKDKNIAVFFEKENINTMDSKGEVLLTIMASLAQQESQSLSQNVKLGIQYRYQQGEVQVNHKRFLGYTKDENKQLVIDPEGAEVVKRIYREYLEGASLLQIARGLEADGILTAAGKAKWRPETLKKILQNEKYIGDALLQKTYTVDFLSKKRVKNNGIVPQYYVENSHEPIIPRDLFMQVQEEMIRRANLRGGKGCKKRVYSSKYALSSIVYCGHCGDIYRRVHWNNRGYKSIVWRCVSRLEEKGSECTAPTINEETLQTAVVKAINELLANKEPFLQALQKNIATILNEENDNATNDIDSKLEELQQQLLIQAKSKNDYEDVADEIYHLRELKQNALVENAEREGKRQRIAEMTDFFNEQSCELEEYDEQLVRRLIEKVTVFHDKFAVEFKSGVEIDVEG

SEQ ID NO: 12256 - protein, 484 aa, synthetic construct
MLAVIFVLIFSAASHIYTKEGDHMKLERCAIYIRVSTAEQMMHGKSLEAQREYLEAYAREHNMVVAGVYADEGKTARKELKKRKAIHALLEDVKAGKIDVIIFWRLDRWFRNLSDFYKVQDILDEYHVRWISTSEPGINMETRDGRLQLNVVLSIGQNEVDTTSERIKFVNEASIRQGKLIFGDANMGYGYKSGTVDGVKCMIKDPEREEAVNTFYQYFFKHQSKTGALKYIQENYDPDFSYSSMRTLLSSEFYKGTYRGAPYCPAYLSTEDWDRLQKISDKNIKVNRSNRVYLFSGLIYCPNCNNLLSGCGCSSIINRKTGAKRTYCYYRCNKAYMDNHCNYRHRLSQNLVESYLLEHLEDEYQKYHVRSGQIREKQKKEKKIKTPEKLRSELERLNLLFQKGRVEWEYYNKEYSRIEYELKEALAIQPEIERDVSYVNEIIQSDFRSMYAKLSLENRRAFWRSIISDIHVTKDSTVKEVNFL

SEQ ID NO: 12257 - protein, 467 aa, synthetic construct
MAREIVHIPARRGLSNRATVTDRKIRVAAYCRVSTDHEEQINSFENQVTYYTEYINRNPNYELADIYADEGISGTNTRRRDDFNRMIADCEAGKIDLIITKSISRFARNTQDCLNYSRKLKDLGIGIQFEKEGINTMDSSGELLFTILSSLAQDESRSISENCQWGIRSLFKQGVLHLNTNRFLGYDKDEKGNLVINEEQAVIVRRIYTEFMNGINPDVISRRLRDEGVPGCMGEAKWQASTIFGILRNEKYMGDAILQKTFTSDYLTKKTVKNEGQLEQYHVKGDHEAIIDPEYWDAVQLELERRQNYMTAHSLRTMGRYTDEQPFSNRVLCGECGKVFWRRTWYRLNNTYKVWQCGNRYREKGVVTCHSENLKESDLHGAFVMAWNGILESRAEFTETWKAQAENGNALERFRAKQMLELTKMKPMKEIDLLLVGKVLDYVIVQHGGELEFHFLDGTQLAVEVTE

SEQ ID NO: 12258 - protein, 548 aa, synthetic construct
MAETAKKISMIPAKVQYDRNVKLSEKKMKVAAYCRVSTELEEQDSSYEAQVEYYTSKISENENWKNAGIYADDGKSGTNTKKRADFNAMIQDALAGKIDMILTKSVSRFARNTVDSLVTIRKLKEKNVAVVFEKEGINTLEGTGEILITILSSLAQEESRNISENIRWGVVRKFEKGKVIVNCTKFMGYTKNEYGDLVIVPEEAEIVKRIFRLYLEGYSTGKIAKHLEEQGIKTATGQDKWHSTVIDKMLRNEKYMGDALLQKTYTVDFMTKKKVKNTGLVPQYYVEDDHEAIIPKELFYRVQEEMMRRASLCKAAVTRKKNQRSRYSSTYALTGMLICGKCGQEYRRVTWARNGKKKVVWRCSNRLTNGVKKCGESETLEENALNRAVMEAIHRITSDDMEFMENFRQNIIHVIGNYSTAKESGEYEEKIKEKIKEKQEEMVALIAENAKTGSYTPEFDERYRTIAEEINALKEAQKTARNEKWMADSYEQRIQDIDHYLSTSTCQIQEFDNDLVRRLISTIKVESSEKLLIQFQSGIVMEQEIRYE

SEQ ID NO: 12259 - protein, 538 aa, synthetic construct
MAKKVTVIKAAKAQKHTQEERRLKVCGYARVSTGSQAQATSYTAQVEYYTEKIESNPLWEFAGVYADEGISGTNVKHRDEFQMMISDCEDGNIDLILTKSITRFARNTVECIQTIRKLKEIGVGIYFEKENINTLSEKSELFITILASVAQGESENISSNNRWAIQKRFQDGTYIISTPAYGYGKDEDGNLVIIESEAETVRWIYESYLNGMGVYVIAKALNQKGIPTIRGAEKWQDGVIQDILKNLIYEGDMLQQRTYTETRFPFVRRVNNGQRNQYLIKDSHPPIVTHEEAEAVRNLMAYRVDVLHMNKSDYTKRYLFSGRIICGECGRTFRRQKIYIGKPYEKIIWTCSGHVEDKESCCMKAIREDVLHRAFTDMWNKLYTNQGTILEPLLKELTELVAARQDSEEIRQLDKEIKDISGQSQILNQVMRKGYMDSALFMESSSKLGWQLTECRRKKTLLTRKLRRTKEIVRTEQLIQLIAEQDGLMEEFDEQLFKMTAEKIVVSKEHDITFCLYNGLKLTERGGGQDAVAHANRL

SEQ ID NO: 12260 - protein, 523 aa, synthetic construct
MPNTESFTVNEVLVYLRKSRSDSPDMSVEEVLRKHEEMIQQYASTHFRSPIPEKNIFREVVSGETIDSRPQMKNLLKMIESEQFKAVLVVEPQRLSRGDLEDCGRLINILRYTNTTVLTLTHSFDLQEEYERKFFEMEITRGNDYLEYTKRILKRGREASVAKGNYIGSVDPYGYKKTVIKKDGITCHTLEIIPEEADTVKLIHELYAYTPEGIGFTNIAHKLDAMHIKPKKAAHWTPAIISSILCNPLYLGMVRWNNRKVVKYINEGQLAKARPQNTEAKYYKGLHEPIITQELYDACMARRGTNPSLRRNKELCNPFAGLLYCGTCGHAMSLKIYKNHNSVSQMMLCNHQAYCHTKSVLYSAFLRRFISSMEDTLNDFELAQKSDDGRTQAISKTIVINLENKLKKLNEKDARQKDAYEDGIYSKEEFLKRNVRTQQDIASTIIALEDARAKKADIIDYEEKIRRFKDCLHALNDPELSAAEKNRFLKSCVDKILYYNNMESKAGIGRYIENVFSLEIQYK

SEQ ID NO: 12261 - protein, 516 aa, synthetic construct
MKAIYVRQSLDKKDSLSIDAQIEDCINLCKRNGWNDYKVYKDKGWSAKNLDRPAFRQLNQDVQNGLIDGVICYKIDRISRSIRDFVNLIVDYQDLGVHFISFADNINTAAPGGMMMATLFVSLAQMEREAIITRVTDNYYYRCELGFWGGGPAPYGFRLVKTTENGQKHTILEPVPEEAEVIRTFFAWYLEPGATVRSIMNRAHLAGMQTRSGSDWTSRVLSDMLSKPLYAPNSMDIYNFYASQGVRVKISPEQCDGKQSLNIFGMRDRNSAHPKRSRPVSEMTLAIAKHKPIVDSDTYLKVQYKKKSRLAVTPRAGTSRTAVLSGLVKCGYCGRAMSPSGAKNGRYFTCSGRRNYAKGVCQGKSVKMDFLDDYVLNDLADFISQPEIKSMFKDGKAQRIPSSEQAKINEYKQRIATIDIDIQKLLDACLTSGDVAVKYLNERIDLLDTEKQNLQAEILAIQNKSNRKLELEGLDINSAPTALAGGEFDTKKYLCNFFIEQIIFYDRDNVQIRYKM

SEQ ID NO: 12262 - protein, 491 aa, synthetic construct
MRFLNVALYVRVSTDIQVDGYSIDEQLERLEKYCDAKDWIIYNKYIDPGFTGSNINRPGLTKLLQDIHKGKIDLVLVYKLDRLSRSQKDTLYLIEEEFLPNNVDFISMTENFDTSTPFGKAMIGILSVFAQLERENIKTRLAMGHVGRAKAGYWRGGSNPPIGYDFINGKLIINEYEALQVRTIYKMFLDGETIHGITRYMSEHFTNRYSNYRTPGQTGVILRNRLYIGKIKYKGVEYDGVHEPIIDIDTFERVQKRYKEISGKWSDHYRSPFKAKHLLTGLLYCGNCGARYFACTQRRKDKTTGKYIKSTESYVYYKCYTRDGNKSMRKGDYCKNPTIRVDKLDKVILDEIKKLKLDPDRLERIINTESKEKVENTELTVLRNKLDNTQSKIDKLMDLYTIGTIPITEIGDRIKPLYEEKEKIELEINTRENELQEPHGLSISETRDILDQFADIDNLDHDLKRELVQSLIKRIEVLPEPDSIKIYWKFV

SEQ ID NO: 12263 - protein, 501 aa, synthetic construct
MNIREDVIYARQSVDRKDSISIESQIDFCKYELKGGSCRVFKDKGYSGKNTDRPEFQKLLGEIRKGKVRRVVVYKLDRISRSILDFANMMELFQEYDVEFVSSTEKFDTSTPMGRAMLNICIVFAQLERETIQKRVTDAYYSRCLKGFHMSGQAPYGFELEPTVVEGIRTKMMAADPVAANHVRLMFEMYAEPETSFGDITRYFEEQGIKIYGKSLTRPFLSQLLRNPVYAQADLEMYEFFKSQGAVVVNDAADFAGTNGCYLYQGRDVKEDKDKSLKDQILVIAPHEGFVPSDIWLRCRKKLMTNITFQNGRKARNTWLAGKIKCGKCGYALKTTHNPSGYEYLRCSKRADHKGCPGCGTLRKNEFEQFIFTAMGEKFREFKLLRGGEEKANPKITAYQVELAQVEAEIEKLLDTLTGANATLLAYANKKIEDLDNRRKTLSKAIADLSVETLSSQQIELLSGYLDDWENISFEDKRKAADGLISSISATSDYVKIEWKI

SEQ ID NO: 12264 - protein, 542 aa, synthetic construct
MFFNLKNNKIIAVYCRVSSDEQSEKGTIENQKEYAEKYVRLNMLNVYDYYMDDGVTGTLPLQKRPEGKRLLEDAKAGKFNLVLFFKLDRLGRSVRVILNAVYDLMELNVDVRSMTEAFDTTTPSGRFTLNTFAGIAELERDTILTRMRMGTIRHAKLGKWLGGPVPYGYTLGNGYLEISHTKIPGLAYSEADIVKLIFEKTVYEKMSAEAIADYLNNLSVPTKYKILNRKLITSGYWYPSRILSMLHNTVYYGVHIFGQMSKHQKPEIIKQTNPAIVDIDLWDAAQNQLTSNKLLAARCRKNDYLLSGLIKCGLCGRTYIGTGYAGSKKEKVLYYVCNDKNRYHPDKNQKICQSQNLRADWIESIVWNDCLSYIMQPDKLYLENKAQNLTDPKDELNALEQTAVKLERERSSILDLFRKKIITENDLKNQLDKIAKEQDKLHRAINDKKALISKIDKINNNMCKMVDLLESFQKYISDNITFADKRKIVEALVENIIVYTDYDNGQRDIPIVTIAINYVFKNEKNPLKRNYQPSSKQNIHGF

SEQ ID NO: 12265 - protein, 584 aa, synthetic construct
MICNMSVDIKWAIPQTGSQATTEGDLAAVYTRYSSHNQGEQSIEGQLAAAQRYAAEHGYTIVREYTDRAKSGRTDDREAFQQMLRDTAKKQFSVIILWKVDRFGRNREEIAINKMKCRKNGVRVEYVAEQIPDSPEGVILESVLEGFAEYYSLQLSQNIRRGLAKSAEKCKVTGGNRPLGYKTGPDKEFLIDEDNAPTVKLIFDMYAKGATVKEIVDHLNQKGLRTLTGKAFTKNSLHTVLKNEKYRGVYTYKDIRVEGGVPRIVDDDTWYKVQEMLKINKRAPAKTWTRADYILTDKLFCGKCGGVMFGECGTSRTGVRHNYYTCSNRKKHHTCDKKAVRQEDIEDLVIKATCNIFRDKELLDAIIENTWQYYLAQSDNQAELKGLTKQLNQTELAIKNLLRAIEAGILTEDTKARMDELTAQKAELKAAIADLQLARGFHLQKSHIAYYLTKLCDANYKDRDVQKRLIQTFVNAIFVFDDHLKITFNFSGDKNTVTLSTVQDAESGNVFGHRALCSTKIGKHLTMLADFILLFSVQRKFYVNSFSTLDKNPRSNSAVIVRNFCFFSTNYAFGACIQPLCEVK

SEQ ID NO: 12266 - protein, 535 aa, synthetic construct
MKFPIDLSTLTKEEISQFEEDPFTLYNGDHDVALYLRYSSSGQSDQSIEGQLRDCRAFCKANHYRIVAIYIDRATTARKDVEKRIHLMEMIADSAKQRWDYVVVWKLDRFSRNRNDSAIMKMRLRKNGVKVLSATEHLSDNPESILLESVLEGMAEFFSAELSQKVTRGMRESALKCHSVGGHVPLGYKIENHKLVVNPDTAHIVQEAFALYANGVSVAEIARKFNAAGYKTAKNTEFNRSSFKVMFQNVRYIGTYTYKDIRIENGVPAIIDRELFDAVQRRLSKTATAPARGKAKVDYLLSGKLFCGHCGASMNGESGVGRSGKTYHYYSCYTKKRRLGCEKRPLRKDYIEEIVARSAFELLTDQLIDEIADMAIKQSEQDMVNETRIPQLTEQLSEIEKSIANITTAIEKGIASETLMNRLVQLEHEKKTINKEIKSEEKYVYRIDRDQIVFWLSQFKCGNIEDENFRRRLIDLLVNSVTVWDEPDGYKITTAYNLTSCKTKTFRVEKSPATENVTGFGFGESECANHRITAW

SEQ ID NO: 12267 - protein, 543 aa, synthetic construct
MPAALAYCMASVNLVFAWADLRIYYTIISLVLERTDYIMTKNAVIYARFSSDKQREESIDGQIRECRAFAEANEINIINTYIDRAMSARTDQRPSFLQMVKDSAKHLFDYVIVYQLDRFSRSRYDSAIYKHRLKKNGVKVLSAKENIKDDPSGILLESVIEGMAEYYSAELSQKVKRGMTENLLEGKWIGGIVPFGYELTSENKLAISPATGHLVSEIYDKYLSGVKTTDILSKLNSLDIKTQRGCNFTRNSLNRILKNQIYTGTFTWAGTSYPDYAPALITQEQYTAMHNLFESRKRKSNTARRVSPQYALTGKIYCGTCGLPMTGYCGKSHTGTTYYYYQCSSKNNKSEKAARSQIACDAKNINRDKLEKLVLDTTISILKNKDAVKCIADQCMAIQKAELEHKPAEELRLESQIKEIEKRLKNSVKAVENGLISQTITNNIETYEKQLTELNAQLDGVKLDTHIIPITEEAVIYYLNQLTERANKKDGYSLDTFDDFIRRVVVTGKCVDIYYNYTAVPNILENPTVKMLRGSSEDCLVTR

SEQ ID NO: 12268 - protein, 519 aa, synthetic construct
MKKVTKIDKVQNAPNQKEKIRVAAYCRVSTSNEAQLESLETQKSHYESYINSRSDWELTGIYFDEGITGTKKDKRPELLRLIKDCEANRIDFIITKSISRFSRSTTDCLELVRKLLSLNIPIYFEKENINTGSMESELFLTILSSMAEDESASISENKKWSNRKQFRDGTFKTMCPPYGYCYNDGTMCIFSEQAKVVKRIFSDVLSGKGTTTIAKELNNDGIPSKQGKKWNQTTVKKILSNEAYIGDAIFQKTYTDEYFNRHINNGEKEMYYIQNHHEAIISKEDFKSASAIISQHATEKNISSNDNKYRNRYAFSGKIICSECGNTFKRRLHTNTYSKYCAWCCNTHLADKSKCSMLYLRDDDLKIAFATVLNKLIYGHNLILKPYVEALKNISGNKDFARIQHLEQLIKQNKEQQEVLTKLLCQGYIDQVLFTNETNSLLAQSGKYKKDIDAINSTINGDNSRHYEAEKLLYFTEHNTMIKEYSENLFERFVDHIIVYSRHLVGFVMKCGLTFKEVI

SEQ ID NO: 12269 - protein, 521 aa, synthetic construct
MGNVMVIPAKRKIGNTNRKKDTKPKLRVAAYCRVSTDSDEQATSYEAQVEHYTEYIKRNPDWEFAGIYADDGISGTNTKNREEFNRLIKDCEAGTIDMVITKSISRFARNTLDCLKYIRRLKEKNIPVFFEKESINTMDAKGEVLITIMASLAQQESQSLSQNVKLGLQFRYQNGQVQINHNRFLGYTKDENGNLVIDPEQAEVVKRIYREYLNGYSMDKIASGLEADGILTGAGKKKWWTSTINKILRNEKYMGDALLQKTYTTDFLNKTRVKNNGIVPQYYVEDDHEAIIPKEIFMMVQEELARRKVVKTSANGKKRSYSSNHCLSQKIICGECDEMYRRIHWYSHGRKTVVWRCISRLESTGIECHARTIHETDLQEIVVITLNELLGNKSKYQKLLQQNIATVIRASAEKTTKEIDKKLIELQKELVKKANDKDSYDEIAEQIFELRDKRQQFTMDTAQRDEQLNRITELQDFIKSQTTDLKEFDETLVVRWLKQITVYSDHCTVELKSGLKVDVEK

SEQ ID NO: 12270 - protein, 501 aa, synthetic construct
MEIQIREGNSRQKRKLKVCAYCRVSTDADEQENSLENQIRHYKEVITSNPDYEYAGVYSDFAISGFKEKRPGLQKMLADARKGKIDLILTKSVSRFARNTSIVLEATRKLKELNVGVFFELQNINTLSGEGELMLTILAAFAQAESESGSTGAKMVYQRKYEAGIPVQYLERSFGYTKDERGIFVADEEEAVWVRKIYEMAADGYTPAAIKRYLNENGVKTVGGAEWIDSTVFRLIENEIYKGDYIMHKHFVNEERKLVRNRGEVDAWYIEDDHEAIVSPELWQRAQDALEAKRDYLAEGSVIEEFTEENYPYMNKIYCAKCGYPLYKRIYSKGNRLNWGCSGMKRYGKSFCDGINIPDGVLRSAWHFEENTYIDEKASDKGVKEFSYLKERSWKRRHKKKLPPSILENTEAEYPYREKIYCALCGSRLVRHVDTKSHKVTWVCNGRKRKGKAFCDGTRVPDTILKGWGEIKKDIYIQRKDDKNGKKRYSYTSKKPSGIGA

SEQ ID NO: 12271 - protein, 463 aa, synthetic construct
MARSVTVIPARNRQASGHRAAPQKKIRVAAYCRVSTDQEDQLHSFEAQVDYYTKYINDHENYEMADIYADEGISGTNTKKREQFKRMIADCEKGKIDLVITKSISRFARNTQDCLMYSRKLKNLGISIIFEKENINTLDSTGELLFTILSSLAQDESRNISENCKWGIRTKFKNGEMHLNTFKFLGYDKDENGKLIINREQAKTVRRIYRDFLWGLNPAQIAKELEEEQVPGCLGQTKWYASTVVGILKQEKHMGDALLQKTYTADFLTKRQVRNNGEVAQVYVKDSHKGIIDKETWNAVQEEFDRREKFMQRHGTDRYSYGSECYPFCEKIFCGECGSLFTRHSWKSRGIIQWQCKNHRKDGKVACTNAYVDNADLEKGFVKAFNRLVSERKKHMERWNAMKADRTPLEKIRAVQMMEATENGQLQKYVPEAAQLVLEEITIFGAKKYEFAFLEGSRVKVSV

SEQ ID NO: 12272 - protein, 564 aa, synthetic construct
MPRAQKAAIYCRVSTLHQVDKDSLPMQRQDMINYAKYVLGIEDYEVFEDAGYSGKNTDRPAFQEMMERIERGEFSHVLVWKIDRISRNLLDFATMYARCKKLGVTFVSKNEQFDTSTAMGEAMLKIILVFAELERNMTSERVSSTMNARAAEGKWNGGRVPFAYRYDRETDSFSIRNDEAKVALELKDTYLRTHSLTYTARLLNEAGRRTRRGYAWTPATVAIILRSPFYRGTYRYNYRDESETTFSFKGRNEWIMCAKHHPPLFSEADCRQIDFWLTKNRRQHGKATHVQRKLVHVFAGLIRCGFCGSNYIASIDRVRASGYQPSMYNCGGRRQKGMCKNRYVTDIRIGGFIFNYISNVIRLRDAFRPQWSKARIQRFLLHGDDFCGASLSDDTLRRVRAALLGSRLSTAEYQPADEQHDDSPTQTHKANLQAELEKNRRALSRLMHLFLYAEDEMPQADFLREKKHLQDTIARLQAELEKARQSSVFASSLTDEEFLDKAARLLFQSAMVRGGIDFPGLAMRVGNLELKNFVNAVIGQIIVLDGRVTQITFRNGEVHTFLYA

SEQ ID NO: 12273 - protein, 487 aa, synthetic construct
MPEYLQIKKRSGFKKMIQDALNGEVDLIITKEVARFARNTVDTLSYTRKLKSAGVGVIFTIDNIDTRDADGELRLTIMASIAQEESRKTSERVKWGQKRQMEKGVVFGRDLLGYTVQNGQLHINEEEVPIVQAIFHKYTNEGKGTWTIANELLVEGMRPKRIALWSNVVILRVLRNEKYVGDLCQKKTYTPDYLTHSKKYNRGEEEMVYLKEHHEPIIDRDLWNRTQEELKRRSPSEEQKSKHSNRYWCSGKIHCAECGCRYVSRTKKLMSGDVYKAWRCYAAANHGTKKQDADGNEIGCNNSSINDRSLKTCMNYCITLVQGERDSLKKEILKEISQLQKTTAKKLDSKKIKKKIDNLEMKKRKAIDLMLDGLISKEDLQSQTEWYNEELEKLNIQLSDALQKDKSDSRQVNHMEKYIKALDEIMELDGDSEDVYKEVLDHMEIHKGNIVDVWLKSIPIGIRLKVKATGKGEYFKTEILETSFIEK

SEQ ID NO: 12274 - protein, 522 aa, synthetic construct
MLHKVVTIPASVRCFSEQPIVSQKKRKVAGYARVSTDNPEQLTSYESQVKYYTSYINGRSDWVFAGMYTDEGISATNTKHRSGFKRMVSDALAGKIDLIVTKSVSRFARNTVDSLTTVRKLKEKGIEIYFEKENIWTLDSKGELLITIMSSLAQEESRSISENVKWGKRKRFAEGKGSLAYSHFLGYERGPNGAMVINRKEAEVVKMIYRLYLTGRSFYAIADELMKREILAPAGGAKWHPSTIQSILKNEKYKGDSLLQKKFVVDFLSKRMKKNEGEIPQYYVENDHEAIISPEVFDLVQTEMKKRHSCRRGRYSGVNLFSSKIRCGDCGSWFGSKVWHSNDKYRKVIFQCNKKFKNDCHTPTISEDEIKDFFVLAAGKILDNKEEVICNIKVLLDCVDDLSEKIRQAETVVEQKLEEIQRYVAYNSQVALDQAEYQKNYEALVGKYEEAKGEYDKLQEVAAKKSNRRQELIKFIATLEQADQVISFEPRLWTLLVDHVTVYRKDDVRFTFKDGTEIKVGE

SEQ ID NO: 12275 - protein, 530 aa, synthetic construct
MPTNKNMARKYAAGGGSDNSCDVEPLRAVIYARYSSSGQREESIEGQLRDCYDFAKKHGIIVIGEYIDKAMTGRVDRRPDFQRMMKDSEKGRFNCVLLWKMDRFARNRYDSAMYKYKLKKNGIRIFYAKETIPDGPEGIILESVMEGYAEYYSENLAQNVKRGNYDSALELKTLGKTCLGLKTGPDGRYMIDQAEAAIVRRIFEEYAEGERAKDIYERLNSEGYRTSRGGKFNKNSLRRILSNKKYIGVYEYEDIYVENGIPAIITDRDLFERVQKMLKINHDAPARGKAQNFLLTTKLFCGLCGSPMIGDGGTSHTGKAYAYYSCTKRKRGRSCKKESVPKDWIEDLVVGELVKIVHNDELIEQIADRVMEYQKREKDQSGLHALEIRQKENEKAISNMLAAIEAGIITPSTKTRLMELEADRADIEKGIAHELLAEPEFERDQIIYFLERFRSGDINDEAYRIMLVDTFLNSVYLYDDDHLVLVMNYSGENCKVDLKLVEGAVSGDGCKGSAFAPSSALDDDPKLKET

SEQ ID NO: 12276 - protein, 506 aa, synthetic construct
MFENNLKTAAIYARVSTTRQAEEGFSLPSQIDACVRKAKELGISNIIKYVDNASGTTLDRPALTIMRKAIREKKIDIIICYDQDRLSRNLGQQLVLTEEIEKYCQKLIFICGDYHNSPNGRLFYAIKGAIAEYEREKIIERCIRGKKEKYKKGKTSNSHLFGYQYNPITELYEINTDEAVIVRRIFKLYINGMSSRQILRQFQIENIPKYFQGKNVGWNDPSAIMRILKNDSYTGVFHAWKHNSHNSLKKAPKQRYKDTSEWINVPIPAIISEEEFILANQIIKENTDRSTRNEKRIHLLSKIAYCTCGRKIYVRPNNNKDYYYCSSKSYKKRNEIDIPFCPIAKYMPADKIDNIFWDTLTKICISEDTLQKYINRQQEDSNINEIQQQLLDLKTLLQKKQTEQVSILEWYSNQLIDEDVAKLKLLKLKNIITELKSQQQILSNKLNNKNKPQKIYDIFKQERKITLEEKRNLIRKIVDRVYLKRTDPAISSNKYDIEVDLFIIFK

SEQ ID NO: 12277 - protein, 519 aa, synthetic construct
MKTVTKIGGQLVFPTPKHKLRVAAYCRVSTDSEEQLVSLATQRKHYESYITANPDWEFAGIYYDEGITGTKKEKRPALLRLIDDCEHKKIDFIVTKSISRFARNTTDCLELVRKLLEHTVYIYFEKENLNTGSMESELMLSILSGLAENESVSIAENSTWSIQRRFQNGTFKLAYAPYGYDVIEGKLVLQPEQATIVKAMFDQTLAGIGTDAIAKELNAKEIPAKRGTHWTATTIRGILKNENYTGDAIFQKTYTDSHFNRHHNHGEKDKYRVEHHHEAIITKDIFEAAQQVIRQRGKEKGALPQNKKYQNRYPFSGVIRCHQCGATFKRRIQGGRNSYIAWCCATHVADATKCSLKYIKETALEYAFVTMMNKLIFGHAFVLKPLLASLRTLHSDDSITVIQDLDTKLAENAEHQKTLAYLLAKKYLEPAMYQKGNNELLQEADQWQHQKDSLVDFLNDDNKTVRETRKLLQYTCKSKMLMGFDGAVFQQFVEQILVYSRTYIGFKLKCGITLRERMV

SEQ ID NO: 12278 - protein, 520 aa, synthetic construct
MAKVTKIFAEKDEENSKLKVAAYCRVSTDSDEQLESLEAQKKHYQTYIKSNPAWQYAGLYYDEGISGTKMEKRKQLLAMLDACERKEIDLVITKSISRFSRNTVDCLEMVRFLIEHGVFVYFEKENLNTMTMESELILSILSSMAEEESHSISKNNKWSIQKRFEQGTYVISCPPYGYINDGGEMRIVLKEAEVVRRIFNDTINGKGSSQIASELTAEGIKSKKGKKWHSTTIRGMLRNEKYTGDAIFQKTFTDDRFTRHTNNGEEQQYYCRNHHEPIISHEIFELAEQETQRRANEKNIKKSTQKYNKRYAFSGIMKCGECGGIMKRRTHYTGRKEYIAWSCGTHIEDKSKCTLLYVRDDAIKAAFTTMMNKLVFGYKEVLTPLLEGLDENTNYMNTEKQKEFDKQQQAIKERETLLREHFHKNLLSQEIFSKGMADIEQELRTLAQMKEDYLHNQNCGITYLAAARDLYAYCCKSKMHSVYDEEVFKRFVNWIIIFSRDEVGFRLNCGITLRERMVVR

SEQ ID NO: 12279 - protein, 492 aa, synthetic construct
MAAYCRVSTDNDEQATSYETQIEHYTTYIHNHPDWKLAGIYADDGISGTNTKKRDEFNRMIEDCMAGTIDMIITKSISRFARNTLDCLKYIRQLKNKHIPVFFEKENINTMDSKGEVPLTIMASLAQQESQSLSQNVKLGLQYRYQRGEVQINCNHFLGYAKDENKHMVIVPEEAEIVKRIYREYLEGASMLKIARNLTADGLKNGAGHTKWRDSNIRQILQNEKYMGDALLQKTYTVDFLTKKRVKNTGIMPQYYVKDNHEAIIPRDIFLQVQEEMVRRSSIHLKNGRKLTYSSNHCFSQRIRCGKCGEIFRRIHWNNRGKKSIVWRCVNRVDHTCKCDARTISEPALAQVCLTAINQVLCEKKDFLTMLQHNIETVFNHNNDETLAAIDTRLEELQTQLVKLASSKAGYDDVAEEIYHLREQKQQALAKSANQDEIRSRIEDMAAFLKTQSTAITQFDDHLVRQLIETITVFEDSCTVEFKSGVTIDVDE

SEQ ID NO: 12280 - protein, 477 aa, synthetic construct
MSNSFSSPAKISAIYCRESTEKQNIQSLIDMCKKAAKKINLQNIKVYYDVASGYNKDREQYSKLKEDIQNNLVDTLVLYESSRLTRDELEHHIFYGLLRVHNVKVYTVTHGWLDLQDADDTFLTNLLNLLDAREGRKTAKRSKDRMTELAEQGRWTGGPAPLGYKLVNKELVIVPEDAEKVKTIFKLFLDGKTRQSIANFFGYEVKKVRRLLENPVYIGKLKFHSVEIINKKKILHKDYKVLNGIHEPIIDESTFSLVQGKLKNIKVERNTDVYIFKDLIKCTCGRKMYRVVNKYNYLKKSTNEISRKTENLYYCRTSDKYKSLGCGAIGIHEEELFEEVMASLKKIIFSLEVENIDTKFDDYQSQLVLYKKELASLSGKEELLARQLLNSLISEEVFEKLMKELKEKKAFLEEKIKNLTTLITNKKNTNKNSEILKKYFFKLEKEKAPEKINNFLKLIIDEIEMVNDYRFYIHLKF

SEQ ID NO: 12281 - protein, 516 aa, synthetic construct
MARRKKVSPGNRLVAYYRYSGGSQQTEQSIEGQRRDCEAYARQHGLTIVHEYIDRHISGRGVESRLAFQQMIADSSKHLFDLVICWKTDRFARNRYDSAVYKKKLRDNGVRILYAAESSVEGPEGIILEGLMESLAEYYSAELAQKMRRGMRESALKGKAINPNRPLGLTTDEHKHFIIDEKNAPTIRFIFEHYAAGESSASIVDQLNAAGLRTSKGNSFNKCSIPRIIQNEAYHGVYICKAYDVRIDGAIPAIIDDDLWKRAQKMLTLNKQHRAPHSSHADYLLSGKLFCGCCHSLMRGISGHNCRNDVYYYYACGNKADGGTCKKKNIPKDVAENLVVNAICENILRPDTLEDLADAIAAAQQAEVNQPDPERAMLEQNLADVHRKINNIIESIENGTASSRLSARLADLEQQESTLNYQLESLKEVHPPVLDRERILFLLEQFLISPNERTEDYNRRIIDTFVNRIEITDTEMLIYFNLSEASASEKQKNSQPNSCSTGNHLVRVARIELTAS

SEQ ID NO: 12282 - protein, 465 aa, synthetic construct
MKGNAGDTIVKKIDLSPELVRVALYIRVSGEEQKIKGLSLEAQQERLEAYARERGWVIVGIYIDAAKTARKNIHKRTDFQRMMDSVKRDEVDILLFCRLDRWFRSVADYYKIMEVLEAHNCDWKTTDEEYDTTTANGRLYINVKLSIAQNEADIDGERIDVVFDSKIAHGTVVSGSAPFGFRVNEEKRLEVVPEDAAIVQDAFNYFETSISQRATVRYIRETYGVNWCDATFRRMLKEKLYTGVYDRGGRFNDHFCPAIISKQQFDRVQALLERNARSVPSGKVYIFTSILTCAECGHKLVGYKSSDYYYYRCNQHFQRGRCSHNHSAREDVVEKWLFEHLAEELERCQLEWEVAAAKKKASVARTDKAALKRKLTKLKELYVNDLIDIEDYKRDYQIYTAALKQIPEPSIEPPPDFAAVRRLLDNDFKTIYENLTREEKRTLWRSVIKEIRIDNDQNITGVVFG

SEQ ID NO: 12283 - protein, 572 aa, synthetic construct
MGKKQKATGGNAVIYARYSSHNQRDVSIEQQVEACRKHAAELGLTVTATYEDRAISGKTDKRPSFQRMMRDAEQHKFAYVLAWKSNRIGRNMMQALVNESRLVDCGVKVFYAEEDFDDNAAGRFALRSMMNVNQFYIENMAEDVKRGLYDNAKKGLVNGSLPLGYKRGADGKPEIDEPKAAIVREIYTRVAAGELFASIAADLNARGIRTARGREWNKGSFHVLCHNDRYRGIYMYGDIRIPGGMPRIISDELFYDAQEAYGMKKDNRYGRARHGAENYLLTGKLYCGHCGSYMVGISGTSKTGEMHYYYACQKHRLEHTCEKKAIRRDVIENAVARVIMMYCLDDETIDFIVDSTIAYFKQKDHELHIEAMENELAAVQQAISNLMKAIEAGIITPTTRTRLLDLEEQQAKLSAKINTAKAERVEIDRDDLIAGLQLFRTGDIKNKKFLAKLFNTFLLAVYLYDDNRLKIVFSFTGNHNNIEIPLDLDNDCPDSESGPYETEVRMSHLECRKNLGSPPSSGEAEKGDDCSDGRFVRTAPLPPHQLTSGPFRPEVLFIPTPSKGGSHGLHHR

SEQ ID NO: 12284 - protein, 500 aa, synthetic construct
MRMCGYARVSTDEERQLDSLEHQMEFFSDFAKQNGHHLVNVYTDEGITGRQLKKRDAFNKMLSDSKLGLFDLLVVKDVSRFARNTVDLLTSIRQLKSRGIDVIFVNNSQKVLGESEFVITLLGAVAQEESSNLSKRVKFGKDITSKKGRVPPRIFGYDRIDNFTMEINEREAEVVREIYHLYIDEGLGCRLIAITLAEKQMKTKFGNDWNQRNIRRILENPIYSGHYINHRYTVVDFLEGTTKALPKEQYYHHDRPEWAIITPERFQQAQEILELRRKQYATEYTHFTGRYSNRHLFSTLIRCKECGRAFSRRVTHYPNSDYIYWRCPTNNQYTAKRCSNNTIVREDDLIETLSTYLREVVSNKESIAQEIARKFKEANAVEGSKPDAQTLEAKKVKLKAKLEKYMEMYANDVITMEALKSKTAEINESINVIDDQLILLEGQRTQERTIESITNEAMTEIERFLSLQSATNMDLRRIIDSIIVDDKKQVKINLKITGNL

SEQ ID NO: 12285 - protein, 523 aa, synthetic construct
MAKSVTTIPATLSRFTAAPINSTKKRRVAAYARVSTDNEEQLTSYEAQIDYYTNYINGRDDWEFVGVYPDEGITGTNTKKHEQFRQMVADALDGKIDLIITKSVSRFARNTVDSLTTIRKLKEHNVEVYFEKENIWTFDSKGELLLTIMSSLAQEESRSISENCTWGQRKRFADGKVTVPFKRFLGYDMGPDHNLVVNPEQAKLVKRIYGMFLQGQSPFQIARTMTEEGIPSPGGKDHWNPSNIKSILTNEKYKGDALLQKSFTVDFLTKKKKTNEGEIPQYYVKDNHEAIIDPETFEMVQTLMTTRTKGRNRKSSVSIFSSKVKCGDCGSWYGPKVWHSNDAYRKVIWQCNHKFDGQKCATPTLTEDEIKELFLRAANQVIDQKEQFIAIYDQVLSRSLNTTALESELSDLEAEINIAAELIEDCIKENAHVALDQDEYQKRYDALVARFDKAKARHTEVTDLIAERMARKHQIEAYLKNLRSREPLTEFRETDWLAMVDYITVHSKKDIWATFKDGNEIKA

SEQ ID NO: 12286 - protein, 590 aa, synthetic construct
MKTVEKIERKLPVLKTRKRVAAYARVSMESERMQHSLSAQVSYYSALIQKNPEWEYAGVFADYGISGTGTKKREEFNRMLAECEAGNIDIILTKSIQRFARNTVDLLNTVRHLKDLGIEVRFEKENINSLSGDGELMLSILASFAQEESRSISENVKWGTIKRFKQGIPNGKFSIFGYEWQDDKLVIVPEEAEIIRWMYAEYMKGASRIEIGRALMDRGIYTRQGKPWVDSNVKVILTNITYTGNMLFQKEYCEDPITKHRRKNYGEMPQYFVEDTHEAIIPMDEWQAVQAEFKRRRDLGPFGNKSLKLSAFSTKITCGCCRKHYRHSGKRNTAGEVYYIWICQTKSQKGVSACPSKNIPEKMLQNTAAEVLGLDKFDEDVFSQQIEEVIVIGDDTLTFRFYDGHEVTTKWQSTAKTDWWTDERRKLWGERHKRKDTNPNRNTFYEFTGFIKCGCCGANYRCQSGKRKDGTPTRSWYCTGPRSECRNPAIRDETMKRLVTEILGLDEFDEAAMDAQIESATILDHMVTFHFRDGHIESRDFLDKRHGTPWTEERREKAKKSMKAAWTDERREAMSERIKKIRSEKKWPNP

SEQ ID NO: 12287 - protein, 612 aa, synthetic construct
MRAAFLIRCSTKKQDYERQVNDLTRLAKKFGYTSSDNMIFGEHITGKDDASKRDRQSIQRLKDAAINKEFDVVLVSEVSRMSRDPMSGRLYVRQLINMDIPVYFRDIDTWTIDPVTGKKVRDAETIIGAAFDAAWKYIKSMKTQIASGRRDELDNNQMSIGQPFFGYKRYGGRDKGKKNSWVINDDAAKVVVDVFEEYVKDGATLKSTALAITAKYGEQFNKKFSIGTIEHILTFEPYCTGIKVVSLTDPDTEDVDEFEVEIPTIITRAMFDKATTKRATNRTARTPYPKQATYILSKLLKCPICEHSLTPQKRGGDKGDKYRLMNGKVAIRWSCMSGINNATDCSSRITISNEKLEAIIWGLVKQELIGFANLNDEDRVARVVELTDKITNLEMNIANFTSHISNMDRLIERAYSAYMDAPDSVMDIAKDKYYKTLTKCENERAECKDKIEALNVEKLRLENMRTFFNQPTLPKDAIEKAESDPIKMRNLVMELVDKIYPYRITTYVSPATNRIMKNGIVLLEVYTINGIYNVLYDGNQRNNKVAYYISGNYATFQNGKNKLDAYDAGEYFVISNATLVTETEDVDLTVTFNELIKICMQNGWEIDYTYKM

SEQ ID NO: 12288 - protein, 523 aa, synthetic construct
MRFFSYGRKSVFSDKSDSIDNQFRMNREYCESKFSGQVDSWQQFSDEDFTGANTSRPDLQRMLSFIKGGFCDVLVVYQLDRLSRDVRDFANIYALLEEHGVMFISIKENIDTTTPIGRAMMYVTVVFAQMERETIAARVTDNMLGLAKKGYWTGGNPPVGYVRKHIVVNGKKHCSIEVDPDGARYVTQIFDTFLAYNCSLQGMETRFKNQGIRTQSGKFFSTTQLHKMLTMPYCVEATPEVYDFYAAKGCIMDPGSPREMWDGSVGVIIYGRSTEKNKKHQAQPPEKWTVCLGKHKPFMPAEKWLAVQSRFTQNKCIKDAKWPVPLLKGVLRCKCGNLMQVSRKKKVDGTCSSWYYCRKRMRQGVDACDMGQIKCDLLDEEVLELFRGITADPALIQKFVKAEAPADVPDLKAAQARVSACERKIGRLAASLALAEDSAASKYIIAEMERLDVELGALKREASLAEMESHRAAASAKDAKATAAEIAKLIHGLEGFDDKEKNAIARAVIQECTWDGERLFITL

SEQ ID NO: 12289 - protein, 615 aa, synthetic construct
MALLPRKPAKHPAKPKRGKKLEIEEPGVLYGRYSSHNQKDISVEQQFEKGYELAAEYGIRIIDTYADRAVSGRTDKRRDFQRMMTDAAKGKFRYVIAWKSNRMGRNMLEALINEARLQDLGVRVLYVEEDFDDTAAGRFAARSMMNVNQFYSENMAEDIKRGLYDNAANCMVANGHLPYGYKADETLHYAIDEPKAAVIREIFTRVSCGEAFVDIMASLNARGIKTSYGRPWGRSSFQKILSNERYRGIYIYGDVRKEGGIPRIISDELYFKVQEVITTKKNPQGRHRVNGDYLLTGKLFCGHCKSPMTGVSGTGRSGNLHYYYVCQKRRTEKTCDKKNVRRDEIELQVAQAIKDYALKDDVIEWIADSTVAYNERKEAESKVGILEDQLAGTEHGIKNIMSAIEQGIITETTKSRLVELESERATIKANIAAARADIVTVSRDDIISGLEMFRDGDVHDKKYQARLFDTFLVAVYAYDDDLRLVFSFSGNKNTIQIPIESAVNAVENNEAECSFKLCSAPPKGYYTNLFTLSAALPSQYGSSNTDRKERIFSLVESVRSFFMSCGLSTDSPWTVCGQSQNAAIFTYRSVRFSQFLIADTDCPSVIGFLFLAVSS

SEQ ID NO: 12290 - protein, 468 aa, synthetic construct
MLYGKPQNYSWYRARVVLYIRVSTDEQARHGYSLGAQREALREFCDTFQCQIVAEYSDDGVSARKEIRRRPGLLRVLEAVKTGGVDYVLFIKLDRWFRSVREYYRVQDVLEAAGTNWKAILEDYDTSTTNGRLNLNIRLSVAQDESDRTADRIKFVFAERVKNGGAIFGSKSLPYGLEVRDHRVQIVEDQAVIVRAFFDHYEVAHSARSTQVWLRDQYGVDLPRNTIGRMLRNGLYCGQYRDNKNYCPAIISPDQFQRVQEILARQASGHTRQSKYNYVFTGLLRCPVCGCTLKAFPQFDYKWNRLYLRYRCTQHWIENRCSWKTTPWEPRLEDWLLDHIQPQLDAYIAQFDVQEAQRRRAVVDVGAIQRKLSRLQDLYVDGMIDRAAYDEKYQALIRQQEAAQAAQQSQSAGRDLEPLRQLLAGDFRSIYATLSPQERHTLWASVIDHIVVKDGRYGHFDLDVIFLP

SEQ ID NO: 12291 - protein, 526 aa, synthetic construct
MPKVTMIPATINPMTHLPKETTQKRRVAGYARVSTDSDEQFTSYEAQVDYYTKFIQSKPEWDFVKVYTDEGISGCNTKHRDGFKEMISDALAGKIDLIVTKSVSRFARNTVDSLVTIRKLKENGVECYFEKEGIYTFDGKGELLITIMSSLAQEESRSISENITWGQRKSFADGKIHLAYKHFLGYKKGEDGRPAIVEEEAVVVRLIYRLFLDGKTQAGICRYLEDLEIPSPSGKAKWSKTTVTSILTNEKYKGDALLQKSFTVDFLQKKTKQNEGEVPQYYVEGSHPAIIEPYEWDHVQAEFARRKELGNAYSGKSVLSAKLVCEDCGGFFGSKVWHSTDCYRRTVWQCNNKFKGGERCLTPNVDTETVQQPFIKAYNQMIGNRKQIIEDCELMRKKLTDFKSLDADIERQFEETQIVAELVKAAVKDNAVTAQSQEAYLKKYEALTKRYETAAAELERLQNLRTLRSQKDKAMALYIRTLKKQPTVLSEWNDTLWTVMVEKAIVHRNSEITFAFYNGTKVKVRQ

SEQ ID NO: 12292 - protein, 464 aa, synthetic construct
MKGNAGDTIVKKIDLSPELVRVALYIRVSGEEQKIKGLSLEAQQERLEAYARERGWVIVGIYIDAAKTARKNIHKRTDFQRMMDSVKRDEVDILLFCRLDRWFRSVADYYKIMEVLEAHNCDWKTTDEEYDTTTANGRLYINVKLSIAQNEADIDGERIDVVFDSKIAHGTVVSGSAPFGFRVNEGKRLEVVPEDAAIVQDAFNYFETSISQRATVRYIRETYGVNWCDATFRRMLKEKLYTGVYDRGGRFNDHFCPAIISKQQFDRVQALLERNARSVPSGKVYIFTSILTCAECGHKLVGYKSSDYYYRCNQHFQRGRCSHNHSAREDVVEKWLFEHLAEELECCQLEWEVAAAKKKASVARTDKAALKRKLTKLKELYVNDLIDIEDYKRDYQIYTAALKQIPEPSIEPPPDFAAVRRLLDNDFKTIYENLTREEKRTLWRSVIKEIRIDNDQNITGVVFG

SEQ ID NO: 12293 - protein, 575 aa, synthetic construct
MNKIIDTLNTQKAAIYIRVSTHHQIDKDSLPLQREDLINYAKYALNIDNYELFEDAGYSAKNTERPSYQYMMSKLRTGEFSHLLVWKIDRISRNLLDFATMYEELKTLGVTFVSKNEQFDTSSAIGEAMLKIILVFAELERNMTSERVSAVMLSRATNGQWNGGRVPYGYNYDKSTKQFSIHPIEGNYIKKLYDLYFETQSMLAVAKYFNEHGIKTKTGNNWSPTTIGKILASRFYLGEYQYNLHKDGIGGAGVASLKPEDEWITVKDHHPAIIEIEQWDKCAEIRAYNHRRSNAPKRYKRKNTHIFAGLIICGKCGSTYQATIDRARTGGYRPSIYLCSRRKQYSDCQNKYMSDITLGPFILNYISNIIKANANMGKTTTPDMFKKKLLRGDVFKDVKDIAPSGLNEMYNMIVSKKFNSDPFTSTVHRDESQPDFASERELLISEKRKYLRALDRLKTLYLYNDNAMAEKDYIIENKNILDNLKRVDERLEEIEKNSSQNFTITDSEFIEKASYFIISQELSNQRYINFNSLIQHIDTNVLKNFIQSVIKKIVVLDGRITSIQFKNGIEHDFLY

SEQ ID NO: 12294 - protein, 516 aa, synthetic construct
MARKKKVSPGNRLVAYYRYSGGSQQTEQSIEGQRRDCEAYARQHGLTIVHEYIDRHISGRGVESRLAFQQMIADSSKHLFDLVICWKTDRFARNRYDSAVYKKKLRDNGVRILYAAESSVEGPEGIILEGLMESLAEYYSAELAQKMRRGMRESALKGRAINPSRPLGLTTDEHKRFIIDEKNAPTIRFIFEHYAAGESSASIVEQLNAAGLRTSKGNAFNKCSIPRIIQNEAYHGVYICKAYDVRIDGAIPAIIDDDLWKRAQKMLTLNKQHRAPHSSHADYLLSGKLFCGCCHSLMRGISGHNCRNDVYYYYACGNKADGGTCKKKNIPKDVAENLVVNAICENILRPDTLEDLADAIAAAQQADVNQPDPERAMLEQNLADVRRKINNIIESIENGTASSRLSARLADLEQQESTLNYQLESLKEVHPPVLDRERILFLLDQFLISPNERTEDYNRRIIDTFVNRIEITDTEMLIYFNLSEASASEKQKNSQPNSCSTGNHLVRVARIELTAS

SEQ ID NO: 12295 - protein, 408 aa, synthetic construct
MAQAQKQVRIIEPLERFVNRINLVGCYARVSSDSEDQLNSYNNQVDFYESNVNSLENSKLVKIYTDEGITGTRMDKRDGFLQMIEDCRKGLINRIITKSISRFARNITETLSVVRELKSIGVSVYFMTEKIDTAKMGSEMMLAVYAACAEIESKAISNAQKWAFRTRAKEGRYNQPKLPYGYQRIDGEVKVIEDEAKIVEDIFNKYVNKDFSVTKLVDYLNKHYFKKKKWSQSTVSSMLKNERYCGDMLLQKKYSPDVFPYKLVTNKGELAQYYVYDVFPKIIDRELFEKANEKLVNNKLKFNKNQTDGNREYLLTSKIKCEHCGGTFKRRVLRNKEYWSCSNHVTSAKKCEVKMIGTDEIDDAFLKIFYKLKGNIHVLEAYKKHIVNFTTNDDDRCELDLVNRELKK

SEQ ID NO: 12296 - protein, 520 aa, synthetic construct
MPRKKAPAAEAPRLVAYYRYSGGSRQTEQSIEGQRRDCEAYARAHGMTILREYVDRHISGKTDDRPAFQQLVADSAAHTFDAVICWKTDRLARNRYDSAVYKKKLRDNGVEILYAAESNISGAEGIIIEGLMEALAEYYSAELAEKARRGMRESALKGKALGSSRPLGLTVDADKHYIIEPTGAEAVRYIFEQYAAGLSSSSIVERLNAMGLRTSHGGPFNKSSINRIIQNEMYRGVYVSKKFDVRIEGAIPAIIDNDLWERAQKMFERNRQSRTPHASRADYILSGKLYCGECGCLMKGVCGRSSGNGQMYHYYACPGRSIGRACTRKNIPQDELEAMVVNAVADLLLEPALLEQIADAIVELQQAEAARPDPEKQALEKSLSDVRSKIQNILTAIENGTSSAALSARLADLEQQESTLSYQLSSLTAKKPLTFTRDQILFLLQQFRVSPSERTKAYCRRLMDTFVDHIELTNTELILYFNLSDETVDKNKKAPRSNPSKESSTEKRLVRVARIELTAS

SEQ ID NO: 12297 - protein, 577 aa, synthetic construct
MSINRNNTSETPKKAALYVRVSTNYQIDRDSLPMQRQELITYAQLMFGINDYVVFEDAGYSGKNTDRPEFQNMMRRIRAGEFTHLLCWKIDRISRNLLDFASMYQELKDLGVTFVSKNEQFDTSTAIGEAMLKIILVFAELERNMTSERVTATMLSRAQNGLWNGGRVPYGYDYDKDSKTFSINQEEAFLVRKMYDLYSKHRSLVMVSRALNEDGYASRAGNDWSPVSIFIILTNPFYTGIYRYNHYKIPGLKIEKDPSEWIEVPDHHPRIISDEQFDNVNRILQSNSRSKRLPGQQHTSKGTHIFGGLLYCGTCGSQYVSTPSRLLASGYRPSKYACPNLRKKKTCNTKSISDPVIGEFVLNYVLNMMHARAAFSSIHDTSELQDALLNGGTFQNVDHIGKDGLDSCFHMFSSTPLDGKRFRKPKKATTIDPELKRLRAEKRKTERALDRLMNLYLYADNPISEKDFVIRKQALDDYLKEINENLGMIDRGRGIETISDENFIKRASYFIMSKELAGKDYIYFKKLAMDMDAEILRDFFQEIIDSIVMEGSNVKEIVFRNGLAHTFFYEGEEKPEA

SEQ ID NO: 12298 - protein, 489 aa, synthetic construct
MLKTVIYARYSSDKQNEQSIEGQIHECEQFAKTHDMVIIKHYVDRALSGKTDDRPSFLQMIKDSSSGLFDAVLVYKTDRFARNRYDSAVYKAKLKKNGIKIFYAKENIPDGPEGIILESMLEGFAEYYSAELSQKVKRGIKENIRKGLSFGGACPFGYKIVNKKYVIDDEQAPYVKKIFEDYAKGRRAIDIFNELNTLPNYAGKGRKWNRSSLNRMLTNKKYIGIYELEDVCVKDAIPPIIDEALFNKVQSRILFNRRHTTRAKVNYLLSGKLFCGLCEHSMTGKTGTSKTKAKYHYYVCSNRHCKQKKYRKELLEDIIIQYTVKDILNPKHFKMIAKKCLEIQQADNKINDILSMLKKQLTATKTKINNLMNAIEAGIITTSTKDRLEQLELEKYKLELEISTQQLNSNRLLSEEQIIYMLNEFYKKRADVSFYNQIIDCFIYKIYIYSDKICIVYNLNNSDKDVTYSDINELYKSSHLNSCGSPYVN

SEQ ID NO: 12299 - protein, 588 aa, synthetic construct
MRKCTNHFRNMNSEVKLMICVDQNGQAVEISVADQMWLDDAYFKEKQLRLGTDAPRAALAYRVSTKGQVDHDDIPMQKIDCRKFAQKQGWRVVKEVAEKGVSGSKVSASKRDAIQQLKEEAANGEFDILLVYMFDRLGRIESETPFVLEWFVQHGIEMWSTHEGQQKIETHGDKLMNYIRFWQAAGESEKTSIRTRDRIRQIVSSGHYTGGFVCYGYQLVDQGRRNKRDKPVMDLVINEEEATWVRELFYKVIQEGTSGYALAEMLNNRGLRTRAGAKFQSSNILRIIRHEGYTGYIITKNARSEYIPELQIIDQETFEKANDIISRRSAKTAQDRRIAHTSQNPTLLAGIVYCAHCGAKMSGFMHTDRYKLADGSIREKVQPKYNCFQRGQRNKGGRDCDGQALYLAERVDAIVLKIVEEVFEKIRDTPYSRMAENRIRQESNRQKTKRALVEKKIKAVQHALERFEGEILKCLDGTSNFTENMIAKQIRRYQQELDDAKAEYAELQNARLNEAAEIRKLRTYYDDFRGWAEEFDTAPLEMKRMILSQLIDRVEVGRKYQVTIKLNMEYQQFLDCSLDTDCSAEIGA

SEQ ID NO: 12300 - protein, 505 aa, synthetic construct
MCPIDALYARQSLDKKDSISIENQLEFCKYETRGAEYETYIDKGFSGKNTNRPAFARMMEDIRTGKIKRVIVYKLDRISRSILDFSNMMEIFQQYHVEFVSSTEKFDTSTPIGNAMLNISIVFAQLERETIQKRIADAYATKSQKGYYMGGRVPYGFQLEKTIINGIHTSVFVPEPNEMKQIRLIYQLYSEPDMTLGAVMRELLRQGFTEKRGAPWSTARISEILRNPVYAKADIDIYNFFESQGANMINPASDYVGTNGIFLYKGINGDKTKKKQYDLVDRDVVIAPHLGVIESDVWLKCRLKIMKNRQSARTNKGKRTWLAGKVKCKKCGYAYTVTRSNTKAGRYFQCSGSRYSIKCKGAGHTIYADVFEDYVLEEMKKQLAKFQYLSDELEAVTQPSSQAEKVRIAEIEQEIGNLLAKVPEANKTVMEYINRRIEELDKEKQSLQQKLVEQSTNQTSGKMDKITNYVAKWDELDNDDKQRVADILIDRIDIDEDVIEITWNI

SEQ ID NO: 12301 - protein, 668 aa, synthetic construct
MAYAKAKKHLKIWTKKKAALYVRVSTRYQVDKDSLPFQRKKLKEYCKFLGLEDHVIFEDDGYSAKNTERPHFQEMMSRVRSGEFSHLIVWKVDRVSRNLLDFAAMYQELKDHKVTFISMNEQFDTSTAIGEAMLKIILIFAELERNMTSERVTGIMLDRAEQGLWNGARMPVGYRWNGETKFPEPDPEEVKIVQLIFDKYEEWKSSIKIARYLNNNNFKSKRGGQWTSKLIHDIIRNPFYIGTYRYNLRESGRGPLKPESEWIVRENNHPAIIDKAQFDRCNKIMDQNGSSRDTSDLRARKYVHTFSGHLVCGKCGANMIASKDRARANGWRPSMYRCAQRSRMLDCDNSRTINESYIGPFIFNYIANLARVQKNFKNIATPEKLERELLKGETFGGVAGILPEGLNLTFQALSFRQVGNGTYIPDIDFLGDSGGASDRDQIELLKSEIEKSKNAVTRLTDVYLFDPDSMTKEEFATKKKELAKKIEGMERQLADLLGDSGNDDLADMSFIKKASAFLVAQRIVSKSFVDYVGMAQELDNEILKDFIDQIVDQIVVLDGRVQSITFINGLKHEFRYATPAELPVCQKCGGRIGSTCGCRTRTFDFSGKRYQRIKVGDPRDTLHGKKNPVCPECFAQEGRWHHWNCKVETCPICGGRLAECEHGPNSKN

SEQ ID NO: 12302 - protein, 573 aa, synthetic construct
MPKKPTKHPAKPKRGKKLEIEEPGVLYGRYSSHNQKDISVEQQFEKGYELAAEYGIKIIDTYADRAVSGRTDKRKDFQRMMSDAAKGKFRYVIAWKSNRMGRNMLEALINEARLQELGVRVLYVEEDFDDTAAGRFAARSMMNVNQFYSENMAEDIRRGLYDNASNCMVANGHLPYGYKRDDTLHYVIDEPKAAVIREIFTRVAAGEPFVDIMSSLNARGIKTSYNRPWGRSSFQKILSNERYRGIYIYGDVRKEDGIPRIISDELFFKVQEVITTKKNPQGRHRVNGDYLLTGKLFCGKCKSPMVGISGTGRSGKLHYYYVCQKHRTEKTCDKKNVRRDEIEMQVAQAIKDYALKDDVIEWIADSTVAYNERKAAESKVGILEDQLAGTERGIKNIMSAIEQGIITETTKSRLVELESERATIKAKIAAARADIVTVSRDDIISGLEMFRDGDVHDKKYQARLFDTFLVAVYVYDNDLRLVFSFSGNKNTVQIPIESAVNAVENNEAECSFKLCSAPPKIPIVLLDGRYFSLCGRWSRSLSPSGEIHLPPPKLTSFERDLSIFTFSLFTLHS

SEQ ID NO: 12303 - protein, 525 aa, synthetic construct
MAKRVTTIPATLNRFDSRPLQSVRKRRVAGYARVSTDSEEQATSYEAQVDYYTRYIKSNPDWEFVGIYTDDGITATNTSHRDGFKQMVEDALAGKIDLIITKSISRFARNTVDSLVTVRELKEKGIEIYFEKENIWTLDAKGELLITIMSSLAQEESRSISENTTWGKRKSFADGKASVSFSRFLGYDRGPNGEFIINEKQAVTVRYIYKRFLEGFSTYQIAKELTKMGVKTAAGKDKWYTSSVLSILKNEKYKGDALLQKSFTKDFLTHKRVDNKGEVPQYYVEGHHEGIVTADQFEQVQAELYRRQNMDRYSGVGCFSSIIKCGECGSWYGAKVWHSNDKYRRVIYRCNKKYGKGCKCKTPHITEDEIKEMFIKAANELFSEKDEIIENTKTMMDMVCNTGDLDKELGDKVAQLNIIAEQMQTAIAENSRTALDQNEYERRYADLTERYNTIKADYDKISEQIESKKAQRELFKGFIRALEKQGALVEEFDEGLWSSLVQEVVVNTKDDIRFIFKNGFEIKTR

SEQ ID NO: 12304 - protein, 503 aa, synthetic construct
MANIRRIEPVLPRLKARKRVAAYARVSMETEQLHHSLSAQVSHYSVLIQSNPEWEYAGVYADEGITGTATKHRDEFKRLMADCDAGKIDLVLVKSVSRFARDTVDTLKATRHLKDLGVDVYFERENIHSISKEGELLLTLLAAFAQAESRSISENIKWSIRKKFKLGIPNGIKAPYGYEWNGDSFSIILEQGEVVREIYDRYLAGEPAYSIAKGLAEKGVKGQSGVPMDDSTIKNILSSLSYTGTMLLQKNFFTEGHKRRKNKGELPMYAVEEMFEPLVSEADFEKAQQIMKDRAESMPNRNPKLTAFSGIVRCANCGCSISRRTSKYGKKWVCNTKERKGKAVCDFRDVYESELEDAATKALSLDGFNEGEVKSRIAFITIDNAFITFRMKNGTSRQVLRKYKKGYSGFSTRLFCGCCGGMLEADTWNMGPAGKKTKYKVWVCRNCSAPREFDSTFRKATQELFHEEQCDGLFAQNIEKAINYDEKIEFYYKRGEVVTWQKE

SEQ ID NO: 12305 - protein, 519 aa, synthetic construct
MKKVTKIDKIQPAKNAENKLRVAAYCRVSTATDAQLESLEAQKNHYENYINSRDDWCFAGVYYDEGITGTKASKRPELMRLLADCKAKKIDFVITKSISRFSRNTMDCLKIVRTLLNLNIPVYFEKENINTGSMESELFLSVLSTMAEGESASISSNNKWSIKKRFENGTYRLSSAPYGYKLESGGLQVVSEQADIVKQIFRELLSGKGMYSIAKKLNAEQVPTQKGGRWTSTSVHNILTNEKYTGDCIFQKTYADSNFNRHINNGELNRYLIQNHHEAIISHEDFKAAAALIKQRATERRIESGSDKYQQRYAFSEKIICGECGNTFRRRIHKGKYNSYVAWVCNTHLSDTNRCSMLFVRDDALKLAFATMLNKLIFSYRLLLKPYLAVMQSNTADEALLRIQYLENQLDQNAEQRSTLHKLMAQGYIDQILYTQESNELLLQARDFRSEIEVLNNTVAGDTTKVYETERLINYCKRGEMLTDFNESLFELFVDHILIYSRQKIGFVLRCGLTFEEMI

SEQ ID NO: 12306 - protein, 597 aa, synthetic construct
MRTITKIESTIPTIKKRKKVAAYARISMESERMNHSLSAQISYYNDFIQKNPDWEFAGVYADNGISGTSTVKRDEFRRMIADAEQGKIDIILTKSIQRFARNTVDLLETVRHLKNLGIEVRFEKENINSLSGNGELMLSILASFAQEESRSISDNVKWGIRKRMQEGMLNASGHFNIYGYEWQGDELIIVPKEAEVVKRIYQNFLDGKSRLETERELEAEGIRTRQGCVMRDSNIKKILTNITYTGNMLFQKEFISDPINKKRKQNRGELPQYWVEDTHEAIIDLETFQYIQDEMARRRQLGALANKSLNISCFTGKIKCPYCGVSYMHNTRKPRTPNGKRLEFWVCGSRKKKGGHCEVGASINQDNMKKVLAEVLDIDEFDDEVFLDKVDFINVPKRYTLEIHLQDGTIVTRPCENTGHQDCWTKEYRDKVSKQRRKKNTNPKGASVFTSKLKCKHCGCNYRRCTQPSTSSEDGKFYYWRCAERTACKAQGLREDFLKSQLAEVLGMAEWDEKVFAEKVEQINIDGYQLEVVGKDGIVTPMTFEPPKRGGRHCSEEQKEHMRQIMKEKWTPERKVEMSQRMKNMRKERGRNWRKEK

SEQ ID NO: 12307 - protein, 550 aa, synthetic construct
MAVQKKNVAIIPPQMKYDKQLRVEQKTLRVAAYCRVSTLLEQQEGSYEAQVDYYTNKINSNPNWKCAGIFADDGKSATQTNKRDDFNAMIDACLAGKIDLVLTKSVSRFARNTVDALQNIRKLKEKSIPVIFEKEGVNTMESGGELLITILSSQAQEESRNISENTRWGLTRRFENGQISVNHKKFLGYTKDEDGNLVIVPEEAVIVKRIFREYLEGSSIINIARGLQRDGIKTVTGLDHWHPGTIDKMLSNEKLCGDACMQKTYTVDFLTKKKVKNDGYVRQYYIEDNHEAIIPKELFHQVQEEKLRRASLHKAAVTRKKNKEEKEKSKYSSKYILTDLMVCAECGHAYRRQIWSKYGEKSAVWRCEDRLKQGKKSRCQNSPTLKEEQLHDAIMTAINSVVENTGEFIGTFRENVIRVIGSYSTQDVTTEYDEQIEQLQQQMLILIENNAKQGAVSEDFDAEYKKLSDQINELKTARIQMVQAQKQAESYKERVDQLDKAITTVNPQVREFDQDLVKRLISFIKVHKGMKLEIQFYSGIVVKQDVDYHE

SEQ ID NO: 12308 - protein, 530 aa, synthetic construct
MTKKVKTIEPIRQKVLGELRPKKKVCAYCRVSTDSAKQHTSYVAQTEYYQQYIQGREDWEYVGIFADEAKTATKVKNRDEFLRMIKECEKGNIDIIITKSVTRFARNTVDSIETIRKLKALGIAVFFEKENINTMSEQSEQMLTILSSIAQGESESISTNNRWGIQKRFQDGSFNIGCVAYGYTKDEDGELIIKEDEAEIIRRIFNEYLAGKGSYTIAKELNHDSIPTIRNAEKWNDSVVKEILQNPIYEGELLLQKTYTTEVLPFTKKRNNGELPMYSIKENHPAIITQQQAERVKEIYAYRRIQMGVDDSGKYQNRYEFSSKIICKECGGVFRRQKIYIGKPYEKIQWCCITHIENIKKCKMKAVREDMIKNAYLAMWNKLVSNYSEILYPLLESLKNLRTSQEQEVQILELNNKITELTEQSRILSRVVQKGYIDSAIFMEQQNTLNVQIEEYKKRRNALLDDNGYEKEIDGTNRLLQIIKYNPVIMEEYQEELFIHTIDKVLIGNNGDITFRLINSLELTEIITRG

SEQ ID NO: 12309 - protein, 566 aa, synthetic construct
MPTSKNTARKYAAGGSSDNSCGVEPLRAVIYARYSSSGQREESIEGQLRDCYEFAKKHGIIVIGEYIDKAMTGRVDRRPDFQRMMKDSEKGRFNCVLLWKMDRFARNRYDSAMYKYKLKKNGIRIFYAKETIPDGPEGIILESVMEGYAEYYSENLAQNVKRGNYDSALELKTLGKTCLGLKTGPDGRYMIDQAEATIVRRIFEEYAEGERAKDIYERLNSEGYRTSRGGKFNKNSLRRILSNKKYIGVYEYEDIYVENGIPAIITDRDLFERVQKMLKINHDAPARGKAQNFLLTTKLFCGLCGSPMIGDGGTSHTGKAYAYYSCTKRKRGRSCKKESVPKDWIEDLVVGELVKIVHNDELIEQIADRVMEYQKREKDQSGLHALEIRQKENEKAISNMLAAIEAGIITPSTKTRLMELEADRADIEKGIAHELLAEPEFERDQIIYFLERFRSGDIKDEAYRIMLVDTFLNSVYLYDDDHLVLVMNYSGENCKVDLKLVEGAVNGDGCKGSAFAPSSALKTPCENHRGFFCAGRDLESGFKVSAPLRSVHCHRPPDDVHPVIRT

SEQ ID NO: 12310 - protein, 526 aa, synthetic construct
MDEYCLYLRKSRIDLEAEANGQGDTLARHRADLLKLARKRGLNITGCYEEVRSGESIAERPEMQRLLNDVEAGRWTGVLVMEVERLARGNTTDQGVVADTFKYSDTKIVTPNKVYDPGNEFDEEYFEFGLFMSRREYKTINRRLQRGRRASLSEGKYIAGKATYGYERYKLSGEKGYSLRIIPEQAEIVRQIYDWYVNGELLPDGTLRPLGSYTIAKRLDARGIPSPTGGKWPPCTVKDILTNPTYIGKLRWSYRPTVKRMVDGELVKTRPVDRAVHLSDGRHEPILDEVLWHRAQLMLKNRSHAPVPKSTNIRNPLAGLLICSKCGRSMERRKFKHGRDTVACPNKDCNCKSSVLEEVEAGMLDSLRIWLSDYKIKLAQSQETISHTGPTAEQEITSLQRTLGTLQAQMDNLYNLVEQGVYSTDLFLQRSQALTARMAEVNQQIETTQAALTASRRIARNRFEIIPRIERVLALYPTLTDPREKNTILKEVLEKILYTKTTGSRWEASDMNLYVFPRVETDGEQL

SEQ ID NO: 12311 - protein, 524 aa, synthetic construct
MAGAKNITVIPARKRVGNTATADNKPKLKVAAYCRVSTDSEEQATSYDAQVEHYTEFIRKNPEWEFAGIYADDGISGTNTKKREEFNRMIEDTMAGKIDMIITKSISRFARNTLDCLKYIRQLKERNVPVFFEKENINTMDSKGEVLLTIMASLAQQESESLSKNVKMGLQFRYQNGEVQVNHNWFLGYTKDENGHLIIDEDQAIIVRRIFREYLQGASLKTIADGLMADGIPTATGNKKWRGDGIRKILTNEKYMGDALLQKTYTVDVLTKKRVSNNGIVPQYYVENNHEAIIPRQLFIQVQEELLRRAHLKTENGKTKRVYSSKYALSSIVYCGKCGDLFRRVAWKARGASYNKWRCASRIEKGPKEGCDADAISEVELQNVVVRAINKTLGGREQFLVQLQHNIEDVLNGDSTATLEYIDQRMAELQEKLVMCVNKNAEYDVIANEIDALREKKAAVVTRDAEQEMLRKRIDEMRQFLQMQTNRVTEYDEQLVRRLIEKITVFDDKLIFQFKSGMTLELKR

SEQ ID NO: 12312 - protein, 555 aa, synthetic construct
MNYIIRDDKEHETTAPKVKVIAPRKKFQPSYNDRQNREIRVGAYCRVSTDSDEQELSYETQCEYYENYIGSHENWELVAIYSDEGITGTSTNKRSDFMRMIDDARAGKLDMIITKSITRFARNTVDSLMYLRILKEYNVDVYFEVENVHSLGANEMLLTILSSVAQQSSEDKSESIKWGYQRQFEKGKVYAANMYGYKSNRGTLDIIEEEAEVVREIFSKYLSGMSESKIARYLTENKVPKKNGSTKWDSGTIGRMLQNEKYSGDALLKKTFSIDFLHKKRYKNEGQKKMYFVENSHPAIVTKEVFKAAQVERTKRNMKSNDEKEVVESHHQNRYSSKNPLSNKIICSECGALYRRAVWTKRNKEKESVWRCSNRLKNGKAICPNSVTLKEKPLLDALTSLINGKTKSKEKTRLELAKELSEYLNPKDIVEKKQKLNCELENVNSQINELLDKGMLLVARGVQDESQIEEPLAQCYQTKQMLKKELQKLDDKYNALKQGRQEKLLKTLEKNSNEHTVMTQEDLAVFIDRIVVKKDKIEIETIDDQKCELLLNQIS

SEQ ID NO: 12313 - protein, 516 aa, synthetic construct
MAQAQKQVHIIEPLERFVNRINLIGCYARVSSDSEDQLNSYNNQVDFYESYVNSLENSKLVKIYTDEGITGTRMDKRDGFLQMIEDCRKGLINTIITKSISRFARNITETLSVVRELKSIGVSVYFMTEKIDTAKMGSEMMLAVYAACAEVESKAISNAQKWAFRTRAKEGRYNQPKLPYGYQRIDGEVKVIEDEAKIVEDIFNKYVNKDFSVTKLVDYLNKHYFKKKKWSQSTVSSMLKNERYCGDMLLQKRYSPDVFPYKLVTNKDELAQYYVYDVFPKIIDRELFEKANEKLVNNKLKFNKNQTDGNREYLLTSKIKCEHCGGTFKRRVLRNKEYWSCSNHVASAKKCEVKMIGTDEIEDAFLKIFYKLKENIHVLEAYKKHIVNFTTNDDDRCELDLINRELKKVSSSINTLVRYYQKDLISLEDYKKKHNELLIDKSVFEMQKCKLNEKIYQRFEVIQTQIIIECLESVKEITALDEEIFNTLVDSIEVGTLDIQFTLKNDLKLKVERKQF

SEQ ID NO: 12314 - protein, 522 aa, synthetic construct
MELLNVCIYLRKSRADREAEARGEGETLARHERILLDLAKKRGYNVGAIYKEIVSGETISARPVMQQLLREVESGMWDGVLVVEVERLARGDTIDQGVVARSFQYSNTLIITPLKTYDPNNEYDEEYFEFGLFMSRREYKTIRRRLTAGRESSAKEGKYCGSKPPYGYSRVKLVGEKGWTLQPVPDQAEIVKLIFNLYVHGVAGERIGMAKICRKLNDSGIKTMDGGLWTVPRVQAILRNPVYAGMIRWNSRKAVKHIQDGQITISRPFAKDYILVEGRHPAIVSKELFQQAQDIVNQNPARPLNSLHVLRNPLAGIIRCGKCGYVMTRKAPSGRQVDLLRCPYSSCNNVSSKLPLVEKALLDGIQELVDGYKLNSNFSDQEYSLSISEKEEMIRGKLKEIDVLRKKKEKQYDLLEQGIYSTEEFLERSRATAAELSACDTVIHSLRQEIKHEQELQFQRSSFIPKCEDLLAHYWTWDTSTKNQFLRELIEKAVYTKNTKNTWKNGDDVSFTLDIYPKIQQK

SEQ ID NO: 12315 - protein, 523 aa, synthetic construct
MRFFSYGRKSVFSDKSDSIDNQFRMNREYCESKFSGQVDSWQQFSDEDFTGANTSRPDLQRMLSFIKGGFCDVLVVYQLDRLSRDVRDFANIYALLEEHGVMFISIKENIDTTTPIGRAMMYVTVVFAQMERETIAARVTDNMLGLAKKGYWTGGNPPVGYVRKHIVVNGKKHCSIEVDPDGARYVTQIFDTFLAYNCSLQGMETRFKNQGIRTQSGKFFSTTQLHKMLTMPYCVEATPEVYDFYAAKGCIMDPGSPREMWDGSVGVIIYGRSTEKNKKHQAQPPEKWTVCLGKHKPFMPAEKWLAVQSRFTQNKCIKDAKWPVPLLKGVLRCKCGNLMQVSRKKKVDGTCSSWYYCRKRMRQGVDACDMGQIKCNLLDEEVLELFRGITADPALIQKFVKAEAPADVPDLKAAQARVSACERKIGRLAASLALAEDSAASKYIIAEMERLDVELGALKREASLAEMESHRAAASAKDAKATAAEIAKLIHGLDGFDDKEKNAIARAVIQECTWDGERLFITL

SEQ ID NO: 12316 - protein, 579 aa, synthetic construct
MRNKSLAGRANNRAERPRKVAIYIRVSTTHQIDKDSLPMQRKDLIAYCELILGIEDYEIFEDAGYSGKNTDRPAFQEMMQKIRSGSFSHLLVWKIDRISRNLLDFAEMYEELQSLRVTFVSKNEQFDTSNAMGEAMLKIILVFAELERNMTSERVTATMISRANQGLWNGGRVPYGYSYDAETSVFSIIQDEADVCQLMKTDYFEHKSIIHTAKLLNDRKVPTRSGALWSPTAVWKILSSPFYAGIYRYNHYKGTENRTINPEEEWVLVPDHHPAIFTLEEHEKICDIMDTNKRMSNLPGQKHRAKNVYAFSGILYCGKCGSKLVSTPGRLQADGFRTTTYSCPKKRKTHECDNPSINDLIVGEFVINYILNMLNAKSSFSSISSPAELEEHLLYGGSFKDVQHISEDGLNEFYNLLSRYGSDSSYVFAVKRPRKKKAAVNPEVEALRKDKEKQERALKRLQDLYLYSERAMAEKDFIIQKNEISSRIQDINTRLGMVTHDANSTLSDEDFVRQASHLLITKKLIGREYIYYKSLAQTVSPDVLKIYMETILDSVYVIDGRVSSIIFKNGLTHTFIDKK

SEQ ID NO: 12317 - protein, 510 aa, synthetic construct
MSYFIYARKSRKDADLEALGIDVLERHITTLLELAKALSLPIGAIYREVVSGDSIDSRPVMSQVMAEVESCMWDGCLVMDVDRLARGDTIDQGRVQRAFFYSNTKIVTPNKTYDPANEYDNEYFEFSLFMSRREYATIKRRMQRGRERSSSDGYYVGNIPPYGWRRVIAPDGKHFSLAPDPVEAPVLDLMYDLCGNKQYGYQKACTHMAEMGILSRSGRPFTPSTLKGIISNPANIGKVRWGHRKTVRTVKDGKISRSRPHSSDYILADAVWPPRISADLFQRANQPKGSCSAPVRDDRPIQNIFAGLVRCSQCGRLMVRKKAHTKTPYDILICQYTECPTVGIRIDELELALLEWLRNYVDKYELTDALPEDAENVAAKEAIVKNFEKEHETLLKQRESLFDFLEQGIYTKEIFIERSNALEQRVKECMEHIISAQNDLHATLALQANRKNFVPRCKNLLGEWGKLTIPEKNSALKVLIEKIMFTKTKRNKKGQDRSDFEIDVFPKVPK

SEQ ID NO: 12318 - protein, 628 aa, synthetic construct
MKAAFLIRCSTKNQDLNRQTRDLTRLAKSMGYEYDLDNLVYGEKITGKDDVTKKNRDSIDRLLRAAKEQRFDVVLVSEVSRMSRDPASGRIYVRLLINMNIPVYFKDIDLWTINPETGKKVRDAELVIGAAFDAAWKYLKSMKTQIASARRNELDNNRISIGQPYFGYKRYEGIDKSKKNQIVVNEAEAEVVLAVYNEYLKEGATLKSTALAITDKYGEKLNRKFSLGTIEHILTYESYATGIKKVNLKDPDTDEVEVFDISTPIIIDKELYEAAANKRKNNRVKDEPYPNQQVYLLSKLIKCPDCGYTLTPRRKAGEFGQTYRLVNGKPAISWLCMSGINNITDCTNRTSIANEKLESIIWELVKKELIGYANMNDEKREEQIRECEEKIEYQNYSIQNFTKEIEKLKKRLSTAYQFSINAAEMAGDDEDMRTMAMEEFNRTAKGVRQEMKNFEKSIEQAKGELEKLVDLKTFYSQPTLPKDYLEQIEGNFTEKRNLVKQLITKIVPYRITTFKKKERESGAKTCNKMITVKNGAVLLEVYTIGGVYNVFYNANSKFQVKTAYYVHGEYATFQNGIRKYPAYDEGEYFVISNANMVMETDDIDEVVTVNEFVDIAIANNWVIEYQYQ

SEQ ID NO: 12319 - protein, 489 aa, synthetic construct
MLKTVIYARYSSDKQNEQSIEGQIHECEQFAKTHDMVIIKHYIDRALSGKTDDRPSFLQMIKDSSSGLFDAILVYKTDRFARNRYDSAVYKAKLKKNGIKIFYAKENIPDGPEGIILESMLEGFAEYYSAELSQKVKRGIKENIRKGLSFGGACPFGYKIVNKKYVIDDEQAPYVKKIFEDYAKGRRAIDIFNELNTLPNYAGKGCKWNRSSLNRMLTNKKYIGIYELEDVCVKDAIPPIIDEALFNKVQSRILFNRRHTTRAKVNYLLSGKLFCGLCEHSMTGKTGTSKTKVKYHYYVCSNRHCKQKKYRKELLEDIIIQYTVKDILNPKHFKMIAKKCLEIQQADNKINDILSMLKKQLTAIKTKINNLMNAIEAGIITTSTKDRLEQLEQEKYKLELEISTQQLNSNRLLSEKQIIYMLNVFYNKRVDVSFYNQIIDCFIYKIYIYSDKICIVYNLNNSDKDVTYSDINELYKSSHLNSCGSPYVN

SEQ ID NO: 12320 - protein, 687 aa, synthetic construct
MQSAFFFIPFFGSWRKGLFMAYVRNKKKILKFWSKKKAALYVRVSTRYQVDKDSLPFQRKKLKEYCKFLGIEDFVIFEDDGYSAKNTDRPHFQEMMSRVRDGEFSHLIVWKVDRVSRNLLDFAAMYQELKDHKVTFISMNEQFDTSTAIGEAMLKIILIFAELERNMTSERVTGIMLDRAEQGLWNGARMPVGYRWNPEIKFPEPDPEETKIVQFIFDEYERVRSTTKIARYLNHNQIASKRGGQWTSKLIRDIIRSPFYIGTYRYNLRESGRGPLKPESEWIVRENNHPAIITKEQFDRCNAIMDENGTSRDTSELRARKYVHTFSGRLVCGKCGANMIASKDRARANGWRPSMYRCAQRSRMMDCDNSKTVNESYIGPFIFNYAANLARIQKNFKNIKTLEQLEKELLKGPEFENMKVSKESLRRTFDALAFQEVGKGAYLPDINLSDGDDDYTAAEQLSILKRELDKCKTAIDRLTDLYLYDPDSMTKEEFAKKKRDLVNKIAGYEKQIEVSQATGDKDDLADLEFIRKASAFLVAQRIVSKKHVDYIQMALDLDNEILKDFVDQVIDRIEILEGRVRSIRFVNGLVHEFTYSTPADLPVCQKCGGRIGSTCGCRTRTFDFAGKPYRRIKVGDPGDKFHGVTGAVCPECSAQAGRWHHWKCGIERCPICGEQLIACEHGPNGKD

SEQ ID NO: 12321 - protein, 463 aa, synthetic construct
MPSKIERCAIYIRVSTAEQMMRGKSLEAQKQYLTNYAKEHNMTVAGVYADEGKTARKELKKRKAIHSLLEDVKAGKIDVIIFWRIDRWFRNLSDFYKVQEVLDDNNVRWISTSEPGINMETRDGRLQLNVVLSIGQNEVDTTSERIKFVNEASIRQGKLIFGDVNMGYGYKSGIIDGVKRMVKDPDREDTVNAFYRFFFKHHAKGLSMRYIQENYDPDFTWANMRTLLSSEFYKGTYRGIPYCPAYLTESEWNNLQEIQNANVKRAPSGRIYLFSGMINCPICGRRLSARGGSSIINRKTGAKKVYCYYRCNKAFIDHKCSYRHMVSQNLIERYLIDHLEYEYNKFKIKCEKIEKEQEKKKKVQTPEKLQKELERLNLLFQKGRIEWDYYSKEYDRIENELNELLNVAPELEPDYAYLEDLLNTDFRTMYYNLTQENRRAFWHSIIREIHLNTDHTVDSVDFL

SEQ ID NO: 12322 - protein, 474 aa, synthetic construct
MKVGIYSRVSTQEQAREGYSIGEQVERLKNYCAAKGWILYKTYTDAGFSGANTDRPGMQQLISDVADGKIDMVLVYKLDRLSRSQKDTLFLIEDVFIKNNVNFASITENFDTSTPFGRAMIGILSVFAQLEREQFRERSIMGKDARAKEGLHHGGGAPTGYDYIDGQLIINKEEAELIKEAYRLFLEDDMTMMGIAAKLSVFSEKFKYDHRIRKMLTNPLYAGWTHCRDELYKGQHEAIISQEVFDKVQTKLKIRAENNPHYRNAFNRTSLLAGILWCKKCGARYFKRVRRYEKGSKVYYYNKYQCYSRSSYKNMVRDKSCKNKIWTMDVLDKAVIDEIKALVANPAEVDNIIKLNQSNNNITEKKEFYKKRIKEIEKQMNKLTDLYSIDGIDIDFVAKKITALNTDKKRIESEMNAINEHKPLISVEDAKKRLSGISNILDNGEFTEKVKVITSLINRIEVDDDDIYIYWNFV

SEQ ID NO: 12323 - protein, 504 aa, synthetic construct
MKRIAIYSRKSKETDTGESIKNQINICKEYFLRQYDQCTFEIFEDEGFSGGNTNRPAFKRMMQLADYKQFDIIAAYKVDRISRNTLDFLTMFEQLKLNDIELVSVTEGFDANTPAGRMMMSMISSIAEMERANIAQRVKDNMFELAKLGRWSGGTPPTGYKSVKITDNGKSIVYLEIIKEYIPIIKNIFHMAGKGYTSYQIANEMNMSSKTINNILKNPTYMISDEKGSLFLKSIGYNIFGIENGNGYLAYNRRPRKNGKKLTKSSNMIASVSLHKGIVTSNEWIEAYIKVNSRFTEAKPRVSQLTFLSHLVKCKCGSGMFVSPGRRRKDGTRTLYFRCSNKKNGGNCNSGFLKILDVEESLLNTFYDISLDKSLINNYIKVNDQFKYDTEINILKKTIENNTKSINSLTEKLILIEGAAINIISEKINLLHFENEDLNKQLFDLERKKLLSLNTSNIDAIYDSIIFILSKWDKLNITDKQIYMQKIIDCIVWDGADGLNINLK

SEQ ID NO: 12324 - protein, 515 aa, synthetic construct
MATVKVIPAYREQIDSLRVAAYCRVSSDSADQRHSYAAQVRSYTAMIQSRDGWELADIYADEGITGTSMEKRDDFNRMIEDCKRGRIDRILVKSVSRFARNTKECLAAVRLLRTYGVSVLFEENHIDTATLTSEMLVSVFGAIAQQESISISRRLRFSYRTRMERGEFITCCAPYGYELIERTKLKVKSNEATIVRSIYKAYMQGAGIETIARQLTLNRIPAPSGGAVWHQTVVSRILASEKYLGDCLCQKYYTDDVFPYHTHENHGQRPQYYVSGTHPAIIDERDYQLVQALRMKKTPKISEKKKYLLSEKIYCAVCGTMFRRRKISNGGIRWVCRKHDRSADNCPNGRVAEPVIYAAFVCLYNKLRQHKEEIVQPVLQQLKALQLNQRMRMPETAELNLKIADIMDEKHKVSKLRSVGLIDDAIHAERQSRLQTKLYALREERERLIHDAGLEQTIHSVEVLMETLQNGPEQLVEFDEALFSDMVDKIYVEGGATLLFELTAGLSFTEKVSEV

SEQ ID NO: 12325 - protein, 531 aa, synthetic construct
MKVIMIPAKTKSEQAAGVLRQLLQVAAYCRVSTDSEEQLNSYKNQKAYYTEKIQKNDGWQFAGIFADEGITGTSMKKRTEFNRMIAACKRGKIDLILTKSIARFARNTVDCLETVRMLKGLGIGVYFEEQNINSLEETSEFMITMHSSFAQAESESISKNVAWGIRKSMEAGNVSIQYRYLMGYRKGADNKPEIVPEEAEIIRGIYQSYVEGASLGEIKKRLETEQITSPNGSKLWSVSTLRSILKNEKYMGDALLQKTFVTDCISKKVKKNNGELPMYYVKDHHAPIVSRELFARVQAELTRRSSKRKVSTKESKTAQGKYSSKYALTERLVCGECGSAYKRCTWSWNGKKKVVWRCISRLENGKKYCRNSPSMEESKLQAAIMTAIRQYAPPKETVTETLEIAMQATVDADVEMSWPYRLEQLTQEQERLVDQMMVDMKNDDLAQQLRAVTEQKKALLEQHDGEPEMSETNIIDSNELHAWMMEQLEQAENYSENLVRKVIAQITVESKNSIDIRFYGDDKEYTQNVED

SEQ ID NO: 12326 - protein, 583 aa, synthetic construct
MALLPRKPAKHPAKPKRGKKLEIEEPGVLYGRYSSHNQKDISVEQQFEKGYELAAEYGIRIIDTYADRAVSGRTDKRRDFQRMMTDAAKGKFRYVIAWKSNRMGRNMLEALINEARLQDLGVRVLYVEEDFDDTAAGRFAARSMMNVNQFYSENMAEDIKRGLYDNAANCMVANGHLPYGYKADETLHYAIDEPKAAVIREIFTRVSCGEAFVDIMASLNARGIKTSYGRPWGRSSFQKILSNERYRGIYIYGDVRKEGGIPRIISDELYFKVQEVITTKKNPQGRHRVNGDYLLTGKLFCGHCKSPMTGISGTSRSGSLHYYYVCQKRRTEKTCEKKNLRRDDIELQVAKAIKRRTLDDDTINWIADSVVEYSQHQESASGIGLLEDQLKDTQRSIKNLMAAIEQGIITPTTKARLMELEKEQSDIDRKITMAKADVIPVNRDQLVGWLKKLQAGDVHDKKYQAELFDTFLIAVYVYDNPDGQDYMKVVFNYAGSKNTVEIPLDPSVIDNVENIETGAVRLSSAQVHQTRKIRTCFRLEKGSDFSFSSGTTTKVPVDGAKLRYLVIDRKPITRFGGYDYEVR

SEQ ID NO: 12327 - protein, 550 aa, synthetic construct
MSRKKQVNQKITALYCRISLEDGGDNESMSISNQKLMLRDFAEKNGMFQYEYYVDDGYTGRNFNRPSFQRMIADIEAGKIGCVITKDLSRLGRNYIEAGSYIEIFFPKHNVRYIAITDGVDSLTRQEMDITPFKNILNDMYSRDISKKVLAGRMTRSRQGKFCGGQPPLGLMRDPEDKGHLIRDPETAPVIRKIYDMALDGWGCMRIAKQLMDDKVPITRVKSNTECDVNYYSWGSARISHILRNPFYKGAHLVCRTHQKGIRSNTYDIIPREDWEIIEDCHEAIISPEEWEQVQEIIDRRPTIMKGNSCPFYNLFHGIIYCATCGKSMQVRYEKVGRTGKNRFTGEQREPIDKAYYICQTYNRLGKNACTSHKIEARDLYNLVLKDIQELAKTALKDADAFYQRLSSRMERRYLLDASQTQKECQRLESRNCEIDEMFLSLYTDKAKGILTEQRFMKLTATLEQEQEANQKRLQDLLLMMRHSDEQENEVRTFIKEIRRYAAIEELDEAVLNRLISKILVGEVKKIDGQKVQEVRIVYNFVGEIPEITA

SEQ ID NO: 12328 - protein, 528 aa, synthetic construct
MTKVTVIPSTIDPLTQMPVNNKEKLKVAAYARVSTSSDEQYTSYEAQVNYYKEYIQGRLDWEFVTVYADEGITGTSTKRRVGFNKMIKDALDGKINLIITKSISRFARNTLDTISYVRKLKEKGVEVFFEKENLWTLDSKSELILTIMASIAQEESRSISQNVQWGKRVAFQSGKVSFAYSNFLGYKKVDDKIVVVEEEAEIVREIYKSFLVYGKTPTGIAKELKERGIKTPSKKSTNWTKNNITSILQNEKYKGDALLQKTFTDNFLEQTIIKNTGQIPQYYVENSHPAIIDKDMWELVQIEIKRRDNLGAKYSSSDIFASKLICSDCGGFYGKKKWHSNTKYERFVYQCNNKFDKDKCICRTPHLTEDDIKLKFIEAYNITMKDKKRIINDLNEVIELVANTKDLETEIEKVSEEIAVVVELATKAIKDNSKTTDNSNEFEKKYKTLETRHEKLKTKLEELLSERFKKESLEIKMRAFLKALRKSESDIDKWDERIWMLMVESGTVNRNKNITFKFNNGLKFKAKE

SEQ ID NO: 12329 - protein, 433 aa, synthetic construct
MKKITKIETIKEMPKRLRVAAYARVSSGKDAMLNSLASQVNHYKNYIKSKPEWEFVGVYTDEAVTGTKELRDEFQLMLSDCKAGKIDMIITKSISRFARNTMTLLKTVRDLKAINVNIFFEEQNIHTLSGEGEMILTFLATFAQEESRSISENMKWRIKKDFEKGLIWGSTSMFGYKLENKKYHIVPEEAEIVRFIYSLYLEGYGDRMIRTILDEKGIKPYRTKTWGVTTITKILANYNYTGDLILQKTFIDNHLTKKLKHNKGELDKYIVSNSHEPIISKEIFMEAQAIRKSKALKFAKSSSYNNEFKGYIRCGKCGKTHTYRRGPYNIYWICSTFRDKGKSYCDNQQVPDDKIKEAAIHLLNMNKFSMPIFKHLVQQVVAQPNNILRFELNDGSVKEYEWAHKPRSEGWTDDMKEQARQHTLKRYGGGSAK

SEQ ID NO: 12330 - protein, 468 aa, synthetic construct
MLYGKPQNYSWYRARVVLYIRVSTDEQARHGYSLGAQREALREFCDTFQCQIVAEYSDDGVSARKEIQRRPGLLRVLEAVKAGGVDYVLFIKLDRWFRSVREYYRVQDVLDAAGTNWKAILEDYDTSTTNGRLNLNIRLSVAQDESDRTADRIKFVFSERVKNGGAIFGSKSLPYGLEVRDHRVQIVEDQAVIVRAFFDHYEAAQSARSTQVWLRDQYGVDLPRNTIGRMLRNGLYCGQYRDNKNYCPAIISPDQFRRVQEILARQASGHTRQSKYSYVFTGLLRCPVCGCTLKAFPQFDYKWNRLYLRYRCTQHWIENRCSWKTTPWEPRLEGWLLDHIQPQLDAYIAQFDVQEAQRRRAVVDVGAIQRKLSRLQDLYVDGMIDRAAYDEKYQALIRQQEVAQAAQQSQSAGRDLEPLRQLLAGDFRSIYATLSPQERHTLWASVIDHIVVKDGRYGHFDLDVIFLP

SEQ ID NO: 12331 - protein, 493 aa, synthetic construct
MKTAVIYARYSSDKQTEQSIEGQLYDCYNYAKQHGITVVQEYIDRAMTGKNDDRPAFQQMLHESAMHKWDSVIVWKLDRFARNTIDSAVNRQILAKNGVKLLSVMESFGDDASGQMMTHIIEAINEYYSADLREKTIRGMRQSAMKAQTTGHIPLGYKVVDKKLVIDDETRIIPETVFRMYAEGERLTEIAEHLNAQGYRNRRGRPFTTNSFYNMLANEKYIGIYKYDDIVIEGGIPQMIPNEVFEAVREKLITNRKRAAKNTAKADYYLSGKLYCGHCGEPMSGLSGTGRNGVKHYYYRCNGVQKKSGCHKKLENKYLIEDEVCRAARSAFEQMDKAETAETIYQMYLQTVRNEYAPAELEKELTECTKQAENVVNAIAQTGGNQLLYDKVRELEERKEQLSSALRLSQAMTDNVPSVEQITVFIDDILATDINTTEGKKSIADIMISKVYVYDDKLTVIFKDKDGKSVDIPLSAVSDSSSADCAPSALGSQ

SEQ ID NO: 12332 - protein, 558 aa, synthetic construct
MNKLRAAAYCRVSTDRAEQSGSLASQRSFFDDYIRNSDSMTLVGVFYDEGTSGTTTLNRYGFNKMISLAVSGGIDIILTKEVSRFARNTVDTLNITRMLRAKGVGIIFINDNIDTRDSDGELRLSIMATIAQEESRKISERVKWGQQRKMEQGVVFGRSCLGYDVKDGKITVNADSAEIVKRIFTEYTVLLKGAESIADGLNAEQIRTVNGGRWSGAFIRKVLRNVKYVGDLEQKKTCTPDFLTHKKRLNSSEHIYIRNHHEPIISRELWEQTQAEISRRKPTDTSRHSDRYVFSGKVYCGVCGSVMVSRVKTLKNGKIYHALRCSGRIGGKSCNNETLNVTALKACVKRIFTDIPIDKTSVINAVIKGLSRTDKPDIPALRRKIETLNAKKRRAVDLMLDGLITQQELIEQKSYYDSIIEKLSQEISSDRSVLETDKIRTNAERFLDFTSDPIWLLVIRADYIHGTLTVYLKGIENGFTTCFTATGRGDSYRVITGNTVRSQGIIPGTMQVQKNWFHHDVNDKLIKKSAPDIFQVHFVLICRLFCSLCVAGHSARTL

SEQ ID NO: 12333 - protein, 541 aa, synthetic construct
MAYRKITDIRDTIGMRAVFYARVSTAEEEQLNAIELQIEENRGCIKDHGWKLVGEYIDRSKSGTTVKGRDDYQRLYEDLYEDLFDIVVIKDQERLQRNTLDWYLFINRVVQTGKLLFMYMDGKFYSPDDALITGVRAIIAEEFSRNLSKKLHNYHDHRIEKARQGQEIALQGSGNVYGWDKKDGKYYINPEQAKVRRLMCEGIMARKGSTLIAKELNDAGYRNTVGKPWKPMDIPKFVYDCKNVGTMIINKERHDFESKQTIKLPKEEWVYVENALPQIVTQEEWDLICKIHEERVIATGSDRRGKKTSGYSFSGKLVCGICGAPYWRKQRVSKDEYWVCSTKQTKGRRTRKRDSTMGKAGEINPLGCDNENISYNSLMEIMGVVSERLQANTDTIKQDMINWLTKLRKQLLEANGGHTEADLQRELSRKSKLLDAYLDGILNKQEYQKKAEELDERIIQLKEETEKNKANSGDIAEIDKVLANIDEEVSRYVDGNEKLKVEYLLEHLEQVQIFPDKVIVIVPILSEGIVVEKTQYVSREK

SEQ ID NO: 12334 - protein, 456 aa, synthetic construct
MRKQNNSEAPVRAALYVRVSGEEQKIKGLSIEAQKERLVAYAKERGWIIAGLFVDAAKTARKNMHKRSEFQKMLDLVRADGVDMLLFCRLDRWFRSVRDYYKVMEVLETHNCQWKTTDEEYDTTTANGRLYINVKLSIAQNEADICGERIHVVFDSKIQHGTVLSGKCPFWLRINDERRYELIPENAAIIQDAFNHFENTTSQRATIRYIRETYDVNWCEATFRRMLKDKLAIGVYNKNGRYNEDFCPPVISKEQFEHVQELLKRNSRHNPAGRVYIFTGILVCEECRHHLVGRKQKDFFYYRCNQHFQRGRCTHNHSAREDVIETWLFEHLGEEIKKYEVAWNVQAAERKRTAASIDRSVLRRKLTKLKDLYMNDLIDIDEYKKDYETYTAALSALEEPEEEKHIDLSGVRRIISHDFREIYNSLTREEKRTLWKNTLKEIRVNNANEITGISFF

SEQ ID NO: 12335 - protein, 523 aa, synthetic construct
MRFFSYGRKSVFSDKSDSIDNQFRMSREYCDTKFSGQVDSWQQFSDEDFTGANTQRPDLQRMLSFIKNGFCDVLVVYQLDRLSRDVRDFANIYSLLEEHGVMFVSIKENIDTTTPIGRAMMYVTVVFAQMERETIAARVTDNMLGLAKKGYWTGGNPPRGYVRKHIVVDGKKHCSIEPDPDGVRYVTRIFDTFLAMNCSLQGMETRFKNQGIRTESGKFFSTTQLHKILTMPYCVEATPEVYDFYASKGCIMDPGSPREMWDGSVGVIIYGRSTEKNKKHQAQPPEKWTVCLGMHKPFMPAEKWLAVQARFGQNKCIKDAKWPVPLLKGVLRCKCGNLMQVSRKKKVDGTCSSWYYCRKRMRQGVDACDMGQIKCDLLDDEVLELFRGIAADPAMIQKFVKAEAPDEVPDLKAAQARVSACERKIGRLAASLALAEESSASKYIIAEMERLDVELGALKREASLAEMESHRAAASAKDAKATAVEIAKLIHGLEGFDDKEKNAIARAVIQECTWDGERLFITL

SEQ ID NO: 12336 - protein, 527 aa, synthetic construct
MYELTQSMESLSVDEIIVYLRKSRSDSPEMSVEDVLKKHEEMIQDYANTHFGSPIPEKNIYREVVSGETIDSRPQVKIVLQKIESPQIKAVLIVEPQRLSRGDLEDCGRLINILRYTNTMVLTLTHSFNLTEEYERKFFEMEITRGNDYLEYTKRILRRGRESSAAKGHYIGSVDPYGYRKIVIKKDGVNCHTLEIVPEEANVVKLIHELYAYTPGGIGFTNIAHKLDSMNLKPKKAAHWTPAIISSILCNPLYLGLIRWDTRKVVKYINDGRLEKSRPRSSDAKYYKGLHEPIISQELYDACMARRGTNPSLRRNKELCNPFAGLLYCGTCDHAMSLKIYKNHNSVSQIMLCNHQSYCHTKSVLYSAFLERFISSMENTIHDFELALLADNGNAQAVNQSIVANLEIRLKKLQEKDMRQKDAYEDGIYSKEEFLERNIKTQQEIASTITALTAAKETKENYVDYGEKIRRFRDCINALNDPELSATEKNQFLKSCVSKIIYYNNMESKAGVGRYVENVFSLEIQYI

SEQ ID NO: 12337 - protein, 539 aa, synthetic construct
MAVAVYCRVSSEDQAERGTIEIQKDFAAKYVNLYNLDVFDYYCDDGVTGTLPLEMRPEGKRLLEDAANHKFNTVIFHKLDRLGRKVRVILNAVHDLDEFGVSIKSMTEPFETETPTGKFLLTTLAGIAELDRDTILARMWSGAQLAAKQGRWLGGVVPYGYQIVGKRLVISDEPIPGFRISEEDVIEIIYRMAGKEKASCPEIADYLNSLKIPTKYQVDKLNNNSTTASAMLWHPSRIAHIIRSTTYKGVHQYGKKTTHKGSKLITRSVPAIVSEELWEKANNVLTSNRLFSRRNSQIEYLLRGMIRCGNCGYAYVGRPNKRDNTKFYICVGKSKWNYKYYQKERCIGKSLHADWLDDIVWEKCLEFLKNPEMIYKEKTPLHDDSQPVSNVSYELQQIKIRLKGMSGEREKLLDLYRKEIITEADLKKQIDKLYKEETNLNKKLSTLNDNLPKQELKRSKDSVVALLQDFAKTIQNVDVKELPFELKRSVVKMLIDKVIIYTEKAPDKSYPEVKIDINWRFDAPPFKIDYIENYTVKLL

SEQ ID NO: 12338 - protein, 515 aa, synthetic construct
MSTNAVIYARFSSDKQREESIDGQIRECKAFAQANQLNVIAIYIDRAMSARTDHRPDFLRMIKDSRSGAFDYVLVYQLDRFSRSRYDSAIYKHELKKNGVKVLSAKENITDSPTGIMLEAMLEGYAEYYSAELSQKVRRGMTENLLEHKWNGSPVPLGYALDANHRLVIDPDMAPHVKALFEMFLAGKSYAELARYLDEKHIRTVTGRKYTGPTVHNLMSRQLYTGTYTWGGQVIEDFCPAIISKSDFSRASLRMANRKRTAKDGIPMSVRRSPEYALTGIIYCGECGRTMTGYSGRGQNGDRYYYYRCNSNNNRCRQTEKIKCKNHPVRRNRLEDLVLQTTVNILSDKEAVAAIAEQVSRIKLENPYASELSNIKSRLADLKKRHDNSVKAIEAGVMSQAIMDNVCKYEAEMDNLKARQEKIKLATPSLQIDPVAVEYFLKSLLLNKKQHDKYRLDLFEAFIHRVVVYHDKVEIQYNYLPGHKLENPITTPLPGCSNLNKVVGPLGFEPRTNRL

SEQ ID NO: 12339 - protein, 489 aa, synthetic construct
MLKTVIYARYSSDKQNEQSIEGQIHECEQFAKTHDMVIIKHYIDRALSGKTDDRPSFLQMIKDSSSGLFDAVLVYKTDRFARNRYDSAVYKAKLKKNGIKIFYAKENIPDGPEGIILESMLEGFAEYYSAELSQKVKRGIKENIRKGLSFGGACPFGYKIVNKKYVIDDEQAPYVKKIFEDYAKGRRAIDIFNELNTLPNYAGKGRKWNRSSLNRMLTNKKYIGIYELEDVCVKDAIPSIIDEALFNKVQSRILFNRRHTTRAKVNYLLSGKLFCGLCEHSMTGKTGTSKTKVKYHYYVCSNRHCKQKKYRKELLEDIIIQYTVKDILNPKHFKMIAKKCLEIQQADNKINDILLMLKKQLTATKTKINNLMNAIEAGIITTSTKDRLEQLEQEKYKLELEISTQQLNSNRLLSEKQIIYMLNVFYNKRVDVSFYNQIIDCFIYKIYIYSDKICIVYNLNNSDKDVTYSDINELYKSSHLNSCGSPYDL

SEQ ID NO: 12340 - protein, 518 aa, synthetic construct
MKKAVAYCRFSSDNQRTESIDTQVRAIEEYCKKEGYTLIKIYKDEAISGTSIDDREEFLKMIEDSKNNEFNYVIVHKFDRFARNRYDHAINEKKLNENGVKLISVLEQLNDSPEAVILKSVLTGMNEYYSLNLAREVRKGQKENALKCVHNGGIPPLGYDLTEDKTYTINEEEAKAVRLIFKMYLEGRGYAYIADELNSLGFKNKLGKPFKKISIRDTLYNEKYIGNFIFGKKDKKGKLTGKEIKIENGIPAIISKEDFEKVQIMLQKKVRSSSGRSTALTTYLLTGLCECGECGGSYSGGYRSVNRNKTVSYGYQCRNRKDKVNDCKNTPIRREVLEDLVITTLKENIFSTSQIEVITDKVYDYVQDTFKRSNKELIKIDKSLEKLKAKAEKLLDLTLDGTISDYEYRNKKGEIDMEILNLKEERFKYTDAPKFMDKQKIKNHLIELGKNLDSKDENLLKILIQTFVKKIIVHRDSIALELRIFPGLTPAKVGGDDGNRTRVRNYQRHRLLQCLVCY

SEQ ID NO: 12341 - protein, 612 aa, synthetic construct
MRAAFLIRCSTKKQDYERQVNDLTRLAKKFGYTSSDNMIFGEHITGKDDASKRDRQSIQRLKDAAINKEFDVVLVSEVSRMSRDPMSGRLYVRQLINMDIPVYFRDIDTWTIDPVTGKKVRDAETIIGAAFDAAWKYIKSMKTQIASGRRDELDNNQMSIGQPFFGYKRYGGRDKGKKNSWVINDDAAKVVVDVFEEYVKDGATLKSTALAITAKYGEQFNKKFSIGTIEHILTFEPYCTGIKVVSLTDPDTEDVDEFEVEIPTIITRAMFDKATTKRATNRTARTPYPKQATYILSKLLKCPICEHSLTPQKRGGDKGDKYRLMNGKVAIRWSCMSGINNATDCSSRITISNEKLEAIIWGLIKQELIGFANLNDEDRVAKVEELTDKITNLEMNIANFTSHISNMDRLIERAYSAYMDAPDSVMDIAKDKYYKTLTKCENERAECKDKIEALSVEKLRLENMRTFFNQPTLPKDAIEKAESDPIKMRNLVMELIDKIYPYRITTYVSPATNRIMRNGIVLLEVYTINGIYNVLYDGNQRNNKVAYYISGVYATFQNGRNKFDAYDTGEYFVISHATLVTETEDVDMLVTFNELIKICMQNGWEIDYTYKM

SEQ ID NO: 12342 - protein, 464 aa, synthetic construct
MARSVTVIPARNRQRETGRRAVQEKKIRVAAYCRVSTDQEDQLHSFEAQVDYYTKYINDHENYEMAGIYADEGISGTNTKKREQFKRMIADCEGGKIDLVITKSISRFARNTQDCLAYSRKLKNLGIGIIFEKENINTLDSTGELLFTILSSLAQDESRNISENCKWGIRTKFKNGEMHLNTFKFLGYDKDENGKLVINKEQAKTVRRIYRDFLIGINPAQIAKELTEEKVPGCNGQTKWYPSTIVGILKQEKHMGDALLQKTYTADFLTKRQVKNNGEIAQVYVKDSHKGIIDKQTWNAVQEEFERRERFMEAHGTDRYSYGADCMPFCEKVFCGECGSLFTRHSWRSRGIVQWQCKNHRKDGKVACTNAYVDNADLEKGFVKAFNRLVTDRDKHMERWNQMKTDGSPLEKIRAEQMMEATGNEPLGRFVPEIAQLVLAEVTVLGAKKYEFFFLEGSRIKVSV

SEQ ID NO: 12343 - protein, 498 aa, synthetic construct
MEIQIREGNREQKRKLRVCAYCRVSTDADEQENSLENQIRHYETVIKANPAYEYAGVYSDFAISGFKEKRPGLQKMLADAQKGKIDLILTKSVSRFARNTSIVLEATRKLKELNVDVFFELQNINTLSGEGELMLTILAAFAQAESESGSAGAKMVYQRKYEAGIPVQYLERSFGYMKNERGVYIADEEEAVWVRKIYEMAADGYTPAAIKRYLNENEVKTVGGTEWIDSTVFRLIENEIYKGDYIMHKHFVNEERKLVRNRGEVDAWYIEDDHEAIVSPELWQKAQDAIEAKRDYLAEGSVIEEFTEDNYPYMNRIFCAKCGHPLYKRIYSNGNRLNWGCSGTKRYGKSFCEGINIPDGVLRKAWHFDGNMYIDEKPSVKGTKEFFYLKESSWKRRHKKKVPEAIPENTEEAYPYRKKIFCGLCGSRLVRHVNPKSHKVIWICNGAKRKGVAFCRGTRIPDSVISGWGEIKKDIYIQRKDDKNGKKRYSYTSKKPTA

SEQ ID NO: 12344 - protein, 528 aa, synthetic construct
MAKKQTNGNLALEQQRVIVIPAHDEIVARKLRVAAYARVSSSSEDQLNSYRVQNQYYSELISGNPDWEMVDIYADEGITGTSVEKREDFQRMMQDCRKGKIDRILVKSISRFARNTKDCLAAVRELKELGVSVQFEEQGIDTSKVSSEMVTAIMASLAQKGSESISGNVQWGYQKRMESGKFNTCKAPYGFTLHEGKLSIIEDEAAVVRFIFQLYLNGLNGYEIANTLSQQEIPPGREMGTWKDSSIYYILKNERYAGNAVVGKSYSTTTFPHKKVRNHGEREMYLLSDSNPPIVSPEVFERVQTLLQSRKNAHIGSTNQTFSRKLYCANCGRSLKRKFTNDKMYWVCNTHFQNAASCPTPPYHTPDIEQAFCRMYYKLKHHGGPIFTQMLSNLQKIRCSRMLWSEDVISLNKKISDILSQVQFLTQLQQAGGVDPDTFISSNNKLSEQLRRLKQEKARLLDTDSNDLADRTRDLMDALEDGPDFLDGFDAELFDALVEKIIVDSNERLRFRLKNGLELLEQIERTRR

SEQ ID NO: 12345 - protein, 562 aa, synthetic construct
MDIHNIRQLLRTKTIYDLPLRVTFYARVSSESDEQLNSLGNQIGYYEDFIKKNPAWTFVPGYIDEGISGASTRHREDFNRMVEDAAAGKFDFVITKEISRFARNTLDSIQFTRQLLSSGVGVFFQNDNINTLDEDAELRLSIMSSIAQDELRKLSSRVKFGHQQAIKQSVVLGNSRIFGYTKDDGRLVIDETQAPMVRELFTLYATGAYSMKQIENLFWEKGYRNLNGKKIAHTTMSNMISNPKYKGYYVGNKVKVVDMFTKKQKFLPPEEWVMFKDETGQIVPAIVSEELWEKANAVLLRRSEDVKNRQGICNHANLLTGKLFCTHCGTAYYRRESKDKLGIQNSKWVCSNKIKSGADACDSFPIYEKELVPLLFEVFRDTRQASAAMIAEYERMYRSMTCDGNLEKKIEEAQANIDLAKKKKSKLLELVTLESITPADFKAMTAQCNQEIKSGEQALLELKDQQESSEEFRANMEHLRKVLRDAEKQCQTEAITKDFIDIFIDRIYVTPEDDNTLRLDIKIFTGDTCEKYLGKLKRRANPAGSTGHTFKKMIEAYESGMQ

SEQ ID NO: 12346 - protein, 541 aa, synthetic construct
MNSIITTEEKITALYCRLSQEDEKEGDSNSIENQKAMLTKYAIENGFRNIEVFVDDGYSGVFFDRPAFQNILNLIEENKVNTLITKDLSRLGRNYISVGNYIEMEFPHRDVRYIAVNDNYDSNDMNSSSNELAPFKNLFNEWFARDTSKKIRAVIKSKAERGERIGSHIPYGYKKDPDRKGHLIINEETAKNVKLIFQLCASGMGPRNIAKVLAEKKIPRPSVYRYENDGVIIQKTDITDRYSWATKTIVGMLENEVYLGHTVNCKTTTLSYKDRKKKLVPIENQFRFENTHEAIIDKETWDIVQKVREGRRRITKSGNINKYSGLLYCADCGARLTYNSGNKPKPKSYYFMCSSYRRHKDGDCVLPHRIREIVLDEIVREEINQAIYYAVNEKDKFVECISKRSLSESRKKLSQKITELDRLNNRKNELNVIFRKLYEDNALGKIPDDQYRLLSDSYTAELHELKAKIPELQNQINTIKTEESNVDRFIALANKYIYIEELTPEILRTFVSKITIHENVKDTTGTKYEIDIFLTHIGKFW

SEQ ID NO: 12347 - protein, 538 aa, synthetic construct
MSTAPNVTVIPAKVQTAESRDKYHQLRVAAYCRVSTELEEQQNSYQVQIAYYTDLINKKKEWTLAGIFADEGISGTQTKKRTEFNRMIRMCRNKKIDLVITKSISRFARNTVDCLEYVRQLKDLGIGVIFEKENINTLTMTSEFMIALYGSFAQAESESISKNVSWGKEKAYREGKVQFQYKHLLGYKKGADGKPEIIPEEAETVKLIYTMFLDGHSMKNIALILHVKGIHTKTGSTEWRTNTITRILQNEKYVGDALLQKTFTSDCITHKVVKNHGERPMYLVTNHHDPIIDRDTYNRVQQELARRNSKRKISDKTVTEQGKYSSKYALSELLICGHCGTPYRRTTWAARGKKQIVWRCLSRLEHGKKYCPDSPTIKEEQLHRGILRAINNYYSCRNDIVRILKANIGSVLECQGQEEILSVEKRLKEIDQARTDLVNLIASGGCDEDKLDSEFAKLYAEEQGLSERLTMLKSQNKTSEETQAKLDKIMDMIEHEKFELETFDNVLIRKLIECVKILSKTEILVIFKGGYEVRTEIE

SEQ ID NO: 12348 - protein, 458 aa, synthetic construct
MPTVTVIQPTITEEQNIKIRCAAYCRVSSDSNDQLNSFMAQTRYYSQVFENSETEELIDIYADEGITGTREDKRDEFQRMLKDCRRGKIDRIYTKSISRFSRNTRDCLKSVRELKSLGITIFFEKENIDTANLTDEMMITIMGGLAQEESTSISQNMRWSIKKRMQNGTYRNSCPPFGYTVQNDTLVVNEEQAKIVKQIFNWYNEGYGLQAIADTLNSMAVPSSQTAERWHASSVKYVLSNERYIGDALFQKKYRTETLPTMQKRNRGEKPKYYVQSVNTPIIDKDIFYSVQELLNKRHREYINNNHFLSKRILCSKCGATYKCVSSKNSVFWTCRTHNNKASDCSNGRIADIKIYAAFVRLCNKLLYNYKTVLIPLQTALQDLKLRKFSGKTQVMDIHKEIAKLREQTHVLARLKTKGFLDEAKYIEQTTELTAKINKLQTDLKKLTRSDDEDETLN

SEQ ID NO: 12349 - protein, 504 aa, synthetic construct
MYKASNGSGELMENKVIRVGGYIRVSTQEQAKEGYSIPAQTKCLKSYCSARNWILHELYIDPGYSGAKMERPALQKMLSDIKKGLVDLVLVYKLDRLSRSQKDTLYLIEDVFLKNEVAFVSINENFDTSSAFGRAMIGILSVFAQLEREQIKERTQMGLAERAKNGMWHGSGITPIGYDYDPASNQLVVNEYEAMQIREAFDLFVNQNYAFTKIVKTFRNKGYSHKHGVWAHSSKLRYILSNKTYIGRINWNGEDYPGKHDPIIPSSLFEAAQKKLAEKDWKLTDKPAKSPFDATQLLSGVLFCGNCGGRYYGAGCYRGSHDPNSPKRRYEHIYSCYSRTKTKLEMIKDPSCKNKNWKTETLDNYVITRIKNLRLEGEIENLIAKERPQKPGIDQRKALEKQIDDIDRQISRLLTLYQLEDVPTAEIGLRLSDLTRKKKTVEEAIENIPLYEPELSVAKAKSLLADAEEIFNCGTTEEKRSLIHALIRKIILTGNDVVIEWAFI

SEQ ID NO: 12350 - protein, 513 aa, synthetic construct
MQENKQNLRFTALYCRLSSDDELKGDSNSIIHQKQILQDYALKHSLTPTEIYVDDGFTGTNFDRPDFKRLLSDVENDLVKTVIVKDLSRLGRNYLKVGYYTEVLFPEKGVRFISIADNLDTSVNDELNDFIPFKNIMNEWYAKDLARKQRAVVKSKGNSGIRLATRPLYGYKKAENGDWLIDEPTAAVVQKIFDLYLKGYGPASIANYLFANKVKIPSTIGLPKLNPEQNPYRWSKDTVAKILTYQDYCGDMINFKRSDVDSLVIFPDRQEPIISREIFAEAQKLRLDRKPVRHDYSEPVLFSDLLLCADCKSRMYAQRRYHGTTSYSCSKARKTQGCTSHYINEIKLIDCVKSDINKLIKNKGIVIKLAKEKMHIDTKTAQCANSQNLKNAKKRILQIDTILKNLYEDKVLGNINLATFKKLESDYLREQAELNKVIFEQSKIKVNLENRSKSICGFLKKLESYNNPVSELSRDLLIDLIDKIEICEATKNGNERSQQVHIYYKEIGKINLE

SEQ ID NO: 12351 - protein, 503 aa, synthetic construct
MDNRLKAVAYARFSSDNQRDESIDAQIYAIENYAKINNIEIIGTYIDRAKSATTDQRPNFQKMIADSSTGTFDIIIVHKLDRFARSKYDSAIYKQKLKVNHVRLISVTENIDGSPESIILESVLEAMAEYYSKNLAREVMKGLCENAKNTIHTGGIPPLGYDIKDKKLVINRHEAEAVRIIFDMYNDGYSYGEIIKTLNDNGYKTKIGNNFGKNSLYEILRNEKYMGVLTYNKSPEKSATGTYNRHKYKDNENIIRINGGCPAIITSDVFYTARDRQLYNKQVSQSNRTRQKYLLSGMLYCDVCGSPLYANRRKKDSQITYRCCKKYRSVDKCTCKEINQQWIDSEIIKIIKKHILNEQNVDYILQTINDYNNSQKSKQANIFLEYTNELTDIKNAKENILNAVEEGFAKEHFKHRLDTLIQRESYLKHQLHTMDNIHHLSISKTDILLISNKFNRLLKENDITALRAMLNDFIDKIYIGNNKVTVYLKERWFRTTILTLDRY

SEQ ID NO: 12352 - protein, 544 aa, synthetic construct
MRTIRKIEQSIPNLRQRKKVAAYARVSVESERMHHSLSAQVSYYSRLIQKNPEWEYAGVYADYGISGTGIKKRQEFQRMLEDVEKGRIDIILTKSIQRFSRNTVDLLNTVRHLKEIGVDVWFEKENIHTMSGEGELMLTILASFAQEESRSISDNIKWRFHKKFEQGIPHAKFLVYGYRWEHNTLVIQPEEAKIIRKIFDDYLSGKTRKELIRDLEKNGIRTRYGHFFRDSSIRQILTNRIYTGILEIQKTFVTDPITKHQVANNGEKSKYIVERHHKAIITAATFEKAQQELKRRKEMGKRQGGYAREFLNTSCFTGIIKCGICGKSYTHVKRKYKGECHEYWTCESHKGKGTNCGAYGSVPQPVLEEICATILGTDSFNKNTFFQQVKKIVVPAYKVLVFHLKDGRIIEKQWNSTARKECWTDELKEKQRQWMKKYHQNDASKRYTAFSERICCPICGVTFTRCLEKRKREKVAYWRCKGKRKCSHVTGIKEETLKIIAASVLQMVSFDGEIFQKKVERIEIQRDGSLSFQFFNGYSKGVTL

SEQ ID NO: 12353 - protein, 521 aa, synthetic construct
MKKVHVIPASIQKYSEKPLDRHCKRKVAGYARVSTDHDDQVTSYEAQVDYYTHYIKSRSDWEFIGMYTDEGISATNTKYREGFKRMIEDALSGKIDLIITKSVSRFARNTVDSLMTVRKLKDKGIEIYFEKENIWTLDAKGELLITIMSSLAQEESRSISENVTWGHRKRFADGKVSLAYSHFLGYERGVDGNLVINKEQAETVKEIYRLFLSGFTYHSIARKLTEKGIKSPAGKDSWCAGTVRSILTNEKYKGDALLQKRLTVNFLTKEMKINEGEVPQYYVEHNHEAIISPQVFDLVQEEILKRKSGKTRYSGVSIFSTKIKCGHCGSWYGAKIWHSNDSYRREIYQCNSKFKNHCNTPHLTAERIKEIFVSAVNKLITNKNEIIENLEMIRQQLCQTKSLEKEREHLKQDMLILSEIIKKNIAENARIAQNQNEYEKKYDDLMNKYNKMKNNYEIILDKIKKQQVRNTQIGEFIDRIKKQDTITEFNEYLWASLVDFITVYNEQNIRITFRDGTEIKV

SEQ ID NO: 12354 - protein, 522 aa, synthetic construct
MNHTTAYIYSRISSKHQTTGHGLDRQQELALEYANRLNFNISTETFNDIASGYHGKQMAGKLGLLIEAVNTGRIQPPAVLIVESLDRLGREHEVEALSRLLDLINAGIDVHEVSTETVYNKARPELLHLALAVMSRAHNESKLKSQRSRDALDRVFHKAERKEGIISRNVPSWIIINTDTTTPATAFSLNKTFASTIQYIFNLYLSGMGSNRIAQKLHEEQHELVLSKPHQAKRMKQTWTDSRVLNILQAEAVTGTFTSKSASRQHIIINDYYPQVISIEQFNQAQAIRTNKKRTNAQASNNGTVKNILSGLIRCECGMKWQYNKSAWTTKQGKQIREYLRCGSYKASPNCGSQSLQLRQLEHLILTWFSSINLNNTVSNTNEHRAKLQQLEQQAENLLDLVMMGDARANTRYQALMNDINETTSLIANETEQQTVIRNAESFNVFDVLDVKNNELRRKVQILLVATVNRITIKVEGKDVTLRIYMNNHQLSDDGFAQQFKGVVNDMAKAHQTHCMPRVAIG

SEQ ID NO: 12355 - protein, 535 aa, synthetic construct
MKKAVAYCRFSSDNQRTESIDAQVRAIEEYCKKEGYILIKIYKDEAISGTSIDDREEFLEMIEDSKNKEFNYVIVHKFDRFARNRYDHAINEKKLNENGVKLISVLEQLNDSPEAVILKSVLTGMNEYYSLNLAREVRKGQKENALKCIHNGGIPPLGYDLTEDKTYTINEEEAKAVRLIFKMYLEGRGYAYIADELNSLGFKNKLGKPFKKISIRDTLYNEKYIGNFIFGKKDKKGKLTGKEIKIENGIPAIISKEDFEKVQIMLQKKVRSSSGRSTALTTYLLTGLCECGECGGSYSGGYRSVNRNKTVSYGYQCRNRKDKVNDCKNTPIRREVLEDLVITTLKENIFSTSQIEVITDKVYDYVQDTFKRSNKELIKIDKSLEKLKAKAEKLLDLTLDGTISDYEYRNKKGEIDMEILNLKEERFKYTDAPKFMDKQKIKNHLIELGKNLDSKDENLLKILIQTFVKKIVVHRDSIALELRIFPGLTPAKVGGDDGNRTRVRNYQRHRLLQCLVYYFISQQSLPQTGLTEAIL

SEQ ID NO: 12356 - protein, 523 aa, synthetic construct
MAERSVTILPPRLNRKAQEIKAEEKAKLRVAAYCRVSTDSDEQATSYEAQIEHYTLFIQNNPEWMLAGIFADDGISGTNTKKRDEFNRMIEECKAGNIDMIITKSISRFARNTIDCLKYIRQLKALDISVFFEKENINTMDSKGEVLLTIMASLAQQESESLSQNVKMGIQFRYQQGIVQVNHNRFLGYTKDADKNLVIVPEEAEIIKRIYREYLEGANYKEISAGLEADGILTAAGNPRWHSSTLKKILTNEKYMGDALLQKTYTVDCLTKKRVANDGTVPQYYVNNDHEAIIPRELFTRVQEEMKRRANIRQGMDGKRRVYSSKYALSSIVFCGHCGDMYRRTHWNNHGKKQIVWRCVTRLNAPGVECPARTLSEIQLQNLVLEAINKVLGGKQRAIKVLETNISEVLGNAHSEELERIKKQIEKQQTLLVKMTAASEDYSKVVDKIYALQREQEEAMAANVNYKAGKERIQEMIEYLKSQPKRVTAYDEQLVRKLIEKITVYDDHLDFLFKSGIQIEMKG

SEQ ID NO: 12357 - protein, 520 aa, synthetic construct
MAKVTKIFNKEEEENKKLKVAAYCRVSTGSDEQLESLEAQKKHYQTYIKSNPAWQYAGLYYDEGISGTKIEKRKQLLAMLDACERKEIDLVITKSISRFSRNTVDCLEMVRFLIEHGVYVYFEKENLNTMTMESELILSILSSMAEEESHSISKNNKWSIQKRFEQGTYVISYPPYGYINDGGEMRIVPEEAEVVRRIFNDTINGKGSAQIARELTEEGIKSKKGGKWNSTTIRGMLRNEKYTGDAIFQKTYTDDRFTRHTNNGEEQQYYCRNHHEPIISHEIFELAEQETRRRADEKNIKKSTQKYNKRYAFSGIIKCGECGAIMKRRTHYTGRREYIAWTCGTHLENKTKCLMLYVRDDAIKAAFTTMMNKLVFGYKEILTPLLEGLDENMNYMNTEKQSEFENQQQAIKEREKLLREHFHKNLLSQEIFIRSMEDIEQELRTLAQMREDYLHNQQRGITYLAAARDLYAYCCQAEMHAVYDEDVFKRFVNGVIIFSRDEAGFRLNCGITLRERMVVR

SEQ ID NO: 12358 - protein, 521 aa, synthetic construct
MKRITKIEGNAAFLNAVRKTRVAAYCRVSTGSDEQLLSLETQKDHYERYIKAHLDWEYAGLYYDQGITGTKKDKRPALMQMVADCEDGHIDRVITKSISRFCRNTTDCLELVRKLLGLGIPIYFEKEDLDTGSMESELMLSILSSLAESESVSIAENSKWSIRRRFENGTFKLAYPPYGYNYIGDGEWAINEEQAKWVRFIYSETLSGKGSDAIAAELIELGAPTKKGGKWTSTSVRGILSNEKYTGDCIFQKTYTDERFNRHTNYGEMDQFYMEGHHDAIVSHEDFDAVAALVEQRAKEKGITRGDAKYQARYPMSGKVFCGECGSPLKRRMNYSTHIQYPALTCSGHLKDKNSCSQKFIREDALQMAFVTMMNKLIFAHKEVLQPLLTSLRNVSKKETVSRLSELDERLEKNAEWQNTLTTLMTRGYLDPALFTQESNDLLTEAQALTEEKEHLVFSVNGEMKKTEKLADLIRFCNRGEMLTEFDGDCFSQFVERVVMHERITAAFELKCGLTLKERIR

SEQ ID NO: 12359 - protein, 523 aa, synthetic construct
MAEKTITVIPARKRVGSRRQVTEEKPKLRVAAYCRVSTDRDEQESSYEAQVEHYTEFIDRNPEWQLAGIYADDGISGTNTKKREEFNRMIEDCMASKIDMVLTKSISRFARNTLDCLKYIRKLKEKNISVYFEKENINTMDAKGEVLLTIMASLAQQESQSLSQNVKLGLQFRYQAGKVQVNHNRFLGYTKDDEGNLVIVPEEAEIVLRIYREYLEGASLFQIGQGLEVDGIKTAAGNNYWLQSTLKKILTNEKYIGDALLQKTYTVDFLNKKRVASNGIVPQYYVENSHPAIIPREKFMKVREEMYRRAHMEYGPGQKRRIYSSRYALSSIVYCAHCNDIFRKINWNNRGCKSTVWRCLSRVEKNRPSCTARTVKEELLHEVIVRAVNEVITESSSFIPALQASFERCLGDSNSAAVEGIDAHLLELQQELLKLANARQNYDALADEIDELRAEKEELLLQEANKDGIRQRMADMVAFLQSEPEEVIEYSEALVRRMIEKITVFDDHFVVEFKSGIEITINE

SEQ ID NO: 12360 - protein, 498 aa, synthetic construct
MQIEVRKADMGKEKKRLKVCAYARVSTEASEQENSLENQVSHYTEMIQSNPAYEFAGVYADFGISGFKESRPQFQKMMRDAKNGKIDLIITKSVSRFARNTAIVLKASRELKERNVGIFFELQNINTLTEAGELLLTILAAFAQAESESASESSKMAYLHRIENGEVVAYLERSYGYEKDENGEYRAKEPEASVIREIYDLVIQGVNCTNIARVLNARNIQTVQGAEWTASTVFRIVENEIYKGDVLMQKTFIDGKRHQVQNRGEKAMYYAKDNHPPIVSEKTWEKAQRKLEDMRAERAEHSVIQEFTEENYPYMNHIFCAKCGWPLKPRVYSHGHRLSWDCSGQKRGTKKFCTGIHVLDNDLRKMKIEGNRYFSETVDKYGEVHLKHVGERTWKNKHKKKKFNHKDLYPELNEENYPYYRRLYCARCGSRLGRYISHGTVRWICSSYKRKGQAKCPGVRIPDEIIKGWNLPDGKIYIMGKEDKNGEKHYSYTSESAL

SEQ ID NO: 12361 - protein, 497 aa, synthetic construct
MQFLNVAAYARYSTENQDENSIETQFDNIAQYCQTHQYNIVAHYFDKAKSGTNIERADFQEMISAARTGKFSAIVIYDITRGSRDVADWFTFRKQMMQAGVQIISTHDNIGDLLNPNDFLTELIGVGIGQHHVLTSRLKSIDGTTMKAHEAIFLGGCPPLGYDVKDGKYIINESEAKIVRKIFSMYASGESYSNIIDSLNGAIGKKGRPIGKNSLSSILRNDRYIGIYTWNRRKIKIMGKWAGGVPNERIVQIKDAIPRIIDQPTWERVQIRLKSKTNSSSKATRSYLLTGKIVCAECGARYCGRTSVNQRGYQNPYYVCGNKTRTRQCHSKNIKCEDLDNFCRNAVREYILNYDLSETAQRVVTTYNATVSQYTNEKKELAEISRKIKNGTDAILNGFSSEELFQQMGKLQMRQKELEKIIADDAADELDLDLVTKLLKNMLEDVSTNIDEVVKQFVTKIYAHPNGDCTVHLGVAHFTSSGREIRTLDTTGMNRML

SEQ ID NO: 12362 - protein, 481 aa, synthetic construct
MKKKNINAPSPIDMVDLYIRVSTTEQAMEGYSVGEQENRLRRFCEALGYQIHKVIIDPGYSGASLNRPGIKEVIHDVQDHLVNKVIVWKLDRLSRSQKDMLIMLEDIFLANNCDFVSMLESFDTSTAFGRAIVGILAAFAQLERENIKERTTMGRQARLAKGHYNSSRPPLGYSFLPGCNDLKVDPYEASIVREIFSLFLSGTAINTIASTMQKKYPTVRSWKNTTIRRTLRNSVYIGKVSDVDITRDGIHEAIISDSDFNMANAMLQHNLEIKKQSCRSHSLLTGLLYCGDCGARMQPRTISKGYPLRRYVCYSVSRTNKAMIKSDHCTNRLHPYTLEELDNIIISEIKKLAVDEKYLKSIIQEDAAPIINESELCHDRLAELDKQTDKLLNLYQIGAVDLSQIQNRLTSLKQERNALTQTLNKISTEMPMNIQQIKDYATAFQEALKKNDYDQVNNIIHILIDKIVVLNEDIEIHWTFC

SEQ ID NO: 12363 - protein, 528 aa, synthetic construct
MAYCIYLRKSRADRELELQGFGETLKRHRDTLIELAKKKNLPIGEIYEEVVSGDSIAARPQMQRLLNDVSDGKWEGVLVMEIERLARGDTSDQGIVTKTFTYSNTLIITPMKTFNPTDEFDQEYFEFGLYMSRREYKTIKRRLHAGMEASCKEGNYIHHTPPFGYSIVKNKKSKGYRLEPKPGEAEIVKLIFQWYTKGILKEDGSYELLGTARIADKLNSEYSIKPLGGVWTIPTISTMLRNEHYLGYIVFGKKKRKKVVENGIIVDKWTRNESYGLYKGKHPALVSQDTFNLAQERLSRNPRRPSKTITNPLAGVIKCGMCGRSMYRRPYQKRGQSASLICSEKTCHNVSSAFYLVEDALLTAIKEWIDGYEIKEEANKYDTSVLESKTKLLEEQQKQLITYKNQLTKVFEAYENRIYDSDTFLNRQKTVSESISSTEEAIVKLNKEIANEREIISHQEEIIPKARKILEIYKTSDDVQLKNDLMKSILDKVVYTKTANGHFKDQRQDDFKLELFPKLPKNKGNSSE

SEQ ID NO: 12364 - protein, 527 aa, synthetic construct
MAYCLYLRKSRADIEAEAHGEGETLARHEKLLLEVAKRGHYNITQIYREIVSGETIAARPVVQKLLQEVEDGKWEGVLVVEVERLARGDTIDQGVMAQAFKYSGTKIITPLKVYDPANEFDEEYFEFGLFMSRREYKTIKRRLVRGRNASAKEGKWVSGLAPYGYERVRIKGDKGWTLRPVEEQADIVRFIFKLYTSGEEDDNGEVRRLGTYTISKRLDSLGVAPPSSAQYWNDRTVQCILQNPAYIGKVRWGVNKSKKRIVNNSIEVERYKAPADEVIYVDGLHSAIVDEAIFQKAQDLLKRSGPPPVPKRNSVVNPLAGILVCGKCGRSIVLRRGRIDILICHNRICDNVGSKYEYVEERLLQALSSWLDGYRLEWSDKLPADEQAILDLKQKALRKTVAELETLHKQLDRTHDLLEQGVYDTDTFLVRSRSLTERIAAAEEDISTLTAEVQADKERAASRLNVIPKVEKLLEVYPVLPSAQAKNEMLKEVLEKVEYTKNERSGRNGPFDNFELVLYPKLPPKIE

SEQ ID NO: 12365 - protein, 488 aa, synthetic construct
MKTAAAYIRVSTHMQEELSPDAQKRLLIEYAKKNDMILSNEFIFMDKGISGKKADKRPDFMKMISMAKQKPAPFDVILVWKFSRFARNQEESIVYKNLLRNKCKVDVISITEQTGDGMFGKLIERIIEWMDEFYSIRLGEDVTRGMVENAMRGNFQASPAIGYKVVRKGELPKKVPEESKPVEIAFKKFNSSMGFLEIARYLNSLGYRTKTGKLFEARGIKYILTNPIYKGWLRWNYRNPDGSRKSKEDWIIVKVPGLEPTVSEELWDAVNERIELMSKIVPPKSKPSSVKRHWLSGLIKCSACGRSLSTSVHTDKRYGRIYTNFQCYGYFKGKCTVSHQVSEKKIVPIVLAMLKEDSLKKDVPFEILTDNKNSDEISILKLQLEKIDMKELRIKEAYRNGIDTLDEYKENKDILTRERSSLQNKLECLNVPEEEMKADMPKRIGSVYDIVSSESTTKDEKYAAINSIVKKIVYRKSDGEVDIYYYYS

SEQ ID NO: 12366 - protein, 440 aa, synthetic construct
MNTNKRAALYIRVSTEEQARHGLSLSAQLENLQQYAKNKGYDIVGIYTDDGASARKSPFSRKAFRQLMEDVQWNRIDRILFIKLDRWFRSVRDYYKAQDILDAHGVDWETTQEQYNTTTTNGRLMLNIKLSVAQNESDMTSDRIRFVFEQKRVKHEVLSGFAPLGYKIKNKHLVPDENASIIANAFNQFIAYPNLQQLTNWFHSQGIHYNVTSIRKLLRNERYVGRNKGDLEYCPPIVSDQQFYTVQDMLDKNLTVKRTASGLVYIFTGLLRCPICGHKLTSSCAYSGTHKYKRYRCSRHWRNEDCSFNRGIAESKLEKQLLAHFDDLYEHFNSAVQEEQKNNTSIDTQVIKKKQERLKELFLNELITLDDYKKDYAKYAAMLPSEPRPSIQPSLYKGMKAADIEQLYKTLPDRQKQAFLRQIIDYIDFDADLKPIIHFK

SEQ ID NO: 12367 - protein, 453 aa, synthetic construct
MECVAYMRVSTEKQAEEGNGLDSQKRDIELFCRKNELVVADWYVDDGYTGANMDRPELQRLINDCIKKRVKCVVAFKLDRLSRSMIDGLYIIERVFQPNHVLFKCVHDSVSYDSPMEQAYTQMMAVFAQLDKNTMMLRMRGGMLERIKQGYWIGGANTPYCYNYSKEKGILIPIPERKEQANRALDMFISGYSDLYIKESLGFHSEVLVRNVLTGVVNIGMIPYKGNIYQGLHEPIFDKERFELAQEIRKSRRKNKTACHTDANLLTGLCYCGVCGCKMRYQKWTHGKHKIYCCSRDKAMKYLPNFNPDCNNSLEWASDIEKQVESEILKISLNLSECKPIEKQSKLEIMQSQFEKEQVKLKRLYVLYSDGNDTVLEMIKNTEKSISEMKVKITEEEKNERNSQKKEVVYENIKKLADVWAHIDKKEKNNILKSIISRIVIVNGDVEIQLKNF

SEQ ID NO: 12368 - protein, 506 aa, synthetic construct
MDHNRSADLTGLDAAVYLRKSRMEEGLATDEVLAKHQKTLYDYAAAHGIHILAEYPEVVSGESLYARPQMLRLLQDVEDGHYDAVLCMDLDRLSRGRMKDQGIILDAFRESGTLIITPEKVYNLSDEIDEEYAELKTFISRREYKIITKRLRRGLQMSIQEGCYVANAPYGYHKTVVDRKPTLEIYEPEAKFVRMMFQLYAQGYGCVAVARHVNALGARPHRSPEFSRNSVAKILRNPTYVGKIVWNQKKHIRKGAKGNPKHITIYQPRDQWTITDGLHPAIVDRELFDQVQAIMDGRYQPAKNDGTVRSPLAGLVKCVNCGQNMQRMVMKQKAYLLCMRPGCCSSTQFDLVEGQILDYLEDTLAKLTMNQPQHIPGRNTDVLETTLAAVKNELAGTDRQKNRLYELLELGEYDLPLFRERMAAVKEKRAALEKKEAELERSLREVQCSNPALLAERIRAVLDAYGTADPAGKNSLLKSVLDTVWYQKEKKTKPSDFQLTFTLRAL

SEQ ID NO: 12369 - protein, 578 aa, synthetic construct
MAYPTKNTAADNRIIAIYVRVSTGYQVDKDSLPFQKKELKAYCKHILHVDLSQVEIFEDAGRSGKNTKRPAYERMMEKVRAGLVSHVLVYKIDRISRNLVDFSLMYDDFKYNRVTFISLNEQFDTSSAIGEAVLKIILVFAELERKLTSERVKDIMIGRATEGKWNGARVPYGWDWDPDAEQPVHSKIEAPYARGMYEMYLKVRSTGKIRDYNNSHNIPTKRGGEWTSKTVSDFLRNPMNKGDYRYNYRESARGRKKPEDEVIYQEGVFEPLVDPEVWERVNRIIDDNASKRNTGGLHPIMKNCNVFAGLIQCADCGSGFQVVKKDRRRKNGFAPSMYGCTSRFRKIHCPAPNVSEVQIGPFVINYISAMVYATKERFKIHSPAALESMLLSDPIFANIAGIESQGLNETFALLTGVSVSGSALWRTDPVKQSDTAATSSEIENLKKQIQKYNRAKERLEDAYYFSDDAMSEKEYLEKKNKFDAARVAAENKLKELTEVQIASHVDDSGFMKSASAFLLAHQLHAGVHIEYRDFAVTVEEESLKEFMNLVLDHISVKDRRVVEIVFSNGLSHRFIYRE

SEQ ID NO: 12370 - protein, 553 aa, synthetic construct
MEKSKRVVGYARVSTEAQDITRQIELITAYCNDRNYHLIKIIQEKISGARKDRKSLNELLDVDDAVADMIIVSELSRLSREDDILSVLSTINELLKQGVDILFLDKQDRIYKAGTILSLYDIITLSVEAKASADERYKIAGRMQTGLRSKLAEFSNMFAGGTVPFGYKVIHNPDYKLNQTPKNLLVVDAKEAEAVKYLFQQLIDGNTIRQTVRVYNKLYPYKLSYSGICRIIRNPKYKGEIYRRGKLYGQIPELQIITPEDFDKANKQMRENSLFQSNAPKYYNPLKGLLFCPCGCGLYMKPNHNSYLIYRCSSAYNDKQKCENYGVKCAYILSSVWTCVKETLHTEEYKRFNTQRANELQGINKQIRETITRKVNSVDELKTQSASLIAKIKKLNNDDLINELETDYNVLCKQIKQTEQEISELNGQIAENDAEIKRNVEQKDFSKMEQSALYKEKLQKAVYHSLSAMRGILEIVFKNGMTRYVLIKKHRNGGTYLLPDTFKGDMERKQIIVPSLRTDKDNPYSAQPMNLRYTFDEFFKAMPVEEYEIPITE

SEQ ID NO: 12371 - protein, 520 aa, synthetic construct
MKRVYCLYRVSTKGQVDKDDIPMQKTSCREFAERNGWTILKEFQEKGISGFKVSARERDAIQDLKTAAENKEFDVLLVFMFDRIGRIDDETPFVVEWFIKHGIEVWSVNEGEQRMDSHVDKLMNYIRFWQANGESQKTSARVKTRLNQMTMDGKFTGGVAPFGYRLIKSGEINKKGKELMDIVVDDDEAVIVKKIFDMTVKEGYGSYRMADYLNSHGIRTHNNSKFQCNTVNRILKNRLYCGYFVSGGVESPYIEKLQIIDENVFDQAQFILKQRSSKNEEKQQIARTTKGSTLLSGNIYCAHCGQKMVSTSYVDRYNRKDGSQYKVRRQRYICTNKAMKRGECDGQSAYVAHRIDGAVLATLKDYLAKIKSTPKDIALEKRYKSEISEYKRKQTKIEKEIEKLKRQVVELSAEIGRSLLGESRFTPDMLSTSIDNTNDILHKKEIELSDIKYKLTNQQNAMGKLDFYYSQFRTWADEFDNSTMEQKKMIACQLIKEVRVARGYELEIVFDLNYKQFLSK

SEQ ID NO: 12372 - protein, 490 aa, synthetic construct
MAYCMYLRKSRADKDYENLSTETILNRHEKTLMELAQKHNYDISKIFREVVSGETLSQRPQMQILLNEVENNMYDGVLVMEVERLARGNSVDQGIIAQAFKYSNTLIITPTKTYDPQNEFDEEYFEFGLFMSRREYKTINRRLNAGRLASCKEGKFVGSVTPYGYTKEKLKNQKGYKLVPDLEESKVLKLIFDLYTNSMGIRNICKHLDSLGIKPRNSENWSTSTIRDILKNPVYIGKILWQKTYSTKTTKDGFVKSKRYKNKEDFYTFNGIHSPLISEDTFQKAQNILLQNSHPPVNNTSLKNPFAGILYCNLCGKAIVRRFVNNKYQYLMCNNPNCQNTATELKNIENCILNIIENHFNYTTSPTVFEKEDNTNELFYINKEIKKLKLQFSNIFDLLEQKIYSKETFLERKQMLEKNIEILTLQKEKFENNASQINPINTPVTILELYNKLDDIKNKNQLLKNIFSKIYYSKIDNNIKITIYSKLPIK

SEQ ID NO: 12373 - protein, 457 aa, synthetic construct
MIKKELSTGPLRVALYIRVSGEEQKIKGLSLEAQQERLEEYARQQGWVVVGIYIDAAKTARKDMRKRSEFQKMINAVKRDEIDLLLFCRLDRWFRSVADYYKIMEILQTHHCDWKTTDEEYDTSTANGRLYINVKLSIAQNEADICSERISVVFDSKVQHGTVVSGNCPFGYVVNEEKRLAIDPDAAAIVRDAFNYYESSISQRGTIRHIRETYGVNWCDATFRRMLAERLYTGVYDSKGRYNENFCEAIISKEQFERVQVLTSRNARSVPSGKVYIFTSILKCAECNHNLVGYVAGPYYYYRCNQHFQRGRCSHNKSVRESYVEEWLFEHLVEELERCKLEWDVQAAERKKKTRSTDKAVLKRKLTKLKELYMDDLITIEEYKKDYQIYTAALQQIPDEAPEETPPDFSAVERMLQADFKSIYDSLTREEKRTLWRSVISEIRVDRDNNITGIIFG

SEQ ID NO: 12374 - protein, 530 aa, synthetic construct
MNIAAYCRVSTDKSDQLNSLEAQKKFFAEFTERNGHNLVRLYADEGISGTKIKNRKEFQRLMRDAKQGLFEMVVVKDISRFARNTVDFLQSIRALKALGIETTFLTANMTVLGNSEFVLTIFGALAQEESANTSKRVKFGKKLNAEKGRVPNIVYGYDKTIGDYFNLEINKEEARIVRQIYKWYINEGYGAAKIANMLNEQGIKTKRNCAWSQNAICRILTNELYMGKIINGKEEVEDFLTGVRTTKDESEWLITDKPELRIIEPEIFDKAQEVLRGRHKAFKLNKERQSNKYIFSTLIKCKECGWSFRRTVRTYKNTYIRWVCSGHNGKGADNCPNAVTIDEAELIQALDEYFKEILKDKKNIINRIVREFNRIYKKKEDNEQYENELITELARLKKTREKYMDMYTDDLISREELNEKIGGMKKKIEKLENELKLVEYNLNKGDQLEEIVQHTFKNIEGITSVADMTNEQLKQIIQKIEVDKEGNVDIYLRIFGDLGLDDSVLISYDYTGCCRLFGCICCLIRILDRL

SEQ ID NO: 12375 - protein, 477 aa, synthetic construct
MELVTKNRVIIYNRVSTIMQDKNESLTEQTDECIRYCNEKGYNIIKILKDVKSGTKDDREGYLELKKHIKRRDFDILVVLETSRIARKMKELVLFFSLLNENNIDYVSIREPNYNTTTPDGKFAMNIRLGLIQFERDNTAERVTDRLYFKASKGQWVNGKPPIGYKLVNKRLEIDEEKAEIVRNIYEDFLNGYSLNQINNKLQFSWGSKQVKRILTNPTYKGYIRYGTRNNRKKNNREAFIVKGWHEAIITEDKWEKVQEMYKSLNRKASNTKPTLLGGLLKCKECGNNYIRKRGGSYDKNLYYGCNLNNLRYSDKFFYKDIPECSSATIKGDLLEKAVIDTLKKQINDLNFNDIEIEKKRQVNIKQIDSSINKFKNRLNKIYELYIEDEISKDKYLKDKKDIEARIISLEKQKKSFGEIEVEKSNNEMIQEYFSKIDLSNIEEANRILKIIVNKIVVYKKKKTPKDDFEVEIYLNI

SEQ ID NO: 12376 - protein, 465 aa, synthetic construct
MKGNAGDTIVKKIDLSPELVRVALYIRVSGEEQKIKGLSLEAQQERLEAYARERGWVIVGIYIDAAKTARKNIHKRTDFQRMMDSVKRDEVDILLFCRLDRWFRSVADYYKIMEVLEAHNCDWKTTDEEYDTTTANGRLYINVKLSIAQNEADIDGERIDVVFDSKIAHGTVVSGSAPFGFRVNEGKRLEVVPEDAAIVQDAFNYFETSISQRATVRYIRETYGVNWCDATFRRMLKEKLYTGVYDRGGRFNDHFCPAIISKQQFDRVQALLERNARSVPSGKVYIFTSILTCAECGHKLVGYKSSDYYYYRCNQHFQRGRCSHNHSAREDVVEKWLFEHLAEELERCQLEWEVAAAKKKASVARTDKAALKRKLTKLKELYVNDLIDIEDYKRDYQIYTAALKQIPEPSIEPPPDFAAVRRLLDNDFKTIYENLTREEKRTLWRSVIKEIRIDNDQNIAGVVFG

SEQ ID NO: 12377 - protein, 502 aa, synthetic construct
MIAIYARQSVEKKDSISIESQIEYAKREVFSEDFKIYQDSGYSGKNTNRPAFHEMMADVQSGKIEKVVVYRLDRISRSILDFADFINILESNRISFVSATEKFDTSTPMGRAMLYIIVVFAQLERETIAERVRDNYYARVKKGAWGGGPAAFGFDLVKTTIDGKKATICQPNEQISVVQRIFELYALPYSSLADVQRQLIQDGSVSSGGVNFDNAKLSSILKNPAYVRADTAVYNFYKAKGAILANPPEDFDGVHGCILVGKRDANERKYKDVSNHLLAMGHHEGIVDSTAFLFCQQKLSRNRQIKNTYKGKHSWLTGLVKCAHCGYAFTIRFSRTKDGQVPYFCCSGKYLHKVCTAKQTHRVREIEAEVQASLIQHAASYNLIHRQNTDAAAKEFQSRISEIDAKIENLILSLESVSHVSAQYINQRIEALHHEKQLLLHRYNETISEYNINEVTPFSATDWEQMDIEQKRQLARSLIRTVYLSEDGLSVSFNIKNGGHKP

SEQ ID NO: 12378 - protein, 512 aa, synthetic construct
MERAVIYARYSSDHQREESIDAQVRACREYCQRKGYLVTKIYADEAKSGKSIAKREQYKKMLADSQKNLFDVVVFHKIDRNSRNELDYYLTKNQLISSGIKYEYAAQNIDTSPAGQMVEGILVAVAANYSRNLAEETKKGLKENALKALFNGGRPPLGFEINQENKYIINDYEAGAIRIIFDLYLKGKGYHYIISQLNSLGYKTREGRKFGKNSLYDILRNPKYCGTYTFNKVNKDPSGKRNSHKISENTIIVEDAIPAIISKEDFRKVQEKMNQNRYRSAAYKSKETYLLTGKVFCGICGAAMNGHRASSNGKKYVYYTCSGRDRLGTSACQNKVVPRDDLEELVLLTIEQELLSENSLKKLKDTIEMEYQAVANEYADEASSLSEQKAIAERKLNNLYTVIEQGTADEYDLERLAAVKQELSQIKEKLAKCAGANSIATINPTHIEKVLKVCRKMLFKNITNESLRMLFDDLVNKITIDAKKITLQLKLECSGTYGAEGRTRTGTWGNHA

SEQ ID NO: 12379 - protein, 581 aa, synthetic construct
MARKRTNLIGNTPSVRETKVAIYIRVSTIHQVDKDSIPMQKKDLIAYCQLILGTDNYEIFEDAGYSGKNTDRPAFQNMMGRIRKGEFTHVLVWKIDRVSRNLLDFAEMYEELRSLRVTFVSKNEQFDTSTAIGEAMLKIILVFAELERNMTSERVTATMISRANSGQWNGGRIPFGYSYDPKEKVFFIREDEASICRELKDLYLLNRSLAYVSRALNEKGYKTRAGVSWSPHSVWIIASSPFYAGIYRYNRYKGVESRTINPEEEWVMIQNHHPAIFTLEEHQAMRSIMKSNKRNMDNLPGRVHLSTKTHIFQGIMYCDKCGSKMVSTPGRLHVDGYRTSNYGCPLRRNTKKCNNPTVNDIVIGEFVINYILNMLNAKKTFSTINTPDELNAALLSGSVFSEVSSVEENGLNSFFNLLSRYGSDRSYIFSVKNPRKKKAAVDPELLKLRKEKEKQERALQRLQDLYLYSETSMSEKDFIIRKSEISSHLDNINRQLGLMTQDQASFLSDEEFIKQASHLLIQKELKNKKYIYFKKLVSTVDPDILKAYMETILDSIYTADGKITAITFKNGLTHRFIYKDK

SEQ ID NO: 12380 - protein, 498 aa, synthetic construct
MEIQIREGNSRQKQKLKVCAYCRVSTDADEQENSLENQIRHYKEVITSNPDYEYAGVYSDFAISGFKEKRPGLQKMLADACKGKIDLILTKSVSRFARNTSIVLEATRKLKELNVGVFFELQNINTLSGEGELMLTILAAFAQAESESGSVGAKMVYQRKYEAGIPVQYLERSFGFKKDERGVYIADEEEAAWVRKIYEMAADGYTPAVIKRYLNENGVKTVGGAEWIDSTVFRLIENEIYKGDYIMHKHFVNEERKLVRNRGEVDAWYIEDDHEAIVSLELWQRAQDALEAKRDYLAEGSVIEEFTEENYPYMNRIYCARCGHPLYKRIYSNGNRLNWGCSGTKRYGKSFCEGINIPDGVLRGAWHFDENMYIGEKQTDKGKKEFTYLKEASWKRRHKKKEPEPIPENTETEYPYREKIFCGLCGSRLVRHVNTKNHKVIWVCNGRKRKGKDFCDGTRVPDTIIKGWGEIKKDIYIQRKDDKNGKKRYSYTSKKPTA

SEQ ID NO: 12381 - protein, 464 aa, synthetic construct
MARSVTVIPARNRQRETGHRAVQEKKIRVAAYCRVSTDQEDQLHSFEAQVDYYTKYINDHENYEMAGIYADEGISGTNIKKREQFKRMIADCEGGKIDLVITKSISRFARNTQDCLAYSRKLKNLGIGIIFEKENINTLDSTGELLFTILSSLAQDESRNISENCKWGIRTKFKNGEMHLNTFKFLGYDKDENGKLVINKEQAKTVRRIYRDFLIGINPAQIAKELTEERVPGCNGQTKWYPSTIVGILKQEKHMGDALLQKTYTADFLTKRQVKNNGEIAQVYVKDSHKGIIDKQTWNAVQEEFERRERFMEAHGTDRYSYGADCMPFCEKVFCGECGSLFTRHSWRSRGIVQWQCKNHRKDGKVACTNAYVDNADLEKGFVKAFNRLVTDRDKHMERWDQMKTDGSPLEKIRAEQMMEATENEPLGRFVPEIAQLVLAEVTVLGAKKYEFFFQEGSRVKVSV

SEQ ID NO: 12382 - protein, 526 aa, synthetic construct
MQYCLYLRKSRADSEAEARGEGETLARHEKALLDLAKKLNINITAIYREIVSGETIAARPVMQQLLQEVEQGIWDGVLVMEVERLARGDTIDQGIVAQTFKFSDTKIITPIKTYNPNNEFDEEYFEFGLFMSRREYKTINRRLQRGRMASVKDGKYVANKAPYGYNRIRIENDKGWTLEINKEEADVVRLIFELYTVGEKQSDNTFNRLGTGFIAKRLNTMKVSPKRGKVWVVASIRDILINPVYIGMIRWNWRPQQKKMIDGQLHISRPRATDYMLCKGLHPPIISKETFDIAQDLMRHNPARPIGEKNTVKNSLSGIVVCGDCGRHMVRRPHTKYPDMLICSEPTCNNVGSQLRVVEERILQSLKEWLGEYKISWDITSPPVERISQVSIKKKALQKEQHELDTLNKQISKTYDLLEQGIYTTDVFLERSRALSLRIDEVKEHIALLDKELKTEITREDNAVNIIPKVEKLLEVYHDLPSPKAKNDMLKDVLEKVVYTKKERSKKGNLDNFNITIYPKIPKYIT

SEQ ID NO: 12383 - protein, 510 aa, synthetic construct
MSYFIYARKSRKDAELEALGIDVLERHITTLLELAKTLSLPIGAIYREVVSGDSIDARPVMTQVLSEVEACMWDGALVMDVDRLARGDTIDQGRVQRAFFYSNTRIVTPNKTYDPANEYDNEYFEFSLFMSRREYATIKRRMQRGRERSSSDGYYVGNVAPYGWERVIAPDGKHYSLAPSQTEAPVLDLMYDLCGNKQYGYQKACTYMTNMGILARSGKPFTPSTLKGIISNPANIGKVRWGHRKTVRAVKDGRVVKSRPKATDYILSDAAWAPRISADLFKRANQPKGCFSAPVRSDRPIQNLFAGLVRCSQCGRLMVRKKAQTKTPYDFLICQYAECSTVGIRIDELEEALLGWLKDYIAKYEFADTHEEDTAAIAAKELIVTNFETEHQTLLKQRESLFDFLEQGIYTKEIFIERSNALEQRIRDCMNNITAAREDLHTTIARQANRKNFVPKCKNLLSEWDSLTVPEKNSALRQLIDRIVLTKTKRNKKNQKNSEFTIDVYPKVPK

SEQ ID NO: 12384 - protein, 652 aa, synthetic construct
MKKKCYIYMRVSTAMQVDGYSLEAQKERLMKFAEFQEMEVVREYCDAGRSGKSITGRPEFQRMLQDVSEERDGVAFILVFKLSRFGRNAADVLNSLQFIQDYGVNLICVEDGIDSSKDSGKLTITVLSAVAEIERENILVQTMEGRKQKAREGKWNGGQAPFGYDLDSKNSTLVVNEEEAEIVRIIYDKFVHTDMGADAICNYLNQRGYTKKKVRGHELNYFARGLIMKILDNPVYTGKIAYGKNVTEKVKGTRDEYRRVKTDDYLLADGLHEAIVDEETWEAAREKRKRTGVKWNKTHSLEHEHILSGLLKCPVCGAGMAGTVRRRKNKKSGEYKDDFYYRCQHRRKIDEEHFCDFKPSLNQNEINAEVEWFIRGMIADERFHEYIGERLQEKVDVSNLEEERDQLKGQLQQVVGAKNKLLVMLDALDAGDKHYARKFQDMQDRLDNLYDRISDFENEIADVEKKIKAAYGRQISEKQLYQILQKFDILYAEMTDFEKKEFMQLFIDAIELYPEKMDDGRIIRQIDLAFPVYYEGFEGETIRLFNENTVETVCLLSKLHEAKHHVNVTLEMDELDVTSVESKATYEEIKEYVLEKHGLRVTNLYIAQVKRKCGIIERENYNKSKSEVAKQTQCPEDKEMAIRDALEYFGMV

SEQ ID NO: 12385 - protein, 637 aa, synthetic construct
MRKKCYIYTRVSTAAQTEGYSLEAQTERLRKYAEYKEMEVVREYCDAGRSGMSIKGRPAFMEMMDDISCEKDEISCVLVFKLSRFGRNAADILKSVQLLMDFDVDLVCVEDAIDSSTQGGRLTLAILSAVAEMEHENITVQFMAARMQKLMNGGWPGGGVPYGYVSVNKELVVVPEAADLVRMIYQKYLEPDMMLNTVVGWMNENGYKRVAKGEDKVITSDFVSSVLGNPVYYGMIVYNRRTNSEEIKRNPKEIISIRGKHEAIIPEDVWMRVQEKRKRLRRPQKKVDDPERISLLSGLVKCPVCGTGMITKKNKRKNNNHGGYYKIVYSYGCRNYRKSAGRVCNCSWTYNQEKLDGAVMEIVRKVTKTREFRQAVMDVVGDRSSLDACEEDLKRTRRELHSQEHLKYKLGMELDNLDVFAENYDSEYEAVQLKIDGVYDNIETLEEKIRKLKKRMDALKKGVRSSDNIRKILDNFDLLFERMNCEERRELCRQFVEKIDVFPEEREDGRILKKIFFRFPVYYENEEKRAGNDEPDEVVTFAVDCTEHRVTASEAKATYVEIWAYVKEKYDMNIPTLYIAQVKRKYGLDMGKAYNKPAKNKNRVPICPMEKELAILDALKHFRMLDEDVEYREESAE

SEQ ID NO: 12386 - protein, 445 aa, synthetic construct
MENNKKLRVAAYVRVSEETKETQRSLHAQEEFYRRQIHEKAEWELAGIYKDNGISGTDIKRREGLVRLISDCEAGNIDLILVKSVSRFARNTLDLLRIVQYLTRLGVSVRFEEQNIDSLTEEGELLLTLMASVAQAESESISENIKWAIHKAFQNGVGNTKRRTLGYHWVDGKLTVIPEEAEVVKRIFANFLSGGSHMKIAEELTGEGITSINGKPISVSAVGNILRNITYTGNTLLQKTFIQDPISKKKVMNTGELPQYFVQDTHQAIIDMDTFERVQEKLARNKEMRRFPYNHTGKKYPFTMKVICGCCGRHYTRQLWNTSEIGKKRPSWVCTGKKAEKYRRCASKNIPEVKLMEASAAVLGIPEFDADIFFEKVESITVRGVHELLFRLKDGTEVSQHWEHTAQKASWTPERKARHAANRTASLAKTKIKKYTDFLSNIIDV

SEQ ID NO: 12387 - protein, 523 aa, synthetic construct
MPNTESFTVNEVLVYLRKSRSDSPDMSVEEVLRKHEEMIQQYASTHFHSPIPEKNIFREVVSGETIDSRPQIKNLLKMIESEQFKAVLVVEPQRLSRGDLEDCGRLINILRYTNTTVLTLTHSFDLQEEYERKFFEMEITRGNDYLEYTKRILKRGREASVAKGNYIGSVDPYGYKKTVIKKDGITCHTLEIIPEEADTVKLIHELYAYTPEGIGFTNIAHKLDAMHIKPKKAAHWTPAIISSILCNPLYLGMVRWNNRKVVKYINEGQLAKARPQNSEAKYYKGLHEPIITHELYDACMARRGTNPSLRRNKELCNPFAGLLYCGTCGHAMSLKIYKNHNSVSQMMLCNHQAYCHTKSVLYSAFLRRFISSMEDTLNDFELAQKSDDGRTQAISKTIVINLENKLKKLNEKDARQKDAYEDGIYSKEEFLKRNVKTQQDIASTIIALEDARAKKADIIDYEEKIRRFKDCLHALNDPELSAAEKNRFLKSCVDKILYYNNMESKAGIGRYIENVFSLEIQYK

SEQ ID NO: 12388 - protein, 501 aa, synthetic construct
MEIQIREGSREQKRKLKVCAYCRVSTDADEQEYSLENQVRHYETVIKANPDYEYAGVYSDFAISGFKEKRPGLQKMLADAGKGKIDLILTKSVSRFARNTSIVLEATRKLKELNVGVFFELQNINTLSGEGELMLTILAAFAQAESESGSVGAKMVYQRKYEAGIPVQYLERSFGYTKDERGIFVADEAEAVWVRKIYEMAADGYTPASIKRYLNENGVKTVGGAEWIDSTVFRLIENEIYKGDYIMHKHFVNEERKLVRNRGEVDAWYIEDDHEAIVSPELWQRAQDALEAKRDYLAEGSVIEEFTEENYPYMNKVYCAKCGYPLYKRIYSKGNRLNWGCSGMKRYGKSFCDGINIPDGVLRNAWHFEENTYIDEKASDKGVKEFSYLKERSWKRRHKKKQPPSISENTEVEYPYREKIYCALCGSRLVRHVDTKSHKVTWVCNGRKRKGKDFCDGTRVPDTILKGWGEIKKDIYIQRKDDKNGKKRYSYTSKKPSGIGA

SEQ ID NO: 12389 - protein, 463 aa, synthetic construct
MARSVTVIPARNRQASGHRAVPQKKIRVAAYCRVSTDQEDQLHSFEAQVDYYTKYINDHENYEMAGIYADEGISGTNTKKREQFKRMIADCEKGKIELVITKSISRFARNTQDCLMYSRKLKNLGIGIIFEKENINTLDSTGELLFTILSSLAQDESRNISENCKWGIRTKFKNGEMHINTFKFLGYDKDENGKLIINREQAKTVRRIYRDFLWGLNPAQIAKELEEEQVPGCLGQTKWYASTVIGILKQEKHMGDALLQKTYTADFLTKRQVKNNGEVAQVYVKDSHKGIIDKETWNAVQEEFDRREKFMQRHGTDRYSYGSECYPFCEKIFCGECGSLFTRHSWKSRGIVQWQCKNHRKDGKVACTNAYVDNANLENGFVKAFNRLVSEREKHMERWNAMKADGTPLEKIRAVQMMEATENGQLQKYVPEAAQLVLEEITIFGAKKYEFAFLEGSRVKVSV

SEQ ID NO: 12390 - protein, 547 aa, synthetic construct
MAKKKATANTSYSAGTRAVIYARYSPGPNQREESIEGQIRECKEIAAKNGLMVIHEYIDKRLSGTRDDRPDFQRMLRDADRGLFDVLLVWKNDRFSRNRYDSAISKRRLKRAGVKIMYAKEHIPDGPEGIILESLLEGLAEYYSANLAQNIRRGQLENALEGKFIGGTIPLGYKLDTEKRYVIDPETAPLVREIFKRYVDGEAIIHICDDLNARGYQTARKKAFNRSSLHRILANEKYIGVYRFEDIEHKDAVPRLISDELFQAASLRAIKNKKSRRTIQAGQVDYLLTGKLFCGHCGETMGGSWGTSKSGTRHYYYVCNGKKTKKSACHKKAERKEDLEKLVVDVVIKNVLCNQAVVDFIIDRCMQIQEQDTDTSAADGLRRELADAEKRLKNLMTAIESGIITATTKARLVELEERCATLKQGIAEAEIRPPKFSREQLEFIFEKYQNRDMDDLSFIRDVIDTFVHAVYVYDNKLLITFNYSGDNTVEIPLSEIEKSVDSAGSQVFDFYGINSTIPKKLITGIIHCNQLFYFPILIILRPHRASP

SEQ ID NO: 12391 - protein, 406 aa, synthetic construct
MRRERLYLKIIKLPLLKEEFKKRKVAAYTRVSVSSDSLLHSLANQVSHYTEMIQKNPEWEFVQVYVDEGVTGTSTESREQFLKMMDDARAGRFDLLLTKSVSRFARNTVDLLESCRELKSLNVEVRFEKDRISTFNSDGELVLSLLASYAQAESESISQNVKWGKTKQMQDGVYHHFTRCYGYDWDGDIYEIVEEEAEVVRFIYKAYLDGMSPQKISELITAKTVTGKNFTRGTVKDILKNRIYIGDRVLQQFYSPRVRKCNRNYGEVPKYILPEVHEPIIAREMFDEVQNVMQQKAKDTPKKTFTCFSGRLKCGHCERALCRRTLHGKKIWKCQGNEISKTCQARYITEEKLKEYTFSIFEDENEFKMRVDHIKVYDDYLEYIFKDDTMKTIERKEPKRRCRQGK

SEQ ID NO: 12392 - protein, 512 aa, synthetic construct
MERAVIYARYSSDHQREESIDAQVRACREYCQRKGYLVTKIYADEAKSGKSIAKREQYKKMLSDSQKNLFDVVVFHKIDRNSRNELDYYLTKNQLISSGIKYEYAAQNIDTSPAGQMVEGILVAVAANYSRNLAEETKKGLKENALKALFNGGRPPLGFEINQENKYVINDYEAGAIRIIFDLYLKGKGYHYIISQLNSLGYKTREGRKFGKNSLYDILRNPKYCGTYTFNKVNKDPSGKRNSHKISENTIIVEDAIPAIISKEDFRKVQEKMNQNRYRSAAYKSKETYLLTGKVFCGICGAAMNGHRASSNGKKYVYYTCSGRDRLGTSACQNKVVPRDDLEELVLLTIEQELLSENSLKKLKDTIEMEYQAVANEYADEASSLSEQKAIAERKLNNLYTVIEQGTADEYDLERLAAVKQELSQIKEKLAKCAGANSIATINPAHIEKVLKVCRKMLFKNITNESLRMLFDDLVNKITIDAKKITLQLKLECSGTYGAEGRTRTGTWGNHA

SEQ ID NO: 12393 - protein, 519 aa, synthetic construct
MKKVTKIAETASSKVKLKKIRVAAYCRVSTDSDAQLESLEAQKTHYENYITSRDDWELAGLYYDEGITGTKKDKRPELLRLIDDCKAGKVDFVITKSISRFSRNTTDCLELVRKLLALHIPIYFEKENINTGSMESELFLAILSSMAEGESVSISENSKWSIQKRFESGTYKVSYPPYGYDWDGEQMVINPEQAAVVKEIFAALLSGKGTHAIADDLNRRGIPTKRNGRWTATTIRGMLSNEKYVGDCLFQKTYSDSRFVRHNNHGEQTQYMVKDHHEAIISREDFEAAHAFIHQRATEKGVVKGSDKYQNRYTFSGKIICGECGDTFKRRIHSCTGYKYTAWCCSTHIKDKDKCHMLFVKDDDLKQAFVTMMNKLVYAHRIILKPYVDALKNTSSDDSLRRIQEIQTLLAQNTEKRETLTKLMTQGIIDPILFNQETNELLSQADSFRDEINALKNAVSGDVTKVTAATALLHFTEKGGILHEFDDDLFNEYVNCIIVRSRNEVRFELKCGLTLRERM

SEQ ID NO: 12394 - protein, 524 aa, synthetic construct
MTVDKEKYRQKKVAAYCRVSTDSEEQLVSYANQKKVYTEMIASRKDWCFAGLFADEGKSGTRADKRPEFNKMINDCLAGKIDYIITKSVSRFARNTVDCLDYVRMLKSKGIGVYFEEQQIDTLKTDSELYLVIYAGFAQSESESISKNITWSVRKKFEEGTPVFIYKRFLGYKKGADGEPEIVPSEAAIVERIFNLYLAGETVDNISKMMQAENYDIPGKTISFSKGMIMNMLSNERYCGDAILQKSVTIDCIEKKRKKNTGEAPMYYVQNNHPAIIDRVTFNKVQEELARRKTKTPGSAKSSITSTGKYSRYALTDILICGNCGTRYRRVTWSRNGVKRIVWRCISRLDYGKKYCSDSPTIMEDKLQEAIVRAVNKFNEQDNATYKALMRATISEALGLNGDPEEVDMLERKIEALNNKMLALVNESVSSGDGIEAHESEFMTLSQEAELLKQRIAAIQESTAKDNGEQNRLEQIQAIIAERESKCMEYDDSIVRQMVECIKVYPGGKLEIIFGGGYLVEESV

SEQ ID NO: 12395 - protein, 505 aa, synthetic construct
MAQRCVIYARYSSDRQREESIEGQIRVCEDFASRNDLEVIQTYVDRALTARTDRRPAFQQMISDCKKRQFEYILVYKLNRFSRNRYDSAVYKHKIAQYGVKVLSAMERITDDPSGILLESLIEGIAEYYSAELAENVHRGMTENVLEGKANGRAPLGYKKGPDGKLVVDERNAKAVRFIFQSILEGRTLKKIAGDLNAMGYKNSFGRPFVSSNFGNLLRNKKYIGIYHWGNEDVEGVVPPIIERSVFDKVQELIESRKHKSTRKRVDSYLLTGRMTCGLCGAAYIGKSGTSHTGTPYAYYCCSNRVHRKGCKGKNYRQDKLEEWLAMETLKALNHPETIRQLAKQVMKIQTAAVAEPDPVVDNLEAELKDYKKRVANSVKAIEAGVISETISQNITNYENKIKTLEQELSRAKLKRQPFTLTQDHIEFFLSSLLAGDPADAKYRSQLIDTLIAGAVIYPDKIEVYYKYQKELPSLRNPLTISEEGSSNGKKLVGPQGFEPWTNRL

SEQ ID NO: 12396 - protein, 516 aa, synthetic construct
MANVTKLTNPQPKVQATLQVAAYCRVSTNSDEQEDSLANQQAHFKSYIRKQPNWQLHQIYYDNGVSGTKAQNRAGLQTLLKDCRNGQIDLVLTKSISRFSRNTTDCLRIIRQLKQLDIPVIFEKENINTGSMDSELILSVLGSLAQDESQSIAYNVRLGYQQRASNGVFHYSLPPYGYQKDDKRDLIINPMERKVVLQIFNWTIEGKSPGQIAKLLNRQAIPTKRNGNWHDSTIRGILQNTVYLGTTEFQKTFTDNEYRRHPNQGEQGKIIIEEHHPAILDQATFTQVQKIIKLKQKFHPQTKNPQTHTFSRKIVCGNCQKLFKRQNRSGKICWGCQTHIKHAEDCPVKSIQEDTLQLAFCTMVNKLIFSRKFLLEPLVEQLRANQNQEQATKLSQIETELEETKNKQENLQQLWKQELIEKDFFTKQDTELEQKIANLQSEIERIKQLLGGQDSKLPLAHELLKLCQRSDYLTAFDDQLFEQIVESITIDPDHNIIFHLKCGLNLIEGSKHYVKA

SEQ ID NO: 12397 - protein, 528 aa, synthetic construct
MAKVRIIPAQVKQGNRNRQVEEAETKLKVAAYCRVSTLYEDQASSYETQVAHYKEFINKNPKWELAGIYADDGISGTDTKKRNQFNQMIDDAKQGKIDLIVTKSISRFARNTIDCLQYIRELKELHVGVFFEKENISTMDAKGEVLITIMASLAQQESESISRNIKIGLQYRYQRGQVIVNTARFLGYDKDDDGNLVINPEQAKVVKRIFYECLTGKSAIEIARELTKEGIKNGIGRTQWHSSGIIKILRNEKYIGDALLQKTYTVDFLTKKRVKNDGQVPQYYVENNHPAIISRALFYQVQKLLDMRRDGFTTEGGHHHGYTNAYCFSSIVYCGRCKDIYTRCVWYRPRIGEVEKVNVWRCYSRLHWSHKGKRCMGRTITEADLEEASLKAMNELIQQHQLADKQIAANILKVTKGTTGPSLDELDQQLEDQQLLLLSMSTHNKNVAQLTEQVQALRKQREQLIQQEIDHDIKRSNLKNIQSFFQTYQGGLIKFDEKLVRLLIEKITIFKSKIEFTFKDGEVITVKM

SEQ ID NO: 12398 - protein, 528 aa, synthetic construct
MAYCIYLRKSRADRELELQGFGETLKRHRDTLIELAKKKNLPIGEIYEEVVSGDSIAARPQMQRLLNDVSDGKWEGVLVMEIERLARGDTSDQGIVTKTFTYSNTLIITPMKTFNPTDEFDQEYFEFGLYMSRREYKTIKRRLHAGMEASCKEGNYIHHTPPFGYSIIKNKKSKGYRLEPKPGEAEIVKLIFQWYTKGILKEDGSYELLGTARIADKLNSEYSIKPLGGVWTIPTISTMLRNEHYLGYIVFGKKKRKKVVENGIIVDKWTRNESYGLYKGKHPALVSQDTFNLAQERLSRNPRRPSKTITNPLAGVIKCGMCGRSMYRRPYQKRGQSASLICSEKTCHNVSSAFYLVEDALLTAIKEWIDGYEIKEEANKYDTSVLESKTKLLEEQQKQLIAYKNQLTKVFEAYENGIYDSDTFLNRQKTVSESISSTEEAIVKLNKEIANEREIISHQEEIIPKAKKILEIYKTSDDVQLKNDLMKSILDKVVYTKTANGHFKDQRQDDFKLELFPKLPKNKGNSSE

SEQ ID NO: 12399 - protein, 578 aa, synthetic construct
MGYVTKKAAQRFEEKKAAIYVRVSTQYQVDRASLPVQREELINYAKYALGISDYVIFEDAGYSAKNTDRPDYQQMMARMRTGEFSHLLVWKIDRISRNLLDFSVMYAELKELGVVFVSKNEQFDTSSAMGEAMLKIILIFAELERKTTSERVSAVFVSRANDGIWNGGKVPYGYSYDKESKTFSIAEDEAKIVRLIYSLYESEKSIVRVARIMNERGLKSRAGSDWSPTTVHTILSSPFYSGTYRYNYRDESNTKRFREKGKDEWVLVENHHPAIVSPERQAAVGVILESKRYNKNATYQRKNVHVFAGLLTCGCCGSTMAATTDKVRADGWRPSMYICSRRRKSEDCTNKYVSDVTLGPFVLNFFANLIKASNSFGRTTSIETLEKKLLRGEALARVDHIERPGLEELYNHLRSGFDEKRFESPTIAATESSADLSERDLLLSEKRRLERALNRLKTIYLYGDDEMASKDFNIERERITKVLSEVDSRINELDIANAFDLSLSDEAFMQKASQFILTQQLLDKRYVNYERFIRKIDPKIVKDFLNETVSNFCIKDGLTTSILLKNGIELRFSYKTAE

SEQ ID NO: 12400 - protein, 521 aa, synthetic construct
MAKVTKLEGNNTHKTTKKLRVAAYCRVSSNSEAQEESLKAQKEHYEAYIFSRKDWEFAGLYYDKGITGTKKEGRVQLLQLLEDCEAGKIDFIITKSISRFSRNTTDCLELVRRLLELSIPVYFEKENINTGTMESELFLAILSSLAQDESTSISENNLWAVKNRFKNGTYKIGYPPYGYDWTGEAIVINPAQAPVVRRIFAEALSGKGTHSIAKVLNAEQIPNKKNGLWRATSILAMLKNNFYTGTVTFQKTYKNALGKRQLNYGQKDKYVAEEHHEAIISKEAFTAVAKVLENNLKLKNVNKNPELHTRRYAFSGKLYCASCGKKLKRVIHASTTHPYIAWSCPTHIEDTKACSLLYLRDDVLKQAFVTLINKLIYGREVLLKPLLEELKTDPTLKVQKAIAAYQVKLLQNTEQRDTLTKLMTDGFIGQQLFIKEQNELLLKANTYRKEIELLSNSKTTENTRLQGVKALLSFTETNSMQESFSDETFTTFVEKVTILSRTEAIFHLKCGLNLKERLKTV

SEQ ID NO: 12401 - protein, 545 aa, synthetic construct
MLQVAAYCRVSTDKEDQANSFEAQQRYFREYIQRQPDWELQGIYADEGFSGTSTNKRVEFNKMLHAAELGQIDLIVTKEVSRFTRNTVDALQITRELRRRGVGVLFLNDSLDTRTNDGELRLTIMSSFAQDESRRTSERSKWGQMRSMEKGVVFGGSLLGYDVIGGKMTVNPEGAEVVRLIFHKYLQERKGCSTIARELREAGILSSKGNCLWSSATVTKILKNEKYCGDLIQKKTYTPDYLTHEKKYNHGKEPLVELKDHHESIIDRETWQAVQRELSRRNRATGCGGHGNRYPLSGKIRCGECGKSFSHRTKKRQDGSSYYRWCCFTATNEGLRRTDGAGNVIGCSVGRQIRDDIAMDLLRRSVSAVTLDKKSIISSLTRVVESVLASGEDSGEQELRRLELEFEKLQARSDAILDRFLDESISKEDYQRVKARCENEMNWVQEKIAAIKQRQTLNTDTQTLKPDIRTAITGIVSGRTADDDFYGHLLQQMTVYRDGRVEVALNLLPAKWVYVLDGLEKYRAKIGVHDASSVPMSVSRPLSSG

SEQ ID NO: 12402 - protein, 526 aa, synthetic construct
MPYCIYLRKSRADAEAELAGEGEPLARHEKTLLALAKKLKLPITKIYKEILSGETIAGRPVMQQLLQDVEAGIWQGVLVMEVERLGRGNTLDQGIILNAFKYSSTKIITPMKSYDPNDEFDEEYFEFSQFMSRREYKTILRRMQRGREASVKEGKFAGSIAPFGYRRVKLPQEKGFTLEIEDAEAAAVRLAYELYAYGDPQPDGTFADIGRATIAKRLDQMGIRNRKGGTWATASVTRMLQNPVYIGKVHWNRRPEKKHTENGKIKKARPLAENYLLVDGLHEPIIPEELWNLAQAKMKQHYRPTGVNGIMQNPLAGLVHCSYCGNAMQRRPYLKTGQPASLICTTHFCPQISSPLYMVEGKILEALSLWMKQHEPTWEEESSADVFSTKIMALEHAIADMEQELQGLQSQFEKIFEFLETGIYTPEVFTARNKTLSEKMAEIRSAIEETQAELSKLKAARKNQVSMIPKIKNILDTYETLTPAEKNKLLKEVLDHVEYHKKIKGKKNVPADNFEIILFPKISPEN

SEQ ID NO: 12403 - protein, 494 aa, synthetic construct
MRVVGYARVSTREQADHGYSIGEQNSRLRAYCQAKDWTLLRVIEDPGFSGAKMQRPGLQQVLEMVRRRECDAVLVWKLDRLSRSQKDTLYLLEDVFLANGCGFVSMLENFDTSTAFGRAMVGILSVFAQLEREQFKERSAIGRVGRAKAGLFHGGGYAPIGYDYYTKEDGGQGLVVNEYEAMQVREVYRLYLAGWAVHKIQVYMHERYTTKNGCWASDTTVRSVLSSPIYLGRITWAGKTYEGQHEALVSQNDFDQVAARRESLKWQPAEPRAACDLIKNSPFRSTHILGGITWCARCGARYFASGNYSGRGENRKYWPYYTCYSVAKSSKKMIKDPNCKNKRWAVGKLDAIILAEISRLEFDPAALAKAAGPVDVSDVEEKRRVLEARVAEVRPQMERLLDLCQTGGLPVASVSGRLAALQKELDALNGELSGLAVPETVDRLAVAQEMLAGASAVIENGTPEQKRALVHSLIGRIDIDGEDITIHWLFAPEN

SEQ ID NO: 12404 - protein, 462 aa, synthetic construct
MSFFTPNPQLFGLRVVKYIRCSHDDQVLHGDTLEAQDLILEDFVKVNRMILVDTFIDEALTARKKFNKRKEFVRLLDGVKAHSFDLIIFTKLDRWFRNIGDYHKIQEILEANGVQWKAVTENYDTTTTNGRLHINIRLSVAQDECDRDSDRIKDVFAYKLKNKTYVSGSLPRGLKLDAEKHVIIDPEWSCFALDMFDRFEATCSKRDTQLFLQDKYNIRVCYDTVARYLKNPLFKGQYRDDPDFCPATISPERFERIQKLAIRNVRIRHTQQFYIFSGLLICSSCNHIMTGTVTYRRMADGTEKAYKSYRCNFKAQSKLCDRGKTYREEYVEEYMLNHIRPALSDYVAKYEVTAASAVQKNPVEEMSKIERKIKKLYDLFMDDLIDKDAYRSEYDKFKKQIEELQKCPAAPVRNLDSVRKLLNDDWEAVYNTFSNQEKNVFWKSFVESVLVHEDGSMDIHFL

SEQ ID NO: 12405 - protein, 523 aa, synthetic construct
MRFFSYGRKSVFSDKSDSIDNQFRMNREYCESKFSGQVDSWQQFSDEDFTGANTSRPDLQRMLSFIKGGFCDVLVVYQLDRLSRDVRDFANIYALLEEHGVMFISIKENIDTTTPIGRAMMYVTVVFAQMERETIAARVTDNMLGLAKKGYWTGGNPPVGYVRKHIVVNGKKHCSIEVDPDGARYVTQIFDTFLAYNCSLQGMETRFKNQGIRTQSGKFFSTTQLHKMLTMPYCVEATPEVYDFYAAKGCIMDPGSPREMWDGSVGVIIYGRSTEKNKKHQAQPPEKWTVCLGKHKPFMPAEKWLAVQSRFTQNKCIKDAKWPVPLLKGVLRCKCGNLMQVSRKKKVDGTCSSWYYCRKRMRQGVDACDMGQIKCDLLDEEVLELFRGITADPALIQKFVKAETPADVPDLKAAQARVSACERKIGRLAASLALAEDSAASKYIIAEMERLDVELGALKREASLAEMESHRAAASAKDAKATVAEIAKLIHGLDGFDDKEKNAIARVVIQECTWDGERLFITL

SEQ ID NO: 12406 - protein, 480 aa, synthetic construct
MTMHKVAIYVRVSTTSQVDEGYSIDEQKAKLTSYCEIKDWNVYDVYTDGGFSGSNTERPALEQLVRDAKRKLFDTVLVYKLDRLSRSQKDTLYLIEDVFLENDIEFVSLLENFDTSTPFGKAMIGLLSVFAQLEREQIKERMQLGKLGRAKSGKSMMWSKTSYGYDYIKETGTLSVNQYQALIVRKMFKWYLSGMSITKLRDALNEQYGQDKEWSYRTVRAILSNPVYCGYNQFKGQIFPGTHEPIISEEDFNKTQEEIKTRQRTAAQRFNPRPFQAKYMLSGIAQCGYCSAPLAIKLGMKRKDGTRLVKYECKQRHPRKTKGVTVYNNNEKCDSGFYFKDDIEHFVLTEISKLQTDSDYIDKLFSNTNQETIDRASYQKQIDKLTAKISRLNDLYIDDRISLEELQKRSSDFMAERTALEKELDADSSVKAVERKKDIKRVLDTKDIFTLDYEHQKAMARALISKVRVTSETIVILWKL

SEQ ID NO: 12407 - protein, 558 aa, synthetic construct
MKRVIGYIRVSTDNQDLERQRVLIRKYCENKGYSLLRIEEDYAISGTVSNRNGLNSILNITNSVADMVVVSELSRLSRQDDIFETLTQIHTIIRNVDLVILDEPDKVYEAGKTIILSDFLMLAIKAYGAADERKKIVSRMTTGKDSKVQAFPLMLTDSNIPTGFKAVPNPNYIKGATPKMLLVEDEERMQLVRDIFNYVANGLSLGKTAEKLNMLGYRTARNKPFYEQSIRTIINDSIYNGVRYWKGMKLELPVKFISDEIWNLAHKKVQENKNYSGEAQKHYNPLKGIIKCPCGQTSMYGRTSSCITYRCLDRIKMGIKSPCTNVGIKAETLIYAVWKDVRLRTLDETYQAKSNEKIAEIEAENIKLTQSIKEKDSEIAKLQSDLKTVIDNVMASTNITIVKALNGKADSIDSQIKSIEAEKTAIDEEIASNNRRIADEIKSQSRKELDSLSLEGKGEMFRELLSKVVYYSVSLNSGFIVITYKNDLETIIAYHNRNKPFLWALPITFRFNKVKRTVIVPTLPEQPKMTSFVLERIKEKEYTFKQLQESFNLEEYKI

SEQ ID NO: 12408 - protein, 508 aa, synthetic construct
MKKAIAYMRFSSPGQMSGDSLNRQRRLIAEWLKVNSDYYLDTITYEDLGLSAFKGKHAQSGAFSEFLDAIEHGYILPGTTLLVESLDRLSREKVGEAIERLKLILNHGIDVITLCDNTVYNIDSLNEPYSLIKAILIAQRANEESEIKSSRVKLSWKKKRQDALESGTIMTASCPRWLSLDDKRTAFVPDPDRVKTIELIFKLRMERRSLNAIAKYLNDHAVKNFSGKESAWGPSVIEKLLANKALIGICVPSYRARGKGISEIAGYYPRVISDDLFYAVQEIRLAPFGISNSSKNPMLINLLRTVMKCEACGNTMIVHAVSGSLHGYYVCPMRRLHRCDRPSIKRDLVDYNIINELLFNCSKIQPVENKKDANETLELKIIELQMKINNLIAALSVAPEVTAIAEKIRVLDKELRRASVSLKTLKSKAVSSLGDFHAIDLTSKNGRELCRTLAYKTFEKIIINTDNKTCDIYFMNGIVFKHYPLMKTISAQQAISTLKYMVDGEVYF

SEQ ID NO: 12409 - protein, 429 aa, synthetic construct
MKKVTKIDKIQPAKNAENKLRVAAYCRVSTATDAQLESLEAQKSHYENYINSRDDWCFAGVYYDEGITGTKASKRPELMRLLADCKAKKIDFVITKSISRFSRNTMDCLEIVRTLLNLNIPVYFEKENINTGSMESELFLSVLSTMAEGESASISSNNKWSIKKRFENGTYRLSSAPYGYKLESGGLQVVPEQADIVKRIFRELLSGKGMYSIAKKLNAEQVPTQKGGRWTSTSVHNILTNEKYTGDCIFQKTYADSNFNRHINNGELNRYLIQNHHEAIISHEDFKAAAALIEQRAAEKGIESGSDKYQKRYAFSEKLICGECGNTFRRRIHKGKYNSYVAWVCNTHLSDTNRCSMLFVRDDALKLAFVTMLNKLIFSYRLLLKPYLAAMQSNTADEALLRIQYLEKQLDQNAEQRSTLHKLMAQGLY

SEQ ID NO: 12410 - protein, 576 aa, synthetic construct
MKITAPARSARAVSLEAFVDNLNLANVVIYARYSSAGQNDQSIDGQLAKCREYAQQRGYRVVGEYCDRALSGRYAETRPEFQRLIADSAKRAFDFVLVWKLDRFSRDRYDSAIYKKKLRTNGVRVLSVTEGVGDSSESVLLEAILEAMAEEYSRQLAQNVRRGMRQNAEKGLSLGGLAPLGYRVVNKQYEINEDEARIVRFIHEQYADGAGQKQIVADCARLGYRNQRGNPLTLTSVKRILANERYAGRYDYLGEIVIEDAFPAIVSKDLKKRVRDRLKANAKAPGHAKAKVEYLLHGKLFCGECGAPMIGECGRGRHGATYYYYTCAARKKQHTCKKRNERKDELEASIVDYIGSCVLTDSWIDGAAERVVAEYQKSYDASGIKPLEKQIRDADKEIDQLVDALISATAEAARRRINERIETAEARKQALEADLASLRIASRVQIRKEDIVVWLNQFRTGDRSDLEYRKKVIDLFVNAIYLYDDSFKLFLNVADSSQVTYADALALAPPSVSDFGVSGVPEKQLISFWNQLLFFFVLYYRRSTKRLPLYARGAVGVSVYLLVQTIRLDGKNRISS

SEQ ID NO: 12411 - protein, 490 aa, synthetic construct
MTDKNLLVITPHRKEPGKQRIAAYCRVSSRSDEQLNSLTNQINFYRSLFENDDTVVFVGIYAEEGLSGTQAESRPQFMKMIEDCRSGLIDCIRTKSVSWFGRNTVDTLIYTRELRSLGIDVFFEKENIHSTESSGELMLTLMAAFAESESETMSKNIKWGKRRRYEQGITGSITLNGMYGFRQNKGIVTIVENEAELVRRIYKDFIDGYSYGEIADRLIAEGVPTRMPGASWAKTTVQHIIRNEKYCGDCLFQKAFIANPITHQQVRNNGELPKYLVEDCLPAIVDKETWKLAKAVAARHTPHKQKSNERYPFTGKLFCGVCGKPYCYYHYTTTNKQPLAAYRCMSRKTQSAVEVPGQTYTPPHKATFNLNASPELIAYRERYCKPPKERPMLCTDVRISIGLPQKAFCRAWNLIVAKKLRYQATLRSTVDNAEDILVQYRAEEMCLLIDEIGKINEFSYPLMLKTLDRVVVNANGKLTFIFKSGIKITV

SEQ ID NO: 12412 - protein, 514 aa, synthetic construct
MSTDSYEQFTSYEAQVDYYTQYIKRNPEWEFVKVYTDEGISGTNTKHRIGFNEMIADAMSGKIDFIVTKSVSRFARNTVDSLVTIRKLKEKGVEVYFEKENIYTFDGKGELLLTIMSSLAQEEARSISENTSWGRRKSFADGKVSLGYSNFLGYDKGLDGELVINEEQAKIVRRIYAEFLAGKTPGGIAKELTADSIETPGHKKVWQASTVLNILKNEKYYGAAILQKEITVSYLTKEKRPNTGELPMYYIEKDHEPIVSPETYQMMQEEMRRRKEAGSNMQCVSIFSSRIICGDCGGYYGRKIWHSSTKYTAWHWHCNAKFQKRKYCETPTLKEESLEETFVEVFNRLIADKDEIMENYRLCIDAVTDDSEYRRQLEDLNNGCGEVQMLIRSLLMTYSRQDTADDIHEKLQEYEERLDTMARLKQELDLKIAACATKRVQITGFLNELMKHDAPLAKFDPLVWQAVINYATVNRNCTITFTFRDGTEKTVPIKNGVRPYTKCNKPQEVDGNDG

SEQ ID NO: 12413 - protein, 600 aa, synthetic construct
MIDNCVRAVFYARVSTQEEEQLKALPKQVEECKDIIASKGWRLIDGYVDEGKSGTKKDGRKAYIKLLEDMQEDKFDIVVVKSQDRLQRNTFDWYKFTDLLNKNNKRLYLYMDNKFYEPSEDALITGIKAILAEEYSRDLSKKLNNSNKRRIEKARAGEEVSAMGNGQTYGYQIVNGKWVVDESQREVVRRMYELYTELHSVRKVRDALNEQGYRNQRGNLFTDENISRIVKNVMHKGWVILNRHHRDFDSKEIIEKSEEEWVIVKNDHEPIVSEELWDAVNNEIQSHRNRGNSGSRGKRGGTDPLSGKMICNCCGRVLWKHASQGSYKSKEGRKYTYKRYTQWYCSGKMGRGELACTDPATISGVKLQKYLVEMSDMFLDYSTVEYSKNLLKKRTISWLEDLRDKLTTPNDNGKIEQDLKALEGKKGKLIDLYTDELISKEEFKSRSVDLDAEIEKKRALLVPVEENPDIKAIEDTIANIDAEIEVLFEDEAMVEEKKVQFIQEHIKKIYVSKNSDVFIVLDNVAGAFLFIDKEDTRIEVVPVAEYNPEELSEEGITENDFVPFDRESMPQHHGPKHFHPSGSQTAPRCCFRDRFSCDQP

SEQ ID NO: 12414 - protein, 519 aa, synthetic construct
MKKVTKIAETASSKVKLKKIRVAAYCRVSTDSDAQLESLEAQKTHYENYITSRDDWEFAGLYYDEGITGTKKDKRPELLRLIDDCKAGKVDFVITKSISRFSRNTTDCLELVRKLLALHIPIYFEKENINTGSMESELFLAILSSMAEGESVSISENNKWSIQKRFESGTYKVSYPPYGYDWDGEQMIINPEQAAVVKEIFAALLSGKGTHAIADDLNRRGIPTKRNGRWTATTIRGMLSNEKYVGDCLFQKTYSDSRFVRHNNHGEQTQYMVKDHHEAIISREDFEAAHAFIHQRATEKGVVKGSDKYQNRYTFSGKIICGECGDTFKRRIHSCTGYKYTAWCCSTHIKDKDKCHMLFVKDDDLKQAFVTMMNKLVYAHRIILRPYVDALKNTSSDDSLRRIQEIQTLLAQNTEKRETLTKLMTQGIIDPILFNKETNELLSQADSFLDEINVLKNAVSGDVTKVTAATALLHFTEKGGLLQEFDDDLFNEYVNRIIVRSRNEVRFELKCGLTLRERM

SEQ ID NO: 12415 - protein, 522 aa, synthetic construct
MGNVMVIPARRQVGNTVKQSAQKKLRVAAYCRVSTDSEEQETSYEAQVTHYTEYIQKNPEWELAGIFADDGISGTNTKKRDEFNRMIDECMAGNIDMVITKSISRFARNTLDCLQYIRQLKDKNIPVYFEKEAINTLDAKGEVLITIMASLAQQESQSMSQNIKLGLQYRYQQGKVQVNHNRFLGYTKDNDGHLIIDPEQAEIVKRIYREYLEGSSMDKIADGLMADGILTGAGKTKWHTSTINKILRNEKYMGDALLQKTYTTDFLTKKRIKNNGTVPQYYVEGDHEAIIPKELFMQVQAELVRRRVVHVSPTGKKRSFSCNHCFAQMVFCGDCGELYRRVHWNNHGCKSIVWRCISRLEPTSAEKNCTNRTVNELLLQEITVKAFHQILTERDFFLKTLQQNIAKAVVNADTLSPDGIQTRLEELQKELIKKANNKQGYDAIADEIFRLRDQKEQSELDSHHREEAMNRIKELQDFIAGQETDITEFDEALVKKLIEKITVFADHFTVEFKSGITIDIEA

SEQ ID NO: 12416 - protein, 513 aa, synthetic construct
MATKKKQTFTNKAADNLAVIYARFSPGPRQTEQSIEGQVRDCKAYAEQMGLKIVGIYADHHISGSDFENRDEFNRLIADAEKGQFHYIIVWKIDRFGRDREEIALNKVRVKKYGVKLLYAKENIPEGPEGIILEGLLESLAEYYVADLRQKVKRGQRESAIKGFAPGGGRAYGYDIVDKCFVVNEVEAAVVLKIFQLYDTGCTAPQIVASFDKLGIKRRDGKSFTYSGIYHILRNEKYIGICMYDDISIPVPRIVPQELWDSVHAKFHTRVGQAASYKADEKYLLSLKCRCGLCGDMLVGESGYGKHGVRYSYYKCATRKRRGSKCSLRTFRKDYLESIVMEHTIKDVLQDDVIEYIADRVMEIQAKNTVNYTLQGLKKQYAEADKARGNIMKAIEMGIITDSTKSRLVELEAQVEELKLLIAREEIKKPALTREHVLFWLQSFRDGDLSDPRFQEKLCDVFINQVIAYDEKVVIIYNFSDANNNHSINFTSVLRGSDEHPIMRHPGFEPGTT

SEQ ID NO: 12417 - protein, 645 aa, synthetic construct
MALSSHYTEEQICKMEIRDFLAEAHFDDILHSVRILQVARYARESTKHEEQVIALENQVLRLDTMIENNPKFILNERHKFTEYGISGRQVEDRIAFNMMMESASRHEFNVLIVQDVCRFARNIEQLFANIRILKDYGVGVLILTGNYWTYNMTETDILRLAIDAGMAQGESMRTAKRVSDGVESYRARGQLVISGLFGYILEKNIDKRLNTLTPHPVESLTVKRIFELYTHPDPKKRMGSGKIADYLNKNNYKTPTGELNWSACKVVRVLKNEKYMGYNLYGKFKVVDTIKKKRVATKKKPIREDVYDKDGNLVEKCNLIEGNWTPLVSEEVWWLANDIRMKRAKEYIYSDKGNVVTGLREPKDIIAQKSFCQCGYTRSVQYVHVATKEKEAQFRYTCRCQINSVASKDTCVCHVPAVSEVKLWLMSLKVFEYIFGDSKDEILYTINLLKEAQKFKQKSRVGKSLQELEEQLKKVERQIENLYLDKLSGEIDTNMCKRLTTRLNEEKAEIEKGICDRQLEEARDSKDMFDIEAIERKLNTYVDFTGRKVSDELIDMFVERIIYRDNDEFVWEMNLTGVRKNTIDYRIKEYSEEYAQALQNDDNFNIIHTFIISVEECQQFMKSPKVNRRFVKKFWRPITVKIAIK

SEQ ID NO: 12418 - protein, 463 aa, synthetic construct
MAKTQTALQRVALYIRVSSDEQAERGDSIRDQKERGTKYIDDHQNMILQDTYIDDGVSGQKLDRDDFTRLIGNVKAGLVDLIIFTKLDRWFRSLRHYLNTQVILDKYNVAWTAIDQPYFDTSTPYGRAFVAQSMTWAELEAQNGGLRVTDVFRSKVEHGEVITGKVPRGYMIQNKHLVFSDEAPAMLDSIQYFHREQGLAKTVNYMRETHGINMSIQNLKNSILRNEKYTGRYRGNENYCPRLISDEMYQDIQRVLDNNSTIRSSQKYPYIFSGILICDECSHKMSGCHINVVSRRTSGKVYRYKYPAYECLQYRAYKKCSNGGEIREIRIEEYLLEHVREELSGYLVDFETGEAKRIDNRAKKNKIRRKLDRLKDLYLNEVINLEEYKKDRAEYEEQLAALPDMEQPIKNLKPLKQVLDCNFEVIYNNLNNEEKRAFWRSIIKEIRVSKSIGRNRKYQIIFL

SEQ ID NO: 12419 - protein, 628 aa, synthetic construct
MKAAFLIRCSTKNQDLNRQTRDLTRLAKSMGYEYDLENLIYGEKITGKDDVTKKNRDSIDRLLRAAKEQRFDVVLVSEVSRMSRDPASGRIYVRLLINMNIPVYFKDIDLWTINPETGKKVRDAELVIGAAFDAAWKYLKSMKTQIASARRNELDNNRISIGQPYFGYKRYEGIDKSKKNQIVVNEEEAEVVQAVYNEYLKEGATLKSTALAITDKYGEKLNRKFSLGTIEHILTYESYATGIKKVNLKDPDTDEVEVFDVNTPIIIDKELYEAATNKRKKNRVKDEPYPNQQVYLLSKLIKCPDCGYTLTPRRKAGEFGQTYRLVNGKPAVSWLCMSGINNITDCTNRTSIANEKLEPIIWELVKKELIGYANMNDEKREEQIRECEEKIEYQNYSIQNFTKEIDKLKKRLSTAYQFSINAAEMAGDDEDMRTMAMEEFNRTAKGVRQEMKNFEKSIEQAKGELEKLRDLKTFYSQPTLPKDYLEQIEGNFTEKRNLVKQLITKIVPYRITTFKKKERESGVKTCNKMITVKNGAVLLEVYTIGGVYNVFYNANSKFKVKTAYYVHGEYATFQNGIRKYPAYDEGEYFVISNANMVMETDDIDEVVTVNEFVAIAIANNWVIEYQYI

SEQ ID NO: 12420 - protein, 502 aa, synthetic construct
MSETTQIGVIYARYSSDKQRDESIDGQIRECMAYAEREGITITNTYIDRALSAKTDDRPEFRQMILDSNKQAFNYVLVYQLDRFSRNRYDSAIYKAKLRKNGIRVISVKENIKDDPSGIILESVLEGMAEYYSAELSQKVMRGMTDNVLQGKWVGTVVPYGYKLSNNRQLEINEHEANVVRKLFDMYLQRHTLSEMASYMNAHGHLTHKGKPFNTNSIKAIISNKKYIGVYSWGTERIENAIPPIIDKNIFEKAQHKRNLRAKKKGNRSELYQLCGKLECGRCGGNYVGSTGTSKTGTLHHYYVCSNRRRKNACQAQNIRRDALDDIVISQTLAILNKPNVVNKIAKYAASSGKNLQSETVAQIDIIDAHIRDLKKSLDNYMTAIANGFISDVLKHRIEATEQELKDQIEIKTNLENTIIPVELTEDHIRFFLLKMAKENPSTLRGRARIIEAFVHHVTIYEDHIEIVFNYKNELSEFHDKTLESSLLNDLVTQKGFEPLAF

SEQ ID NO: 12421 - protein, 514 aa, synthetic construct
MRRKKVEGGNRLVAYYRYSGGSGQTEQSIEGQRRDCENYARLHGLTIVHEYIDRHISGKTDDRAAFQQMMNDGDKGAFDMVICWKTDRFARNRYDSAVYKKRLRDNGIEILYAAESNVEGAEGIIIEGLMEALAEYYSAELAEKMRRGMRESALKGQAINRCRSLGLTTDENKKYVIDEKTAPTVRFIFEHYAAGESSASIVEQLNAKGLRTSQGNPFNKCSIPRIIQNEMYRGVYTSKAYNVRIEGAIPAIIDDDLWKRAQAMMKTNRQLKAKYEPKAEYLLSGKLFCAKCGCTMKGVSGHSGGNDEVYRYYACSNPQCRKRNIPKDDLEGKVIRSICDHLLQPETMELLAETMVDVQKADMEKPNAERDVLEQELWDVRRRSKNIMDAIETGSANPQLVARLDDLTQQENTLTYQLSTMEAEKPLLFTKEQYLFLLQQFYAQPTEQDDAYKRRLINTFVTNIEVSDSELLIYFNISEETENKNKNAPKLNFDKSSSTEKRLVRVARIELTAS

SEQ ID NO: 12422 - protein, 520 aa, synthetic construct
MPRKKAPAAEAPRLVAYYRYSGGSRQTEQSIEGQRRDCEAYARAHGMTILREYVDRHISGKTDDRPAFQQLVADSAAHTFDAVICWKTDRLARNRYDGAVYKKKLRDNGVEILYAAESNISGAEGIIIEGLMEALAEYYSAELAEKARRGMRESALKGKALGSSRPLGLTVDADKHYVIEPKGAEAVRYIFEQYAAGLSSSSIVERLNAMGLRTSHGGPFNKSSINRIIQNEMYRGVYVSKKFDVRIEGAIPAIIDNDLWERAQNMFERNRQSRTPHASRADYILSGKLYCGECGCLMKGVCGRSSGNGQMYHYYACPGRSIGRACTRKNIPQDELEAMVVNAVSDLLLEPALLEQIADAIVELQQAEAARPDPEKQALEKSLSDVRSKIQNILTAIENGTSSAALSARLADLEQQESTLSYQLSSLTAKKPLTFTRDQILFLLQQFRVSPSERTKAYCRRLVDTFVDHIELTNTELILYFNISDETIDKNKKAPRSNPSKESSTEKRLVRVARIELTAS

SEQ ID NO: 12423 - protein, 668 aa, synthetic construct
MAYAKKKKILNFWTKKKAALYVRVSTRYQVDKDSLPFQRKKLKEYCKFLGLEDYVIFEDDGYSAKNTERPHFQEMMSRVRSGEFSHLIVWKVDRVSRNLLDFAAMYQELKDHKVTFISMNEQFDTSTAIGEAMLKIILIFAELERNMTSERVTGIMLDRAEQGLWNGARMPVGYRWNDEAKFPEPDPEEVKIVQLIFDKYEEWKSSIKIARYLNNNNFKSKRGGQWTSKLIHDIIRNPFYIGTYRYNLRESGRGPLKPESEWIVRENNHPAIIGKAQFDRCNKIMDQNGSSRDTSDLRARKYVHTFSGHLVCGKCGANMIASKDRARANGWRPSMYRCAQRSRMLDCDNSRTINESYIGPFIFNYIANLARVQKNFKNIATPEKLERELLKGETFDGVAGILPEGLNLTFQALAFRQVGNGTYIPDIDFLGDSDGASDRDQIELLKSEIEKSKNAVTRLTDVYLFDPDSMTKEEFATKKKELAKKIEGMERQLADLLDDSGNDDLADMSFIKKASAFLVAQRIVSKSFVDYVGMAQELDNEILKDFIDQIVDQIVVLDGRVQSITFINGLKHEFRYTAPAELPVCKKCGGRIGSTCGCRTRTFDFSGKCYQRIKVSDPRDMLHGKKNPVCPECFAQEGRWHHWNCKIETCPICGGRLAECEHGPNGKK

SEQ ID NO: 12424 - protein, 493 aa, synthetic construct
MDSRIDAIYGRQSIDKKDSISIESQFEFCRYELKGGEGKEYKDKGYSGKNIERPDFQRLLQDIRLGLIKRVIVYKLDRISRSIVDFAKLMELFKQYDVEFVSCTEKFDTSTPMGRAMLNICIVFAQLERESIQMRVQDAFYSRCTKGYYMRGRTPYGFDTEPIVMDGIKTKKLVENAEMDFAELMFQMYAEPGNSYGDITRYFVKHSIKVYDKALQRAFISKLLRNPVYVQADMDIYEYFKAQGVKIESPPEMFTGDNSCYLYQGREGEEPILVIAPHQGRISSQLWLTVQRKLSQNTTFQNGRKCHNTWLAGKIKCGRCGYALTALRAQNGVVYLRCKQRADNGSCEGAGTLTAQSMEAFVYGEMVKKMRKFHTLKGGEEQSYNPKLTAARVALAKTESEIEKLLDTLSGANSLLLQYANTRIEELDAERQKQLRLVADLTANSVSASQIDSITGYLDDWESVSFDDKRKVVDILISQIDATSESVTIHWKI

SEQ ID NO: 12425 - protein, 465 aa, synthetic construct
MKGNAGDTIVKKIDLSPELVRVALYIRVSGEEQKIKGLSLEAQQERLEAYARERGWVIVGIYIDAAKTARKNIHKRTDFQRMMDSVKRDEVDILLFCRLDRWFRSVADYYKIMEVLEAHNCDWKTTDEEYDTTTANGRLYINVKLSIAQNEADIDGERIDVVFDSKIAHGTVVSGSAPFGFRVNEGKRLEVVPEDAAIVQDAFNYFETSISQRATVRYIRETYGVNWCDATFRRMLKEKLYTGVYDRGGRFNDHFCPAIISKQQFDRVQALLERNARSVPSGKVYIFTSILTCAECGHKLVGYKSSDYYYYRCNQHFQRGRCSHNHSAREDVVEKWLFEHLTEELERCQLEWEVAAAKKKASVARTDKAALKRKLTKLKELYVNDLIDIEDYKRDYQIYTAALKHIPEPSIEPPPDFAAVRRLLDNDFKTIYENLTREEKRTLWRSVIKEIRIDNDQNITGVVFG

SEQ ID NO: 12426 - protein, 529 aa, synthetic construct
MPYCLYLRKSRADIDAEANGEMETLARHEKILLDLAKRMHLDVTEIYREVVSGETISSRPVVQHLLTEVENEMWDGVLVVEIERLARGDTIDQGIVSRAFKFSNTKIITPLKTYDPNNEYDEEYFEFGLFMSRREYKTIRRRLTQGRMSSAKEGKHTGSKAPYGYDRIHVESGKGYTLSPNEKEAPIVKMIFDWFVNGQLQEDGSYRKLGAHAIAHRLTNLSIDSPTGNPTWNPRSVYWMLHNPVYTGKIRWGYKKDKKIIVDGAVKRTRIIPPEEEQILVEGLHPAIISDEIFNRAQELFLRRGNPSVVIEKELKNPLAGVVVCGICGRPLRYRSNANRRDFGVECRTYGCPCKGSYIYIVEKRIIDALRDWVNEYKLSWDDMPRETHSLLIVKEQAYNAAIKELNTLTKQLDKTHDLLEQGIYDTETFLIRSKSLSEKIAESEKNIAKLSADINNEKLRENNRKNLIPKVENLIDIYWQLPNASAKNDMLKEVLEKVEYTKLHTVGRSKTKKLDDFDLVLYPKLPRT

SEQ ID NO: 12427 - protein, 508 aa, synthetic construct
MKKAIAYMRFSSPGQMSGDSLNRQRRLITEWLKVNSDYYLDTVTYEDLGLSAFNGKHAQSGAFSEFLDAIEHGYILPGTTLLVESLDRLSREKVGEAIERLKLILNHGIDVITLCDNTVYNIDSLNEPYSLIKAILIAQRANEESEIKSSRVKLSWKKKRQDALESGTIMTASCPRWLSLDDKRTAFIPDPDRVKTIELIFKLRMERRSLNAIAKYLNDHAVKNFSGKESAWGPSVIEKLLANKALIGICVPSYRARGKGISEIAGYYPRVISDDLFYAVQEIRLAPFGISNSSKNPMLINLLRTVMKCEACGNTMIVHAVSGRLHGYYVCPMRRLHRCDRPSIKRDLVDYNIINELLFNCSKIQPVENKKEANETLELKIIELQMKINNLIVALSVAPEVTAIAEKIRLLDKELRRASVSLKTLKSKGVSSLGDFHAIDLTSKNGRELCRTLAYKIFEKIIINTDNKICDIYFMNGIVFKHYPLMKVISAQQAISTLKYMVDGEIYF

SEQ ID NO: 12428 - protein, 516 aa, synthetic construct
MIYARYSSDNQREESIEGQIRECTAYAEKNGITIVKHYIDRAISAKTDNRPEFQQMIKDSDKKLFDIVLVWKLDRFARNRYDSARYKTQLKKNGVKLMSATEIISEGPEGTILESVLEGYAAYYSADLSEKVIRGMTENALKGKFTGGAIPFGYIINADHRFEIDPLTAPFVAETFQRYNDGQTMREIRDWLNEKSVKNQRGGLMTFNTIQHMLNNRRYIGELKYRDVLIPDAIPSIVSAELFNDVQKKMLKNKKAPARRKAEDDFLLTTKLFCGYCGALMFGESGTSRTGEVHRYYKCATAKKHKGCKKKTVRKQWLEDLVVNQTMQLVKDDAAMESIIAKVMELQNKENTNIPLYEKQLRDAESGIQNMLNAIQAGILTSSTKERLEQLEETKRELEARIAEEKLAKPKVTEEFIRFWLRRFRKLDMRLKDQRQTLVDTFINAIYLYDDKVLITFNYKEGTQTVTFGEASEVASEGNGSDLDCIPAPQKRQLSKAVFFVLHDYFPLAATADNRT

SEQ ID NO: 12429 - protein, 523 aa, synthetic construct
MRFFSYGRKSVFSDKSDSIDNQFRMNREYCESKFSGQVDSWQQFSDEDFTGANTSRPDLQRMLSFIKGGFCDVLVVYQLDRLSRDVRDFANIYALLEEHGVMFISIKENIDTTTPIGRAMMYVTVVFAQMERETIAARVTDNMLGLAKKGYWTGGNPPVGYVRKHIVVNGKKHCSIEVDPDGARYVTQIFDTFLAYNCSLQGMETRFKNQGIRTQSGRFFSTTQLHKMLTMPYCVEATPEVYDFYAAKGCIMDPGSPREMWDGSVGVIIYGRSTEKNKKHQAQPPEKWTVCLGKHKPFMPAEKWLAVQSRFTQNKCIKDAKWPVPLLKGVLRCKCGNLMQVSRKKKVDGTCSSWYYCRKRMRQGVDACDMGQIKCDLLDEKVLELFRGITADPALIQKFVKAEAPTDVPDLKAAQARVSACERKIGRLAASLALAEDSAASKYIIAEMERLDVELGALKREASLAEMESHRAAASAKDAKATAAEIAKLIHGLDGFDDKEKNAIARAVIQECTWDGERLFITL

SEQ ID NO: 12430 - protein, 502 aa, synthetic construct
MEIQIREGNSIQKRKLKVCAYCRVSTDADEQENSLENQIRHYKEVITSNPDYEYAGVYSDFAISGFKEKRPGLQKMLADARKGKIDLILTKSVSRFARNTSIVLEATRKLKELNVGVFFELQNINTLSGEGELMLTILAAFAQAESESGSVGAKMVYQRKYEAGIPVQYLERSFGFKKDERGVYIADEEEAVWVRKIYDMAAQGYTLAAIKRYLNENNVKTVGGAKWLDSTVLRILENEIYKGDYIMHKYFVNEERKLVRNRGEVDAWYIEDDHEAIVSPKLWQRAQDALEAKRDYLAEGSVIEEFTEENYPYMNRIYCARCGHPLYKRIYSNGNRLNWGCSGTKRYGKSFCEGINIPDGVLRGAWHFDENMYIGEKQTDKGKKEFTYLKEASWKRRHKKKEPEPIPENTETEYPYREKIFCGLCGSRLVRHVNTKNHKVIWVCNGRKRKGKDFCDGTRVPDTIIKGWGEIKKDIYIQRKDDKNGKKRYSYTSKKPKGADRA

SEQ ID NO: 12431 - protein, 470 aa, synthetic construct
MKGESELDKKAAIYIRVSTQEQATEGYSIQAQTDRLIKYVEAKDFILYKKYIDAGYSASKLERPAMQELIQDVQSKKVDVVIVYKLDRLSRSQKDTMYLIEDIFRPNDVELISMQESFDTSTAFGSATVGMLSVFAQLERKSISERMITGRVERAKKGFYHTGGQDRPPAGYQFNSDNQLIINEYEAAAIKDLFRLYNDGLGKSSISEYLKKNYPGKNKWLPSSIDRMLKNSLYIGKVKFSGVEYDGIHEPIIDEVTFYKTQKEIARRKQTNTKRYNYVALLGGLCECGICGAKMANRRSVGRKGKVYRYYRCYSKKGSPKHMMKTDGCSSKAQQQFIIDEAVINNLKNIDVEAELKRRSAPQTNTSLISSQIESIDKQINKLIDLFQVDSMPLDVISEKIDKLNKEKQSMEKLLERKNKLDKTELQHRFDVLKSFDWDNSSIESKRVVIEMLVQKVIIHDNSIEIILVE

SEQ ID NO: 12432 - protein, 438 aa, synthetic construct
MSTDQEEQLLSYENQVNYYTNYISENPLYEYAGTYADEGISGTNTKKRDEFNRMIADCRAGKIDMIITKSISRFARNTLDCLNYVRELKDLGIGIIFEKENINTLDAKGEVLLTILSSLAQDESRSISENCTWGIRRRFETGKHKMSTKRFLGYDTDETGKLVINRTQEPIVIRLYQEFLDGKTTDYIKRIFERKGVKNWDGGTKWQSTTLMSMLENEKYKGDALLQKSYTVDFLTKKRTQNKGEIQMFYVEDDHDAIISKRIWECVQLEIKRRKKYLEEHGTNSYSHRPESNPFASKIICGDCNKVFARKGWRSSTGVDRKVWQCSERYKVKGVMGCVNRHVEEETLIKAYLMAWNALVENREDFMEQWTEQLQSENLLEGYRAEKFIEYTDGAEPLTEMDTDFMLKTLDHIKVFEDGTLLVVFLDGTEIECKNEEE

SEQ ID NO: 12433 - protein, 417 aa, synthetic construct
MSRTSKITALYERLSRDDDLTGESNSIINQKKYLEDYARRNGFGNIRHFTDDGFSGVNFNRPGFQALIKEVEAGNVATIIVKDMSRLGRNYLQVGFYTEVLFPQKDVRFLAINNSIDSDNASDNDFAPFLNIMNEWYAKDTSNKIKAVFDARMKDGKRCSGSIPYGYNRLPTDKQTLVVDPVASEVVKYIFLLTNDGKSPREIAEILTEEKVLIPAAHAKEYHPEQYNGIKFADPCIWSVSSVRKILDRQEYLGHTVLRKSVSTNFKLHKRKSTDEEEQYVFYNTHEPIISQELWDSVQRRRQRANRTAARGTHTNRLSGYLYCADCGRRLTLQTHYSKKDRSLQYSYRCGGYASRVNSCTAHSISVDNVEALILSTVKRFSRFVLNDEEAFAKELQALWNDKQADKPKQNQSELQR

SEQ ID NO: 12434 - protein, 514 aa, synthetic construct
MRRKKVEGGNRLVAYYRYSGGSGQTEQSIEGQRRDCENYARLHGLTILHEYIDRHISGKTDDRAAFQQMMNDGDKGAFDMVICWKTDRFARNRYDSAVYKKRLRDNGIEIFYAAESNVDGAEGIIIEGLMEALAEYYSAELAEKMRRGMRESALKGQAINRCRSLGLTTDENKKYVIDEKTAPTVRFIFEHYAAGESSASIVEQLNAKGLRTSQGNPFNKCSIPRIIQNEMYRGVYTSKAYNVRIEGAIPAIIDDDLWKRAQAMMKTNRQLKAKYEPKAEYLLSGKLFCAKCGCTMKGVSGHSGGNDEVYRYYACSNPQCRKRNIPKDDLEGKVIRSICDHLLQPETMELLAETMVDVQKADMEKPNAERDVLEQELWDVRRRSKNIMDAIETGSANPQLVARLDDLTQQENTLTYQLSTMEAEKPLLFTKEQYLFLLQQFYAQPTEQDDAYKRRLINTFVTNIEVSDSELLIYFNISEETENKNKNAPQLNFDKSSSTEKRLVRVARIELTAS

SEQ ID NO: 12435 - protein, 527 aa, synthetic construct
MYELTQSMESLSVDEIIVYLRKSRSDSPEMSVEDVLKKHEEMIQDYANTNFGSPIPEKNIYREVVSGETIDSRPQVKIVLQKIESPQIKAVLIVEPQRLSRGDLEDCGRLINILRYTNTMVLTLTHSFNLQEEYERKFFEMEITRGNDYLEYTKRILRRGRESSAAKGHYIGSVDPYGYRKIVIKKDGVNCHTLEIVPEEANVVKLIHELYAYTPGGIGFTNIAHKLDSMNLKPKKATHWTPAIISSILCNPLYLGLIRWDTRKVVKYINDGRLEKSRPRSSDAKYYKGLHEPIISQELYDACMARRGTNPSLRRNKELCNPFAGLLYCGTCDHAMSLKIYKNHNSVSQIMLCNHQSYCHTKSVLYSAFLERFISSMENTIHDFELALLADDGNAQAVNRSIVANLETRLKKLQEKDMRQKDAYEDGIYSKEEFLERNIKTQQEIASTITALTAAKETKENYVDYGEKIRRFRDCINALNDPELSATEKNQFLKSCVSKIIYYNNMESKAGVGRYVENVFSLEIQYI

SEQ ID NO: 12436 - protein, 503 aa, synthetic construct
MNNRIDAIYARQSVDKKDSISIESQIEFCKYELKGGNCKEYTDKGYSGKNTDRPKFQELVRDIKRGLIAKVVVYKLDRISRSILDFANMMELFQQYNVEFVSSTEKFDTSTPMGRAMLNICIVFAQLERETIQKRVTDAYYSRSQRGFKMGGKAPYGFHTEPIKMDGINTKKLVVNPEEAANIRLMFEMYAQPTTSYGDITRYFAEQGILFNGKELIRPTLAQILRNPVYVQADLDVYEFFKSQGAVLVNDAADFTGMNGCYLYQGRDVKPSKKNDLKGQMLVLAPHEGIVPSEIWLTCRKKLMNNMKIQSARKATHTWLAGKIKCGNCGYALMSIFNPSGRQYLRCTKRLDNKSCPGCGKIITSELEAVVYQQMVKKLASYKTLTGRKKAAKANPKIAALQVELAHVDSEIEKLVDSLTGANNVLLSYVNVKIAELDGRKQELVKQIAELTVEAISPEQISQISGYLDTWENVSFDDKRRVVDLMITTVAATSDSLNITWKI

SEQ ID NO: 12437 - protein, 527 aa, synthetic construct
MLNNNNTQNGQRKTLRCAIYTRKSHEEGLDQEFNSLDAQREAGEAYIESQKLQGWKAIPYRYDDGGFSGGTMERPALQRLLADIDAGKIDVIVVYKIDRLSRSLLDFMKMIELFNEKEVSFVSVTQHFSTTDSTGRMFLGILITFAQYEREVIGERIRDKVAAAKRRGKYCGGPAVLGYDVDRENKKLLINQSEAPLIKLIFRRYTQVGSAKKVAQELNEQGYKTKSWTTKKGKERIGTEWNTAQVYRLLNNRLYIGEIAYKGKNYPAEHEALIDQNTWDKVQALLSENNRTKMSKARVKMVSPLSGVIRCGHCDSAMGITYTNKGDRRYSYYICEKDTKRAVSRCPLKRVPAGDIESVVLGQLGAVFRTPTLVAKTYFAAREIEAEERERLQSQKKELEQSLQSVRQEALKLMSPDNDDPDRNNRLPLVNQQAVDLTKQLTNVSARLRVIDTEQISEGDVSEAFQSVETFWEDLFPLERNRLIQLLVETIEIRETGIDMELKTNGLTNLVTELAGLACEVRERSNS

SEQ ID NO: 12438 - protein, 508 aa, synthetic construct
MVKHYIDRAVSAKTDNRPQFQQMIKDSERGIFDVIIVWKLDRFARNRYDSARYKTQLKRNGVKLVSATEVISAGPEGIILESVLEGYAEYYSADLSEKVVRGMTENALKGIYNGGTIPFGYMIDETRHYQPDPLLAPYVEQTFQKYADGATMTDLRDWLKAHNIKNSMGGEMSYNTIQRMLSNRRYIGELRLRDVVQPNAIPALVSEDLFNKVQEKLTKNKKAPARHKAEDTYLLTTKLYCGKCGALMFGESGVSHTGKMYTYYKCAAAKKKKTCDKKAVRKQWLEDLVVSETMKLVEDDASMNAIIAKVMELQNQESTDLPIYEKQLKETEVGITNMLNAIQMGILTSSTKERLEALEEQRKELQARIAEERLAKPKMKEEFVRFWLLRFRKLDMTQPEQRQTLVDTFINAIYLYDDKVLITFNYKEGTETVAFGEAVKAEKSSDMSARGAPENAVKSKDFMAFLFCKPWLHGFCTVFARSVLSMSDDVGRCIALQSVPFFASGEQC

SEQ ID NO: 12439 - protein, 503 aa, synthetic construct
MLRAALYGRFSSDNQREESIMAQFRDSEEYCKKKNYCIVARYADEAKSGTTTVGRDRYNQMLDDARRGLFDVIVFHKVDRNARNEFDYYMTKHKLQQVGVRYEYSKQDINATTPEGQMMESMLVGMAAYYSRNLSNEIKKGLRENVLQGKHAGGPVPYGFLTDENKKYIINEKEAPAVRMIFNLYVAGVHYGTIRKKLFNAGYRNRAGREFTTAGIYEILRNRKYVGDLYLGKTLFRKGKRNSHRTSADVRYYENVIPAIIPRSLFMEVQEKMNRNRRRTGSGNAKTVYALSGLIFCGRCGSAMVAHSTKNSRGVKNYYYRCPKGRLVGDEKCHQKFVNRDKIEAAVYNLIRDTFTSPNAHDRIKEVISKNKIKINPEDYTEQIKRLKQQEAADVRSLDRLYDIYMAEQEDEFTISKMKKLKEGILRLRNQIEELETRQKIVQSEKFDIDRVIDTFQKQLKQKQSPEFIQTLFQLAIKSVTIYPDKIQVALLVTQERFELPTP

SEQ ID NO: 12440 - protein, 546 aa, synthetic construct
MTRAAIYVRVSTARQAERDLSIPDQIVQCRTWCQRQGIEVVQVFSEPGASALDEDRPVFQELIHTAKRTDKPFDLVVVHSLSRFSRDSLHSELYIRELRKAGVELISITQEVGQDPTGEMFRKLLHIFDEHQSRETAKHVHRAMLENARQGFWNGSRPPYGYGVEIAERRGSKDKKVLVVNDAEARVVRMIFDMAAGVEGRPMGVKAIATWLNERGILRRGRRFSTGGVHAILTASTYHGQHYFNRTDSRNDRPRPPSEWIPLAVPAIVDEKTFNAAQALLQSRAPKRVAPRLVNTPTLLAGVARCGHCGAALIQNTGKGGQYRYYCCSRRLKEGPFGCKGLRMPMDKLDGIVIGEVTKQILQHEHLVGLLGDYLRTALEREDRNRDRLRQMRQDHKESEAGIARLLELVEKGLMDAEDASMRERLINLRFRRDELAEQIVDLTRRLAMAEPVITPEKIEKLAVLLRDKLHHGPPDLRQAYARLLLSDVRVNDREIRISGSKAVLARSAAAGVAKTTPAVLSLLGLFKSDPQNARFSGIIGFDNLS

SEQ ID NO: 12441 - protein, 466 aa, synthetic construct
MKKAGLYIRVSTPQQEKEGYSIEAQTEKLNAYAVAKDYKVFKTYTDAAFSGAKLERPALNEMIEDIENNKIDVVIVYKLDRLSRSQKNTMYLIEDVFLKNNVDFISMQESFDTTTSFGRAMIGILSVFAQLERDNITERMSMGKLERVKRGYYMGGGNVPFGYEYNQITGELEIQETQALAVKRMFELFLSGQAINKIVSILKKEFPVFEDSFMDSTVRRRLQSHYYCGKQKYQNKVYDAKHEPIVSIKEFNKVQRLISNRPHSNAFNHSYLFSGLIMCHKCGKPYNGYESVRTANGKKYKHKYYRCSCRTYKHKQKYGWACSGKSYRCDFLDAAIMSEIKKRAENSKFALKENNNEIDNKPIIREIARLNAQQSKLLDLYLSDKISTIILDSKTDELKDKIEKLELQLNQTVSKKDKEEFEKSLEELVDHFEEMDFSTRRSLIENIIEKIEVIDNEITIYFYVSI

SEQ ID NO: 12442 - protein, 594 aa, synthetic construct
MSKEITRVVLYLRYSSNAQSEQSIEGQMHVCESFCTRNNYAIVQSYIDRALSASKNTDKRIQFAQMLKDAESGNFDAVVVYKLDRFARDRYDFAMARYRLKKCGVAIISATENLSDSPESIILESVLEGMAEFYSAELSQKVSRGMRETAAKHNSVGGVALGYKVENKKYVIDPITAPIIKEIFQLYANGVSIADICKSLNEKGYRTSAGKPFNRSSFNRILRNERYIGVYKYLDYRAENGIPAIIDKPLWDAVQLRLNSPRPGGCHKADIPYLLAGKLFCGHCGNKMNGESGISHTKAKYYYYSCYTHKRGKGCLKRSVKKGWIETIVLQNLRALLTKESIDKISSLAVAENKKQINNGTRIPLLEEKIRDNEKATQNIIKVIEKGVSSDSLIERIHELEQEKQELLLQLAIEKRGVVKLSKEEITYYLSQFSENDFENETLNQSLIDLLINSVTIWDEPDGNFKIVIAYNLEMYPAQTFKLNPTGYDLQKFYRVQTPQKVDKIQECKNQSSKVAKVINKVSGDNSRSASNKPRAKSREKRSNKVQKGSDNCEEVSGSDTANGGPPICRIVLYDAAFFIKDLSEEKPPAKLVE

SEQ ID NO: 12443 - protein, 563 aa, synthetic construct
MESERMQHSLSAQVSYYSALIQKNPEWEYAGVFADYGISGTGTKKREEFNRMLAECEAGNIDIILTKSIQRFARNTVDLLNTVRHLKDLGIEVRFEKENINSLSGDGELMLSILASFAQEESRSISENVKWGTIKRFKQGIPNGKFSIFGYEWQDDKLVIVPEEAEIIRWMYAEYMKGASRIEIGRALMDRGIYTRQGKPWVDSNVKVILTNITYTGNMLFQKEYCEDPITKHRRKNYGEMPQYFVEDTHEAIIPMDEWQVVQAEFKRRRDLGPFGNKSLKLSAFSTKITCGCCRKHYRHSGKRNTAGEVYYIWICQTKSQKGVSACPSKNIPEKMLQNTAAEVLGLDEFDEDVFSQQIEEVIVIGDDTLTFRFYDGHEVTTKWQSTAKTDWWTDERRKLWGERHKRKDTNPNRNTFYEFTGFIKCGCCGANYRCQSGKRKDGTPTRSWYCTGPRSECRNPAIRDETMKRLVTEILGLDEFDEAAMDAQIESATILDHMVTFHFRDGHIESRDFLDKRHGTPWTEERREKAKKSMKAAWTDERREAMSERIKKIRSEKKWPNP

SEQ ID NO: 12444 - protein, 547 aa, synthetic construct
MGYARVSTEAQDITRQVELITAYCTERNYRLIKIIQEKISGARKDRKSINELLEVDDTVADMIIVSELSRLSREDDILSVLSTINELLKQGVDILFLDKQDRIYKAGTVLSLYDIITLSVEAKASADERYKIAGRMQTGLRSKLAEFTNMFTGGTVPFGYKVIHNPDYKLNLTPKNLLVVDAQEAEAVKYLFQQLIDGNTIRQTVRVYNKLYPYKLSYSGICRIIRNPKYKGEIYRRGKLYGQISELQIISPEDFDRANKQMRENELFQSNAPKYYNPLKGLIFCPCGCSLYMKPNHNSYLIYRCSSSYNDKQRCENFGIKCSYVLSAVWTCVKATLHTEEYLRFNSRRSQELQELNAQIRETITQKVNIADEQKAQSAALIDKIKRLTNSVLIGELEAEYNLLQNKLKQTEQEITELNGRIAENDAEIQKNVEQKDFSQMEQSALYKEKLQKVVYHSLSAMRGILEIIFKNGMIRYVLIKKHRNGGVFLLPEFWTVDISRAVIIVPTHPSVDPEHPYTLLPTIPREYTFDAIITERDMDEYRITVS

SEQ ID NO: 12445 - protein, 579 aa, synthetic construct
MSDPIINCAIYTRKSTEEGLDQDFNSLDNQYEFCHNYLVSQNDPCLHIVPTRYDDGGYSGGNLNRPALQRLLEDIRCGLVNRVIFYKIDRLTREMRDFFKLYDIFEKYNVDFISVKENEFYNTTTAPGRLMVNMMLSFAQFERENAGDRIRDKIANSKAKGMWMGGVPPLGYNIGNRCLVINETEAAIIRSIFQTFTITHSLADTTDAANNAGYRTKCHTSRQGRVSGGRKFSTASIQRILQNPLYKGLVSHKDKLYPGQHEAIIEAQTFDVVQAIFQSHAVQRPARKAKTENRVSEQAFLTGLIYCGCCGSAMTPSFCNKGDIRYRYYRCYRRARKLDDKCPINQIRASEIERVVMEQVLSILKTREFFIKYISTQREIEVSTVHSLFCNLDNVWDRLFETEKIRILQELVSRITVYKDRITIDVKKSGLSNVFAELMENNKIAGIQYHEGDTFQISVSYVGKRLPNGAKIIVPSTAPQENRFNGSLTLARHFAKAYEWQKKLASGWTLQEIYSSEKINERDIRFALRISLIDPEIIEAVLAGQAPEFLTYRFMKQHPIPLLWNDQRKLYGFKERKIS

SEQ ID NO: 12446 - protein, 514 aa, synthetic construct
MRRKKVEGGNRLVAYYRYSGGSGQTEQSIEGQRRDCENYARLHGLTIVHEYIDRHISGKTDDRAAFQQMMNDGDKGAFDMVICWKTDRFARNRYDSAVYKKRLRDNGIEIFYAAESNVDGAEGIIIEGLMEALAEYYSAELAEKMRRGMRESALKGHAINRCRSLGLTTDENKKYVIDEKTAPTVRFIFEHYAAGESSTSIVDQLNAKGLRTSQGNLFNKCSIPRIIQNEMYRGVYTSKAYNVRIEGAIPAIIDDDLWKRAQAMMKTNRQLKAKYEPKAEYLLSGKLFCAKCGCTMKGVSGHSGGNGEVYRYYACSNPQCRKRNIPKDDLEGKVIRSICDHLLQPETMELLAETMVEVQKADMEKPNAERDVLEQELRDVRRRSKNIMDAIETGSANHQLVARLDDLTQQENTLTYQLSTMEAEKPLLFTKEQYLFLLQQFYAQPTEQDDAYKRRLVNTFVTNIEVSDSELLIYFNISEETENKNKNAPQLNFDKSSSTEKRLVRVARIELTAS

SEQ ID NO: 12447 - protein, 488 aa, synthetic construct
MPEALNAVIYARYSSDRQTEQSIEGQLRECYAFAKANDIAVIDTYIDRAISGKTDNRPAFQKMIEDSAKRQFQAVIVYRLDRFTRNRYDSAIYKARLKKNGVKVLSAMENLNGSPESIIMESLLEGMAEYYSVELSQKITRGMRENALKGKALGGQRVLGYKVNSDCYFEIDETTAPVVVDIFKLYSSGKTVKEICDILNARGVKTARGGAFNKNSLHTILTNKKYIGIYKTKYGEIVGGIPAIIDKELFEMVALRMEQNKKAPARAKAEINYLLSTKLFCGKCRSAMVGESGTSKTGKKYYYYACVKKKREKACDKSNVKKDWIEDLVIQRTVTDILKDDVIEKIADRLVELQKAEAAESGTMLYLENSLAEIQVSIKNIMTAIEKGIITESTKTRLTELEDEKRNVEIEIAKESIARRIISREQIIYWISSFKDGDITSEKYRQQLIDTFVHAVFVYDDKIVITYNYSGENNTATISDLDLSSPPK

SEQ ID NO: 12448 - protein, 523 aa, synthetic construct
MAKSVTTIPATLSRFTAAPINSTKKRRVAAYARVSTDNEEQLTSYEAQIDYYTNYINGRDDWEFVGVYPDEGITGTNTKKREQFRQMVADALDGKIDLIITKSVSRFARNTVDSLTTIRKLKEHNVEVYFEKENIWTFDSKGELLLTIMSSLAQEESRSISENCTWGQRKRFADGKVTVPFKRFLGYDMGPDHNLVVNPEQAKLVKRIYGMFLQGQSPFQIARTLTDEGIPSPGGKDHWNPSNIKSILTNEKYKGDALLQKSFTVDFLTKKKKTNEGEIPQYYVKDNHEAIIDPETFEMVQTLMTTRTKGRNRKSSVSIFSSKVKCGDCGSWYGPKVWHSNDAYRKVIWQCNHKFDGQKCATPTLTEDEIKELFLRAANQVIDQKEQFIAIYDQVLSRSLDTTALESELSDLEAEINIAAELIEDCIKENAHVALDQDEYQKRYDALVARFDKAKARHTEVTDLIAERMARKHQIEAYLKNLRSREPLTEFRETDWLAMVDYIAVHSKNDIRVTFKDGTEIKA

SEQ ID NO: 12449 - protein, 590 aa, synthetic construct
MKTVEKIERKLPVLKARKRVAAYARVSMESERMQHSLSAQVSYYSALIQKNPEWEYAGVFADYGISGTGTKKRDEFNHMLAECEAGNINIILTKSIQRFARNTVDLLNTVRHLKELGIEVRFEKEKINSLSGDGELMLSILASFAQEESRSISENVKWGTIKRFKQGIPNGKFSIFGYEWQDNKLVIVPEEAEIIRWMYAEYMKGASRIEIGRALMDRGIYTRQGKPWVDSNVKVILTNITYTGNMLFQKEYCEDPITKHRRKNYGEMPQYFVEDTHEAIIPMDEWQAVQAEFKRRRDLGPFGNKSLKLSAFSTKITCGCCRKHYRHSGKRNTAGEVYYIWICQTKSQKGVSACPSKNIPEKMLQNTAAEVLGLDEFDEDVFSQQIEEVIVIGDDTLTFRFYDGHEVTTKWQSTAKTDWWTDERRKLWGERHKRKDTNPNRNTFYEFTGFIKCGCCGANYRCQSGKRKDGTPTRSWYCTGPRSECRNPAIRDETMKRLVTEILGLDEFDEAAMDAQIESATILDHMVTFHFRDGHIESRDFLDKRHGTPWTEERREKAKKSMKAAWTDERREAMSERIKKIRSEKKWPNP

SEQ ID NO: 12450 - protein, 509 aa, synthetic construct
MRGVIYARYSPGPHQTEQSIEGQVADCQQYAEEHGIDIIEIYADRHVSGKSVVGRDEFQRMLRDAEKGRFDCVLVWKIDRFGRDRQDIAMGKMALKRAGVKLMYARESVPEGPEGIILESVLEGLAEYYSADLRQKVIRGMKETAKKGQYCGQPLPIGYKVDSQRHVVIDEREAAAVREAFKMHIAGAQLRDIVRLFADRGIMGRRGKPVSNAVVYRMLRNEKYLGEFYIQDVKLNVEPIIDQATFLEAAQHFKTSRNNAAGRAKVNYLLSCKMFCGYCGSMISAEAGTGKLGKVYRYYKCGDKKRGKKCELKPFPKDHLEDAIILATVNDMLTDEMIEKLTVRILEVQEQENADDPVVGLRRRLDSNKKRQRNLLDAIEEGGARGLVSRLAALEEEEEQLVLEIQRAEIKRPRLTHEVVEAWLRSFRVGDVTDDDFRARLVDTFIARVELRNDEALIFYNIREKGPHSRVRVRPEWWSRRESNPCPKAYSLSFYECSLFFDIPSAPRE

SEQ ID NO: 12451 - protein, 483 aa, synthetic construct
MKQKITAPPADPVVDLVDLYIRVSTTEQALEGYSVAEQESRLRRYSEAMGFRIHKVHIDAGFSGASLDRPAIKEVIRDIQSHLVSKVIVWKLDRLSRSQKDMLVMLEDVFLANDCDFISMMESFDTSTAFGRAIVGILAAFAQLERENIKERTTMGRRARLAKGHYNGSRPPLGYRFLEGSNDLKVEPYEANMVHEIFSSFLAGQSINAIAATMQRKYPTTRTWNNTMIRRTLKNPVYMGKVKDVDVIRDGIHEPLISESEFVMANAVLSHNREIKKQSCRSNSLLTGLLYCGDCGARMQPRQIARGYPLRRYVCYSVSRTNKSMIRSDHCTNRLHPYTLEELDDIIIGEIRKLAADEDYLRAIIREDAGPILDESELLKDRLSEIDKQTDKLLNLFQIGVVDLSQIEQRLADLKQEREALKERLERTAPVVQMDIQKIQSYADAFQEALDSGDAECQSSIIRLLIDKIVVLNEDIEIHWTFC

SEQ ID NO: 12452 - protein, 492 aa, synthetic construct
MRLDGYIRVSRVGGREGDSFISPDVQREQIASWAKLRGVEIAAWQTDLDQSGGKLSRPGLDAIMSRVRSGETGGIVVAKLDRLSRAGVADALNLVEEISDHGGQVAAVDLGIDPTTPFGEFGLTIMLALARMERRRITENWAYARARANKRGVYQARAPFGYDKGEDGRLVPNEDAAHVREIYARRSRGTTWQDIARWLNDEGVKPPDSKQWVRGTVKDLAANKAYLGIAYHGEYVNESAHEPLVTRALFEAAKGKAFNPTQGKQPNLLSGIMRCAGCSYCLSPGMTGSPGKRTRQYWCKKKHGSGTCPTGGSIRAEPLESWVVEQFFSYIDTPVFEGAEQQGDYDALSQRLEQAQARLDELAQDVEAREVMGRETWLSAIRSHKDAVALAERACDDCRRKAAGVSVPVADLREYWSKLSTDEQRTILRQTIDAIMVRNVGRGNVVPVEERVRILWRGQAPADLPRQGQKASIREFVFAPDFAPDDIGVPLA

SEQ ID NO: 12453 - protein, 464 aa, synthetic construct
MSSSYFRPQPELYGLRVVKYIRCSHEGQVLHGDTLEAQDTLLNEFIEVNHMVLVDTFVDEALTARKRFTKRKEFVRLLDGVRTHSFDLILFTKLDRWFRNISDYHKIQEILDANGVQWKAITESYDTTTTNGRLHINIRLSVAQDECDRDSDRIKDVFAYKLKNKSYISGRLPRGLKLDADKHIIHDPEWKQWALDMFDHFESSGSIYSTFLFLTDKYGPLLRYDGVSRALKNPLYKGMYRDDPEFCDPLIDPERFDRLFDLAKKNVRQRKTRRYYIFTGLLVCSSCQHNLVPYTIPHTLADGTHKDYVSYRCGYHSSSRLCDRSRTYREEYIEQYLLDHVRPALSRYMAEYDVVSSSALKKDPAAEAAKIRHKLEKLYDLFLDDLIEKDLYRQKYDELQAQLKDCLAVPSTPVRDFSAVQELLSKNWEDMYCTFSKTEKNVFWKSFVESIIVYEDGSMDINFL

SEQ ID NO: 12454 - protein, 581 aa, synthetic construct
MNTVIYARYSAGPRQTDQSIEGQLRVCTDFCKQRGLTVIGTYCDRHISGRTDERPEFQRLIADAKRKKFEAVVVYKTDRFARNKYDSAVYKRELKRNGIQIFYAAEAIPDGPEGIILESLMEGLAEYYSAELAQKIKRGMHESALKCQSTGSGRPLGYRVDEQKRFQIDPESAQTVQTIFEQYIKGESNAAICELLNSRGLRTAQGKPFNKNSINRIIKNRKYIGEYRYHDIVVEGGMPAIISKDTFNLAQAEMERRRTRKAPKSPKAEYLLAGRLFCGHCKGPMQGVSGTGKSGNKWYYYYCGNTRGKNKTCDKKQVSRDRLERAVVDFTVRYILQEDVLEELARKVHAAQERQNDTASEIAFYEKKLADNKKSIANVLRAIESGAATQTLPARLQELENEQAVILGELSFLKGKHLAFTEDQILFALMKHLEPYPGESEQDYRRRIISDFVSEVYLYDDRLLIYFNISSEDGKLKSADLSNIEGSEFDEGLVSSTNLPHRFCTMRRFLCLKNFGRPCRAPNPEVGCEPGGVINVLFENPSVPRFFLCILQSSAGKCIAFMPPSRKFLQKFPHHRRLTQP

SEQ ID NO: 12455 - protein, 482 aa, synthetic construct
MKAAIYVRVSTMEQAEEGYSLDEQVDKLKKYCEIKGWNIYKIYRDGGFSGANTDRPGLSEMINDAKLRAFDTVLVYKLDRLSRSQKDTLYLIEDILAANDIAFVSLNENFDTSTAFGKAMIGILAVFAQLEREQIRDRLLMGKIGRAKSGKAMAWGVPPFGYVLPESNREKYEIVPVEAEIVKKIYHDYIAGKLVAKICDELNAEGHIGKREPWVHANMKRTLTNPVYAGFIRYRGEVFEANHEPIVSKETFDLVQEQIELRQTRAYQKFNNPRPFQAKYLLSGLIKCGICGARFEVIQYKPRADGSRIRYYKCVSYSPKNHAPSMWKNSDGCTSPKYYLDDLEKELLSELEKLRDDPSLITSYVSKTNQIDVSGLKKRLKTLNNQLKKLVTLFIDNDFPKDVIESKKKIIMDEKKLILDKINEAESIKPEVSTNEVIDELGQIKISMFDLDYEEQKRIARKLIKEIILYPDKMEIHWAFAI

SEQ ID NO: 12456 - protein, 514 aa, synthetic construct
MRRKKVKGGNRLVAYYRYSGGSGQTEQSIEGQRRDCENYAKLHGLTILHEYIDRHISGKTDDRAAFQQMMNDGDKGAFDMVICWKTDRFARNRYDSAVYKKRLRDNGIEILYAAESNVEGAEGIIIEGLMEALAEYYSAELAEKMRRGMRESALKGQAINRCRSLGLTTDENKKYVIDEKTAPTVRFIFEHYAAGESSTSIVDQLNAKGLRTSQGNLFNKCSIPRIIQNEMYRGVYTSKAYNVRIEGAIPAIIDDDLWKRAQAMMKTNRQLKAKYEPKAEYLLSGKLFCAKCGCTMKGVSGHSGGNDEVYRYYACSNPQCRKRNIPKDDLEGKVIRSICDHLLQPETMELLAETMVDVQKADMEKPNAERDVLEQELWDVRRRSKNIMDAIETGSANPQLVARLDDLTQQENTLTYQLSTMEAEKPLLFTKEQYLFLLQQFYAQPTEQDDAYKRRLINTFVTNIEVSDSELLIYFNISEETENKNKNAPQLNFDKSSSTEKRLVRVARIELTAS

SEQ ID NO: 12457 - protein, 502 aa, synthetic construct
MEIQIREGNSRQKRKLKVCAYCRVSTDADEQENSLENQIKHYEEAITSNPDYEYAGVYSDFAISGFKEKRPGLQKMLADARKGKIDLILTKSVSRFARNTSIVLEATRKLKELNVGVFFELQNINTLSGEGELMLTILAAFAQAESESGSVGAKMVYQRKYEAGIPVQYLERSFGFKKDERGVYIADEEEAVWVRKIYEMAADGYTPASIKRHLNENGVKTVGGAEWIDSTVFRLIENEIYKGDYIMHKHFVNEERKLVRNRGEVDAWYIEDDHEAIVSPELWQKAQDALEAKRDYLAESSVIEEFTEENYPYMNKIFCARCGHPLYKRIYSNGNRLNWGCSGTKRYGKSFCEGINIPDGVLRGAWNFDENMYIGEKPTDKGKKEFTYLKEASWKRRHKKKEPEPIPENTETEYPYREKIFCGLCGSRLVRHVNTKSHKVIWVCNGRKRKGKDFCDGTRVPDTIIKGWGEIKKDIYIQRKDDKNGKKRYSYTSKKPKGADRA

SEQ ID NO: 12458 - protein, 573 aa, synthetic construct
MAYNAQNKTGARVAIYVRVSTLHQIDRDSLPMQKQDLLAYAKLMLNTDDCVIFEDAGYSGKNTDRPKFQEMMSQMRAGAFTHLLVWKIDRISRNLLDFATMYNELKTLGVTFVSKNEQFDTSTAMGEAMLKIILVFAELERNMTSERVTATMISRANNGLWNGGRIPYGYDYDYETHEFSVNEEESKVVILMHDMYEQERSLVRVVRELNERGYRSRAGNLWSPVSLLIILRNVFYCGDYRYNMLKEGDRQKVKDESEWVTVENHHVAIIPKDQKERIIATLDSNSKLCKQRNIYKSSKHTHVFGGLIYCGSCGKPLGSTPGNLTRDGWHYSKYTCPTRRKSVTLCTGKSTSDPIIGEFVFNYILNMLNAQNDFDKISSPEELEKLLLIGDTFAYIDHIESNGLNDLFNVLSSGTVKGAVFGKGASLPTKKATVEPEVARLRNEKQKTERALDRLRSLYLYADEAMSEAEYMIQKNKLEETLEDINDQIGMMNTDSWQQSVSDEEFIQRASEFIIAQKLSGRKYVNYKRLAMSVDSEVLKNFVVSIIDSITIQDGLVSNIVFKNGLCHTFIFR

SEQ ID NO: 12459 - protein, 514 aa, synthetic construct
MRKKKVKDGNRLVAYYRYSGGSGQTEQSIEGQRRDCENYAKLHGLTILHEYIDRHISGKTDDRAAFQQMMNDGDKGAFDMVICWKTDRFARNRYDSAVYKKRLRDNGIEILYAAESNVEGAEGIIIEGLMEALAEYYSAELAEKMRRGMRESALKGHAINRCRSLGLTTDENKKYVIDEKTAPTVRFIFEHYAAGESSTSIVEQLNAKGLRTSQGNPFNKCSIPRIIQNEMYRGVYTSKAYNVRIEGAIPAIIDDDLWKRAQAMMKTNRQLKAKYEPKAEYLLSGKLFCAKCGCTMKGVSGHSGGNDGVYRYYACSNPQCRKRNIPKDDLEGKVIRSICDHLLQPETMELLAETMVDVQKADMEKPNAERDVLEQELWDVRRRSKNIMDAIETGSANPQLVARLDDLTQQENTLTYQLSTMEAEKPLLFTKEQYLFLLQQFYAQPTEQDDAYKRRLINTFVTNIEVSDSELLIYFNISEETENKNKNASQSNFDKSSSTEKRLVRVARIELTAS

SEQ ID NO: 12460 - protein, 525 aa, synthetic construct
MARSAKKIEYAPAEQIGVIYARYSSHNQKEESIEQQIAECTEFAEKNGIRIIGIYADKAVSGRSDRRPNFQRMMRDAEKRHFQIVVAYKSNRIARNMLNALQYEAKLDLFGIKTLYAKEEFGNTAAGRFALRTMMNVNQFYSENMGEDIKRGMVDNANECKVNGMLPLGYVKSKEGKYAIAPDEAAVVREIFDSVLKDVPVAEIARSLNQRGIHTKLGREWNKNSFHIMLKNDNYIGVYRHSGVVVEDGIPPILEKEVFAAVQEKLANKKKTAGRRSANGEYLLTGKLFCGYCGSYMIGVSGTGENGTVHNYYQCQKRHAEGRCEKKNVRRDFIEKLIARLTQDYILQDDTIEWIADSTMSFQAMARRESGVAQLERDLADNRKVAKNIMAAIEQGIITETTKARLLEVEGTIHDLERSLSIAKAASQPIERERVVFSLEQMREGNVGSKDHQKKLIDTFVKSVTLWDDRIQIDYYHTPGKHKFSYSLEELTSKAENESNASDVRTDSLELHHQAAPKKMPLRKA

SEQ ID NO: 12461 - protein, 528 aa, synthetic construct
MNNAKRVTVWEPIDIQAMCEEESEIPKLKVAAYAHVSTEQDEQQSSYEAQVDYYGKYIRSNPAWEFVGIYADEGITGTNTKKRDGFNRMIADAKAGKIDLILTKSISRFARNTVDTLQTVRELSTLKIEVIFEKEGIRTLDKQCEVMLTIMSSLAQEESRSISENVRWGMQKSMQDGNISLPYKRFLGYKKGEDGRPEIVPEEAEIIRDIYRMFLDGKTIRTIADILTERGIKTPGGKDRWSVSTVKSILSNEKYKGDALRQKTYTVDYLSKTVRKNNGEVKQYYVSNSHEAIIDEDTFNLVQAELERRSNFRSALRDNSIFSTKIICGECGYFYGRKVLHSNSKKHRKVVWYCNHRYDGDEKCASPSISESDIKKYYLEALEKLLSNKDSYITECQERLENEDVLVQLKETRLQAEISLENLMVEIQGLVHENARKSQDQQKYRAKFNKFVQQIDEQKKRMAVLKAEELKLVGMREKLHRFIETLKNCKDATVFKEQEWNNLVERAVVKTESLDFEFKNGERIKITI

SEQ ID NO: 12462 - protein, 574 aa, synthetic construct
MSKRESKSGQKCLAAEQIGVIYARYSSHNQKEESIEQQIAECSDFAAKNGIRIVGIYADKAVSGRSDRRPNFQRMMRDAEKRHFQIVVAYKSNRIARNMLNALQYEARLDLFGIKTLYAKEEFGNTAAGRFALRTMMNVNQFYSENMGEDIKRGMVDNANECKVNGMLPLGYVKSKEGKYAVAPDEAAVVREIFDSFLKDVPVAEIARSLNQRGIRTKLGREWNKNSFHIMLKNDNYIGVYRHSGVVVEDGIPPILEREVFAAVQEKLANKKKTAGRRSANGEYLLTGKLFCGYCGAYMIGVSGTGENGTVHNYYQCQKRHAENRCEKKNVRRDFIEKLIARLTQDYILQDETIEWIADSTMSFQAVARRQSGITQLERDLADNRKIAKNIMAAIEQGIITETTKARLLEVEGTIRDLERSLSMAKAASQPIERERVVFSLEQMREGNVGSKEHQKKLIDTFVKSVTLWDDRIQIDYYHTPGKHKFSYSLEELTSKVENESNAADVRAESLEVHHCRRELHRFTTAFLLTAAPSRLYGTIKKTQESNSCVFFACIDGCVPQCPARLGIVWSSKR

SEQ ID NO: 12463 - protein, 509 aa, synthetic construct
MPEALNAVIYARYSSDRQTEQSIEGQLRECYAFAKANDIAVIDTYIDRAISGKTDNRPAFQKMIEDSAKRQFQAVIVYRLDRFTRNRYDSAIYKARLKKNGVKVLSAMENLNGSPESIIMESLLEGMAEYYSVELSQKITRGMRENALKGKALGGQRVLGYKVNSDCYFEIDETTAPVVVDIFKLYSSGKTVKEICDILNARGVKTARGGAFNKNSLHTILTNKKYIGIYKTKYGEIVGGIPAIIDKELFEMVALRMEQNKKAPARAKAEINYLLSTKLFCGKCRSAMVGESGTSKTGKKYYYYACVKKKREKACDKSNVKKDWIEDLVIQRTVTDILKDDVIDKIADRLVELQKAEAAESGTMLYLENSLAEIQVSIKNIMTAIEKGIITESTKTRLTELEDEKRNVEIEIAKESIARRIISREQIIYWISSFKDGDITSEKYRQQLIDTFVPAVFVYDDKIVITYNYSGENNTATISDLDLSSPPLQSNPNIFVTLDVFGLVVQIER

SEQ ID NO: 12464 - protein, 473 aa, synthetic construct
MRAATYTRISRDYAGEGHGVERQALDTQALCDTKGYEVVARYEDNDVSAAGAVKRERPSYNSMLEAAKAGEFEVIVAYSNSRLTRRPRELEDLIDLHQNHGIRFDTCVSGQDDLSTADGRMVARIKANVDAAEAERTAERITRQKAGRAAAGLKQGGRYRVLGYSRTWEVIEDEAQLVREIFSRRAAGESSSAIATDLHSRGLETTAGKPWTGATIGKILSRTEYAGILTSNGKVVGKTAFGSIVDEATFEAATALKTAAARPGMNARRHLLSGFLVCSRCMTGLKGNGLKDRPSYRCPSPVTDPTACGSTSVKMPDTDAAIFNAAWRKFQEAPVAPKADERNFDAEIAAIDKRLEDIRSMFTSGDLALEDVQPMLKAEREARSALVKEASEVVTLDAISQTFINGMVDFYGMNLSQQRLWIANKVKSVIVHPTTRGGRAGYDVRRLEVFYTDGTSERLTAPKSVDRIKVEQV

SEQ ID NO: 12465 - protein, 463 aa, synthetic construct
MRRKTTAPVEKILLRVAIYIRVSTDKQVKDGDSMRDQLATGQKYIDSHENMILVDAYIDDGISGQKLKRDDFQRLIDDVRAGRIDLIIFTRLDRWFRNLRHYLNTQDILDKHGVSWTAIEQPYFDTSTPHGRAFVNNSMIWAELEAQNDSDRILGVFDDKVDNGEVLSGSTPLGYTIVNKHLVPDDDAPTAVAIFQYYRKTGNLSMTLRYMESEFGLVRSAASLKNMLTNTKYIGEFRDNKNYCPAIIDRDLFFDVQRLLKINIKSGKKHDYIFSGLVVCDDCDHIMSGCQQRARGRVRADGTRIIYKYSVYRCRQGVNLHRCPNRKLVFETTLEKMLLERIRPELENYIAEYEVANLPALRTDAKRRSVEGKMQKLKDLYLNDLITMDEFKLDREKLLMQLEKINAEDSRPVKDLSYLKNFLKMDFESVYDSLSIPERRELWRSIVKEIRVDHDKNIHIIFL

SEQ ID NO: 12466 - protein, 474 aa, synthetic construct
MQHIAIYIRVSTDEQAEHGYSIEIQKQKLEAFCISQGWDYYKFYIDDGFTGTKMERPALKRMIRHIEEGNVSTVLVHKLDRLSRKQKDVLHLLEDVFDKNNVTFKSSTEPFDTASSFGKATIGILAVFAQLERDMIVERMTLGRRQRVDAGKWYGGRIPFGYIWNKEIEMLEIVPEEAMIIKQIYKLYLQGHSRLSIAEWATSRTNKRTIDHNIVMEILKRPVYSGKFKNSGRIVQGKHEAIIPQEMWDAVQRETEKRKEGQTPLGEYLLTGLLKCGVCGGPIVHVKRVTKRSGKTYAYELYACKKQHVRVKDRTGTCTLGYPRRELVEKYVIQQIKSLGTNPKKVNDLLRGDDDSSDAKRHIDTISDSLKKIDVSLENLYDAIESGDIKASSVRSRIKKLEEQRESLENDLDEMLDNSTRKHDKKIFIDTITQIGLAWDYFDEDEKKAAIRKIVNYVTLTGKTSDPKIDWLLA

SEQ ID NO: 12467 - protein, 485 aa, synthetic construct
MPTSDLKIAAAYIRVSTDDQEEYSPDSQVRLIREYARKNGYLLPEEYVFQDDGISAATARKRPAFNRMIALAKEKERPFDAILVLMFSRFARNREESVLYKGLLRKQGISVISVKEPAMDGPFGTLIESIIEWFDEYYLINLSAEVKRGMSEKFLRGEAMGTAPFGYRIDSANKTFTVDPERAEIVCDVFRSYADGAGLRDIAVQLGDAGITTRRGNRPDNRFVEYMLRNPVYIGKIRWTPGHKTRYSRVHIADGVEVVDGKHPPIVSMDLWEAVQRRMDQRKAAYGRYQRQAPAAWMMRGLVRCSACGATLIMAGRSSSCPFLQCHSYAKGACHTSHSLSLRRANAAVLTGLRRSVGTLTFHMVPHLTSAPSRAADYGRLLEQERRRLARCKDAYQAGVDTLEEYRDNKARLEERIRRIEEQAASAAAAPESFDKAAYGKKAADILRFLETSADEGAKNEVLRSVVDHITYEKASRHLAIYFYT

SEQ ID NO: 12468 - protein, 464 aa, synthetic construct
MARSVTVIPARSQKVRTGHKAVQEKKIRVAAYCRVSTDQEDQLHSFEAQVEYYTKYINEHENYEMAGIYADEGISGTNTKKREQFKKMIADCEGGKIDLVITKSISRFARNTQDCLAYSRKLKNLGIGIIFEKENINTLDSTGELLFTILSSLAQDESRNISENCKWGIRTKFKNGEMHLNTFKFLGYDKDENGKLVINKEQAKTVRRIYRDFLIGINPAQIAKELTEEKVPGCLGQTKWYPSTVIGILKQEKHMGDALLQKTYTADFLTKRQVKNNGEIAQVYVKDSHKGIIDKETWNAVQEEFERREKFMQKHETDRYSYGSECYPFCEKIFCGECGSLFTRHSWKSRGIIQWQCKNHRKDGKVACTNAYVDNADLEKGFVKAFNRLVGEREKHIERWNSMKLDGTPLEKIRAGQMMEATESGQLQQYVPEAAQLVLEEITIFGAKKYEFAFLEGSRVKVSV

SEQ ID NO: 12469 - protein, 502 aa, synthetic construct
MEIQIREGSREQKRKLKVCAYCRVSTDADEQENSLENQVRHYETVIKANPNYEYAGVYSDFAISGFKEKRPGLQKMLADAEKAKIDLILTKSVSRFARNTSIVLEATRKLKELNVGVFFELQNINTLSGEGELMLTILAAFAQAESESGSAGAKMVYQRKYEAGIPVQYLERSFGYTKDERGVFVADEAEAVWVRKIYEMAADGYTPASIKRYLNENEVKTVGGVQWVDSTVFRLLENEIYKGDYIMHKHFVNEERKLVRNRGEVDAWYIEDDHEAIVSPELWQKAQDALAAKRDYLAEGSVIEEFTEENYPYMNKIYCAKCGYPLYKRIYSKGNRLNWGCSGTKRYGKIFCDGINIPDGVLRSAWHFKENTYIAEKASDKGVKEFTYLKEQSWKRRHKKKQPPAIPENTEAEYPYREKIFCALCGSRLVRYVNPQSHKVTWVCSRRKRKGKDACDGTRVPDTIIKGWGEIKKDIYIQRKDDKNGKKRYSYTSKKPEGADRA

SEQ ID NO: 12470 - protein, 560 aa, synthetic construct
MALLPRKPAKHPAKPKRGKKLEIEEPGVLYGRYSSHNQKDISVEQQFEKGYELAAEYGIRIIDTYADRAVSGRTDKRRDFQRMMTDAAKGKFRYVIAWKSNRMGRNMLEALINEARLQDLGVRVLYVEEDFDDTAAGRFAARSMMNVNQFYSENMAEDIKRGLYDNAANCMVANGHLPYGYKADETLHYAIDEPKAAVIREIFARVSCGEAFVDIMASLNARGIKTSYGRPWGRSSFQKILSNERYRGIYIYGDVRKEGGIPRIISDELYFKVQEVITTKKNPQGRHRVNGDYLLTGKLFCGHCKSPMTGVSGTGRSGNLHYYYVCQKRRTEKTCDKRNVRRDEIELQVAQAIKDYALKDDVIEWIADSTVAYNERKEAESKVGILEDQLAGTEHGIKNIMSAIEQGIITETTKSRLVELESERAAIKANIAAARADIVTVSRDDIISGLEMFRDGDVHDKKYQARLFDTFLVAVYAYDDDLRLVFSFSGNKNTIQIPIESAVNAVENNEAECSFKLCSAPPQKETSDRMSLFHFKSRGVLAGAPHPFLHFLSAQSCLWD

SEQ ID NO: 12471 - protein, 535 aa, synthetic construct
MAEIQRIVRTIPATFAKTTSMFTKMVNVGAYARVSTKTEEQEDSYERQVNHYSNYIKHHEGWNFVDIYADEGITGTRADGRKDFQRMMNDCRLGKLDKILVKSIARFARNTVDALNAIRELKELGISVYFENENIDTLSPGGEVLITILAAMAEQESRTISTNVKWAYQKKFQNGDISLNYKRFLGYTRDENHNLVIVPEEAEVVKRIYREYLHGYSVSYIAKGLTRDKIPTPSKKQVWYNSVIISILRNEKYYGGLICGKTYKPDVLSKKRYKNEGQVERYYIENSHPGIVSRKEFDMVQAEMLKRKTESGCSDTNQGRYSSLYPFSKKVICGECGAFYRRHAQYCRGEYVRTWVCNTHKTKGVAWCSQTYIREEELEWAFVAILKRLIQNYKEITDTLEENIKSTLKQDVDDELRTILDKIEERQNEMLELLREKRNGNVTPEQYNQRGSEIEQAIQDLTKKRVALEEKSSLNKLAILRVEQISAALNTPEDIEKFDDELCRSLVDVIVVRNNYTLDFHFKCGITETITIKRA

SEQ ID NO: 12472 - protein, 494 aa, synthetic construct
MKKAAAYARVSTTGRAQEHSFEFQSKYWNQTLGNSEEYEYVGLFADKGISGKLMNRRPRFLALMELCDRNGVDIIFTKSVQRFARNTEELLKIVRKLREKGIAVYFEKENINTLDADSELYLTIAAALAEEDLTRYSNNVAWSVKDRFQRGEMILGAKVFGYRKTKENSLVIYPQEAQIVKEIFETYVRGDISTVQIAKELNAKKIPSPSGGEWRNSQILYILRNEKYYGDMILQKTYMDGATKKVNRGEKERYYVEGSHEPIVSREVWDRAQEVIARRANPKLVGAAQKNYPFTGIITCECCGSVYTHKVNNSGTISQANFWKCRQALHKGVAYCGNPGIKEQVLNDLFVECYNEFITMGYYKTNMDTGEDEQRLKALIETEKELTHLMMNGLLSRIQYAAEQQSVRTEIQKISGKLQELRSQEVRGSDFNTIGEFDEQKVYAFIKGVRIKNWTVTFEFYNGIEISRTYTNGQPGNIRDWKLKQKLRREQENG

SEQ ID NO: 12473 - protein, 434 aa, synthetic construct
MERVVERVDALIPAQPKALRVCAYARVSTGKDAMLHSLSAQVSYYSKMIQSHNGWMYCGVYSDEAVTGTKRERAGFQHMIEECRQGNIDLVITKSISRFARNTVTLLQTVRELKILGVDVFFEEQHIHTQSSDGELMMTILASYAQEESLSASENQKWRVRKAFENGEIINLRFLFGYDITPDGIQVNEKDAAIVREIFERFNNGESMSSICRDLDTRGHKGVLGGTWCAERMRNTLSNEKYLGNALLQKQYRNNHIEKKLLPNRGELPMYYAEGTHEPIIDQATFDKAQERLRLLAQQAANRKKPTRSVFSGLIHCGLCGNTYKRVTYRKKHYWNCTTFQTKGKSECAAKRIPEETLEVLTCEVLGAVSFDPDMVRSKITAIRAEKNNVVVYCMDDGSEIVKRWKDRSRAESWTPEMKEKARQRALQARRKKK

SEQ ID NO: 12474 - protein, 529 aa, synthetic construct
MSRTVARSVTVIPPTINPLTHLSRVAVQKRRVAGYARVSTDSDEQFTSYEAQVDYYTQYIKRNPEWEFVKVYTDEGISGTNTKHRIGFNEMIADAMSGKIDLIVTKSVSRFARNTVDSLVTIRKLKEKGVEVYFEKENIYTFDGKGELLLTIMSSLAQEESRSISENVTWGQRKRFADGKVNLPYKQFLGYRKGADGFPEVVPEEAIVVHRIYTRFMEGLTPGAIAKELTADGIPTPSRKQCWQTSTVESILQNEKYKGAALLQKCFTVDFLTKKRKVNEGEVPQYYVEHSHEPIITPEEFDKVQTELARRKHISRQYSGKSIFSSRIVCGDCGSYFGSKVWNSTSKYRRVIWQCNGKFKGEHKCETPHLDEETIKVQFVSAFNAIIESKDNILEDCRLMQTTLTDCTGIDAEIESLLEEIEVVTELTKRCIAENSQTAQNQEEYAARYNGLVERYEKAKARLEQLRTTKAAREAQTEAIGAFMFEVQELDALTEFDEKLWLTVIDTVTVHADGRMTFKFQGGKTLTSY

SEQ ID NO: 12475 - protein, 464 aa, synthetic construct
MARSVTVIPARSQKVRTGHKAVQEKKIRVAAYCRVSTDQEDQLHSFEAQVEYYTKYINEHENYEMAGIYADEGISGTNTKKREQFKKMIADCEDGKIDLVITKSISRFARNTQDCLVYSRKLKNLGIGIIFEKENINTLDSTGELLFTILSSLAQDESRNISENCKWGIRTKFKNGEMHLNTFKFLGYDKDENGKLVINKEQAKTVRRIYRDFLIGINPAQIAKELTEEKVPGCLGQTKWYPSTVIGILKQEKHMGDALLQKTYTADFLTKRQVRNNGEIAQVYVKDSHKGIIDKQTWNAVQEEFDRREKFMESHGTDRYSYGADCMPFCEKVFCGECKSLFTRHSWRSRGIVQWQCKNHRKDGKVACTNAYVDNADLEKGFVKAFNRLVMDRDKHMERWQQMKSDGTPLEKIRAGQMMEAVRNEPLTRFVPEIAQLVLCEVTVLGAKKYEFFFLEGSRVKVSV

SEQ ID NO: 12476 - protein, 502 aa, synthetic construct
MEIQIREGNSRQKRKLKVCAYCRVSTDADEQENSLENQIRHYEEVITSNPDYEYAGVYSDFAISGFKEKRPGLQKMLADARKGKIDLILTKSVSRFARNTSIVLEATRKLKELNVGVFFELQNINTLSGEGELMLTILAAFAQAESESGSVGAKMVYQRKYEAGIPVQYLERSFGFKKDERGVYIADEEEAAWVRKIYEMAADGYTPASIKRYLNENGVKTAGGAEWIDSTVFRLIENEIYKGDYIMHKHFVNEERKLVRNRGEVDAWYIEDDHEAIVSPELWQKAQDALEAKRDYLAEGSVIEEFTEENYPYMNRIYCARCGHPLYKRIYSNGNRLNWGCSGTKRYGKSFCDGINIPDGVLRWAWHFDENMYIGEKQTDKGKKEFTYLKEASWKRRHKKKEPEPIPENTETEYPYREKIFCGSCGSRLVRHVNTKNHKVIWVCNGRKRKGKDFCDGTRVPDTIIKGWGEIKKDIYIQRKDDKNGKKRYSYTSKKPKGADRA

SEQ ID NO: 12477 - protein, 520 aa, synthetic construct
MKRITKIVENASLGKKKIRVAAYCRVSTASEEQLVSLAAQKAHYENYIKSNDGWEFAGLYYDEGISGTKKEKRDGLLAMVAACERGTIDFVITKSISRFARNTTDCLELVRKLLDLNIYIYFEKENINTGSMESELMLSILSGLAESESVSISENEKWGIRRRFQNGTFIISYPPYGYANVDGEMMIVPEQAEIVKQIFADTLAGKSTHEIAKGLNEQGVVTKKGGRWTPGTINGIIGNEKYTGDVLFQKTYTDNSFNRHQNRGEVDQYLMQDHHEAIISREEFERANAVLKQRGREKGNGHDTGRYQNRYGFSGRIYCGECGSKYKRRLHYKPSGQYAAWTCVTHLADKERCSQKYITDDALKLAFVTMMNKLVFGQQMVLRPLLQSLRGLNDQSRLLKIEELETAIEKNREQKQVLTNLMASGYLEPALFNKESNELAAEAETLRQEKEGLMRSVNGDMVKVEELQRLLRFTSKGTMLTEFDDAFFLSFVERVTVLSRKEVAFELKCGLSLRERLVEP

SEQ ID NO: 12478 - protein, 497 aa, synthetic construct
MTIAAIYARFSSDRQRDESIEIQVEHCEALIEREGWTLGEIYTDYAKTGTNDKRPSFKRCIEDGKAGAYDVLVIYKLDRFARNVEISRRYKRELRDAGVRIVSVREGEQRDTPDGLLQEGMGELFAEYYSRNLSVVVRDGIRKNAENCKASGRRIFGFAVDASDHFVEDEVQAPIVRRAFELYFSGRSSNQISEWMADLGFLTKRGNSWSPKAVLNMLTNEAYIGVYDYAGVRVEGGMPAIVDRGLFMAVQEQMRLRKESKRKNVVNDFLLTDRMFCLECGKPMCGTSGTSHTGKKYSYYGCVNKDGCKLRVNADNVEDAVLEELSKLLHDEQTIDDMVASVVEYAREQQSMTDMYREELSDCLSRKNNLIKSLEEGIPASAVRDALTALEDRIEELEGLVAFEDFKVEKLRDEDSIRSFVREIVDRAEKDPAKENLLISTFVKAVYANKETIIVVFKVSGDDGDRYDFEEIKAIENANPAELPSSDRVRKLNFWSG

SEQ ID NO: 12479 - protein, 646 aa, synthetic construct
MKEIIKIENTTFKIKKINKLRVAAYARVSTEKDEQKISIEAQKEYFKYFILNNPKWEFAGLFVDEGLSGTSYHKREGFNQMIDKARNGEIDRIVTKSISRFARNTVDTISIIRELKAKGISVFFQKENIDTLDAKSEFVLTLMSSFAQEESRSISENITWGHRKRFRDGKVTVPFSSFLGYSRGEKGELVVNEQEANIVRAIYYLRVIGCTINQIVKELETNNVLTPQKKEKWNHSVVLSIIRNEKYKGDALLQKKFTVDFLTRKQKVNEGELPQYYVENSHPPIVLRDTHEYANKLLETDAKSENKKTITSALSSKIVCKECGDYYGRFKIHPEWHGGRWAWRCRNKYSRTSKCKVRHIYDDELIKSISKAIMEYIKTRDDLIKEVEDISKVSINSYLTENKSFMNYVLIDRTISPIIKSIYVNKNHVADIELIDGTVIKDIVIEGTCIKVGRRLDKKYLKRIKYQDSFKKWLELRYLKNQVRNILQKVNQVNRILEIKDAKTYINELEKQDDFSKYQSEVKKDYIYAIRLYFEFLYECIQDEIEDLGLTGFEWQRINWQQTTKEVDTSIDEFKEWLNESTEYSPTTQKNIIKKVRKAHRILSIANKTNYIYQLEKTKEYQCLSNKIQSVIKYSYKVYLRFITEK

SEQ ID NO: 12480 - protein, 524 aa, synthetic construct
MQKRVTTIPATISKFNKKPISEIKKRKVAGYARVSTDKDEQQSSYDAQLDYYTNYIKSRDDWEFVKVYTDEGISGTNTKKRAGFNKMIKDAMNGKIDLIVTKSVSRFARNTVDSLTTVRKLKEKGIEIYFEKENIWTLDSKGELLITIMSSLAQEESRSISENVKWGKRKGFSDGKVTVAYKNLLGYKKGENGELAIDEEQAKVVRKIYALFLKGYSERAIAKKLEEEGIKTVYGKSKWYSNIIHSVLTNEKYKGDALLQKYYTVDFLSKKQQRNNGEIQQYYVKNNHEAIIKPSTFDRVQRMIEQRKKLNIRTSRISIFSSRLICGSCQSYYGPKVWHSNDKYRRTIWQCNCKFDKKCKTPHLTEDEIKEVFINAANQLFENKGELIKTHKEITKELFKTDVLEEKQAKLENEISIISELINEEIGKNSRFAQDQEEYERKYNDLVKRFETAKAKLDDVVEKIIDKNSKYDLINEFIEKLEGQDIITEFNEDLWCSLVESLTIHSKKEILVVFQDGTKIKTEL

SEQ ID NO: 12481 - protein, 413 aa, synthetic construct
MAKIEQVTPVRPVRVKLVNVAAYARVSTASQRQLSSIATQVSYYSRLIQSTPGWTYAGVFTDEGITGTTTGGRQGLADLMNLAREGGVDIVLCKSISRLARNTLDLLRIVRELKNLDVSIRFERENIDTATADGELLLTLLVSFAQEESASLSANVKWAIRQGFKQGKTNSFVLYGYRWDGQRFHIHEREAEAIRRIYTGFLAGTSPEKIVDQLNAEGFRSLTGKPLEPNLARRILENERYTGNQMLQKTFIPAIGAKREVKNTGELERYWVEDSHPAIIDMETFQQVQAELARRRRLGLAATPSLTTGCFTSRIKCASCGRNYQRKTRYRKAGAYKIWRCWGACLGKGNTCGPDLKETHLKQAVIKILALAKWDEEEIMSRLSCITVTKDQLTLTHDNHRQTVIALARLEGE

SEQ ID NO: 12482 - protein, 521 aa, synthetic construct
MATITAIPATKTRIHDSALSGFSPKRRVAAYARVSTDMEEQASSYQTQIDYYTTYIQSRADWVFAGMYADEGISGTSTKHREGFQSMIADALAGKIDLILTKSVSRFARNTVDSLTTVRQLKEAGVEVYFEKENIWTLDSKGELLITIMSSLAQEESRSISENVTWGHRRRFSDGKVMVPYSSLLGYKKGADGNLAIDETQAPTVRLIYQLFLDGSSITEIRAELQRRGILTPRGKTNWSTSTVRSILSNEKYKGDALLQKTFTADFLTKRIEVNEGEVPQYYVTGNHEPIIDPAVWDQVQYELATRHAANTAKIGLFASRLKCADCGAWYGRKTWASNTKYKHTIWRCNQKYDHAQPCQTTTLRDEQIQTAFLAALNQLAEQYRGQSHLLEVIEAMFNTDQLEAESARLDKKIRALASEIEALVAENQRVAQDQDQYLAKYTQLEAKYQKTLGHKQAIDADIAAKQAKATAIKTAYIQLADQPIQHFQPSQWTALIDHAVIGANEIRFVFRTGKEITVNL

SEQ ID NO: 12483 - protein, 521 aa, synthetic construct
MKTITKIDANQAAANSGKKLRVAAYCRVSTDSDEQLESLDEQKKHYENYIQAHESWNFAGLYYDEGISGTKKEKRSELMRLLSDCEAGRIDYIITKSISRFARNTTDCLEMVRKLLKINVPVYFEKENINTASMESELVLAVLSSIAENESVSISGNEKWSVKQRFQSGTYKLNQPPYGYRWNGEQLEIHSDEAVIVKRIFADFLSGKGVAHIARELDSEKISPARGKRWCQSSILRILKNENYTGSAVFQKTFTDESFHRCVNYGQVDKYLVENHHERIISKEDFVAAAALIDKHAAEKNVTKGSHKYQLRYCFSGKIICGECGATFKHRTHRTGGEPYEAWCCSNHIYNKESCSMKFIRDEDLKLAFVTMLNKLVFGHKLILKPYLLALRNSSTDSSIQRIQQLRLLIEQNTGQQETLTRLMANGFIDRALFGRELNAIMAQTDEYRTEIDMLSNSVTGDGAKLKETERLIKLVERGRMFTEFDSDLFAKLVDHIYVFSRGEVGFALKCGLTLKERIGE

SEQ ID NO: 12484 - protein, 521 aa, synthetic construct
MSNITIIPARPQRTNQQQSEAEKPKLRVAAYCRVSTDSDEQATSYETQVTHYTEYITGNPEWSFAGVYADDGISGTNTKKREEFNRMITDCMDGKIDMVITKSISRFARNTLDCLKYIRQLKDRNIPVFFEKENINTLDAKGEVLLTIMASLAQQESMSLSQNVKLGLQFRYQRGEVQVNHSRFLGYTKDENGRLVIDPEQAEVVRRIYREYLDGYSGDKIAAGLERDGILTGAGNPHWHTSTIAKILRNEKYMGDALLQKTYTVDYLSKKRIKNNGIMPQYYVENDHEAIIPKEIFMRVQDELVRRRLVKVSPNGRKHGFSSNHVFSQMIVCGECGELFRRVHWNNHGCRSIVWRCLSRLQSTGVVCHARTVNEEVLKKVVMQAFNELLRNKSAYQKRLRDNLAVVLCGYSDDEALEIDKRLAELQQELINHASRKEDYNDIADEIFWLREMKQKNFTDTAVRDEQVKRINELNDFISQQDTELTEFDESLARRWLKEITIWSDRITVELKSWMSIEIKI

SEQ ID NO: 12485 - protein, 626 aa, synthetic construct
MRNEKITPLYERLSRDDELQGESNSISNQKQMLEDFARRNGLPNPTHFTDDGISGTRFDRPGFLAMMEEVEAGRVEAIVIKDMSRLGRDYLKVGQVMEILRQRGVRLIAINDGVDSLKGDDDFTPFRNIMNEFYARDTSRKIRSVFKSKGMSGKHLTGTVIYGYLWDEKREHWLVDEEAAEVVRRIFSLTLEGYGPYQIACKLSADRIEIPVVHLARFNEGVNRSKPVKDPYGWGSSTIVNILKKREYLGHTINFKTRKHFKDKKSHYVSEDEWTIFENTHEAIIDQQTFDLAQKIRSNVRRYPNGWGEAAPLTGLLYCADCGGKMYVHRTNNGKRISQYTCSNYTKVPCGTLCPTQHRINESAVLTLVSDTLRAIAEYSRNDRTEFIHTVQETQVAQQSADISKKRRRLATAQKRAGELEKLICKIYEDNALGKLPDARYRALDAQYAKEQDALEIEIAELEKAVTGYEQSQKSAEKFIALIDKYENFDTLTNTMLNEFVEKILVHERARKGSQDTTQEIEIYFNFLGRYIPPALQPVPLTPEEQEELRKKEERKDRLHQNYLRRKANGKQKEWEERYTAKRKAQVEAAKAAIRAEDMEKGIFTTISQLPRQEPRKATLPASAAV

SEQ ID NO: 12486 - protein, 522 aa, synthetic construct
MKRYFAYIRVSTVKQGEHGSSLHEQRDAIAAFAQRHGISITEWFEERETAAKLGRLEFNRMLRLLKKGRAAGVVFHKIDRGARNLKDWSVIQDLTERGIDVQFVHEPIDMKSNEGKLTGDFLAVIASHFIRNLRDEVKKGMRGRLKQGLYPFRAPTGYLDQGGGRPKIPDPERAPFVRAAFDLYGSGRYTLLELCEELTRRGFRTNSGKEIFPNRLHDLLCNPFYAGLIAIRATGETYPGIHEPLIPMSLFQDVQRMLRGNGTAKVVTHDFVFRRLVRCRSCNRSLIGEQQKGRTYYRCQTKACPTTGFRQEAIDTAIEERFAPFTFTDHEIEDMRVMLREVIAERKGSAAELDRAGALRRENIEGRLSRLLDAFLDGTIEKPEYEAKKRALLVEQRLIEETLTERSRWSGDTGAEMLELLTSLSLSYKTGKADEKREMLKLTTSNLWVREKYIGVELLSPYQEAADLLVVRFGEPYCNRPRTRRERLKNLVEIMVDHDDREDEIKHGVKISRFGADGRIGV

SEQ ID NO: 12487 - protein, 514 aa, synthetic construct
MAKRKFNKGGEVRLVAYYRYSGGSGQTEQSIEGQRRDCETYARLHNMTIQKEYVDRHISGKTDDRAAFQQMITDSDKGAFDMVICWKTDRFARNRYDSAVYKKRLRDNGVEIVYAAESNIAGAEGIIIEGVMEALAEYYSAELAEKMRRGMRESALKGQAISRCRALGLKTDEHKRFVIDEKTAPTVRFIFEHYAAGESATSIVDKLNAKGLRTSQGNPFNKSSIPRIIQNEAYRGVYVSKSYDVRIEGAIPAIIDDELWERAQTMLKLNRQLKAKNEPKADYILSGKLYCSCGSLMRGMSGHSATGEVYRYYTCPNKNCHLRNIPKDDLEGKVMQSISDHLLQPEAMEALAEAMVEVQKADAEKPNAERVAIEQSLADVRRRSKNILDAIENGTANAQLCARLDDLSEQERTLNFQLSALEKEKPVVFTKEQYLFLLEQFLVEPSERTPEYGRRLVNTFVTSMVVSDSELVINFNVSEETVNKNKKASQTNLQKESSSGMRLVRVARIELTAS

SEQ ID NO: 12488 - protein, 579 aa, synthetic construct
MAYKAKAPDSGAEKDIRVAIYVRVSTVYQIDKDSLPMMKQDLTAYCKYVLNTEDYEIFEDAGYSGKNTARPAYQKMMAQIRQGNFTHLLVWKIDRISRNLLDFAEMYQELKKLDVTFVSKNEQFDTSTAIGEAMLKIILVFAELERNMTSERVTATMINRASNGVWNGGRVPYGYSYDKDTQTFSLDPSENSIYNLLVETYETSKSVVYTSRKLNDLGYRSRYGNLWSPIAVWTILRSPWYKGIYRYNYYKIPGRAAIKDESEWVVVENHHPASITPERFDKIQETLDRNARFRNAPGRKITKKTTHVFAGLVLCADCGSAFTASPGKRHVSGYHPSKYGCSNARKTSACHAKYTSDVVLGEFLLNYILNILNAQKNVDEISSTEELQSRLLCGSTFSSIDHVKQDDLDSLFTQLKSRPEKDPFIAVRSKAKPKVDPELKRMMNDLKKQRRALDRLNDLYLYSENSISEREYLVRKQQITDCIQEINDTIEAIAKENHEQSIDDNEFIKQASTFILNQKLADRQYVCYTKLAETLSPETLKAFFSSIIDSIIMRAGKIETVIFRNGLSQTFIYKEKPGK

SEQ ID NO: 12489 - protein, 548 aa, synthetic construct
MAKYAISIPKTPKAALYIRVSTDMQADKDSLPLQESDLRKLADLNGIKDIEVFCDAGFSGKNLNRPAFRSMMDRIRAREFSHLYVWKLDRISRNLLDFLELYDELKCYGVAFASKNESFDTQSPGGEAMLKILLIFAELERKTIAERVTAVMLGRANENKWNGGRVPFGYMPGPVTTDANGKKCKSWPVPDPIEAPIVRAIFELYLREKALKKVAAALNTAGYRSRKGTLWSDTTVRCILKNHFYKGEYVYNRQNPNAGRREDFYRSENDWVVVTGQHEAIVPEETWRRCNEMLSKNRSWLAPIGSLVSAQDKYIFGGLLQCAECGYTMNSKDRTRIHDHTHSSYYYCTGRWKAPAVCTGEHSGYASDRVLLPQILKLIARIIEACANAIKFASAEQLVSYLLNDNLIPGATGIEEAQRIYMIVRAHVKHIYGIEQANQYNPNALLVEQSQKEKEKQERALSRLKRAYLFDDGDMSEAEYFEQKAAIEGTIAKLEKQIKSLSGNDIGADEAYLAQLSKLIMIKKLQDTNSDFDYYKPVSYTHLTLPTN

SEQ ID NO: 12490 - protein, 433 aa, synthetic construct
MSGKITIVSKPPKLERKKRVAAYARVSSGKDAMLHSLSAQVSYYSDLIQNHGDWLYTGVYSDEAKTGTKDSRAGFQNLVADCRAGKIDMVITKSISRFARNTVTLLQTVREFKALGVDIYFEEQNIHTISGDGELMMTILASYAQEESRSASENQKWQIKRSFESGIPWDRTLMGYRMENEHYVIVPREAEIVRRIYNEYLSGSGYQLIAKRLNEEGVPSRFGGKWNQSAVSRILSNHTYTGNLLLQKTFRENHITKRKIFNNGELPKYLAEESHEAIVDEKTFQAVQEEKSRRAARFNKKSVPKKTYPFSSLMVCDNCGKNYRRKITKTGAVWVCGTYNSLGKAACASKQIPESTLQQVTADVLGQNDFTHEWLCHRIQHIRVCNDNTLIFYFKDGSEITRIWKDRSRSQSWTDEMKEAARQKTLERSKHNA

SEQ ID NO: 12491 - protein, 526 aa, synthetic construct
MPKVTMIPATVNSLTHLPKASVQKRRVAGYARVSTDSDEQFTSYEAQVDYYTRYIQSKPEWDFVRVYTDEGISGTNTKRREGFKEMIADALAGKIDLIVTKSVSRFARNTVDCLVTIRKLKENGVECYFEKEGIYTFDGKGELLITIMSSLAQEESRSISENITWGQRKSFADGKIHLAYKHFLGYKKGEDGRPAIVEEEAVVVRLIYRLFLDGKTQAGICRYLEDLEIPSPSGKAKWSKTTVTSILTNEKYKGDALLQKSFTVDFLQKKTKLNEGEVPQYYVEGSHPAIIEPDEWNHVQAEFARRKALGNAYSGKSVLSAKLVCEDCGGFFGSKVWHSTDRYRRTVWQCNNKFKGGERCLTPTVDTETVQQLFIKAYNQMMGNRKQIIEDCELMRKKLTDFKSLDADIERHLEETQIVAELVKAAVKDNAVTAQSQEAYLKKYESLTKRYETAAAELARLQNLRTLRSQKDKAVALYIRTLKKQPTVLSEWNDTLWTVMVEKAIVHRNSEITFVFYNGTKVKVRQ

SEQ ID NO: 12492 - protein, 515 aa, synthetic construct
MDQVGVIYARFSSHAQREESIEDQLRECHAFAERNGIRIVEEYCDQALTGKTDARPAFQRMVRDSAKGRFSIVITYKVDRFARNRYDSATYKARLKKNGVRVLYAKETIPDGPEGIILESVLEGYAEYYSANLAQNITRGLEGNALNCRTNGVVVLGYKKSDDDHYEIDETTAPIVREIFEKYAAGVKQMEICEELNARCLRTTRGGPFNKNSLVRILKNRKYIGEYHYMDVTVPGGMPAIISVELFEDVQQKLKRGRRAPSKDWSRADFLLTGKLFCGECGEPMVGTSGHGRSGRKYNYYICGAKKRRQGCKKENVAQDWIEEVVLTYTMEVVLQDDTIQEIADGVMDFLAREAADDGVLVSLEARLAEVKTSVKNLMKAIEAGIITKATTERMMELENERVELEDAIAIEKIKEPEIERDQVVFFLEKFRDGDLNDPAFRLRLVEAFVSSVYLWDDGRIDINYNYTGQGSKVSLDQAADIVSKIAGGDGSDLDSSGPLELNKITLCLLEFLLI

SEQ ID NO: 12493 - protein, 514 aa, synthetic construct
MNTVIYARYSAGPRQTDQSIEGQLRVCTDFCKQRGLTVIDTYCDRHISGRTDERPEFQRLIADAKRKKFEAVVVYKTDRFARNKYDSAVYKRELKRNGIQIFYAAEAIPDGPEGIILESLMEGLAEYYSAELAQKIKRGMHESALKCQSTGSGRPLGYRVDEQKHFQIDPESAQTVQTIFEQYIKGESNAAICELLNSRGLRTAQGKPFNKNSINRIIKNRKYIGEYRYHDIVVEGGMPAIISKDTFNLAQAEMERRRTRKAPKSPKAEYLLAGRLFCGHCKGPMQGVSGTGKSGNKWYYYYCGNTRGKNKTCDKKQVSRDRLERAVVDFTVRYILQEEVLEELARKVHAAQERQNDTASEIAFYEKKLADNKKSIANVLRAIESGAATQTLPARLQELENEQAVILGELSFLKGKRLAFTEDQILFALMKHLEPYPGESEQDYRRRIISDFVSEVYLYDDRLLIYFNISSEDGKLKSADLSNIEGGEFDEGLVSSTTSQKIRTLSSMVIRSDF

SEQ ID NO: 12494 - protein, 501 aa, synthetic construct
MIIREDAIYGRQSVDRKDSISIESQIEFCKYELRGGNFRKYTDKGYSGKNTDRPKFQELMADIRRGLIKRVVVYKLDRISRSILDFATMMETFQEYNVEFVSSTEKFDTSTPMGRAMLNICIVFAQLERETIQKRVTDAYYSRCQHGFHMSGAAPYGFQLEPTTIEGIRTKMMKPDPETADIAKLMFEMYSQPATSFGDIARYFADEGILIYGKEMTRGFISQLLRNPIYAQADLDMYEFFKSQGTVVVNEATDFAGTNGCYLYQGRDVQERKNKHLKDQILVLAPSEGLVSSDTWLRCRKKLMANKTFQGGRKAKNTWLAGKVKCGRCGYALMSVGNPTGVQYLRCSKRADSKSCDGCGTLRTREFERFLYGEMVKKLSEFQTLTAKRETVNPKLTALNMELARVEDEIEKLLNTLTGANAVLLSYANSKIEELDTHRQALTKEIAALSAEIMSPEQIERLSVYLNQWEEIDFEDRRQVADGLISQIRATDEHVSIEWKI

SEQ ID NO: 12495 - protein, 592 aa, synthetic construct
MPNLRKIEAAVPAIREKKKVAAYARVSMQSERMLHSLSAQVSYYSGLIQKNPDWEYAGVYADDFISGTNTVKRDEFKRMLADCEAGKIDIILTKSISRFARNTVDLLETVRHLKDLGVEVRFEKERIRSMDGDGELMLTILASFAQEESRSISDNVKWGIRKRMQNGIPNGHFRIYGYRWEGDELVIVPEEAEVVKRIFRNFLDGKSRLETERELADEGITTRDGCRWGDSNIKVVLTNVTYTGNLLLQKEFISDPISKQRKKNRGELPQYYVEDTHPAIIDKATFDFVQEEMARRRELGALANKSLNTSCFTGKIKCPYCGQSYMHNKRTDRGDMEFWNCGSKKKKKKGTGCPVGGTINHKNMVKVCTEVLGLDEFDEAIFLEKVDHIDVPERYTLEFHMADGNVVTKDCLNTGHRDCWTPERRAEVSMKRRKNGTNPIGASCFTGKIKCVSCGCNFRKATRNCKDGSKVSHWRCAEHNGCDSPSLREDLLEQMAAEVLGLDAFDAAAFREKIDRVEVLSSSELRFCFKDGRTVSRNWQPPERVGRPWTEEQRAKFKESIKGAYTPERRRQMSEHMKQLRKERGDKWRREK

SEQ ID NO: 12496 - protein, 548 aa, synthetic construct
MSTGTELRAVFYARVSTEEEKQLNALEKQIHENKDVIRDHGWRLVGEYIDEGKTGTTTKRRNDYKRLLKDMTENKFDIVVCKDQDRLQRNTLDWYLFVDNLVTNNLKLFMYLDNKFFKPSEDALITGVKAIIAEEYSRNLSKKLNNSNKRRIERALNGEEVSAMGNGKSLAFKIVNGKWVKDEEEAKLGKKIFELYLEYDSIRKVRDWVNEHGYTNSVGKPFTSESISRILKNEKAKGVIVMGKYHHDFDKKKIVRRSEEELVRIPAPELAYVSEEVFDKVQERLKAKTGNGRGVNAYSDPLSGKIYCGSCGRKLWKHASNGYVNWMCASQVAKGDVECNGTRITTVAIRNIYKKITDNLEVNKGVVKQDIVKWLNELKATLSDTSVNEKIQKDLDKLERKRTKLLEAYLEDFISKDDYKAKYEAIEGQIEEKKKLLVPVEENEDIKVIESVLQNIDDEIDAYVKTLDMEESKVDFLIEHTKRITVLENRDIIIELDLVAGAIIAGKDFLLYVHDTMPQHHGPKHLHPSGPQTAPRCCFRDRFSCDQP

SEQ ID NO: 12497 - protein, 456 aa, synthetic construct
MRNKEIAPALVRVALYIRVSGEEQKIKGLSLEAQQERLEAYARERGWVIVGIYIDAAKTARKNIHKRTEFQRMMDSVKRDEVDILLFARLDRWFRSVADYYKVMEVLQAHNCDWKTTDEEYDTTTANGRLYINVKLSIAQNEADIDGERIDVVFDSKIAHGTVVSGSAPFGFRVNEEKRLEVVPEDAAIVQDAFNYFENTVSQRATVRYVRETYGVNWCDATFRRMLKEKLYTGVYDRGGRYNDQFCPVIINRQQFDRVQALLTRDVRSAPSGKVYIFTSILTCAECGHKLVGYKSSDYFYYRCNQHFQRGRCSHNHSAREDVVEAWLFDHLGEELERCQLEWDVEAAKKKASVARTDKAALKRKLTKLKELYVNDLIDIEDYKKDYQIYVSALNQIPEPAQEAPPDFAAVRRLLDNSFRTIYDTLTREEKRTLWRSVIKEIRIDNDQNITGVVFG

SEQ ID NO: 12498 - protein, 456 aa, synthetic construct
MRNKEIAPALVRVALYIRVSGEEQKIKGLSLEAQQERLEAYARERGWVIVGIYIDAAKTARKNIHKRTEFQRMMEAVKRDEVDILLFARLDRWFRSVADYYKVMEILQAHNCDWKTTDEEYDTTTANGRLYINVKLSIAQNEADIDGERIDVVFDSKIAHGTVVSGSAPFGFRVNEEKRLEVVPEDAAIVQDAFNYFENTVSQRATVRYVRETYGVNWCDATFRRMLKEKLYTGVYDRGGRYNDQFCPAIINRQQFDRVQALLTRNVRSSPSGKVYIFTSILTCAECGHKLVGYKSSDYYYYRCNQHFQRGRCSHNHSAREDVVEAWLFDHLGEELERCQLEWDVEAAKKKASVARTDKAALKRKLTKLKELYVNDLIDIEDYKKDYQIYVSALNQIPEPAQEAPPDFAAVRRLLDNSFRTIYDTLTREEKRTLWRSVIKEIRIDNDQNITGVVFG

SEQ ID NO: 12499 - protein, 525 aa, synthetic construct
MAQRKVTAIPATITKYTAVPIGSKRKRRVAGYARVSTDHEDQVTSYEAQVDYYTNYIKGRDDWEFVAIYTDEGISATNTKRREGFKAMVADALAGKIDLIVTKSVSRFARNTVDSLTTVRTLKEKGVEIYFEKENIWTLDAKGELLITIMSSLAQEESRSISENTTWGQRKRFADGKASVAYKRFLGYDRGPNGGFVVNQEQAKTVKLIYKLFLDGLTCHAIAKELTERKLPTPGGKAVWSQSTVRSILTNEKYKGDALLQKEFTVDFLQKKTKKNEGEVPQYYVEGNHEAIIDPATFDYVQAEMARRMKDKHRYSGVSMFSSKIKCGECGCWYGSKVWHSTDKYRRVIYQCNHKYKGGKPCSTPHVTEDQVKDAFVRAVNILLSEKEELSANVQMVIAMLCDSAELEKRQTELKEELEVVVGLVERCVTENARVALDQDEYTQRYNGLVSRYEAVKAQFDEVTQAVANKADRKKLLEQFLQTVETQEPVAEFDERLWSSLVDFVTVHGEKDIRVTFKDGTEIQI

SEQ ID NO: 12500 - protein, 592 aa, synthetic construct
MPNLRRIEAAVPAIREKKKVAAYARVSMQSERMLHSLSAQVSYYSGLIQKNPDWEYAGVYADDFISGTNTVKRDEFKRMLADCEAGKIDIILTKSISRFARNTVDLLETVRHLKDLGVEVRFEKERIRSMDGDGELMLTILASFAQEESRSISDNVKWGIRKRMQNGIPNGHFRIYGYRWEGDELVIVPEEAEVVKRIFRNFLDGKSRLETERELADEGITTRDGCRWGDSNIKVVLTNVTYTGNLLLQKEFISDPISKQRKKNRGELPQYYVEDTHPAIIDKATFDFVQEEMARRRELGALANKSLNTSCFTGKIKCPYCGQSYVHNKRTDRGDMEFWNCGSKKKKKKGTGCPVGGTISHKNMVKVCTEVLGLDEFDEAIFLEKVDHIDVPERYTLEFHMADGNVVTKDCLNTGHRDCWTPERRAEVSMKRRKNGTNPIGASCFTGKIKCVSCGCNFRKATRNCKDGSKVSHWRCAEHNGCDSPSLREDLLEQMAAEVLGLDAFDAAAFREKIDRVEVLSSSELRFCFKDGRTVSRNWQPPERVGRPWTEEQRAKFKESIKGAYTPERRRQMSEHMKQLRKERGDKWRREK

SEQ ID NO: 12501 - protein, 583 aa, synthetic construct
MRVSVNLNAQKPDTTTNAVIYARYSSHGQTEQSIEGQLAKGHEYAAAQGYTVVHEYIDRAMTGRNDNREAFQKMLSDTGKHQFQVIIVWKVDRFGRNREEIAFNKHTCKKNGVRVEYVAESLPNSPEAVILESVLEGMAEYYSIQLSQNIRRGQLESAKKCQCVGGSVPLGYTLDSDKHFVIDPQTAPVVKKIFDLYAEGATISEITGQLNEQGIRTIRKQLFTKNSLTKLLKNEKYIGVYTYKDIVRVEGGVPAIVDKSTFDRVQELLKINRRAPSHTWTKVEYLLTDKLFCGHCGSPMVGESGFSHTGAKYSYYGCIKRRREKACDKKPVRQDWIEALVLDETVKLLHDDELMEYIIDRTWEYYQVTDKVQEEKAVLEAQLAEVDKAINNLVRAIEAGIFNAATKSRMDELDAQKAALTASLADLELTSGIRITRDHIEYFLLRLRDLDIKDRECQKRLVQTFVNAVFVYDDGRVKITYNYSGKSSTITLNQIDGSEKGKGFVCCLPCSTSSPRFPRGVAALFFCFGGKTAANQLPISAVLCYNGSENGGGGTENEKAACCVPNGARLLGLCGVRGRNAGR

SEQ ID NO: 12502 - protein, 468 aa, synthetic construct
MARQIVHIPAQRNIANRAVAPDTKLRVAAYCRVSTEQDEQLNSFENQVTYYTEFINRNPNYELAGIYADEGISGTSTKRREQFNRMIADCEAGKIDLIITKSISRFARNTQDCLNYSRKLKDLGIGITFEKENISTMDSTGELLFTILSSLAQDESRSISENCQWGIRSLFKQGVVHINTNRFYGYDKDEDGRLVINPEQAKVVRWIFESYMDGINPDILAKRLMEQGVPGCMGKPKWTVDTIMGILQNEKHMGDAILQKTFTADYLTKKQVKNEGQLAQYHVKDDHEAIVSKELWEVVQLEIQRRKDYMKRYGLRTMGRNTDEQPFTNRVFCGVCGQLFWRRTLYRLNGSIKAWMCASRCKGKDVKGCINDTILEADLHKAFVMAWNAMLENREDFLAHWKEQLSTSNPLVAFRAKQFMQLTAKAKPMKELDMSIVSKTLDHCDIKPLGVIDFYFLDGSHIGLVMDD

SEQ ID NO: 12503 - protein, 412 aa, synthetic construct
MRIKVIKPKTETELKRKRVCAYVRVSTDSLEQEDSLDNQASYFSDYIRSNPSWEFAGIYADQGISGFKENRPQFQKMIADARAGKIDMIIVKSVSRFARNTETVLKFSRELKSIGVGIFFELQNINTLSGPGELMLTIIAAFAQAESQGASDNANLTYKRKFKAGIPVHDLKYTFGFDSDEGGNVYILEEQAKTIRLIFDLAQKGIWPSKIKQYLNKNNIPACSGGKWDDTGIFRILKNPAYKGDMVLQKTYLDANRVRHKNTGQKDQWYIAENHTAIVPPKQWDEVQEILLARSEQLTPRPPQKPPQPRSCRNQYPLTNKLFCPFCGQKLHHKWSNQGKNEYWACSTNVKVGSKACRGIWLPAEIANSWGEITEPTTVICYEDEYGMRHFTAYPKEEYELSDECPYQRKEN

SEQ ID NO: 12504 - protein, 542 aa, synthetic construct
MKVRVIEDAVTALYCRLSVDDGEEGDSNSIVNQKKMLGDYAQSHGYPNPKFYTDDGFSGTNFNRPGFQELIRDVDAGRVRTIIVKDMSRLGRDYLKVGYYSEVYFGEAGVHFIAVNDGVDNTVENDSDFTPFRNIMNEWYAKDTSKKVRAVLRAKGKSGKSLTNCPPYGYTKDAEGNWHIEEEAAGIIRRIYSLCVEGYGPSQIAKKLNEMKAISPVVWKYKVGWNYKLEKVDHPEIWTVTAVRRILSNPVYLGHTINFRTKKKSYKSHSVVFLPKEDWVVFENTHEPIIDKDTFDTVQKLREGVKRRLSIDGEMSVFSGLLYCADCGSKMYLNRHRGKEKDCFNCASYRKEKHSQCTSHYITLHAIEEIVLGDLQRVLGMAKNREDEFIALLQEKNKKVAQRDLSEKRKELEEKERRIAELDLIIQNLYEDKVRGTLSEERFVKMSQNYENEQVALRDSTTMLKEELDAVQREKDDISRFMRLVRKYTEITELTPETVRCFIDKILVHKGEKAQGGHRQTIEIFYNCVGAIPDLRENEDNA

SEQ ID NO: 12505 - protein, 700 aa, synthetic construct
MDSNAFLNDLMSKMKLPEAKGKKKAEQSESVAQILAAMQKVRAEKKKPPVTSYAPVKEMPVNEPESMEEFSQLASDVMQECRPSMPTVKTSISEKTVRVAAYIRVSSTNPAQEDSYEMQERYFMSLLAGNAGWTSAGIYSDHGISATSREGRTGFNRLLRHCKQGKIDRVICKSISRFARNTQDFLVALRTLKENNVTILFEREAMDTADAYSEFILTTLAAIAQEESRSISANIAWSNQKRFPAGNVCNKDIYGYEFRKGEYTVNENGYRYRAVFIIPEEAEIVRMVFRLFTKEELGFTQIAQKLDALHIQPPNSGCRQRQKRKPTVLPAGALKEEDKRGWTATDVRYIIANVRYCGSVLCQKTYTDHRNGHKQKVNKGEKPKYLIRNHHPAIISEELWQEAQEVWKAYTAKYRGIEKGRNERNYSKLLLCGECGRYFQGHSTTRTTIWRCATKLAQQGQKRCRMESIYEEQIQALLRKAFAEKFKLGEKMDAEVHEVMQMVSKVPIDSARNQALKNLTEKLREIHDFDQMEQEGDFLKRQLSAVNYSIRDVHQHIRDIQAEKEALKVRCEVLGEPIDKEAVTELENRLLNEEEQLEKLEHEAQQQAEQVRYMEDYWKKLEQTYEIREKTLQWLDSLVGGTQMFLDEAAGTYVKAFVLSVTIFSPKHFRIHWFDDTCTDVECASVFEGYQQPGMIRRKY

SEQ ID NO: 12506 - protein, 588 aa, synthetic construct
MNRQMTQGTVANNVQVIPATKRRVSAGGQLKKAKDIRVAAYGRVSTDELAQQTSYEGQKSYYTKLINEKEGWTFAGMYADEAISGTNRNHRTEFNQMMQDALDGKIDYIITKSISRFARNTVDTLNCVRQLRQCDPPIGVYFEKENIDTLDASGELLLTILSALAQEESNSISKNISWSIQKRFQEGIAFGNPRSVYGYTDGETNKDWVIVEEQAKVVRFIFDEFLLGKSSYKISNELNEKGIPSSKGTKWQSESVDFILQNEKYVGDCEMQKTVTVDFLSHKSIPNNGEAPKFYVTDHHVPIINRTVWMRAQEILAHRKKNRTKKKDEKREKRVGKDVFDNLVCGKCGDPFYRRTLQARATHFEDDRCLDACRSELLAQGSSPDDYYERYYYTYPVWRCSSLKDTSPTNDGPFMGKADPDVAWHPTYIGEGDAKCPSHFVYETAVKQSFMEMLYAIKRDHEENGENAWIDSEFRMVYQKVQEHVAERDSSRKAELDEQILQLEEKMAQMQGRLKEAVERGRQKASPEIDTYERLVDDLRERLNEKTDERQQLSQEEQLLSEMKHNYDFFIRLSLIHISEPTRHLRIS

SEQ ID NO: 12507 - protein, 576 aa, synthetic construct
MKKNFKMPGSGSETPIRVAIYVRVSTVYQIDKDSLPMMKQDLTSYCKYILNTDDFVIFEDAGYSGKNTDRPAYQKMMSQIRQGLFTHLLVWKIDRISRNLLDFANMYAELKDLGVTFVSKNEQFDTSTAIGEAMLKIILVFAELERNMTSERVTATMINRASNGVWNGGRIPFGYSYDKPTQVFSIDPEENKIYNFMVETYEDTQSIVHTSRRLNEAGYRSRNGNMWSPVAVWTILRNPWYKGVYRYNYYKIPGRKAIKDESEWVIVENHHPASIDPDRFDRIQATLDKNARYRNTPGRKTAQKNVHVFSGLVWCAECGSAFTASPGKLHVSGYRPSKYGCPNVRKTKTCHAKYTSDVVLGEFLLNYILNILNAQKQFAYIHSTDDLQKRLLHGSTFSNVDHVDPDGLASLLNMLEKCSGSDPVLLKRPRSKPKMDPELKRMMADQKKQQRALDRLNDLYLYSDDSISEREYLVRKQQITDRLQEINEAIGMMSQEPWMRTMNDEEFIHQASSFILTQKLADKQYIYYENLAESLDPEILKNFFVSILDSIILRDGRPETVVFRNGLSHTFTYKDS

SEQ ID NO: 12508 - protein, 573 aa, synthetic construct
MAYNAQNKTGARVAIYVRVSTLHQIDRDSLPMQKQDLLAYAKLMLNTDDCVIFEDAGYSGKNTDRPKFQEMMSQMRAGAFTHLLVWKIDRISRNLLDFATMYNELKALGVTFVSKNEQFDTSTAMGEAMLKIILVFAELERNMTSERVTATMISRANNGLWNGGRIPFGYNYDYETHEFSVNEEESKVVILMHDMYEQERSLVRVVRELNERGYRSRAGNLWSPVSLLIILRNVFYCGDYRYNMLKEGDRQKVKDESEWVTVENHHVAIIPKDQKERIMATLDSNSKLCKQRNIYKSSKHTHVFGGLIYCGSCGKPLGSTPGNLTRDGWHYSKYTCPTRRKSVTLCTGKSTSDPIIGEFVFNYILNMLNAQNDFEKISSPEELEKLLLIGDTFAYIDHIEPNGLNDLFNVLSSGAVNGAVFGKGASLPTKKATVEPEVARLRNEKQKTERALDRLRSLYLYADEAMSEAEYMIQKNKLEETLEDINDQIGMMNTDSWQQSVSDEEFIQRASEFIIAQKLSGRKYVNYKRLAMSVDSEVLKNFVVSIIDSITIQDGLVSNIVFKNGLCHTFIFR

SEQ ID NO: 12509 - protein, 448 aa, synthetic construct
MERIIQKVTPPARKKAPKLKRVAAYARVSSGREAPLHSLSAQISQYSGMIQKTPGWQYAGVYADEALTGTKDSRGEFQRLLADCRAGKIDMIITKSVSRFARNTVTTLRTIRELRLMGVDVFFEEQNIHTMGEDGELLLTLLAAYAEEEARSVSENQKWRIKSNYEQGLPWSITMYGYRQVNGRLEVVPEEAEIIRLAADLYLEGYGRYKLEDAFAAVNIKGRHGANMGGNSIVDLICNEKIVGDMLLQKTFVVDPITKEVRKNNGEKPQYFVEGSHDGILDRETYEKVLAERARRAAAYKPRSGSYERNRFPFSGKIHCGKCGKSFTRKVLNGNTPYEKRGWLCRTFNQKGKAHCDAKQIPEEILKRVSAEAMGLPEFDEAAFAAKVEEIQVPENGVLVFVFYDGHTVTKTWDNPSRRHSWNPENRQRARELALRQAAERRLAKCQQ

SEQ ID NO: 12510 - protein, 537 aa, synthetic construct
MPAVTAARVTVIPAKKDRLPINVLSSEARKLRVAAYARVSTNNEEQLTSYEAQVDYYTRYIQSKDEWQFVEVYTDEGISATNTKKRDGFNRMVADALAGKIDLIITKSISRFARNTVDTLTTVRKLKEKGIEVFFEKENIRTLDGKGELLITIMSSLAQEESRSISENVTWGQRKRFADGKVSLPYRRFLGYEKGPDGLPVIVESEAVIIRLIYRLFLYGKSPSAIATYLTDEGIPTPGGKKVWRAKVVESILTNEKYKGDALLQKKFTVDFLTKKQKVNEGEVPQYYVTNSHPAIIEPELFDLVQYELKTRKTDGRFTSCLHPFSGRIICGECGGIYGSKVWHSNTENRSLVWQCNEKYRGQHCSTPHLTEGEIKAAFLAAFNIVLGNRDEIMEAYEEVIAALTDTADLDAEQETLENESEVVLGLIQKIISENAQTAMDQEEYNRRYDAYSERFEAARKRLAEIAELRQERNAKKTRIRLFMENMNNHQELVQSFDEELWYSTVDYVTVYEDKRLVFTFRDGRQVEITAELWRAA

SEQ ID NO: 12511 - protein, 502 aa, synthetic construct
MEIQIREGNSRQKRKLKVCAYCRVSTDADEQENSLENQIRHYEEAITSNPDYEYAGVYSDFAISGFKEKRPGLQKMLADARKGKIDLILTKSVSRFARNTSIVLEATRKLKELNVGVFFELQNINTLSGEGELMLTILAAFAQAESESGSAGAKMVYQRKYEAGIPVQYLERSFGYTKDERGIFVADEDEAVWVRKIYEMAADGYTPAAIKRYLNENGVKTVGGAEWIDSTVFRLIENEIYKGDYIMHKHFVNEERKLVRNRGEVDAWYIEDDHEAIVSSELWQKAQDALEAKRDYLAEGSVIEEFTEENYPYMNRIYCARCGHPLYRRIYSNGNRLNWGCSGTKRYGRSFCEGINIPDGALRGAWHFDENMYIGERQTDKGKKEFTYLKEASWKRRHKKKEPEPITENTETEYPYREKIFCGLCGSRLVRHVNTKNHKVIWVCNGRKRKGKDFCDGTRIPDTIIKGWGEIKKDIYIQRKDDKNGKKRYSYTSKKPKGADRA

SEQ ID NO: 12512 - protein, 464 aa, synthetic construct
MARSVTVIPARSQKVRTGHKAVQEKKIRVAAYCRVSTDQEDQLHSFEAQVEYYTKYINEHENYEMAGIYADEGISGTNTKKREQFKKMIADCEDGKIDLVITKSISRFARNTQDCLAYSRKLKNLGIGIIFEKENINTLDSTGELLFTILSSLAQDESRNISENCKWGIRTKFKNGEMHLNTFKFLGYDKDENGKLVINKEQAKTVRRIYRDFLIGINPAQIAKELTEEKVSGCLGQTKWYPSTVIGILKQEKHMGDALLQKTYTADFLTKRQVRNNGEIAQVYVKDSHKGIIDKQTWNAVQEEFDRREKFMEAHGTDRYSYGADCMPFCEKVFCGECKSLFTRHSWRSRGIVQWQCKNHRKDGKVACTNAYVDNADLENGFVKAFNRLVTDRDKHMERWQQMKSDGTPLEKIRAGQMMEAVENEPLTRFVPEIAQLVLCEVTVLGAKKYEFFFLEGSRVKVSV

SEQ ID NO: 12513 - protein, 548 aa, synthetic construct
MSTGTELRAVFYARVSTEEEKQLNALEKQIQENKDVIRDHGWRLVGEYIDEGKTGTTTKRRNDYKRLLKDMTENKFDIVVCKDQDRLQRNTLDWYLFVDNLVTNNLKLFMYLDNKFFKPSEDALITGVKAIIAEEYSRNLSKKLNNSNKRRIERALNGEEVSAMGNGKSLAFKIVNGKWVKDEEEAKLGKKIFELYLEYDSIRKVRDWVNEHGYTNSVGKPFTSESISRILKNEKAKGVIVMGKYHHDFDKKKIVRRSEEELVRIPAPELAYVSEEVFDKVQERLRAKTGNGRGVNAYSDPLSGKIYCGSCGRKLWKHASNGYVNWMCASQVAKGDVECNGTRITTVAIRNIYKKITDNLEVNKGVVKQDIVKWLNELKATLSDTSVNEKIQKDLDKLERKRTKLLEAYLEDFISKDDYKAKYEAIEGQIEEKKKLLVPVEENEDIKVIESVLQNIDDEIDAYVKTLDMEESKVDFLIEHTKRITVLENRDIIIELDLVAGAIIAGKDFLLYVHDTMPQHHGRKRPHPPGPPAAPRQPVRDRLRCDQP

SEQ ID NO: 12514 - protein, 502 aa, synthetic construct
MGIQVIKSKKSNEKLRVAAYCRVSSDTDEQESSLENQIDYYTKLIKNNPLYEFAGIYTDQGISGYVERRPGFKQMMEDARQGKIDLIITKSITRFARNTDTVLKASRELKKLGIGIFFELQNMNTLKEDGEFLLTVYAAFAQGERDTYKELADMTYRRRFEECKPFYNIKNVLGFDMDGKQNIIVNKEEAKNVKQIFTWVKQNYSTVEIVKKCKEAGITNTMGKPVTRVFIIKTIRNVQYKGDYIMQSTYTDDKKISRRNNGVVPSYYIKNNHPAIVSRKLWEDAKRCVDERSSELHKRLVVKPMTTTNYPYKNMIYCAECGGKMKAVKKKSGLEYSYTCQNRRKYGSDFCNNRAVPQKVIESWGTIDEPVYVSFDKEKPIDKQYKFVRGSTWRKGHIEKVPPEDYTREKCFYYRRIFCDKCGSMLRKTTDTGGNVHFRCGGHVDFGNEYCKGIYVPKEKLDNLPQVDGYYLIKEEKKGEEKRYSYTCKEERPIRKERPDRK

SEQ ID NO: 12515 - protein, 612 aa, synthetic construct
MSNTAMANTAQALMDSMTPKFAVSYLRVSTRGQAERGGGHDEGFSIPAQREANKKKALSMGAMVGKEFVDRGASAKSADRPQLQAMLEYVKENADRVDYVIVHKIDRLARNRDDDSDIMRVLRECGVQLVSASESIDDTPAGMLLHGIMSSIAEFYSQNLATEVKKGMGEKIKGGGTVGRAPIGYQNVRLVDDKGREERTVITDPERAPLITLAFEEYATGNWTVADLADHLAACGLNTRSTPKISSQPVTLKTLHKVLVNPYYKGVVKYKGVEYPGSHEALVDTETWDKVQAILASRINGTRNLKHPHFLKGSIFCAYCGERMMVSNEKKKDGTIYPYFVCSGRHSKRRKDCTTKAVLIDVVEKEIEKIYEAYQLPPEVRILLESCIQEIISTERAKYDAELDGLKGEKAKLENKRKKLLEAHYCDAIPLDLLKSEQQKIAKELSSIEHEIKMHDTTFEQITENLKRALDIVENCGEAYKNASDTIKKLMNQAIFEKFYISNDADMEFKVDAEFRPPFDQILEPVKDDIIRINRLAQDCSSKLSYYIGIAKDHIQEIFGCGLYTINNSTNMSTYSNGSNFFSHNSSSKVLLVDVNGFEPLTFRTSSGRSTS

SEQ ID NO: 12516 - protein, 543 aa, synthetic construct
MEITKVPKKIVTVIEPKRSMTVDKEKYRQKKVAAYCRVSTDSEEQLVSYANQKKVYTEMIASRKDWCFAGLFADEGKSGTRADKRPEFNKMINDCLAGKIDYIITKSVSRFARNTVDCLDYVRMLKSKGIGVYFEEQQIDTLKTDSELYLVIYAGFAQSESESISKNITWSVRKKFEEGTPVFMYKRFLGYKKGADGEPEIVPSEAAIVERIFNLYLAGETVDKISKMMQAENYDIPDKTISFSKGMIMNMLSNERYCGDAILQKSVTIDCIEKKRKKNTGEAPMYYVQNNHPAIIDRVTFNKVQEELARRKTKTPGSAKSSITSTGKYSRYALTDVLICGNCGTRYRRVTWSRNGVKRIVWRCISRLDYGKKYCSDSPTIMEDKLQEAIVRAVNKFNEQDNATYKALMRATISEALGLNGDPEEVDMLERKVEALNNKMLALVNESVSSGDGIEAHESEFMTLSQETELLKQRIAAIQKSTAKDNGEQSRLEQIQAIISERESKCMEYDDSIVRQMVECIKVYPGGKLEIIFGGGYLVEESV

SEQ ID NO: 12517 - protein, 513 aa, synthetic construct
MPEVRLITPITRQSTKKMQVAAYCRVSSNSADQLNSYAAQIRAYKKCIGARDDWELVDIFADEGLTGMKSETRDEFQRMIRMCELKQIDLIITKSISRFARNTKDALAYVRKLKLLGVGVQFEKEGISTLSIGDEMLLNTFSALAQEESQSISMNQRLSIVKRMELGEYVDSNAPYGYRLVDKALAVYEPEAAVVRDIFDLYLRGFSISEIGRELKSRNIPTKAGKESWHPYRIAYMLKNERYIGDSFYQKTYRETTVPFNQHINRGQEDRFYAKGTHPGIIDKDVFNAVQQLIQKRKETFSRTTTQNIYPLTSRIQCSECGSFYRRRSVSGTVKWVCALHKDDSTACDSHYYSEERIYDGFITMVNKLRFSEDNILGQVISRLEMTLAAIKRNNLAARDLSKSIAELNAKLLMLEQLRSKGYLAPEVYQAQANEISAELAKLKNVRQEKFNSKAAIMLDEVKKLKMLVFELEEPLDAFDEKLFLEIVKSIQINKEDEMSVEFLGGLRFKERI

SEQ ID NO: 12518 - protein, 459 aa, synthetic construct
MSTTHFYSHYPTIEYKTCALYVRCSKEEQAKFGDTIEAQIEDLKAFAKLHHLKIYAIYVDEGHTARKKYNKRKEFMRMLQDVELHKFEYIIFTKLDRWFRNIADFYKIQEILDNNGVTWLTALERYEMETTNGKLNVNIRLSVAQDEADRDSDRIKDVFRLKVKKGEAITGSLPIGLMVGENGKVDIDPDTVQIAYDMFDYFEAHNSKRGTLLYLIDKYNRYFCYETIARALRNPLYKGEYRGNPDYCPKIIDPARFDRIQVLGKRNVKVRKNNRYYVFSGLAQCKECGHALVANTTVQKRYNREYTQYRCNYYSNSHLCTHSHGTNEKVIEKYLLDNIKPELEKYVTAYEVKQNAPTKKADPSKIKAKMQRLKELYVNELIDLDDYRIEYEQYKQELDRLTSTAAPEVKDLSAIRSFLALDLQSIYDSLTPQEKRTLWSSIIDKIIISDNGDIEIVFL

SEQ ID NO: 12519 - protein, 590 aa, synthetic construct
MRVSVNLNAQKPDTTTNAVIYARYSSHGQTEQSIEGQLAKGHEYAAAQGYTVVHEYIDRAMTGRNDNREAFQKMLSDTGKHQFQVVIVWKVDRFGRNREEIAFNKHTCKKNGVRVEYVAESLPNSPEAVILESVLEGMAEYYSIQLSQNIRRGQLESAKKCQCVGGTVPLGYTLDSDKHFVIDPQTAPIVKKIFDLYAEGATISEITGQLNEQGIRTARKQLYTKNSLTKLLKNEKYIGIYAYKDVVRVEGGVPAIVDKSTFDRVQELLKINRRAPSHTWTKVEYLLTDKLFCGHCGSPMVGESGFSHTGAKYSYYGCIKRRREKACDKKPVRQDWIEALVLDETVKLLHDDELMEYIIDRTWEYYQVTDKVQEEKAVFEAQLAEIDKAINNLVRAIEAGIFNAATKSRMDELDAQKAALTASLADLELTSGIRITREHIEYFLLRLRDLDVKDRECQKRLVQTFVNAVFVYDDGRVKITYNYSGKSSTITLNQIDGAEKGKGFVCCLPCSTSSPRFPRGVAALFLFWGKSGANQLPISTVLCYNGSENGRGGMENEKAACCVPDGARLLGLRGVRGRNAGWRYGHFRAV

SEQ ID NO: 12520 - protein, 434 aa, synthetic construct
MERVVERVDALIPAQPKVLRVCAYARVSTGKDAMLHSLSAQVSYYSKMIQSHNGWMYCGVYSDEAVTGTKRERAGFQHMIEECRQGNIDLVITKSISRFARNTVTLLQTVRELKSLGVDVFFEEQHIHTMSADGELMMTILASYAQEESLSASENQKWRVRKAFENGEIINLRFLFGYDITPDGIRVNEKDAAIVREIFARFNGGESMSSICRDLDARGHKGVLGGTWCAERMRNTLSNEKYLGNALLQKRYRNNHIEKKLLPNRGELPMYYAEGTHEPIIDQATFDKAQERLRMLAQQAANRKKPTRSVFSGLIHCGLCGNTYKRVTYRKKHYWNCTTFQTKGKSECAAKRIPEETLEVLTCEVLGAVSFDPDMVRSKITAIRAEKSNMVVFCMDDGSEIVKRWTDRSRAESWTPEMKEKARQRALQARRKKK

SEQ ID NO: 12521 - protein, 529 aa, synthetic construct
MSRTAARSVTVIPPTINPLTHLSKVAIQKRRVAGYARVSTDSDEQFTSYEAQVDYYTQYIKRNPEWEFVKVYTDEGISGTNTKHRIGFNEMIADAMSGKIDLIVTKSVSRFARNTVDSLVTIRKLKEKGVEVYFEKENIYTFDGKGELLLTIMSSLAQEESRSISENVTWGQRKRFADGKVNLPYKQFLGYRKGADGFPEVVPEEAIVVHRIYTRFMEGLTPGAIAKELTADGIPTPSRKQRWQTSTVESILQNEKYKGAALLQKCFTVDFLTKKRKVNEGEVPQYYVEHSHEPIITPEEFDKVQTELARRKRISRQYSGKSIFSSRIVCGDCGSYFGSKVWNSTSKYRRVIWQCNGKFKGEHKCETPHLDEETIKARFVTALNTIIESKDNILEDCRLMQATLTDCTSIDTEIESLLEEIEVVTELTKRCIAENSQMAQNQEEYAARYNGFVERYEKAKARLEQLRSTKAAREAQAEAIGAFMFEVQELDALTEFDEKLWLTVIDTVTVHADGRMTFKFQGGKTLTSY

SEQ ID NO: 12522 - protein, 528 aa, synthetic construct
MSRSVRSVTVIPASINPISHLPIALQRKRRVAGYARVSTDSEEQQTSYEAQVDYYTHYIQSKPEWEFVKVYTDEGISATNTKKRDGFNQMVADALAGKIDLIVTKSVSRFARNTVDSLTTVRKLKEKGVEVYFEKENIYTLDSKGELLITIMSSLAQEESRSISENVTWGKRKQFADGKVALPYKHFLGYQKGPDGLPQIVPEEAEIIRRIYSMFILGSTPCAIAKQLTEDGIPTPSGKSKWSPSTIESILSNEKYKGDALLQKTYTVDFLTKKMIVNDGKVPQYYVENSHPAIVQPWEFAIVQAEIKRRRSLPRRYSGQSVLATHIICGDCGDYYGSKTWHSTSKYRRTIWQCNSKFSGNQKCHTPHLDEERVKAAFLTVFNTLIENRDALIEDGIIIQQTLTNCEEIDSQIAAMVQEQEVVTELIRKSIAQNATDALDQEDYAKRYAALMDRFEAAAAKLAELNEKKQARDDQACMIGGFLFELRERDEALTEFDPYIWAITLDVVTANSDGSLVFKFRNGLEVAA

SEQ ID NO: 12523 - protein, 466 aa, synthetic construct
MKRIITQVEFPAEAPKLTRVAAYARVSSGKDAMLHSLSAQVSYYSDLIQKHPGWQYCGVYADEALTGTKDNRENFQRLLNDCRTGKIDLVITKSISRFARNTVTLLETVRELKLLGINVYFEEQNIYTLSADGELMMTILASYAQEESRSASENQKWRIRANFQNGLPWNGLVLGYRIEDGIYVQVAEEAALVKLIFSLYSGGWGTYKIAKYLNKEGYRTRLGNLWTQGSLQKLLNNYAYTGNLLLQTTFVEDHITKKGRINRGQLPMYHAEGSHEAIISMTEFQTTQETRKERAAIHAHTSDPNVIYPFRGKLVWMDCGKNYRRKMVRRGPAWVCGTYNTKGKEFCPTSKVIPEETLMAVTAEVLGTDTFDEAVFLAKIERIEVGTENRLTYCFKDGNQVTTVWQDRSRRESWTADKREAARQTALQQEMPERYSDGRFKKKDSGCLPPSGDQRATQHTQRRPQL

SEQ ID NO: 12524 - protein, 528 aa, synthetic construct
MPRTTKKITTIPATLTRFTATPITEQKKRRVAGYARVSTDHDDQFTSYEAQIDYYTNYIKSRDDWEFVDVYTDAGITGTSTKHREGFKRMVTDALAGKIDLIVTKSVSRFARNTVDSLTTIRQLKESGIECYFEKENIWTFDGKGELLLTIMSSLAQEESRSISENCTWGQRKRFADGKVTVPFNRFLGYDRGPDGNLVVNAEQAAIVRRIYAMFLQGMTYNGIAQQLTADGILSPGDKSKWNTSAVKSILSNEKYKGCALLQKTYTVDYLTKKKKVNEGEIPQYYVENNHEAIIDPDTFEMVQREMEKRGRGRKYHSGVHAFSSKIRCGQCGSWYGSKVWHSNSKYRKVVWQCNHKFDGDQHCSTPHLTDDLIQQAFLSAANKLLATKDAVIADGREMMALLFDTTDLEKEQEELRQETQLVSELVQRCIYENAHIALDQTEYQKRYDGLTERFEKAKARLDAVTEEIHQKQTQRGSIEDFLKAFAAMPDELTEFTLESWHGLVDYGTVYAADDIRFTFKNGQEVKA

SEQ ID NO: 12525 - protein, 577 aa, synthetic construct
MRKVSKIEPISPSLPTRKKVAGYARVSVESERLNHSLSAQVSYYSNLIQSNPEWEYAGVYADNAVTGTKASGREEFQRMLNDCEAGKIDIILTKSISRFARNTVDLLETVRHLKELGIEVRFEKERINSLSGDGEVMLTLLASFAQEEVRSLSENVKWGTRKRFEKGIPNGRFSIYGYRWEDDHLVVEPEEAKIVRLIYDNFLKGLSAEATEKQLEEMGVKSYTGTHFPNSSIRAILKNITYTGNLLFQKEYTLDPISKKTRKNHGELPQYWVEDTHEAIIPMETYQAVQAEIARRRELGALANWSINTSCFTSKIKCGLCGASFVRNTRKNRAKISQLGERYTFYGCGSNKKGGHCKCGTIRETVLKEECAKVLGLPEFDEDVFSERVAKITIPVTGTMLFEFTDGTSLEHHWYRNARKESWTPELRQAASEYRRDRDTGWKCYHTFTHFIKCGRCGANYRCQTHRRVDGTVVRSWYCSAPTSVGCSKVGIREDILRELIADVLGLPEFDEELFNQQLAYATVPADNEIVFHFRDGHEISRTFVQKRQMPRQTEERKKHMSEVMKEKWRERHAKND

SEQ ID NO: 12526 - protein, 510 aa, synthetic construct
MKAAIYARYSSDNQREESIEAQIRAINEFAERENIQIVKTYIDEARSATTDDRPKFLKMIKESELGLFDTLIVHKLDRFSRNRYDSAFYKKKLKDNNVRLISVLEHLDNSPESIILESVLEGMAEYYSVNLSREVMKGMRETALQCKHNGGLPPLGYDVAKDKTYIINPNEAKAVKLIYELYSNGVGYNLILSRLNELGYKTKKGKFFGKNSLYSILTNEKYNGIYVFNKSSKKINGKRNSHKHKLDEEIIKIKDGMPKIIDDDLWNEVKKKMDNNKAHRGAAQAKKIYLLSGLIYCGKCGHAMTGNSRHSGRNKTLYETYECSNRKRTKQCDMRAINKSLAEKIVIDALYDNIFSKKAIENLTRKILTYAQEQNKTITEDIITYKKELKDVDSKIDNIVEAIADGLYSPVMKEKLTSLESKKNALLIRIDEAEREAILTSPSKEMIKKYLSKDSDIKEKTPQQQKKVVQNYIKKVTIYDDEVITDTIVTCLGIGEAYRTRIHKLYLTKY

SEQ ID NO: 12527 - protein, 456 aa, synthetic construct
MRNQNTSEVPVRAALYVRVSGEEQKIKGLSIEAQKERLVAYAKERGWIIAGLFVDAAKTARKNMHKRSEFQKMLDLVRADGVDMLLFCRLDRWFRSVRDYYKVMEVLEAHNCQWKTTDEEYDTTTANGRLYINVKLSIAQNEADICGERIHVVFDSKIQHGTVLSGKCPFWLRINDERRYELIPENAAIIQDAFNHFENTTSQRATIRYIRETYDVNWCEATFRRMLKDKLTIGVYDKNGRYNDDFCPPVISKEQFEHVQELLRRNSRHNPAGRVYIFTGILVCEECRHNLVGYYSRGYIYYRCSQHFQRGRCIHNHSAREDVIEAWLFEHLGEEIEKYEVAWNVQAAERKRTAASIDRSVLRRKLTKLKDLYMNDLIDIAEYKKDYETYTAALSALEDPEEEKHIDLSGVRRIISHDFREIYDSLTREEKRTLWKNTLKEIRVNNANEITGISFF

SEQ ID NO: 12528 - protein, 521 aa, synthetic construct
MPASKNTARKYAAGGGSDNSCGVEPLRAVIYARYSSSGQREESIEGQLRDCYEFAKKHGIIVIGEYIDKAMTGRVDRRPDFQRMMKDSEKGRFNCVLLWKMDRFARNRYDSAMYKYKLKKNGIRIFYAKETIPDGPEGIILESVMEGYAEYYSENLAQNVKRGNYDSALELKTLGKTCLGLKTGPDGRYMIDQAEAAIVRRIFEEYAEGERAKDIYERLNSEGYRTSRGGKFNKNSLRRILSNKKYIGVYEYEDIYVENGIPAIITDRDLFERVQKMLKINHDAPARGKAQNFLLTTKLFCGLCGSPMIGDGGTSHTGKAYAYYSCTKRKRGRSCKKESVPKDWIEDLVVGELVKIVHNDELIEQIADRVMEYQKREKDQSGLHALEIRQKENEKAISNMLAAIEAGIITPSTKTRLMELEADRADIEKGIAHELLAEPEFERDQIIYFLERFRSGDINDEAYRIMLVDTFLNSVYLYDDDHLVLVMNYSGENCKVDLKLVEGAVSGDGCKGSAFAPSSAL

SEQ ID NO: 12529 - protein, 563 aa, synthetic construct
MKKEKIKVYIYTRVSTTMQIDGYSLDAQKSRMKAFAEYNDYEIVGEYEDAGKSGKSIEGRSEFNRMMEDIKSGKDGVSYVLVFKLSRFGRNAADVLSTLQVMQDFGVNLICVEDGIDSSKEAGKLMISVLSAVAEIERENIRVQTMEGRIQKAREGKWNGGFAPYGYTLEKGKLIINEEEAEAIRIIFDQYVHTDMGANGLAKYLANHGIHKIQRQNGKNPLFDAALIRRILKNPVYCGKIAYGRRRTEKVHGTRNDYRLVEQDDYLLADGLHEGIVSEELWHEAQVKLLAQAEKYEHVNRGKDAKVHLLSGIVKCPICGAGMYGNKSIKHRPDGTKYKDFFYYGCKHRTMIRGHKCDYKRQINEELLDDAVAEVIVKLVSNPKFAALMQQKISMKVDTTAIEQEIAAYEKQLRQSYSTKSRLIEEIDSLDPDDKHYIKRKSDLDERLYRMYDKIENTENLLIAARAKKMAIEAEKLTGDNIYKVLIYFDKLYDAMNEQEKRQIMEALISEIQIYEERQPNGQWLKSIKFKLPIIDEDMNLSLDNDEHVEVVIMMQNCGLEGK

SEQ ID NO: 12530 - protein, 525 aa, synthetic construct
MYLEISNPMDYHVALYIRLSKEDETEGPSQSVTNQKSLLNEFVQQHRLSVYDTYVDDGWSGTSFDRPDFQRMIEDIEAKKVNMVITKDLSRLGRDYIMTGHYMERYFPEKRVRYISLLDGIDTGVESTANDITPFRAIMNDMYAKDISKKIKSVKRDKQRKGQFIGGKPMYGYKMHPTEKNEIVIDEEVAPVVRRIFAMALDGMSCRKIATTLNEESVPTPATYCGWNMGRKGPYAGLWSSERISEMLQNETYLGNMVQGRTVKISYKSKKCLKQDRENWVVVENTHEPLIDKETFQKVRMLVNSRRHTRSRTYDFLLKGLIFCHECGYPMAVLNRPPVSGEDRLFFVCRTYQRFTKAGVCSCHSIKEQVVTEAVLAKVREVCEAYLDPNKLQPIAADAVEKARKAENHEAEIQSIQNKIDSLTANLDKMYMDRLTGLLAEADFERIYQRVKMDRTSLEEKLKELESQKESPVSTEDRARELVQQFLDSAYTSRELLVSLIERVELTENKQIIIKFRFRELEAIS

SEQ ID NO: 12531 - protein, 499 aa, synthetic construct
MIAIYARQSLDKKDSISIETQIELCKKEIEDEPYKEYVDRGYSGKNTNRPQFKAMMRDVENGVISKIIVYKLDRLSRSTLDFGELMDALSKHSVEFSSTREKFDTSTPIGKAMLNIIMVFAQLERETIQVRVQDNFRMRSARGAYDAKAPYGYAKTKVMMHGKAVSTLKPDKAYSLMVKKIFEQYAYTSTSLGYLARTLNQQGIKSANGAAWDSCKLSKLLCNPIYVKADAEVYKYYRAKGMEITNDIDDFRGQYGCVTYGQWDRAKNKFAQLSGLTLSIGLHEGIIDAKTFLACQYKLADNTQINNTGRGKHSWLTGLLKCGCCGKAMKVMTYKETATFRCSGAMNTGLCNDSPSVGVREIEEAVEREIFAHVARHQELVVQKRKEEDNKAHNYKIAIAKLDDQIANLITALADGTELTMKYINGRISELQKQRDILAAELQQHKNATKQQDDIKQFHDIINLWPGMTIPQKHEIAMMLIKRVEIQEDTTRIYWKYDL

SEQ ID NO: 12532 - protein, 523 aa, synthetic construct
MNICCYGRKSIYSDHSDSIDNQFRMCRDYVEMKFSGQVDSFLEYQDEAFTGANIKRPDLQRLLVDIAAGNCDILIVYQLDRLSRDVRDFANIYAILEEHHVKFISIKENIDTSTPIGRAMMYVTVVFAQMERETIAARVADNMIGLAKKGYWTGGNPPEGYVRTRIEANGKKHCSIVPDPEGVKYVTWIFDTFLQNGYSLQSMETAFKKQGIRTRTGAFFSTTQLHKILTMPYCAQATPEVYDYYAAKGCQMDIESPRELWDGTCGVMIYGRTTQKNKKHQMQPPEKWLVCLGAHEPFMPADKWLSVQARFAQNKFDKTMKYDVPLLKGVLRCSCGSIMCVARKKKKEGVSSWYYCLKRMRQGKEVCDSHHIKCELLDQKVLELLQSIKRDPGVIQKFAEQNTEVLSGPDPKVLASKINTCQTRIDRLVSSLSLAADSSAQKYILAELERLDLEIQALRREHNLALAVERKRSLQQQDTLSKVSEINRLVSDLDSFSAAEKNAIVKDVIKKCVWDGESLSIML

SEQ ID NO: 12533 - protein, 497 aa, synthetic construct
MNAIYARQSVDRADSISIESQIEFCQYEMRGEQYKVYTDRGYSGKNTDRPAFAEMMNDIENGVIGKVVVYKLDRISRSILDFSNMMEQFGTHKVEFVSTTEKFDTSSPMGRAMLNICIVFAQLERETIQKRVADAYYSRSQKSFYMGGRVPYGFRLIPTTIEGIKTSMYEINAEEAEQVRLIYELYSKPECSYGDIIRYFQAHGILKNGKPWGRTRLADVLRNPIYVRADLSVYEFYRDQGAIMANDPSDFIGTNGCYYYKGQDSVGRKQMNLEGNHLVLAPHEGIIPSDLWLKCRAKCLEAQQIKPYQKAKNTWLAGKIKCGICGYALVDKHYSTTRSRYLLCSNKMNSKACEGPGTIYTDEFEQIIYNEMRKKMAQFKTLRRCKGNYVNPELTALNVQLTQVETEIGSLMNRLSAADDTLFRYISGRVKELDGKKQELMKCISELKLHKEADYTEIYNHLTMWDELSFNDKRQTVDQLIRVIYATSDSIKIEWRI

SEQ ID NO: 12534 - protein, 485 aa, synthetic construct
MPTSDLKIAAAYIRVSTDDQEEYSPDSQVRLIREYARKNGYLLPEEYVFQDDGISAATARKRPAFNRMIALAKEKERPFDAILVLMFSRFARNREESVLYKGLLRKQGISVISVKEPAVDGPFGTLIESIIEWFDEYYLINLSAEVKRGMSEKFLRGEAMGTAPFGYRIDSANKTFTVDPERAEIVCDVFRSYADGAGLRDIAVQLGDAGITTRRGNRPDNRFVEYMLRNPVYIGKIRWTPGHKTRYSRVHIADGVEVVDGKHPPIVSMDLWEAVQRRMDQRKAAYGRYQRQAPAAWMMRGLVRCSACGATLIMAGRSSSCPFLQCHSYAKGACHTSHSLSLRRANAAVLAGLRRSVGTLTFHMVPHLSSAPSRAADYGRLLEQERRRLDRCKDAYQAGVDTLEEYRDNKARLEERIRRIEEQAASAAAAPESFDKAAYGKKAADILRFLETSADEGAKNEVLRSVVDHITYEKASRHLAIYFYT

SEQ ID NO: 12535 - protein, 513 aa, synthetic construct
MMQQALNAVIYARYSSHNQTEQSIEGQLRDCYAFAEREGLQVIGEYIDRAITGRTDERPDFQRMIADARKQEFQRVIVWKFDRFSRDRYDSAIYKHKLKQCGVRVLSAMENVGEGDVSIILEALLEASAEQYSLDLSKKVLRGQRESRLKGTFLGGLTPIGYKLENRKLVADERTAPIVRYIFEQYAKGTSKQDIINELATRGILNRHGKPLSHSTLQTILKNKKYIGVYTHGGQDVAGGCEALIDEKTFLKVQEQLSKRKHAPAASKAVIEYLLQGKLYCGYCGFNMFGDSGRGRNGSTYRYYACRRRKKERDCKKKNEKKDFIEWYVVEQTVEYVLTPERIEYIASELVAQYKKDCGIDRIKTYEKQLDRIKAEISRLVDTLAVCPAAARQPIFDKMEQLDAEKQEVELDLSKLRISAKIQISKEHIADWLKQFCNGDALDVDFQKRIIDTFINSVYLYDDKVIIYYNIEGGKQVSYIDMIDSTEEPPFSDDAPGSSGGSDLKRPAPRLCC

SEQ ID NO: 12536 - protein, 464 aa, synthetic construct
MNEKTMTLTRMEAPAQLPVRKRVAAYARVSMEKDAMLHSLAAQVSYYSERIQRNPEWEYAGVFADFGLTGTKETRPEFQRMLQECREGKIDLILVKSISRFARNTLTLLNTVRELKGLGIGVYFEEQKLDTLSGDGEFMLTILASFAQEESRSVSENCKWRIRKKFEQGIPTGFGMYGYKVRNGSFAIKPEEAAVVRRIFQMYLEGMGSVKIMKLLTEEGVPAPLGGLWNASVVMEMLKNEKYVGDLLLQKFYTNNHVEKKRFHNRGELPQYFVGEDHEPIIDRETFDAVQREIAWRTAQRKAAKAKRTATNAELSASAVEPSMSSSGNNSRETIPLTDRIYCGVCGKRYRYKVTRLGTPYAAPVWICSTFNYRGKAYCASKQIPEDILKELIASALGTVYTEDSVHHIEMHPGNRVLFVFQDGHTEEHFWEDHSRKDSWNEEKRQKAAEKTRIQHQKRKEQEQ

SEQ ID NO: 12537 - protein, 559 aa, synthetic construct
MSEARTYEPTVTRVKTVRVIPPTIQPLSDIPAFSARPRRVAAYARVSTSSEEQLTSYEAQVKHYTEYIKSKETSDNWQFVDVYTDKGITGVSTKKREGFNRMIQDALAGRIDLIITKSVSRFARNTVDTLTAIRKLKEYGVEVYFEEQNIYTLDGKGELLLTIMSSIAQEESRNISENVTWGMRKRFADGKVTMPYGQFMGYRRGKDGTPEVVEAEADVVRTIFRRFLEGATPAMISRELNLAGVPCPSRKSLLSENEAEIAKARKKTSRWGTSTVENILTNEKYKGDAILQKTYCTDYLLKTFVVNDGSVVPKYYAQNSHPAIVSPEVFDLAQQELAWRRSLNGRYSGRSCFASRVVCGDCGAFYGSKVWHSTDEYRRTIWRCNNKYAGETKCATPHVTQEALEKAFVQVIQQMLSQKDRILTACREALDEAFDTMELDKAATRLQDQALGMAARVRQLVDENARVQRDQDEFKNDYEALLAEHARLSEKIRTIAEQKKDKAERRRRIEIFLHMLEEQKECADFEPGMFVALVDKVIIQHDGHMGFCFRNGMKCEYPQ

SEQ ID NO: 12538 - protein, 520 aa, synthetic construct
MKRITKIEENRSLDKKKKLRVAAYCRVSTASDEQLVSLAAQKAHYENYIKANDEWEFAGLYYDEGVTGTKKEKRDGLLSMIADCERGKIDFVITKSISRFARNTTDCLELVRKLLDRNVYIYFEKENLNTGSMESELMLSILSSLAENESVSISENEKWGIKKRFQNGTFIISYPPYGYDNVDGEMVIVPEQAEIVKQIFADTLAGKSTHAIAGELNAKGVLTKKGGSWTPGTINGIIGNEKYTGDVLYQKTYTDSSFNRHTNYGELDQYLVQDYHAAIVSHEDFDRANAVLRQRGKEKGNGRNTEKYQNRYGFSGRVKCSECGDSFKRRIHYKPSGSYAAWCCATHLTDKAVCSMKYVTDDALKRAFVTMMNKLVFGHQTVLRPLLQSLRGMNDKAQLLKMQELEEKIEKNMEQRQVLTSLMAGGYLELALFNKESNALAAEAETLRQEKDSLMYSLNGNMVKADELQKLLRFTSKGTMLTEFADGTFLEYVDRVTVLSRSEVSFELKCGLCLRERLVD

SEQ ID NO: 12539 - protein, 598 aa, synthetic construct
MRKINKIEPLMPMLPTRKKVAAYARVSIETVRLQHSLSAQVSYYSELIQSNPEWEYAGVYADDGITGTKSNRTEFQRLLADCEDGKIDIILTKSISRFARNTVDLLETVRHLKELGIEVRFEKEHINSLSGDGEVMLTLLASFAQEEIVSLSNNVKWGNRKRMEQGIPNGHFRVFGYRWEDDQLVIVPKEAAIVRRIFQNFLDGKSRLETEREFAEEGITTRDGKRWVDSNIKVVLTNVTYTGNLLLQKEYVEDPLTKKRKKNRGELPQFYVEDTHEAIIDKETFDYVQAEIARRKELGPFANKSLNITCFTSKLKCCRCGCSYVRNQRSNRTKHTSTYDDTIVAWGCGTTKKKGGRCSNKDIPERVLREACATALGLDEFDEDIFLERVDHIQVLEGQILEFHFYDGTTALLEWVSTAKKDCWTDEHKNRQREWMKNYMANASDGRFCEFTTRIRCEHCGSTFRRNTQPSKSANGGKMHYWRCPTSGDCVTTGIREDRLKDITASVMGLTEHDADAFKEQVEYISVSDDMKLTFHFFDGREPVVQYNTKRQGTPWTEERHKKFSESMQGKYTEERREAMSQRMKQIRSEKHWSSKRK

SEQ ID NO: 12540 - protein, 527 aa, synthetic construct
MVVQKKVTTIPASLTRFTATPITELKKRRVAGYARVSTDHDDQFTSYAAQIDYYTNYIKSRDDWEFVEVYTDEGITGTSVKHREGFKRMVADALAGKIDLIVTKSVSRFARNTVDSLTTIRQLKEKGIEVYFEKENIWTFDGKGELLLTIMSSLAQEESRSISENCTWGQRKRFADGKVTVPFNRFLGYDRGPDGNLVVNPEQAVIVQQIYAMFLQGMSYHGIAKKLTADGIPTPGGKEKWSISTVRSILSNEKYKGDALLQKSYTVDFLTKKTKVNEGEIPQYYVEDNHEAIISPEIFAMVQREMTKRGRGKNYHSSVHAFSSKIKCGHCGSWYGSKVWHSNSQYRKTIWQCNHKFDGDERCDTPHLSDEDIQRLFLSAANKLLVNKDEVVTNCREMRDLLFDTTELEAEQATLLEETQLISDMVQQTIYENAHVALDQTEYQKRYDSLTQRFETAKQRLETVMAELDRMQTQRADIEAFIESFEALPETLTEFKLENWHSLVDYATVYSIDDIRFTFKHGQEVQA

SEQ ID NO: 12541 - protein, 491 aa, synthetic construct
MYLRKSRAEEGQSTEEVLAKHRAALEELADRLGLPVDGVYEEVASGEKLYARPEMLKLLELIRAGEVEAVLCMDIDRLGRGGMADQGTILDAFRESGTLIITPEKTYDLTNDVDIEMTEFKAFFARAEWRAIRKRMRRGLMQTIEAGGYTANAPYGYRRCRIGKLPSLEVIPEEARFVCYIYKRYLAGIGAQTIAQELNVMGSTPRRGAEWNRNTVRHVLRNPTFAGKVAWNRVKHYRPGAHGKDKHHVVYTPEGEWLMVDGVHEAIIPWDTWLEAQERRKQRYIPPSNTGQRANPFAGIIRCSKCGNNMQRMGTNKGEPYLLCTTKGCAAGAKFEYVEERMVELLYDELARLRLLIDSGAAPNVDALEAALAAAQREQERVQARIPRLYEFLEDGTYDRATFRSRLDAAEKELAELANKRAGLERQIDERRRSDPRKAAAALENLVQLYPTMSPADKNSALKALGVEVTYTKEKKTKPRDFTLELQLRDF

SEQ ID NO: 12542 - protein, 543 aa, synthetic construct
MPRKKAPAAEAPRLVAYYRYSGGSRQTEQSIEGQRRDCEAYARAHGMTILREYVDRHISGKTDDRPAFQQLVADSAAHTFDAVICWKTDRLARNRYDSAVYKKKLRDNGVEILYAAESNISGAEGIIIEGLMEALAEYYSAELAEKARRGMRESALKGKALGSSRPLGLTVDADKHYIIEPTGAEAVRYIFEQYAAGLSSSSIVERLNAMGLRTSHGGPFNKSSINRIIQNEMYRGVYVSKKFDVRIEGAIPAIIDNDLWERAQKMFERNRQSRTPHASRADYILSGKLYCGECGCLMKGVCGRSSGNGQMYHYYACPGRSIGRACTRKNIPQDELEAMVVNSVADLLLEPELLEQIADAIVELQQAEAARPDPEKQALEKSLSDVRSKIQNILTAIENGTSSAALSARLADLEQQESTLSYQLSSLTAKKPLTFTRDQILFLLQQFRVSPSERTKAYCRRLVDTFVDHIELTNTELILYFNLSDETVDKNKKAPRSNPSEESSTEKRLVHLAHQQANYSLYAASGYFSLVEHQFSARWWRTA

SEQ ID NO: 12543 - protein, 464 aa, synthetic construct
MARSVTVIPARSQKVQTGHKAVQEKKIRVAAYCRVSTDQEDQLHSFEAQVEYYTKYINEHENYEMAGIYADEGISGTNTKKREQFKKMIVDCEGGKIDLVITKSISRFARNTQDCLAYSRKLKNLGIGIIFEKENINTLDSTGELLFTILSSLAQDESRNISENCKWGIRTKFKNGEMHLNTFKFLGYDKDENGKLVINKEQAKTVRRIYRDFLIGINPAQIAKELTEEKVPGCLGQTKWYPSTVTGILKQEKHMGDALLQKTYTADFLTKRQVRNNGEIAQVYVKDSHKGIIDKQTWNAVQEEFDRRERFMESHGTDRYSYGADCMPFCEKVFCGECKSLFTRHSWRSRGIVQWQCKNHRKDGKVACTNAYVDNADLEKGFVKAFNRLVTDRDKHMERWQQMKSDGTPLEKIRAGQMMEAVENEPLTRFVPEIAQLVLCEVTVLGAKKYEFFFLEGSRVKVSV

SEQ ID NO: 12544 - protein, 464 aa, synthetic construct
MARSVTVIPARNRQRETGRRAVQEKKIRVAAYCRVSTDQEDQLHSFEAQVDYYTKYINDHENYEMAGIYADEGISGTNTKKREQFKKMIADCEGGKIDLVITKSISRFARNTQDCLAYSRKLKNLGIGIIFEKENINTLDSTGELLFTILSSLAQDESRNISENCKWGIRTKFKNGEMHLNTFKFLGYDKDENGKLVINKEQAKTVRRIYRDFLIGINPAQIAKELTEEKVPGCNGQTKWYPSTIVGILKQEKHMGDALLQKTYTADFLTKRQVKNNGEIAQVYVKDSHKGIIDKQTWNAVQEEFDRREKFMEEHGTERYSYGADCMPFCEKVFCGECGSLFTRHSWRSRGIVQWQCKNHRKDGKVACTNAYVDNADLEKGFVKAFNRLVTDRDKHMERWNQMKTDGSPLEKIRAEQMMEATENEPLGRFVPEIAQLVLAEVTVLGVKKYEFFFQEGSRVKVSV

SEQ ID NO: 12545 - protein, 498 aa, synthetic construct
MEIQIREGSREQKRKLRVCAYCRVSTDADEQENSLENQIRHYETVIKANPSYEYAGVYSDFAISGFKEKRPGLQKMLADAQKGKIDLILTKSVSRFARNTSIVLEATRKLKELNVGVFFELQNINTLSGEGELMLTILAAFAQAESESGSVGAKMVYQRKYEAGIPVQYLERSFGYMKDERGVYIADESEAVWVRKIYEMAADGYTPASIKRYLNENGVKTVGGAEWIDSTVFRLIENEIYKGDYIMHKHFVNEERKLVRNRGEVDAWYIEDDHEAIVSPELWQKAQDAIEAKRDYLAEGSVIEEFTEDNYPYMNRIFCAKCGHPLYRRIYSNGNRLNWGCSGTKRHGKSFCEGINIPDGVLRKAWHFDGNMYIDEKPSVKGTKEFTYLKESSWKRRHKKKVPEAIPENTEEAYPYRKKIFCGLCGSRLVRHVNPKSHKVIWICNGAKRKGVAFCRGTRIPDSVIRGWGEIKKDIYIQRKDDKNGKKRYSYTSKKPTA

SEQ ID NO: 12546 - protein, 506 aa, synthetic construct
MPKKETTAPVKAVLYVRYSSDRQREESIEGQIRVCEDYARRNNMVIVHTYADRAMTGRSDQRPEFQMMIQAAATQAFDVVLVYKLNRFARNRYDSAKYKHKLKKYGVHVVSAMENIADDPSGILLESVIEGMAEYYSAELAENVMRGMTENALECKWSGGLVPLGYKLDADHHLVIDEAGAQIVRRIYQMVLDGRTPTGIINELNAANCRTSTGRPFGKSSLTTILRNEKYIGTYTWNHIRKENAIPAIIDRKTFEAVQKTLQYRKNNHVKVCSENFLLTGKLFCCQCGSNMVGTSGTSKYKNTYYYYACTKHLKKDGCTARNIRADKLEELVCSVTTRILSSKEAVHAIARQAVEAQKKQKESLTVQSLKNQAAEINKKLKNCVQAVESGLISVTITNHIKEYEKRLTELNEAISREELLSGKSKLTEKHIEFFFYSIAQKIKTADKYKSILLSSLVRCVIVYDDYIEIQYNYKNELPLLQNPVRVKSSNLNGMVTQERFELPTP

SEQ ID NO: 12547 - protein, 459 aa, synthetic construct
MSTTHFYSHYPTIEYKTCALYVRCSKEEQAKFGDTIEAQIEDLKAFAKLHHLKIYAIYVDEGHTARKKYNKRKEFMRMLQDVELHKFEYIIFTKLDRWFRNIADFYKIQEILDNNGVTWLTALERYEMETTNGKLNVNIRLSVAQDEADRDSDRIKDVFRLKVKKGEAITGSLPIGLMVGENGKVDIDPDTVQIAYDMFDYFEAHNSKRGTLLYLIDKYNRYFCYETIARALRNPLYKGEYRGNPDYCPKIIDPARFDRIQVLGKRNVKVRKNNRYYVFSGLAQCKECGHALVANTTVQKRYNREYTQYRCNYYSNSHLCTHSHGTNEKVIEKYLLDNIKPELEKYVAAYDVKQNAPTKKADPSKIKTKMQRLKELYVNELIDLDDYRIEYEQYKQELDRLTSTAAPEAKDLSAIRSFLALDLQSIYDSLTPQEKRTLWSSIIDKIIISDSGDIEIVFL

SEQ ID NO: 12548 - protein, 528 aa, synthetic construct
MRYVIYLRKSRADLEAEAHGEGETLSRHKTALLELARRMGITISATYEEIVSGETIAARPQMQRLLSEVGAGEWDGVLVMEIERLARGDTMDQGLVAQTFKYSGTKIITPLKTFDPQNEFDEEYFEFGLFMARREFTTTNRRLVRGREASAKEGKYVGSVPPYGYRKVKIPNDKGFTLEIVEEQAKVVRMIFEWYAEGAEVNDQKKRIGPYTIAVRLNELGIKSVAGKDYWTIYGVQHMLINPVYIGKIRWGYRKVKKTVTPEGMKKKSREFAQDGDYIVVDGLHEPILSEELFYKVQDLIAANPPTPIKYRNNNVNPFAGLIFCAKCGHCLSYRKGYGRHPGYLGCNIAGCDNKAAPFELIEQRVLSILNSWVKDYSVDKAQIKHEADLNVELSNAISLAEKEIETLQDQLDKVYSFFERGTYTEKIFKQRSSAIEQQITDIGEKIDRLKAEHQQVLERQNVQAEFVPSIKHLLEIYDTLEPVEKNKWLKQIIDHMVYEKNADGKYRNVDPGDFTLGILPRLPKKGS

SEQ ID NO: 12549 - protein, 502 aa, synthetic construct
MEIQIREGNSRQKQKLKVCAYCRVSTDADEQENSLENQIRHYKEVITSNPDYEYAGVYSDFAISGFKEKRPGLQKMLADACKGKIDLILTKSVSRFARNTSIVLEATRKLKELNVGVFFELQNINTLSGEGELMLTILAAFAQAESESGSVGAKMVYQRKYEAGIPVQYLERSFGFKKDERGVYIADEEEAAWVRKIYEMAADGYTPAVIKRYLNENEVKTVGGAEWIDSTVFRLIENEIYKGDYIMHKHFVNEERKLVRNRGEVDAWYIEDDHEAIVSLELWQRAQDALEAKRDYLAEGSVIEEFTEENYPYMNRIYCARCGHPLYKRIYSNGNRLNWGCSGTKRYGKSFCEGINIPDGVLRGAWHFDENMYIGEKQTDKGKKEFTYLKEASWKRRHKKKEPEPIPENTETEYPYREKIFCGLCGSRLVRHVNTKNHKVIWVCNGRKRKGKDFCDGTRVPDTIIKGWGEIKKDIYIQRKDDKNGKKRYSYTSKKPKGADRA

SEQ ID NO: 12550 - protein, 620 aa, synthetic construct
MEKKVIAIIRTSTTQQEIDSQRKEVLSMAIADGYSIDEIEVVGEKGASAIKMDDAYLKNMNKVYELIEVQPIEAVYAWAIDRIGRNRTMLNNFRETLCKKHIQLIIKNPELRLLNPDGSENNGIGLAFALFSEMAVQEMEQKKARFNRARKRNDEKGKYNGGYVAYGYMVQDGYIVINEDEAKVVRLIFTELASGKYSCDGLARELQARGIKFKGKKMLFSNVRGILKNKIYCGEQVTTSGAIRNVPQIVSKELYDKARAAISANNPTKTNSTTNRFCFGLRLIKCPYCGCHFSVAAKLYQCHNHNRNYYDSRQGFEKCPNGISIGAANLDRLLWYAAATVHFAYLKQLTGQRDEEIDDKIEVLNQKIQHLQNEIDSLIDKRKRINLVFMDGDMSEKERDERLAKLLKDNEKYAVQIREYEEEIGKLTALKDGDIGDEILFENFHNLMMLDNLELQSKIVRQHIKNIVLEKAEYAPYKRVLKITIQFYNHPELQYLYLAKSLGEFYTITNGELDRDIKGNLVPIPNLKEMGDILGDEEEGVSGYRFAPEIIAIKDSISESKELTDIVKQTYSLTDIDIAFISRTASRFFIGKADAVLQQRIGRLVARKVVIPLDNTTIPL

SEQ ID NO: 12551 - protein, 541 aa, synthetic construct
MAKRIPAAASDCDGMIGVIYARYSSHSQREESIEDQLRECHEFAARNNIKIIAEYTDSALTGRTDSRPDFQKMIRDSARGKFQVVVTYKVDRFARDRYDSAIYKAKLRKNGVRVLYAKETIPDGPEGIILESVLEGYAEYYSAALSQNILRGLEGNAMKCKTNGVQVLGYYTGEDGCYEIDPDYASVVLSIFQKYDAGIPQKEIIDDLNARGFRTTRGFAFNKNSVTRILRNRKYIGEYSWGDVTVPGGMPQIVPLPLFDSVQRKLDRGSRAPAHKWKVADYILTSKLFCGHCGELMVGRAGTGKSGKKYDYYACVNRTRRHGCDKKPVKKEWIEDIVVKYTKEVVLAENMIEQIADGVMDFLEREKKSNGELDALEASLKNVESSIRNMMQAIEQGIITKSTKQRLMELEEQQDQISAAIAREKMATPDIERDQIVYFLEKFKEGSLDDPDYRTKLVEAFVSSVYLWDDGRIVINYNYTGENNQLTLRQIEQELVDIDGAEGSPLDSSAPLNESEANTTRILYFRGVVSFVFNWKVFAEH

SEQ ID NO: 12552 - protein, 542 aa, synthetic construct
MKITAPARSAGAVSLEAFVDNLNLANVVIYARYSSAGQNDQSIDGQLAKCREYAQQRGYRVVGEYCDRALSGRYAETRPEFQRMISDSAKHAFDFVLVWKLDRFSRDRYDSAIYKKKLRANGVRVLSVTEGVGDSSESVLLEAILEAMAEEYSRQLAQNVRRGMRQNAEKGLSLGGLAPLGYRVVNKQYEINEDEARIVRFIHEHYADGAGQKQIVADCARLGYRNQRGNPLTLASVKRILANERYAGRYDYLGEIVIEDAFPAIVSKELKKRVRDRLKANSKAPGHAKAKVEYLLHGKLFCGECGAPMIGECGRGRHGATYYYYTCAARKKQHTCKKRNERKDELEACIVDYIGSCVLTDSWIDGAAERVVAEYQKSYDASGIKPLEKQIRDADKEIDQLVDALISATAEAARRRINERIETAEARKQALEADLASLRIASRVQIKKEDIVVWLNQFRTGDRSDLEYRKKVIDLFVNSIYLYDDTFKLFLNVTDSTQITYSDSLALAPPSVSDFGASGVPDMHLSEHIIFVNGVIGMIVQR

SEQ ID NO: 12553 - protein, 427 aa, synthetic construct
MQISYIKKTEDPIPKKRRVAAYARVSSGKDAMLHSLSAQITFYSGLIQRNPDWEYAGVYADEAITGTKASRPEFQRLLCDCKAGKIDLILTKSLSRFARNTVTTLQTVRELKECGVDVWFERENIHSLSEDGEFMLTLLSAFAQEESLSASENQKWKIRKNFSEGQPTPTRILGYKLVGDRFEVIPAEAAIVKRIYTDYLSGLGLTAICKKLMNDGVPTKNGGQWRESVIRSILTNEKYVGDILLQKSYVTDHISKKQVRNNGELPQYYVKNAHEPIIDRETFAIVQNEMQRRSSAYPHARCSDTALHEFAGKILCGKCGCKYRRKKLASGKVVWICPTFNRLGKAYCASQQIPDAILRDLVGGIAFDHICVPCANTVTIITKSGEEITRTWENPSRSESWTPEMREKARQRSIIHGKKRSNDYSGD

SEQ ID NO: 12554 - protein, 533 aa, synthetic construct
MAKREVTIIPAIKPKYASKATEVGRKRRVAAYARVSTDSDEQFTSFEAQVDYYTKLINAREDWEFVEVYTDEGISGTSTKHRAGFNRMVSDALEEKIDLIVTKSISRFARNTIDTLTTVRRLKEKGVEVYFEKENIYTLDSKGELLITIMSSIAQEESRSISENVTWGQRKRFSDGKVSLPYKKFLGYEKGEDGYPKVVEEEAKVVRMIYRLFLEGETPSGICHILMAQGIPSPGGGDKWHKSTIDSILTNEKYKGDALLQKKFTVDFLSKKQKINEGEVPQYYVEGSHEAIVSPQVFDLVQFEIQRRKELPTKYSAVNPFSSRIICGECGGLYGSKVWHATDKYKRTVWICNRRYRKGTIAGTGCHTPHLTEAEIKAAFLGAFNKCIRNKAEIIENCRIALAEITDTVELERKAAELSEECEAAAGLIRKCVEENAHISVDQNAYAEKYGALAEKYAKYKERLDATNMEISRRNIRKSQIAFFLDELAKSKELVTEFSTGLWNTVVDSVTVYSRSKVVFRFKGGTEVTWKIV

SEQ ID NO: 12555 - protein, 520 aa, synthetic construct
MKNVTKINQVDFSIFKKTRVAAYCRVSTDSDEQELSLETQKNHYESYIKANSEWEYAGIYYDDGVSGTKTAKRDGLLRLMEDCEKGLIDLVITKSISRFSRNTTDCLTLVRKLLNYEVYVIFEKENINTGSMESELMLAILASMAESESRSISENEKWSIKKRFQNGTYVISYPPYGYANVDGEMVIVPEQAEVVKEIFAGCLAGKSTHIIAKELNEKGVPTKRGAKWTGATINGILTNEKYIGDALFQKTITDASFKRKRNYGEEEQYYCENHHEPIIDKDTFEKAKEAIRQRGLEKGNCSEDTSKYQNRYAMSGKIKCGECGRSFKRRYHYTSHGRSYNAWCCGGHIEDSSSCSMKFIRDDDLKRAFLTMMNKLVFGNDLVLKPLLISITTSNSKKNIHSMEDIEKDMQGNEEQRKQLNTLLTRGYLESPVFAEAHNKLVMEYEQLTAKRDLLYRMDNAGYTMEQALSDLVSFLNGAEPFTEWDDSLFERFVEKVKVLSREEVEFELKFGLKLKERID

SEQ ID NO: 12556 - protein, 508 aa, synthetic construct
MKKAIAYMRFSSPGQMSGDSLNRQRRLIAEWLKVNSDYYLDTITYEDLGLSAFKGKHAQSGAFSEFLDAIEHGYILPGTTLLVESLDRLSREKVGEAIERLKLILNHGIDVITLCDNTVYNIDSLNDPYSLIKAILIAQRANEESEIKSSRVKLSWKKKRKDALESGTIMTASCPRWLSLDDKRTAFVPDPDRVKTIELIFKLRMERRSLNAIAKYLNDHAVKNFSGKESAWGPSVIEKLLANKALIGICVPSYRARGKGISEIAGYYPRVISDDLFYAVQEIRLAPFGISNSSKNPMLINLLRTVMKCEACGNTMIVHAVSGSLHGYYVCPMRRLHRCDRPSIKRDLVDYNIINELLFNCSKIQPVENKKDANETLELKIIELQMKINNLIAALSVAPEVTAIAEKIRVLDKELRRASVSLKTLKSKAVSSLGDFHAIDLTSKNGRELCRTLAYKTFEKIIINTDNKTCDIYFMNGIVFKHYPLMKTISAQQVISTLKYMVDGEVYF

SEQ ID NO: 12557 - protein, 515 aa, synthetic construct
MMQQALNAVIYARYSSHNQTEQSIEGQLRDCYAFAEREGLQVIGEYIDRAITGRTDERPDFQRMIADARKQEFQRVIVWKFDRFSRDRYDSAIYKHKLKQCGVRVLSAMENVGEGDVSIILEALLEASAEQYSLDLSKKVLRGQRESRLKGTFLGGLTPIGYKLENRKLVADERTAPIVRYIFEQYAKGTSKQDIINELATRGILNRHGKPLSHSTLQTILKNKKYIGVYTHGGQDVAGGCEALIDEKTFLKVQEQLSKRKHAPAASKAVIEYLLQGKLYLYCGYCGFNMFGDSGRGRNGSTYRYYACRRRKKERDCKKKNEKKDFIEWYVVEQTVEYVLTPERIEYIASELVAQYKKDCGIDRIKTYEKQLDRIKAEISRLVNTLAVCPAAARQPIFDKMEQLDAEKQEVELDLSKLRISAKIQISKEHIADWLKQFCNGDALDVDFQKRIIDTFINSVYLYDDKVIIYYNIEGGKQVSYIDMIDSTEEPPFSDDAPGSSGGSDLKRPALRLCC

SEQ ID NO: 12558 - protein, 435 aa, synthetic construct
MAAYCRVSTDQEDQLHSFDAQVDYYTRYISDHPNYEMAGIYADEGITGTNTKKREQFRRMISDCESGKIDMVITKSISRFARNTQDCLQYSRMLKNLGIGILFEKEHINTLDSSGELLFTILSSLAQDESRNISENCKWGIRSKFKKGEMHLNTHKFLGYDKVDGKLVINEREAKIVRRIYREFLWGHSPQEIAKGLEDEKIEGCMGAKKWYPSTVINILKNEKHMGDALLQKSYTADFLTKKQVKNHGEVTQVYVKGSHIGIIDKEIWNAVQLEFARREEFVKEHGLKGYGYGRECNPFTSRIFCGECGSSYTRHTWKSRGIMQWQCKNHMTNGKVTCVNRVVSQSDLELGFVRAYNMLMSRKENLILRWKKTIETGNALEKLRAKQFMELSEQPKLECYVPELAQLVIQMVIIKGAKKYEFTFMDGSRETVSV

SEQ ID NO: 12559 - protein, 542 aa, synthetic construct
MTQVVVPDTFQGSPHDGEPWLGYIRVSTWREEKISPELQQVSIQQWAARTGRRIVDWIVDLDATGRNFKRRIMGGIQRVEEREAVGIAVWKFSRFGRDRPGIAINLARLERVGGRLESATEDVDATTAVGKFNRGILFEVAAFESDRAGEQWSEAHALRRSAGLPATGGQRLGYIWYPRRIPDPNRLGSYLLQQERYEINPQTVGDIEALFERKLNNEGYGALAGWINRLGYRTGHNTLWRADSLRRYMLSGFAAGLLRIHHPECRCNYTGNGGNCKRWTFRDGAHEAIISPETWEKYQAHVEQRRRISPRARNPTYMLTGLVRCGECHGDCGASSAPRAGGRVYGLAYQCGTRGRSGGTLCTRGVWVQRHIVEDEVLNWLRREAAEGIDNAPAGPVERPQVNAARDRAAAERTRLQAESDRITQGLANLAADRALAPDAYPEGVYEAARGRLLTQQVEVTKALSMAAEVELAPDRSDYVPIAVGLLQEWETINVQEKNAILRQLIRRVVLTRGAMGRKGVKGSAQNRIDLHPIWEPDPWAD

SEQ ID NO: 12560 - protein, 558 aa, synthetic construct
MTNAVIYARYSPGPNQTDQSIEGQIHECTRFCEDNDLRIVGTYIDRKQTGRNDNRADFQKMLRDSSRHGFSTVVVWKIDRFGRNREEIAKNKAVLRMNGVRVLSAKEHIPDGPEGIILESVLEGLAEYYSANLSQNIKRGMRESALKCQFNGSGLSTGYTVDADHKYRIDPDGAAVVRTIFEMYDGGKKIADILRYLQQSNIKTMRGKEYTHYGISRILRNRVYIGEYHWHDIVVPGGVPQIIDNDLFDRVQKRLEANKHAPAARRGDVDFLLTSKLICGNCKSTMIGDCGTGKNGARWYYYTCRAKKTKSSKCRKKSVPKEALEREVTALTAAYVLRDDVIDYIADKVVEIQKSEHDDKSMLRYFESQLKDTNKAIANIMRAIEAGIITETTRSRLEELEDTKRDLETEIIKEKVARPTIEREQVIFFLEKFRGGNVDDKEYQRKIIDTFVHKVILYDDKITITYNYSTDSTKNAENTVESIESAASAAECKCSNKPSSSPPVTRILLLQCSCYFFRRGSNRMVLRSRIPSVRWTVGKSACVSAHGSAPSDPLRLHQ

SEQ ID NO: 12561 - protein, 559 aa, synthetic construct
MSKTVAIYVRVSTGKQADRDSIPFQIQECSNYVKHFLKTENFEVFKDAGRSGKNTHRPEYQRMIEKVKAGMISHVVVYKIDRISRNLVDFSIMYNDFKEHKVAFISLNEQFDTSSAIGEAVLKIILVFAELERKLTGERVRDIMMNRALEGKWNGARVPYGWDWDTKKQCPVHSDTEAEYARMMYRLYDECHSTCVVRDYCNAHDIPTKRGGEWTSKTVADFLRNPMNVGDYRYNYRKSARGKRNDPSEVIYVKDVFPPLIDRELYERVTHQMDLNTFGLGKDGRKVVSKKTHVFGGLVVCGLCGAFYHSDADVVRADGFRPSNYRCGAHNKKIHCKAKGTSDVKLGPFIFNYISNLVKASKSKKLLHSVSDLEQILLTGPEFEQVAGIADIGLDVTFDTIMHGFKPKRYTAAPYTVIRSGDSDALTAKRDKTIRALERLKKLFLFEDDAMSEKEYLMSKRELEGTLSDIENELSALETDATDTKYDDMSFISTASGFLIAHQIASGEHINYRELACAVDAKVLKDFANSVIERIVLLDGRVASIEFKNGLVHEFLYRE

SEQ ID NO: 12562 - protein, 506 aa, synthetic construct
MQKKIIEDKGKAVIYARYSSDRQREESIEGQLRVCEDYAKRNGMTILHVYADRALSGRSDQRPEFQMMIQAAATQAFDTVLVYKLNRFARNRYDSAKYKHKLKKYGVKVVSAMENIANDPSGILLESVIEGMAEYYSAELAENVMRGMTENALECKWPGGTVPLGYKLDAAHHLIIDEPAAKTVRWIYQMALEGRQPSSIIRELNAAGCRTAFGRPFGRTSLNTILKNERYIGAFVWNDIKKPNAIPAIVNPEDWQKVQEITKAKKKCIAKSRGENYLLTGRLFCGQCGGSMVGTAGTSKMQRVYHYYDCGNHLKKKGCTTKAIRADKLEDIICNTTTQLLSNQEAISAIAKQAISAQKEQGPSLVLQSLQNQRTEISRKLQNCIKAVEKGLISQTVTNHIQDYEKQLQTLNDDIRKEELMNQVPRLTEKHIEFFFWSISQQIKKADKYKSILLSSLVRSVIIYGDFIEIQYNYKKELPILQNPVKIKSSYLNKMVIHPGFEPGTP

SEQ ID NO: 12563 - protein, 526 aa, synthetic construct
MPKVTMIPATVNSLTHLPKASVQKRRVAGYARVSTDSDEQFTSYEAQVDYYTRYIQSKPEWDFVRVYTDEGISGTNTKRREGFKEMIADALAGKIDLIVTKSVSRFARNTVDSLVTIRKLKENGVECYFEKEGIYTFDGKGELLITIMSSLAQEESRSISENITWGQRKSFADGKIHLAYKHFLGYKKGKDGRPAIVEEEAVVVRLIYRLFLDGKTQAGICRYLEDLEIPSPSGKAKWSKTTVTSILTNEKYKGDALLQKSFTVDFLQKKTKLNEGEVPQYYVEGSHPAIIEPDEWNHVQAEFARRKALGNAYSGKSVLSAKLVCEDCGGFFGSKVWHSTDRYRRTVWQCNNKFKGGERCLTPTVDTETVQQLFIKAYNQMMGNRKQIIEDCELMRKKLTDFKSLDADIERHLEETQIVAELVKAAVKDNAVTAQSQEAYLKKYESLTKRYETAAAELARLQNLRTLRSQKDKAVALYIRTLKKQPTVLSEWNDTLWTVMVEKAIVHRNSEITFVFYNGTKVKVRQ

SEQ ID NO: 12564 - protein, 509 aa, synthetic construct
MPEALNAVIYARYSSDRQTEQSIEGQLRECYAFAKANDIAVIDTYIDRAISGKTDNRPAFQKMIEDSAKRQFQAVIVYRLDRFTRNRYDSAIYKARLKKNGVKVLSAMENLNGSPESIIMESLLEGMAEYYSVELSQKITRGMRENALKGKALGGQRVLGYKVNSDCYFEIDETTAPVVVDIFKLYSSGKTVKEICDILNARGVKTARGGAFNKNSLHTILTNKKYIGIYKTKYGEIVGGIPAIIDKELFEMVALRMEQNKKAPARAKAEINYLLSTKLFCGKCRSAMVGESGTSKTGKKYYYYACVKKKREKACDKSNVKKDWIEDLVIQRTVTDILKDDVIDKIADRLVELQKAEAAESGTMLYLENSLAEIQVSIKNIMTAIEKGIITESTKTRLTELEDEKRNVEIEIAKESIARRIISREQIIYWISSFKDGNITSEKYRQQLIDTFVHAVFVYDDKIVITYNYSGENNTATISDLDLSSPPLQSNPNIFVTLDVFGLVVQIER

SEQ ID NO: 12565 - protein, 590 aa, synthetic construct
MKTVEKIERKLPVLKTRKRVAAYARVSMESERMQHSLSAQVSYYSALIQKNPEWEYAGVFADYGISGTGTKKRDEFNHMLAECEAGNIDIILTKSIQRFARNTVDLLNTVRHLKELGIEVRFEKEKINSLSGDGELMLSILASFAQEESRSISENVKWGAIKRFKQGIPNGKFSIFGYEWQDDKLVIVPEEAEIIRWMYAEYMKGASRIEIGRALMDRGIYTRQGKPWVDSNVKVILTNITYTGNMLFQKEYCEDPITKHRRKNYGEMPQYFVEDTHEAIIPMDEWQAVQAEFKRRRDLGPFGNKSLKLSAFSTKITCGCCRKHYRHSGKRNTAGEVYYIWICQTKSQKGVSACPSKNIPEKMLQNTAAKVLGLDKFDEDVFSQQIEEVIVIGDDTLTFRFYDGHEVTTKWQSTAKTDWWTDERRKLWGERHKRKDTNPNRNTFYEFTGFIKCGCCGANYRCQSGKRKDGTPTRSWYCTGPRSECRNPAIRDETMKRLVTEILGLDEFDEAAMDAQIESATILDHMVTFHFRDGHIESRDFLDKRHGTPWTEERREKAKKSMKAAWTDERREAMSERIKKIRSEKKWPNP

SEQ ID NO: 12566 - protein, 523 aa, synthetic construct
MRFFSYGRKSVFSDKSDSIDNQFRMNREYCESKFSGQVDSWQQFSDEDFTGANTSRPDLQRMLSFIKGGFCDVLVVYQLDRLSRDVRDFANIYALLEEHGVMFISIKENIDTTTPIGRAMMYVTVVFAQMERETIAARVTDNMLGLAKKGYWTGGNPPVGYVRKHIVVNGKKHCSIEVDPDGARYVTQIFDTFLAYNCSLQGMETRFKNQGIRTQSGKFFSTTQLHKMLTMPYCVEATPEVYDFYAAKGCIMDPGSPREMWDGSVGVIIYGRSTEKNKKHQAQPPEKWTVCLGKHKPFMPAEKWLAVQSRFTQNKCIKDAKWPVPLLKGVLRCKCGNLMQVSRKKKVDGTCSSWYYCRKRMRQGVDACDMGQIKCDLLDEEVLELFRGITADPALIQKFVKAEAPADVPDLKAAQARVSACERKIARLAASLALAEDSAASKYIIAEMERLDVELGALKREASLAEMESHRAAASAKDAKATAAEIAKLIHGLDGFDDKEKNAIARAVIQECAWDGERIFITL

SEQ ID NO: 12567 - protein, 516 aa, synthetic construct
MARRKKVSPGNRLVAYYRYSGGSQQTEQSIEGQRRDCEAYARQHGLTIVHEYIDRHISGRGVESRLAFQQMIADSSKHLFDLVICWKTDRFARNRYDSAVYKKKLRDNGVRILYAAESSVEGPEGIILEGLMESLAEYYSAELAQKMRRGMRESALKGKAINPNRPLGLTTDEHKRFIIDEKNAPTIRFIFEHYAAGESSASIVDQLNAAGLRTSKGNSFNKCSIPRIIQNEAYHGVYICKAYDVRIDGAIPAIIDDDLWKRAQKMLTLNKQHRAPHSSHADYLLSGKLFCGCCHSLMRGISGHNCRNDVYYYYACGNKADGGTCKKKNIPKDVAENLVVNAICENILRPDTLEDLADAIAAAQQADVNQPDPERAMLEQNLADVRRKINNIIESIENGTASSRLSARLADLEQQESTLNYQLESLKEVHPPVLDRERILFLLDQFLISPNERTEDYNRRIIDTFVNRIEITDTEMLIYFNLSEASASEKQKNSQPNSCSTGNHLVRVARIELTAS

SEQ ID NO: 12568 - protein, 521 aa, synthetic construct
MGNVMVIPAKRQVGNTARQQDAKPKLRVAAYCRVSTDSDEQATSYDAQVEHYTEFIQKNPEWEFAGIYADDGISGTNTKKREDFNRMIDDCEAGNIDMIITKSISRFARNTLDCLKYIRQLKDKNIPVFFEKEAINTMDAKGEVLITIMASLAQQESQSLSQNVKLGLQFRYQNGQVQVNHNHFLGYTKDVDGNLIIDPEQAEVVKRIYREYLEGYSMDRIAKGLEADGILTGAGKTKWWTSTINKILRNEKYIGDALLQKTYTTDFLNKTRVKNNGIVPQYYVEGNHEAIIPKDIFLRVQEELVRRRVVKTSTNGKKRSYSCNHCFAQIVICGKCGEMFRRIHWNNRGCKSVVWRCISRLEPTGQECRARTVNETVLENVVVQAINMLLGDKSTYQAQLQQNIAKVIRSAQQNTADGIDEKLQSLQKELLKKANNKEAYDEIADEIFKLREQREKCTVDTAARDAQITRINELQDFIKQQPAHLEAFDEALVKRWLERIIVWEDHFTVELKSGLKIEIEG

SEQ ID NO: 12569 - protein, 519 aa, synthetic construct
MKKVTKIDKIQPSLASKKKLRVAAYCRVSTDSDAQLESLDAQKEHYKSYITSRDDWTFAGLYFDEGITGTKADKRPMLLRLIEDCKAKKIDFVITKSISRLSRNTTDCLEIVRTLLSLDIPIYFEKENINTGSMESELFLSILSSMAEGESASISENNKWSIKKRFLDGTYKLGYVPYGYCWKDGEILVDPEQAEIVKRIFRELLSGKGTEAIAKELNQEQVPTKKSGRWTSTSIRDIIRNEKYTGDCIFQKTYTDSNFNRHKNDGHLDQYYVPDHHEAIISHEDFEAAAALIEQRASEKGIKKGNAKYQQRYAFSSKIICSECGNTFRRRIHSNTYGKYAAWVCNTHLENTNRCSMLYIRDDDLKLAFTTMINKLVYCHKLVLKPYLKALQENTGDASLLNIQQLEMLLEQNTEQRETLHKLMGQGYIDQILFTQENNALLSQANDYRNEIEALNRSQSLDATKVYETERLLHFCERGEMQPEYSKELFELFVDHIEVYSRQKIGFALHCGLILKEMI

SEQ ID NO: 12570 - protein, 474 aa, synthetic construct
MNRAALYIRVSSKMQAEEGFSMEAQHDILMSVIERKGLQLYKVYSDPAVSGKTFKRPGVQMMLQDMKDGKFDTVIIHKLDRLSRNQGDLYGFINLINKLDVRLIIAAQGSEEIDTRSPMGKAFLMFSGIWAEIYLDNLREETLKGLTKKAQNGGRHMSRPPLGYMFDSDLNLIVVEEEAKLVREVFTLYLSGLGRNKIAQMMNEHSRMKEGGKWGAKEIKTLVMNPTYAGYNHFKPSHWDDSKRILTQGAHQPIVTIEEYEKVQKMVNRRKAGEMSNNSYAYAYSGILKCAKCGANFNGNSSKKRMADGSYQVYKGYRCHNNYLYKTCDTPTISEPALNQLVFERVMVSGNSVQERKKKRKEQFDLQKEVEISNRRRKNWMIALGDGNLSSGDYAQLIEEEEQRMNDIYSKAKQEDVYESEIPAEDLIQMLITLKEHWSLLEEGTQKELIQSMFRKITIDKKENGWQVNDLLTV

SEQ ID NO: 12571 - protein, 528 aa, synthetic construct
MARQITVIPATRDKFTALPTASIQKRRVAAYARVSTDSDEQFTSYEAQIDYYTTYIKKRDDWEFVKVYTDEGISGCNTKRRDGFNEMVTDALAGKIDLIVTKSVSRFARNTVDSLTTVRKLKEKGVEVYFEKENIYTFDGKGELLITIMSSLAQEESRSISENVTWGQRKRFADGKVTMPFKHFLGYDRGENGQPVINEEEAKTVRLIYHLFLQGKTAVGICKHLDGLDILTPSGKKKWSQTTVMSILQNEKYKGDALLQKKFTVDFLTKKQKVNEGEVPQYYVEGSHPAIVTATDFDAVQDEIARRQGLGRFYSGSSIFASKLICGDCGGFYGQKVWHSTDAYRRVIWRCNSKFKGEAKCETPTWDTGTIQHMFLTAYNKLMTSRDQLLQDCETMRALVNDCTALNAEIDSLNEEIQVVAGLVSLCIKENATTEQSQEEYAKKYNRLVKRYEKATARLKVVTEERERRMQRDRELRIFIGSIEKQPLVLEAWDEGLWISLLDTATVHSDGSITLRFKNGTEIEAGVE

SEQ ID NO: 12572 - protein, 423 aa, synthetic construct
MPKTVTRINFLPRLESKKKVAAYARVSSGKDAMLHSLSAQVSYYNDLIQREDGWQFVGVYADEAITGTKECRADFQRLIADCRAGKVDMIITKSISRFARNTVTLLETVRMLKALGVDIYFEEQNIHTMSADGELMLTILASYAQEESRSASENQKWRIKKNFEEGLPWSGIILGYRLVNGRFEIVPKEAALVQRIFTEYLNGAGAGLIAKHLDENGIKPRRGERWHPNTIQKMLRNYNYTGNLILQKTFRENHITKNTIINEGQLPKYHAEGTHEAIIDMDTFIAVQMEIERRAKQYTPKPSTTRRYPYTGKITCAECGKCYRRKTTKTQIVWICATFNTRGKAYCAAKQIPETTLDAIVAEIPGGIGAVDTITAADNNTLHFHLKDGTTLTRIWKDRSRAESWTPEMREKARQKANERSQT

SEQ ID NO: 12573 - protein, 556 aa, synthetic construct
MKGAVIYARYSCERQTEQSIEGQLHECYKYAEKNGLSILGEYIDRATTGTNDNRPAFQKMLADSERTTAWDIVLVYAIDRFGRNSIEIAINKQKLIKNGKNLISATQRTSTNIDGSKNLDGILLENVYIGLAEYYSAELSQKIRRGLTESRNKGLFCGGKVVYGYYVKDKTIYINEAETETVRYIFQEYNNGKTIPDIIEVLDARGIKYKGETFKKNFIYRMLRNEKYIGITKYDGVEYKNIYPPIIKEDLFNAVQSRMVTYSVGAHSKDADLLLKGKVVCGLCGHMMNGDCSTSRSGKLMHYYKCSGRKRGTGCESRILRQDKLDEFIVDVTKQVFCSKENIQLLVDKVIAVHKQRQKDESILNSLKSRHSDLVKSINNMLFALQEGIITPSTKERLNMLESDKAEIEEQIAKEELALSKQISRDDVEYYLRRAIKSSPKILLNNLVDKVIVYNDKIEIYYKYCHKIPDDPDDQRGYFFEELRIPINCGKRNRQFLPIMIDHQKMIASVKYILNRKKKMLAPINYKKRPILASQNVTGADGYLLVEPRGFEPLTF

SEQ ID NO: 12574 - protein, 434 aa, synthetic construct
MERVIERVDLQIPMQPRALCVCAYARVSSGKDAMLHSLSAQVSYYNSLIQSHAGWLYCGVYSDEAITGTKSQRDGFQRMLASCRAGEIDLIITKSISRFARNTVTLLETVRELKSLGVDVFFEEQNIHTMSADGELMLTILASYAQEESLSASENQKWRIRKAFENGELVNLRFLFGYNITASGIQVNEKDAAIVREIFTRFNGGESLSSISRDLNGRGCERTFGGTWCADRIRNLLSNEKYTGNALLQKKYRNNHIDKKLVPNRGRLPMYYVAGSHESIIDQTAFDKAQVRLNEMARQAEKREKPTRSTFSGLIRCGLCGSTYKRVTCRGKHFWNCTTFQTKGKAECPAKKIPAETLEALACEVLGTEVLAPDMVRSKITMIRAEKNNVVVFCMDDGSEIVKRWKDRSRAESWSPEMKEQARQRALQTRRVQK

SEQ ID NO: 12575 - protein, 528 aa, synthetic construct
MSTATVRSVTIIPPTINPLTHISMAATRKRRVAGYARVSTDSDEQFTSYEAQIDYYTQYIQRNSEWAFVKVYTDEGISGTSTKNRTGFNEMIDDAMSGKIDLIVTKSVSRFARNTVDSLVTIRKLKEKGVEVYFEKENIYTFDSKGELLLTIMSSLAQEESRSISENVTWGQRKRFADGKVNLPYKQFLGYRKGADGLPEIVPEEAAIVRRIYARFMEGLTPHTIAKEMTADGIPTPSGKQCWQTSTVESILQNEKYKGAALLQKCFTVDFLTKKQKVNEGEVPQYYVEHSHEPIIVPEEFDKVQAEFVRRKQFGLQYSGKSIFASRIVCGDCGSFYGAKVWNSNNKYRRVVWQCNNKFKGSHRCKTPHLDEKTIKARFVDAFNAVLGGKDGILADCRLMQTTLTDCTGIDAEIERLLTEVDVVTELTHRCISENAQSAQNQLEYTARYNSLVERYEKAKTQLGQLRATKTAREAQAKAIGAFMFEVQELDAFTEFDEKLWLAVIDKVTVHTNGRMTFRFRSGTEIDA

SEQ ID NO: 12576 - protein, 577 aa, synthetic construct
MKAAIYCRVSTDDQEFRKTIDSQIEFATKYCDLHEIEIIDWYKDDGVTGTLPLESRQEGLRLLQDAQNKKFDTLLIYKLDRFGRSARIILNGVHQLEELGVQVRSMTEPFDTGDPAGRFLLTILAGVADLERDNILSRMAIGAERAAKAGKWLGGIVPFGYFVNDDGFMEVNENKMTGCEMSEADVIRLIFQLTVEEGMSTMRIAERFNAMQLPTRYVIDNRQVMRGKRKERTRGYWYPGRVLSILHSTTYKGIHHYGKRSKKEVIAREVPAIVSKDLWDRAQEAIEDNRIEALRNSKQQYLLRGLIKCGSCGITYGGTSDSRRNKRYYACFGKTKYHGPIEKCRSKNVSAEWIEELVWNECVNFILSPGEAVKKIKDDHSEKIDYSQELQLIEEQLSQKQGERTMILDAYRRNVISEPDMIVQVSRINTEQTLLEQHESELKKAIATSDRLDTQQSEAIKLLTDLQPRIKTGDPLSFEEKRAILKLLINEIRIHTIEDPDCDELRRKVKVTIDFSISRCSSKLLTTRTGISGSDQQKRGREVVSPLSSSDGNMPLFQGLTQYLQHLTRKLRQFVKK

SEQ ID NO: 12577 - protein, 529 aa, synthetic construct
MSRTAARSVTVIPPTINPLTHLSKVAVQKRRVAGYARVSTDSDEQFTSYEAQVDYYTQYIKRNPEWEFVKVYTDEGISGTNTKHRIGFNEMIADAMSGKIDLIVTKSVSRFARNTVDSLVTIRKLKEKGVEVYFEKENIYTFDGKGELLLTIMSSLAQEESRSISENVTWGQRKRFADGKVNLPYKQFLGYRKGADGFPEVVPDEAIVVHRIYTRFMEGLTPGAIAKELTADGIPTPSRKQRWQTSTVESILQNEKYKGAALLQKCFTVDFLTKKRKVNEGEVPQYYVEHSHEPIITPEEFDKVQTELARRKQISRQYSGKSIFSSRIVCGDCGSYFGSKVWNSTSKYRRVIWQCNGKFKGEHKCETPHLDEETIKMQFVAALNAVIDSKDSILEDCRLMQTTLTDCTGIDAEIESLLEEIDVVTELTKRCIAENSQTAQNQEEYAARYNGFVERYEKAKAQLEQLRTTKAAREAQAEAIGAFMFEVQELDTITDFDEKLWLTIIDTVTVHADGRMTFRFQGGKTLTSY

SEQ ID NO: 12578 - protein, 434 aa, synthetic construct
MERVVERVDALIPAQPRALRVCAYARVSTGKDAMLHSLSAQVSYYSKMIQSHNGWMYCGVYSDEAVTGTKRERAGFQHMIEECRQGNIDLVITKSISRFARNTVTLLQTVRELKSLGVDVFFEEQHIHTMSADGELMMTILASYAQEESLSASENQKWRVRKAFENGEIINLRFLFGYDITPGGIQVNEKDAAIVREIFARFNGGESMSSICRDLDARGHKGVLGGTWCAERMRNTLSNEKYLGNALLQKQYRNNHIEKKLLPNRGELPMYYAEGTHEPIIDQATFDKAQERLRMLAQQTANRKKPTRSVFSGLIHCGLCGNTYKRVTYRKKHYWNCTAFQTKGKSECAAKRIPEETLEVLTCEVLGAVSFDPDMVRSKITAIRAEKSNMVVFCMDDGSEIVKRWKDRSRAESWTPEMKEQARQRALQARRHKL

SEQ ID NO: 12579 - protein, 594 aa, synthetic construct
MEVSGTNKLILPKDIILADRERERTIVYYGRVSTEHEAQLSALENQLQWYDDQSKYHPNWKVLRKYIDEGITGTQAKKRPAFLKMLEDAKNGQFDLIVTREVCRFARNTVDTLVTTRELKKIGVEVYFVEDNIWTMDGDGELRLTIMATLAQEESRKTSERVRAGQKISRDNGVLYGNGNILGYDRVGDTYVINEEQAETVRLIYNLYSQGLDFKKIINELVSQHRKDSYGLVRWECTKISRILHNATYKGYMGYLKSFRNNYLEQKSIINRDESTHLYIKGNFEPIVSEELWEKCRQIRESKAMKIKSYGGKERVVGFKPSNDIWVKKMKCRCGSSFRRCKWHKNKSGELIYGYQCYNQLNNGSKKIRESAGISTEGYCDMGTIGDWKIDMMAQKIFQGLCGEQRECINRSYSIYENNFKAKGNSSNNQKEVLLSKIEKSKVKLNNLTNMRMEGEISKEEYQECRQKVTDEIATFQKKLKALVEEKKEPDPAVIKMSLDEFAAILIEKIDFNAPIIDRGIIEQFVEKIVPRNTLEFDWHLNLIPHIFEDDLSTGYNEVWTFVINFDEAEKYRKLRGGFLRKNQWRDLTVHVFV

SEQ ID NO: 12580 - protein, 519 aa, synthetic construct
MTTNVQKAVIYCRVSNKTQTTRGDGLGSQETRCREYAKYKGYEVEKVFTDDVSGSLIKRPGMQAMLAHMSKNRKNPRVAIIDDISRLARGLDAHLQLRGAIAKAGATLESPSIEFGDDSDSVLVENLLASVSQHQRQKNSEQTLNRMKSRLKNGYWVFQAPVGYRYQKTSGQGKILERDEPIASIIQEALEGYASGRFQLQVEVKRFLESFPNYPRDRKGEVRNQRVTDLLTKVLYAGYVESADWGVNLRPGRHEGLITLETYKKIQDRLKGNAYAPARKDINLDFPLRGFVSCGECGHNLTACWSKGKKAHHPYYMCFKKGCSSYRKSIRREVIEGEFEQFLLSLKPTKELFNLALAMFKELWEYRVEYQKTHSKSLQLEMNKTEKKIEQLLDRIVDAESTAVVSAYEKRIGELQLEKQIMQEKVANCGRPLRGFDESFRTAMDFLSNPHELWASERIEDRHAVMKLTFADRLAYVRGEGFRTPETTLPFKALGGISGGENKMAHRGRFELPTPRFVV

SEQ ID NO: 12581 - protein, 544 aa, synthetic construct
MTKRVAVYVRVSTVRQAVNDVSIPDQIRQAEDYCQQKGWELVEQYIEAGASATNDRRPAFQRMIADACVSPSPYDIILVHSLSRFSRDAIDQGLYKRKLEQHDVLLKSMTQDFGEGAQADLISTIIGACDQHQSAETAKHVSRSMIENARQGFWNGARPPLGYVTYVSEKRGEKAKKKLKIDPKSSEIVKLIFSLYLEGIDDLGPMGIKSITDYLNRRGYKTATGSDFYIGQVHKILGRTSYMGMHYYNQRDNKTGKLKSRDEWVPMAVPVIIEPEIFQRVQDKLASRKPEVQAPRISNSKVLLTGAAYCESCGSPLMLTTGKSGRYRYYSCSGKHLKGDSSCERPIRVPEQNLDQLVSEQVAHRVLAPSRLKGLVGAVLDNHTQTKSKLHTEAKELRRQLRDVDRKLDRLFDAVSEGVVTDSSAFRRSQNKLEAEREELMRLIAIKDRRLQVGLKRISTRQLELFGKKLQKMLLSGPFAFRKEYLHLLVDQIEVGKEQVTIKGSKAALAASMQSVKMGDEKVPNYIREWRTSKEKLRTAFSRH

SEQ ID NO: 12582 - protein, 570 aa, synthetic construct
MTVFSVRKSRLFSTSKPLNTVRDKMANDFSGKRVAIYARVSTKRQAQNDLSVPDQIAHAERWIADQGAILARSFVDGGASATNDNRPEFQKMIAEAKADDGEIDVILVHSLSRLFRNALHFMQYKAQLARHRVRIVSITQSFGDDPASELAVGMLALFDEYHSAENSKHVRRTMLANAAKGYWNGQTPPFGFKSVTVPQPKGKDRKKLEHDPQSAEIVRYIFKTYLDGGPEGPIGIASLAQLLNQRGERIRGKPFHTSNVHKILTNTAYVGYVLYNQRDSRTGEYRPEEEWVPIPVPPIVDEDTFYAVRAQMAARDPRMGESAAKTNTNLLTGLVSCGCGDGCGGGMTTATGKGGQYKYYACHRRMSAGKSECEGRRIPMQKLDDLVVLQVANQVLAPDRLHILLQSWLDRSDTARDKRQAELRALRTRLTNLDGESAQVIKLVRNGICSPDDPQIATELANIAARKRAIEADIDLIETQIANGNRAITPETIEKFGSLISSKLHDRNASVRREYVRLLIEEVEVGNDVIRITGSKDALAVAASSPPENGVPKAVRRWRARQDSNLLPQD

SEQ ID NO: 12583 - protein, 511 aa, synthetic construct
MRVAAYARYSSDQQRAESLDDQLRNVRHWCQRNGVPEPVAYTDAAISGASDNRPGYRALVADITGGRVDLVVVDDLSRLSRDSSEIGQLLKRVRFAGARLVGASDGVDTARKGHKIDVGLRGLMGEMYLDELADKTHRGLTGRALAGASAGGLPYGYRVAGTGQRTIDPDHAQVVRRIYNMAAAGHTPRQIAAALNADGVPSPRGSSWAMSVIYGDRKRGIGILANPIYRGRQIWNRSTWTKHPDTGRRLRSERPENEWIITEHPELRIITDAQWQAADATLQNRRSRSGAPPGRSPRHMLSGLLKCCDCGGPMVAVDAYRYGCARAKDRGPTVCASRLRVARTHVESALLAGIKRDLLSEAAYHAFEREARRLLTQAAPDTGNIEKRIRDAERTRENIMAALKAGIITAGTRQALIDAEQGVTDASAELKAARNYQPAQILPRARETWRRLVEQLADARDTPEIRSAVRELLGDEIVLGEDAGGVFAEARNGSQILVVAGAGFEPTTFGL

SEQ ID NO: 12584 - protein, 545 aa, synthetic construct
MAKEKPIQDTSTKALIYCRVSSAKQRIDGGGLESQEQRCRSYADEKGYQVEAVFPDDVSGGGDFMNRPGMRAMLAYLDAQAGKPYVVIFDDLKRFARDTEFHIKLRREFAKRGALVECLNFKLDDTPEGVFIETIMAAQGQLEREQNRRQVVQKMKARVENGFWVFRAPVGYKYVAAKGGGGKILVPDEPMASVVREALEGYASGRFVSQAEVQRFLERDPHFPKDKKDGTLRPMTVKRLLSKVVYAGYVEAPKWGVSVRKGEHEGLIFFETHQRILDTIEGKKRAPAARKDFNEDFPLRGFVTCGCCGNAMTAAWSKGCRKRYAYYRCETRGCEAKSKSVPRAKMETGFADILKSLQPTHQFFEIAKAMFRDAWDMRMNQSEAQRSEWQRQLKAAEKQIEDLLDRIVDATRKPVIAAYEKRLDKLEREKIVLAERIEKAVPPKGRLEECMELSLKFLSSPWEIYEKGSYALRQTVLRLAFVEPLSYHPNGVYGTPHLSFPFKYLENVSGQKREMVPQGRIELPTSPLPRVRSTTELLRRLTVGG

SEQ ID NO: 12585 - protein, 441 aa, synthetic construct
METQQTSARMSHSVTPPAVAVRYVLYARKSTEQDERQALSIESQVNEMMQMAEKEGLDIVEVRREAHSAKASGQRPVYREILEDIRREKFNGIIVWHPDRLSRNAGDLGELVDLMDQKLLVEIRTNGQAFTNNPSEKFLLMILCSQAKLENDNKSINVKRGLKARVEMGLWPAPAPCGYVKEKRMDRKCETLIDPERAPIIKKMFEKVAYEKWSGRKVYNWLRFELNFTALPSKKPLSLGNIYRLLENHFYYGIFEYPRNSGNWYQGKHEPIITKELFDLVQEQLKGNELKTRQEKEFAFTKLMTCGLCGSGISADEKYKKLKNGKINTHIYYGCTKARDKHCKCGYINETDLIEQLQALINTVELSETSVLKKVREEVARYKKFSKSLLGESSKMAVKDIDVKDYVKFLLVHGKDHEKREILSCFSSTLTLANKKVQLSK

SEQ ID NO: 12586 - protein, 546 aa, synthetic construct
MANDFSGKRVAIYARVSTKRQAQNDLSVPDQIAHAERWIADQGAILARSFVDGGASATNDNRPEFQKMIAEAKADDGEIDVILVHSLSRLFRNALHFMQYKAQLARHRVRIVSITQSFGDDPASELAVGMLALFDEYHSAENSKHVRRTMLANAAKGYWNGQTPPFGFKSVTVPQPKGKDRKKLEHDPQSAEIVRYIFKTYLDGGPEGPIGIASLAQLLNQRGERIRGKPFHTSNVHKILTNTAYVGYVLYNQRDSRTGEYRPEEEWVPIPVPPIVDEDTFYAVRAQMAARDPRMGESAAKTNTNLLTGLVSCGCGDGCGGGMTTATGKGGQYKYYACHRRMSAGKSECEGRRIPMQKLDDLVVLQVANQVLAPDRLHILLQSWLDRSDTARDKRQAELRALRTRLTNLDGESAQVIKLVRNGICSPDDPQIATELANIAARKRAIEADIDLIETQIANGNRAITPETIEKFGSLISSKLHDRNASVRREYVRLLIEEVEVGNDVIRITGSKDALAVAASSPPENGVPKAVRRWRARQDSNLLPQD

SEQ ID NO: 12587 - protein, 538 aa, synthetic construct
MPKINARVYSYLRFSDPRQATGSSADRQLQYAQRWAADRGLLLDESLSLRDEGLSAYHQLHVKQGALGAFLKAVDEGRIPEGSVLIVEGLDRLSRAEPIQAQAQLAQIINAGITVVTASDGREYNRAGLKAQPMDLVYSLLVMIRAHEESDTKSKRVKAAIRRQCEGWKAGTYRGLIRNGKDPQWLRWDGQAWQLIPERVEAVRYAIELYKQGEGATRAVRKLAERGHVLSDWGIAGQQIYRLVKLPALWGAKRISVDGEDYLLEGYYPPVLSEAEYAELQAAAGTRHGRRGASDIVGLVTGIGITYCGYCGTAVVAQNLLSRAREDGTLADGHRRLHCTSYSNSLGCKAASCSVVPVEKALLAYCSDQMNLSRLLQPTDDGQALRQRLLACQRKQADVERQLARVTEALLADDQGAAPLAFVRKARELEAELRQLQGEAEQLEREQAARAQVQTPAAAELWRKLAVDARDIYSPAREQLRQLVLDTFSRITVYMRGVVPDPKSRVIHLVLVSRAGRRVALDIDRRSGDWKASRDRQG

SEQ ID NO: 12588 - protein, 537 aa, synthetic construct
MMDCVIYMRWSSAEQGKGSSLERQREDCRRHAGEAGWRIVNELVDDGISAFKGQHATSGALGRFVKDVEDGRYPEGVILLCEKLDRLSRQEPGRVFMWMMNLTEAGVTVATVDGARRYSKGNFDMASIIEVVVKAQLSHEESEKKSQRLSSAWAVKRRRLNSGEKFVMTRRAPAWLEVVGNPPTFIPIPERAAVVRRIFEETVAGYGKHHIARNLNLEGVQTFGRADGWHASYIQKVLRNPAVIGELHTARKARGARRAMTGDVVVDYYPAVVDADLHRRALAAMAERSRKFTGRGRRLVNLFSGLAVCGNCGNKMTFRGKGRKQRADGTWVNEDYLVCDGYQRGKGCANNVHYNYATWEDGILDPIIFEAFSDDRPVSQSEVRDLEIEIARLERAWHIAKSRADNALRIAVETGRPEAQVIWTDLATECDAANDALDDARSRLLISAHTPSLEEQWSRLERLRSDLKHEDETVRFEARTKVQSAIHALVSRLAFFGPYPLGVEVEVAKERLISIHYDELNGGTEWSMHDLDADNRD

SEQ ID NO: 12589 - protein, 538 aa, synthetic construct
METTGLKAAIYARFSTDMQADRSIDDQISLCTDFALKQGLTIAETYSDAAQSGGSIFGRDGLLRMMEDARQNKFQVIVIEALDRLSRDMEDLAGLHKRLSFQGIEIRAVHEGKVDTILVGLRGLVGQLYREDNVHKVRRGMAGRVKDGLHAGGRAYGYQAIDGKKGELEIIPAEADTVRRIFTAYAAGTTPRAIAKELNAEGIAPPRGARQWNASTIAGNAKRGTGILNNRIYIGEIVWNRVRMVRDPDTGKRVSRPNPPEQWQRQAAPHLAIIDQTLFDQAHGQKASRAHGDHAKYARRKHLLSGLLRCGACGGGMQSYGKGARGTPRIRCSSAKEGGFCPDSKSFSRTAVERLVIEALRQELAHPDVITAYVQTYHAERKKLAATANQRRDALNRKIARLDAECERTLDFMIKGIGHEERLKQRIAEAEQELAEARRELAALDPPPPVIELHPATMTRYRETLDALATAIGNDIEDDPEAVVETRRAMDELVESVTVQRSNAGETTIQIAGRLTPLLGPNAFPEGVGGINGSGGGT

SEQ ID NO: 12590 - protein, 495 aa, synthetic construct
MNAVIYARFSSHAQNEQSIDGQLRVCYEYAAREGYAVVGEYIDRALTGRSDDRPDFQRMISDAKKHAFDYVIVYKLDRFARNRYDSAIYKNALKRAGVKVLSAMENIGDNPESIILEAVLEASAEYYSVDLSQKIKRGRRDSAMKGKFIGGAIPTGYKTIGGALIIDEDKAGIIKYAFEQYAAGVPKKEIMAELNARGLRNSKGKPYGITAFQKALQCEKYIGVLDQSGIRIEGGCPALIDKTTFDKVQARLALNRHKGGKNKAKVEYLLSGKLFCGHCGSTMQGVAGTGKGSGRWYYYSCRKRRAHECTKKHEKKDFIEWYVVEQTVEYVLTPPRIKQIAAAVVKQYDSEFNDGKVKEIQRRIEKLERDIKKIVDMLMDVPASGRQPLYEKLEMYGAEKADLEIDVAKLQIANKIRYTEEDIVAWLKQFCRGDLFDMEFRKRIIDVFINSIYLYDDKIIIYYNVRGGKQVSYLEMLESTADAEVGDDPEGNSGV

SEQ ID NO: 12591 - protein, 530 aa, synthetic construct
MKHGASSGKIAVIYCRVSSSKQTTRGDGLSSQETRCREFAGYRGHEVVKVFKDDASGGLIDRPGMKAMLAFIRSKRKASPVVVIDDISRLARGLEAHLQLRAAIGNAGGTLESPSIEFGEDSDSLLVENLLASVSQHQRQKNGEQTKNRMRARALNGYWVFQAPTGYRYERQRGCGNVLVRDEPLASIIAEALEGFASERFGTQVEVKRFLEDYPEFPRQRSGDIPNQRVTELLTQPLYAGHIEVPRWDVPMRKGQHEGLISFETFQTIQERLNGKARAPVRRNINEDFPLRGAICCADCDQPLTANWSKSRSGKRHAYYLCRTKGCVSEAKSIRRAEVEGAFESLLKKLVPSRDLFELAEMIFRDLWEQRLEARKAHRKSMAAEVSQIDRKVEQLLDRIVETESDSVVKAYENRIRDLESEKLILNEKVENCGREASDYASSFRTAMSFLGSPWNLWVSDRLEDKHAVIKLAFSEQLSWKRGEGLRTPEIALPFKALQGFSASKEELARPAGFEPAASGLEVPCSIQLS

SEQ ID NO: 12592 - protein, 540 aa, synthetic construct
MKTIAIYTRKSLFTGKGDSIGAQVDTCKRFIDYKFANEDYEIRTFKDEGWSGKTTDRPDFTNMVNLIKSKKIDYVITYKLDRIGRTARDLHNFLYELDNLGIVYLSATEPYDTTTSAGRFMISILAAMAQMERERLAERVKSGMIQIAKKGRWLGGQCPLGFDSKREIYIDDMGKERQMMRLTPNKEEVKIVKLIYDKYLEMGSMSQVRKYCLENSIRGKNGGDFSTNTLKQLLTSPIYVKSSDNIFKYLESQNINVFGTPNGNGMLTFNKTKEIRIERDKSEWIAAVGKHKGIIEDTKWLQIQKQLQQQAEKQIKSSGRQGTTSTGLLSGIIKCEKCGNNLLIKTGHKSKKNPGTTYSYYVCGKKDNSYGHKCDNKNVRTDEADSAVITQLKLYNKELLIKNLKEALIQNEKTDTDNIEILESKLKEKEKAVSNLVKKLSLIDDESISNIILNEVTNINKEINDIKLQLSNETLKINEVTKATLDTEIYIKILENFNKKIDDITDPIEKMNLLKSALESVEWNGDSGEFKINLIGSKKK

SEQ ID NO: 12593 - protein, 545 aa, synthetic construct
MIAAIYSRKSKFTGKGESVENQIEMCKEYLKRNFNNIDDIEIYEDEGFSGKDTNRPKFKKMIKAAKNKKFSILICYRLDRISRNVADFSNTIEELQKYNIDFISIKEQFDTSTPMGRAMMNIAAVFAQLERETIAERIKDNMVELAKTGRWLGGTSPLGYKSEPVEYSSEDGKNKKMYKLTEVEDEMNIVKLIYKLYLEKRGFSSVATYLCKNKYKGKNGGEFSRETVRQIVINPVYCISDKNIFKWFKSKGATTYGASDDIHGLMVYNKREGGKKDKPINEWIIAVGKHKGVISSDIWLKCQNLIQQNNAKSSPRSGTGEKFLLSGMVVCKECNSGMSSWSHFNKKTNFMERYYRCNLRNRASNRCSTKMLNAYKAEEYVANYLKELNIDVFKKIYHSNKKDIIDYNAKNEVNKLNKSIEENKKIIQGIIKKIALFDDLDILGMLKNELERLKKENDEMKLKLKEIKSILELEDEEEIFLNTMEENISNFKKFYDFVNITQKRILIKGLVESIVWDTSGKEKILEINLIGSNTKLPSGKIKRRE

SEQ ID NO: 12594 - protein, 507 aa, synthetic construct
MKAVIYARYSSSNQTEQSIEGQLRDCTEFAKAHDITIVGTYIDRAISAKTDQRKEFQKMIKDSKKNIFDTIITYKIDRFARNRYDSAIYKAELKKNGVKVLYAKEHIPNGPEGIILESLLEGMAEYYSAELSQKIKRGMRESAHKCQALGGMPPLGYKIAVDKKYVIDDSSAHIVKQIFEMYDNGASVTEICTAMNKKGYKTSSGVKFNKNSLWRMLKNEKYIGVYEAIGIRTEGGIPAIIEKELFDRVQDKLVLNKKRAGSKKTKMKYALSGKLYCGHCGAGMIGESGTSRNKGTKYYYYKCSAKKNKKNCDKKTVRKDWLEDLVVRETVNHILKPDKIKVISKSCVDISKNEEQNNLEIKAIKKQITAVNKSLNNIMKAIEQGIITTSTKERLKELEQTKEKLEFELSLCAIKHPVLTEEHIEFMLSQFITESEDITEEYKQDVIECFVNSVYLYNNKLVITYNLTNQKTELESSVVETLTSVDIPSPNKGSDIVSNGGGEENRI

SEQ ID NO: 12595 - protein, 421 aa, synthetic construct
MFFVSVVTRIVPVMPQAGVRKKVAAYARVSDDGDRLLNSLSNQVSYYNEYIQANPGWEFAGVYVDEAISGTSMKNRSGLNNLLHLARKGQVDMVLCKSISRMARNTVDLLSIVRELKQLNVVVRFERENIDTSTVDGELLLTLLASFAQEESRSLSENVKWGIRNRFKQGISNSNVLYGYRWDKTAKTLRIHAVEAEAVRLMYQWFLSGLAAEQIATRLNTQGYKSYMGKKLCGKRVMAVLENERYTGCQMLQKTYLPTIGSNRQNLNDGVLPKYWVEDVNPAIISKTLYEQVQAEIKQRRSLGKAGIPSLNSSGFTSRIRCGVCGKHYHRKSRPQKSGGKKWFWRCHSACQGTGNPCKASNIDEKYLKQLVCKTLNSEKFADSLILENIKCFTVYPNRIEIVKTSGQKIVTSLSKFMGVK

SEQ ID NO: 12596 - protein, 504 aa, synthetic construct
MTQPLKALVGARVSVVQGPQKVSHIAQQETGAKWVAEHGHTIVGTFQDLDVSATVSPFERPDLGPWLTEEKSHQWDILVFSKIDRMFRSTRDCVRFAEWAEQHGKVLVFAEDSMTLNYRDKGQSGSLESMMAELFIYIGSFFAQLELNRFKSRARDGHRVLRGTDRWASGVPPLGFKVVDHPSGKGKGLATDDEGKALLYEMAGKLLEGWSFIRIADWCNESGALTNMDRARVAKGQEPKQRPWTVGTVTDALTLPKTQGFKMHKRQTVLDDKGEMIRLGPPTFDDDTWNHIQKAAAKRKRQPRSKTHSSNPMLGVGFCGQCGASLAQQFSKSKSKSEDKTHRYYRCGRTPVNCRNTLLQADIGDQLLEESFVDQWGSQPVKRRIFVPGEDHTHELERIRATIERLRRESDEGLIVGADEEERYFTRMRSLVTRRVELESTPMREAGWITEETGQTYGEVWNDGETDRRQLLADAGIRFVLEQSKPYLKFHLEVPQDRVPIKTQ

SEQ ID NO: 12597 - protein, 475 aa, synthetic construct
MMKCIIYVRVSTDEQAKHGYSIAAQLEKLEAYCISQGWELVKQFIDDGYSAKDLNRPQFQEMLQQIKAGGIDVLLVYRLDRLTRSVSDLYEILNELDKYNCKFKSATEVYDTTNAMGRLFITLVAAIAQWERENTAERVRMGMEKKTKLGEWKGGMAPFGYKVINGKLEIDEFESEIIKEIFMLSKTFGFYTIAKQLTLKGISTRKGGDWHVDSVRAIANNPIYAGYLTFNESSKDYKKPPREQKLYEGNHDVIIDRKEFWDLQDVLDRRRKFGGKRETSNYYFSSILKCARCGHSLSGHRGANKIKTYRCSGKKAGKNCTSHIFLEEKLVNAFFKKLEEIKLTLNSDVEESNTDKGHLNELKLELSSVQKLMKKKKTMFENDIIDIDELISSTDELRLKEKNLQKEIARLEKMNNNNTLELKSIIENMDEVWNYADDQERKALITTIFEQIVVDTMDDYRGSKYPREVIIVSYK

SEQ ID NO: 12598 - protein, 528 aa, synthetic construct
MTYQEGGEAMKKITKIEGNKVASIIKPKLRVAAYCRVSTGSDEQLVSLQAQKSHYETYIKANPEWEYVGLYYDEGISGTKKENRTELLRMLSDCENKKIDLIITKSISRFARNTTDCLEMVRKLLDLGIYIYFEKENINTQSMESELMLSILSGLAESESISISENNKWAIQRRFQNGTFKISYPPYGYDNIDGQMVVNPEQAEIVKYIFAEVLSGKGTQKIADDLNQKGIPSKRGGRWTATTIRGILKNEKYTGDVILQKTYTDSRFNKRTNYGEKNRYLIENHHEAIISHEVFEAVEAALNQRAKEKGIEKRNDKYQNRYSFSGKIICSECGSTFKRRIHSSGTRKYVAWCCSKHLKQITECSMQFIRDEDIKKAFVTMINKLIFGRKLILQPLLDALRGMSNSDNLSRIQELERQIEKNAEQRELLVKLMAKGYLEPALFNRENNELQMEADNYMGQKEALIHALNGELSKVQEVSNLIKFTNKAEMINTFNEQIFNDHIEKIIVFSRVEIGFVLKCGITLRERM

SEQ ID NO: 12599 - protein, 521 aa, synthetic construct
MAVSKNVMIIPAIKRVGNNRKEDETPKLRVAAYCRVSTDSDEQASSYEVQIEHYTEFIKKNSEWEFAGIFADDGISGTNTKNRNEFNRMIDECMAGKIDMIITKSISRFARNTLDCLQYIRKLKDKNVAVYFEKENINTLDAKGEIMLTIMASLAQQESQSLSQNVKLGYQYRYQQGEVMVNCSRFLGYTKDENKRLVIVPEEAEVVKRIYREYLEGSSMDKIKKGLEADGILTGAGKKRWHTSTIRKILSNEKYIGDALLQKTYTVDFLTKKRVVNNGIVPQYYVENNHEAIIPREIFMQVQEELVRRSRGHISTSGKKRNFSSNHVFSQIIFCGECGEIYRRVHWNNRGKKSIVWRCVSRLENTGLACHSRTVLEEMIGLATVDVINKLIGQKDGFLTILKENIETVISETDNNIVAEIDKKLEELQKDLLRLANSKEDYNDIADEIYRLREERHKALAEEAGKKGSKQRLEDMEKFLNEQSTFLEEYDEQLVRRLIEKITVYDDKLTIEFKSGVEVDV

SEQ ID NO: 12600 - protein, 535 aa, synthetic construct
MAKKVVQILEKKPLEELEGVQSKQKLRVCAYCRVSTDSEEQKESYANQLDHYTNLIQNNPNWEFVDIYADEGISGTSDKKRIQFKQMIEDAKAGKIDMILTKSISRFSRNTVVLLENARELKNLGIAIVFEKENINTLEASGEVLLTILSSIAQDESRNISENSRWGIVKGFRDGKVYCNTTRFLGYDKDENGELVINEKEAEIVKRIYREYLEGKSTQAIAKGLMADGIKTVAGNEKWWDSTVTGILTNEKYYGALLQQKTITVDYLTKKRVKNDGQATQYFIEENHEPIIPKEVFEQVQSEKKRRAKLKGYKEENAHRYSSKYPFSGKLVCMCCGNTLKRRIWNSNNISRKVVWQCKTYIAAGKQGCDAKAVDEAVLMEAFVRVFNRMKEDKDQFVQTMNRNIEKVLMKNADKTKIQKIDKKIEELKQEYKGLVQLNLKGEMDAEIYQEEQVRIGDQLEQLREQKHEIQVSKESKEQYKKRVQEIMNVFKQKEGLLEQFDDGIFNALVEKIEILSPTHFVFVLKNGVRVEEKI

SEQ ID NO: 12601 - protein, 436 aa, synthetic construct
MTKKTVTKVNALPKLASKKRVAAYARVSSGKDAMLHSLSAQVNQYKKLIQENPEWLFVGVYADEALTGTKDARTEFQKLLKDCRAGKIDMIITKSISRFARNTVTLLKTVRDLNAINVDVFFEEQNIHSISGEGEMILTFLATFAQEESRSVSENMKWRIKKDFEQGIMWGGKPCLGYDLENKRLILVPEEAKIVQYIYQLYIDGNGADTIGKLLSARGISPQKSPRWNRSTIMQILSNYNYTGDLMLQKTFRKDHLSKRKVVNYGEVDKYIVKNNHEAIISKEMFNKVQKIRKKQAEKIQPNPIKKHRVFRGMIRCGVCGRAYTYKNTPHNEVWRCSLAVTKGKTACTAKQVPDSKIIEAANSTLDRNGFNEVYFNSKVEMILVMPGNRLAFQMKDGMSIDYHWKTSRSDSWTPEKREQARIRALKQIKGGVHNG

SEQ ID NO: 12602 - protein, 527 aa, synthetic construct
MAKVTVIPSTINPLTQMPLDQISVKKVAAYARVSTNSDEQYTSYEAQVNYYRKFIQNRPDWEYTNVYADEGISGTNTKRRAGFNKMINDALNGKINLIITKSISRFARNTLDTISYVRKLKDNGIEVFFEKENLWTLDPKSELILTIMASIAQEESRSISQNVTWGKRVGFQQGKVSFAYKTFLGYKKEDDKIVIDEDQAVIVRMIYKMFLVEGKTATGIANYLKSKHIKTPTGKAANWTKNTVNSILTNEKYKGDALLQKTYTENYLDHKIVKNNGQIPQYYVENNHPAIIDRDMWEQVQIELERRERIGAQYSSSDVFASKLICEDCGGFYGKKKWHSNSKYSRFVYQCNNKFHKHKEKCLTPNLKEDDIKIKFLKAYNLVMEDKRRIIQDSEEIIELLTDTTKIDDEIRDLDDELFITSELVSKLVNENSKTSDSIENYNKKYEELSSRYEKLQAKREELLKQRNDKQGQALRMKAFIASISESEDELSDWNERIWMLLVDRATVHRDSSITFMFHNGVESKIR

SEQ ID NO: 12603 - protein, 446 aa, synthetic construct
MNRVIHKVQPTIRAIPQRKRVAAYARVSNDKESMVESLAAQVSHYSAHIQRNPQWIYVGVYADEGLTGTKDARPEFQRLIADCYAGKIDMVITKSLSRFSRNTLDTLNILRELKQRGVDVFFERENIHSNSGDGELMLSILSSFAQEESRSISENCKWRIREKMKQGELVGLRDMYGYVIDRNIVSIEPQQAQIVLQIFDWYLSGDSSVVIAKRLNAAGEQTLNHAAWSAKHVREILTNEKYTGNALLQKSFITDHLSKRKKRNHGEAPQYYVEQSHPAIVDIDTFQAAQEMLKISSERYKPSNPVNARYPFTGRIICGNCGKNFQRKTTKERISWQCATYLEHGKSACPAKQIPESALLDASAEALGFASFDETDFLKRVLRIEVLGANTLRFVFTDGTTTLSEWKDRSRSESWTDEMKQAAKARSLAIREAMYSGSSTETSNEN

SEQ ID NO: 12604 - protein, 522 aa, synthetic construct
MEAAQKRVTKIERSAVAFGENQIRPLTKRRVAAYARVSTDSDEQFTSFEAQVDYYTRQITANPDWTMVEVYTDEGISGTNTKKREGFNRMIADALAGKINLIITKSISRFARNTVDTLTAVRQLKEKGVEVYFEKENIYTMDSKGELLITIMSSLAQEESRSISENVAWGKRAKCEEGKVYLPYKQFLGYEKGPDGQPQIVEEQADTVRLIYKLFLDGLMPSGIAKRLEAMGIFSPAGKSRWQPGTVESILTNEKYKGDALLQKTFCVDFLTKKMKRNEGELPQYYVEQSHPAIITTEVFDEVQQELKRRREARYVGRSGCFSSKIICGECGSYYGRKVWHSNDKYRTVIWRCQHKYNNGEPCKTSHVTEDQIKAAFVAEMNRVIASKEQVLADIGMLIATLTDTREMEEKESAARKELEAVSASMRKLVDAYAHAMIEQREYDDRYAGLLAQSQVLEEQIVRIGEQCEQRRARKHELDAFYKVLKSTGPILEFDEELWNVAVESVLVHEDGKLQIKQRIRI

SEQ ID NO: 12605 - protein, 445 aa, synthetic construct
MNRVIHKVQPTIPAIPQRLRVAAYARVSNVKMAMVESLAAQVSYYSAHIQRNPQWIYVGVYADEGLSGTKDNRPEFQRLISDCYAGKIDMVITKSLSRFSRNTLDTLNILRELKQRGVDVFFERENIHSNSGDGELMLTILSSYAQEESRSASENIKWRIRKKFEQGEISGWCQLYGYTIRRGKITIDDYKAAVVHRIFSEYLAGDSATLIAKRLRLEGVPCEQGGQWKQFTVSEILRNEKYTGNQLLQKTFTKDHLSKRSKKNQGELPFFLVENAHPAIIDADTYQHAMKRMESNQKTAKRPEPKMDNQLFRRKIVCSQCGRHFIRKNTNGTPGYVCSTYSAEGKDFCLSKKIPETTLVEFSLIALGIPEFDKELFDKEIDHIVARYPNDLAFVFRDGHICEYTWEDRSRAESWTEEMKKSAGDKTRSREGSNSHGSHQESHED

SEQ ID NO: 12606 - protein, 518 aa, synthetic construct
MEAIKKVTKIDRAVVAKASAHQPIASLRRVAAYARVSTDSDEQFTSFEAQVDYYTRQITANADWALVEVYTDEGISGTNTKKRDGFNRMIADALSGKIDLIITKSISRFARNTVDTLTAVRQLKEKGVEVYFEKENIYTMDSKGELLITIMSSLAQEESRSISENVAWGKRAKCEEGKVYLPYKQFLGYEKGPDGQPQIVEEQAKTVRLIYSLFLEGLMPSGIAKRLEAMGILSPAGKQRWQTSTVESILRNEKYKGDALLQKTFCVDFLTKKMKRNEGELPQYYVEQSHPAIVSPEVFDEVQQELKRRREARYVGRGGCFSSKIVCGECGSYYGRKVWHSNDKYRTVIWRCQHKYENGEPCKTPHVTEDQIKAAFVAEMNRVIANKEQVLSDIGMLIETLTTTHELEDKESAAGMELKDVSASMHKLVDDYARALIEQNVYDDRYAELLAQSRTLEERIAEIGEQREQRKARKRELDSFYKVLKATGPIVEFDEELWNVAVEKIIVQTDGKLQIKNR

SEQ ID NO: 12607 - protein, 523 aa, synthetic construct
MKAVIYARYSSDNQREESVEAQINAIEEYANKNNHIILKHYIDRELTGTNDNRPSFQSMIKDSKTGLFDLVLIHKTDRFSRNKADSAIYKRMLLENGVKVIPVAESFISDSPFGVVMEGMLEGWAEYYSLNLSTEVKKGQNSNIRKFDTIGKVKHNGGKPPFGYVIDSEGYYVIDDHEAIAVRKIFDMYLNGYVYKDVMEWLDQLGYRTKYGKPFGKTSIHGILHNPKYCGVYTYRNKKRVYVGGRYKDIENPDKIVIDGGIPAIVSKEDFERIQLIMAENNKNSKRSASKEIFILSGKVFCSKCGSKLESNSYMGGRDRKHQYRNYRCSGRKKGLECDLKPYDKETLEMDVCLQLEKDVFNDDQIDILSKEIYEAFKKQSSTSVSTLKSYNTKKASLERQIENLTTALANGAAFNSVYSKLSDLEHQKDMLEFEIKREQYSSDRIMSLESIRDILLVGKDMHLKTDKEKTTLINMFVERIVLGDTLEVRLNFKPDRYMDSGGEGNRTPVRKPVHESFSHQSH

SEQ ID NO: 12608 - protein, 505 aa, synthetic construct
MQYCMYLRKSRADMDAEAHGEGETLARHERVLIELSRRLNKPVTKIFREVVSGETIIARPEMQKLLSEVEQSIWDGVLVMEVERLARGDTIDQGLVAQTFKYSNTQIITPMKTYDPNNEYDEEYFEFGLFMSRREFKTINRRLQRGRLESVKEGKYVGNRPPYGYTRIKIEHGKGFTLEPIENEAEIVQLIYKLYTYGEIESNGAPKRIGVSLIARKLNEMKVMSKTGKIWTQSTIRDILINPVYNGMIRWNWRPSVKKMVDGHMVKERPRKTDYILTKGIHHAIIDESIWQLAQEYMSHNPSQPIPHRKKVMNPLSGLIICGKCGRKMVRRPLNHTSYKFDYLMCSEPSCSTVSSPLNYVEDRVLQGLEEILNAYKLKWENSESENNIELDIKRKAILKFDVELKNLELQLSNLHDLLEREVYSIDTFLDRSKIISERIKQIKQDLEIINKSIEMDEQRENNKKSIIPKIQTILEVYRTLDDPYQKNVILKDVDQIILHLLYIL

SEQ ID NO: 12609 - protein, 557 aa, synthetic construct
MAKAYAYIRLSSQAQAAGDGQRRQRDTAQQFAAQHGYEIVDYVQDIGKSAFRSTNSLQGELAEFLKMAQKGAFADGTLLIVESVDRLSRDELQPAVRLLLNIFDYGLLLGIISEEKIFSQINFDDFLQLLNDMSRSNKESAMKSTRSIENWKTKHSKAKVGKPVSKQCPNWMKLKGGKFKLIPERVEIVKRIFDWYSEGKGQGKIADMLAEQGVPAWNKRKPVWHQSYIFKLLHNHAVIGEYHPEVTVSGKRTSAGIIENYYPEIIDKDTFKLIQDKTRLRRENHAGRKGKKYSNLFQGMTRCAVCGARMRYLSHTKDSTRKNGLRPWAIYLACSSSLKKGGCRNKQYYSYLHMENFILSGVMSDIDIVEAAGVHDERQKQHLERVQDLDAQLTREKAILSRYLDAMENQNLSNMPELISKLEKTNTRRTLIEKQLSAARAGAAEAREAAQSAVLFRLVEEAYSEQLPENIDMSDEAIYSRRLRIANQMRAVIEDVAFHEDHLIRIKTRAGTAYELVNREWTRIEKNKRIGAKGTLTARTYVGRATMQLGAEEDEEE

SEQ ID NO: 12610 - protein, 499 aa, synthetic construct
MEKSKSVGIWIRVSTEDQARGESPEHHEKRARFYAEAKGWHVREVYHLEAVSGKSVMGQPETQRMLEHIENGHITGLIFSKLARLARNTKELLDFADIFRKYDADLISLQESIDTSTPAGRLFYTMIAAMAQWEREEISERVAASVPIRAKLGKPLGGQAPLGYSWKDRKLVPDPIEAPVRKLLHELFLEHKRKKTVARLLNEMGYRTRNGSNFSDTTVLRLLRDPSAKGLYRQNYTKSLGDNKKWVTKPKEEWIFTEIEPIVSEELWNQCNAILDDQEKKNKRPTKKPVHLFTGFAFCNCGNKMYVPSNSPKYTCYKCRNKIGVTDLEDIFHHQLRDFFFSQSDIAGYLDKADQMIKEKEALSKALLDEKKKTEREMDKIYRSYMDEEIDSKTFGSLYRPKTERVNQIDAQFPDLQGEIDFLRIQYLSSDHILNEAKDLYSRWPKLAIEEKQKIIENITDKIIIGSEDVTINLCYLPPSSEMMADKQRNFMDSSPPPA

SEQ ID NO: 12611 - protein, 507 aa, synthetic construct
MNTAIPFQAGARVVAYLRDSGGDDQELSVAQQRAFVTQWCLENNLILSAVFADLARPGSSTIGRSKFLEMIRHFEDPACLDAGVLIWKYSRFSRDVDDSQYYRSLLRMKGFIVHSLKDDVPNDDFGRLYESVIDFTNARFLKDMREDVKRGLRHLVTTYGALPGTPPRGFMRQPVEISQRRDGSAHIGSRWVPDPAMWENCRRAWQMRAAGIPIRDIHKELHLFNNRTSYTAFFTNRLYLGELRYSDLIIPNYTEPLIDQSTWDAVQAINETNWLENDPHRRSEKSHPRRISSDFMLSGLLHCPRCSSVMNGKSVTFNGQTKRNYYICANAQRKMECDAKSIPQDDIEGLVILGLKEAILRPSSIQIRAKKLKQQAESEINGINADHRELLINIHTNKLRINNLVDRIANDTSAPQSIIDKIKELELDQKKYQASLDNLNEQKKSLTAGTITRERAKELSEYIMDLFDTGDLDTKRTILKSLIKSVSAERIDKKVRANIIYCNPVDS

SEQ ID NO: 12612 - protein, 568 aa, synthetic construct
MTVEQFQRPAYIYCRYSSEMQSQGDSLRRQFQRCNEAIKKHNLYVKERITDEAFSGFHGDNLINGKLKDFIDRAIAGDIEKNAFLIVENLDRITRLQPSKAVNVITQILSSGLEIYQTSPECLFTFKNKKDEAMTIIMITLFAQRAHEESDTKSYRIKEAWISRIERILKGEQKILMDKPPYWLDVVEKDFDVNGKTKRLKCYQVNQTRTDEVLLILEYLKSMGIKESCKMMNAESVGKKWTVKAVQRLLQSKTLYGELDLKLSVREDGKKELQSRGLEMPQIYPAIISKPDFDEILELIKIRASGRGGGRKSTQFHNIFSKILFCAHCGGAYRYMHKREYSYLVCYNSEVHTCKYEKVLSLRFYDVQNAILAYGGYFDFNVLFKGVELKEYAADITDKQAELDAKREAFSNMFNSIMLKNNGIISSMYQSSLDMTERSIEELEKEIEALKQKDILNPSKRIKANGGALLLDPALLSTAFGRAKLNAHLKRMVERIELSHNKVTNDGYNLLRIKFIGVETVLEIKFQGTKRIFDDGGQDFSKIFDDDSDGFIDEEEWNKQSSMLNDMF

SEQ ID NO: 12613 - protein, 540 aa, synthetic construct
MRTAIYARFSSQLQKDSSIEDQVRVCTERAEREGWTVTAVFSDYAMSGAVRDRPGLNSLIEHIKAGSADQVLAEAIDRLSRDQEDLAGIHKRVRFLGARIFTLSEGPIDELQIGFKGTMASLFRKDLADKIKRGQGGRVAAGRTPGNIVYGYRKVHRLDSRGEAERGLREIDPEQADIVRRVYAEYIAGESPLAIARRLNAEGIPSPSGGTWNVSAINGDAVRGNGLLCNEIYIGQLVYNRTTMVRDPDTRKRVPRVNPPEQWQRQAVPDLRIIDDESWDAVRRRKSRRENWDFNKQRRPKRLLSGLVKCGQCGGAIVVIGSEKWGCANTRRAGTCTNRRTIDSNVLESRVLAGLRKELLSPERVSLVVKAYNQHRARLDREAFEAAATNRKRIDELEKQIANLVSAIAAGAADVPEIVAALQRAKAEREQLTEAIGSANAAQVISLHPAIAEAYRHAVEDITRHLNGEEESARTARSALRTLIDAVILTPKENGRGMHIDLEGRLENVVSLATGEAPMEREGMLQVVAEEGLEPPTRGL

SEQ ID NO: 12614 - protein, 598 aa, synthetic construct
MNKTKLFSYVRFSSGKQSDGQSVERQTATANRIANQYGLELDTLSFRDLGVSAFKGKNAAQGNLREFINQIGKRVPVGSWLVVENLDRLSREESLSALDILKEILRKGITVVTGMDSKVYTYESLSSSTMDLVMSVLLFSRAHEESVTKKNRVESQARSLIQKNLNRESGTPAFVIESIGQNVWWSAQDNGKVIKHPEYFSVAQKIISMKWDGCSPGEIQRYLNENHQPPTKDKRGNADIWGMNLIRGFLNPTVHGRKEFVLDKRDLNGALVRKRHIDESGDEYWITEKETFVIEDYYPALMIETDYLTLASMDKARSATRNSVNGNELREIGLLSGIGVLRCGKCGLPMTKNSAAKSRFRYVCTSKNTTGKSCGNAGFTGQPLEHVILQLIADHVWNNNQEDRTEWFNHEIDKLDRQIKKLVRLATLTEDSGIDELATEINSYKKQKRELEFKFSEYKLEKSAQISTGWDEFRKFDTEDVTNPDRKRIRLKIKQAIRSIDCTTFNNRYGLFMVKYMDNSEQRIVLKYNRRSSPGEAFVDIHTVNDRVLVELAGITLHTHIEKLIDPVAYEATQQAWIKANQQHVDGVPITIIDELTQ

SEQ ID NO: 12615 - protein, 534 aa, synthetic construct
MKDFSIFDSFAKGAQSLSSIRGTNCVIYTRVSSKEQADNLSLATQMKACVAYAEKSMYNVLSSFGGTYESAESDERKEFQSMISYVKKAKEKVSYILVYSLERFSRNDNSIWLSGELRKLGIEIVSVTQPIDTTSASGQMQQKMLFLFGEFDNQLRRQKCMAGVKEMLLRGDWPTMVPLGFDIVRLNSKRQIVVNSKGRLIKQAFEWKAYQGLSNESIRIRLAEKGLKLCHQRISAIFRNPFYCGLLAHRMLEGRVIEGNHEKLVSKELFLKVNGLLDQNTHGFSVNEENDAIPLKRFFMCDYCGKPLRGYLVRKKNIHYYKCNSKGCGNNKNANQLHDKFKKILESFRMDDNPELVQLLTKQMTATFNQMTGQHREEEAVLLKRQEDIVRKVNRLEERFIEEEITSDLYNKYLAKYADEKKEIRQLLIKLPAGRSNLGECLEIALGFMRDMPYRWASGSYSVKQKIQFMLFPEGIRYSKKTEKCRTTRINSVFGLVTAKMQDYRQEKSGIPELNLNYAALVAETGVEPVTSGL

SEQ ID NO: 12616 - protein, 542 aa, synthetic construct
MTRVALYARYSSDRQNERSISDQLNVLIQHAASKGWAVVGTYTDAAISGSAMANRPGLLGALAAADRGEFDLLLAEDEDRLARNLEHLAHVANRLADIGAGIATLSTDRVQDMHVAFKGLIAQDFIRNLSMKTKRGMASNAEKGLATGSRLYGYRSQPGGAVEIVPDQAEVIRRIFSMYVNDRMSSREIAERLNRDRIPSPAGRQWNASSIQGSRQRANGVLHSEIYAGVKVYNRVEMRKDRQTGRKITICKPPSEHKRIDVPHLAIIDQDLWKAAQQRLDSRQTTDPSQRASLRRRPGLLSGLTKCGCCGASYTSLSQGRLVCAAYREKGASACDNNRHVNRAEIEQRVLDGLRTRLLAPDAVAAYVRAYHAAWAEQAAHVEDRRRPLTRRIAEVERAIERGADALLSGATAAAVIGKKLEALEIEQAQLKATLEQLDAEGAPPVQLHPRAAENYARKIEQLQARLADAADSSDDADRDLISSVRGLIQKVDIEPINKSRGAPVRVTLHGDLARFVLPQHPPAGGCALVVGGGIEPPTCGL

SEQ ID NO: 12617 - protein, 475 aa, synthetic construct
MKDYADANDIQVAREFVDVETAKKSGRTSFNEMLQYVRRHPTVRTLLVEKTDRLYRNLKDWVTVDDLDIEIHFVKEGVVLSQDSRSSEKFMHGIKVLMAKNYIDNLSEETRKGMLEKAEQGLWPTVAPIGYLNVEGPNGKKIITIDPALGPLVQRLYEWYSTGQYSLKDVSKKARQAGLTYRKSGAPIGVSTVHTILRNRIYTGAFEWLDKVYQGSHAPLVSEDLWGAVQDVLDGRKAANIRASVNDFPFTGMMTCGHCGCAMVAEIKKQRYIYYHCTGFKGKCGEPYVREEVLEQRFAGLLRQLRFDDAAFELIQRALRESLQDETRERRAAIERLRGEADRLQARIERMYEDKLDGVISDDFYRRMQIVWREERDRCLKDIERHHSADDEYIDNGIALIRLGREAHDLFERASASEKRRVLNLVLSNCSWAHGELTAKFRQPFDLLSETIAQSTLPKKGETGDLPENEKWLRG

SEQ ID NO: 12618 - protein, 542 aa, synthetic construct
MTKRVAVYARVSTTRQAENDISIPDQIAHAKRYCRTKSWNVAREFIDAGASARDDKRPEFQSLMEAACVDPSPYDVVLVHSQSRFFRDVPGYVISKRRLQKHGVSLVSMTQDFGEGATADFAETIIAASDALNSAETAKHVTRTMLENARQGFWNGAHPPFGYRTVEVERRGQRIKKHLEIEPREAEIVRQIFKLFAEGDGTHGPMGVKDIASWLNARSFRNSQGNPFYTGTVHLILTRETYAGVHHYNRHDSRTRRERPKAEWIAIAVPPIIPADQFERAQQRLYMRRPNMTAPRITNSPVLLTGLARCQSCGGALMLSTGKSPKYRYYTCANHRLKGRTACPDPITVSMAEFDRLIVGALADQLLTPERLPIILREAQKHRHALASGNVHRRTTLRRQLKEADTQIRRLYAALAEGTVKDTGLFREALNDLEARRDESIRLLSLLDVEAPSLRRVLSKAQARTVAATLKRRLMEAPPPMQRRYVHGLVSEIVVDREKAVIAGPKAAIAAAITSGAYKSEVRSFVREWRTRRDSNSRPPDS

SEQ ID NO: 12619 - protein, 514 aa, synthetic construct
MSSQSTEWASTMHAKETDSIRCAIYTRVSTAEQASDGVSLEMQRNHAEAFAVAKDWPVYQCYEDAGWSGGKIERPALNRMMKDAEAGRFSVVLVYKVDRLSRVVPHLFALCDRLEAHNVGFVSVTQPFDTTTVAGKMMFGMLAVIAGFERGQIIERTVDAEARMKELGTLVCGPAPFGFKHEDKKLLYDPETLPVAKEILRRSGSGEPERKVAHSLGLTRDQVRSVLHNSLFAGKIAYDKRGKNGTRVGYNKWTYVDYAGIEPILEFDDWLRLQQELALRSDRSEGSTLPLFGRMIYCTKCKHLLSAHGSSKRNKTEYACQSAGNGQKACGAQLLEHNLLPVFVSKLSEELCHFVPKFDGADRLVEIDRKIAKYDRDITQLEGRLAIPEVSVEKVRERIAVLRTLKHEALQERAEIGKEKAQLEEVKNVLANFEPFFLSLDRASQLEVVHRFARRIDLGVTNIVIHWRFSENECKVPRLEVSPRARKAGVRGRVVEIGGLEPPTSCMPCRRSPS

SEQ ID NO: 12620 - protein, 534 aa, synthetic construct
MKAYFGYVRVSTKRQGEGASLPQQQTAITEYAAKHGLEIIDWFIEKRSAAKRGRAQFATMMDGLNAGRAQGVIIHKIDRSARHLADWVWVGELIDRGIDVRFAHENLDLTTRSGRLTGDMLAVIAADFIRNNRDEVLKGFDGRLKQGLYPMRAPLGYFDCGKGKPKAIDPGKGPLIRQMFELYASGRYSHWTLRAEMKKRGLRNHAGKVLSVNSTARILHNPFYIGIIKIERRGETFQGVHPPLIKKSVFDRVQSILLGRVPARPIKHDFTFRRLITCVTCGRTLYGELQKGHVYYRCHGRECRGTSYRESEIENRVRELLHLLQFDDVEFGDLRDLGEEANADDATAEEARQANLTRLINLCGERLTRLTDAFLDAAIDKATFEERKSKLLHERRELEDELANPDGLHKSANLLEKLELGSTAYLQFNSLIPAERRDVVESTVSNLSAEGKELAVTLQFPFDRIAAARNSHFGAPARRTARNGSKSCENQKAGYVSSRFTRAELKTLFDQLKQEMTCLPPAQHLQREAHLFQL

SEQ ID NO: 12621 - protein, 544 aa, synthetic construct
MSSQEWTPEAEAAALASLRAARNHTGQPRVVLIYARQSVSDFDAEGRLRGPSLRQQVDSVSQRSEFAGLCAEVFQDADRSGKETSRRGDYLRMLERIKGAAAGEIAAVASYDIDRLHRNDLEFFRFMAEMAERRILVFDSSGLVSAVDQLPWKVKAIVAQEERVKVARRVRDNLRYLKRTGHLLGVIPQGYRRVDGAIVEDPEVAPVIRQIFELYATGRFSFQTLADHLNRLGIRPRRGPSKSRHNRPAAVIFTGDVLKDILDNSSYLGKVKIDGQLIEAKHPALIDEVTWTSCLEVRRRNRRNTSGTWTRHSYPLTPVLRCGRCGSTMHGEISSNNRRTAAYYACHAARRNRSATMPRGPKCDARWIPASHLDTAIRDELRRCAPSDVMHAAYREQLGRSLNRPHDPRALADGAIRRLDEQLARSRRLFEFGEYDWDTFMEKRAQIQQEQQRLRNEAAAAPSVDDPEWCRAQILDLLAAWDSADDGQRSRLLASLFDSVEAEALPDRRLKLIAIPRGAWQRFFQVVVLERETGLEPATSTLGR

SEQ ID NO: 12622 - protein, 588 aa, synthetic construct
MTVDLIVEYKNMYIPSELLQLKYDVYIRRSSDDADHQVASLESQKEVLLKLVKDNKLKVERIVEESMSAKQPGRPIFNEELQRVEDGIIQGLVVWDLSRCSRNPVDSGTLSWFLQKEKLKVIVTPHRIYQSQDNVLLLNIEFGQANQFLRDLSKNVKRGLNTKLTKGWRPGIAPEGYLNDKSEEKGNRKIITDSVRFSLVRKAWDLLLTGNYTVPQILKIMNEEWEYTTVKRKKLGGAEMSRAGLYRIFTNSFYYGWYEYPIGSGNWYEGKHDKMIEQAEYDKVQIILGRKGKQRAKAREFSFTGMVRCGECDSRVTAEELWQVICTKCKNKFSSKNTNNCTQCNTSIANMANPSILHYIFYRCTKKNKTIKCKQKYVRLEALEEQIDFLLSRIEIPEAFKDWAISHLNYLHDQEAREQDAIAESINTKYRDCLERINNLIKLKISPMNSDGSVLSDEDFKKQITPLQKEKINLEQEQKTLAKRADEWLELSQRTFNFACYARLKFKHGSHHEKKEILATIGSNLILKDKILSLAVPKPFIAIREAKIETDRIVARFKPEEKVDITAQMMYLYQENLTLRRGWDLNPR

SEQ ID NO: 12623 - protein, 533 aa, synthetic construct
MGNNMKIKIVIFCRVSSREQEVDGYSLPAQEKLLNEYALKQGYNPKEIKLFSISESASGKKQRNFFLNMLSYVKEHKIEILLCEKVDRLTRNLRDATDMNDWLNENPNHQIHFVKENVVLSRDSKSNEKFIWNIKVSVAQYYIDNLSEEVKKGQKEKLAQGWLPTTPPVGYITTGDKGHKIHVIDEEKAPLAIKMFEYYASGNYSVKQLTAKMAKEGLRNRHGHKIVMSRIHELLQNPFYIGKNRWNGIITQGEHECLIDKDLFERVQRRLKGKGGPVYSKHFFLFNKLIKCGECSGTITWEIHKNIIYGHCHHFKACSQSTWAKEFDIEIELAQVLEELEVKNKRIQTWIHKALKEGHEDESHYYSTAVNELTKQHEVVKTRLDRLYDDKVDGKISQEFYDAKFRKYTDEREGILEELGKHANADTKYLEKTITFYELSQSAKERYLYTKGIEEKRVMLNDIFKSLTFRDGKLYFEFTPVFTILKKLADISNRDKTIADVEPVLLNFEQRGIIDLKTQTETLQLVCPDLLRD

SEQ ID NO: 12624 - protein, 515 aa, synthetic construct
MLKYFVYARKSTEDEDRQILSIEAQLSELNIIARQNGLVIAETFTESRSAKEPGRTIFNDMLRRIERGEANAILSWKLDRLARNFDDGGKIIGLLQRGVIQEIRAFERTYLPSDNVLMIAVELGMANQYVRDLSVNIRRGIREKVRRGVWSGRAPLGYYNEPRLRTIEPHPEHFPKMKRLLELFATGEYSLTAIQKEATKLGILGRQNGKPLRLSSIGNLLRCHFYYGVFLHKGEVHHGVHLPMISKKTFDQIQEALVAVAKPRKHRDDKGFLFLNFATCGSCGHCITGERHLKKSGLRFDYYRCTHKNKKVHCEDRSYIRKDTFADEVKRNTQLVALPLEWKERFLARVETWEAEETARRQIQIDRLKAELAAIKTKIDRINNGFADGSLDIEEFKELKNPLVPRKVDLEGQITTLESNDAHRLEPLKNWLFEANKAEEWLADQNWLEMKGFLKKVGSNRLLREQTLTVTFRKPWNFLAETTVAAPSAVDDFTPSSKWWRRWELNPRPLQSARK

SEQ ID NO: 12625 - protein, 446 aa, synthetic construct
MKTAIYLRKSRADEESEIKEGHETLSRHRSTLLKIAREQNLNIVEIKEELVSGESVQYRPKMLELLDEVKQGLYDAVLVMDIDRLGRGNMQDQGLILETFKKSKTKIVTPRKIYDLTNEFDEEYSEFEAFMARKELKLITRRMQRGRVKSVEEGKYIASQAPFGYKFTFDSNGKKSMIIDDEKAYIVKMIFDLYLNRGYGGRKIASHLNALGLKTSRGRTWYDKGVRDIIKNKTYAGYVVWNKVERGKTTSRTRPLDERVEAKGIHEAIISETDWNKAQMLLSRNEIPRNKKDTTIRNPLAGLVICSNCGYKMVAQQSTYQGGAIVRFIKCTECGANRGIRLDILEDEVINQLNSWVNSYDLSFDNESNAKENSILKNYKKLLKTLESESNTLNMQKENLHNLLEQGVYDIDTYLDRSKVLAEKIDFNKSSIKKLKMTLKKNLILL

SEQ ID NO: 12626 - protein, 525 aa, synthetic construct
MLELNSRAVIYARVSSQIQKDKQTIASQLSTLPAYVASQGWKLVKPVDTYVDDGRTAKSGHLEKREGWRRLVKDMAAGLFDVVVVVDQDRLTRSEDMIERAQILGAFQRADVKIAVASTGQILDLGSSEGDLLSMLQAWVAAEHNRKHRERVKRGKLEAISKGKKPAGPTPFGYRYERATGIWSIHEQNGPVVVEIFERVAAGESCQVIALDLHARGIERPRCGFWSRERVWQITRARTYLGEWVADKRKGLKVPVPRIIPEELYKGTQEALLRFGLRGLKRNKHISLCQGIALCGLCGASVVLSQANAHDGKRKLRYYKCARALRVPFGQTKCALPSRRVEVVDEAVWARVQEVLSNPERVNRALAARKADASIVGGNWKSDLEGFRRRLRQLERAEEALLERFSREMISEAAMDQQLKRMSAERLLLLRQVDTAELQVMHASQADRDVDLLRAAVSDLEFDFATATQERRRSLLIRLVPGRGKHFIMFGLLSLDLHLVLPVKASQAKPDGISVDVEVALARAS

SEQ ID NO: 12627 - protein, 529 aa, synthetic construct
MLDPSGTYYMYLRKSREDRDAEAHGEGETLARHENRLKELAEQLGITISHVYREVVSGETIAARPEMMQLISDIESNRPDGVLVIELERLARGDTRDQGLIMETFKYGNTKIITPMKTYDPNDEFDEEYAEFGLFMSRREYKVINRRLQNGRRASVKEGKWTGNVAPYGYERMKLPHEKGFTLKPIPEESKIVQFVFQLFTSGTPESDNLPLGTTQIAHLLDDMKIPPRKSDHWEASVIRGMLRNYAYIGKLETGKRKQVKMIENGAVKRSRPINTDCEIFDAIHPPIINEHVFYAAQKRLEANFRPSAFLTIKSPLAGLMYCSECKMSMYRRPAGSRNPSDTILCKTHNCPTVGSFYYLVEERLLQFLERYLKDYEIKVQNEDSGDWEEVIDRKMAVLAGYQNEASILNKQLETVYDYFEQQVYSLDLFRKRSKELTKKIDENDRLIENIQSEIIEVRNRIAKKEEFIPYFEGILRSYAETEDPLRKNILLKQVVDHVYYRKIKKGNRLGQGNDLFTLDVYLKLPYQD

SEQ ID NO: 12628 - protein, 521 aa, synthetic construct
MTKEITTIHQEPTNEKIRVCAYARVSTTSDEQYTSYITQITYYQKLISKNPNYIFAGVFADEGKSGTNTKHRIEFNKMISLAKQGLIDKILTKSLSRFARNTVDCLSIINDLKLHNVEVFFEKENISSLDPNIEVVMSLYSGVAEEESRSISENVKWGIKKRFEKGIHHMNTSVILGYTKDSEGNVIVDEKQAIIVRTIYDLYINGLGTRKIKEYLESQGYLTVKGNTTWNKSTIMSILKNEKYMGDALLQKTFKPTYQSEKRLINNGQMPQYYVENSHPPIISKAQFKQVQEIRNARKQEYSSNNDTHRKAEKSIYTSFVRCPHCGKFYQMKTRTYYRTGAVTKFLQCASNSVKKTCPGKNIKVSDLKVLLLDKINHIIKNKQQFLEELRFGLHDYAEYQEVQDDIIKLDRKTAHIKTLLRDLEGKEDDFSKSLYDEYSNQLSELYMKLAQLQNTIAIEYNVDSYLAKIKSILMHHTKSVFTTDEFPIRQFIQNISIVENKIKLHFKLNDNYNTFIYDLF

SEQ ID NO: 12629 - protein, 572 aa, synthetic construct
MNEKRVIRIDPTPQNFFDNKEEINLQKKRVCAYARVSTDQEDQKNSYNAQISEYTKRIKRKEEWEFVEMYADEGISGTSIKKRPGFLKMIDDAKAGKIDMILTKSLSRFARNTVDTLTVVRELRDLNVEIFFEKENISSLDTKVDFMITIFSSIAQEESRNISENVKWGYRKRFQEGKVHINTRRFLGYDKDKQGKLIINKSQAMTVKIIYNLFLAGTPYREVCNYLIENKKKNGAGNIKWAPSNIMSILRNEKYIGDALLQKTVTVDYLTHKAVFNNGHAPKYYIENNHPAIIPRDIFNLVQLLIEERKHKRYKSAYMERYPLSGLVICANCKNVLNRGYHNYNKPNERIILTCKNGKNIDKTCTHKPISNTSLEEATTIILQALNKKDGSIIQELIKTVENNYDTSYIFKQTNKIRKKIIKIEEELRSLIKLRASSESNYNESFIISAFEEKKAQVDSYKKQIEELNSKVVQEHKKKKRTLELKEFLEDNINLSRAALSSVVKKIIQISDTEVLFCISTFEFQNEIILDNIEKLKTYKPVLRGTVSHPTDKKPLHYKVIEIGEELLWQKK

SEQ ID NO: 12630 - protein, 503 aa, synthetic construct
MMLVALYIRISTNHKSQKGSIENQKKQLIDYCKSKGYIVYKIYVDIGSGTSSNRKGFKQLIEDAKQKKFGLVLSKELSRLARNARLSLEFKDIIMSNEIHIITLDGAINTIENGVGMYGLYAWIYETESRNTSRRIKDTMRAVAKSGSYTKGDPPYGYIVEEGVLKVRNDETPSIVRKIFSLYIEGRGRNYIMRYLTDNNIRTPGQIKGRCDVDGKWQETTVLLILKNRHYIGDLVQCKESTPDISLDKDKKENRYKRLKNEDPIIVENTHDEIISREDYFMVQKMLSEKSAKSKNRSSPQRYLFSDKLYCNECGKRLWIISNRGYYVCGTYKRYGANHCSIHKVKEKDLAEIIKNDLTSYAESLSDFDSIEEKIKLKIKDSKVKFEKRQISMNKKLEKLKKKKGNLVLKWMDESLTQDQYELALAVVDEDINYHEKQLDALVEENNYEKQMEALNKVKAQLELLKSFDVVNREVINRFVDKVVVYEDSSVDIHYAFSNENIY

SEQ ID NO: 12631 - protein, 636 aa, synthetic construct
METGNNGNARCYSYIRFSRPEQLKGDSLRRQIEQSEAYAKKHNLIIDDSLRMEDHGLSAYNGVHKDRGALGEFLKVVEDGKVPKKSVLIVESLDRLSREEVLSALKQFISILEAGIKIVTLSDGMEYSSDSVKDFTQLLISITIMSRAHEESEIKSRRIKSAWENKRNNIKTKKLTRMAPLWLKLNDDKTEFIEIKDRCNLVVKIFEEYRDGKGMGQIAHMFNKSNIKPWGRGTGWHISYINKILHNRGVIGEFQPHKKKDGKRVPAGEPIVDYYPRIVSDELYYQVHDRIKNNGPWQGRRGRVANLFTHITTCGYCGYKMAFVNKGKRPVGNKYLVCDKARRRLGCKYNSIRYVEFESAFLNYCLEIDISSIIRKEGDARSRELEDISTSIDATNGQLSEIETQKNNYVTAIGKSDSNSVLELLTKNLEKASQDEQVLKDRLKDLQLKFDDLSIQVRSQDEHLNNIKILISQISTDGPDVPSIRQRLKTQIRKLVKSIVVFPIGLKDAEFYIEGGKVNIRKITGNLDAYEHLGCDPEIFGDETQYKEAVASEKKRVKALIAENTGREKRCFVVIFHTGAYKIIMPDDSTPSGYSVWAEKEGDILKHGPITYKNGKMIFDPKALGLKKTKLCDSGQ

SEQ ID NO: 12632 - protein, 507 aa, synthetic construct
MKRVISYIRFSSERQAKGDSLRRQSKMVNDWLKAHPEYYLDQDLSFRDLGVSGFTGKHLKGGLGDFLTAIEKGLVKAGDTLLIESLDRLSRQDVDQASELLRNILRSGVDVVTLSDGEHYTRESLKDPLALIKSILIMQRSHEESLRKSERIQAAWNRKKELISEGIKISKRCPAWLKLNDDRKSFSVIPEKVETVKRCFQLRLEGKSIWEIVRTLNDEGHQTLNQYKAGSFGQTSVQDLLKNRSVIGYFTPKGCEEISGYYPAIIDETTFYKVQQLSYARYGRKPASDKPMAVNLFKGVIRCSECGHALIITGFSDTRNGIYRCPLRNENRCSAKGLSRKQTDGTLLALLSRLDRFDSDMTNTIDTLKLHREHISSNIEKLVQLSLEIEDLSAITSKLKQLKGELSQVDADIEKETQRLKSIDVGCLSDCDLTTKAGRIEAQLIIKSAVKEVVLNTAKRRCKVTFHNGKAITLPITENPSDNVTEAIQSLSEVTERGLIDVDEVII

SEQ ID NO: 12633 - protein, 507 aa, synthetic construct
MKRVISYIRFSSEKQAKGDSLRRQSKMVTDWLKAHPEYYLDQDLSFRDLGVSGFTGKHLKGGLGDFLTAIEKGLVKAGDTLLIESLDRLSRQDVDQASELLRNILRSGVDVVTLSDGEHYTKESLRDPLSLIKSILIMQRAHEESLRKAERIQAAWDAKKEAAKAGIKISKRCPAWLKLNDDRKSFSVIPEKVETVKRCFQLRLEGKSIWEIVRTLNAEGHQTLNQYKAGKFGQTSVQDLLKNRSVIGYFTPKGCEEISGYYPAIIDETTFYKVQQLSYARYGRKPASDKPMAVNLFKGVIRCSECGHALIITGFSDTRNGIYRCPLRNENRCSAKGLSRKQTDGTLLALLSRLDRFDSDMTNTIDTLKLHREHISSNIEKLVQLSLEIEDLSAITSKLRQLKNELSQVDADIEKETQRLKSIDVGCLSDCDLTTKAGRIEAQLIIKSAVKEVVLNTAKRRCKVTFHNGKVIDLSITEDPSEDVTEAIQSLSEVTERGLIDVDEVII

SEQ ID NO: 12634 - protein, 506 aa, synthetic construct
MRTAITYLRFSSAIQGAEGADSTRRQNDLFKQWLKKNSDAQVVASFSDEGVSGYKGKHLTGQFGDMLARIEAGEFPEGTILLVESIDRIGRLEHLETEALMNRILGNGIEIHTLQDGLVYTKDALADDLGISIIQRVKAYIAHQESKQKSFRVSQKWKQRAKLALAGEQRLTRNVPGWIDPDTLKLNEHAETVRLIFKLLLSGESLHNIARHLQSNGIKSFSRRKDANGFSVHSVRTILRSETTIGTLPASQRNDRPAIPNYYEAAIDAATFNKAQEILDKNRKGRTPASDNPLTINIFKGLFRCQCGASVHPTGTKNKYAGVYRCNNHLDGRCDVPPLKRKPFDRWMIDNFLGMIDVGNDGEAEGKIASLQHEVEIVTARIKKATALLLEMDDIDELKIQLKELNQKRTELQTMIDNMRRKASLTDKELPQLKDIDLTTKAGRVECQLILSKHLKGLTLGKDSVTVTLQNDTEIIVPTDPLPLNDGTSIFEIAEKELLEIDAYQL

SEQ ID NO: 12635 - protein, 517 aa, synthetic construct
MNVIDITPLSREKAEKIRLAAYARVSSKSEEQLHSFAAQVQYYSEYVKDHPEYELIDIYADEGITGTEMSKRKELNRLLRDCKNGKVDRIITKSVSRFARNTEELIAVLRMLKELGVSVYFEEQGIDSEKLNMEMIVTFPGLAAQKESEAISGNLRWSFQKRMESGEYNCTFTPYGYERINGEMVIKESEAAVVRRIYELYLNGTGIQTIKSILNEEKVPKRYGKTHWHHSSIKYILTNERYKGDALLQKKYTTETLPYRRRQNKGEYTQYYVENSNIPIISKEVFERVQELLKFKKNEKSPYNHYLLSRKLICPECGGAFRRQQIEEKVYWLCMKTSLGYTECQSRRVQEDMVYETFTDMLYKLKHYQDQIIGSLLYSLEQLQNRTSQNQERVRQLDKEIADLAAKNLIVTRLHTSGILDSSEYSAQTSEIENRLNELRSERRKKLSEDEDPAIEELKELNEIMEEYQPSSRFNEELFEQIVPKIIVDDSTKITFHLLGGLELTQEINEKGRCKVV

SEQ ID NO: 12636 - protein, 546 aa, synthetic construct
MEATATVQGPKKIRIIAPANNIQKTTARTHQLRVVAYCRVSTEQEEQLNSYEVQKQAYTEKINSNPEWKLAGIYADKGITGTSVKKRDGFNDMIKFCKRGKVDMIIVKSISRFARNTMDCLKYTRMLKELGVDVFFEEQGIHSTQLGAEFYITIYGCIAQSESENISANVKWGKAQSAKQGKAAFHYKYFLGYKKGEDGQPVIDAEQAEVVKFIYDRFLAGDSSLLIAQRLEELKILSPTGKEKWCVSTIRSILSNEKYKGDAIINKTFIDDCLTKKIKVNNGERPKYYVENNHPAIIDAETFGRVQEELARRAGKRKVKQVGTKTEQGRYSSKYALTELLVCGECKTPYRRCTWTASGKKRVVWRCINRLDYGKKYCHNSPTIEESVLEEAIMSAIMKTAQENVDVLKTLKLHIGMGLGTEDTEDKSLDIQIRIAEIDAELKEMINAISANTVETFDEARAQELAKEKSNLLQQLEQFADIQQKRKNAASRLEKLYTILDGLKNHPLTYDNQLVRQLLEAVIVESKEQIRVIFIGGLEVVQTLET

SEQ ID NO: 12637 - protein, 491 aa, synthetic construct
MNAVIYARYSSDNQREESIEGQLRECKEYAVKNGMTILNTYIDRALSAKTDNRPEFQHMIKDSAKHLFDVVIVWKLDRFARNRYDSAHYKATLRKNGVKVLSATEAIATDSTGILLESLLEGYAEFYSAELAEKVVRGMTENALKCKYNGGSIPMGYAIDGEQHFQIDPASAPVVIEIFKLYSKGTSMQTLVNMLNERNIKSSRGGKITLNIVNHILKNRRYIGEYSYRDVIQPDAIPAIVPQELFDRVQERMAKNKKAPARHKAEDDYLLTTKLHCGKCGAFMVGESGTSRTMKVHHYYRCVNTKKKKLCDKKAIKKDWIENLVVEQTMKVIMDDAMVLYIADMVMDLQARESTDLPLLKQRLAETEKAIKNMLDAIQQGIFNLSTKARLDELEQNKSELEVSILQEEMQKPLLTKEQVTFWICHFRDIDVTKQEQRQRLIDSFVNSVYLYDDKMIITFNYKDGSKTVSLADIEGSDLARFGAPKAIEPA

SEQ ID NO: 12638 - protein, 533 aa, synthetic construct
MNGEYCIYLRKSRSDENNPNVSMEETLARHEKTLLTLSKQMNLNITKIYREVVSGDTIASRPVVQELLADVESGIWSGVLVMEVERLARGDTIDQGIISQTFKYSDTKIITPIKTYNPNDEYDEEYFEFGLFMSRREYKVINRRLQRGREASVKEGNYLGSVPPYGYKRVPNQDGKGYTLEINKDEAETVKLIYEMYTNGIPNDIGVCERIGISKIAKKLSQMGINPRKSKTWSIATIKDILKNPVYIGKTRWGNRKAIKKIVNGKKITMRPRAKDFILEDGKHPAIITEDVFNTAQYYMSKNPAKPIGENRKITNPLAGLVVCSKCNHKMIARPYSNNTPTSLLCTTLGCQTVGTALHYVEDRIIEALYNWLNKYTLNIKPCNTIQNSSYEKLMLNNLNAIQDEIITLNKQMDSLYDFLEQGVYTTEIFIERSKKISDKMSELKENEDNIKNELSKSKKQTAINKDFIPKLKNILDTYYEISDPEIKNQMLKEVVEKVVYTKEKRGTKKTPDKFEITIYPKLPNTQILSLPK

SEQ ID NO: 12639 - protein, 449 aa, synthetic construct
MSAPVVRAAGYIRVSTAEQALRGLSLEAQEAEIRRWAAEHHVRLENIYVDKGITARKQLHRRAAFMQMMQAVDAGQIDLILVMRLDRWFRNVYDYHKMMNEHLIPHGVNWCAVKEDYDTTTTNGRLMINLRLSIAEQECDTDADRIRDVQQNMVAKGRWPFGAAPLGYRIEEKRLVKDPQTQPQVEFFFRHMLANGSLRGALFAMNDRFGTSYEYRRAQDLSRKSVYYGVYGENQSFCPAYITLEEHQRIRSLAEKNVRVWSSPTAWPHLFSGLLICDDCHRRLNAQTIRRPSGVYTTYRCSHSTDNHGCANNRSISEKVIEEYLLNYVREDLAQYIVQMEVSRKKAAALPDNTAKIRAKQERVKTLFINNFIDLEEYKRRIQELEGQIIRRPPSEKTKDVSKLKQLLEDGALKMYPTLTREEKRAFWRGFLKELHIYRGTIQGPPIFL

SEQ ID NO: 12640 - protein, 515 aa, synthetic construct
MKRAVIYARFSSDNQRTESIDAQVRACKEYCKRKQYLVTKVYADEAKSGRDVAKRDSYNQMLADALEDKFDVIVFHKLDRNARDEFNYYTFQHKLQKLGIDYEYAVQPIDSTPEGRMMEAMLVGMAAYYSRNLAKETKKGLNENAYKAMFNGGQPPLGYKIVDKKYVIEPREAEAVKLIYKMYLAGNGYKQIALELNKRGFKTREGRDFGKNSLYEILRNEKYMGTYTFNKTQRREGFPRNMHAPESQNVIRVEDGIPAIITEAEFIAAETLREENKHRRHSYKSREVYLLSGKIHCGICGCAMAGRKYSPRGKTYVYYCCTGKERLPACKCTQKQIRRDPLEDWIVRTIKEKLLAPESIEIIAREMAEADAKTNSLYRKEKDALTTQKVMAERKLDNIYKVFENGAADEYDMERLAAAKKELTDIKQRLKKFENFKSLPPLSEKEILMTLLELKKKLLSKEDKEAKKILIDLFVEQVSINQDDVCVTFNTKMFYMSMVPKTGLEPVRVSLPEGF

SEQ ID NO: 12641 - protein, 543 aa, synthetic construct
MAKPRTERALGYVRVSTQRQAEGGISLTNQEERLTAHYSQRGVELADIYRDGGLSGTNDNRPGLQALFEHALRPGSGVTEIGVYSFSRLFRDHYLLEHYRRKLKRAGVRIVAITQDVGHDAEGDLVRSVLSNFDEYQSRQTAKFTRDTMKRNAEAGFWNGAIPPFGYTTEVAEMRGPKAKKRLVIEHSEALQVQQIFRMKRIGVGQGPMGYKKIVSHLNGNGATLRGRKFHVSNIKDILQRSTYRGKHPYGVHDVRNGIKRSEDEWQMIDVPVIIPESEWLEVQAGIARNAQHITPARITNGPTMLAGIAKCGHPECGHALAIATGKGGRYRYYRCSRRLRRGETACEGTSIRDEKLETIVIDAMAERLLRPERLQELLANLLDDSSAAVRERQAHLKALRTERTRVAGAIQNMFDFIEQGIVSPRDVDFTARLAAQRTRRADLEQEILLVERQLSTADRRVTPEAIERLGEVILTKLRSDDHTLRQGYARRFIAKVVVAPNLITITGPIKPLELAVGGDPEQITPAVPSSAREWCRLQDSNL

SEQ ID NO: 12642 - protein, 528 aa, synthetic construct
MRTVIYARYSSQLQNARSIEDQIAVCRERADREGWTIVEVYTDYAISGAAGIEGAQRPGLNAMMARVEAGGVDQVLTESTDRVARHQGDAFAIRERLQFVGARLFTLMDGEVDDITGTIKGLMDARFRKDLGARIKRGQRGTIKQGRAPAGIAYGYRRANRLDERGELVRGLREIDEDQAEIVRRIFREYADGRAPQAIAKALNAEGITPPRGTTWRQTTILGDRQRQNGMLNNRVYAGVLVHNRTSKVVNPTTRKTIIRPNPESEWIEQAAPDLRIVDDALWQRVQAIRAEGAGVHRTYQRRPKHLLSGLGRCGVCGGGWIRRTGEYWACGRHHDGAGCTNNRTIKNDNYERQVLEHLQHQLLAPELVAEYVREYHREHARLAGEGQRERASIERRHAEAKRKVDRLVEAIAAGGAEFAEIRDVLAKARADRDAFASQLAGIDAVPVIALHPTIADDYRRQVQALQDALNGNPAAQLEAVPRLRALIDHVVLTPKEAGRGVDVHVVGRIEEAIGLAGHTATTLQKRA

SEQ ID NO: 12643 - protein, 524 aa, synthetic construct
MRTIIYARYSSDLQNPRSTADQLSSLRERADREGWAIVDTYFDDEISGRAGIEEMQRPGLNAMLGRIERGDIDQVLAEATDRIARHPGDAHAVREHLEFHGARLFTLADGHVDEIVGTIKGLMDARFLKDLADRIRRGQRGQHSRGFNTGGRAYGYRVIKPIGPDGEVIRGMLEVNEEEAAIVRRIFDEIVAGMSAYAIVKRLNGEGVPSPSGGKWRVSTINGDRVRANGILRNNLYRGVMVYERTHKVYHHKTRRRLIRSNPLAKWRSIDVPHLRIVSDEQWEDVQHRFAQFDGVIASKQRRPKRLLSGLGRCGVCGANWIVYSKDKWGCSDWKTRGGCSNSRSISALEYERRVLGQLQAILLDTDATALFLDRYNASLKRRLAEAATMRAPLERKMEDMRARVRRLIDAVADGGNEFPEIRDRLRTAKAELADAEAQLASLVAETPIQAPVDLGERYRAFVAELDAALATDGPAREKAAAAIRALIDVIVLTPKAAGRGVDVEVKGRMAEIINLARQQYEGL

SEQ ID NO: 12644 - protein, 537 aa, synthetic construct
MTEMTLTRSALKPAYIYARFSSAEQAKGFSLERQLSTARSFIESKGWHLAGEMTDEGRSAFHGSNRDEGAALFEFEAKARSGHFSNGAVLVVENIDRLSRQGPKAAAQLIWALNERGVDVATYHDDQIYRADASDMLEIFGLIIKASLAHEESEKKAKRAKASWDKKYAAIEAGSKKAITKNVPAWLTVTEDGDIQENKRRVAVVREIFESYAEGIGLHTIMKRLNGRGEPAFSGRDNSKGWSKSAINHVLSHRAVLGEFQTQNGKHIPVAYYPQIITLDLFNRVEAMRSTKTRTGGSSKYQGNNLFAGIARCEHCEGPMGFVRDGGLTRYTTASGEKKVYERKANHAYLICDAARRGFGCDNKTHASYSTIEAATLKQLLWVAIDDEQPSNPKADATQDKIDAVLHSLDLKHRQISNMLDSMIDTPSKAMAARVVALEGETETLQAELESLQKEHALLTAAPSTFNDIEELRVLADLLTSDDEDIRRAARLRTNAALKRVIDHMTVNRNGDFVVMADDIAVWEFNKQGHRIGGQAL

SEQ ID NO: 12645 - protein, 534 aa, synthetic construct
MGKVYSYVRFSDARQASGASSDRQRAYAADWARQQGLELDEALSLRDEGLSAYHQKHIQKGALGVFLKAVEDGKVDAGSVLIVEGLDRLSRAEPIQAQAQLTAIVMAGISVVTASDGKVYERKRLKAQPMDLIHSLLIMIRANEESETKSRRVRDAIRRQCLGWQAGTFRGLIRYGKQPSWLRVVDGAWQLIPERTDAIRMAAALFRQGLGAVQIVRRLHAAGLAVSGAEGTSGHLTRLLANPALKGEKHLDLDGITHVLQAYYPPVLDAADWDALQQLTDLRSRQRVKGEIPSLLTGFGVTFCAYCGAPLKSQTMANKRRLDGTLTDGHRRLQCVRTNSGEPCPVGGSCSAAPIERMLMRFCSDMVNLQSLYEADRSAQPRGEVSAAQAKLQEIDLQLTRLTDALLLTDAPPATFVRRATELEVERDLVRQQLRAAETSLAQASRAELQGADERWRALVEGVDALDYDARMKARQLVADTFERITIAHHELPAQARARYIDVVLQAKGGAARMLRIDRKSERKRAPNLPARSP

SEQ ID NO: 12646 - protein, 537 aa, synthetic construct
MTDLPPIRSNTKPAYIYARFSSAEQAKGYSLERQLSTARSYIESKGWQFADQMTDEGRSAFHGSNRDEGAALFEFEAKARAGHFKNGCILVVENIDRLSRQGPKAAAQLIWALNENGVDVATYHDDQLYRADASDMLEIFGLIIKASVAHDESEKKSKRAKASWDKKYEGIAAGSKKAITQNVPAWLVVTPEKDIIEDKRRVAVVREIFNAYVEGIGLHTIMKRLNERGEPAFSGKATSKGWSKSAINHVLSNRSVLGEFATQQGKHIPVVYYPQIITLDLFNQAEAMRATKSKTGGSSKSQGNNLFAGIARCEHCEGPMGFIRDGGVSRYTTASGEKKVYKSKGHSYLICDAARRGFGCDNKAHTPYRVIEAATLQQLLWATVEEQPDTSNPKADAIRSNLDAALHNIDLKHRQIGNIIDSMAEAPSKAMAARVAALETEIETLQAECATLQKELAIESSAPSTFDDLAELRDLTELLESEDEDIRRAARLRTNASLKRVLDHMTVDRTGKFVVMSMDVGVWEFDRTGQRIGGQAL

SEQ ID NO: 12647 - protein, 518 aa, synthetic construct
MRTILYARFSSDLQNPLSTADQLASLKERADREGWTIIDSYFDEEISGRAGISEMQRPGLNGMLARVERGDVDQVLAEATDRVARHIGDAHAVREHLEHFGARLFTLADGHVDEITGTIKGLMDARFLKDLADRVRRGQRGQHSRGFNAGGRSYGYRVIKPIDADGEIVRGILEINEDEAAIIRRIFEESIAGVPARAIVKALNDEGIPAPRGKRWNVSVIHGGRARANGILRNQLYRGIKIYGRFSKTFHPKTRRRVLRPNPINEWRFVEVPHLRIVTDEQWAQIETRYAAFDGNIRKQKRHPKRLLSTLGRCGECGGVWTVIGRERWGCSTYKAQGDCTNSRSISTPLYEDGVLGQLKAVLLNSDAISLFVERYNAGIRARQSEAKMNRAPLERKASDLRARVTRLVDAIADGAGEFQEFKDRLHTARKELRDVESQLAHLAADTPIELSKDVAERYRAYVIELDTALAAEGMARERAAGAIRALIETITLIPKTQGRGVDIQVTGRMAEIINLAK

SEQ ID NO: 12648 - protein, 539 aa, synthetic construct
MLGIYCRISKEKEQGKGQSLADQERLGIELAKQLGLDHKIYVDDGLSGAGDNIEDRPQFERFLADVSNRVLTHVFAYDQSRFERNPQVRFVINKLFKDNNIKYYTHLDGGEVDLHDPQAEFFGDLLSVINKYHVTTTKIKVKSALKNRAMLGKGQAVMPYGYDKDSEGYIIINEEEAEVVKRIFEMSLSGIGTKTIAETLQNEGIPTRYNKLGKGSLTVVNKYTGQKTTTNKADVKWSGNSIRGIIVNTIHKGEKRFKDMVIEVPAIFEKDYWDKVNENLPKNRNTRTVSNAKYDYLLKGLIRCGVCGRNMYGRKRADKHDNHYSCSSKRIKSENCGNRSINIDKLDDFVWRKLFLKHGFMQSLRSHFNKNKKGSDSLDVNEQVVVLKKKIESLKNQNEKAIQYVLEDIWKMEDVSVILEKNKKTIADTEKEIELLQSEIKIINNTDRILKKYQDSIPIHEGDFEFKRKVISDFIKNIIVSFDPVTKEYILQLEYLVNIQDEEYKGDVMPRPVKSWSEFTDANKKKDVSKPRPDIAQRM

SEQ ID NO: 12649 - protein, 550 aa, synthetic construct
METSSAQPSRPLRAVLYARLSRESDASTSIKGQDADLRALAASEGWHVVAEFADEGKSGGKRRENADEAVRMLESGEVDVLAAYAVDRFSRLGIGEDAELVRIVRKSRARTPRRVVFIRENIDSATDPKGWALRFVIASEMAHGEREVMVQRRTAAISRMRNEGRYVGLGAAPYGYRSAPNPHGAGRVLVIDPAEADVVRDIAGRLLDGHSATAIARDLVARRVPSARSAARLASIAGDDPAGLPTGAWNSATLGRMMQSQHLLGRITTETTRKTGQEDLDDDNAQNLGRGESRYGKSVRGHDGKPLVAFEPVLDLSTFLRLGERFTRNAGRGVQVRRKAARLGSGLVYCGLCGSKAYVVSSRGRAQYRCSAPSRGESNKCGGMSAAASIVEDGLRSEYLGMLGHLPAVLRVETLSSPEVDTALATVSEQLRTEAAELIRPGADVAAGAARVAELQAERDRLIALPRERRIEEHDLGGTWADVWERSDLVSQRRYLGEAFEYFTMHPAGEPRRIVGVIAESEEEDHGGESTPRDPSALRRRPRSERKATA

SEQ ID NO: 12650 - protein, 627 aa, synthetic construct
MDERDERGENYIADAAPVDGGGDALEAAKGLDFPAEKSVNAEDLTEGGPHMYQEGEEAAATLAQPNLTSVAGLEHLFKGDDTMHVPLRTGVAISYLRVSTTRQLNTAADLDEDGNSIATQREWAIRKAKELGVPILREFVEPGQSAQTIDKRPEFKKLLRFVDANPDVRYVVIYMRSRVFRNHLDAAITKRQLRDKGVELISAKENFGDGYMGDAMEAITDVVNELQVRMSGEDIRIKMAHKVERGGSVGRAKLGYLNVRKDFDGRLVNTIDVDPVRAPLIVWAFEQYATNQFSITQLQMMLEDQGLTTRQSSKRAAKPLSSSQLAMILRDPYYTGVIRYKGKLHPGRHTPLISKELFLAVQKILDGRNRKGDRDRIHFHFLRGLLYCAECKSEGRTSRLVYSQNKGHGGTYEYYVCTAKQRGHCSMPSARLDELEDEVARRVAAERFDGEDIASVREEVRRALVELQAADQEEKDALRKQLKKLEGQEERLIELAADGTIAVEKLRQRLEYVTLQKGAITEKLTRTVERIRHGVDKAFAFVDLLEDPAALYRQLPDNVRRELLTAFFTRLDVQVTDREVSIGVERTELNAGLHDWRAQHHLSATAHTPTKEKRASRIPAEDSLSDP

SEQ ID NO: 12651 - protein, 553 aa, synthetic construct
MRAAIYARFSTDLQSDRSVEDQVALCRSHAAKLGLAVADVFADRAASGASIHGRPDYQRLIGLALAGQFDVILTEDLDRLSRNLADIARLYETAQFAGVKLVTVADGEISEMHIGLKGTMSALFLKGLAQKVRRGLSGVVRDGRSAGGRAYGYKPVPGRPGELAIVAEEAAIVRRIFAEYLAGDSARIIAGRLNDEGVPPPRGRFWSAVTINGNRTRGHGLLLNPIYAGRLVWNRVRMVKDPATGRRISRVNASGEHQEKAVPHLAIVDAATFEAVRIRREGRGLNGPRERARPRHILSGLLRCGGCGGGMSVKDRDHGRVRIRCTTATESGSCDNRRSYYLDRVEQAVVGGLRERMADREAIALYVRSYNEERQRLAASTIANRAQIEKRLAAAEREHERIYRAYVKGLIEEDALERELPPLKAERDRLRAELAAAEEPPRVVALHPATVKRYLASIERLEATIAEGETHGGEAKEALRDLIRTVTIHPAPAGQEPAIDVIGELTALIGGAHFPTTRSGGQMVAGGRSVRAPPIENRTGTAASVFVYGRFAA

SEQ ID NO: 12652 - protein, 518 aa, synthetic construct
MKPCVVYARVSSKEQEREGYSIPAQLELLRKYAQANGFTVLHEFTEAETAKKTGRNQFAAMVDFIRGQRKAGKMAILVEKTDRLLRNLDDYVLISHVITDNDAEVHKVKENMVISRDSKSFELFIDGLNALLAKRYVDNLSEEVRKGRRQKVLAGGWHTLAPYGYKNDKNTRTIIPNPEQAPFVIRAFQLYATGVYSLEAVIEKLDKEGFAYRPQTRRIGRSKLHSMLQNVAYIGKIPFQGEVYDGTHPPLIDLETWRSVQLAFRKDGKPSTLSKRDFLYKGMITCGHCGSAIVGELKKGKYVYYRCSGVKNGCSQGYVPESRITETVEGTLSSLVFPEDAKQIIRDSVRRHHQEIYKIGQTERNRLEGVLKKLHNKRRAIYEDRLAGIIDADMYRAVDQDCLLEIAGIEAQKSQITYADTDYRQMADLAVELPEMLKGEWFSAEIEEKRLILNFLRSNFFLLDGNPLLELHPVFDSLKKSNDLIKKRKWHDKDRTSLLNVFSLHFETIRKIHLTLSA

SEQ ID NO: 12653 - protein, 507 aa, synthetic construct
MKRVISYIRFSSERQAKGDSLRRQSKMVNDWLKAHPEYYLDQDLSFRDLGVSGFTGKHLKGGLGDFLTAIEKGLVKAGDTLLIESLDRLSRQAVDRASELLRNILRSGVDVVTLSDGEHYTSESLKDPLALIKSILIMQRAHEESLRKSERIQAAWNRKKELISEGIKVSKRCPAWLRLNDDRKSFSVIPDKVETVKRCFQLRLEGKSIWEIVRTLNDEGHQTLNQYKAGKFGQTSVQDLLKNRSVIGYFTPKGCEEISGYYPAIIDETTFYKVQQLSHYRYGRKPVSDKPLSVNLFKGVIRCSECGHALIITGFSDTRSGIYRCPLRNENRCSAKGLSRKQTDGTLLTLLSRLDRFDSDTTNTIDTLKLHREHISSNIEKLVQLSLEIEDLSAITSKLKQLKGELSQVDADIEKETQRLKSIDVGCLSDCDLTTKAGRIEAQLIIKSAVKEVVLNTAKRRCKVTFHNGKSITLPITENPSEDVTEAIQSLSEVTERGLIDVDVVEI

SEQ ID NO: 12654 - protein, 499 aa, synthetic construct
MKTAVIYARVSSGRQEREGFSIPAQIEFLTEYARQNNFSIEAQFVEAETAKKAGRKQFNNMLKYISEHNIDAILAEKTDRIYRNLKDYLTLDEFKQLEVHLVKENMVISEHSSSHIKFMHGIKVLMAKQYIDNLSEEVKKGKNRKAKEGYYPQQAPVGYMNTDGPEGKRIIVPDPANGPFIAKLFTMYNHGTYSIAALRKLLYEEGFNHKGKPYSKARLLAILHDPFYIGKFMYNGALYQGKHEPLVPDEIFYSVQRSFNQSKARKHDTEFLYTGLLKCGHCGCQLTAELKKGKYVYYHCTGKRGGDCKKDYIREEQIDEVFMDLIKKIPNPDSKLFDLIRAGIKETRRLKGEYEEHSVEEIEKQIKRLQARIDNLYTDKLDGRITEEFWKEKHNLWYEEKDQLIEKLKSINNAARTFDEGTNLLENFCKHAPRLYERACPKTKQEILKIIGSNFTYKDKKVSVELTSVFELLLNNPFSKNGGNDEARTRDLMRDRHAL

SEQ ID NO: 12655 - protein, 507 aa, synthetic construct
MKRVISYIRFSSERQAKGDSLRRQAKMVTDWLKAHPEYYLDESLTFRDLGVSGFTGKHLKGGLGDFLTAIEKGLVKAGDTLLIESLDRLSRQDVDQASELLRNILRSGVDVVTLSDGEHYTRESLKDPLALIKSILIMQRSHEESLRKSERIQAAWDAKKEAAKAGIKISKRCPAWLKLNDDRKTFSVIPEKVETVRRCFQLRLEGKSIWEIVRTLNDEGHQTLNQYKAGKFGQTSVQDLLKNRSVIGYFTPKGCEEIAGYFPPIIPETDFYKVQQLSYSRYGRKPASDKPLSVNLFKGVIRCSECGHALIITGFSDTRSGIYRCPSRNENRCNAKGLSRKQTDSTLLALLSRLDRFDSDMTNTVDTLKLHREHISSNIEKLVQLSLEIEDLSAITSKLKQLKGELSQVDADIEKETQRLKSIDVGCLSDCDLTTKAGRIEAQLIIKSAVKEVVLNTAKRRCKVTFHNGKIIDLPITENPSEDVTEAIQSLSEVTERGLIDVDVVEI

SEQ ID NO: 12656 - protein, 507 aa, synthetic construct
MKRVISYIRFSSEKQAKGDSLRRQSKMVTDWLKAHPEYYLDESLTFRDLGVSGFTGKHLKGGLGDFLTAIEKGLVKAGDTLLIESLDRLSRQNVDRASELLRNILRSGVDVVTLSDGEHYTRESLKDPLALIKSILIMQRSHEESLRKSERIQAAWNRKKELISEGIKISKRCPAWLKLNDDRKSFSVIPEKVETVKRCFQLRLEGKSIWEIVRTLNDEGHQSMSQYKPGSFGQSSVQDLLKNRSVIGYFTPKGCEEIAGYYPAIIDETTFYKVQQLSHSRYGKRSVSDKPLSVNLFKGVIRCSECGHALIITGFSDTRNGIYRCPLRNENRCSAKGLSRKQTDGTLLALLSRLDRFDSDTTNTIDTLKLHREHISSNIEKLVQLSLEIEDLSAITSKLRQLKGELSQVDADIEKETQRLKSIDVGCLSDCDLTTKAGRIEAQLIIKSAVKEVVLNTAKRRCKVTFHNGRAITLPITETPSEDVTEAIQSLSEVTERGLIDVDEVII

SEQ ID NO: 12657 - protein, 586 aa, synthetic construct
MRVACYARYSSDLQKDTSIEDQLRVAREYAVSRNWEVLKDHIYRDAAVSGGSIEGRVGVQRLLAAAAQKPRPFDVVLVDDSSRIARDIADAIRVMQQLKFLGVRVIYISQGIDSASEQADALIMVHGLIDSLYLKELAKKIKRGLAGQIERGFATGAKTYGYRTVPVPDPSGKKDSSGGPALLGKRIEIDPDEASVIRRVFEWAADGVGVASIVERLNRERARPPRGARWAKGAVNRLLANERYLGKQIWGQRAWEREPGTMKKVARAVARDEWKSNERPDLRIISEELWKRAHATRAAVRQAVAPKRNLARGKDARFHSPHVFTGFMKCAECGGTISSVSGGKGSPRFGCARSWNNGPSSCSNRLTIRAKIAEPQMLAKLQAELVRPEVEKYVLERVQTELAKRRDGQPQREAKLQKELKEERRKLQNLVSAIEGGAHVPSLMAALKEREAAVAQLEAALRRGEKAAKPLAMAADLPSAVAEQLRSLHQLLLTNPERTKSEFRRLNLKLEWTPIEAEPRPYIAVKGQCDLSALAFSVLVPAERRMGAVVGLSLGRAAVERSWSRARFTHTARDGRAGSAPSTARR

SEQ ID NO: 12658 - protein, 558 aa, synthetic construct
MSTICAIYARFSSEKQNAASIDDQIRKCREYAVRHGWTVSEKHIYRDAAISGASDNRDALKRMIASATAVTPEFNCVLVDDTTRLSRDLGDGDRIVKRLKFAGVKICFVAQGFDTESESAGMLTAIFGGIGEQYLVDLGKKTFRGVEGLAKRKLHTGGRCFGYKNIPIEDETERDSHGRPVIRGVRLEVDPEQAKTVVRIFTMAAEGRSLKTITKLLNAEGVQSPRPSKGRISRGWDTSSVRTILHNERYCGTVIWGKTRKVRSPNTGRRIYRRRPQSEWVRTDIPEQRIVPDELWQRVKARQAIVQSVYARANGSLRARSMHSSYLFSGLLKCGECGANLTILWGKGRNKTSQTYGCPSNWNRGVCKNTARVRRDDLEAALLSQLHEKILREEVVDCVMEKFQTGLLKELENITGKMDRMHRRKRELERELANLTKALAGGQYSPTIMGAIADREREIAQITEQVVSSNEDSIKSQVAAMRAEAIEEVKDLRGLMGGDVTVARAALLKHVSKIEMEPRGKSYVAKGDWKLLGTLPIDGAGGQNRTGYARLFRAALYQ

SEQ ID NO: 12659 - protein, 547 aa, synthetic construct
MKLLVTYIRWSTKEQDSGDSLRRQTNLIDAFYSKHKNDYYLLPAHRYVDKGKSGFHQQHKAQGSDFRRMFENVMSGAIPEGSLIVVENFDRFSRADIDTAIDDVRQILRKGVSILTLGDGELYDKSALTDPVKLIKHIIIAERAHQESLVKQKRIAQVWNHKTQLARELKKPMGKQAPGWLELSEDGSHYIVDEDKASLVNIIYDKRLSGMSMFAICKWLNEQGYPTINQRKVRISKTKKPDGNWSALSVKHILTSRSVLGYLPAKISTEDRKTVLREEIESFYPQIVTDSKFYAVQQLLEETGKGKTSSGEHWLYVNILKGLIRCKCGLVMTPTGIRKPVYQGTYRCNGNKESRCSYGTVSRKLLDTQLCSRLFSKLSQLHDEATDTAKLDELQRRLNTVDSELEKLTETLIQLPNITQIQEALRVKQEEKDELIVQLSREKARVKSVSSLDLSGLDMESVEGRTEAQIIIKRLVKEIVVSGNEKLVDIYLHNGNMIRGFPLDGKDDHTLTLEEATDEMQPLDDMLIFGEPVTRIYPAGDMEEVDA

SEQ ID NO: 12660 - protein, 506 aa, synthetic construct
MRSVITYLRYSSAIQGAEGADSTRRQNDLFKQWLKKNSDAQVVASFSDEGLSGYKGKHLTGQFGDMLARIESGEFPEGTILLVESIDRIGRLEHLETEALMNRILGNGLEIHTLQDGLIYTKDALADDLGISIIQRVKAYIAHQESKQKSFRVSQKWEQRAKLALAGEQRLTKMVPGWIDPDTFKLNEHAETVRLIFKLLLSGESLHNIARHLQANNISSFSRRKDANGFSVHSVRTILRSETTIGTLPASQRNDRPAIPNYYEPAIDASTFNKAQEILDKNRKGRTPASDNPLTINIFKGLFRCQCGASVHPTGTKNKYAGVYRCNSHLDGRCGVPPLKRKPFDKWMIDNFLGMIDVGNDGESERKIASLQHEVEIVTARIKKATALLLEMDDIDELKIQLKELNQRRTELQTTIDSMRRKTSLSDKGLPQLKDIDLMTKAGRVECQLILSKHLKGLTLGKDSVTVTLQNDTEITIPTNPLPLNDGSPIFEIADKELLDIDAYQL

SEQ ID NO: 12661 - protein, 506 aa, synthetic construct
MRTVITYLRFSSATQGAEGADSTRRQNELFKQWLRKNSDAQVVASFNDEGLSGYKGKHLSGQFGDMLSRIESGEFPEGTILLVEAIDRIGRLEHLETEALMNRIIAHGIEIHTLQDGLIYTRDALSDDLGISIIQRVKSYLAHQESKQKSFRVSEKWKQRAKLALAGKQRLTKMVPGWIDPDTLKLNEHAETVRLIFKLLLSGESLHNIARHLQANNISSFSRRKDANGFSVHSVRTVLRSESVIGTLPASQRNDRPAIPNYYEAAIDAATFNKAQEILDKNRKGRTPASDNPLTINIFKGLFRCQCGASVHPTGTKNKYAGVYRCNNHLDGRCDVPPLKRKPFDKWMIDNFLGMIDVGNDGEAEGKIASLQHEVEIVTTRIKKATALLLEMDDITELKTQVKELNQKRTELQTTIDSMRRKTSLSDKGLPQLKDIDLMTKEGRVECQLILSKHLKGLTLGKDSVTVTLQNDTEITIPTNPLPLNDGTSIFEIADKELLDIDAFRL

SEQ ID NO: 12662 - protein, 520 aa, synthetic construct
MKKVTKIAQNNDNHTEHSKLRVAAYCRVSTDSDDQLVSLETQIKHYESYINANPDWEFAGLYYDEGITGTKKEKRPELLRMIADCENKQIDFIVTKSISRFARNTTDCLELVRKLLDLGICIYFEKENINTGSMESELMLSILSGLAESESVSISENSKWSVKRRFQNGTFKISYPPYGYETDDGKLVVNKTQADIVRFIFAEILSGKGTHKIADELNRCNIPSKKGGRWTATTIRGMVGNEKYSGDAIFQKTYTDEYFSRHYNYGEQEQYLMKNHHDAIISHEDFEAAQTIINQRGKEKGVVKHHGKYQNRYPFSGKIICGKCGGKFKRRIHSTGRHNIAWCCTNHISDIGKCSMKYIPQSDFEYAFVTMMNKLIFGHQTVLRPLLIALREINSDDSLATIRELDKKLEENAEQRNVLVGLMTKGYLEPAVYKKSNNELLQEAERIQRQKESLLRFLNSDSKNQSEVSAILQYATKAAMLKGFDSDIFGRFVERIIVYSRTEIGFELKCGITLKERLVR

SEQ ID NO: 12663 - protein, 522 aa, synthetic construct
MEVSKNVTVIPARKHTRKSNDEEKPKLRVAAYCRVSTDSDEQSTSYEAQIEHYTAYINACPDWELAGIYADDGISGTNTKKRDEFNRMIDECMAGNVDMVITKSISRFARNTLDCLKYIRQLKEKNISVYFEKENINSMDSKGEVMLTIMASLAQQESQSLSQNVKLGLQYRYQQGEIQINCKWFLGYTKDENKHLVVVPEEAEIVKRIFREYLEGASMLKIARGLEADGIQNGAGKEKWHTSNINTILRNEKYIGDALLQKTYTVDFLTKKRVKNNGLVPQYYVENSHEAIIPREIFMQVQEELVRRRSVHTSKNGKNRTFSSNHCFSQMIFCGNCGEVFRRVHWNNRGKKSVVWRCVSRLENTGLFCDARTVLESTIERVLVTAINQTLCDKDEFLTTLQSNIKTVLCYENNQTLADIEKRLAELQMELLKLANSKADYEDVADEIYRLREQKQQVQVENAGRDELKKRIADMGAFLREQPTALTEYDEPLVRRLIEKVTVFEGKFTVEFKSGVTVDVNE

SEQ ID NO: 12664 - protein, 437 aa, synthetic construct
MNRRITKIEMQPTLPTLKRTAAYARVSGAKDEMLHSLAAQVSFYAKLIQDNPEWDYAGVYADEAETGTKDSRPEFMRLVADCKAGLIDEIITKSISRFARNTVTLLETVRELKALGIGVYFEEQRIHTLSADGELMLTILASYAQEESRSVSENCKWRIRKDFKEGKPSNNIRIYGYEYKAGGFTIIEEEAAVVRMIFADYLSGLGKNAIMKKLIRLGVPTKLGGRWSESVIGSILKNEKYIGDMCLQKGYVTDHLTKHQVKNNGELPKFYVENHHEPIISREIYEAAQIEMARRAALANHPGERVLSEFSGLIVCGRCKAKFRRKINGAGTKYAKVVWACATYTYRGKHECAAKRIPDDILKEKCAEALGLTEHDPAIFTAKVERITVPDDGILVFTFKNGTERTLSWKNRSRAMSWTDEMKQAARKRALGGVDNG

SEQ ID NO: 12665 - protein, 487 aa, synthetic construct
MANVRVIPATAPVLSAQERNSGYRRRVAFYARVSTDSSEQKTSYDAQVDYYTKFIQSHPEWEFVCGYTDEGISAVNTKRREGFKQMVADGLAGKFDLLVTKSVSRFARNTVDSLTTVRKLKEVGCEIWFEEQNIYTLDSKGELLITIMSSLAQEESRSISENVTWGQRKRMADGKVSLPYKQFLGYEKGEDGLPQIVPAEADIVRLIFRLYMEGKTPSAIAKFLSVNNIPSPAGKTTWQSAVVRSILTNEKYKGHALLQKTFCADFLTKKMVKNEGQVQQYYVEDSHPAIIEPNEFDTVQLEIGRRKSLGKVTSSTSIFSSRLICADCGGHFGKKVWGSYKGDKTYRKEVWRCNDKYKRQGKPGKGCQTPHITEYEIKTRFLSAFNRLMESRDGITQDCRLAQSVLCDTKAIDAELAELQNEIEVVTELSRKAIYENARTAVNQTEWSARNNAYLERHAEASKRMDELEAAKRQRLGKVKTIEGFIR

SEQ ID NO: 12666 - protein, 544 aa, synthetic construct
MLRAVIYSRFSTDLQNEKSIEHQEAVSRSYAVREGLDVIRTYADAAKSGGSILGRDGLEELLFDARAHKFDVVIVEALDRLSRDMEDLAHIHKRLTHAGIEIRAIHEGIANTLTVGLRGLVGQLFREDNVHKTRRGMKGKIDAGMIASGKSYGYSLAGDVRGRAEIEPTEAGIVRRIYAEFLEGRSPAEIAERLNAEAVPGPRGGVWQNTTIYGWEKRGTGILRNPLYVGRLVWNRQRWVKDPDTGLRQPQMNEEKDWVVNDAPELRIIAQATFDAVQAKLQAASSKPRAKSLQARPTRMLSGLLVCGGCGGGMSLRGKDKSGKNRLVCTRHQAGVPCPEPKTYYVETVEDLVVEALRDELAQPELLEEYVRAYNEARQEFARQTTRRRATLERRIADLDAEIDRMLQMLIKGIGNQDRMGAEMNAREEELKAAKAELAAEAPPVDIVALHPMVIKRYRDQLDNLKRELSGDIKKTAPEIGAVMRELIHSITVYPNPDKWGGVRIEVQGNLRLLLEDNGVSGSPQKSGGKLVAGARFELTTFRL

SEQ ID NO: 12667 - protein, 538 aa, synthetic construct
MSRNNNHGRGEALDSASRTNGTIRCAIYTRKSTDEGLEQEFNSLDAQRESAEAYIASQRHEGWVCIPDRFDDGGFTGGNMERPALKRLFAGIESGGIDCVVVYKVDRLSRSLLDFARMMELFDKHSVSFVSVTQQFNTTSSMGRLTLNILLSFAQFEREIISERTRDKMSAARRKGKWVGGMPVLGYDVDPKGGRLVVNEDEAVQVRGMYQLYLEHKALIPVVQEIERRGWKNKQWTTKKGQERGGKPFTKNSLFRLLTNVIYTGKVDYKGSIYNGEHDGIVDVDLWQRVQDALRRNGSTGGKEVRNKYGAILKGILYCAPCGTGMVHTYTAKDNGKRYRYYVCLNAQQRGWASCPTKSLNAHEIETAVVEHIRGIGRNEEIIAATAAKVREESGKRMVELETEQRGHERELKRLHTRVQKLVSESFTAASNGGAAMDQLADLQDQIRTIEQRMTTIREEVITIQRETVDEGDLARALAVFDSVWESLSSREQSRIVRLLVERVGYDGRDGRVTVTFRSAGVKALCSEADIRSREVSA

SEQ ID NO: 12668 - protein, 655 aa, synthetic construct
MKPTIITYLRYSSKQQADGLSEFRQSEINRKFVEKFCAEHDVDLNEVISLKDLGVSAYRGLNLTLGSFSQTIKKFKSGEIKKRFNEDGEINTYLIVESLDRITRTGPFKSTQIFTELLEYTNIVVLADGEKKIYSKKSIDSTHGMMDLFMALISLQRSHTESLMKEFRSRKSWEKKREDLLNYFTLPEEERIGLERPKNATAMCPFWLTAKKDGRGYDFIPENKKVMDFLIEKLLDGNGMTRAVRLLNDEIDAGNLKPKLKKANRKTRHFRAAAYSGLFNSEISTVKGDYLLTESYYPTEDDVEQGKYPEKHLGKRVRKEIAVLKNYYPALMTESQAAYIRKMMDERRSAGTKPNKSIKNLAQGILRCPHCNSTYIKAKDRKNVYLRCNLSREGLCNAKVIKHGVFEHNLLQFCKGLNINKIISNQSSDQVIDSSLKELEQKMMPLKVKKSQLEDDIEQIVKNISSIKIPSLLEKVQDDYLKKENELKKVVQEIDLIETSIMKLQHQIAMSDGDNSLQELIDLTLDEHADDEIRQRFNVELKKVVKSMTVLYRDTEDNPFGYHMISIQFLDGVHRLIPVHEKMTDKIHNILPYQDAVKVDSVDFSETVILPEDYVEGREKGKYPNLDGMAKYYQENPTKYLRLKHKIDQVHEIHA

SEQ ID NO: 12669 - protein, 508 aa, synthetic construct
MINVVGYARYSSDNQREESIIAQERAIKEFCQKNNYNLIKLYKDEAISGTSIKDRTEFLELIEDSKKKEFQCVVVHKFDRFARNRYDHAIYEKKLNDNDVKLLSVLEQLNDSPESVILKSVLTGMNEYYSLNLSREVKKGKNENALKCIHNGGIPPLGYDLDENKRYIINEIEADTVRIIYKLYDEGIGYVSIAEQLNKMGRLNKLGKPFRKTSIRDILLNEKYTGVFVYGKKDAHGRLTGKELKIDGGIPQIISKEEFENVRIKMRRRKTGSRATAHETYFLTGFCTCGECGGRYSGGYRSRQRDGSINYGYTCINRKTKVNDCKNKAIRKEILEEFVFKTIKKEIFTEKRIKHIATKVEKIVNEKMLNRIEEIKKIEIEIDKTKNKIETLLEIFLENKISKEIFENKNGKLENELFGLTQEKNKLSTSKKINKENIENFIRNFKSNFNKINVKKLIIETFVKEIKVYETSVEIVLRLFPVYIDRNGGDDESRTRVRNHNNHKLLQV

SEQ ID NO: 12670 - protein, 540 aa, synthetic construct
MIVAMYARVSTQRQENEETIETQIMAINDFVTKNGHTIVKEYRDDGWSGTLLARPSLDELRLDARKKIWEAVVIYDPDRLARKYSYQELVTDELNELGIQVLYVTTPPIKDDGDRLLYGVKGLFAEYERAKIAERFRLGKLRKARDGNVVTSQAPYGYDYILKQGDKQGFYKINTQEAEVVKMIFRWVANERITIRTIVKRLKKMGIKPRKSEREVWNTSTLSTLLRRKDYIGTTYYNRSYAIVPEHPLKDIKYKRIKKTSRRFKPKEDWISISAPAILDVSLYQKVQKQLKENYELTARNVKNKYLLSGKIYCSCGRRRTGEGPQKGKHLYYRCTDRVYMHPLPRKCHEKGINARMADKLVWDGISNYMTSPNVLKAQVKRWMSDQNKEVIQTDKSVEELKKELGRIKKEEQRYIKAYGAEMIDSEQLKESTEDLKKQKKSIEQQIFSMQRDTATGDISYPNDNEIDEFCRIAYKVIADIGFEAKQSIIRKVVDTAVGTQHDIKVYGHLPINSSIIANIWKGDTQDVKFETSSRNRGFA

SEQ ID NO: 12671 - protein, 431 aa, synthetic construct
MEIGQPIQYCLYARKSSESDERQAMSIESQVNEMSQLARKEGLFIKNIYRESHSAKTSGTRPLLMQLISDIRNGEYNGILTWAPDRLSRNAGDLGMLVDLMDQEKLVQIKTFSQMFSNNPNEKFLLMILCSQAKLENDQKGINVKRGIRAKCDQGWRPGVAPLGYYNRAFAGTKDIVVDPERGPLVKEMFEKAAYNKDSGRKIKLWLAEKGFTNRTGTTVSLSQVYLMLKNPFYYGEFEYPVGSGTWYTGKHKPLITKTLFNKVQEKLKVPEKSKWGAKSFTYKGIFKCANCKASVVAEERYRKRKYGRQPRHHIYYHCSRQKDYKCKEPYVTEKKLEESIYRFINFVYINHPKNIKLTKSLREDMGKYKEVRDQILLQQNIDPDSQIWDVRDYAKHILSSGDSKKKRELLNMFDYQFYLQNARVTTLRAH

SEQ ID NO: 12672 - protein, 437 aa, synthetic construct
MIKKTVTKVNALPKLASKMRVAAYARVSSGKDAMLHSLSAQVNHYKKLIHDNSEWSFAGVYADEALTGTKDSRLEFQNLLEDSRAGKIDMIITKSISRFARNTVILLETVRELKSLGIDVFFEEQNVHTLSGEGEMILTFLATFAQEESRSTSENMKWRIKKDFEQGILWGGKPCLGYALEDKRFIVIPDEAKIVQQIYQLYIAGYGADTIGKILDERGIIPKNSAKWNRSSIMTILSNYNFTGDLILQKTFRENHLSKRKIINSGELDQYAVKKNHEAIISKDLFDKVQEIRKQRAERIKPRINKKPQAFKGMIKCGICGKAYTHKSTPHNEIWKCSLSVTKGIEACPSKQVPDREIKKAAKTILKIRSFDEEVFKSKVKQVIVIPENNLIFQFKDETSVEQTWNKSSRSETWTPEMREKARIRALKQHKGGVHHG

SEQ ID NO: 12673 - protein, 527 aa, synthetic construct
MAKVTVIPSTIHPLTQMPLNQMAVKKVAAYARVSTNSDEQYTSYEAQVTYYKKFIEDKPDWEYINVYADEGISGTNTKRRVGFNKMIADALNGKINLIITKSISRFARNTLDTISYVRKLKDNGVEVFFEKENLWTLDPKSELILTIMASIAQEESRSISQNVTWGKRVGFQQGKVSFAYKSFLGYKKEDEKIVIDEDQAEIVKMIYKMFLVEGKTATGIANYLKSKHIKTPTGKTTNWTKNTVNSILTNEKYKGDALLQKTFTDNYLDHKMVKNNGQIPQYYVENSHPAIIDRDMWELVQIELERRDKIGAKYSSSDVFASKLICEDCGGFYGKKKWHSNSKYSRFVYQCNNKFHKHKEKCQTPNLAEEDIKLKFISAYNLSMEDKERIIEDTYEVIALLTDTKKLDDAIIEIEEDIMVTSEIVSRLVNENSKSDIALEDYNKKYEELSNRYDKLKNKHTDLLNERNEKEGQALIMKAFIKNLSESEDELDEWNERIWMLLVERATVHRDSSITFRFHNGNQIKTY

SEQ ID NO: 12674 - protein, 520 aa, synthetic construct
MKKKDRGYVRVSTLKESQQDSPEHQESLIKEHALREGIELDHVYEDRDTATSIVKRSDVLKMIEDAKRGEIRSIWFASLSRFSRDALDAISLKRILVNALRIRVVSVEDNYDSEKKDDELLFGIRSVVNQNTSGDISVSSRRGIRKSCLEKKNYIGTIAPYGYKKIKDGKRKTLEIVKHQSDIVEMIYDLYIDGLGDKMIVRYLNGGNPNSLFFPSYTGGLWSLSSVQTVLTNPVYTGYNVSGRYTTEVVYDNIENLMNRRKKLVRNPRDKWEFSEEQAHPEIVPLSKWEYVQELREQRGKGKRGGKRTFVNAFAKMIFCSECGSAMVTMSSIKNGKKYQYLLCSRRRRIGEKGCSNSKWIPYHEMRDDTIAEILRRIKSAVKAMESKGAAELSVSVPQNNYDKEKRKINKRIEDNRRLLFEIRRQHMLGEIEQSQYEFEKEQYTVEIDTNEMRLTEINNEEKRSFDHARLLKDAKKSLHELTQLESYAHDVDKTRILLMKVVRRIDVSANGDISIETYV

SEQ ID NO: 12675 - protein, 576 aa, synthetic construct
MTTRRPHVYTRISKAAQSEGSGLDEQTARIEQYLKDKNHLFEGDVTYWQDIGISAYKNKNIQDGQLAEFIKQVDEGRIGQGDALIIYSLDRLSRRSSWDETAIQHIVKKGVEIHDVSTPIVLNKDDPMSKIIMELIVSRGNNESKIKSERSTAGWDKRLNDTLKDGRVFTNKLPRWLGSNDDQYVVLKDEAEIIKRIFREYTNGMSSPMIARRLNEEGIKSTGKSLWRPNTITKLIKDERLRGNLVREKITLIPNIFPKVIDDELFVLANRILSTNAVGKKGRPRENNVTREVNNIITGLVRCGKCGSKVTTTKNGKGMRYITCLNRLNYKICGQKSIRLEEVERIVINHVKQVDMSKVLSISNVDTSSEAQLQAELIELKIEEQSCIVKIEERKILKQRTSLPLANALTDIQDRIEEVTNEILNLQVQEPLPDISSESISALLNASNVELRMSLRKYLVQVVDKLTFINIGDYNIIEVKYNNNVYCHAIITDKKLKVLHEVDITFSGDTTTYNSGEFSIVESENEGVCTFTGIDAVSSTDYFLLANYIGSLPEKQWIVDVMYLQQNINVVLQGHD

SEQ ID NO: 12676 - protein, 583 aa, synthetic construct
MVLTMRKCFLYSRVSSDAQISGDGLVRQEDKLKQYLLQNAERLNLSTIDYEILVDSGISGWKGSNMGDTAALGQLFMRVESDEIDDSVLIVESLDRFSRENPFRVAGYISKLAEHGIDIIDVENNLVIGPSNPWSSTISSIIANRAHEESTLKSKRIKAAWDSRRKKAKESGQYMIKNTPFWIDVLDDKYVVNANASIVREIFDLYLQGYGSFTIAKKMNEVGKIIRDKRWSTPKICALLRNPRCNGDFISNSLERNYEKGTSTSTEHVIKGLYPKIVTDDEFALVLNRLDGNHKNRRVRNDRKVTILNGLLKCSICGGALTVRSAGAYRYVGCLKTIEKGGCYAKPMRYDVLEKIIIEHIRNMDIGQVYESNDSKEFQLQSRIKNLASHIDEFTNGIASIRAKNKKPSFEMLSELQQSEEELESLKKEQEQYKLSKIDLGEFKVSTELFDDTKVALRSRLESTISNLLNKIKIHHTKDMSFSLIELVYVNDVVKHVLIVDKKGNVIGDVIIRTDEDSTIYESRSVKIIKDEGRIFSLDCSISEIALNDYLFLMNIVDFIDSDAKEFLNLHLNAVLQHESQQK

SEQ ID NO: 12677 - protein, 570 aa, synthetic construct
MGKVVDLYIRVSTDEQADKGYSQRDQEERLRRYCENNNLLIRYVIFEDHSAKSFKRPEWIKYLNTLKTKQNKDKSDLVLFTKWDRFSRNAADAYQMISRLKRLGLEPQAIEQPLDMEIPESKIMLAFYLASPEVENDRRALNIIRGMRRAKNEGRYLGPAPVGYLNKVTEDGHKYIAVFEPQAKLIKWVFKEIAKGILPADEVRKQAHAKGLKCGKTHFWTVIRHPVYCGKIFIPAFKDEPAKLVLGTHQPIVSEKLFYEVQDILDGRKRKVRVKPKKTAPEHLPLRGFLKCPKCTRMATGSGSKGRNGIFYYYHCLTPCRWRHRADSINALFEQELDKFRLRPGFEDLYKDVFRDAYKLRVGNITDERQQTIQEIEKINQRISKARNLLLADAIDASDYREIKSECDHKLVRLEAKLTDISASTSRKTNFEKLLELALKNLSQLSNDYKEGTIERKRQIIGSIFPEKINFEENEFRTARVNEAANLIYLTNKELTKNRKGDIKSDFSGPVVSTGGRTPGLLEEDLAKIATINEMPAENVNRQEPRQKADYELLKSQRKGTSRKTKRPKI

SEQ ID NO: 12678 - protein, 551 aa, synthetic construct
MTDTKIRNCALYCRVSTSRQAEKDLSIPDQIRHARQYCEQRDWELVREFIEPGASATNDNRRVFQELIAFACGPDKPIDAVLVHSFSRFFRDDYEFETYRRRLKRHKVTLISMTQEIADDPQGNLIRSVLTGFDAYHSAETAKHTTRTMMENARQGYWNGGKPPFGYCTIEAEKRGDRVKKRLAIDEDEATLVRRIYDLYINGNGLSGPLGVKAIVEHLNSRGIKRRGKMFYVSHVHDILQRTIYTGTHYFNRLDSKTREIKPREEWIPVNVPPIIEQVVFDKVQRTLEAKRPQNTPPRVVSGPTLLSGLLKCATCGGSMVLRTGKSGQYRYYACSTCARKGKTACPGRSIRMDFMDDMILQELAQKLFTPERLYLTLQEIMDRSKGGKEALKQKLAQLKKEHSAKAAGLSNLYAAIEEGLIDLTDPQLKERITKTKAYRDELEEQVELLSRQISDDDLAITPEKLEAFAKLMREKFFGGNPGMQKAYLTLFIEQIMLNDNEVRITGSKHALAHAICTPEKLNTTKVPSFVREWYALRDSNPCYRRERAAS

SEQ ID NO: 12679 - protein, 523 aa, synthetic construct
MGRVLGVIRLSREREESTSVARQRAYITAWAEQNGHTIAGWAEDEGVSGSVPPWERPQLGEWLPTSLGGRADVARFDILCAWRLDRVSRRVLHLAALMDWCKSTGRAIVSTSEGFDINSPMGAVFVNILAALAEGELEAIRERARSSFAHLMKQGRWRGGFVPYGYRAVKAETGQGWRLEIDPETSKVAREIVRRIIAGESANSVVRWLNETATPSPLDAQRVRAGKATTGTEWRVANLLKMLRSHTLLGYAEMTETRTRPDGTRETFARLVRGEDGLPLQRAEPVVSAAQWEQLQEALRKNANPKAGNRVGGSPLLRVAYCECGEPLYRNRGRHGMYYRCGLRARAGRNCPEGMTSIPAHVLEQITEQTFLLVAGDLEVMRRVFVSGSDHAAELADVEESLAELREHLTAGLFRGERGKAEFAQMYSALEARREALEALPSKPDRWELEPTGQTYRERWATLTTAAERNREMREAGLKVIVYALPSDEELEAMNDPDEYKRVRVIIPEDLMERVQANAAKAA

SEQ ID NO: 12680 - protein, 530 aa, synthetic construct
MKAIAYVRYSSAVQGDGDSVERQISPLEAFERRFNVKVEEIFKDEGVSSYSGDNIKKGRFSEILEKIENEEIKKGDFLVIESIDRISRQELNKTAKILQDILEKGIKIYTTIDERLYNYEDKERDLENYLMIGLIAKRSNDESETKSRRRKSAWDKAKQLAEDEGKIFSTSINTPYGLEIVDGKFKIIEEEAKEIRFIIENLKYEGVSATIRKLNEWSKRSWKPHHIGHFFHNQYIRGVYRAQKRENKKKVHERYIENYYPPIVSETAFYEAREAMKKRETKKEYGNKAKGHLNIFKNCIKCKECGSTMIFMKNKNPRGVWYSYYSCETKKEKRAGCEDQSLRAEYVIALFLAELEIRLQFKDDVDEKDKLIYEIMRTEEKQEDKKLFNDKNNELQKKKAILKNLENTAEELAENAPTYIFKKMSIIEKEVEKLKDELNKIEIKKIESLNIYSFDELKELVYTEKGRLKLNKFLKDRNIKVFVEYRRKERTVEQSIYIDNERYSVKARKFDLRNDTLLEKYEMKNLAEYI

SEQ ID NO: 12681 - protein, 502 aa, synthetic construct
MARVLGRLRISRSTEESTSIDRQREHVELWAKSNDHEIVGWAVDENVSGSVDPFETPGLGPWLKTDRLVEWDILVAWKLDRVSRRVVPLNALFGFLDQHAKSLACTSQPIDLSNWAGRLVVNVIAGVAEGELEAIRERTQDSRRKLRKVGRWHGGTVPIGYQKVRLDSGGFGLAVNPETAPIVQEIAARAERRESIRSIADLLNERGVSAPRGGLWTAQTLTRMLRSRWIIGEIEYNGRPVMGDDGLPVRRSLSEPLISPERWETIQAVLDDQKRPKQRRNEPGLLLNVAVCSECGEPLYHTVMTKADKGTEKIRTYRYWRCSAKSKRKTRDGNPVCTTKYAVPAVMLEQIVEEMFLADIGDVERTEEVYVPAEGHGDEIAVIDRAIAMARREYDAGIYDGDDNAYFERITTHRANRDRLAAIPSLPARWVRQPTGETYSQAWSRMDVRQRRELMIDAEIVVRARMVGPSVPEVAFHVDHARLQVAVPGFVPPALASQSNAK

SEQ ID NO: 12682 - protein, 550 aa, synthetic construct
MPSPLRALILVRLSRVTDATTSPERQEDACREFCTRQGMTVVGVAEDLDVSGSTDPLDRDGSGPWLRDRLSEFDVVVAAKLDRYGRSTRHVYGLFDYLNGHGKRLLSADGVINTLGPAGELILFILSWAAQMELDAIKGRNRDSAQYSLNNGKYRGGIVPAGFRKAKHPDKGWTLVHDVGCDRPGKDGHDECSGTRCRNAMAPVIQEIVRRILDGESQSSIVKDLNGREVMTARDRQAELNDRPTVGHEWSVSNLGRIIASPTLIGQGTRTDENGREVPLIHNGEIVQRGEPLISASDYRALRAKLDERAPATRKIAEPSLLLGVLECECGKPMWMLRGGKRVRADGTRRSAVDRYRCASHTQGDRKSCGHPSFKAPDAEALAHALITDALGSAPDGTARPLIVREWVEGTSNGDVLADLNAQIEGIADDLPYLRGEQRQAARDMLDRLYARQDELEGQEDTPSGWVFRESDQSLRDYWEALDTPGRNALLREYGVEMTFGKSGVEVRLTNLPKAFGAVFENVARAATFEPDALRAFLAENYGRTEVTSA

SEQ ID NO: 12683 - protein, 527 aa, synthetic construct
MTLTQSPPAAESTTVADLRGRIAEHNAALPTSATVVDLYARLSQNPDGKLEKIETQLADAFAVAVRRAWRVGELLIDNSLSAWNPRVRRPGWEALLTRLESGASGGVVAYHWDRMMRRPQDLGRLLDIIRDRRLEIATAHGSRDLQDPNDQFIAWVEVAHAQRSSTDTSRRLRRRFQAMREDGQVRGGPRWFGFPGADRSLPKDSDGHRPPVQAELVQRERDAIRAASQGIATGTMTLADIAAQWNAEGLRTATGGTWDGVNVRQVLSRPRNAGLINHEGAIVGRVRDEKPIVDEDTWNRVQAVFASRRRGRTPNPRNYIASGLIHCGQCGHVLTGRPRSRRRPDGTLVNEYYCHKLRGGCGRLAVEARNVETILRAFAIRRLSDARFATQIAAATAQANERAEEVAAELESARQVEDALAEKLGRGELSLSAWEGGHKHAHARVLALEAERDELAAQAAQAGPGVAVAGAEELAADWDADEATGGTLRRTMLAQALRGRRVVIEPRPHQNGKPVFDPTRVQIGLAE

SEQ ID NO: 12684 - protein, 408 aa, synthetic construct
YNVEFISSTEKFDTSTPMGRAMLNICIVFAQLERETIQKRVQDAWYARCQRGFKMGGRAPYGFRTEPIIIDGIHTKKLVIEPTEAAFVRKMYEMYIDPQVSLHDITRQLTEQGMRTYFGKPFSRATISIMLRNPIYTMADLDIYEFFKSQGTNIYNDAADFVGTNGCYYYRSKDSTENKHTHLEGQTLVLAPSEGFIPSDLWLRVRKKMMANQTYQPARKARNTWMAGKIKCGKCGYALMSAHSCGYLYLRCTKHADSKFCSGCGTIRLRDLEAVVYQQMVKKLEDYKTLTGRKKKRTASPKLTAKQMELAQVESEIEKLLDTLTGATPVLISYANAKIEELDSRRQTLASEIAKLTAEAVSPEQIDTISNYLDDWENVSFEDKQQVVDLMITVIRATSEKLQIEWKI

SEQ ID NO: 12685 - protein, 587 aa, synthetic construct
MSTDIQLKGDSLRRQTERSKQYADQHGLELVEDFRLEDIGVSAFKGDNVSSGALGKFLEAVKAGRIPKGSYLLVESFDRLSRQKLNASVSLFFDITSNGINLVTLSDNQLYRAGEAEFAQLIMSIVVMARANEESEMKSQRLSAAWDAKRRAVGEKKLTGLCPAWLELSEDRRNFHVIDDRAQVVRRIFEDSASGQGSFVITRRLNDSGIPAFGRSTGWVQSYVTKILQARAVLGEFQPHTKQNGRRVPLGDPIPDYYPQIVDENLFLRAQFARGKRRIEGGGRKGEALRNLFTHLATCGYCGSPMHFLNKGIGPGGGTYLKCSHALRGLDCVPTAWRYQDFERSFFLFVKEIDLAEMLRASSQKSDVLILDERAVALAEKKSELELKRERTYSLIDDGAISVEFLTTKLRECEAELASVEQQIADVDRQRQEIREQQSISPDELRLLIDQLQQMEGPEAFSQRSMLATRLREIVTDLRLEVEGSRPRQGKAAILLDAADIDPQERSQILDLIQRSDREAQRHHRSFSVILADGVSRRVVLKNDDPAKFIAEVLVDKDGGISGSDRGMPIGWSDWWDNAFDGPASAQ

SEQ ID NO: 12686 - protein, 601 aa, synthetic construct
MNSPPKPLAYSYIRMSTDVQLKGDSLRRQQQSSKAYAEQNGLELIEHFKLEDIGVSAFKGANVSSGALGKFLALVKAGEIVRGSYLLVESLDRISRQQVLDSIPVFFDIIKSGINVVTLADRHLYRAGETNFADIMYSVMVLGRAYEESKTKSMRVGEAWRNKRNKASEKKLTKVAPAWLALREDRSSFDQIKERADIVRQIFDLADAGHGSFFIARRLNKSDVPTFTKSNGWHESYVTKILNNRAVLGEFQPHRYDEHGERIPSGDPIRNYFPQIIDEDQFLRIQAARRRRLVEGAGRKGPEYRNLFSKIARCDYCGAPMRFVHKGRPPKGTQALKCTNAVRNLGCESVGWKYSDFETSFLYFVKEIDLTAILQAAAHDSDRATLQQKMEALEEKLHQLQSKRERIFEMLVDPGSSTAFIKGKLEECESEIAGEQEQVEQLREQLIARQPLQPITSLQLKSMIDTIQDTTAPDIFDRRAAVANRLRTMIRSLRVASDGSRPKAKRIEHFLSSSGVDPAERGRLLDQIRSSNELAQRYQRTFSVVLADGISRHVIVTSDDPTDFIAEVLVDKDGAMSGSDRGMTIGSDGWDNVFDEPARAQ

SEQ ID NO: 12687 - protein, 601 aa, synthetic construct
MQSPTKPLAYSYIRMSTDIQLKGDSLRRQQQSSKAYADQNGLELAEAFKLEDIGVSAFKGANVSSGALGQFLALIKAGEIARGSYLLVESLDRISRQQVLDSIPVFFDIIKSGINVVTLADKHLYRAGETNFADIMYSVMVLGRAYEESKTKSMRVGAAWENKRKNAGTRKLTKVCPAWLSLQENRTGFDLIPERVEVVRQIFQLADTGNGSFSIARRLNQTAIPTFTKSNGWHESYVTKILNSRAVLGEFQPHRYDDHGDRVPYGEPVADYFPKIIEDYQFHRVQASRRRRLVEGAGRKGPEYRNLFTKIAKCEYCGAPMRFVHKGRPPKGSQALKCTNAVRGLGCESISWRYSDFETSFLYFVKEIDLTATLKAAAERSERATVEQQITVIEEKIRQLTAKRERIFELLTEPGSSTAFIKGKLDECEAAIATEGAQITKLREQRSMADMLPTISADELRSLIASVQDMSAPDIFERRAAVANRLSILVTSLRIAADGRRPKMKGIRTFLESQELNPDERDRLIDHIEKTNKQSQRYNRSFNVMLADGVSRYVVVKSDDPTDIIAEVLVDRDGAISGSDRGMPIGWSDGWDNVSDEPVSV

SEQ ID NO: 12688 - protein, 583 aa, synthetic construct
MRGDSLRRQEQASKRYAEQHGLQLVEDFKLEDIGVSAFKGANVSSGAALGRFLELVKGGQIAKGSYLLVESLDRISRQQILDSVPIFFDIVKGGINVVTLADNHVYRAGDTNVADVIYSVVVLGRAYEESKTKSMRVGAAWENKRKNAGSRKLTKVSPAWLSLQEDRTGFDLVPERVEIVRQIFQLADTGNGSFSIARRLNQSATPTFTKSNGWHESYVTKILNNRAVLGEFQPHRYDDHGDRVPHGEPVADYFPKIIEDDQFHRVQASRRKRLVEGAGRKGPEYRNLFTKIAKCEYCGAPMRFVHKGRPPKGSQALKCTNAVRGLGCESISWRYTDFETSFLYFVKEIDLTATLRAAAENSERASVEQQIAAIEEKIRQLSAKRERIFELLTEPGSSTAFIKGKLDECEASIAAEEALIAEIREQRSMADMLPTISADELRSLIASVQDMSAPDIFERRAAVANRLSILVTSLRIAADGRRPKMKGIRTFLEGQELNADERDRLTDHIEKSNEEAQRYNRSFKVVLADGVSRYVIVRSDEPTDIIAEVLVDKDGAISGSDRGMPIGWSEGWDNLFDEPATAQ

SEQ ID NO: 12689 - protein, 504 aa, synthetic construct
MLQPRDLKGRNAISYARWSSGKQASGDSLARQTKNAEDFCISFGLTLDRQLRDDGVSAFKGRNLEQGLGRFINGVKSGTIHHDTVLLLEAMDRFSRQNPMDARDSFEGILKLGVTVVTLIDNRVHTWDGYRNDIMQSISSLLMMKAANDYALRLSHNVKGAWERKATKAKAAVASGGRIKVAKLPFWIDRDSNELNERADDARLIFELAKEGHGQQAIAQILNTRGIPSSAGNTWSQVVVGDVLRSPATYGCLVLKGEEVPGYFPALISETEWLATRQRTKARLHGRQVGRTSNLFSRMVHCGHCGSPMVLTSSKKGGVSWGYFICTGKTFKRTGCTAPNWRYDQFERELLDRVGFLAVPVPQDQSAPDLSRELEETIGALEAKQSNVLAGIAEAETADVRKVLLAKADELSRQIEVKRKEIVAIRENDARYRESAAAVMDFTADQEEIRRLAKEDRKGAQGLISSLVQRIDLESASKTLRRAMVTMRSGYTHAIVFDGTREPG

SEQ ID NO: 12690 - protein, 504 aa, synthetic construct
MLQPRDLKGRNAISYARWSSGKQASGDSLDRQTKKAEEFCTSFGLTLDKRLLDEGVSAFKGANLEASLGKFVGDVKSGRIPSDVVLIVENIDRITRVKPTRAIRYFLDLLDTGLTLVTLTDQRVHTSEGYDDNFANLMMSLMAMQAAHEYSAKLSYRVSEAWGRKPEKARAAVASGGRIKVAKLPFWIDRDTNRLNERADDARLIFELAKEGHGQQAIAQILNTRGIPSPAGNTWSQVVVGDVLRSPATYGCLVLKGVEVPGYFPALISETEWLATRQRTKARRHSRQIGRTANLFSRMVYCAHCRSPMVLTSSKKGGVSWGYFICTGKTFKRTGCTAPNWRYDQFERELIDRIGFLAVPIPQDHTAPNLSDKLEEDIRALEFKQSNILAGIADAETADVRKVLLGQADALTRQIEVKRREIVAVRENDARYRESAAAVVDFTADQEEIRRLAKEDRKGAQGLISNLVQHIDLESASKTLRRAMVTMRSGYTHTIVFDGTGEPG

SEQ ID NO: 12691 - protein, 512 aa, synthetic construct
MNAVIYARYSSHNQTEQSIEGQLRDCYEYAKRNDLAIIGEYIDRAISGKTDERPDFQRMIKDASKRQFERILVWKLDRFARNRYDSATYKHKLKQYGVKVISAMENVGEGDESVLLEALLEASAEYYSLDLKKKIARGMRESALRGKFVGGTLPWWCRVDDEQKLTVIDERAAIVREAFMRYDSGEGSKSIVSDFAKRGLRSNRGVPVTLSWLLSILKNRKTIGEYTYNGIEIPGGLPAVVDKPLFDRVQDRIARNRRTGGGEARAKTEYLLQAKLFCGLCGSPITAECGQNHKGVVYNYYACSLKKKKHQCKKANERKDFLEWYVVEQTLDYVLTPARTEYIASAIVAEYEREFDKSGIRVLEQKIALTEGEIQKTMDLCIQATTDAMRDRFMKRCEELDAKKADMEIDLSKLRVAASIVYTKDEVCAWLRQFCTGDCFDPAFRRRIIDVFINTVYLYDEKLIIYYNLRDSRQVSYIEAIGASSEIENLLPVPDNKKSAAECSTADGDGGA

SEQ ID NO: 12692 - protein, 552 aa, synthetic construct
MKQFNRQSSTIATDKITALYCRLSRDDELQGDSNSILNQKAILQKYADDNGFGNTLFFVDDGYSGTNFDRPDWQRLMALVDEGKVGTFIVKDMSRLGRDYLKVGYYTEVVLPGADVRFIAINNGVDSANQQDSDFTPFLNIINEWYAKDTSKKIRAVFKAKGESGKPLCTNPPYGYLKDPDDKHHWIVDEVAADVVRDIFKMCVAGKGPSQIAKALSQWQIPVPTVHLHCMGINTPAREPEDIYAWQQRTVADILVKMEYLGHTVNFKTQKKSYKSKKKVNNDPSEWVIFENTHEAIIDQETFEIVQNIRNGRRRLTPMGEMPVLSGMLFCADCGAKLYQVRARGWTHEQEHFVCATYRKQKGKCTSHQIRNVQVEQILLMEINRMLAFVRERESEFVELLTKKNERDLNRQFRECNRELEQATQRITKLDSIIQRLYEDNLDGKISDERFAKMTATYEQEQKDLSARVIVLRETLAKAKTQRLNIDSFLAQVKKYTEVKELDAEIIRALVERIDVFTPEKVPGIRTKKQTILIHWNFIGAVELPQEQKISA

SEQ ID NO: 12693 - protein, 463 aa, synthetic construct
MARSVTVIPARNRQVSGYRAAPQKKIRVAAYCRVSTDQEDQLHSFEAQVDYYTKYINDHENYEMAGIYADEGISGTNTKKREQFKRMIADCGKGKIDLVITKSISRFARNTQDCLMYSRKLKNLGIGIIFEKENINTLDSTGELLFTILSSLAQDESRNISENCKWGIRTKFKNGEMHLNTFKFLGYDKDENGKLIINREQAKTVRRIYRDFLWGLNPAQIAKELEDEQVPGCLGQTKWYASTVIGILKQEKHMGDALLQKTYTADFLTKRQVKNNGEVAQVYVKDSHKGIIDKETWNAVQEEFERREKFTQKHGTDRYSYGSECYPFCEKIFCGECGSLFTRHSWKSRGIIQWQCKNHRKDGKVACTNAYVDNADLEKGFVKAFNRLVGEREKHIERWNSMKLDGTPLEKIRAGQMMEATESGQLQQYVPEAAQLVLEEITIFGAKKYEFAFLEGSRVKVSV

SEQ ID NO: 12694 - protein, 501 aa, synthetic construct
MEIQIREGSREQKRKLKVCAYCRVSTDADEQENSLENQVRHYETVIKANPDYEYAGVYSDFAISGFKEKRPGLQKMLADAEKGKIDLILTKSVSRFARNTSIVLEATRKLKELNVGVFFELQNINTLSGEGELMLTILAAFAQAESESGSVGAKMVYQRKYEAGIPVQYLERSFGYTKDERGVFVADEAEAVWVRKIYEMAADGYTPASIKRYLNENGVKTVGGVQWVDSTVFRLLENEIYKGDYIMHKHFVNEERKLVRNRGEVDAWYIEDDHEAIVSPELWQKAQDALAAKRDYLAEGSVIEEFTEENYPYMNKIYCAKCGYPLYKRIYSKGNRLNWGCSGTKRYGKSFCDGINIPDGVLRSAWHFEENTYIDEKASDKGVKEFTYLKERSWKRRHKKKQPSAIPENTETEYPYREKIFCALCGSRLVRYVNPQNYKVTWVCNRRKRKGKEACDGTRVPDTVIKGWGEIKKDIYIQRKDDKNGKKRYSYTSKKPSGIRV

SEQ ID NO: 12695 - protein, 413 aa, synthetic construct
MRIKVIKPKQQLHPDRKKVCAYVRVSTDSLEQEDSLDNQSTYFKGYIQSNPEWEFVGIYSDQGISGFKENRPEFQRMISDAKAGKIDLIVVKSVSRFARNTETVLKFSRELKRIGVGIFFQLQNINTLSGAGELMLTILAAFAQAESEGASENARLTYKRKFSRGIPASGLERTFGFTADEDGFIHIVQEEAETVRLIFDLAHQGVWPSKIKGYLNKNNIKGCSGGAWDDTGVFRVLHNPAYKGDLILQKTYLDSNRVRHRNEGQADQWYITDNHPAIVPPELWDEVQEILRQRSEKLKTKQEVPVSPRNSRSGYPLSGKLHCPRCGAKLIHKWNKGEREYWACRTNLKVGASVCKGIWLPASVANTWGEITEPTTVVCYKDEYGMKQFTGYPKEEYESSPDCPYSISKERKE

SEQ ID NO: 12696 - protein, 468 aa, synthetic construct
MAREIVHIPARQELRNRAASVGQHIRVAAYCRVSTEQDEQLNSFENQVNYYTEYITRNPQYEMAGIYADEGISGTSTRRRENFMRMIRDCEAGKIDLIITKSISRFARNTQDCLNYSRKLKELGIGVLFEKEAINTMDSTGELLFTILSSLAQDESRSISENCQWGIRSLFKQGVLHLNANRFYGYDKDEDGKLVINPEQAKIVRWIYRSYMDGINPDVLARKLNEAGVPGCMGEPKWATSTIIGILQNEKHMGDAILQKTFTADFLTKKMVKNEGQLEQYYVKDDHEAIIDKELWTAVQGEIARRRDYLQQHGLRSMGRYTDTQPFSNKVFCGTCGNVFWRRTLSRLNGPVKVWMCGQRYREKGKKGCTSSTLYEKDLHRAFVMAWNAILENREDFLGVWEEQARGQDALAAFRAKQFIGLTKDTVPLQEIDLALVGKTLEHCTIEPLGVINFYFLDGTELGIEIGD

SEQ ID NO: 12697 - protein, 527 aa, synthetic construct
MARAITVIPATKDKFTALPTASIAKRRVAAYARVSTDSDEQFTSYEAQIDYYTQYIKKRDDWEFVKVYTDEGISGTNTKRREGFNEMVADALAGKIDLIVTKSVSRFARNTVDSLVTVRTLKEHHVEVFFEKENIYTFDSKGELLITIMSSLAQEESRSISENVTWGQRKRFADGKVSMPYKQFLGYDKGENGLPVINEEEAEIVRLIYRLFLQGKTSTGICKHLMELGIPTPGGKAKWRPTTVMSILQNEKYKGDALLQKKFTVDFLTKKQKVNEGEIPQYYVEGSHPAIITAIDFDMVQAEIARRQTLGRAYSGSSIFASKLICGDCGGFYGQKVWHSTDAYRRVIWRCNSKFSGEAKCETPTLAAETIQQMFLKAFNQLMGSCEQVLKACEAMREIVSDCTALDAEIDALNDEIQVVAELVNQCIKENASKEQSQEEYAKKYNRLVKRYEKATDRLKVVTTERESRMQRDRELRIFIGSIEKQPLVLEAWDEELWLTLLETATVHKDNSITFLFKNGTEIAVQA

SEQ ID NO: 12698 - protein, 430 aa, synthetic construct
MPKTVTRVAYPPRLMRKKRVAAYCRVSSGKDAMLHSLSAQVSYYNNLIQKEDGWEFVGVYSDEAITGTKEGRADFQRMLDDCRNGKIDMIICKSISRFARNTLTLLETVRMLKALEVDVYFEEQNIHTISSDGELMLTILASYAQEESRSASENQKWRIKKNFESGMPWCGRMLGYRIKDGQYYIIEDEAEVVRRIYRDYLAGAGPNLIAIQLTEDGIPTRNGGIWQPQTVARILRNYTYTGNLLLQKTFRENHITKKTIKNTGQKPRYLAEDAHDAIIDPVMFDAVQAEIERRANSRKITPPAKPVFTYTGLIQCAKCGKNYRRKTTKTQVVWVCATFNTKGKRYCASKQIPETTLDTLLGEITTDPANIKKIIADDDNILHFHLMDGSVITKTWVDRSRAESWTPERREAARQRAYERRQEQWQEQLQ

SEQ ID NO: 12699 - protein, 559 aa, synthetic construct
MALLPRKPAKHPAKPKRGKKLEIEEPGVLYGRYSSHNQKDISVEQQFEKGYELAVEYGIRIIDTYADRAVSGRTDKRRDFQRMMTDAAKGKFRYVIAWKSNRMGRNMLEALINEARLQDLGVRVLYVEEDFDDTAAGRFAARSMMNVNQFYSENMAEDIKRGLYDNAANCMVANGHLPYGYKADETLHYAIDEPKAAVIREIFTRVSCGEAFVDIMASLNARGIKTSYGRPWGRSSFQKILSNERYRGIYIYGDVRKEGGIPRIISDELYFKVQEVITTKKNPQGRHRVNGDYLLTGKLFCGHCKSPMTGVSGTGRSGNLHYYYVCQKRRTEKTCDKKNVRRDEIELQVAQAIKDYALKDDVIEWIADSTVAYNERKEAESKVGILEDQLAGTEHGIKNIMSAIEQGIITETTKSRLVELESERATIKANIAAARADIVTVSRDDIISGLEMFRDGDVHDKKYQARLFDTFLVAVYAYDDDLRLVFSFSGNKNTIQIPIESAVNAVENNEAECSFKLCSAPPKQSQTNHAGSPGFCSAPTIYMVSDVFVLVCPFSHARK

SEQ ID NO: 12700 - protein, 472 aa, synthetic construct
MQTKRKVAIYSRVSTLHQAEEGYSIGQQIEALTKYCQAMGWVIYDNYSDGGFSGGKLERPAMQKMIQDAKSGKFDTVVVYKLDRLSRNVRDTLYLVKDVFNANNVDFVSLQENIDTKSAMGNLFITLLSAIAEFEREQIKERMQLGVKGRAKSGKTTSWTTPPFGYKYDTNTQSMTVDHYQAEIVRDMFNKIISGWSIMGITTYMRENYDGKWTHVKVKRILENITYIGKVKYRNEIFDGEHAPILTEEIFYKAQKALEERTSKKDNTRPFQGLYMLSNIAKCGYCGTPLKIDSYKPRKDGTRKRTYTCINRNPKRIKTAIYNDGEQCKESGRYDVKDVERYVLNEISKLQLNPKSIESLYRDKPEENITAHQERLKKLETKLSKLNDLYINELISMEALKQKSAELLKEKSSLETFINNNKRKINNKPAFEKVAKMDDVFKMSYDDQKKIVKTLIKRVEVKRDEINVIFKL

SEQ ID NO: 12701 - protein, 501 aa, synthetic construct
MEIQIREGNSRQKRKLKVCAYCRVSTDADEQENSLENQIRHYKEVITSNPDYEYAGVYSDFAISGFKEKRPGLQKMLADARKGKIDLILTKSVSRFARNTSIVLEATRKLKELNVGVFFELQNINTLSGEGELMLTILAAFAQAESESGSVGAKMVYQRKYEAGIPVQYLERSFGFKKDERGVYIADEEEAAWVRKIYEMAADGYTPASIKRYLNENGVKTVGGAEWIDSTVFRLIENEIYKGDYIMHKHFVNEERKLVRNRGEVDAWYIEDDHEAIVSPKLWQKAQDALEAKRDYLAEGSVIEEFTEENYPYMNKIYCAKCGYPLYKRIYSKGNRLNWGCSGMKRYGKSFCDGINIPDGVLRNAWHFEENTYIDEKASDKGVKEFSYLKERSWKRRHKKKQPPSIPENTEAEYPYREKIYCALCGSRLVRHVDTKSHKVTWVCNGRKRKGKDFCDGTRVPDTILKGWGEIKKDIYIQRKDDKNGKKRYSYTSKKPSGIGA

SEQ ID NO: 12702 - protein, 463 aa, synthetic construct
MARSVTVIPARNRQASGHRAAPQKKIRAAAYCRVSTDQEDQLHSFEAQVDYYTKYINDHENYEMAGIYADEGISGTNTKKREQFKRMIADCEKGKIDLVITKSISRFARNTQDCLMYSRKLKNLGIGIIFEKENINTLDSTGELLFTILSSLAQDESRNISENCKWGIRTKFKNGEMHLNTFKFLGYDKDENGKLIINREQAKTVRRIYRDFLWGLNPAQIAKELTEEKVPGCNGQTKWYPSTIVGILKQEKHMGDALLQKTYTADFLTKRQVKNNGEIAQVYVKDSHKGIIDKQTWNAVQEEFERRERFMKDHGTDRYSYGADCIPFCEKVFCGECKSLFTRHSWKSRGIVQWQCKNHRTDGRVTCSNAYVDNSDLEKGFVKAFNKLVADREKFMERWNQMKTDGSSLEKIRAEQMMEATGNDPLGRFVPEIAQLVLAEVTVLGAKKYEFFFLEGSRIKVSV

SEQ ID NO: 12703 - protein, 456 aa, synthetic construct
MRNKEIAPALVRVALYIRVSGEEQKIKGLSLEAQQERLEAYARERGWVIVGIYIDAAKTARKNIHKRTEFQHMMDSVKRDEVDILLFARLDRWFRSVADYYKVMEILQAHNCDWKTTDEEYDTTTANGRLYINVKLSIAQNEADIDGERIDVVFDSKIAHGTVVSGSAPFGFRVNEEKRLEVVPEDAAIVQDAFNYFENTVSQRATVRYVRETYGANWCDATFRRMLKEKLYTGVYDRGGRYNDQFCPAIIDRQQFDRVQALLTRNVRSAPSGKVYIFTSILTCAECGHKLVGYKSSDYYYYRCNQHFQRGRCSHNHSAREDVVEQWLFEHLGEELERCQLEWGVEAAKKKVSIARTDKAALKRKLTKLKELYVNDLIDIEDYKKDYQIYVSALNQIPEPAQEAPPDFAAVRRLLDNSFRTIYDTLTREEKRTLWRSVIKEIRIDNDQNITGVVFG

SEQ ID NO: 12704 - protein, 561 aa, synthetic construct
MARSKKTECLPLERIGVIYARYSSHNQKEESIEQQVEECTSFALLNGIKIVHVYADKALSGRTDKRPQFQRLMRDAEKRSFSVVVAYKSNRIARDMLNALKYEDRLGKYGIETLYAKEEFGNTAAGRFALRTMMNVNQFYSENMAEDIKRGMLDNAENCKVNGALPLGYVSGPDKRYAIEPKEAEIVRGIYDKVLEGVSFADIANDLNACGVRTKHGSLWNKCSFHRILTNDVYIGVYRHSGVVKEGGVPPILEREVFIAMQKYLERKKNPRGRHRENGDYLLTGKLRCGYCESFMVGISGTSKTGDKHYYYSCNGRRSGSGCKKENVRRDSIEYAVAALTQQVVFKEDVIEWIATAAVKLAKEASGQDEIDAMEAELAENRKATKNIMAAIEQGIFTATTKNRLLELEADIASLEQSIRDAKAISEGKLLEKERVVYFLTSLREGNLHSKTYQKRLIDTFVRTVYLWDDYIGIDYYYAGKDSVVKYSLSEIESDIGENIREVLKDSLTGHHVAADCISFAATFYASHEKSLLTHFVAAPPKIAIADAGLRFCFSNLAVDP

SEQ ID NO: 12705 - protein, 519 aa, synthetic construct
MKKVTKIAETASSKVKLKKIRVAAYCRVSTDSDAQLESLDAQKTHYGNYITSRDDWEFAGLYYDEGITGTKKDKRPELLRLIDDCKAGKVDFVITKSISRFSRNTTDCLELVRKLQALHIPIYFEKENINTGSMESELFLAILSSMAEGESVSISENNKWSIQKRFESGTYKVSYPPYGYDWDGEQMVINPEQAAVVKEIFAALLSGKGTHAIADDLNRRGIPTKRNGRWTATTIRGMLSNEKYVGDCLFQKTYSDSRFVRHNNHGEQTQYMVKDHHEAIISREDFEAAHAFIHQRATEKGVVKGSDKYQNRYTFSGKIICGECGDTFKRRIHSCTGYKYTAWCCSTHIKDKDKCHMLFVKDDDLKQAFVTMMNKLVYAHRIILKPYVDALKNTSSDDSLRRIQEIQTLLAQNTEKRETLTKLMTQGIIDPILFNKETNELLSQADSFRDEINALKNAVSGDVTKVTAATALLHFTEKGGILQEFDDALFKEYVNRIIVRSRNEVCFELKCGLTLRERM

SEQ ID NO: 12706 - protein, 556 aa, synthetic construct
MKGAVIYARYSCERQTEQSIEGQLHECYKYAEKNGLSILDEYIDRATTGTNDNRPAFQKMLADSERTTAWDIVLVYAIDRFGRNSIEIAINKQKLIKNGKNLISATQRTSTNIDGSKNLDGILLENVYIGLAEYYSAELSQKIRRGLTESRNKGLFCGGKVVYGYCVKDKTIYINEAETETVRYIFQEYNNGKTIPDIIEVLDARGIKYKGETFKKNFLYRMLRNEKYIGITKYDGVEYKNIYPTIIKEDLFNAVQSRMVTYSVGAHSKDADLLLKGKVICGLCGHMMNGDCSTSRSGKLMHYYKCSGRKRGTGCESRILRQDKLDEFIVDVTKQVFCSKENIQLLVDKVIAVHKQRQKDESILNSLKSRHSDLVKSINNMLFALQEGIITPSTKERLNMLESDKAEIEEQIAKEELALSKQISRDDVEYYLRRAIKSSPKILLNNLVDKVIVYNDKIEIYYKYCHKIPDDPDDQRGYFFEELRIPINCGKRNRQFLPIMIDHQKMIASVKYILNRKKKMLAPINYKKSPIHTGQNVTGADGYLLVEPRGFEPLTF

SEQ ID NO: 12707 - protein, 521 aa, synthetic construct
MKKVTKIEGVQNNSTQKKKLRVAAYCRVSTGSDAQLESLEAQKTHYERYINSREDWQFAGLYFDEGITGTKAEKRPELLRLISDCESKKIDFVITKSISRFSRNTTDCLALVRKLQSLDIPLFFEKENINTGSIESELFLAILSSMAEGESTSISENAKWSIKRRFQNGTFKLSYTPYGYDWDGENMVVNPAQASIVKRIFADVLSGKGTQAIADELNADGITSKKNSKWTATTIRAILANEKYTGDVIFQKTYTDENFNRHVNYGEVDQYMAPDHHEAIISHEDFDAANALVAQRASEKGIEKGNGKYQQRYAFSGKIICGDCGDTFKRRIHSCNTYKYVAWACNTHLRDKTICSMKYVRDDEIKTAFVTMLNKLIYGHRLVLAPYLKALENSSGDEAIQRIQHLELLLAQNSEQRETLTKLMAQGYIDQILYNRETNALLLQAETYRSDIEAITICMTGDSAKVTETNLLLHFVSHADMLTAYSEELFESYADHIEVASRHEIRFVMKCGLTFTERIGD

SEQ ID NO: 12708 - protein, 584 aa, synthetic construct
MKTKKFPIDLSMLTEEEIDQFRQDPSTLFEGDTDVSLYLRFSSERQREQSIEGQLRDCRAYCKMNRYRITAIYVDRATTARKDVEKRLHFQEMIRDSEKRPWEYVVVWKLDRFARNRTDSALFKFRLRKNGVKVISATENISEKPEGIILEAVLEGMAEFYSADLSQKITRGMRESALKCHSIGGHVPLGYKIEDHKLVINPATAHIVQEAFELYANGETVADICRMFNTKGYRTAKGVEFNRNSFKSMFRNKRYIGVYTYKDIEVEGGVPAIIDKELFETVGRRLSKNAEAPARGKAKVDYLLAGKLFCGHCGGSMNGESGTSKTGSIHNYYTCYTRKRKHACEKKPLKKDWIEYIVAQDAMELLTDDTIQELADMAISQTEQDLRENTRIPELTDRMKETESGIANITKAIEKGVASDALMNRIMELEKEKKNLLRLLAEEEKYVCKIERSQIVYWLTEFKGGRIEDERYRRIIIDLMVNSVTVWDEPDGFRITTAYNLTSCKSKTFRIDPSGTKGFGFEGLESTISRKITANSAVIFRLTTIIPQTAENPDHFWNPQAVSSSPSPPADFRFMCLPVRQVLL

SEQ ID NO: 12709 - protein, 440 aa, synthetic construct
MNVVLRAALYPRVSTEEQKKFGLSIHDQQNDLEEYAKAHSMKVVGVFQDAGFSARKKIEKRPAMLQLLEAVKHDEVDIILVTKLDRWFRNIGEYYKVQEILEAHNVSWKTIYEDYDTSTAAGRLKINIMLSVAQDEADRASERIKKVLDAKKDRNEVCTGHLPKGYKIEGKFAVIDKEAEPVIRRYFSTFLETGSITKAMDAVPELKLKYQTASQMLDNPGYMGDWHGIKLPPYLTPQEFQRVQDLRIRVTRKSPYNRTYIFSGLIVCGECGRRMTGHPSPRPSGACSYSYYCQGSAQRKGCNNGNFTVEWKIEDYLLSTIDEQIQIKLQAKPRQEPKVNQDVQLKALQKKLSKLSELYIDDMISKADYSKKYAELTSQMDEITRVNPQSRAPEEIATLFSAGWQEIYKQLTRENKQAFWKLKIKVIRLYKDRRIEFDFL

SEQ ID NO: 12710 - protein, 523 aa, synthetic construct
MPDYAIYLRKSRKDNEAEQRGEGETLARHRKLLLDYAKCEGLRIAKIYEEVVSGESIATRPQMQLLLADVEQGLYDGVLVVEVERLARGDTMDQGLVAQTFKYSNTKIYTPMKVYDPNNEFDEEYFEFGLFMSRREYKTINRRLQRGRRASASEGKYIAGRAPYGYEKIKIPNDKGNTLRIIPEQAEVIKQIYDWYVNGLDGEDAGLSKIATKLNSLGIKPYRNDYWSKETLRDIITNPVYAGFIRWGYRRNKKTVVDGKTVTSRPVTLDENCVLSKGLHEAIITQELYDKAQRKIKSIPPPPVGYKKELKGSLAGIVICKNCGHKMTLRSPSTKGKPPYLVCHYRYCDNVSTPYDIVEKRVLDTLKEWAEKYKLKEKQSKKNSSSSIDMLKSSVESAKKKVATLQQQLDGMCDLLEQGIYTPDMFRQRSVSVTERITKAKAEYEQLSEQLESMEKLLTEKSEFIPKVEHVLKIYDTLSTPADKNRVLKEVIDHAEYSKAKSGAYKGVSVDDFNLTVFPKMPL

SEQ ID NO: 12711 - protein, 544 aa, synthetic construct
MAETAKKISMIPAKVQYDRNVKLSEKKMKVAAYCRVSTELEEQDSSYEAQVEYYTSKISENENWKNAGIYADDGKSGTNTKKRADFNAMIQDALAGKIDMILTKSVSRFARNTVDSLVTIRKLKEKNVAVVFEKEGINTLEGTGEILITILSSLAQEESRNISENIRWGVVRKFEKGKVIVNCTKFMGYTKNEDGDLVIVPEEAEIVKLIFRLYLEGYSTGKIAKHLEEQGIKTATGQDKWHSTVIDKMLRNEKYMGDALLQKTYTVDFMTKKKVKNTGIVPQYYVEDDHEAIIPKELFYRVQEEMMRRASLCKAAVTRKKNQRSRYSSTYALTGMLICGKCGQEYRRVTWARNGKKKVVWRCSNRLTNGVKKCGESETLEENALNRAVMETIHRITSDDMEFMENFRQNIIHVIGNYSTAKESEEYEEKIKEKQEEMVALIAENAKTGSYTPEFDERYRTIAEEINALKEAQKTARNEKRMADSYEQRIQDIDHYLSTSTCQIPEFDNDLVRRLISTIKVESSEKLLIQFQSGIVMEQEIRYE

SEQ ID NO: 12712 - protein, 538 aa, synthetic construct
MAKKVTVIKAAKAQKHTQEERRLKVCGYARVSTGSQAQATSYTAQVEYYTEKIESNPLWEFAGVYADEGISGTNVKHRDEFQMMISDCEDGNIDLILTKSITRFARNTVECIQTIRKLKEIGVGIYFEKENINTLSEKSELFITILASVAQGESENISSNNRWAIQKRFQDGTYIISTPAYGYGKDEDGNLVIIESEAETVRWIYESYLNGMGVYVIAKALNQKGIPTIRGAEKWQDGVIQDILKNPIYEGDMLQQRTYTETRFPFVRRVNNGQRNQYLIKDSHPPIVTHEEAEAVRNLMAYRVDVLHMNKSDYTKRYLFSGRIICGECGKTFRRQKIYIGKPYEKIIWTCSGHVEDKENCCMKAIREDVLHRAFTDMWNKLYTNQGTILEPLLKELTELVAARQDSEEIRQLDKEIKDISEQSQILNQVMRKGYMDSALFMESSNKLGWQLTECRRKKTLLTRKLRRTKEIVRTEQLIQLIAEQDGLREEFDEQLFKMTAEKIVVSKEHDITFCLHNGLKLTEMGGRQDAVAHANRL

SEQ ID NO: 12713 - protein, 492 aa, synthetic construct
MAAIDFNNVVDLYIRVSTSEQAEEGYSVAEQEERLRSYCAAYNYTINAIHVDPGFSGASLDRPGIKKVMYDVEHGRCKKVIVWKLDRLSRSQKDTLILLEDVFLANDCNFISLMESFDTSTPFGRCIVGILAAFAQMERENIKIRTMMGRQARIREGHFHGSRCPLGYKFQYAPDGTLLSNDLVVDPYNSKLVQEVYRLSLGGSSISSIAAHMTSTYGCSLYDWSRNTAIRRILSNPIYMGKVKVGNELYPGIHEPLVSETDWYMVAAMLKHNKEQQKRTYAYQISGGAYADNLLTGLLFCGDCGARMYARRVSQNKKKYICHSVAKTSPAMIKSDHCTNRLHPFTVHQLDEMVIDEILKLSLDRPGFDMLCDQPDDSSKSEDKEIYEERLAEVNRQLDRLVKLYQTGLIDLDNISARLGDLNQEKNFLEGNLATINEVTPAEIRETAWKSIQSLQSVLNNGDMDEVHRIIHTLIDKVVVLNTDVTIYWSFC

SEQ ID NO: 12714 - protein, 581 aa, synthetic construct
MARKRTNLIGNTPSVRETKVAIYIRVSTIHQVDKDSIPMQKKDLIAYCQLILGTDNYEIFEDAGYSGKNTDRPAFQNMMGRIRKGEFTHVLVWKIDRVSRNLLDFAEMYEELRSLRVTFVSKNEQFDTSTAIGEAMLKIILVFAELERNMTSERVTATMISRANGGQWNGGRIPFGYSYDPKEKVFSIREDEASICRELKDLYLLNRSLAYVSRALNEKGYKTRAGVSWSPHSVWIIASSPFYAGIYRYNRYKGVESRTINPEEEWVMIQNHHPAIFTLEEHQAMRSIMKSNKRNMDNLPGRVHLSTKTHIFQGIMYCDKCGSKMVSTPGRLHVDGYRTSNYGCPLRRNTKKCNNPTVNDIVIGEFVINYILNMLNAKKTFSTINTPDELNAALLSGSVFSEVSSVEENGLNSFFNLLSRYGSDRSYIFSVKSPRKKKAAVDPELSKLRKEKEKQERALQRLQDLYLYSETSMSEKDFIIRKSEISSHLDNINRQLGLMTQDQASFLSDEEFIKQASHLLIQKELKNKKYIYFKKLVNTVDPDILKAYMETILDSIYTADGKITAITFKNGLTHRFIYKDK

SEQ ID NO: 12715 - protein, 515 aa, synthetic construct
MPEIRVIEPIIFAPAEKLRVCAYARVSSDSTDQRNSFASQVNYYTKYIQAHEGWTFVDIYADQGITGTSALKRDEFLRLMRDCRQGKIDRILVKSVSRFARNAQDCIEAVRELRQLGVTVYFEKEHINTANMSNEMFLSMMSAFAQEESISISKNMRKGAVMRMKNGTFRLSQAPYGYYLDEKGILIVQQEESKIVQRIFGNFLSGMGIQEIAAELQKEHIPKLNGEPIWSYTGILYILTNERYIGDELFQKRYTTDTLPFQKKINRGQKKQYYAEDTHDPIISREVFRKAQELLKRKSERHGHQNNGQYTFTSLIVCDECGTNFCRRIAKNQRVLWTCRKHFKGKHLCSMESLNETEIQQCFLTLYKKLAENRQEILGSYLRQLEELKDKDFMAHPDAMELNRQIAGLLEQNHTLHRLRAKECIDSAFFIAQSNELSQKISNLKAELKQYRDLNEYADFIDNTRLILTILDSPMPVFSSSVFRNIVSRITVTHETLRFQLVNGLELEEERISGG

SEQ ID NO: 12716 - protein, 434 aa, synthetic construct
MDRIVERVESHIPAQPKALRVCAYARVSTGKDAMLHSLSAQVSYYSNMIQSHSGWLYCGVYSDEAVTGTKRERGGFLSMVEECRRGNIDLIITKSISRFARNTVTLLQTVRELKALGVDVYFEEQHIHTQSTDGELMMTILASYAQEESLSASENQKWHVRKAFENGELINLRFMYGYNISPDGIEINEKEAAVVREIFARFNNGDSMSSICRDLESRGIKGALGGTWCPERMRCTLSNEKYLGNALLQKRYRNNHIDKKLMPNKGELPMYYAEGTHEPIIDQATFNKAQERLRIFAQQTAGRKKPTRSAFSGLIRCGLCGNSYKRVTYRNKHFWNCTTFQTKGKSECAAKRIPEETLESLAYEVLGTKTLDSNTAKRKITEIRAEKNNVVVFCLEDGSEIVKRWKDRSRAESWTPEMKEQARQRALQARRHKV

SEQ ID NO: 12717 - protein, 528 aa, synthetic construct
MSRTAARSVTVIPPTINPLTHLSRVAVQKRRVAGYARVSTDSDEQFTSYEAQVDYYTQYIKRNPEWEFVKVYTDEGISGTNTKHRIGFNEMIADAMSGKIDLIVTKSVSRFARNTVDSLVTIRQLKEKGVEVYFEKENIYTFDGKGELLLTIMSSLAQEESRSISENVTWGQRKRFADGKVNLPYKQFLGYRKGADGFPEIVPEEAVIVRRIYSRFMEGLTPCAIANELTADGILTPAKKQTWQTSTVESILKNEKYKGAALLQKCFTVDFLTKKRKVNEGEVPQYYVEHSHEPIITPEEFDKVQTELARRKRISRQYSGKSIFSSRIICGDCGSYFGSKVWNSTSKYRRVIWQCNGKFKGEHKCETPHLDEETIKMRFVAALNAVIDSKDNILEDCRLMQTTLTDCTSIDTEIESLLEEIDVVTELTKRCIAENSQMAQNQEEYAARYNGFVERYEKATARLEQFRTTKAERESQAEAIGAFMFEVQELDTLTEFDEKLWLTIIDTVTVHADGRMTFKFQGGTEIEG

SEQ ID NO: 12718 - protein, 558 aa, synthetic construct
MKKCVAYCRVSTNSEEQEESYLHQKQYFEELLTKQNGFELIDIYADKGTGTSFKREGFQKMLYDAGLDIEYKKGEINFYVSRREPKFNYIYVKENSRFARNIEVVSIIRKLKEKGVYIVFIDLSKNTENEEDTMMLQFFYSMAQEESRKISSRVKFGKYQAAKNGKIHLTGGIYGYECDFKSNALRAIPDEAEVIKLIYNLAEENNGVRKIKKYLDENGYSRNGKKFTEHFLLYALQNKKYCGYNIRNVYDKPDILNKYKQIKKDESEWIIEKSDRIDVIITEEQFNKVQELISRRRTHKPDGKSLGYKASKSDLAGKIICGECGGKYISNREVYSNGRVREFYNCNVKKKKGTKYCKNKNIDKIEIEVQIEVWRNGFYKKYFDSEREETIKKLILKQQEIENLKDLNKIKDIENIKNEISEYENKLSNLLDNMIEEQSDTLKRVYKNKIENMENEIKVLEEKLKALESSEQEREEKIKNINVFIEALNMKKMDVKEKMTREEFLEEADFVIKEGKIYTITKSHKFFNLINRIIKGDLSKIKQKKLEEIESLSKSISM

SEQ ID NO: 12719 - protein, 513 aa, synthetic construct
MMQQALNAVIYARYSSHNQTEQSIEGQLRDCYAFAEREGLQVIGEYIDRAITGRTDERPDFQRMIADARKQEFQRVIVWKFDRFSRDRYDSAIYKHKLKQCGVRVLSAMENVGEGDVSIILEALLEASAEQYSLDLSKKVLRGQRESRLKGTFLGGLTPIGYKLENRKLVADERTAPIVRYIFEQYAKGTSKQDIINELATRGILNRHGKPLSHSTLQTILKNKKYIGVYTHGGQDVAGGCEALIDEKTFLKVQEQLSKRKHAPAASKAVIEYLLQGKLYCGYCGFNMFGDSGRGRNGSTYRYYACRRRKKERDCKKKNEKKDFIEWYVVEQTVEYVLTPERIEYIASELVAQYKKDCGIDRIKTYEKQLDRIKAEISRLVDTLAVCPAAARQPIFDKMEQLDAEKQEVELDLSKLRISAKIQISKEHIADWLKQFCNGDALDVDFQKRIIDTFINSVYLYDDKVIIYYNIEGGKQVSYIDMIDSTEEPPFSDDAPGSSGGSDLKRPALRLCC

SEQ ID NO: 12720 - protein, 432 aa, synthetic construct
MEVFLLERKLKAALYLRVSTFHQIDKDSLPLQESDLINYAKYILGIDDFVIFKDPGYSGKDTDRPDYQNMMARIRMGEFSHLLVWKIDRISRNLRDFSEMYDELKKYKVTFISKNEQFDTSTAMGEAMLKIILVFAELERKLTAERVFAVMMSRAEKGLWNGATVPLGFIWDEETKFPKIYEPEAKVVQYIFDLYEKIRSTTKVAKQLNMEGVKTKRGGSWTARTVGAILTNPFYIGTYRYNTKTQKTRRWKDKSEWIVIEDHHPAIISKEQFNRVADILKGNYRGDYNRQRESKNVHILSSIIKCFKCGSNMNAGNDRARKNGFTPSRYTCYLFHKTYTCNNFASDLTVLPFLINYIGNYMTLQERITKNHSYRDMESILLRGKYFKDIEHINKDDIKSTYKLLVNNLPVVNYQMPVSYTHLRAHETELHL

SEQ ID NO: 12721 - protein, 435 aa, synthetic construct
MAAYCRVSTDQEDQLHSFEAQVEYYTRYISDHPNYEMAGIYADEGISGTNIKKREQFRRMISDCETGKIDMVITKSISRFARNTQDCLQYSRMLKNLGIGILFEKEHINTLDSSGELLFTILSSLAQDESRNISENCKWGIRSKFKKGEMHVNTHKFLGYDKVDGKLVINEREAKIVRRIYREFLWGHSPQEIAKGLEDEEIEGCMGAKKWYPSTVINILKNEKHMGDALLQKSYTADFLTKKQVKNHGEVTQVYVKGSHIGIIDKETWNAVQLEFARREEFVKEHGLKGYGYGRECNPFTSRIFCGECGSPYTRHTWRSRGIMQWQCKNHMTDGKVTCVNGFVSQNDLESGFVKAYNMLLKHKEILIPRWKDTIETGNALERLRAKQFLDLSEQPELECYVPELAQMVIQMVIIKGVKKYEFTFMDGSRETVCV

SEQ ID NO: 12722 - protein, 504 aa, synthetic construct
MEIQVLEARSSKSYRKKVCAYCRVSTDALEQENSLENQIAYYEDLIQSNPEYEFAGVYYDFAISGYKEKRPGLQKMLTDARNGKIDLIYTKSVSRFARNTAIVLKASRELKELNVGIFFELQNINTLSSQGELMLTILAAFAQAESESGSIGAKMVYQRKYEQGIPVQYLERCFGYTKNEKGEFVPDTEQAKWIVKIYEMAAEGYSLSTIADEMNAAGVKTDKGAGWVESTVKRILENEIYKGDYIMHKNYVNEERKLVRNRGEVDAWYIEDDHPPIVSRQLWDKAQEARKKKRDYLDMDCQIREVTEENYPYKGHLFCAKCGSPLTHRIYSNGNRMSWDCSGRRRHGKDFCTGIHVPDTAVRQWKFDGNIYISVKDSRKSIKEFSYTKESSWSRRHKKKEFVRDVPELTEENYPYYRSIFCAECGSRLVRHIKKHGDIVWECNGRKRKGATYCEGVRIPDRVVQAFMPIRKAIYIKERKGRNGTKHYSYSCKKPERATRKEQG

SEQ ID NO: 12723 - protein, 458 aa, synthetic construct
MKKDTPVGESLPLRAALYPRVSTEEQAKYGLSIHDQQGDLEEYAWAHGMRIVGVFADAGYSARKKVEKRPAMLALLEAVKRDEVDIVLVTKLDRWFRNIGEYYKVQEILEAHNVSWRTIYEDYDTSTAAGRLKINIMLAVAQDEADRTSERIKKVFDGKRARLEPLTGDKPFGYTIEGKRYVKDPETEAAVDAFFRKYMACGSVSATQDYIKSEYGIFIPYQGADKLLRSTAYYGRYFGADGMCPAYITKAQYDAIQLMRKRVMRRPAQNRVYLFSGLIFCPVCGGRMGGRKNQNVVSSHYNCSNHFCRRIPCTNNRSISEAKLERYLLNALDAKFAEYKRQTSRVSGARRKDYSSEIAALKGKLSRLKELYLNELISLDEYKRDRAGFMAKLDELEANQAALAAPAPSGEKIDGLLQGDWKGMYADLPKDKQQEFWRIVIKEIRLYPDRHIEFDLNL

SEQ ID NO: 12724 - protein, 535 aa, synthetic construct
MPTSKNTARKYAAGGSSDNSCGVEPLRAVIYARYSSSGQREESIEGQLRDCYEFAKKHGIIVIGEYIDKAMTGRVDRRPDFQRMMKDSEKGRFNCVLLWKMDRFARNRYDSAMYKYKLKKNGIRIFYAKETIPDGPEGIILESVMEGYAEYYSENLAQNVKRGNYDSALELKTLGKTCLGLKTGPDGRYMIDQAEAVIVRRIFEEYAEGERAKDIYERLNSEGYRTSRGGKFNKNSLRRILSNKKYIGVYEYEDIYVENGIPAIITDRDLFERVQKMLKINHDAPARGKAQNFLLTTKLFCGLCGSPMIGDGGTSHTGKAYAYYSCTKRKRGRSCKKESVPKDWIEDLVVGELVKIVHNDELIEQIADRVMEYQKREKDQSGLHALEIRQKENEKAISNMLAAIEAGIITPSTKTRLMELEADRADIEKGIAHELLAEPEFERDQIIYFLERFRSGDINDEAYRIMLVDTFLNSVYLYDDDHLVLVMNYSGENCKVDLKLVEGAVSGDGCKGSAFAPSSALRCEKALRDQGFFVI

SEQ ID NO: 12725 - protein, 510 aa, synthetic construct
MEQQLKRAAAYVRVSTYHESQEKSITDQVRMLNEIIDKDETLVNVGTYIDQGATGKYQTKRKQFNVLMKDCMEGRVDVVYCKQMSRFGRNALETMTSIEKLRGLGIAVRFVMDDIDTIVDRDCSRLAMLASLAEDERDNLQDLMIWSMKRRLEQGHYIFRPDMLFGYSLDKDKNMVVVPEEAVAVRYIFEEYAKGTRVAEICKWLNEHGYRTRKGNPFNKSSVGDILLNEKYYGDMIIGKWRTEGPKRVKNNGESEMYLFEGHHEPIVSKELFDQCQKVRESRHIKVTKDYGHSDVFCKKVYCGQCGGLFIRQGRTNCVHDFAQIVFACGKAVRSCRRECRNKLQRIGTLEDGFMSVFNYLLENRSVLQDIVTDNKEFNDLNARLDELREAEKKYFELEVKGLLNEQMKKNHTRLVGEMLTLEDRRKELLTRNFEVSTFNRNLKKMQAVLKTAKPMTVFDPKVFDLFVQRILVMDRNNLIYELACGHKVKVEVVDYYKTRDEIGRVYVTE

SEQ ID NO: 12726 - protein, 536 aa, synthetic construct
MLPNNVKIIKPKVRLGEDEQPIPQLIRVAGYVRVSTGKPEQKTSFESQQKHYRQLLARHPEWIDVGLYADEGITGTSIRKRKNFMRMIEDCRAGKIDKIIVKSVSRFARNTVDCLATIEELTALNVEVYFELQNLSSIRDSKTTKLQLTLFASMAQEESETLSESVSYGIRMGIESGRYRMPKAYGYYLDENKKLKIDPTEAEEVRFIFHSFLEGYTVGQICKILNERGVKPPRGAKWHDSTVLNMLRNEKYAGDLILEKTVSSDLKNRRRIPNTKGDQYFVGDNHEPIISREIFDRVQREFEYRRTLRGFGKTGKAQYTTQYAFSNRLFCGSCGSKYRRHCYDVKRKGAEGYDHVFTWVCINHKLNGNKACEMTQVREETLKQAFLAALNSLIDDKDGFIATVIANINKVLQTELSPVNIEKLKDQYTGKQKELQTLMTESVSSHDAALVARYEDLMGELEELKGRIKEAEESRVRASMHRERSEELQKFLEGKKPFEQFDDMVFRKLVQKAIVKEEEVTFVFSDYFERTVPIIR

SEQ ID NO: 12727 - protein, 464 aa, synthetic construct
MARSVTVIPARSQKVRTGHKAVQEKKIRMAAYCRVSTDQEDQLHSFEAQVEYYTKYINDHENYEMAGIYADEGISGTNTKKREQFKRMIADCEGGKIDLVITKSISRFARNTQDCLAYSRKLKNLGIGIIFEKENINTLDSTGELLFTILSSLAQDESRNISENCKWGIRTKFKNGEMHLNTFKFLGYDKDENGKLVINKEQAKTVRRIYRDFLIGINPAQIAKELTEEKVPGCNGQTKWYPSTIVGILKQEKHMGDALLQKTYTADFLTKRQVKNNGEIAQVYVKDSHKGIIDKQTWNAVQEEFERRERFMKDHGTDRYSYGADCIPFCEKVFCGECKSLFTRHSWKSRGIVQWQCKNHRTDGRVTCSNAYVDNSDLEKGFVKAFNKLVADREKFMERWNQMKTDGSSLEKIRAEQMMEATGNDPLGRFVPEIAQLVLAEVTVLGAKKYEFFFLEGSRIKVSV

SEQ ID NO: 12728 - protein, 502 aa, synthetic construct
MEIQIREGNSIQKRKLKVCAYCRVSTDADEQENSLENQIRHYEEAITSNPDYEYAGVYSDFAISGFKEKRPGLQKMLADAQKGKIDLILTKSVSRFARNTSIVLEATRKLKELNVGVFFELQNINTLSEEGELMLTILAAFAQAESESGSVGAKMVYQRKYEAGIPVQYLERSFGFKKDERGVYIADEEEAVWVRKIYEMAADGYTPASIKRYLNENGVKTVGGAEWIDSTVFRLIENEIYKGDYIMHKHFVNEERKLVRNKGEVDAWYIEDDHEAIVSPELWQRAQDALEAKRDYLAEGSVIEEFTEDNYPYMNRIYCARCGHPLYKRIYSNGNRLNWGCSGTKRYGKSFCEGINIPDGVLRGAWHFDENMYIGEKQTDKGKKEFTYLKEASWKRRHKKKEQEPIPENTETEYPYREKIFCGLCGSRLVRHVNTKNHKVIWVCNGRKRKGKDFCDGTRVPDTIIKGWGEIKKDIYIQRKDDKNGKKRYSYTSKKPKGADRA

SEQ ID NO: 12729 - protein, 559 aa, synthetic construct
MCAKKKPAMLEPDMQDAVIYTRYSSHNQRDCSIEQQVADCEIFARQNNLRVVKVYADRHLSGTTDNRPQFQQMLKDAAHGHWAYVICWKIDRFARNRYDSATYKFRLKKAGVRVLYAKESIPDGPEGILLESVLEGSAEYYSAALAQNIRRGMKYNAEQCKVNSGSIPFGYRKGPDGRFAIHEANAEAVREIFRKAAAGMPFVDIANDLNSRGLKTSRGGRWNKGSFRLLMNEAYIGVYHFSDTRIEGGMPALIDQGTFLTANERLKANSSVRGRHQDGGDYLLTGKLKCAHCGSYMIGFSGTGKSGELHYYYGCQKRRRERACKKANVPREWIERVVVKAALDYVLRPDVMEWIADAVMEYQEREAASAQLAALTAELEENQKATDNVMKAIEAGIITSTTKQRLLDLEAKAQDLKRAIELEKLSHVRLERDQVLFWLDCFRGGSLQSQEFRRKVIDAFVSVVYLSDDHLRIAFNYSGGSNAEADFDLVMDAEAAAGELSKKFVQGHVASTKQEPDEPCVFAQGRLCSANENHLDSLKSRWFSFFRPHFWVIVCISRF

SEQ ID NO: 12730 - protein, 501 aa, synthetic construct
MNTVIYARYSAGPRQTDQSIEGQLRVCTDFCKQRGLTVIDTYCDRHISGRTDERPEFQRLIADAKRKKFEAVVVYKTDRFARNKYDSAVYKRELKRNGIQIFYAAEAIPDGPEGIILESLMEGLAEYYSAELAQKIKRGMHESALKCQSTGSGRPLGYRVDEQKHFQIDPESAQTVQTIFEQYIKGESNAAICELLNSRGLRTAQGKPFNKNSINRIIKNRKYIGEYRYHDIVVEGGMPAIISKDTFNLAQAEMERRRTRKAPKSPKAEYLLAGRLFCGHCKGPMQGVSGTGKSGNKWYYYYCGNTRGKNKTCDKKQVSRDRLERAVVDFTVRYILQEEVLEELARKVHAAQECQNDTASEIAFYEKKLADNKKSIANVLRAIESGAATQTLPARLQELENEQAVILGEISFLKGKRLAFTEDQILFALMKHFEPYPGESEQDYRRRIISDFVSEVYLYDDRLLIYFNISSEDGKLKSADLSNIEGGEFDEGLVSSTISPP

SEQ ID NO: 12731 - protein, 576 aa, synthetic construct
MIRENTENGSNQRIRVAIYVRVSTVYQIDKDSLPMMKQDLTAYCKYILNTEDYVIFEDAGYSGKNMDRPAYQKMMSQVRQGLFTHILVWKIDRISRNLLDFANMYAELKELGVTFVSKNEQFDTSTAIGEAMLKIILVFAELERNMTSERVIATMINRANNGIWNGGRVPFGYTYDKESQTFSFDEAEQKIVRLIFDTYEKTGSIVHTSRKLNDSGFLTRGGNVWSATAVWIILRNPWYKGVYRYNYYKIPGRKAVKDKKEWVIVENHHKPSIDPERFDKIQLTLTNNARYRRSPGRSNVQKNVHIFAGLLWCGECGAAFTSSPGKLHASGYRPSKYGCPNVRKTKTCHAKYTSDVVVGEFIINYILNIINAHKDIKLVRSPEDLQQHLLRGSTFSDICSIDSDGLSAMYDMLTCCSKSGMLFKRVKPKFKVDPELKHLQSEQKKQQRALDRLNELYLYSDESMSEREYIVRKQQITDKLDEINDAIGMMSQEPWMHTMGDSEFIQQASSFILNQKLHDRQYVYFTSLAESVDAEILKAFFGSIIDSIVITSGKIQRVTFRNGISHTFTYKNKPEN

SEQ ID NO: 12732 - protein, 525 aa, synthetic construct
MARAVTVIPPTIQPITHLARNAVVRRRVAAYARVSTSSEEQLTSYEAQVDYYTRFIQSKPEWEFVRVYTDEGISAVNTKKREGFNQMVRDALDGKIDLIVTKSVSRFARNTVDSLVTVRKLKEKGVEVYFEKENIYTLDSKGELLITIMSSLAQEESRSISENVTWGQRKRFADGKVSLPYSHFLGYRKGADGLPEIVPEEAETVCWIYSLFLTGKTTGSIASLLTREGIPTPAGKAKWQASTVESILKNEKYKGDALLQKAFTVDFLTKKQKKNEGEVPQYYVENSHPAIIDPAEWKLVQRELERRKSIGRSYSGNSIFSSRLVCGDCGGFFGSKVWHSTDKYRRTIWRCNSKFTGEEKCQTPHLTEEEIKARFLDAFNALVSDKERLLDECRTMQAALTDTGSLDSEIAALLSEMEVVAELTKRCIEENSTTAQDQAAYLERYNGLAERYETAKAKLEKLQAAKAQREAKAEDIGGFMFELAEYGEPIIEFDDRLWLTAIDTVTVHRDGRLIFRFQTGHEITV

SEQ ID NO: 12733 - protein, 552 aa, synthetic construct
MGKKQKTNGGDAVIYARYSSHNQRDVSIEQQVEACRKHAAELGLTVTATYEDRAISGKTDKRPSFQRMMRDAEQHKFAYVLAWKSNRIGRNMMQALVNESRLVDCGVKVFYAEEDFDDNAAGRFALRSMMNVNQFYIENMAEDVKRGLYDNAKKGLVNGSLPLGYKRGADGKPEIDEPKAAIVREIYTRVAAGELFASIADDLNARGIKTARGREWNKGSFHVLCHNDRYRGIYMYGDIRIPGGMPRIISDELFYDAQEAYGMKKDNRYGRARHGAENYLLTGKLYCGHCGGYMVGISGTSKTGEMHYYYACQKHRLEHTCEKKAIRRDVIENAVARAIMMYCLDDETIDFIVDSTIAYFKQKDHELHIEAMENELAAVQQAISNLMKAIEAGIITPTTRTRLLDLEEQQSKLSAKINTAKAERVEINRDDLIAGLQLFRTGDIKNKKFLAKLFNTFLIAVYLYDDNRLKIVFSFTGNHNSVEIPLELDNDCPDSEIVSDETEVRMSHLECRKNLGSSPSSGEAEKDDDCSDGRFVRTAPLPPHKKTPQAYA

SEQ ID NO: 12734 - protein, 521 aa, synthetic construct
MKKITKIDGVQNNSTVNKELRVAAYCRVSTGSDAQLESLEAQKTHSERYINSREDWKFAGLYFDEGITGTKAEKRPELLRLIADCEAKKIDFVITKSISRFSRNTTDCLALVRKLQSLNIPIFFEKENINTGSMESELFLAILSSMAEGESASISENSKWSIKRRFQNGTFKLSYTPYGYDWDGENMIINPTQAAVVKRIFADILSGKSTNAIADELNTEKIPSKKNTSWTSSTIRGILANEKYTGDVIFQKTYTDENFNRHTNYGEVDQYMALDHHEAIISHADFEAANALVSQRALEKGVKKGSDKYQKRYAFSGKIICGECGDTFKRRIHTCTTYKYVAWACNTHLKDKSTCHMKYIRDDDIKSAFVTMLNKLIYGHRLVLVPYLKALENSSGDEALQRIQHLELLLDQNSEQRETLTKLMAQGYIDQILYNQETNALLLQAETYRSDIEAITICMTGDSAKVTETNLLLHFVSHADMLTTYSEELFESYADHIEITGRNEIKFVMKCGLTFTERIDD

SEQ ID NO: 12735 - protein, 522 aa, synthetic construct
MGNVMLIPARRQVGNNARKQEEEKPKLRVAAYCRVSTDSDEQATSYEAQVEHYTEYIQKNPDWEFAGIYADDGISGTNTKKREEFNHMIDDCKAGNIDMVITKSISRFARNTLDCLKYIRQLKDMNIPVLFEKESINTLDAKGEVLITIMASLAQQESQSLSQNVKLGLQYRYQQGKVQINHNRFLGYTKDADGNLIIDPEQAEIVKRIYREYLEGLSMDKIAAGLERDGILTGAGGKRWHTSTINKILRNEKYIGDALLQKTYTTDFLNKTRVKSNGLVPQYYVEGNHEAIIPKDIYLQVQEELVRRRVVKTSANGKKRSYSCNHCFSQIVICGECGEMFRRLHWNNRGVKSIVWRCISRLESTGLECHARTINELVLQDAVVKAINQMLGDKSSYQAQLQLNIASVIRASQVTSVENIDEKLMALQQELIQKAQSKEAYDEIADEIFRLRELRQQTTVDTAARDEQIKRINDLQDYIAQQTNHLTEFDESLVRRWIKQITIWDDHITVELKSGVSIDVDA

SEQ ID NO: 12736 - protein, 530 aa, synthetic construct
MEQYLIYLRKSRSDLEAEAHGEGETLSRHEHTLLELAKRQHLNVTDIYREVVSGDTIAARPMMQRVLSEVEQGVWSGVLVMEVERLARGDTIDQGIIAQTFKFSGTKIITPIKTYDPDNEFDEEYFEFGLFMSRREYKIINRRLQRGRLASAKEGKWPSGLAPFGYRRVKLKNEKGCSLEPIEEQAAIVRMIFDLYTVGLQDEDGSARPLSLGSIATRLNDMRIPSPSGSQWARITIRGIIKNPTYIGMVRWGSRETKKKVVDGKVVSVRGPADPEKECVFKGIHPPLIPKETFELANDKLTRSENTSTHKEKVVRNPLAGLLVCSECGRQMMRMINPVHPDMPVVRCPRRGCPNCSSYLPIVEERVIQGLSEWMKGYELEWSSAAASSSVSSVGVREKALASAEAELRKLQQQLERTHDFLEQGVYDTDTFLSRSRMLSDKIAVAKDSVARCSRELTEEKLRETSRRDIIPKVRNLLDVYPLLETAEEKNALLKEVLEKVVYQKLNEKRKKSPDGFTIEIYPRIPKSEK

SEQ ID NO: 12737 - protein, 596 aa, synthetic construct
MAKITKIEPQIPALPTRKKVAAYSRVSMETERLHHSLSSQISYYSELIQKNPEWEYVGVYADEAITGTIAKKRDEFQRLIADCEAGKIDIVLTKSISRFARNTVDLLNTVRHLKELGISVRFEKENIDSLSGDGEVMLTLLASFAQSESESISTNVKWGVRKRMEQGTPNGHFRVYGYRWEGDQLVIVPEEAVIVKRIYQNFLDGKSRLETEREFATEGITTRDGCRWVDSNIKVVLSNITYTGNMLLQKEYIADPISKKRKKNHGELPQYYVENTHEAIIPMETFQYVQDEMARRRKLGAFANKSLNITCFTAKLKCEKCGKSYVRNTRKNRAKMTQLDDQLVGWVCGSSKKKNGECKAMEIPEYILRQKCAEALGLEKFDEDAFAKQIEVITIPEQGILNFHMTDGTLKTLTWVSTAKKDAWTEEARNKASAYRRNHAIKRDDVSCFTAKLKCAECGNNYRRQTRKKSTGEKYHLYACATTNTCSNNCIHEDTLRELSAKALGLEMLDEELFKEKIDHVSISPGGHITFCFYDGHEEAMTYSTKRRMPGWTPERREKQVEAIKASFTEERKQKMSENMKKIRSEKYWASTKAKK

SEQ ID NO: 12738 - protein, 529 aa, synthetic construct
MGINQGKKVKTIPATLTRFTASPITEQKKRRVAGYARVSTDHDDQFTSYEAQIDYYTNYIKSRDDWEFVNVYTDEGITGTSTKHREGFKKMVADALSGQIDLIVTKSVSRFARNTVDSLTTIRQLKEKGIEVYFEKENIWTFDGKGELLLTIMSSLAQEESRSISENCTWGQRKRFADGKVTIPFNRFLGYDRGANGELVVNLEQAETVRNIYDMFLQGLTYHGIAQKLTDNGIKTPGGKDKWSISTVKSILSNEKYKGDALLQKRFTVDYLTKKQKKNEGEIPQYYVEGNHEAIIPPEKFDMVQREMAKRGRGKKYHSGVHPFSSKIRCGECGSWYGSKVWHSTDKYRRIIWQCNHKFDGDKRCTTPHLTDEQIQDAFLSAANKLLATKDAVIANGRAMMELLFDTTEQEAERDRLLEEAQIVSDAVQQNIYDNAHVALDQKVYQKKYDDLTARYETLKDRLDELNEQISQLQSQKGNYEDFIRAFKKLPDQITEFSLDSFNGLVDFITINAADDIQVTFRNGQTIKA

SEQ ID NO: 12739 - protein, 477 aa, synthetic construct
MRDSKSKTVIIYNRVSTIMQDKNESLTEQTDECIRYCKTNGYEIYKILKDVKSGTKDDRAGYLELKKHIKRKDFDILVVLETSRIARKMKELVLFFSLLNENNIEYISIREPNYNTTTPDGKFAMNIRLGLIQFERDNTAERVTDRLYFKASKGQWVNGKPPIGYKLVNKRLEIDEEKAEIVRNIYEDFLNGYSLNQINNKLQFSWGSKQVKRILTNPTYKGYIRYGTRSNRKKNNREAFIVKGWHEAIIPEEKWEKVQEMYKNLNRKASNTKPTLLSGLLKCKECGNNYIRKRGGSYDKNLYYGCNLNNLRYSDKFFYKDIPECSSATIKGDLLEKAVIDTLKKQINDLNFNDIEIDKKRQVNIKQIDSSINKFKNRLNKIYELYIEDEIPKDKYLKDKKDIEARIISLEKQKKSFGEIEVEKSNNEMIQEYFSKIDLSNIEEANRILKIIVNKIVVYKKKKTPKDDFEVEIYLNI

SEQ ID NO: 12740 - protein, 520 aa, synthetic construct
MKTNLSEEYAVYLRKSRGDSTLESLGVDVLERHEHMLLALAKKMNITIGHIYREVVSGDSISARPEMQALLHDVEDFRWKGVLVVEVERLARGDTIDQGIVQRTFQYSDTLIVTPLKIYNPADESDQEYFEFGLFMSRREYKTIKRRLQNGKYAAASEGRWPFNASPYGFNQVRLAKGFTLDIDPAEAPAVKLAFSLFTGPDRIGVTMIRKYFSDHGILTRSGKQWTDGMIRDMLSNPVYDQKVAIGRRRTVTKLVDGRPVKTRPRSNDYKVYDGLHPRMIDHKIFLEAQSYLGLGAPKPPESYGVKNPLAGLIVCAECGHKLVRRPATRATTKNGAKYDTMLCRTPQCPTVGCSLEILEKELLNSLSDWVKDYELRTILPESHVKEKEDLVTAAASELSTLESQRERLYDLLEQGVYTKDIFLERSHSLQERINDARVRLSTLELELANERQIDAHILNFIPSCKELLSTYWSLSAADRNQALRMLIESVEYRKYEKNKKGKKDDASFELIIKPRIPRG

SEQ ID NO: 12741 - protein, 594 aa, synthetic construct
MPKISKIEPTVPAIKQLKKVAAYARVSMQSERMMHSLSAQISYYSKLIQKNPDWEYAGVYADDFISGTNTVKRDEFKRMLVDCEEGKIDIILTKSISRFARNTVDLLETVRHLKAKGIEVRFEKENINSMSGDGELMLSILASFAQEESRSISENIRWATKKRFEKGIPNGKFKIFGYRWEDDKLVPVPEEAEIVKRIYQNFLDGKSRLETEKEFAAEGITTANGCRWVDSNIKVVLTNITYTGNLLLQKEFIEDPITKRRKKNRGEMPQYFVENTHEPIIDMETFRYVQDEIARRKELGALANKSLNTCCFTGKIKCPHCGVSYMHNKRTDRGNCLEFWCCGSRKKKGGRCGVGGSINHKNMVKACTEVLGLEEFDEEIFLREVDHIDVPKRYVLEFHMTDGRVITKDCPNTGHKDCWTAEYRAKTSAKRRKNGTNCKGSSCFTGKIKCKNCECNFRRATQPSATAENGKVNYWRCSEHSNGCQTAGLREDALIPLIADTLGMAEFDDALFRKTVEYISVLTDKDLEIHKKDGTVTAVIYTPPAPKRLPRTEEQKAHMRSLMKEKWTPERKVEMSERMKQMRKERGENWRKEK

SEQ ID NO: 12742 - protein, 527 aa, synthetic construct
MAQRKVTAIPATINKFTATPVNSRKKRRVAGYARVSTDHEDQVTSYAAQVDYYTNYIKGREDWEFAGIYTDEGISATNTKKRDGFKRMVADALAGKIDLIITKSVSRFARNTVDSLTTIRKLKEHNVECYFEKENIWTFDSKGELLLTIMSSLAQEESRSISENVTWGHRKRFADGKVSFAYSRVLGLEKGPDGNIVVNQEQAKIVKLIFRRFLEGMTPHSIAVELTEMGIKSPGGKDKWNGATVRRMLSNEKYKGDALLQKEFTVDYLQKKTKKNEGEVPQYYVEGNHEAIIEPSVYDLVQVELAKRSKKNEARYSGVSIFSNKIKCAECGSWYGSKVWHSNDKYRRVIYRCNHKFDGNRKCETPHVTEEEIIAAFIKAMNILITERDEIIENIQLIRQTVCNVTTLEQEQDKLRSEMEIVVELTQSCVAENARTAQNQEDYQKRYDGLVERYEKVKSRYDATQEAIEEKQAHYEKLGIFIETLRQHGESITEFDAGMWGSMVEYITVDKDKKMTVTFKDGSEIQV

SEQ ID NO: 12743 - protein, 519 aa, synthetic construct
MRNIAIYVRVSTMHQAEQGYSIDSQLVDCRKKAHDLGAITINEYVDKGKSGAFLDRPELQRMLNDIKTEKEYYDALIIYKLDRLSRDSMGLAYIIKILQQKNIKIISTDGAQYGTNPQDVLTMQIMGSIAQFDNALRKERSIRGKIEKRKQGKLDKITKYGYTFNDEKQNLDIKEDEAIVIRKIFKWFTEDNLSAFRISKKLNSEKIPAPQPKINRKIINKDNIWFESTIRTMLKDETYAGIRHTMIYKFEKISLNNMKKTKRPPEEWISVPVPSIISRETWDKANNIMNRKSTNPRRTQRTWILQGLVFCEKCGQIMNIKQTPKIGKIKENEEKYNFYFKCRTNILNWFGSDKKCPNRQVPIYALEDSVWETLLNIFYSKETLEKYLKETQLKDNVYNLLDKLIEDRNKLSKNKNKIVEWFADGKIDQEIADNKINDLNNKINDLDKKISNLQSTNRSKKSFSINNLYDIFHKIKNPNREQKKEIIHSVVEKIFVERLDNKRSNAYTKPVLKIRIILR

SEQ ID NO: 12744 - protein, 569 aa, synthetic construct
MKQSSNKKSREATAFLYERLSRDDNLEGESYSIVNQKKLLTKVAKEKGYTNLVHFLDDGISGVTMNRPGFVEMMQQLEQGKAAAVFVKDLSRLGRNYIEVGRLTEEFFPDHDIRLVAVSDNIDTAEGENELAPIRNLFNEWYARDISKKRRISNKIKGNSGEPMGLPPYGYIKDPNNPKHWVIDEEAAQVVRRIFDMTLEGFGTEQIATQFEKEGILTPQAYWIQKGIGRPGKSKTRPATKWNGSTITHLLYQQEYCGDVLNFKTYSKSYKNKKRIHNDPENWVVFQDVHEPIIERAVFEQVQQKRGKMRKRRTSNGEHNMFSGLLVCADCGCNLHFHFNQGNPEIKYFNCSNYKGNRGTCQSTHYIRVDFLEEVVLGEIRRLTKFASLYEDDFLKAVIGHSQQADEADRKLKEKELKALLARDEELDGLFERIYEDNVSGKISDERFSRMSRRYEDEQKELTEKIKQLRAEIEKQRSRTMTTDMFISLVRKYTRAKKLTPRMLNELVEKIEVFNAEKVNGVWEQRLRIHYNCVGTIEIPSALPLPTPDVSVNTRKGVVVNYAPCDVAI

SEQ ID NO: 12745 - protein, 521 aa, synthetic construct
MNKNITMIPARKKQGNTKTETPSPTLRVAAYCRVSTDSDEQATSYEAQVAHYTEYIQAQKGWELAGIFADDGISGTNTKKREEFNRMIDACEAGEIDIIITKSISRFARNTLDCLKYIRKLKEINIPVFFEKENINTMDAKGEVLITIMASLAQQESQSLSQNVKLGIQYRYQQGKVQVNAKWFLGYDKDADGHLVINSEQAKTVKRIYREYLEGLSMNKIAAGLEADGIRNGAGHTKWTPSNIRQILTNEKYIGDALLQKTYTVDFLTKKRVRNEGHMPQYYVENDHEAIIPKEIFLLAQDELVRRRNLSKRADGKRKAYSSNHCLSGLVLCGECGEYYRRIHWNNRGCKSIVWRCMSRLTPGNNSCHARTVEEEFLKGIVLSAINRCIKDKGCFFAELEDRITHVIDHESSVDMKSIEQRLEDLQQMLMDRISNREPYEDVANEIDAVKEEKMQAELAQAKTDNQILRIQAMRDFLQAQNGILTTLDDALVRRMVDTITIHDKKIDVRFTSGVSVSIKQ

SEQ ID NO: 12746 - protein, 525 aa, synthetic construct
MKALKKVTRIDGVATQRKQQKQMRIAVYCRVSTESDAQLESLEAQRKHYASYICTRDGWTLHDIYYERGVSAAKSKARPELRRMLRDCRLGKIDLVLTKSISRFSRNTADCLRMVRKLLELKIPVYFEKENINTSEMESELFLSILSSMAQDESASQSANVRWSIEQRFQSGTFIITCPPFGYRNDDGVMAIVENQAVIVREIFQLALAGYGGYSIARILNDQNIPSAHGGLWSSGSILAILKNEKYTGDCLFQKTYTDDAFKRHKNNGEKNAYLVRDHHKAIIDRKTYDAVNELIELKRENKGIIQESPKYLNRTVLSGKVRCKACGSVMKRITRYTQSGSYKMYACSTHLHSKKNCPFKAVYEDGILCAFASMMNKLTFAREAILEPLLSEMQGQKPKTYVKELKVANEAIREDSDKLDVLTRLSASGYIDRPHFLNEKNKLVTRIEERKKEREQLKNQETGIDDTVRNLEALCRYVKGRKVSESFFDDEFKRFVDFIEVVNQTEICFVLKCGLRLPERMAKR

SEQ ID NO: 12747 - protein, 522 aa, synthetic construct
MGSVMVIPAKRQVGNTVKQSEQKKLRVAAYCRVSTDSEEQETSYEAQVTHYTEYIQKNPEWELAGIFADDGISGTNTKKRDEFNRMIDECMAGNIDMIITKSISRFARNTLDCLQYIRQLKDKNIPVYFEKESINTLDAKGEVLLTIMASLAQQESQSMSENIKLGLQYRFQKGKVHINHNRFLGYTKDADGHLIIDPEQAEIVKRIYLEYLEGSSMDKIAAGLMADGILTGAGKEKWHTSTINKILRNEKYMGDALLQKTYTTDFLTKKRIKNNGIVPQYYVEDDHEAIIPKDLFMQVQAELVRRRVVHTSPSGKKRSFSCNHCFAQIVFCGDCGELYRRVHWNNHGCKSIVWRCISRLEITHAEAPCENRTVNELLLQEGTVKAINRILTERGTFLKQLQANIAKAVVSADTLSPDGIQARLEELQKELIKKANNKQDYDAIADEIFRLREQKEQSEVDSHHREETMNRIKELQGFIARQKTDITGFDEALVKKLIEKITVFTDHFTVKFKSGLTIDIEA

SEQ ID NO: 12748 - protein, 567 aa, synthetic construct
MKQSSKYQTGTAALYCRLSRDDNMDNESNSIQNQKKILQKAAKDKGYTDTIFFVDDGITGTTMKRPGFQKMITAIEAGYISAVFVKDLSRLGRNYIEVGKLTEEFFPQHDVRLVAVSDGVDSDEGEDDFTPFRNIMNEWYAKDISKKRKIVNKMKGNAGIPLSQPPYGYIKNPDDPRFWVVDPDAADVVQRIYRLALEGNGPMQIATALCEAGILNPSAYRTSKGISKGGSKSTLELTKWNHTTVKKILSLQEYCGDVINFKSYSKSYKMKRRIENPEENRAIFLDVHEPIIDRISWEKVQSLHTTRRRRTTVTQEPSVFSGIMKCPECGGNLTFHFNQNNHDIKFFSCNNHNSGLRKCSSTHYIRLDFLEQVVLYEVKRLAAFANEYENDFIKAMMGRSARVAETDRARKQRELDALLARDKELDMLFERLYEDNVSGKIDDARFAKMVKRYEQEQGETAGKIKALGLELKKADGKKMDMDFFLETIRRYTDATTITRRMVGELIDHIDVYHAEKRDGITNQRVVIHYNCIGAFDVPDRRKIPEIDIIMETRKGVALSYAPTQIAV

SEQ ID NO: 12749 - protein, 554 aa, synthetic construct
MAERVCCSYQNVLSIQNRVCCLYRVSTTKQVDHDDQNQADIPVQRKACREFAERMGWTIVYEEQENGVSGFKVSANDRDKIQLIKEYAEQGKFDILLVFMFDRIGRRAEETPFVVEWLINHGIQVWSVNEGEQRIDTHVDRLTNYIRFWQADGESQKTSMRTKAALGQMVQEGRFRGGSAPYGYDLVPSGTYNKRKHEVFKLEINPDEAKVVRMMFDLCVGSGYGRFKIANFLSEMGIKTRDGKNWHEATVGHILHNIMYTGVLRSGSTQSKAFPDLQIISPENFELAQKLMAERANECNALRTMPRNTRGQSLLSGNVFCGHCGGRLTLTTNGTTRINAAGEKVGRKRIRYVCYNKTRKRSNCDGQTGYTMHILDKMVTDILHQVFDRMRSVEENEIISRTHRSAMVSLKKRLADAKAESAKATKEYESLKLEIIKAVQGESAFPMDILSELVNNARTRMLDVNAQLTELNEEVEKSNQRIEAIKADYRRIMEWSEMFDGSDMDVKKMIAGYIIKRVDVYSDYRLHIEFNMSFAQFELGLETEVEYAAQDIVS

SEQ ID NO: 12750 - protein, 523 aa, synthetic construct
MQKNQTKKAALYIRVSTHYQIDKDSLPFQRNELINYAKYALGIDDYAIFEDAGYSGKNTDRPAYQDMMRRIRAKEFSHLCVWKIDRISRNLLDFAAMYEELKKFNCTFVSKNEQFDTSSAIGEAMLRIILVFAELERKLTAERVTSIMYSRANKGLWNGAPIPLGYKWDAKGKYPVIDEDTAVVVRYIYDQYERIHSTMKLSDKLNRENIKSARGGEWTGTTVKGILRNPFYKGTYRYNYKTQTGRIKPVEEQIVHEDNHPGIIDKEQWDRVNKILDENSTRSVAQLRSNVKYTHIFSKLLRCGQCGHTMGGGLDRARSDGYRPSRYYCTSHTRKAGCTNGVYSDVYLGPFVFNYIANLVRAQRALTDSQKPRDLERMLLRGKFFDSVAGIEQQGLLDTYNTILYGSGEDVMLQPSPEIAEQSASELELLDRDQKKYERALERIEQLYLYSEESMPEKDYVLKRNELKAMLDNIAERRAEVNSRLGLVNDIGRNIYPTFASHAYSSPAFSLESCSSILSTVSV

SEQ ID NO: 12751 - protein, 463 aa, synthetic construct
MSFFTPNPQLFGLRVAKYIRCSHDDQVLHGDTLDAQNELLDDFVKVNKMVLVDTFIDEALTARKKFTKRKEFVRLLDGVKAHDFDLIIFTKLDRWFRNIGDYHKIQEILEANGVQWKAVTENYDTTTTNGRLHINIRLSVAQDECDRDSDRIKDVFAYKLKNKTYLSGSLPRGLKLDAEKHVIIDPEWNCFALDMFDRFEATCSKRDTQLFLQDKYNIRVCYDTVARYLKNPLFKGQYRDDPDFCPATISPERFERIQKLAIRNVRIRHTQQFYIFSGLLICSSCNHYMCGTVTYRRMADGSEKMYKNYRCNFKAQSKLCDRGKTYREADLEEYMLAHIRPALSDYIAKYEVTAASTVQKNPVTEIAKIERKMKKLYDLFMDDLIDKEAYRSEYDKFKAQIEELQKCSTAAPMRSLDSVKKLLSEDWEAVYHTFSDQEKNTFWKSFVESVLVYEDGSMDIRFL

SEQ ID NO: 12752 - protein, 401 aa, synthetic construct
MLHSLSAQVSYYSKMIQSHNGWMYCGVYSDEAVTGTKRERAGFQYMIEECRQGNIDLVITKSISRFARNTVTLLQTVRELKSLGVDVFFEEQHIHTMSADGELMMTILASYAQEESLSASENQKWRVRKAFENGEIINLRFLFGYDITPGGIQVNEKGAAIVREIFARFNGGESMSSICRDLDARGHKGVLGGTWCAERMRNTLSNEKYLGNALLQKRYRNNHIEKKLLPNRGELPMYYAEGTHEPIIDQATFDKAQERLRMLAQQAANRKKPTRSAFSGLIRCGLCGNTYKRITYHKKHYWNCTTFQTKGKSECAAKRIPEETLETLTCEVLGEGSIDSDMFRSKITAIRAEKSNMVVFCMDDGSEIVKRWKDRSRAESWTPEMKEKARQRALQARRKKE

SEQ ID NO: 12753 - protein, 486 aa, synthetic construct
MPKTEEKQAAKAVIYARYSSDRQREESIEGQLRVCEDYARRNNITILHTYADRAMTGRSDQRPEFQMMIRDAATMAFNVILVYKLNRFARNRYDSAKYKHKLKKYGVKVVSAMENIADDPSGILLESVIEGMAEYYSAELSENVLRGMTQNALEGKWPGGVIPLGYKLDKGGRLIINEEKAPIVRMIYQMFLDGMSVARIERKLNDKKYTTDAGKVFSRSRVYYILHNERYIGTFQWKDIKKEGIIPPIISKEAFHAVQERINAMKSSSYRTNNNYLLAGKAFCASCGAKVSGTSGKSQNGNKYCYYGCSHHHRSARYEYCETKNIRADVLEKLVCDKTHEILSSKKAIKEIARQAVKLRPRDESELEIRAIKNHISSCQKKIDNCIKAIENGVMSNALVESLNENERTLDVLKEKLAKASLMQGSGLLTEEKIQFFFETIREKAKETEKYNDILLTSLVRAVYICNEYVEIQYNYAEQLPILTTP

SEQ ID NO: 12754 - protein, 506 aa, synthetic construct
MDHKSESNLQGLDAAAYLRKSRLEAGLDTDEVLAKHQKTLYDYAASHGIHILEEYPEVVSGESLYARPQMLRLLQDVEDGKYDAVLCMDLDRLSRGRMKDQGIILDAFRDSNTLIITPEKIYNLSDEIDEEYAELKTFISRREYKIITKRLRRGLQMSIQDGCYVANAPYGYRKTMVDRRPTLEIYEPEAKFVRMMFELYAKGYGCVAVARHVNALGARPHRSAEFSRNSVAKILRNPTYIGKIVWNQKKHIRKGAQGNAKHVTIYQPRDQWTITDGLHPPIIDRELWETVQAIADGRYRPARNDGTVRSPLAGLVKCANCGQNMQRMVMKGSAYLLCTRRGCCASTKIDLVEGQILNYLTDTLAKLTMDQPQHIPGRDTDVLETALSQVRDSLAGTDRQKNRLYELLELGEYDLELFRERMAAVKEKRAALEKKEAELERSLRDIQCSNPALLAEKIRAVLDAYSTADAAGKNALLKSVLESVWYKKEKKTKPADFQLQFVLRAL

SEQ ID NO: 12755 - protein, 473 aa, synthetic construct
MTNSQNLGTIEATNPVLAVAPLKEETEMLRATEKITALYCRLSQEDANEGDSNSITNQKDILLRYAKEHRFPNPTFFVDDGYSGTNYDRPGFQQMLSEIEAGKVAVVLTKDLSRLGRNSSLTGLYINFTFPKYSVRYIAINDHFDTIDPNSTDNDVAGIKNWFNEFFAKDTSRKIRAVQKAKGERGVPLTTNVPFGYRKDPEDRTKWIVDEAAALVVKRIFKLCMEGRGPMQIAKLLQAEKVLNPTSYKRREGIKSPSPETADPYHWNTNTVVHILERREYTGCTVNFKTYTNSIWDKKQRETPIEKQAVFYNTHPAIIEQEVFDKVQQIRKQRHRRTKTGKSSLFSGMVYCADCGAKMRYCTTNYFEKRQDHFVCANYRSNTGSCSAHFIRAVVLEELVWMHMKAVIFYVTRYEKHFRAVMEQRLRMSSEESVATRRSLHRQNAALQSLTDCLSASMRTMFPGASPMNDFPL

SEQ ID NO: 12756 - protein, 492 aa, synthetic construct
MKGVIYARYSSDSQREKSIEGQLRECKASAEKNDIQIVETYIDRALSARTDRRPDFQRMIGDSAAKNFDAVIVWKLDRFARDKFDSAYYKRILKNNGAKVISATEAISDGAEGILLESILEGMAEYYSAELSEKIIRGLTENALKCKYNGGTLPLGYVIDSEQYYQLDPLTAPAVLDAFTRYADGSSMQEIADELNLKGVRTNRGNKITINVIARMLHNRKYIGEFKQKDIVKPGGIPAIVTEELFDRVQKRMTANKKAPAKHKAEDEYLLTTKLFCGKCRCYMVGESGTSHSSQVHRYYKCVSVKKHRGCDKKTVKKDWIENLVIEQIKSIVFNDELIESIADAIMELQGQESTTLPLLRKQYADTQKAIDNMLNAIQQGILTPSTKERLESFEKKKNELSVEIVKEEMAKPAITKDQIVFWLHRFRKLDTKKREHRRRLIDSFVNAVYLYDDRMIITFNYKDGSKTITLAELEKSALGSDINALSPPENR

SEQ ID NO: 12757 - protein, 527 aa, synthetic construct
MRVSVNLNAQKPDTTTNAVIYARYSSHGQTEQSIEGQLAKGHEYAAAQGYTVVHEYIDRAMTGRNDNREAFQKMLSDTGKHQFQVVIVWKVDRFGRNREEIAFNKHTCKKNGVRVEYVAESLPNSPEAVILESVLEGMAEYYSIQLSQNIRRGQLESAKKCQCVGGSVPLGYTLDSDKHFVIDPQTAPVVKKIFDLYAEGATISEITGQLNEQGIRTARKQLFTKNSLTKLLKNEKYIGIYAYKDVVRVEGGVPAIVDKSTFDRVQELLKINRRAPSHTWTKVEYLLTDKLFCGHCGSPMVGESGFSHTGAKYSYYGCIKRRREKACDKKPVRQDWIEALVLDETVKLLHDDELMEYIIDRTWEYYQITDKVQEEKAVLEAQLAEVDKAINNLVRAIEAGIFNAATKSRMDELDAQKAALTASLADLELTSGIRITRDHIEYFLLRLRDLDVKDRECQKRLVQTFVNAVFVYDDGRVKITYNYSGQSSTITLNQIASAEKGKGFVCCLPCSTSSPRFPRGVAAFFVF

SEQ ID NO: 12758 - protein, 597 aa, synthetic construct
MRTITKIESTIPTIKKRKKVAAYARISMESERMNHSLSAQISYYNNFIQKNPDWEFAGVYADNGISGTSTVKRDEFRRMIADAEQGKIDIILTKSIQRFARNTVDLLETVRHLKNLGIEVRFEKENINSLSGNGELMLSILASFAQEESRSISDNVKWGIRKRMQEGMLNASGHFNIYGYEWQGDELIIVPKEAEVVKRIYQNFLDGKSRLETERELEAEGIRTRQGCVMRDSNIKKILTNITYTGNMLFQKEFISDPINKKRKQNRGELPQYWVEDTHEAIIDLETFQYIQDEMARRRQLGALANKSLNISCFTGKIKCPYCGVSYMHNTRKPRTPNGKRLEFWVCGSRKKKGGHCEVGASINQDNMKKVLAEVLDIDEFDDEVFLDKVDFINVPKRYTLEIHLQDGTIVTRPCENTGHQDCWTKEYRDKVSKQRRKKNTNPKGASVFTSKLKCKHCGCNYRRCTQPSTSSEDGKFYYWRCAERTACKAQGLREDFLKSQLAEVLGMAEWDEKVFAEKVEQINIDGYQLEVVGKDGIVTPMTFEPPKRGGRHCSEEQKEHMRQIMKEKWTPERKAEMSQRMKNMRKERGRNWRKEK

SEQ ID NO: 12759 - protein, 463 aa, synthetic construct
MSFFTPNPQLFGLRVVKYIRCSHDDQVLHGDTLEAQDLILEDFIKVNRMILVDTFIDEALTARKKFNKRKEFVRLLDGVKAHSFDLIIFTKLDRWFRNIGDYHKIQEILEANGVQWKAVTENYDTTTTNGRLHINIRLSVAQDECDRDSDRIKDVFAYKLKNKTYVSGSLPRGLKLDAEKHVIIDPEWNCFALDMFDRFEATCSKRDTQLFLQDKYNIRVCYDTVARYLKNPLFKGQYRDDPDFCPATISPERFERIQKLAIRNVRIRHTQQFYIFSGLLICSSCNHYMCGTVTYRRMADGSEKMYKNYRCNFKAQSKLCDRGRSYREEYVEEYMLNHIRPALSDYVAKYEVTAASTVHKNPATEIAKIERKMKKLYDLFMDDLIDKEAYRSEYDKFKAQIEELQKCSTAAPVRSLDSVKKLLSEDWEAVYHTFSDQEKNTFWKSFVESVLVYEDGSMDIHFL

SEQ ID NO: 12760 - protein, 504 aa, synthetic construct
MTAVIYARYSSDNQREESIEGQIRECTAYAEKNDITIVKHYIDRAISAKTDNRPQFQQMIKDSDKKLFDIVLVWKLDRFARNRYDSARYKTQLKKNGVKLMSATEIISEGPEGIILESVLEGYAEYYSADLAEKVVRGQTENILKGRCNGGRGTFGYTLDSERKFHIDPLASPFVLESFTKYRDGLTMKEIRDWLNENGIKNPVGGEFTYNSVEHMLKNRRYIGELKFRDVVVPDAIPPIVPLELFDDVQEKIAKNKKAPARRKAEDDYLLTTKLHCGCCGALMFGESGTSRTGEVHRYYKCATAKKKKGCKKKTVRKQWLEDLVVNQTMQLVRDDAAMESIIAKVMELQDRENTNLPLYEKQLRDAESGIQNMLNAIQAGILTSSTKERLEQLEETKRELEARIAEEKLAKPKIKEEFIRFWLMRFRKLDMSLKDQRQALVDTFINSIYLYDDKVLITFNYKEGTQTITFEEAAQAASKENGSDLDCFTAPSKIPRLTVENTV

SEQ ID NO: 12761 - protein, 535 aa, synthetic construct
MRAKKKPAMLEPDMQDAVIYTRYSSHNQRDCSIEQQVADCEIFARQNNLRVVKVYADRHLSGTTDNRPQFQQMLKDAAHGHWAYVICWKIDRFARNRYDSATYKFRLKKAGVRVLYAKESIPDGPEGILLESVLEGSAEYYSAALAQNIRRGMKYNAEQCKVNSGSIPFGYCKGPDGRFAIHEANAEVVREIFRKAAAGMPFVDIANDLNSRGLKTSRGGRWNKGSFRLLMNEAYIGVYHFSDTRIEGGMPALIDQGTFWAANERLKANSSVRGRHQDGGDYLLTGKLKCAHCGSYMIGFSGTGKSGELHYYYGCQKRRRERACKKANVPREWIERVVVKAALDYVLRPDVMEWIADAVMDYQEREAASAQLAALTAELEENQKATDNVMKAIEAGIITSTTKQRLLDLEAKAQDLKRAIELEKLSHVRLERDQVLFWLDRFRGGSLQSQEFRRKVIDAFVSVVYLSDDHLRIAFNYSGGSNAEADFDLVMDAEAAAGELSKKFAQGHVASTTQESGEPHNLLRGRVLRPDHAAP

SEQ ID NO: 12762 - protein, 564 aa, synthetic construct
MPRAQKAAIYCRVSTLHQVDKDSLPMQRQDMINYARYALGIEDYEVFEDAGYSGKNTDRPAFQDMMERIEAGEFSHVLVWKIDRISRNLLDFATMYARCKKLGVTFVSKNEQFDTSTAMGEAMLKIILVFAELERNMTSERVSSTMNARAAEGKWNGGRVPFAYRYDRETDSFSIRNDEAKIALELKDIYLRTRSLTYTARTLNEAGRRTRRGYAWTPATVAIILRSPFYRGTYRYNYRDESETTFSFKGRNDWIMCAKHHPPLFSEADCQQIDFWLTKNQRRHGKATHVQRKLVHVFAGLIRCGFCGSNYIASVDRVRASGYQPSMYNCGGRRQKGMCKNRYVTDIRIGGFIFNYISNVIRLRDAFRPQWSKARIQRFLLYGGDFCGASLSDDTLRRVRAALLGSRLSTAEYQPADEQHDDSPTKTHKANLQAELEKNRRALSRLMHLFLYAEDEMPQADFLREKKHLQDTITHLQSELEKAQQSSVFASSLTDEEFLGKAARLLFQSAMVRGGIDFPELAMRVGNLELKNFVNAVIKQIVVLDGHVTQITFVNGETHTFLYR

SEQ ID NO: 12763 - protein, 508 aa, synthetic construct
MKKAIAYMRFSSPGQMSGDSLNRQRRLIAEWLKVNSDYYLDTITYEDLGLSAFKGKHAQSGAFSEFLDAIEHGYILPGTTLLVESLDRLSREKVGEAIERLKLILNHGIDVITLCDNTVYNIDSLNEPYSLIKAILIAQRANEESEIKSSRVKLSWKKKRQDALESGTIMTASCPRWLSLDDKRTAFVPDPDRVKTIELIFKLRMERRSLNAIAKYLNDHAVKNFSGKESAWGPSVIEKLLANKALIGICVPSYRARGKGISEIAGYYPRVISDDLFYAVQEIRLAPFGISNSSKNPMLINLLRTVMKCEACGNTMIVHAVSGSLHGYYVCPMRRLHRCDRPSIKRDLVDYNIINELLFNCSKIQPVENKKDANETLELKIIELQMKINNLIAALSVAPEVTAIAEKIRVLDKELRSASVSLKTLKSKAVSSLGDFHAIDLTSKNGRELCRTLAYKTFEKIIINTDNKTCDIYFMNGIVFKHYPLMKTISAQQAISTLKYMVDGEVYF

SEQ ID NO: 12764 - protein, 571 aa, synthetic construct
MQRAVIYARYSPGPNQTEQSIEGQVRECTKYAELHDLRIVGTYVDRKISGKTDNRREFQRMIDDSEKHIFDVIILYHTDRFARNRYDSAIYKHKLKENGVELRYATTDIPKGPEGIILESIMEGWAEYYSAELSRKIKRGMRESALKCHSTGAGRCLGYRTAEDKSLVIEPEGAKAVQTVFDMYIKGKSHADICRYLNDCGFRTAQGKLFNKNSVTHIIRNKRYIGVYTYDDITIEDGIPAIISKDTFHLAQLEAARRKTAKRPKEPKAEYLLSGKAFCGHCQKPLVGVSGTGKSGNKWYYYYCQESRAKRGCTKKPVKRDWLEREVVERTVAEILQPEVIQRIAKKCYDLQMEDRQDNSDVLFYELKLKDVRKAIKNTMHAIESGVKTKTLPARLQELENEEEALEAELAIAKASDFVITTDQIEFLLTQFAEPWECESEEEYHRRIIKCFVHKVFLFDDKLLIYYNVSRDGKTREQSEAELLEEALGEGFDKRSSGSTKAEPDEPRGRLALLLSLQSIWSAESSFWSVRSTRKNKKEATAQDCSCAVASLCFFIAITDFVIIYQNPARF

SEQ ID NO: 12765 - protein, 464 aa, synthetic construct
MKQANTNIVRVALYPRVSTEEQFLRGYSLKTQEEVLVQYAADHGFKVVGIYRDEGHSARKPAMKRAVMQQLLTDVQAGKIDRILFIKLDRWFRNVREYHKIQEILEANHVTWQATMEDYNTATADGRLKVNIMLSVAENESDRTSERIKFVFDGKRRRKEWCFTGGQDKWPYGYRPEVVDGVKRCVKDPETAPIVQDFWDYVLNYNSVRKAGMYCCEKYGITRHYRSWSCTARNEIYTGTFKGVEDYCPAYISREDWERIILGHETIKKTQRPERIYLFTGLLRCPDCGTTLKATFKSDPRDRNKEYLSYRCGRANINLCAFHHTLSERKIEKYLLKNIRIQLEDYVLAVDAQQNQKKPQPHLQDLVTLNEQLRRLNVIFMAGNLTDEEYASETKRLKQSIEAAKRASQQTTLPNLQAIRNFLSDNVLDLYGTLSKEDKRRLWRSLISEIQVQGTTPVKIIPRP

SEQ ID NO: 12766 - protein, 456 aa, synthetic construct
MRNKEIAPALVRVALYIRVSGEEQKIKGLSLEAQQERLEAYARERGWVIVGIYIDAAKTARKNIHKRTEFQRMMDSVKRDEVDILLFARLDRWFRSVADYYKVMEILQAHNCDWKTTDEEYDTTTANGRLYINVKLSIAQNEADIDGERIDVVFDSKIAHGTVVSGSAPFGFRVNEEKRLEVVPEDAAIVQDAFNYFENTVSQRATVRYVRETYGVNWCDATFRRMLKEKLYTGVYDRGGRYNDQFCPAIIDRQQFDRVQALLTRNVRSAPSGKVYIFTSILTCAECGHKLVGYKSSDYYYYRCNQHFQRGRCSHNHSAREDVVEAWLFDHLGEELERCQLEWDVEAAKKKASVARTDKAALKRKLTKLKELYVNDLIDIEDYKKDYQIYVSALNQIPEPAQEAPPDFAAVRRLLDNSFRTIYDTLTREEKRTLWRSVIKEIRIDNDQNITGVVFG

SEQ ID NO: 12767 - protein, 576 aa, synthetic construct
MKITAPARSARAVSLEAFVDNLNLANVVIYARYSSAGQNDQSIDGQLAKCREYAQQRGYRVVGEYCDRALSGRYAETRPEFQRMISDSVKHAFDFVLVWKLDRFSRDRYDSAIYKKKLRANGVRVLSVTEGVGDSSESVLLEAILEAMAEEYSRQLAQNVRRGMRQNAEKGLSLGGLAPLGYRVVNKQYEINEDEARIVRFIHEQYADGAGQKQIVADCARLGYRNQRGNPLTLASVKRILANERYVGRYDYLGEIVIEDAFPAIVSKDLKKRVRARLKANSKAPGHAKAKVEYLLHGKLFCGECGAPMIGECGRGRHGATYYYYTCAARKKQHTCKKRNERKDELEASIVDYIGSCVLTDSWIDGAAERVVAEYQKSYDVSGIRPLEKQIRDADKEIDQLVDALISATAEAARRRINERIETAEARKQALEADLASLRIASRVQIKKEDIVVWLNQFRTGDRSDLEYRKKIIDLFVNAIYLYDDSFKLFLNVADSAQVTYADALALAPPSVSDFGASGVPEKQLISFWNQLLFFFVLHYRRSTKRLPLYARGAVGASVYLLVQTIRLDGKNRISS

SEQ ID NO: 12768 - protein, 514 aa, synthetic construct
MSMNAVIYARYSSHNQTEQSIEGQLRDCYDYAKRNDLTVIGEYIDRAISGKTDDRPDFQRMIEDAPKRQFERVLVWKFDRFARNMFDSVTYKHELKKHGVKVISAMENIGEGDESVLLEAMLEASAEYYSLDLKKKIARGMRESALKGKFVGGAVPWWCSVNAEHKLIVIDERAVIVKEAFARYDSGEGSKSIVDDFAKRGLRSNRGMPVTLSWLLSILKNRKTIGEYTYNGIEIPGGLPVVVDKPLFDRVQERIARKRRTGGGEATSKTEYLLQGKLFCGLCGSPITAECGQNRKGVVYNYYACSLKKKKHQCKKANERKDFLEWYVVEQTLDYVLTPDRTDYIAEAIVAEYERQFDKSGIKALEQKIALTEGEIQKTMDLCIQATTDAMRKRFMKRCEELDAKKADMEIDLSKLRVAASITYTKEEVRAWLRQFCAGDSFNPAFRRRIIDVFINTVYLYDDKLIIYYNLRDSRQVSYIEAIGASSEIENLRPVPDNKKTAVECSTADKNGGA

SEQ ID NO: 12769 - protein, 588 aa, synthetic construct
MRIVNKIEAKTPQMPRRKRVAAYARVSMESERLQHSLSAQVSFYSSLIQSNPAWEYVGVYADNGITGTKAEAREEFNRMIADCEAGKIDIVLTKSISRFARNTVDLLNTVRRLKELGVSVQFEKERIDSLTEDGELMLTLLASFAQEEIRSLSDNVKWGTRKRFEKGIPNGRFQIYGYRWEGDHLVIHEEEAKIVRLIYDNYMNGLSAETTEKQLAEMGVKSYKGQHFGNTSIRQILGNITYTGNLLFQKEYVADPISKKSRINRGELPQYFVENTHEAIIPMEVYQAVQAEKARRRELGALANWSINTSCFTSKIKCGRCGKSYQRSNRKGRKDPNANYTIWVCGTRRKTGNAYCQNKDIPEQMLKDACAEVMGLDTFDEIIFSEQIDHIEIPAPNEMIFYFKDGRIVPHHWESTMRKDCWTDERRAAKGRYVQEHQLGPNTSCFTSRIRCDSCGENYRRQRSRHKDGSFDSVWRCASGGKCQSPSIKEDALKNLCADAMGLEEFSETVFREQIVCIHITAPYQLSIRFFDGHTFETAWENKRKMPRHTEERKQHMREVMIQRWREKRGESNDNTCDDKPIHGNADQ

SEQ ID NO: 12770 - protein, 526 aa, synthetic construct
MPYCIYLRKSRADAEAELLGEGETLARHEKTLLALAKKLKLPITKIYKEILSGETIAGRPVMQQLLQDVEAGIWQGVLVMEVERLGRGNTLDQGIILNAFKYSSTKIITPMKSYDPNDEFDEEYFEFSQFMSRREYKTILRRMQRGREASVKEGKFAGSIAPFGYRRVKLPQEKGFTLEIEDAEAAAVRLAYELYAYGDPQPDGTFADIGRATIAKRLDQMGIRNRKGGTWATASVTRMLQNPVYIGKVHWNRRPEKKHTENGKIKKTRPLAENYLLVDGLHEPIISEELWNLAQAKMKQHYRPTGVNRIMQNPLAGLVHCSYCGNAMQRRPYLKTGQPASLICHTHFCPQISSPLYMVEGKILEALSLWMKQHEPTWEDESSINVFSTKIMALEHTIADMEQELQGLQFQFEKIFEFLETGIYTPEVFTARNKTLSEKMAEIRSAIEETQAELSNLKAARKNQVSMIPKIKNILDTYETLTPAEKNKLLKEVLDHVEYHKKIKGKKNVSADNFEIILFPKISPEN

SEQ ID NO: 12771 - protein, 574 aa, synthetic construct
MRKKKIDAPKEKPQRAAIYLRVSTAYQVDRDSLPMQRKDLVGYCEYALNISDYTIFEDAGYSGKNTDRPAFQKMMMQIRNGMYSHLLVWKIDRISRNLLDFAQMYEELKTLGVTFISRNEQFDTSTAMGEAMLKMVLIFAELERKTTAERVTATMISRANDGTWNGGRVPFGYDYNKETQTFSVNGDESFIVLEMYDLYEKTDSLVHTARELNDRGYVSRQHNPFSPVSVWTILRNPWYIGTYRYNYYKIPGRKAIKDESEWVVIPDHHTPLVSKERFDRVQKMLDSNARYRNTPGRSATQKNVNVFSGLIWCACCGAAFTASPGKLHASGYRSAKYGCPNVRKTKTCNAKYTSDTVLGEFLLNFILNVINAQKRFDQIKSPADLEAQLLRGDTFKNVAGIDSASVDALYEMLAEYSPADSVLLKKPTVKKNLDPELRKLRADKRKTERALARLDHIYLYSNKQMSDKEYLIKKNDLMNDLKEQDKSIGLLTSESWAQSLSDDDFLEQASSFIMSQRLQEREYIYFQGLAECTEPSVLRSFFLSIVDSVRMRNGHVETLTFKNGISHKFTYLAI

SEQ ID NO: 12772 - protein, 569 aa, synthetic construct
MKQSSNKKSREATAFLYERLSRDDNLEGESYSIGNQKKLLTKVAKEKGYTNLVHFLDDGISGVTMNRPGFVEMMQQLEQGKASAVFVKDLSRLGRNYIEVGRLTEEFFPDHDIRLVAVSDNIDTAEGENELAPIRNLFNEWYARDISKKRRISNKIKGNSGEPMGLPPYGYIKDPNNPKHWVIDEEAAQVVRRIFDMTLEGFGTEQIATQFEKEGILTPQAYWIQKGIGRPGKTKTRPATKWNGSTITHLLYQQEYCGDVLNFKTYSKSYKNKKRIHNDPENWVVFQNVHEPIIERAVFEQVQQKRGKMRKRRTSNGEHNMFSGLLVCADCGCNLHFHFNQGNPEIKYFNCSNYKGNRGTCQSTHYIRVDFLEEVVLGEIRRLTKFASLYEDDFLKAVIGHSQQADEADRKLKEKELKALLARDEELDDLFERIYEDNVSGKISDERFSRMSRRYEDEQKELTEKIKQLRSEIEKQSSRTMTTDMFISLVRKYTRAKKLTPRMLNELVEKIEVFNAEKVNGVWEQRLSIHYNCVGTIEIPSALPLPTPDVSVNTRKGVVVNYAPCDVAI

SEQ ID NO: 12773 - protein, 504 aa, synthetic construct
MTAVIYARYSSDNQREESIEGQIRECTAYAEKNDITIVKHYIDRAISAKTDNRPQFQQMIKDSDKKLFDIVLVWKLDRFARNRYDSARYKTQLKKNGVKLMSATEIISEGPEGIILESVLEGYAEYYSADLAEKVVRGQTENILKGRCNGGRGTFGYTLDSERKFHIDPLASPFVLESFTKYRDGLTMKEIRDWLNENGIKNPVGGEFTYNSVEHMLKNRRYIGELKFRDVVVPDAIPPIVPLELFDDVQEKIAKNKKAPARRKAEDDYLLTTKLHCGCCGALMFGESGTSRTGEVHRYYKCATVKKKKGCKKKTVRKQWLEDLVVNQTMQLVRDDAAMESIIAKVMELQDRENTNLPLYEKQLRDAESGIQNMLNAIQAGILTSSTKERLEQLEETKRELEARIAEEKLAKPKIKEEFIRFWLMRFRKLDMSLKDQRQALVDTFINSIYLYDDKVLIAFNYKEGTQTITFEEAAQAASKENGSDLDCFTAPSKIPRLTVENAV

SEQ ID NO: 12774 - protein, 498 aa, synthetic construct
MEIQIREGNREQKRKLRVCAYCRVSTDADEQENSLENQIRHYETVIKANPSYEYAGVYSDFAISGFKEKRPGLQKMLADAQKGKIDLILTKSVSRFARNTSIVLEATRKLKELNVGVFFELQNINTLSGEGELMLTILAAFAQAESESGSAGAKMVYQRKYEAGIPVQYLERSFGYTKDERGVYIADESEAVWVRKIYEMAADGYTPAAIKRYLNENGVKTVGGTKWIDSTVFRLIENEIYKGDYIMHKHFVNEERKLVRNRGEVDAWYIEDDHEAIVSPELWQKAQDAIEAKRDYLAEGSVIEEFTEDNYPYMNRIFCAKCGHPLYKRIYSNGNRLNWGCSGTKRYGKSFCEGINIPDGVLRKAWHFDGNMYIDEKPSVKGTKEFTYLKESSWKRRHKKKVPEAIPENTEEAYPYRKKIFCGLCGSRLVRHVNPKSHKVIWICNGAKRKGVAFCRGTRIPDSVIRGWGEIKKDIYIQRKDDKNGKKRYSYTSKKPTA

SEQ ID NO: 12775 - protein, 514 aa, synthetic construct
MRRKKVEGGNRLVAYYRYSGGSGQTEQSIEGQRRDCENYARLHGLTIVHEYIDRHISGKTDDRAAFQQMMNDGDKGAFDMVICWKTDRFARNRYDSAVYKKRLRDNGIEIFYAAESNVDGAEGIIIEGLMEALAEYYSAELAEKMRRGMRESALKGQAINRCRSLGLTTDENKKYVIDEKTAPTVRFIFEHYAAGESSASIVEQLNAKGLRTSQGNPFNKCSIPRIIQNEMYRGVYTSKAYNVRIEGVIPAIIDDDLWKRAQAMMKTNRQLKAKYEPKAEYLLSGKLFCAKCGCTMKGVSGHSGGNDEVYRYYACSNPQCRKRNIPKDDLEGKVIRSICDHLLQPETMELLAETMVDVQKADMEKPNAERDVLEQELWDVRRRSKNIMDAIETGSANPQLVARLDDLTQQENTLTYQLSTMEAEKPLLFTKEQYLFLLQQFYAQPTEQDDAYKRRLINTFVTNIEVSDSELLIYFNISEETENKNKNASQSNFDKSSSTEKRLVRVARIELTAS

SEQ ID NO: 12776 - protein, 534 aa, synthetic construct
MKKRINTNSAARAVIYARYSSANQRDCSIEQQVEKCRELAAREGVTVIEIYADRAVSGKTDRRPNFQRMMKDASLRQFDVVLAWKSNRMGRNMLQAMMNEEQLRSNGIRTIYAEEDFDDTAAGRFALRNMMNVNQFYSENMAEDISRGLMDNASKCMSNGSLPLGYKTGKDQKVVLDEAEAAIVQEIFTRVSCYEPFIDIARDLNRRGIKTKKGAEWGRSSFHTICRNERYRGIYIYRDIRVEGGMPRIVSDELFYKVQEVLKVKKNPQGRRKRSGYEEYLLTGKLYCGHCGSTMTGIAGTSKTGAMHYYYTCQKRRTDHSCDKKAVRRDQIEKAVAIAIQQQLLTDENIQMMADETMAYNARTEIKYRLQSLQQQLYSNETSTANIMKAIEMGIITDTTKARLLALEQEHGQLLAKIDTAKAEMVPINREDFVSLLDIYRTGDVNNKKYLAALFDTFLVRVDLYDDHFKITFDPTGGKMPVDIPIGAEDSPESPGDSPESSDFEASPQDAEKFVLALHNRTKILERLFGDFLF

SEQ ID NO: 12777 - protein, 572 aa, synthetic construct
MASRIAEKLAAKKAAIYIRVSTHWQVDKDSLKVQRRELIAYVTLVLGITDYVVFEDPGYSAKNTDRPEYQAMMDRIRTGEFTHLVVWKIDRISRNLIDFAAMHDELQSLGVTFVSKNEQFDTSSAIGEAMMRIILIFAELERKTTAERVTAVMLSRASDGQWNGGRIPFGYSWSKETKTFSIVPEEAKAIRRMAELYEQYQSLLYVAKYLNDAGIVTKTGGQWTPTTVRTILTNPWYIGQYVYNVHSDGKGIEKRDSDEWITVENHHEPILNEDVFCRMRFLLTRNKRGGVPSHKTYVRKNIHIFAGLLRCGQCGSNMTANLDRRRANGFRPSQYACGSRRRKGTSCTNKYISDTTLGPFVLNYVANIIRASKNSSEATTPEVLERKLLRGEAFEDVASVSTDALGQLLDAFRSAGDAVEYRPQIAFSGDDNSIHEIDTLRARRRKLDNALARLNALYLYDDEAMPEKDFVMQRGQITKQLEEVNARIEELQNQESSEELGDDFIGKASYYIMANKLIEDRYIDYEKYIRAIDPSIPRSFLQQIIDHIVVNDGRVTSITFKNGATHTFTYKT

SEQ ID NO: 12778 - protein, 541 aa, synthetic construct
MRIAIYSRKSKFTGKGESIGNQIEMCRDYIATNYNGEEHFIQVFEDEGFSGKNLDRPQFKKMMEIENVIPFDLIVVYRLDRISRNVGDFASLIEKLNKKNTSFVCVKEHFDTGNSMGRAMMNIAAVFAQLERETIAERIKDNMYLLAKEGHWLGGTTPLGYKSIEVTNGKRTHFELIIDESQIDLVNIIFSKYKQLGSINGVETYLFVNGYKTQKNNYWHKSNVKRILTNPIYCIADIDSLNYFTELGCNVCFTLDDCNGKKGIYPYNRFSGQKREMQSYDRWIITISEHQGILTGKEWVAIQQQLKANSKDGFGGKANERRSTSNTSLLSGILFCSCGAYMRPKKYPSGNTFYICENKMDKKITECDNSNINADELDEIVLNELFSFDIKDGVVDSQIQNLKEQITNIDNDLQKQIGRLKKQIETNKNTVNKFMNIVALSIENNTPEQVVEVYNQKINELLNQNKITQKRIDELQDTNIIQAKMNDRLNSLTDAMAYLKENFDKLTIVEKRGFVKEIVDRIVWDGNNINIFIKGISELSE

SEQ ID NO: 12779 - protein, 502 aa, synthetic construct
MEIQIREGSREQKRKLKVCAYCRVSTDADEQENSLENQIRHYETVIKANPDYEYAGVYSDFAISGFKEKRPGLQKMLADAEKGKIDLILTKSVSRFARNTSIVLEATRKLKELNVGVFFELQNINTLSGEGELMLTILAAFAQAESESGSAGAKMVYQRKYEAGIPVQYLERSFGYTKDERGVFVADEAEAVWVRKIYEMAADGYTPASIKRYLNENGVKTVGGVQWVDSTVFRLLENEIYKGDYIMHKHFVNEERKLVRNRGEVDAWYIEDDHEAIVSPELWQKAQDALVAKRDYLAEGSVIEEFTEENYPYMNKIYCAKCGYPLYKRIYSKGNRLNWGCSGTKRYGKTFCDGINIPDGVLRSAWHFKENTYIAEKALDKGVKEFTYLKEQSWKRRHKKKQPPAIPENTEAEYPYREKIFCALCGSRLVRYVNPQSHKVTWVCSRRKRKGKDACDGTRIPDTIIKGWGEIKKDIYIQRKDDKNGKKRYSYTSKKPEGADRA

SEQ ID NO: 12780 - protein, 464 aa, synthetic construct
MARSVTVIPARSQKVRTGHKAVQEKKIRVAAYCRVSTDQEDQLHSFEAQVEYYTKYINEHENYEMAGIYADEGISGTNTKKREQFKKMIADCEDGKIDLVITKSISRFARNTQDCLAYSRKLKNLGIGIIFEKENINTLDSTGELLFTILSSLAQDESRNISENCKWGIRTKFKNGEMHLNTFKFLGYDKDENGKLDINKEQAKTVRRIYRDFLIGINPAQIAKELSEEKVPGCLGQTKWYPSTVTGILKQEKHMGDALLQKTYTADFLTKRQVRNNGEIAQVYVKDSHKGIIDKQTWNAVQEEFDRREKFMESHGTDRYSYGADCMPFCEKVFCGECKSLFTRHSWRSRGIVQWQCKNHRKDGKVACTNAYVDNADLEKGFVKAFNRLVTDRDKHMERWQQMKSDGTPLEKIRAGQMMEAVGNEPLTRFVPEIAQLVLCEVTVLGAKKYEFFFLEGSRVKVSV

SEQ ID NO: 12781 - protein, 573 aa, synthetic construct
MQKNQTKKAALYIRVSTHYQIDKDSLPFQRNELINYAKYALGIDDYAIFEDAGYSGKNTDRPAYQDMMRRIRAKEFSHLCVWKIDRISRNLLDFAAMYEELKKFNCTFVSKNEQFDTSSAIGEAMLRIILVFAELERKLTAERVTSIMYSRANKGLWNGAPIPLGYKWDAKGKYPVIDEDTAVVVRYIYDQYERIHSTMKLSDKLNRENIKSARGGEWTGTTVKGILRNPFYKGTYRYNYKTQTGRIKPVEEQIVHEDNHPGIIDKEQWDRVNKILDENSTRSVAQLRSNVKYTHIFSKLLRCGQCGHTMGGGLDRARSDGYRPSRYYCTSHTRKAGCTNGVYSDVYLGPFVFNYIANLVRAQRALTDSQKPRDLERMLLRGKFFDSVAGIEQQGLLDTYNTILYGSGEDVMLQPSPEIAAQSASELELLDRDQKKYERALERIEQLYLYSEESMPEKDYVLKRNELKAMLDNIAERRAEVNSRLGLAPASSDFLEKATYFYLTNSLNQKRSLDFRKMVDTFEPKMLQDFLCSVIDHIVVVDGHVASISFKNGLTNKFIYKATKPPKSASTKP

SEQ ID NO: 12782 - protein, 538 aa, synthetic construct
MSTAPNVTIIPAKVQTAENRSKYHQLRVAAYCRVSTAQEEQQNSYQVQIAYYTDLINRKKEWTLAGIFADEGISGTQTKKRTEFNRMIRMCRNQKIDLVITKSISRFARNTVDCLEYVRQLKDLGIGVIFEKENINTSTMTSEFMIALYGSFAQAESESISKNVSWGKEKAYCEGKVQFQYKYLLGYKKGEDGKPEIVPEEAETVRLIYTLFLDGYSMSRIKKLLENKGILTSQGKKVWNESLIRSILKNEKYVGDALLQKTFTSDCITHKVVKNHGERPMYLVTDHHDPIIDRDTYNRVQQELARRSSKRKVSDKTITEQGKYSSKYALTELLICGKCGTPYRRTTWTSRGKKLIVWRCISRLEHGKRYCPDSPTIKEEQLHKAIIRAINNYYSCGNDVEKILKANIGNVLECQGQEEIIAAENRLKEIDQARNDLISLIATGGCDEDKLDSEFEKLYKEEQSLSERLAMLKSKNQTSAETQAKLDKIIDMIEHEKFELETFDNVLIRKLIECVKVLSKTEILVIFKGGYEVRTEIE

SEQ ID NO: 12783 - protein, 498 aa, synthetic construct
MENKRAVIYARYSSDRQREESIEGQIRECTAFAKRSNLDVINTYTDRALSARTDNRPSFQKLIRDSNKRIFDYVIVYTLDRFSRSRYDSAVYKNKLKKNGVKVLSAKEHIEDTPSGIILESVLEGYAEYYSAELAQKVKRGLTDNVLEHKWTGTCIPFGYKKDDANHLVPDAVTSPLTPRIYEAALGGKSRVEIARWLNEKGYITTYGRRFRPEQVTKILKNRIYTGTFTWDGKQYPAFTTPLITEELFDKVQKTFRKNTRKNPDDYVLTGKIYCGRCGSTMTGMSGTSKSRKTYYYYRCSSMNHSARQAKEPCGAKNVSRDMIEKLIYDKTLQILNTPEWRKEIAHQAMLAQSDDSEELKIKAMEQELSDAKRKITNIITAISNGISSEELAKTLHDLEARKKELESQISHEQLVKKDLTLTEDAIEFYFVQLARKSAGGSDLNVFWDFINHIVVYDDYIEVFYNYVANKKIANPVIIQCSPRNVLVDHQGFEPRTP

SEQ ID NO: 12784 - protein, 464 aa, synthetic construct
MARSVTVIPARNRQCETGRRAVQEKKIRVAAYCRVSTDQEDQLHSFEAQVDYYTKYINDHENYEMAGIYADEGISGTNTKKREQFKRMIADCEGGKIDLVITKSISRFARNTQDCLAYSRKLKNLGIGIIFEKENINTLDSTGELLFTILSSLAQDESRNISENCKWGIRTKFKNGEMHLNTFKFLGYDKDENGKLVINKEQAKTVRRIYRDFLIGINPAQIAKELTEEKVPGCLGQTKWYPSTVTGILKQEKHMGDALLQKTYTADFLTKRQVRNNGEIAQVYVKDSHKGIIDKQTWNAVQEEFDRREKFMESHGTDRYSYGADCIPFCEKVFCGECKSLFTRHSWSSRGIVQWQCKNHRKDGKVACTNAYVDNADLEKGFVKAFNRLVTDRDKHMERWQQMKSDGTPLEKIRAGQMMEAVGNEPLTRFVPEIAQLVLCEVTVLGAKKYEFFFLEGSRVKVSV

SEQ ID NO: 12785 - protein, 533 aa, synthetic construct
MKAVIYARYSSDNQREESIEGQVRECQSFAERKGYTVIRTYIDRALSGTRADNRPQFQQMISDSTLREFQYVIVWKIDRFSRDKFDSVKYKYALKSSGVSVISATEPIDGSPEGQMMESVFEGISVYYIKDLAQKTSRGMTENAIKGKFNGGTLTFGYTIDENHHFQLDPVNAPIVLDVFTRYSEGETIHSILDDINSKMSNNGRKFTYHFLNWMLNNRRYLGEYKFQDTVNNEAIPPIISQELFDKCQHRLNVNKHKAGSFKKNKEKYLLTGKIFCGICGATISGISGTGKCKSIYRYYKCMNVKKHKCNKKPVQKELIENIVLNAALDIFKDKALIRKISKACFDLQSKESPMLPALKRRLRENQKEIKNLMNAIKAGIVLKTTKSELEKLEAEQEQLEINIAMEKLVKPVIPQEKIQAWLMNFAAADLSDQSQKQRIIDIFVNSVYVYDDRVVIFFNYKDGERYVDFSTLDDLENPAGSNEKKTNTHENECSPLIKSGDPSGNRTRDTLIKSQRKIMPVNGSAMRFRCLN

SEQ ID NO: 12786 - protein, 521 aa, synthetic construct
MKKVQVIPATLQNYTEKSFHNQKKRKVAGYARVSTDRDEQLTSYEAQVEYYTHYIKGRSDWKFAGIYTDEGISGTNTKHREGFKRMIADALAGKIDLIITKSVSRFARNTVDSLTTVRKLKDKGIEIYFEKENIWTLDAKGELLITIMSSLAQEESRSISENVTWGHRKRFADGKVSLAFSHFLGYDKGPNGNLVVNKEQAKIVKLIYRLYLSGYTFHSIAKELTEQKIPTPAGCKIWRANTIRSILMNEKYKGDALLQKKFTVNFLTKESKKNEGEVLQYYVEHNHEAIISPQVFDWVQEEIKRRRGGRSRYSGVSIFSSKIKCGQCGGWYGAKVWHSTDKYRRTIYRCNGKFKSYCQTPHLTEDDIKEAFVRAVNQLIENKADVLDSITLLKERLTDTEDLEEERDRISTDLNLLADKIKQLIAENARVAQNQDDYDRNYNELVSRYEAAKTQYDKTCEAIQYRKARSRQMDSFIKELRNQDLIKEFDARLWGSLVDFITVYSKDDIRVTFKDGTEIRA

SEQ ID NO: 12787 - protein, 468 aa, synthetic construct
MPRQILHIPAQQRSVMVGGARVPQRKLRVAAYCRVSTAEEEQLNSFENQVAYYTAYINNNPEYEMVDIYADEGISGTSTKRRDEFNRMIADCKAGKIDLVITKSISRFARNTQDCLNYSRKLKDMGIGIRFEKEGINTLDGSGELLFTILASLAQDESRSISENTTWGIRSLYKKGILHLNTNRFYGYDKDENGRLIINEEQAEVVKWVFESYMDGTSPDVLARTLNEQQVPGCMGKPKWTVDTIMGILQNEKHMGDTILQKTFTADFMSKKMVKNEGQVAQYYITDDHEPIVSKELWQATQQEIRRRKEYMKVHGLRTMGRYTDTQPFTNRVFCGACGDLYWRRRMQRLGYVKYQWKCKQKCLGKESKGCINQDIWESDLHQTFVMAWNSLLEQRETLVENWNAQLASEDPLVRFRAKQFMELTKGKPLDDVDFQLVNKVLDHAEVLPTGRVRYAFLDGTTIEVTFP

SEQ ID NO: 12788 - protein, 572 aa, synthetic construct
MASRIAEKLAAKKAAIYIRVSTHWQVDKDSLKVQRRELIAYVTLVLGITDYVVFEDPGYSAKNTDRPEYQAMMDRIRAGEFTHLVVWKIDRISRNLIDFAAMHDELQSLGVTFVSKNEQFDTSSAIGEAMMRIILIFAELERKTTAERVTAVMLSRASDGQWNGGRVPFGYSWSKETKTFSIVPEEAKAIRRMAELYEQYQSLLYVAKYLNDAGIVTKTGGQWTPTTVRTILTNPWYIGQYVYNVHSDGKGIEKRDSDEWITVENHHEPILNEDVFCRMKFLLTRNKRGGVPSHKTYVRKNIHVFAGLLRCGQCGSNMTANLDRRRANGFRPSQYACGSRRRKGTSCTNKYISDTTLGPFVLNYVANIIRASKNFSETTTPDVLERKLLRGEAFEDVASVSTDALGQLLDAFRSAGDAVEYRPQIAFSGDDNSIREIDTLRARRRKLDNALARLNALYLYDDEAMPEKDFVMQRGQITKQLEEVNARIEELQNQESSEELGDDFIGKASYYIMANKLIEDRYIDYEKYIRAIDPSIPRSFLQQIIDHIVVNDGRVTSITFKNGATHTFTYKT

SEQ ID NO: 12789 - protein, 569 aa, synthetic construct
MKQSNNKKSRDVTAFLYERLSRDDNLEGESYSIGNQKKLLAKVAKEKGYTNLVHFLDDGISGVTMDRPGFVEMICQLEQGKAAAVFVKDLSRLGRNYIEVGRLTEEFFPNHDIRLVAVSDNIDTAEGENELAPIRNLFNEWYARDISKKRRISNKIKGNAGEPMGQPPYGYIKDPNDPKHWIVDDEAAQVVRRVYSMTLEGFGTEQIAAQLEKDDVLTPRAYWLTKGIKRPGKGKQQPPTKWNSSTITKILSLQEYCGDILNFKTYSKSYKNKKRIDNDRENWVVFQDVHEAIIERAVYEQVQQKRGKIRKRRTNNGEHNMFSGLLVCADCGSNLHFHFNQGNPEIKYFNCSNYKGNRGTCTSTHYVRVDFLEEVVLGEIRRLTKFASLYEDEFVKAVIGHSQQAEQTDRKLKEKELRTLLARDEELDGLFERIYEDNVSGKLSDDRFAKMSRRYEDEQKELAEKIKKLRSEIEKQSSRSMTTDMFIGLVRKYTRARKLTPRMLNELVEKIEVFNAEKIDGVWEQRLRIHYNCVGTIEIPTVLPLPIPEVSVNTRKGVVVNYAPCELAV

SEQ ID NO: 12790 - protein, 508 aa, synthetic construct
MKKAVIYARYSSDRQREESIEGQIRVCEDYARKHDLSIIHIYTDRALTGRTDKRPQFQMMIKDAAKMNFEIVLVYKLNRFARNRYDSARYKHKLKTYGVKLVSAMENIAEDASGILLESVIEGMAEYYSAELSENVLRGMTENVLEGKWPGGVLPYGYTLDANHQLVLDPIRSEAVRIAYRLLLSNHSKKYILNYLNERHYTSVNGGKISYSNLHSMLTNERCTGAMIWRGIRKENAFPAIIDKDTFDKAQIILERRKRNRMKSTNSDFFLTGKLFCGKCGARMIGTSGTSKAKSTYYYYACSKRLKKKCDTKNIRKDVLENAVCSVTTQILADKRAVKAIAKQAVEIQKNKKDSPELMAIKQQISKDSRKLQNCQKAVENGLESFTITNRIKELENNLIKLEKSLRRQTLLEKGPELTEVQITFFLESVAKQIKNADKYKRILLTSLIRNVIVYDDYIEVQYNYKDELPILRNTVKIKSSSENLLAEQVGFEPTEPYGSTDFESAPL

SEQ ID NO: 12791 - protein, 579 aa, synthetic construct
MRNKSLAGRANNRAERPRKVAIYIRVSTTHQIDKDSLPMQRKDLIAYCELILGIEDYEIFEDAGYSGKNTDRPAFQEMMQKIRAGSFSHLLVWKIDRISRNLLDFAEMYEELQSLRVTFVSKNEQFDTSNAMGEAMLKIILVFAELERNMTSERVTATMISRANQGLWNGGRIPYGYSYDAETSVFSIIQDEADVCQLMKTDYFEHKSIIHTARLLNDKKIPTRSGALWSPTAAWKILSSPFYAGIYRYNHYKGTENRTINPEEEWVLIPDHHPAIFTLEEHEKLCNILDTNKRTANLPGQKHRAKNVYVFSGILYCGKCGSRLVSTPGRLQADNFRTATYSCPKKRKTHECDNPSINDLIVGEFIINYILNMLNAKSSFSSINSPAELEERLLYGGSFKDVQHISEDGLNEFYNLLSRYDSDSSYIFSVKRPRKKKAAVNPEVEALRKDKEKQERALKRLQDLYLYSERAMTEKDFIIQKNEISSRIQEINTRLGMVTHDANSTLSDEDFVRQASHLLITKKLIGRDYIYYKTLAQTVSPDVLKIYMETILDSVYVIDGRISSIVFRNGLTHTFIYQK

SEQ ID NO: 12792 - protein, 523 aa, synthetic construct
MRFFSYGRKSVFSDKSDSIDNQFRMNREYCESKFSGQVDSWQQFSDEDFTGANTSRPDLQRMLSFIKGGFCDVLVVYQLDRLSRAVRDFANIYALLEEHGVMFISIKENIDTTTPIGRAMMYVTVVFAQMERETIAARVTDNMLGLAKKGYWTGGNPPVGYVRKHIVVNGKKHCSIEVDPDGARYVTQIFDTFLAYNCSLQGMETRFKNQGIRTQSGKFFSTTQLHKMLTMPYCVEATPEVYDFYAAKGCIMDPGSPREMWDGSVGVIIYGRSTEKNKKHQAQPPEKWTVCLGKHKPFMPAEKWLAVQSRFTQNKCIKDAKWPVPLLKGVLRCKCGNLMQVSRKKKVDGTCSSWYYCRKRMRQGVDACDMGQIKCDLLDEEVLELFRGITADPTLIQKFVKAEAPADVPDLKAAQARVSACERKIGRLAASLALAEDSAASKYIIAEMERLDVELGALKREASLAEMESHRAAASAKDAKATAAEIAKLIHGLDGFDDKEKNAIARAVIQECTWDGERLFIKL

SEQ ID NO: 12793 - protein, 555 aa, synthetic construct
MARKKNIAAGLDAVIYARYSSHNQREVSIEQQIAECTKHAAALGLRIVGTYEDRAISGKTDNRPRFQQMMRDAEKGKFQAVVAWKSNRIGRNMLQAMVNEAKLDDYGVKVFYAEEDFDDTAAGRFALRNMMNVNQFYSENMAEDITRGLYDNASKCMANGRQPLGYKRGEDGRVVLDEANAAVVREIFTRVAAGDLFVDIARDLNAQGIKTSKGANWNKGSFQSICQNERYRGIYIYGDVRVADGIPRIVSDDLWYRVQEAMRMKKNPVGTRHRVGAEDYLLTGKLRCGHCGSYMTGVSGTSRNGELHYYYTCQKRRTEHACDKKNIRRDVIEPAVAQAIKMYCLTDDVIEWMADRTVEYWEKHDNDLQIEALEQQLEENKKATSNMLKAIEMGIITEATRTRMVELETEQSRLSVQLNAAKEDVVKIDREQIISYLELLQQGDIHDRDFQMELFKNFLVAVYVYDDNRMKLVFSCMGDQNSVEIPLETGEDPPDGGLSPDAKMFVLTPDSSTKKALYFVGSMVLFFLRGQIFGAALLRLHVFWAFCEKPGCSRR

SEQ ID NO: 12794 - protein, 491 aa, synthetic construct
SVDKKDSISIESQIEFCKYELKGGNCKEYKDKGYSGKNTERPQFQQLMRDIESGLVRKVVVYKLDRISRSILDFAKMMDFFQKYEVEFVSSTEKFDTSTPMGRAMLNICIVFAQLERETIQKRVQDAWYSRCQRGFKMGGKTPYGFRTEPYVMDGVRTKKLVIEPTEAAFVRQMYEMYADPQVSLHDITKKLTADGMRTYHGRPLSRATLSVILRNPIYVMADLDIYEFYKSQGTDIYNDAADFAGTNGCYYYQGKGNTEDKHKHLQGQTLVLAPHEGFIPSELWLKCRKKLLASHTYQPARKARNTWMAGKIKCGKCGYALMSAHSNGILYLRCTVHADSKACPGCGCVKLHELEAVVYGAMVKKLKDFKTLTGRNKAAKISPKLTAKRLELAQVESEIEKLLDTLTGASPVLLSYANSKIEELDARRQSIANEIAKLSADAVPMEKMESISGYLDDWENVSFEDKRQVVDALITVIRATNEKVEIEWKI

SEQ ID NO: 12795 - protein, 528 aa, synthetic construct
MLDNSNVAPGKNKTLRCAIYTRKSHEEGLEQEFNSLDAQRESAEHYIEAQRMRGWTALPDRYDDGGFSGGNMERPGLRRLLADIDAGKIDVIVVYKVDRLSRSLLDFMKMIDLFNEKGVSFVSVTQHFSTTDSTGRMFLGILITFAQYEREVIAERIRDKVAAAKRRGKYCGGVPILGYDVDRDNKKLLVNPDEARTVQYIFRRFIQIGSAKKLGQELNEQGYRTKAWTTKKGKVREGSEWNTGHIYRLLNNRIYIGEIAHKDRSYPGEHEGIIDRATWDKVKAILEDNKPVKVSMARTKMVAPLKGVIRCGHCGCAMGPTYARKNGRHYTYYICQKDSKRTVSRCPLKRIPAGDIEQAVVEQLSAVFRTPTLVAKTYFAARDIEQAERERLFKQKAQLEMELSQAREQALELMRPGSDQPGKAEMLTTINRQAVELSKQLTHVSERCRAYRGNSITEQDVSEAFQNVEGFWEDLFPVERNRLIRLLVDKVEIRETGIDMELRTNGLTTLIAELAGLACEVTERRASR

SEQ ID NO: 12796 - protein, 569 aa, synthetic construct
MKQSSNKKSREATAFLYERLSRDDNLEGESYSIGNQKKLLTKVAKEKGYTNLVHFLDDGISGVTMNRPGFVEMMQQLEQGKASAVFVKDLSRLGRNYIEVGRLTEEFFPDHDIRLVAVSDNIDTAEGENELAPIRNLFNEWYARDISKKRRISNKIKGNSGEPMGLPPYGYIKDPNNPKHWVIDEEAAQVVRRIFDMTLEGFGTEQIATQFEKEGILTPQAYWIQKGIGRPGKTKTRPATKWNGSTITHLLYQQEYCGDVLNFKTYSKSYKNKKRIHNDPENWVVFQDVHEPIIERAVFEQVQQKRGKMRKRRTSNGEHNMFSGLLVCADCGCNLHFHFNQGNPEIKYFNCSNYKGNRGTCQSTHYIRVDFLEEVVLGEIRRLTKFASLYENDFLKAVIGHSQQADEADRKLKEKELKALLARDEELDGLFERIYEDNVSGKISDERFSRMSRRYEDEQKELTEKIKQLRSEIEKQSSRTMTTDMFISLVRKYTRAKKLTPRMLNELVEKIEVFNAEKVNGVWEQRLRIHYNCVGTIEIPNALPLPTPDVSVNTRKGVVVNYAPCDVAI

SEQ ID NO: 12797 - protein, 540 aa, synthetic construct
MKQPYNTTIYNTALYLRLSRDDELQGESGSIQTQRMMLRQYAAEHGLTVVDEYIDDGWSGTNFERPSFQRMIDDIEDGKINCVVTKDLSRLGRNYILTGQYTEIYFPSKGVRYIAINDNVDTINGESELAPFLNILNEMHARQTSKKVKAAMHTRFANGAHYGAYAPLGYVKDPDKKGHLLIDPETRWIVEKIFDLAVHGRGAASITRILVEEKVPTPGWLNYERYGTFANIYAGAPAEKAYAWTIAQVKSILKEETYIGHSVHNKQSNISFKNKKKVRKPQEEWYRVENTHEAIISEEVFQKVQELIASRRRKRRNGTTQIFAGLIKCADCGWSLAYGENKQNKNPYGYYHCSKNGQGLRQCSMHYIRYDVLYAYVLARLQYWSMLAQKDEDKLLKRLLNASDRERNSAKKKQAAELKKAEKRKAEVDGLFAKMYEDWSAGRITEYNFNMLSEKYQNEQKELETKIRQLHETMEAAVQTAADAEKWIALMKQYVNPVELTAELLNTLIEKITVHEAVKGEDGSREQEVEIYYRFIGKID

SEQ ID NO: 12798 - protein, 547 aa, synthetic construct
MEATAATLERRVRVIPATRKPEELHRDHDGKMRVAAYCRVSTDSEEQLNSYEAQKTYYTQKIQDSPDWEMAGIYADEGISGTSLKKRTQFNKMITACKRGHIDLIITKSLSRFARNTVDCLDTVRLLKANGIGVYFEKENINTLTESSEFLITLFSGFAQAESESLSKNVAWGKQKSAEAGKVTFQYKKMLGYRKGADGQPEIVPEEAEIIRRIYHRYLDGCTLGQIKRELDEDGVPTAQGVERWSPSIIHNILTNEKYIGDALLQKTYVTDCINKKVKKNRGERTMYYVENSHPAIVSRDLFNQVQQEMTRRSSKRKVLQKRGKTELGKYSGKYALTELLVCGECGSPYKRVTWARNGKKRIVWRCVSRLEFGTKYCQHSPTLDEGKLHSAILAAMNEYAAIRQEVCPDVLAMAEEARQALSQAGARLLQLKKRMDAVSREQSDVLDRLLVNMADTELNARMKALTDEKESLKAQIADAQQAEVDLEEQAARRRQMWDSIMECAAGYTEFDNELVRQVIQKVMVEDAETIHIHFRDSDVVLEQKVE

SEQ ID NO: 12799 - protein, 517 aa, synthetic construct
MAQVKIIAPQTREAEHLRVAAYCRVSSDSKDQLHSYAAQIRNYTEEIAQHDGWELVDVYADEGLTGTRMDQRDDFNRMMRDCRKGKIDRILVKSVSRFARNTRDCLSALRELSAMGVSVRFEKENIDTKTLTTELMVSVSGSLAQQESISISANQKMSYQRRMERGEFITCTAPYGYRIVNKKDLEIVPEEAATVRWIFDAYLKGRSSGWIAEQLTAKGIPSQSGAECWRETGIRYLLTNEKYIGDALSQKSYSCGFPFVQKRNHGERLQYYTENSHPAIIDRDTFERVQVLLQKKAQKEKKRREKSPLALKIVCGNCGTVFQRRSSQSGYVTWVCRTHDRHAADCPVGRIPEAEIHAAFLRMYHRLKSNADIILAPALRQLNTLDTILRQNHPQVLAINRAIAEATEESHKISTLRANGLLDADICAARMNAISARLAQLRGERRRLTENEAIDETMDALRKVEQTLLNGPERLDGFDEELFERLVEKIIAETQTRIRFRLYGGLELTEQWEVAAR

SEQ ID NO: 12800 - protein, 569 aa, synthetic construct
MKQSSNKKSREATAFLYERLSRDDNLEGESYSIVNQKKLLTKVAKEKGYTNLVHFLDDGISGVTMNRPGFVEMMQQLEQGKASAVFVKDLSRLGRNYIEVGRLTEEFFPDHDIRLVAVSDNIDTAEGENELAPIRNLFNEWYARDISKKRRISNKIKGNSGEPMGLPPYGYIKDPNNPKHWVIDEEAAQVVRRIFDMTLEGFGTEQIATQFEKEGILTPQAYWIQKGIGRPGRSKIRPATKWNGSTITHLLYQQEYCGDILNFKTYSKSYKNKKRIHNDPENWVVFQNIHEPIIERAVFEQVQQKRGKMRKRRTNNGEHNMFSGLLVCADCGCNLHFHFNQGNPEIKYFNCSNYKGNRGTCQSTHYIRVDFLEEVVLGEIRRLTKFASLYEDDFLKAVIGHSQQADETDRKLKEKELKALLARDEELDGLFERIYEDNVSGKISDERFSRMSRRYEDEQKELTEKIKQLRSEIEKQSSRTMTTDMFISLVRKYTRAKKLTPRMLNELVEKIEVFNAEKVNGVWEQRLRIHYNCVGTIEIPSALPLPTPDVSVNTRKGVVVNYAPCDVAI

SEQ ID NO: 12801 - protein, 478 aa, synthetic construct
MTNQAEKTSYIENVAAYIRVSTQEQKLHGISIEAQEEKLNEYADSHGMKIVKFYKDEGVSGRKLIRKRPALQAMIQDAEKGNFRRIIFIKLDRFFRSVAEYHECMKRLAAGGVIWTATEEKYDLSTPSGEAFVNMKLTMAQFEADQVGERIRMINEYKVKSGQPLYGSQALPFCYQVKQSGDGDRRKYIAKRDEIIMEDLIDHFCKNRSVRAALHYINAKYSRAFSYSTIKNALTSELICGTYRGNPAYCEGYMTPAAFETMQKYIQHNPRTSQREHSYIFGGLIRCPCCGNMLVGSPTVLNRIGKSGQKLSYKYYGYRCYRGNLEKKCDFRTMAFEHRLEAIMLSEVEAVMRGKQMYLLRLQNAPQRVAQHDLAELQQELARLNYAWQKGRIKTAADYDRQYDDLMMRIDAANAERQELAANPDYRKISRILSDGWKQLYISLDNDHKRAFWRAFIEEIQLEWTKDVKRIRDITFFT

SEQ ID NO: 12802 - protein, 572 aa, synthetic construct
MASRIAEKLAAKKAAIYIRVSTHWQVDKDSLKVQRRELIAYVTLVLGITDYVVFEDPGYSAKNTDRPEYQAMMDRIRTGEFTHLVVWKIDRISRNLIDFAAMHDELQSLGVTFVSKNEQFDTSSAIGEAMMRIILIFAELERKTTAERVTAVMLSRASDGQWNGGRVPFGYSWSKEAKTFSIVPEEAKAIRRMAELYEQYQSLLYVAKYLNDAGIVTKTGGQWTPTTVRTILTNPWYIGQYVYNVHSDGKGIEKRDSDEWITVENHHEPILNEDVFCRMKFLLTRNKRGGVPSHKTYVRKNIHVFAGLLRCGQCGSNMTANLDRRRANGFRPSQYACGSRRRKGTSCTNKYISDTTLGPFVLNYVANIIRASKNFSETTTPDVLERKLLRGEAFEDVASVSTDSLGQLLDAFRSAGDAVEYRPQIAFSGDDNSIREIDTLRARRRKLDNALARLNALYLYDDEAMPEKDFVMQRGQITKQLEEVNARIEELQNQESSEELGDDFIGKASYYIMANKLIEDRYIDYEKYIRAIDPSIPRSFLQQIIDHIVVNDGRVTSITFKNGATHTFTYKT

SEQ ID NO: 12803 - protein, 498 aa, synthetic construct
MEIQIREGNREQKRKLRVCAYCRVSTDADEQENSLENQIRHYETVIKANPAYEYAGVYSDFAISGFKEKRPGLQKMLADAQKGKIDLILTKSVSRFARNTSIVLEATRKLKELNVGVFFELQNINTLSGEGELMLTILAAFAQAESESGSAGAKMVYQRKYEAGIPVQYLERSFGYTKDERGVYIADESEAVWVRKIYEMAADGYTPAAIKRYLNENGVKTVGGTKWIDSTVFRLIENEIYKGDYIMHKHFVNEERKLVRNRGEVDAWYIEDDHEAIVSPELWQKAQDAIEAKRDYLAEGSVIEEFTEDNYPYMNRIFCAKCGHPLYKRIYSNGNRLNWGCSGTKRYGKSFCEGINIPDGVLRKAWHFDGNMYIDEKPSVKGTKEFTYLKESSWKRRHKKKVPETIPENTEEAYPYRKKIFCGLCGSRLVRHVNPKSHKVIWICNGAKRKGVAFCRGTRIPDSVIRGWGEIKKDIYIQRKDDKNGKKRYSYTSKKPTV

SEQ ID NO: 12804 - protein, 528 aa, synthetic construct
MSTATVRSVTVIPPTINILTHLSTVTTQKRRVAGYARVSTDSDEQFTSYEAQVDYFTQYIRRNPEWEFVKVYADEGISGTSTKNRTGFNEMIDDAMSGKIDLIVTKSVSRFARNTVDGLVTIRKLKEKGVEVYFEKENIYTFDSKGELLLTIMSSLAQEESRSISENVTWGQRKRFADGKVNLPYKQFLGYRKGADGLPEIVPEEAAIVRRIYARFMEGLTPHTIAKELTADGIPTPSGKPNWPTSTVESILQNEKYKGAALLQKCFTVDFLTKKQKVNEGEVPQYYVEHSHEPIITPEDFDRVQNEFVRRKQLGRQYSGKSIFASRIVCGDCGSFYGPKVWSSNSKYRKLIWQCNNKFKGGHRCETPHLDEKTIKARFVDAFNAVLDGKGGILADCRLMQTTLTDCTGIDAEIERLLTEIDVVTELTRRCISENAQSAQNQQEYTARYNGLVERYEKAKAQLEQLRATKTAREAQADAIGAFMFEVQELDVLTEFDEKLWLAVIDKVTVHTNGRMTFRFRSGTEIDA

SEQ ID NO: 12805 - protein, 434 aa, synthetic construct
MERVIERVDFQIPMQPKALRVCAYARVSSGKDAMLHSLSAQVSYYNSLIQTHAGWLYCGVYSDEAITGTKSQRDGFQRMLASCRAGEIDLIITKSISRFARNTVTLLETVRELKSLGVDVFFEEQNIHTMSADGELMLTILASYAQEESLSASENQKWRIRKAFENGELVNLRFLFGYNITASGIQVNEREAAIVREIFTRFNGGESLSAISRDLNDRGCERTFGGTWCADRIRNLLSNEKYTGNALLQKQYRKNHIDKKLVPNRGELPMYYAEGTHEPIIDQAAFDTAQVRLNELSRQAEKREKPTRSTFSGLIRCGLCGSTYKRVTCRGKHFWNCTTFQTKGKAECPAKKIPAETLESLTCEVLGTEVLDPDMVRSKITMIRAEKNNVAVFCMDNGPEIVKRWKDRSRAESWSPEMKEQARQRALQTRRGQK

SEQ ID NO: 12806 - protein, 438 aa, synthetic construct
MARTIQQISFPAPMRPSLKRVAAYARVSSGKDAMLHSLSAQVSYYSALIQKHTGWLYCGVYADEAFTGTKDSREGFQDLLAECRAGNIDMVITKSISRFARNTVTLLETVRELKALGVDVYFEEQNIHTMSADGELMMTILASYAQEESRSASENQKWRIRHGFERGELVNLRFLFGYKIEKGQVEVDPEKAEVVREVFRRALEGESLSSLAADLNRRGVTGVLGGKWNAMRIREMLSNEKYLGNALLQKQYRNNHLEKKEIPNRGELPQYYAEGTHEAIIDQSTFDAAQRLLVKLREGTPVRSPWKKSAFTSMISCTVCDRNYKRCTSGKRHFWNCPTAVRTDLASCGTSQIPEKLLYDLSAQVLGLTQFDEPVFREKVKSIDALPDKTLVFHFYDGSTVARHWEYTSRAKSWTPEMKEKARQRALAQRRGEKWQER

SEQ ID NO: 12807 - protein, 543 aa, synthetic construct
MARKKNIAAGLDAVIYARYSSHNQREVSIEQQIAECTKHAAALGLRIVGTYEDRAISGKTDNRPRFQQMMRDAEKGKFQAVVAWKSNRIGRNMLQAMVNEAKLDDYGVKVFYAEEDFDDTAAGRFALRNMMNVNQFYSENMAEDITRGLYDNASKCMANGRQPLGYKRGEDGRVVLDEANAAVVREIFTRVAAGDLFVDIARDLNAQGIKTSKGANWNKGSFQSICQNERYRGIYIYGDVRVADGIPRIVSDDLWYRVQEAMRMKKNPVGTRHRVGAEDYLLTGKLRCGHCGSYMTGVSGTSRNGELHYYYTCQKRRTEHACDKKNIRRDVIEPAVAQAIKMYCLTDDVIEWMADRTVEYWEKHDNDLQIEALEQQLEENKKATSNMLKAIEMGIITEATRTRMVELETEQSRLSVQLNAAKEDVVKIDREQIISYLELLQQGDIHDRDFQMELFKNFLVAVYVYDDNRMKLVFSCMGDQNSVEIPLETGEDPPDGGLSPDAKMFVLTPDSSTRRKSTARKRVVFFVITDQRRNYELRDRIQQ

SEQ ID NO: 12808 - protein, 514 aa, synthetic construct
MSMNAVIYARYSSHNQTEQSIEGQLRDCYDYAKRNDLTVIGEYIDRAISGKTDDRPDFQRMIEDAPKRQFERVLVWKFDRFARNMFDSVTYKHELKKHGVKVISAMENIGEGDESVLLEAMLEASAEYYSLDLKKKIARGMRESALKGKFVGGAVPWWCSVNAEHKLIVIDERAVIVKEAFARYDSGEGSKSIVDDFAKRGLRSNRGMPVTLSWLLSILKNRKTIGEYTYNGIEIPGGLPVVVDKPLFDRVQERIARKRRTGGGEATSKTEYLLQGKLFCGLCGSPITAECGQNRKGVVYNYYACSLKKKKHQCKKANERKDFLEWYVVEQTLDYVLTPDRTDYIAEAIVAEYERQFDKSGIKALEQKIALTEGEIQKTMDLCIQATSDAMRNRFMKRCEELDAKKADMEIDLSKLRVAASITHTKEEVRAWLRQFCAGDSFNPAFRRRIIDVFINTVYLYDDKLIIYYNLRDSRQVSYIEAIGASSEIENLRPVPDNKKTAVECSTADKNGGA

SEQ ID NO: 12809 - protein, 567 aa, synthetic construct
MARSAKKIEYAPAEQIGVIYARYSSHNQKEESIEQQIAECTEFAEKNGIRIIGIYADKAVSGRSDRRPNFQRMMRDAEKRHFQIVVAYKSNRIARNMLNALQYEAKLDSFGIKTLYAKEEFGNTAAGRFALRTMMNVNQFYSENMGEDIKRGMVDNAIECKVNGMLPLGYVKGEDGKYAIAADEAAVVREIYDSVLKDIPLAEIARSLNQRGIRTKLGRDWNKNSFHILLKNDNYIGVYRHSGVVVEDGIPPILDKEVFEAVQEKLTNKKKTAGRRSANGEYLLTGKLFCGYCGSYMIGVSGTGENGTVHNYYQCQKRHAEGRCEKKNVRRDFIEKLIARLTQDYILQDDTIEWIADSTMSFQAMARRESGVAQLERDLADNRKVAKNIMAAIEQGIITETTKARLLEVEGTIHDLERSLSIAKAASQPIERERVVFSLEQMREGNVGSKEHQKKLIDTFVKSVTLWDDRIQIDYYHTPGKHKFSYSLEELTSKAENESNASDVRTDSLELHQNVRNFLVFAEDSELFCIFQNQTLSTVAILPPFGSHPTQSRLKSSKETRNSTSKR

SEQ ID NO: 12810 - protein, 538 aa, synthetic construct
MEQKKRVNCLYRVSTIGQVEKDDIPMQRQYCREFIASHPDWVLQNEFYEKGVSGFKKSAKERDAMQELQQEAVAGSFDILLVYMFDRLGRRDDETPFVVEWFVRNGVEVWSAVEGQQRFDNHVDKLLNYIRYWQASGESIKTSVRVKTRMEQLTKDGCFTGGIVPFGYKLQKQGRINKKNQEVNDFVIDEDAAEIVRFIFYKYVNEGYGAQRISHYLLENGIRRADGSMIPNTTIVRMIKNKLYMGVISNGNAESEIIPELQIVDEATFRRAQELMEKRTTHHADTPLNLRGSSLLVGNIFCGHCKNRLTLTTSGKKYIRKDGTVRNQVKSRYQCHFKARHPDLCDGQSGYGVIKLDEIVDALVRYQLSRIRVSAKDSLIAEQHEKAAALARSRYKMSAMRLEEKQKELSDYEAETINVIRGKSRLNVDLRNSLVAKCKEEIAELSQEVDAQKADMEHQLESAAQEQAEFEKLESWADLYDNCTFEAKKMIVSQLIKAVYVYRDYRLEVEFRVSFDDFRRLCVGCEPNGGRIATVESV

SEQ ID NO: 12811 - protein, 545 aa, synthetic construct
MTNAVIYARYSPGPNQTDQSIEGQIHECTGFCEDNDLRIVGTYIDRKQTGRNDNRADFQKMLRDSSRHGFSTVVVWKIDRFGRNREEIAKNKAVLRMNGVRVLSAKEHIPDGPEGIILESVLEGLAEYYSANLSQNIKRGMRESALKCQFNGSGLSTGYTVDADHKYRIDPDGAAVVRTIFEMYDGGKKIADILRYLQQSNIKTMRGKEYTHYGISRILRNRVYIGEYHWHDIVVPGGVPQIIDNDLFDRVQKRLEVNKHAPAARRGDVDFLLTSKLICGNCKSTMIGDCGTGKNGARWYYYTCRAKKTKSSKCRKKSVPKEALEREVTALTAAYVLRDDVIDYIANKVVEIQKSEHDDKSMLRYFESQLKDTNKAIANIMRAIEAGIITETTRSRLEELEDTKRDLETEIIKEKVARPTIEREQVIFFLEKFRGGNVDDKEYQRKIIDTFVHKVILYDDKITITYNYSTDSTKNAENTVESIESAASAAECKCSDKYSSSPPRKNLVHKNEVFSVIFACGELYCFAVIFGIRRVIFALQASGRI

SEQ ID NO: 12812 - protein, 524 aa, synthetic construct
MNKLRAAAYCRVSTDRAEQSGSLASQRSFFDDYIRNSDSMTLVGVFYDEGTSGTTTLNRYGFNKMISLAVSGGIDIILTKEVSRFARNTVDTLNITRMLRAKGVGIIFINDNIDTRDSDGELRLSIMATIAQEESRKISERVKWGQQRKMEQGVVFGRSCLGYDVKDGKITINADSAEIVKRIFTEYTVLLKGAESIADGLNAEQIRTVNGGRWSGAFIRKVLRNVKYVGDLEQKKTCTPDFLTHKKRLNRSEHIYIRNHHEPIISRELWEQTQAEISRRKPTDTSRHSDRYVFSGKVYCGVCGSVMVSRVKTLKNGKIYHALRCSGRIGGKSCNNETLNVTALKTCVKRIFTDMPIDKTAVINAVIKGLSRTDKPDIPALRRKIETLNAKKRRAVDLMLDGLITQQELIEQKSYYDSIIEKLSQEISSDRSVFETDKIRKNAERFLDFTSDPLWLLVIRADYIHGTLTVYLKGIENGFTTCFTATGRGDSYRVITGNTVRSQGIIPGTMQVQKNRCRHDVNDK

SEQ ID NO: 12813 - protein, 536 aa, synthetic construct
MKRAALYARYSSDNQRHESIDAQLRASREYCASRNYAIVRIYTDEAITGTSVVRRDAFQKMILDSGDDIFDVVIFHKIDRNARDEIDYYTNVDRLRKNGVTYEYSAEGIDVSTTNGKLTEGIKVAVAAWYSRNLATEVKKGQKENALKGIFNGGRPPLGYKIVNQRYEIEPREAEAVRLIFDMYIHGNGYVKIASELNRRGFTTRNGKPFVKNSLYEILGNERYTGTYIFNRICTDEFGRRNNHKINPDAIRIENAIPAIIDKETFKIVAELRARNKNCSSRFRAVETYLLSGKVKCALCGSPMNGHRVKCKTGTYSYYCCSKTRLPKDVKCAQKLISKTALEKKVANVIMERILSESERPKLFEEMKNYYQMLIGHSEKERHTLNIAKAAAETKLSNLYALVEAGNVIDKFDIMRIQKVKAEITDITNQLNNIPKTTNLKLPDEETFNKILKEMHSALLRDDKEVMEMIINIFVSEVEIGPNYVHIYVETKGPPIFSAKHGSLHLHHFHEYTLIKCRIPRTILCKTLHLNDVVIL

SEQ ID NO: 12814 - protein, 571 aa, synthetic construct
MKIKDEPQAKQYVIYSRKSKFTGKGESIENQIELCRQYIAMHFGEDAAEQVLVYEDEGFSGGNLERPQFKKMMKDSQKIEFAAIVVYRLDRISRNIGDFAKLIEDLGDRHIDFISIREQFDTSSPMGRAMMYIASVFSQLERETIAERIRDNMHELSKTGRWLGGTTPTGYESESLSNVTVDGKVKKACKLKPIPEEIQLVKTIFSVFMETGSLSKTDQYLLEHRCVTKRGKQFTRFAIRSILTNPVYMIADETAYQYLKENNVDLFAERAEFDGEHGVMAYNRTLQRPGKANQIRPMEEWIVSVGKHPGIITGSDWVQVQSMLDVNKSKSYRRPRSNVALLSGLLRCSECGDYMRPKLTNRHTADGELIYTYMCSTKERSRGTVCGMKNCNGNTLDAKIIEEIRKLSADKETLSKLLAQTKKVISGNKEGYDAELALLKEKHTETEDRIKRLVESLSVASETSSKYVMEQIDELHRESETQQARLSELEALTEQSRMLNQEFAFHQEMIESFASAVDSATLEEKRRLLRTIVKKVVWDGKNAYVYLFAEDGEANLPPVEQPAIPSGEDSE

SEQ ID NO: 12815 - protein, 513 aa, synthetic construct
MQENKQNLRFTALYCRLSSDDELKGDSNSIIHQKQILQDYALKHSLTPTEIYVDDGFTGTNFDRPDFKRLLSDVENDLVKTVIVKDLSRLGRNYLKVGYYTEVLFPEKGVRFISIADNLDTSVNDELNDFIPFKNIMNEWYAKDLARKQRAVVKSKGNSGIRLATRPLYGYKKAENGDWLIDEPTAAVVQKIFDLYLKGYGPASIANYLFANKVKIPSTIGLPKLNPEQNPYRWSKDTVAKILTYQDYCGDMINFKRSDVDSLVIFPDRQEPIISREIFAEAQKLRLDRKPVRHDYSEPVLFSDLLLCADCKSRMYAQRRYHGTTSYSCSKARKTQGCTSHYINENKLIDCVKSDINKLIKNKGIVIKLAKEKMHIDTKTAQCANSQNLKNAKKRILQIDTILKNLYEDKVLGNINLATFKKLESDYLREQAELNKVIFEQSKIKVNLENRSKSICGFLKKLESYNNPVSELSKDLLIDLIDKIEICEATKNGNERSQQVHIYYKEIGKINLE

SEQ ID NO: 12816 - protein, 599 aa, synthetic construct
MIDNCVRAVFYARVSTQEEQQLKALPKQIQENRDKIREKGWVLVDGYVDEGKSGTVIKRRDEYQRLLEDMELNKFDVVVVKDQERLQRNTRDWYNFIDRLVQNKLKLYFYLDNTFYSPDNALITGIKAIMAEEYSRNLSKKMNNSNKRRIEKARAGEEVSAMGNGQTYGYSIVNGKWVVDESQRELVKKMYELYTELHSVRKVRDALNEQGYRNQRGNLFTDENIGRIVKNVMHKGWVILNRHHREFDSKETIEKLEDEWVIVKNDHEAIVSEELWDAVNDEIQSHRNKGNSGTRGKRGGTDLLSGKMVCSCCGRVLWKHASQGSYKSKEGRKYTYKRYTQWYCSGKMGRGELACTDPATISGVKLQKYLVEMADMFLDYSTVEYSKNLLKRRTISWLEDLKDKLTTPNDNGKIEQDLKALEGKRGKLIDLYTDELISKEEFKSRSVDLDAEIEKKRALLVPVEENPDIKAIEDTIANIDAEIEALFEDEAMVEEKKVQFIQEHIKKIYVSKNSDVFIVLDNVAGAFLFIDKEDTRIEVVPVAEYNPEELSEEGITENDFVPFDRESMPQHHGPKHLHLSGPQTAPRCCFRDRFSCDQP

SEQ ID NO: 12817 - protein, 562 aa, synthetic construct
MKGAIIYARYSCERQTEQSIEGQLHECYKYAEKNGLSILGEYIDRATTGTNDNRPAFQKMLADSERTAAWDIVLVYAIDRFGRNSIEIAINKQKLIKNGKNLISATQRTSTNIDGSKNLDGILLENMYIGLAEYYSAELSQKIRRGLAESRDKGLFCGGGITYGYNVVDKHIVINDEQAEIVRYIFQEYNNGKILPDIIEEMNAKGYRYKGGEFVKPTLYRLLRNEKYIGITKYMGVEYKNIYPPIISEDLFYSIQERLATYKVGRICKDADLWLKAKVFCGYCGHPMHADGSTSQSGKRFHYYKCSGRKDHICNIRVFRQDKLDKFVFETTLKVFATDENIELLVDKIIEVHKKKQKDESILIGLKSRLNDTKKSIDNLLVALQEGIITTSTKERLTKLENDKADLEKEIANEENKLSLELSRDEVEKYLRKSLRASPKILLNNLIEKIIAYDDKIEIYYKYSHYVPDDPDDQRGHFFSKCEIPINRGSRTKQVLDITIDKHTIHFFVRYGIKRNKDLCLPINYKTFDKNKTSAPVSATGADGYRVVETIRLELMTSTMST

SEQ ID NO: 12818 - protein, 453 aa, synthetic construct
MECVAYMRVSTEKQAVEGNGLDSQKRDIENYCRKNELVITDWYIDDGYTGANMDRPGLQRLVNDCSRKRVSCVVAFKLDRLSRNMIDGIYLIEKVFQKCNVTFKCVHDSVNYDSPMEQAYTQMMAVFAQLDKNTMMLRMRGGMLERIKQGYWMGGGNLPYCYSYSKEQGILIPIPERAEQARKALELFISGYSDVKIKEICGFKSELVTRNILTGIVNIGMIPYKGKIYQGRHEPIFDKGRFNLAQELRKTRAKSRVTCQTEPNLLTGLCYCGVCGCAMRYQKWTNGEHKIYCMSRNKSMSYLPNYNANCNNSLEWADDIEKQVEKEILKISLNLSSYKPKEKATKLEIMQSQLDKEQTKLKRLYNLYADGNDTVLEMIKESESLIKTMKANVLSESKSTANTQKKEFVYENIKKLADVWDNIDKKKKNMILKTIIDKIVIVNGNIEIQLKNF

SEQ ID NO: 12819 - protein, 574 aa, synthetic construct
MRKAKENPQKEKPQRAAIYLRVSTSYQADRDSLPMQRKDLVGYCEYALNISDYTVFEDAGYSGKNTDRPAFQKMMMQIRNGMYSHLLVWKIDRISRNLLDFAQMYEELKTLGVTFISRNEQFDTSTAMGEAMLKMVLIFAELERKTTAERVTATMISRANDGTWNGGRVPFGYDYNKETQTFSINGDESYIVLQMYDLYEKTDSLVRTARELNKLGYVSRQHNPFSPVSIWIILRNPWYVGTYRYNYYKIPGRRAVKEESEWVVIENHHSPLVSKERFDHVQKMLDSNARYRNTPGRSSKQKNVNIFSGLIWCSCCGAAFTASPGKLHASGYRPTKYGCPNVRKTKTCNAKYTSDPVIGEFLLNFILNVINAQKGFEKINSPADLESRLLRGDAFRDVAKIDSASVAALYEMLSSFSPADSVLLKKPTVKKDLDPELRKLRADKRKTERALARLDHIYLYSNKQMSDKEYLVKKNDLMTDLKELDKSIGLLTSESWAQSLSDDDFLEQASSFIISQRLQEREYIYFQGLAESTDPAVLRAFFVSIIDSVRMRNGLVETLTFKNGISHTFTYKTI

SEQ ID NO: 12820 - protein, 596 aa, synthetic construct
MPKIAIKKVAIYIRVSTVHQVDKFSLPMQRRDLSTYSELILGIPDYEIFEDAGYSGGNTDRPAYQNMMTRIRKGEFSHLLVWKLDRISRNLLDFAAMYEELQRLGVAFVSKTEQFDTSTAMGVAMMQIIMVFATLERRTTAERVTATMLSRAHSGQWNGGRVPYGYNYDADTKTFSINEDEAKNCRTIFNTYLKEKSIVVVTQYMNSLGAKTRNGIDWTPGTVWKILSNPFYAGIYRYNRYSGTKNRIINDKNEWILVKNHHPAIITQDAYEQAATTLLENGTQRNTLGRLHHAKQPYVFRDLIYCGLCKTRMVASPGNKNAHGARIPIYTCPLRRTSSCDNQSTNEYAIGEFVLNYIINMLWAKKEFSSIKSPTELEKRLLRGSNFCKIAYIEPDGLNDFYNLLTHYKRGSSFIFTASKPRKKKAPENSEVAALRKEQEQQERALSRLQNLYLYDESAISEKDFILRKHDIMAKLDEINRKLGMMNTAAVATLSDSDFVAKASYLLISKELQSKKYIYYRDFAESVSPDVLKTYMRSIIDSIFLVYGHVTAITFKNGLTHRFAYSAPLSPRFSHKSGYNLDKQKQAEQENHQNTE

SEQ ID NO: 12821 - protein, 521 aa, synthetic construct
MNKSITVIPARRRVGNTVNKEVKPKLRVAAYCRVSTDSDEQATSYDAQVEHYSNFIQKNEEWEFAGIFADDGISGTNTKKREEFNRMISECMEGHIDMIITKSISRFARNTLDCLRYIRQLKEKNIPVFFEKENINTMDSKGEVLLTIMASLAQQESESLSKNVKMGMQFRFQKGEVQVNHNRFMGYTKDEDGHLIIEPAEAEIVKRIYREYLQGASLKQIGDGLMEDGILTGARKPKWRPESVKKILRNEKYIGDALLQKTYTVDVLTKKRVKNNGIVPQYYVENSHEPIIPRDLYMQVQEEMLRRSNLHSGANRKKRVYSSKYALSSIVYCSKCGEIYRRVAWNNHGKRSTVWRCVNRVEHGPDCCDAPTVKEEELQSVVVKAINMALGGKEDMLADLEENIAMVLALEDETSIESLDAKLEDLQQELLKRANARQDYEYLADEIDHLRERKQKVMADNAERDGTKQRIAEMQQFLAGQTEQIEEYDENLVRRMVEKITVYEEKFMVEFKSGTSVNVER

SEQ ID NO: 12822 - protein, 520 aa, synthetic construct
MKRITKIEENRALSIKKKTRVVAYCRVSTASDEQLISLDTQKAHYEDYIKSNAEWEFAGIFYDEGITGTKKECRDGLNSLVAACEKGLVNMIITKSISRFSRNTTDCLELVRKLISLNVTVIFEKENINTGSMESELMLSILSSLAESESVSISENSKWSIQKRFQNGTYIISYPPYGYENVGGEMIVVPEQAEIVKKIFEDTLAGKSTHAIAKELNDCGVTSKKGGKWTPGAINAIIRNEKFTGDVIFQKTYTDSQFSRHTNDGELNQYLCENHHEPIVSHEIFDKANEVLNQRGREKGNGERTERYQNRYGFSGRIKCGECGGVFKRRIHYKPSGSYIAWCCTHHIEDRHSCSMKYITDDGIKTAFLTMMNKLVFAHQSVLKPLLHSLQGFDDKDRLLQIQEYETKLEKNMEKRQVLTSLMAGGLLEPALFSKENNALILEEKHLQEEKKQMINSVSGDRTKIEALETLIKFASGSEMLTEYSDEIFLSYVEGITVLSRKEIVFELKCGLKLKERLVG

SEQ ID NO: 12823 - protein, 496 aa, synthetic construct
MLGVIYARYSEGPKQTDQSIEGQVADCMTYAERSGIEVVKVYADRHVSGKSTAGRDEFLQMIHDAQEHRFEAVIVWKIDRFGRSRQDIAINKMRLKKAGVRLYYAQEAVPEGPEGIILESVLEGLAEYYSADLRQKVNRGIRESAKKGRVNGGTLPIGYKLNGDRHPVPDPEVAPLVQQAFQMHIAGAKTAEIRELFIKAGVKGRRGSAVSNAAIYRMLRQERYTGTWEIQGIPLDVEPIIDLATFEEAARHFKTSRCNAAGRANVDYMLSCRCHCGYCGKLVQGESGTGKGGKVYNYYKCGGKKRGSKCKLKAIPKDQLEMAVLEATITDVLTDEMIGKLTDRIMKIQEDEHADDPTAAFISRLDGCRKRQRNIVEAIEAGGGAALVTRLSELEAEEKELQRRIRAAEIEQPMLSREVIAKWLDSFRDGDVDDPAFCARLLDTFVADMVLTNEEITIFYNITKRTGSRCSSTVRLVDLTGVEPVSENKFPFLLLS

SEQ ID NO: 12824 - protein, 523 aa, synthetic construct
MRFFSYGRKSVFSDKSDSIDNQFRMNREYCESKFSGQVDSWQQFSDEDFTGANTSRPDLQRMLSFIKGGFCDVLVVYQLDRLSRDVRDFANIYALLEEHGVMFISIKENIDTTTPIGRAMMYVTVVFAQMERETIAARVTDNMLGLAKKGYWTGGNPPVGYVRKHIVVNGKKHCSIEVDPDGARYVTQIFDTFLAYNCSLQGMETRFKNQGIRTQSGKFFSTTQLHKMLTMPYCVEATPEVYDFYAAKGCIMDPGSPREMWDGSVGVIIYGRSTEKNKKHQAQPPEKWTVCLGKHKPFMPAEKWLAVQSRFTQNKCIKDAKWPVPLLKGVLRCKCGNLMQVSRKKKVDGTCSSWYYCRKRMRQGVDACDMGQIKCDLLDEEVLELFRGITADPALIQKFVKAEAPADVPDLKAAQARVSACERKIGRLAASLALAEDSAASKYIIAEMERLDVELGALKREASLAEMKSHRAAASAKDAKATAAEIAKLIHGLDGFDDKEKNAIARAVIQECTWDGERLFIKL

SEQ ID NO: 12825 - protein, 523 aa, synthetic construct
MVSFDSIIIYLRKSRSDDPAQTVEEVLAKHERILQDYCMKEYGKAIPEKRIYREVVSGETIQDRPVMQQLLKELEAENISGVLIVEPQRLSRGDLQDCGQIINSFRYTNTAVITPGKTYDLSDEYDRKFFEMELTRGNDYLEYTKKILSRGRVASVRQGNYICSVRPYGYRKITLGSGKDKCHTLEIIPEEADAIRLMYHLYLDENMGFTNIARTLDSLHIKPLKSDNWSAATIRDMIDNPIYIGKVVWNSRKVVKKWENEQITKVRPRNKGDDVICVNGRHEAIIDEHTFEAARNKRGLTPKVKKFKELRNPLAGLLFCGTCGHGMSMKKYVDKRSHTGKVTTVMLCNQQAVCHTKSAQYEDILAKIKVSLANAIFDFEIKLKEQENNNIDMHELRMSSLLDELNRLYSKDVRQKDAYEDGIYTKEEYIERNSKLQERILNVKEDIADEKKNIPVKIDYEDKIITFKDCLASLDDPNISAADKNILLKSCIDKIIYYNDMPSKPGIGRYIENSFRLEIFLKL

SEQ ID NO: 12826 - protein, 433 aa, synthetic construct
MPRAITIVPKPPKLEQKKRVAAYARVSSGKDAMLHSLSAQVSYYSDLIQNHDDWLYVGVYADEAKTGTKESRADFQRLIADCRAGKIDMVITKSISRFARNTVTLLQTVRDFKAWGVDIFFEEQNIYTMSGDGELMMTILASYAQEESRSASENQKWRIKRNFEEGMPWNGAMLGYRLKSGRYEIIPEEADIVHRIYDEYLSGDGYLTIAKRLNEDGIPSRFGKQWGQSVISKILSNYTYTGNLILQKTFRENHITKKTIINNGELPKYHAENAHDAIIDMETFQAVQAEKTRRAARFLKKPASKKAYPFTSLLVCDGCGKNYRRKVTKTGSVWVCGTFNSIGKAACASKQIPEETLQAVTAEVLGQVDFSEELLRRLIKSILVCNGNVLIFHFFDGSEVTRKWKDRSRSQSWTVEMKAVARQKALERRNQNA

SEQ ID NO: 12827 - protein, 513 aa, synthetic construct
MKKCVIYARYSSERQTEQSIEGQLRVCYEFAKNNELIVVHEYIDRAMTGTNDLRKEFQQMLSDSERTKEWDICLVYALDRFGRNSIEQAINKYRLQKTGKIVISATQRTSRNIDGSQNLDGIILENMYVGMAEYYSAELSQKVKRGLNESRIKGQFTGGVPIFGYEAYGTKAEGRRVRIKEDEAVIVRRMFEEYASGRLIKDILDDLNNEGVLCHGKPFTRTTFYNLLKNEKYIGIVRFGDQVFDNIYPPIVNEQVFDICRAKAQANKIGKHTDATYLLKNKVHCGYCGRPVSSDTGTSKNGNVMRYYKCIGRKVDKKCDNVPIRKDLLEQLVIDSTYQVLATPDLIEKLAELILGAHKKRMADASILNILESQWQDTSTSIANLISCMEKGIVSNSTAKRLEELENQKTELETKIALEKVKESTLIQKRDIVNYLNQAIKKTPRLMIELIIKDVVLYKDRIEIHFNYTDLIRPDAEPRQALLFYKFTKEVVIDYHRMNCQPIKKNIEIKLYI

SEQ ID NO: 12828 - protein, 512 aa, synthetic construct
MERAVIYARYSSDHQREESIDAQVRACREYCQRKGYLVTKIYADEAKSGKSIAKREQYKKMLADSQKNLFDVVVFHKIDRNSRNELDYYLTKNQLISSGIKYEYAAQNIDTSPAGQMVEGILVAVAANYSRNLAEETKKGLKENALKALFNGGRPPLGFEINQENKYIINDYEAGAIRIIFDLYLKGKGYHYIISQLNSLGYKTREGRKFGKNSLYDILRNPKYCGTYTFNKVNKDPSGKRNSHKISENTIIVEDAIPAIISKEDFRKVQEKMNQNRYRSAAYKSKETYLLTGKVFCGICGAAMNGHRASSNGKKYVYYTCSARDRLGATACQNKVVPRDDLEELVLLTIKQELLSENSLKKLKDNIEMEYQAVANEYADEASSLSEQKAIAERKLNNLYTVIERGTADEYDLERLAAVKQELSQIKEKLAKCAGANSIATIDPAHIEKVLKVCRKMLFKNITNESLRMLFDGLVNKITIDAKKITLQLKLECFGTYGAEGRTRTGTWGNHA

SEQ ID NO: 12829 - protein, 505 aa, synthetic construct
MPKSAVIYARYSSDRQREESIEGQIRECKAFAAANDYEIVGTYTDRALSARTDQRPGFQKMIADSDQHLFQFVIVYALDHFSRSRYDSAIYKNRLKKNGVRVLSAKENIRDDPTGVILESLLEGYAEYYSLELAQKVKRGMTDNLLEGKWVGTVIPFGYYKGSDSHLYVDESKRNAVLDIFKMYAAHVRIIDIIRHLNDLQFTTAQGKPFSRNSLRSLLVNPIYTGTFKWGGELYKGYAPRIISDELFERVQKIHEQKKRTGLKGISPDYSLTGKIFCGHCGRPMVGISGTSKSGSTYYYYKCSGKTHGKKDCDSKAVRRDIIEPAVYNATVNMLRLPQAIKIITDQAILAQERCRDDSEVLRLKKEKDALDAKIRNISKAVASGLTADEIISQANEYSKRSKDLETLIRLEELKEKAFTLTPEAVTFFLEKLLEKAETGQATLSTFWDFIRCIKINGSIAEIQFNYTAVSATLDNPIRIRLDFDEECSNDFTLVDHQGFEPRTP

SEQ ID NO: 12830 - protein, 522 aa, synthetic construct
MNVVIYARFSSHSQTEQSIEGQLKVCYEYAEQNHYTIIGEYIDRAVSGKYDNRAEFQRMISDSEKHAFEGILVYQLDRFARNRYDSAIYKSKLKKNGVRVLSARENITDDASGILVEGVLESMAEYFSAELSQKIHREMEINAQKCLSNGSNPGLGFKVDKDRRFYVDEEEAKIVREIFERYASGETKAEIVKDLKRRKIKTSLGNDFTYNSLSRMLSNKRYIGVYMYNGQETPGGMPRILDDNIFYKVQDILDKNKKASARTHGEGEYLLTTKLFCGHCKNMMVGYGGTSKTGKQYHYYICKEARKKRCDKTIVSKKKIEDRVIAECLKLLTYDNIKFIAQKVSEECSKSPDNLTVKQLKKAIREADIAIENLWRGIEQGQSVPMLTERLNKRQAEKDALEEQLAIEENKRICLSEAQILAFLNFICEMPLDDVNKRRAIINILVHSVYLYDAHFTLIINASKKPMSVDDIPLEEIEEAFNSDKTCTEQCSTMTSPAPPNKNRNSDTFYQDYGSFPFAPGK
